United States Patent Application Publication US 2011/0252509 A1 - sequence listing, part 2

SEQ ID NO: 2624 - protein, 399 aa, Prochlorococcus marinus subsp. pastoris str. CCMP1986
MAREKFERNKPHVNIGTIGHVDHGKTTLTAAITNVLAKKGQAQAQDYGDIDGAPEERERGITINTAHVEYETAERHYAHVDCPGHADYVKNMITGAAQMDGAILVCAATDGPMAQTKEHILLAKQVGVPALVVALNKCDMVDDEEIIELVEMEIRELLDSYDFPGDDIPIVQVSGLKALEGDSTWESKIEELMTAVDASIPEPEREIDKPFLMAVEDVFSITGRGTVATGRIERGKVKVGEEVEIVGIRDTRLTTVTGVEMFRKLLDEGMAGDNVGLLLRGVQKEDIERGMVLVKKGSITPHTKFEGEVYVLKKEEGGRHTPFFAGYRPQFYIRTTDVTGQITAFTADDGANVEMVMPGDRIKMTGELICPVAIEQGMRFAIREGGRTIGAGVVSKIIE

SEQ ID NO: 2625 - DNA, 1191 bp, Chromobacterium violaceum ATCC 12472
  CDS (1)..(1191): transl_table=11
atggcaaaagaaaagtttgagcggaccaaaccgcacgtaaacgtaggcaccatcggtcacgtggaccacggtaagaccaccctgaccgctgctatcaccacgattctgtcgaagaagttcggtggcgaagccaaagactactcccagatcgacagcgcgccggaagagaaggctcgtggtatcaccatcaataccgcgcacgttgaatacgaaaccgagacccgccactacgctcacgtagactgcccgggccacgccgactacgttaagaacatgatcaccggtgctgcccagatggacggcgcgatcctggtctgctcggccgctgacggtccgatgccgcaaacccgcgaacacatcctgctgtcccgccaggttggcgtgccgtacatcatcgtctacctgaacaaggctgacctggttgacgacgccgagctgctggaactggtggaaatggaagtgcgcgatctgctgtcttcctatgacttcccgggcgacgacaccccgatcgtgaccggctccgctcgtctggcgctggaaggcgaccagtccgaaatgggcgaaccgtcgatcttccgtctggctgacgcgctggattcctacatcccgactccggagcgcgccatcgacaagccgttcctgctgccgatcgaagacgtgttctcgatctccggccgcggcaccgtggtgaccggtcgcgtagagcgcggcatcgtgaaagtgggtgaagaactggaaatcgtgggtctgaaagacaccgtgaagaccacctgcaccggcgtggaaatgttccgcaagctgctggaccaaggtcaagccggcgacaacgtgggcgtgctgctgcgcggcaccaagcgtgaagacgtggagcgcggccaggttctggccaagccgggcaccatcaccccgcacaccaagttcgaagcttcggtgtacgttctgtccaaggacgaaggtggccgtcacaccccgttcttcgcgaactaccgtccgcagttctatttccgcaccaccgacgtgaccggcgcgatctcgctggccgaaggcgtggaaatggtaatgccgggcgacaacgtggaaatcaaggttgagctgatcgccccgatcgccatggaagaaggtctgcgcttcgccatccgcgaaggcggccgtaccgtcggcgccggcgtggttgccaagatcatcgcttaa

SEQ ID NO: 2626 - protein, 396 aa, Chromobacterium violaceum ATCC 12472
MAKEKFERTKPHVNVGTIGHVDHGKTTLTAAITTILSKKFGGEAKDYSQIDSAPEEKARGITINTAHVEYETETRHYAHVDCPGHADYVKNMITGAAQMDGAILVCSAADGPMPQTREHILLSRQVGVPYIIVYLNKADLVDDAELLELVEMEVRDLLSSYDFPGDDTPIVTGSARLALEGDQSEMGEPSIFRLADALDSYIPTPERAIDKPFLLPIEDVFSISGRGTVVTGRVERGIVKVGEELEIVGLKDTVKTTCTGVEMFRKLLDQGQAGDNVGVLLRGTKREDVERGQVLAKPGTITPHTKFEASVYVLSKDEGGRHTPFFANYRPQFYFRTTDVTGAISLAEGVEMVMPGDNVEIKVELIAPIAMEEGLRFAIREGGRTVGAGVVAKIIA

SEQ ID NO: 2627 - DNA, 1185 bp, Photorhabdus luminescens subsp. laumondii TTO1
  CDS (1)..(1185): transl_table=11
gtgtctaaagaaaaatttgaacgtaaaaaaccgcacgttaacgttggtactatcggccacgttgaccatggtaaaactaccctgactgctgccatcactactgtactggctaaaaccttcggtggtaacgctcgcgcattcgaccagattgataacgcgccagaagaaaaagcgcgtggtatcaccatctctacttctcacgtagaatatgatacgccaagccgtcactatgcgcacgttgactgcccaggccacgccgactacgtgaaaaacatgatcaccggtgcggctcagatggacggcgcaatcctggtagttgccgcgactgacggtccaatgccacagacgcgtgagcacatcctgttaggccgtcaggtaggcgttccttacatcatcgtgttcctgaacaaatgtgacatggtagacgacgaagagctgctggaactggttgagatggaagtgcgtgagctgctgtctcagtacgatttcccaggcgacgacacgccagtcatccgtggttctgctctgaaagcgctggaaggtgatgcagagtgggaagccaaaatcatcgaactggcagaggccctggatagctacattccagagccagagcgtgctattgaccagccattcctgctgccaatcgaagacgtattctctatttcaggccgtggtactgtagttaccggtcgtgtagagcgcggtatcgttaaagtgggtgaagaagttgaaatcgtgggtatcaaagacacgactaaaaccacttgtactggcgtagaaatgttccgcaaactgctggacgaaggccgtgcaggtgagaacgtcggtgttctgctgcgtggtaccaagcgtgacgaaatcgaacgtggtcaggtactggcgaaaccgggttcaatcaagccacacaccactttcgaatcagaagtttatattctgagcaaagacgaaggtggccgtcatacgccattcttcaaaggctaccgtccacagttctacttccgtacaactgacgtgaccggtaccattgaactgccagaaggcgtggaaatggtgatgccaggtgataacattcagatgaaagttaccctgattgccccaatcgcaatggaccagggtctgcgttttgctatccgtgaaggtggccgtacagtaggtgctggtgttgttgctaaagttatcgcataa

SEQ ID NO: 2628 - protein, 394 aa, Photorhabdus luminescens subsp. laumondii TTO1
MSKEKFERKKPHVNVGTIGHVDHGKTTLTAAITTVLAKTFGGNARAFDQIDNAPEEKARGITISTSHVEYDTPSRHYAHVDCPGHADYVKNMITGAAQMDGAILVVAATDGPMPQTREHILLGRQVGVPYIIVFLNKCDMVDDEELLELVEMEVRELLSQYDFPGDDTPVIRGSALKALEGDAEWEAKIIELAEALDSYIPEPERAIDQPFLLPIEDVFSISGRGTVVTGRVERGIVKVGEEVEIVGIKDTTKTTCTGVEMFRKLLDEGRAGENVGVLLRGTKRDEIERGQVLAKPGSIKPHTTFESEVYILSKDEGGRHTPFFKGYRPQFYFRTTDVTGTIELPEGVEMVMPGDNIQMKVTLIAPIAMDQGLRFAIREGGRTVGAGVVAKVIA

SEQ ID NO: 2629 - DNA, 1185 bp, Photorhabdus luminescens subsp. laumondii TTO1
  CDS (1)..(1185): transl_table=11
atgtctaaagaaaagtttgaacgtacaaaaccgcacgttaacgttggtactatcggccacgttgaccacggtaaaactaccctgactgctgctattactactgtactggctaaaacctacggtggtaatgctcgtgcattcgaccaaatcgataacgcaccagaagaaaaagcgcgtggtatcaccatctctacttctcacgtagaatacgatactccaagccgccactatgcgcacgttgactgcccaggccacgccgactacgtgaaaaacatgatcaccggtgcggctcagatggacggcgcaatcctggtagttgccgcgactgacggtccaatgccacagacgcgtgagcacatcctgttaggccgtcaggtaggcgttccttacatcatcgtgttcctgaacaaatgtgacatggtagacgacgaagagctgctggaactggttgagatggaagtgcgtgagctgctgtctcagtacgatttcccaggcgacgacacgccagtcatccgtggttctgctctgaaagcgctggaaggtgatgcagagtgggaagccaaaatcatcgaactggcagaggccctggatagctacattccagagccagagcgtgctattgaccagccattcctgctgccaatcgaagacgtattctctatttcaggccgtggtactgtagttaccggtcgtgtagagcgcggtatcgttaaagtgggtgaagaagttgaaatcgtgggtatcaaagacacgactaaaaccacttgtactggcgtagaaatgttccgcaaactgctggacgaaggccgtgcaggtgagaacgtcggtgttctgctgcgtggtaccaagcgtgacgaaatcgaacgtggtcaggtactggcgaaaccgggttcaatcaagccacacaccactttcgaatcagaagtttatattctgagcaaagacgaaggtggccgtcatacgccattcttcaaaggctaccgtccacagttctacttccgtacaactgacgtgaccggtaccattgaactgccagaaggcgtggaaatggtgatgccaggtgataacattcagatgaaagttaccctgattgccccaatcgcaatggaccagggtctgcgcttcgctatccgtgaaggtggccgtacagtaggtgctggtgttgttgctaaagttatcgcttaa

SEQ ID NO: 2630 - protein, 394 aa, Photorhabdus luminescens subsp. laumondii TTO1
MSKEKFERTKPHVNVGTIGHVDHGKTTLTAAITTVLAKTYGGNARAFDQIDNAPEEKARGITISTSHVEYDTPSRHYAHVDCPGHADYVKNMITGAAQMDGAILVVAATDGPMPQTREHILLGRQVGVPYIIVFLNKCDMVDDEELLELVEMEVRELLSQYDFPGDDTPVIRGSALKALEGDAEWEAKIIELAEALDSYIPEPERAIDQPFLLPIEDVFSISGRGTVVTGRVERGIVKVGEEVEIVGIKDTTKTTCTGVEMFRKLLDEGRAGENVGVLLRGTKRDEIERGQVLAKPGSIKPHTTFESEVYILSKDEGGRHTPFFKGYRPQFYFRTTDVTGTIELPEGVEMVMPGDNIQMKVTLIAPIAMDQGLRFAIREGGRTVGAGVVAKVIA

SEQ ID NO: 2631 - DNA, 1191 bp, Rhodopseudomonas palustris CGA009
  CDS (1)..(1191): transl_table=11
atggccaaagcaaagtttgaacgtacgaagccgcattgcaacatcgggacgatcggtcacgtcgaccacggcaagacgtcgctgacggcggcgatcaccaaggttctggcggagacgggcggtgcgacgttcacggcctatgaccagatcgacaaggcgccggaagagaaggcgcgcggcatcacgatttcgaccgcgcacgtcgagtacgagacgcagaaccgtcactacgcgcacgtcgactgccccggccacgccgactacgtgaagaacatgatcaccggtgcggcgcagatggacggcgcgatcctggtggtgtcggcggccgacggcccgatgccgcagacccgcgagcacatcctgctggcccgtcaggtcggcgtgccggcgctggtcgtgttcctgaacaagtgcgacatggtcgacgatccggaactgctcgagctggtcgagatggaagtgcgcgagcttctgtcgaagtacgacttcccgggcgacgacattccgatcgtcaagggttcggcgctggcggcgctggagaactcggacgccaagctcggtcacgacgcgatcctggagctgatgcgccaggtcgacgcctacatcccgcagccggagcgtccgatcgaccagccgttcctgatgccggtggaagacgtgttctcgatctcgggccgcggcaccgtggtgaccggccgtgtcgagcgcggcattctgaaggtcggcgacgaaatcgagatcgtcggcatccgcgacacgcagaagaccacctgcaccggcgtcgaaatgttccgcaagctgctcgatcagggccaggcgggcgacaacatcggcgcgctgctgcgcggcaccaagcgtgaggacgtcgagcgtggccaggtgctgtgcaagccgggttcggtgaagccgcacaccaagttcaaggccgaagcctacatcctgaccaaggaagagggcggccgccacaccccgttcttcaccaactaccgtccgcagttctacttccgcaccaccgacgtgaccggtgttgtgcacctgccggaaggcaccgagatggtgatgccgggcgacaacatcgcgatggaagtgcacctgatcgtgccgatcgcgatggaagaaaagctgcgcttcgccatccgcgaaggcggccgcacggtcggtgccggcgtcgtcgccgcgatcatcgagtaa

SEQ ID NO: 2632 - protein, 396 aa, Rhodopseudomonas palustris CGA009
MAKAKFERTKPHCNIGTIGHVDHGKTSLTAAITKVLAETGGATFTAYDQIDKAPEEKARGITISTAHVEYETQNRHYAHVDCPGHADYVKNMITGAAQMDGAILVVSAADGPMPQTREHILLARQVGVPALVVFLNKCDMVDDPELLELVEMEVRELLSKYDFPGDDIPIVKGSALAALENSDAKLGHDAILELMRQVDAYIPQPERPIDQPFLMPVEDVFSISGRGTVVTGRVERGILKVGDEIEIVGIRDTQKTTCTGVEMFRKLLDQGQAGDNIGALLRGTKREDVERGQVLCKPGSVKPHTKFKAEAYILTKEEGGRHTPFFTNYRPQFYFRTTDVTGVVHLPEGTEMVMPGDNIAMEVHLIVPIAMEEKLRFAIREGGRTVGAGVVAAIIE

SEQ ID NO: 2633 - DNA, 1185 bp, Onion yellows phytoplasma OY-M
  CDS (1)..(1185): transl_table=11
atggctaatgaaaaatttatacgaaacaaaccgcatttaaatgtaggtactattggacacgtagaccacggtaaaactactcttacagcagctattacccaagttttgtctactcgtggcttggctaaaagtagagcttatgatcaaattgataatgctcctgaagaaagagaacgtggaatcactattaaaacttcacacgtagaatatgaaacagaaaaacgtcactatgctcacgttgactgtcctggacacgccgattatgttaaaaacatgattactggtgctgctcaaatggatgctgctattttagttgtttctggtgcagatagtgttatgcctcaaactagagaacacattttattagcgcgccaagttggtgttccaaaaattgttgttttcttaaataaatgtgatctttccccagacgaacaaattttagaattagtagaaatggaagttcgtgaattattatctcaatacgatttcccaggagacgacattcctgttattagaggatctgcattaaaagctttagaaggtgacgctcattacgttgctcaagtaaacgaattaatcgaaactctagacacctacattgaagacccggtgcgcgaagttgacaaacctttcttaatgcctgtagaagatgttttcactattactggtagaggaactgttgttactggtagagtagaaagaggtcaagtaaaagctggtgatgaagtagaaatcgtaggacttaaagaaactagaaaaactattgtaactgcagtagaaatgtttaaaaaagacctagattttgctcaagcaggagacaacgttggagctttattacgtggaattaaccgtgaagacgtacaacgtggacaagttttagctaaaccaggttctgttaagcctcattctaaatttgttgctcaagtttatgttttaactaaagaagaaggaggacgtcacactgcctttttctctcaataccgtcctcaattctatttccgtactacagatattacaggagtagttgaattacaaggtgatgttaaaatggtaatgccaggtgacaacgctgaattagtagttacccttaacaacccaattgctatcgaagaaggaactaaattttctattcgtgaaggtggaaaaacagttggtgcaggatcagtttccaaacttcttaactaa

SEQ ID NO: 2634 - protein, 394 aa, Onion yellows phytoplasma OY-M
MANEKFIRNKPHLNVGTIGHVDHGKTTLTAAITQVLSTRGLAKSRAYDQIDNAPEERERGITIKTSHVEYETEKRHYAHVDCPGHADYVKNMITGAAQMDAAILVVSGADSVMPQTREHILLARQVGVPKIVVFLNKCDLSPDEQILELVEMEVRELLSQYDFPGDDIPVIRGSALKALEGDAHYVAQVNELIETLDTYIEDPVREVDKPFLMPVEDVFTITGRGTVVTGRVERGQVKAGDEVEIVGLKETRKTIVTAVEMFKKDLDFAQAGDNVGALLRGINREDVQRGQVLAKPGSVKPHSKFVAQVYVLTKEEGGRHTAFFSQYRPQFYFRTTDITGVVELQGDVKMVMPGDNAELVVTLNNPIAIEEGTKFSIREGGKTVGAGSVSKLLN

SEQ ID NO: 2635 - DNA, 1191 bp, Geobacter sulfurreducens PCA
  CDS (1)..(1191): transl_table=11
atggcaaaggcaaaattcgagaggacgaaaccgcacgtcaacataggaacgatcggccacgtagaccatggcaagaccacgctgacggcggccataaccaaggtattggcagagcgcggccaggcagagttccgtggttttgaccagattgacaacgctccggaagagcgcgagcgcggtatcaccatcgccacgtcccatgtggagtacgagaccgagaagcgtcactacgcccacgtggactgcccgggtcacgccgactatgtaaagaacatgatcaccggtgcggcgcagatggacggcgcgatcctcgtcgtatccgccgccgatggccccatgccgcagacccgcgagcacatcctgcttgcccgtcaggttggcgtgccctacattgtcgtgttcctgaacaaggccgacatggtagacgacgaagagctgctcgagctggtagagctcgagattcgcgagctgctctcctcctacgacttcccgggtgacgacatcccgatcatcaaggggagcgcgctcaaggggctcaatggcgacaaggacgagctgggcgaagaagccatcctgaagctgatggaagccgttgacaactatattcccgagcccgagcgggccgtagacaagccgttcctgatgcctgtggaggacgtattctcgatctccggtcgcggtaccgtagccacggggcgtgtggagcgcggaattgtcaaggtgggtgaggaggtcgagatcgtcgggatcaaggccactgccaagaccacggtgaccggagtcgagatgttccgcaagcttctggacgaaggccgcgccggtgacaacatcggtgcccttctgcggggggtgaagcgtgaagacatcgagcgtggccaggtgcttgcgaagccggggagcatcactccgcacaccaagttcaaggccgaggcgtacatcctgacgaaggaagaaggtggccgtcacacgccgttcttcaacgggtaccgtccgcagttctacttccgtacgacggacgtgactggcgtagtagaccttcctgccgggactgagatggtaatgcctggcgacaacgtggcggtgacgatcaacctgatcacgccgatcgcgatggatgaaggtcttcggttcgcgattcgcgaaggtggccgtactgtgggcgccggcgtcgtcagctccattatcgaataa

SEQ ID NO: 2636 - protein, 396 aa, Geobacter sulfurreducens PCA
MAKAKFERTKPHVNIGTIGHVDHGKTTLTAAITKVLAERGQAEFRGFDQIDNAPEERERGITIATSHVEYETEKRHYAHVDCPGHADYVKNMITGAAQMDGAILVVSAADGPMPQTREHILLARQVGVPYIVVFLNKADMVDDEELLELVELEIRELLSSYDFPGDDIPIIKGSALKGLNGDKDELGEEAILKLMEAVDNYIPEPERAVDKPFLMPVEDVFSISGRGTVATGRVERGIVKVGEEVEIVGIKATAKTTVTGVEMFRKLLDEGRAGDNIGALLRGVKREDIERGQVLAKPGSITPHTKFKAEAYILTKEEGGRHTPFFNGYRPQFYFRTTDVTGVVDLPAGTEMVMPGDNVAVTINLITPIAMDEGLRFAIREGGRTVGAGVVSSIIE

SEQ ID NO: 2637 - DNA, 1173 bp, Wolbachia endosymbiont of Drosophila melanogaster
  CDS (1)..(1173): transl_table=11
atgacagcgatagtggaagcatttggaaagccgcatgtaaatgtgggaacaataggacatgtggatcatgggaagacgacgttaacagcggcgataacgaagcattatggaaattttgtagcgtacgatcagatagataaagcgccagaagaaaggaagagggggataacgatagcaacagcgcatgttgagtatcagacggaaaaaaggcattatgcacacgttgattgtcctggacacgctgactatgtaaagaatatgatagtaggtgcagcacagatggatgcggcgatattggtagtgtcgggggttgatgggccaatgccacaaacgagagagcatatattgctggcgaagcaggtaggtgttggatatatcgtggtgtatataaataaagctgatgttgctgatgctgatatgatagatttagtagaaatggaagtgagggaattactgagtaaatacggatttccaggggatgaagtgcctgtggtggttggttcagcgctcaaggcgctggaggatgacagcagcgaatatggaaagaaatcaatagataaattgatggaaaagttagatgaatatgtagcggttccaccaaggcctgtggatttaccatttttattgccaatcgaagatgtattttcgatatcggggcgaggaacagtggtaacaggaagaatagagaagggagagataaagacgggagaagagatagagataataggtctgaaagcgacgcaaaagacgatatgcacaggtgttgagatgtttaagaagttgctggataagggaagtgcaggactcaatgtaggaatattgttaagaggaacaaaaagagaagaagtggagagagggcaagtattagcgaaaccggggacgataacaccgcatagaaagtttaaggcggaggtttatatattaaagaaagaggaaggaggaaggcatacaccattttttgcgaattaccagccacagttttatttaaggacaacggatgtaactgggagcataaaattgctagatgggaaggagatggtaatgccaggagataatgtgagtgtagaagtagaattgcaagtaccgatagcaatggataagggattgcgttttgcgataagagaaggcggtagaactgttggttctggtgttgtttctgaaattttggagtga

SEQ ID NO: 2638 - protein, 390 aa, Wolbachia endosymbiont of Drosophila melanogaster
MTAIVEAFGKPHVNVGTIGHVDHGKTTLTAAITKHYGNFVAYDQIDKAPEERKRGITIATAHVEYQTEKRHYAHVDCPGHADYVKNMIVGAAQMDAAILVVSGVDGPMPQTREHILLAKQVGVGYIVVYINKADVADADMIDLVEMEVRELLSKYGFPGDEVPVVVGSALKALEDDSSEYGKKSIDKLMEKLDEYVAVPPRPVDLPFLLPIEDVFSISGRGTVVTGRIEKGEIKTGEEIEIIGLKATQKTICTGVEMFKKLLDKGSAGLNVGILLRGTKREEVERGQVLAKPGTITPHRKFKAEVYILKKEEGGRHTPFFANYQPQFYLRTTDVTGSIKLLDGKEMVMPGDNVSVEVELQVPIAMDKGLRFAIREGGRTVGSGVVSEILE

SEQ ID NO: 2639 - DNA, 1191 bp, Bdellovibrio bacteriovorus HD100
  CDS (1)..(1191): transl_table=11
atgtctaaagagaaatttacacgtaataaaccgcacgtaaatatcggcactatcggtcacgtcgatcatggtaaaacaactttgactgctgctatcacgactactcttgcagcatctggtaaagctcaagcgatggcttacgatcaaatcgataagtctccagaagaaaaagctcgtggtatcacgatctccactactcacgttgagtacgaaactgacaaccgtcactacgctcacgttgactgcccgggtcacgctgactacgtaaaaaacatgatcactggtgctgctcaaatggacggagctatcttggtagtttcttctgctgacggtccaatgccacaaactcgtgagcacatccttcttgcacgtcaagtaggtgttcctgctctagttgtattcatgaacaaagttgacatggttgacgataaagaacttcttgagctagttgagcttgaagttcgtgaacttctgtctaaatacgaattccctggcgatgatatcccagttgttaaaggttctgcattgaaagctcttgaaggcgacacttccgaaatcggtcgtccagctatcatgaaattgatggaagcttgtgatacttacatcccagctccagttcgtgcagtagacaaaactttcttgatgccagtagaggacgtattctctatctctggtcgtggtacagttgttactggccgtgtagagcgtggtattgttaaagttggtgacgagatcgaaatcgttggtatccgtccaactcaaaaaactactgtaactggtatcgagatgttccgtaaacttcttgacgaaggtcaagcaggggacaactgcggtgttcttcttcgtggtactaaaaaagaagacgttgaacgtggccaagtacttgttaaaccaggtacagttaaaccacacaaaaaattcaaagctgaagcgtacatcctgactaaagaagaaggcggacgtcacactccattcttcaacggttaccgtcctcagttctacttccgtactacagacgttactggcgtttgtactttgaaagctggaactgaaatggttatgcctggtgataagatcgaagtttctgttgaacttatcgctcctatcgctatggaaaaagagcttcgcttcgcgatccgtgaaggcggtcgtacagttggagctggtgttgttactgagatccttgagtaa

SEQ ID NO: 2640 - protein, 396 aa, Bdellovibrio bacteriovorus HD100
MSKEKFTRNKPHVNIGTIGHVDHGKTTLTAAITTTLAASGKAQAMAYDQIDKSPEEKARGITISTTHVEYETDNRHYAHVDCPGHADYVKNMITGAAQMDGAILVVSSADGPMPQTREHILLARQVGVPALVVFMNKVDMVDDKELLELVELEVRELLSKYEFPGDDIPVVKGSALKALEGDTSEIGRPAIMKLMEACDTYIPAPVRAVDKTFLMPVEDVFSISGRGTVVTGRVERGIVKVGDEIEIVGIRPTQKTTVTGIEMFRKLLDEGQAGDNCGVLLRGTKKEDVERGQVLVKPGTVKPHKKFKAEAYILTKEEGGRHTPFFNGYRPQFYFRTTDVTGVCTLKAGTEMVMPGDKIEVSVELIAPIAMEKELRFAIREGGRTVGAGVVTEILE

SEQ ID NO: 2641 - DNA, 1188 bp, Mycoplasma mycoides subsp. mycoides SC str. PG1
  CDS (1)..(1188): transl_table=4
atggcaaaagaacaatttgaccgtagtttacctcacgttaatattggaacaattggacacgttgatcatggtaaaactacattaactgctgctattactaaagttttatctgaacaaggtaacgcagaattcaaagattatgcaaatattgataatgccccagaagaaagagaacgtggtattacaattaatactgcacacgttgaatataaaactgctaatagacactatgcacacgtagattgcccaggtcacgctgactatgttaaaaatatgattactggagcagcacaaatggatggagctattttagttgttgctgcaactgatggaccaatgccacaaactagagaacacattctattatcaagacaagttggagttccaaaaatcgttgttttcttaaacaaatgtgatatggttgaagatgatgaaatgatcgatctagttgaaatggaaattagagatctattaactgaatacgactttgacggagaaggagcaccagttattagaggttcagctttaggagcattaaatggtgattcaaaatgaactggagcaattaatgaattaatggcagcagttgatgaatacatcccaactccacaaagagatgctgataaaactttcttaatgccagttgaagacgtatttacaattactggacgtggaactgttgcaacaggacgtgttgaacgtggaactgtaaaagtaaacgaagaagttgaaattattggattaaaagaagaaccaactaaaactgttgttactggattagaaatgtttagaaaactacttgattttgctgtagctggagataatgttggagcattactacgtggtgttgatagacattcagtagaacgtggacaagttttagcaaaacctggaactattaaaccacatactgtattaaaagcttcagtttatgctttaactcaagaagaaggtggacgtcataaaccattctttaataaataccgtcctcaattctacttccgtacaactgatgttactggagaagttactttaccagaaggaactgatatggtaatgcctggtgataatgttgaaatggaaatccaattaatcaaaccagttgctgttgaagaaggaactaaattctcaatccgtgaaggtggaagaacaattggtgctggaacagttatctcaattgaaaaataa

SEQ ID NO: 2642 - protein, 395 aa, Mycoplasma mycoides subsp. mycoides SC str. PG1
MAKEQFDRSLPHVNIGTIGHVDHGKTTLTAAITKVLSEQGNAEFKDYANIDNAPEERERGITINTAHVEYKTANRHYAHVDCPGHADYVKNMITGAAQMDGAILVVAATDGPMPQTREHILLSRQVGVPKIVVFLNKCDMVEDDEMIDLVEMEIRDLLTEYDFDGEGAPVIRGSALGALNGDSKWTGAINELMAAVDEYIPTPQRDADKTFLMPVEDVFTITGRGTVATGRVERGTVKVNEEVEIIGLKEEPTKTVVTGLEMFRKLLDFAVAGDNVGALLRGVDRHSVERGQVLAKPGTIKPHTVLKASVYALTQEEGGRHKPFFNKYRPQFYFRTTDVTGEVTLPEGTDMVMPGDNVEMEIQLIKPVAVEEGTKFSIREGGRTIGAGTVISIEK

SEQ ID NO: 2643 - DNA, 2241 bp, Strongylocentrotus purpuratus
  CDS (70)..(1455)
tcttttctagcattactgcagttgccactttcatctgtctgaaagtcatctggcatataactatccatcatgcctaaggaaaaagcccatatcaacatcgtggtcgtcggtcacgtagattccggcaaatcaaccaccaccggtcatctcatctacaaatgcggtggaatcgacaagcgtgtcatcgagaaattcgagaaggaagcttccgaccttggaaagggatcgttcaagtatgcctgggttctcgacaagctgaaggcagagcgtgaacgtggcatcaccattgacatcgccctgtggaagtttgaaaccccaaagtactgtgtcactgtcatcgatgcacctggtcatcgtgatttcatcaagaacatgatcactggaacctcacaggccgactgtgccgtgttggttgttgccgctggtattggagagtttgaggctggtatctccaaggatgggcagacacgagagcatgccctgctgtgctacaccttgggtgtcaagcagctcattgttgctgtcaacaagatggacagcgcacaatacaatgaagcccgtttcaaagaaatcgtcagggaggtctctggctacatcaagaaggttggctacaacccaaaggctgtgcccttcatcccaatctcaggatgggttggtgacaacatgatggaggcagccacaacgactatgccatggttcaaggggtggtcaattgaacgcaaggataataatgccagtggagtgaccctgttgaatgcccttgatgctatcatgctccctaagaggccacatgacaagcctcttcgtctaccactccaggatgtctacaaaattggaggtattggaactgtgccagtgggccgtgttgaaagtggaacaatcaaggccggtatgatcgctaggtttgcccctgccaatttgaccactgaggtgaagtctgtggagatgcaccatgaaactttggaaaaggcattgccaggtgacaacgtcggcttcaatgtcaagaacgtctctatcaaggatatcaggcgtggtatggtttgcggagaatccaaggacaatcccccaatggctgccaagtccttccaggctcaggtcattgtcatgaaccaccccggtgagatccatgctggctacaccccggttttggattgtcacacagctcacattgcctgcaagttcgcagaactcaaggagaagctcgaccgtcgatcaggcaagagtcttgaggataaccccaagtttgtgaagagtggtgatgccgtcattgccaaactgattccctccaagcagatggtggttgagagttacacagattttgctcctcttggacgttttgctgtccgtgacatgaggcagaccgtagccgtcggtgtggtgaagtctgtcgaaaaggatgaagcatctacaggcaaggttaccaagtctgcccagaaggctggcaagaagaaatgatggcgatggcattctgcatcccaaggctacaacatgtacccactccccttcactaatgagttcaaaggaatcactgcaagccttcgtttacctatgcttcttgaaaaaatgaaaacccaaagaatatcacactaattcttcctccgcagatagcagaggaagatagtgttgctattatatcggcagcatgtttttatcaagtctattctaaacaagactgttacagcaaatgtgctgagagtaaaacaaaaataaaagaaacgcttaatattgctctaaatatgtaccacccatgaaagacgaatggggttataagaagtgacatttctttgaaattttaaaataagtatgtctgtatcaaggtataatcaaaaaagcttatcacacactgtgtgctgcaccaagttttatttaaccctgaaaggcaggggttgtttgacatacagcactgggagctcacccatgatctcgatttagttaacacaacaaaataaaaagagaagtcatcttttttgcaacacggtaaacatgcaggcaaaatgtggtcctcatgggttaatcattcatcagatatgtttttacatctatgttgcatgtaagcaaattgattttagaaatccttagttcaagtggcaattgcaactaaatgtgctcaagtgaactacttgtatggacagagctggtccttaattttggaaaatataatttcttggtgacttaacaatttatttgtatgtaaatggaaacaagtgtatgccttggaaataaatattaaaaaaaaaagaa

SEQ ID NO: 2644 - protein, 461 aa, Strongylocentrotus purpuratus
MPKEKAHINIVVVGHVDSGKSTTTGHLIYKCGGIDKRVIEKFEKEASDLGKGSFKYAWVLDKLKAERERGITIDIALWKFETPKYCVTVIDAPGHRDFIKNMITGTSQADCAVLVVAAGIGEFEAGISKDGQTREHALLCYTLGVKQLIVAVNKMDSAQYNEARFKEIVREVSGYIKKVGYNPKAVPFIPISGWVGDNMMEAATTTMPWFKGWSIERKDNNASGVTLLNALDAIMLPKRPHDKPLRLPLQDVYKIGGIGTVPVGRVESGTIKAGMIARFAPANLTTEVKSVEMHHETLEKALPGDNVGFNVKNVSIKDIRRGMVCGESKDNPPMAAKSFQAQVIVMNHPGEIHAGYTPVLDCHTAHIACKFAELKEKLDRRSGKSLEDNPKFVKSGDAVIAKLIPSKQMVVESYTDFAPLGRFAVRDMRQTVAVGVVKSVEKDEASTGKVTKSAQKAGKKK

SEQ ID NO: 2645 - DNA, 1359 bp, Strongylocentrotus purpuratus
  CDS (1)..(1359)
atggcagcgctgttcacactaaaaacgtgcggcaagaaaccaaatatgcgcagtttacttgctcaagccttcaagtcggcttcgttgaagcaatgtcatgctttgcagtgcaatgctcgcttgatgcggacatttgctcccctgctggctgctgaagccaagcggtcctttgaaagaggaaagcctcatgtgaacattggaactattggtcatgtcgatcatggcaagacaaccctcacagcagctatcacaaaagttcttgcggaggagggcaactctgaattctacaagtacgatgagattgataaagcaccagaggagaagaagagaggtatcacaatcaatgcagcacacatagaatacgagacaggtagcaggcattatgctcacacagattgcccaggtcacgcagattacatcaagaatatgatcactggagcagctcagatggagggtgctatattggttgtcgcggcaacagacggtcagatgcctcagacgagagaacatcttctcttggccaaacagattggtgtagataagatagtagtgtatatcaacaaggctgatgtggtggacgaggagatgctggagcttgttgagcttgagatgagggatgtcttgagtgagtttggatacgatggagaggaaacgcccatgatcatcggctcagctctcaatgtccttgaggacaagaacccagaaattggaaaagaatccattaagaagctgatggaagccgtggatagctggatacctctaccactcagagagctggagaaaccgttcatgatgccggtcgaagctgtctattcaattccagggcgtggtactgttgtatctggtcgtgtagagaggggcgtaatcaagaagagtgatgaagtagaatttgtcggacacagtgcaagaatcaaatcagttgtaacaggtctggagatgttccacaagacgctagaccagggcgaggccggagaccagatgggggcgctagtcaggaacgtcaaacgagacgagatcaggaggggtatggtcatgtgcaaaccaggagttctatcacctcataataacttcattgcgcaggtatacattctcagcaaagatgaaggaggtagacataagccattcacgagtaacttcacacctattatgtactcatacacatgggatgctgcagctaggataacactgcctgaaggcaaggagatggtcatgcctggtgaggatacttccctggagattgctctcaagaggccgatggtgtcggaggtcggtcagcgcttcacgttacgagacggacgcatcacactcggcacgggcatcatcactaaagtcctgaccaacatcgaatcagaagtctaa

SEQ ID NO: 2646 - protein, 452 aa, Strongylocentrotus purpuratus
MAALFTLKTCGKKPNMRSLLAQAFKSASLKQCHALQCNARLMRTFAPLLAAEAKRSFERGKPHVNIGTIGHVDHGKTTLTAAITKVLAEEGNSEFYKYDEIDKAPEEKKRGITINAAHIEYETGSRHYAHTDCPGHADYIKNMITGAAQMEGAILVVAATDGQMPQTREHLLLAKQIGVDKIVVYINKADVVDEEMLELVELEMRDVLSEFGYDGEETPMIIGSALNVLEDKNPEIGKESIKKLMEAVDSWIPLPLRELEKPFMMPVEAVYSIPGRGTVVSGRVERGVIKKSDEVEFVGHSARIKSVVTGLEMFHKTLDQGEAGDQMGALVRNVKRDEIRRGMVMCKPGVLSPHNNFIAQVYILSKDEGGRHKPFTSNFTPIMYSYTWDAAARITLPEGKEMVMPGEDTSLEIALKRPMVSEVGQRFTLRDGRITLGTGIITKVLTNIESEV

SEQ ID NO: 2647 - DNA, 1386 bp, Nasonia vitripennis
  CDS (1)..(1386)
atgggcaaggagaagatccacataaacatcgtggtgatcggtcacgtcgattccggcaagtcgacgacgaccggccacctgatctacaaatgcggcggcatcgacaagcgtaccatcgaaaaattcgagaaagaagcccaggagatgggcaaaggcagcttcaagtacgcctgggtactggacaagctgaaagccgagcgtgagcgcggcatcaccatcgacatcgccctctggaagttcgagacggccaagtactacgtgaccatcatcgacgcgcccggacatcgggacttcatcaagaacatgataaccggcacgagtcaggccgactgtgccgttctcatcgtcgctgctggaatcggtgagttcgaggccggcatctcgaagaacgggcagacgcgcgagcacgcgctgctggccttcaccttgggcgtcaagcagctgatcgtcggcgtcaacaagatggacatgaccgagcccccctactcggaggcgcgattcgaggagatcaagaaggaggtgtcgtcgtacatcaagaagatcggttacaataccgcctcggtggccttcgtaccgatctccggctggcacggggacaacatgctcgagccgtcgcccaagaccgcctggtacaagggctggaaggtcgagcgcaaggatggaaatgccgatggaaagacgctcatcgaggctctggacgctatcttgccgccgtcgcggccaactgataagccgctgcgtctgccgctgcaggacgtctacaagatcggcggaatcggcactgtaccggtgggtcgagtcgagaccggcatcctgaagccgggcatggtggtgaccttcgccccggcagccctgaccaccgaggtcaagtccgtggagatgcaccacgaggctctgaccgaagctcttcccggcgacaacgtcggcttcaacgtcaagaacatctcggtcaaggagttgcgccgtggctacgtagccggcgactcgaagaaccagccgcctcgcggtgcccaggacttcaccgctcaggtcatcgtcctcaatcatccgggacagatcagcaacgggtacacgcctgtgctcgactgtcacacagctcacatagcttgcaagttcgccgagatcaaggagaagtgcgaccgtcgtacaggtaaaacaacggaggagaatccgaagagcgtgaagacaggagacgcggccatagtgctgctgcagccgacgaagcccatgtgcgtcgaggctttccaggagtttccgccgctcggcagattcgccgtgcgcgacatgcggcagaccgtcgctgtgggggtcatcaagagcgtgaatttcaaagatctccagggcaaggtaacaaaggccgcggagaaggcccagaagaaaaagtaa

SEQ ID NO: 2648 - protein, 461 aa, Nasonia vitripennis
MGKEKIHINIVVIGHVDSGKSTTTGHLIYKCGGIDKRTIEKFEKEAQEMGKGSFKYAWVLDKLKAERERGITIDIALWKFETAKYYVTIIDAPGHRDFIKNMITGTSQADCAVLIVAAGIGEFEAGISKNGQTREHALLAFTLGVKQLIVGVNKMDMTEPPYSEARFEEIKKEVSSYIKKIGYNTASVAFVPISGWHGDNMLEPSPKTAWYKGWKVERKDGNADGKTLIEALDAILPPSRPTDKPLRLPLQDVYKIGGIGTVPVGRVETGILKPGMVVTFAPAALTTEVKSVEMHHEALTEALPGDNVGFNVKNISVKELRRGYVAGDSKNQPPRGAQDFTAQVIVLNHPGQISNGYTPVLDCHTAHIACKFAEIKEKCDRRTGKTTEENPKSVKTGDAAIVLLQPTKPMCVEAFQEFPPLGRFAVRDMRQTVAVGVIKSVNFKDLQGKVTKAAEKAQKKK

SEQ ID NO: 2649 - DNA, 1419 bp, Nasonia vitripennis
  CDS (1)..(1419)
atggcgttagtttctgctaggaccgttttataccccgccctgcggcagaccgtgaggcagttgaacttcacccggcagttggctaaataccaacgtcgcaaccaactatgcagtcgcctgtacttaccagaggtcaccgttcagagactctacgccgagaaggttgtatttgccagagacaagccccacgtgaacattggaaccattggccacgtcgatcatggaaagaccaccttgactgctgccatcacaaaggtgctgtcggagaaggagctggcaaaggccaagaactacaacgagatcgacaatgctccagaggagaaagctcgtggtatcacgatcaacgttgcacacatcgagtaccaaactgagaagaggcattacagtcacacggactgtcctggacacgccgattacataaagaacatgatcactggtacagctcaaatggacggtgctatacttgtggttgccgccactgatggtgctatgcctcagaccaaagagcacttgctactcgccaagcaaattggtatcgagcacatcgttgttttcatcaacaaggtggatgctgccgacgccgaaatggtcgagcttgttgaaatggaaatccgcgagctcatgactgagatgggctacgatggagacaaaatcccagttatcaaaggaagtgccctctctgctctggaaggtaagaaccccgagatcggaagcgaggccataatgaagctcctggaacagatcgatggatacgtacccgtgccagttcgcgatctggacaaacccttcctcttaccagtagaaggtacctactccattcccggtagaggaactgtcgtctcgggtcgcttggaacgtggaaaactgaagaagggccaggaagtcgaattcgtagggtacaacaaacaattaaagagcacggttactggtatagagatgttccacaaaattctggagacggccgaagctggtgatcagttgggagctttgatcaagggtgtgaagcgagaagacatcaggaggggaatgattatggctaagccgggatccgtaaaggcttacgatcatgtggaggctcaagcctatattctaaccagtgaggaaggtggacgtaagaaggcggttcaggatcacatccaacttcaaatgtacagcaagacctgggattgtcctgcccaagttaccattccaggaaagaacttggctatgcctggtgaagacgcaaaattggacctgaaacttctcaaaaatatggtatgtgagaagggacaacgtttcacgttgagagacggtaccgtgacagttggcactggtgtcatcactaatctccttgctcctctcactgagaacgaaaaactggttctggtggaaggtaagaagggtcttaggaaactggagaggaaacaacagaagagttaa

SEQ ID NO: 2650 - protein, 472 aa, Nasonia vitripennis
MALVSARTVLYPALRQTVRQLNFTRQLAKYQRRNQLCSRLYLPEVTVQRLYAEKVVFARDKPHVNIGTIGHVDHGKTTLTAAITKVLSEKELAKAKNYNEIDNAPEEKARGITINVAHIEYQTEKRHYSHTDCPGHADYIKNMITGTAQMDGAILVVAATDGAMPQTKEHLLLAKQIGIEHIVVFINKVDAADAEMVELVEMEIRELMTEMGYDGDKIPVIKGSALSALEGKNPEIGSEAIMKLLEQIDGYVPVPVRDLDKPFLLPVEGTYSIPGRGTVVSGRLERGKLKKGQEVEFVGYNKQLKSTVTGIEMFHKILETAEAGDQLGALIKGVKREDIRRGMIMAKPGSVKAYDHVEAQAYILTSEEGGRKKAVQDHIQLQMYSKTWDCPAQVTIPGKNLAMPGEDAKLDLKLLKNMVCEKGQRFTLRDGTVTVGTGVITNLLAPLTENEKLVLVEGKKGLRKLERKQQKS

SEQ ID NO: 2651 - DNA, 1386 bp, Nasonia vitripennis
  CDS (1)..(1386)
atgggtaaggagaaggttcacatcaacatcgtcgtcatcggacacgtagattccggaaagtcgaccaccactggtcacttgatctacaaatgcggtggtatcgacaagcgtaccatcgagaagttcgagaaggaagcccaggagatgggtaagggttccttcaagtatgcctgggtcttggacaaactgaaggccgagcgtgagcgtggtatcaccatcgatattgctctgtggaaattcgagacttccaagtactacgtcaccatcatcgacgctcccggacacagagatttcatcaagaacatgatcactggtacgtcgcaggccgattgcgccgtgttgatcgtcgctgccggtactggtgaattcgaagccggtatctccaagaacggtcagacccgtgagcacgctctgcttgccttcactcttggtgtcaagcagttgatcgttggtgtcaacaagatggactccaccgagccaccctactcggaggctcgtttcgaggaaatcaagaaggaagtatcttcctacatcaagaagatcggttacaacccagccgctgttgccttcgtccccatctctggatggcacggagacaacatgttggagccatccaccaaaatgccctggttcaagggatgggctgttgagcgcaaggaaggcaaggccgacggcaagtgcctcatcgaagctcttgacgccatcctgccacccagcaggcccaccgacaaagcccttcgtcttcccctccaggacgtctacaagattggtggtattggaacggtacccgtcggtcgtgtcgagactggtgtgctgaagcccggtatggtcgtcaccttcgccccagctggactcaccactgaggttaagtccgtcgaaatgcaccacgaagctctgactgaggccgtccccggagacaacgttggtttcaacgttaagaacgtttccgtcaaggacttgcgtcgtggatacgtcgctggtgactccaagaacaacccacccaagggagccgctgacttcaccgctcaggtcatcgtcctgaaccaccctggtcagatcagcaacggatacacgcccgtgctcgattgccacacggcccacattgcttgcaagttcgccgaaatcaaggagaagtgcgaccgtcgtaccggtaaaaccaccgaagagaaccccaaggccatcaagtctggtgatgccgccatcgtcaaccttgtgcccagcaagcccatgtgcgtagaggccttccaggagttcccacccctgggacgtttcgctgtccgtgacatgcgtcaaaccgtcgctgtcggtgtcatcaaggccgtcaacttcaaggacgttagcggcaaggtcaccaaggctgccgagaaggcccagaaaaagaagtag

SEQ ID NO: 2652 - protein, 461 aa, Nasonia vitripennis
MGKEKVHINIVVIGHVDSGKSTTTGHLIYKCGGIDKRTIEKFEKEAQEMGKGSFKYAWVLDKLKAERERGITIDIALWKFETSKYYVTIIDAPGHRDFIKNMITGTSQADCAVLIVAAGTGEFEAGISKNGQTREHALLAFTLGVKQLIVGVNKMDSTEPPYSEARFEEIKKEVSSYIKKIGYNPAAVAFVPISGWHGDNMLEPSTKMPWFKGWAVERKEGKADGKCLIEALDAILPPSRPTDKALRLPLQDVYKIGGIGTVPVGRVETGVLKPGMVVTFAPAGLTTEVKSVEMHHEALTEAVPGDNVGFNVKNVSVKDLRRGYVAGDSKNNPPKGAADFTAQVIVLNHPGQISNGYTPVLDCHTAHIACKFAEIKEKCDRRTGKTTEENPKAIKSGDAAIVNLVPSKPMCVEAFQEFPPLGRFAVRDMRQTVAVGVIKAVNFKDVSGKVTKAAEKAQKKK

SEQ ID NO: 2653 - DNA, 1389 bp, Unknown
  Unidentified
  CDS (1)..(1389)
atgttaatacaaagaatattgctgcgctcgttcaattgtgtgaggtcacagaggcttagcttaaatgtcaagcatgtttgccaaataaatcttgactactttcacaccaaagcaaactggagcaaacagcgtttctactctagcgatgcgaatgacaaggatttaatttgtagcgtagggactatcggacatgtagatcatggcaaaactactctcacagctgccatcactaaatatttatcagaaaaggacaaaaactgtaaatacgtttcctacgatgaaattgatcgtgctcctgaggagaaagctcggggtatcacaataaacattgctcacattggatatcggactaagaagaggagatatgctcatactgattgtcctggacatttggatttcatcaagaatatgatcagtggagcatcccagatggatggagcaattcttatagttgctgccacggatggtcccatgccccaaactatggaacaccttctgctggctaagcaagtcggagttaaggagatcatagtttacatcaacaaagctgatctggttgacgaagaagttctggaccttgtggatctagagatcagggagcttttggaaaattttggatttgactctgaaaatagtccagtaataaggggttcagctttattggctcttaaaggagacacttctaattatggaactccatcagtgcaaaatttattggatgctatggactcgtacttttcacctcccaaaagagactacacatctcctttcattttaccttgtgataaccttttcaatgtaccaggtagaggtactgttgttgttggaactgtcaaaagaggaatcatcaagaagggtgcagaagcagaacttattggatttgatgagcgtatcaaaaccgtccttagcgacgttcagattttccaaaaaagtgtaccagaagctccagctggcgaaaatgttggtgttctgctcagaggtgtaaaaattaatgctgtgagaagaggaatgtgggtcgttccaagaggttcacaaacgtttagcaatcactatgaagctcaactatatcttctaaacacttctgaaggaggcagacatagacctcttgggaaaaacggatactgttcgattatgtactgctcgacttggaacatctacacgagagtcgatcttatactaccagatggccaaaatatgctgatgcctggtgaacaggccacttgcagattgactctacttgactgtatgccaatactgatgggtcagactttcacgataagagaacagaagtgcactgtcgccaccggaatcataactgcagttcacgatcgcgtggaattcgacaaaaggaaaatgaatgagataaaaattcctggagtcaatgcgtaa

SEQ ID NO: 2654 - protein, 462 aa, Unknown
  Unidentified
MLIQRILLRSFNCVRSQRLSLNVKHVCQINLDYFHTKANWSKQRFYSSDANDKDLICSVGTIGHVDHGKTTLTAAITKYLSEKDKNCKYVSYDEIDRAPEEKARGITINIAHIGYRTKKRRYAHTDCPGHLDFIKNMISGASQMDGAILIVAATDGPMPQTMEHLLLAKQVGVKEIIVYINKADLVDEEVLDLVDLEIRELLENFGFDSENSPVIRGSALLALKGDTSNYGTPSVQNLLDAMDSYFSPPKRDYTSPFILPCDNLFNVPGRGTVVVGTVKRGIIKKGAEAELIGFDERIKTVLSDVQIFQKSVPEAPAGENVGVLLRGVKINAVRRGMWVVPRGSQTFSNHYEAQLYLLNTSEGGRHRPLGKNGYCSIMYCSTWNIYTRVDLILPDGQNMLMPGEQATCRLTLLDCMPILMGQTFTIREQKCTVATGIITAVHDRVEFDKRKMNEIKIPGVNA

SEQ ID NO: 2655 - DNA, 1422 bp, Magnaporthe grisea 70-15
  CDS (1)..(1422)
atgggtaacaaggagaagagccatcttaacgtcgtcgtcatcggacacgtcgactccggaaagtccacgactaccggccacttgatctacaagctgaagggtattgaccagcgtacgatcgagaagtacgagaaggaagccgctgagttgggcaagggttccttcaagtatgcctgggttcttgacaagctcaaggccgagcgtgagcgcggtatcaccatcgacattgctctttggaagttcgagaccgccaagtaccaggtcaccgtcattgacgcccccggtcaccgtgatttcatcaagaacatgattactggtacttcgcaggccgactgcgccattctggtcatcggtgccggtaccggtgagttcgaggctggtatctccaaggatggccagacccgtgagcacgctctgctcgctttcaccctgggtgttaggcagctcattgttgccgtcaacaagatggacactgccaagtgggcccagtcccgttacgacgagattgtcaaggagacctccaacttcttgaagaagattggtttcaaccctgactccgtccccttcgttcccatctccggtttcaacggtgaccacatgatctcggagtccgccgacatcaagggcaacatctcccctaacgctccttggtacaagggctggaccaagaccgtcaacaaggacggtaagaaggagaaggtcatcggtggtgcttcgctccaggacgccattgacgacgtcacccctcccactcgtcccaccgacaagcccctccgtcttcccctccaggatgtctacaagatcggtggtatcggcacagtccccgtcggccgtatcgagactggtatcctcaagcccggtatggtcgttaccttcgcccccgccaacgtcaccactgaagtcaagtccgtggagatgcaccaccagcagctccccgagggtgtccccggtgacaacgttggtttcaacgtcaagaacgtgtccgtcaaggacattcgccgtggtaacgtcgctggtgacagcaagaacgaccctcctatgggctgcgcttcgttcaacgctcaggtcatcatcctgaaccaccccggccaggtcggtgctggttacgcccccgttctggactgccacactgcccacatcgcctgcaagttctctgagatccttgagaagcttgaccgccgtaccggcaagtccatcgagtccaaccccaagttcatcaagtcgggtgacgctgccatcgtcaagatgattccgtccaagcccatgtgtgtcgagactttctccgagtaccctccccttggtcgtttcgccgtccgtgacatgcgtcagaccgtcgctgtcggtgtcatcaagagcgtcgacaagtcccagggtacccagggcaaggtcaccaagtccgctgccaaggccgccaagaaataa

SEQ ID NO: 2656 - protein, 473 aa, Magnaporthe grisea 70-15
MGNKEKSHLNVVVIGHVDSGKSTTTGHLIYKLKGIDQRTIEKYEKEAAELGKGSFKYAWVLDKLKAERERGITIDIALWKFETAKYQVTVIDAPGHRDFIKNMITGTSQADCAILVIGAGTGEFEAGISKDGQTREHALLAFTLGVRQLIVAVNKMDTAKWAQSRYDEIVKETSNFLKKIGFNPDSVPFVPISGFNGDHMISESADIKGNISPNAPWYKGWTKTVNKDGKKEKVIGGASLQDAIDDVTPPTRPTDKPLRLPLQDVYKIGGIGTVPVGRIETGILKPGMVVTFAPANVTTEVKSVEMHHQQLPEGVPGDNVGFNVKNVSVKDIRRGNVAGDSKNDPPMGCASFNAQVIILNHPGQVGAGYAPVLDCHTAHIACKFSEILEKLDRRTGKSIESNPKFIKSGDAAIVKMIPSKPMCVETFSEYPPLGRFAVRDMRQTVAVGVIKSVDKSQGTQGKVTKSAAKAAKK

SEQ ID NO: 2657 - DNA, 1332 bp, Magnaporthe grisea 70-15
  CDS (1)..(1332)
atgtctgctactttcagatccctcgcaccgttcgccagaacggcgcggttcgccttcaagaagacgggcaaccccttggtctcactccagcagcagtcaaggtctcctgtcctgaacttgaggagaggttacgctgtgtacgagaggacaaagcctcacgtcaacatcggcacaatcggtcacgtcgatcacggcaagaccaccctttccgctgccatcaccaagaggcaggccgagaagggcttcgcaaacttccttgactatgccgccatcgacaaggctcccgaggagaggaagcgtggtatcaccatctcgtcagcacacatcgagtactctacggaaaaccgtcactactcccacgttgactgcccgggtcacgccgattacatcaagaacatgattactggtgctgccaacatggacggtgccattattgtcgtcgctgcctcggatggtcagatgccccagacccgtgagcacttgcttctcgcccgccagattggtatccagaagatcgttgtcttcgtcaacaaggtcgacgctctcgatgaccctgaaatgttggagcttgtcgagatggagatgcgtgagctgctcaacagctatggcttcgctggtgatgacacccccgttatcatgggttcggccctttgcgctctgaacgacaagcgccccgaaatcggtcagcagaagatcgacgagctgcttgaggccgttgacacctggatccccacccccgagcgtgaccttgacaagcccttcctgatgtcggttgaggatgtcttcaccatcggcggtcgtggtacagtcgtctcgggccgtgtccagcgcggtatcctgaagcgtgatgctgagatcgagattgttggcaaatccgacgaggttgtcaagaccaaggtcaccgatattgagaccttcaagaagtcgtgcgaggagtctcgcgctggtgacaactctggtttgctgctccgtggtgtccgccgtgaggacatcaagcgcggtcaggtcatcgctgcccctggcagcatcaaggcccacaagcagttcctggtctctctctacgtcctgaccaaggaggagggtggaaggcacactggtttccaggagaactacatgccccagatgtacatcaggactgccagcgaggcctgctccctgcactggcccgagggcaccgaggatgcctccagcaagatggtcatgcccggtgacaatgttgagatgaccgctaccctgcacagccctatcgctgtcgagcctggtttgaggatcaatatccgtgagggtggcaagactgtcgccactggtctggttactcgcatcctcaaataa

SEQ ID NO: 2658 - protein, 443 aa, Magnaporthe grisea 70-15
MSATFRSLAPFARTARFAFKKTGNPLVSLQQQSRSPVLNLRRGYAVYERTKPHVNIGTIGHVDHGKTTLSAAITKRQAEKGFANFLDYAAIDKAPEERKRGITISSAHIEYSTENRHYSHVDCPGHADYIKNMITGAANMDGAIIVVAASDGQMPQTREHLLLARQIGIQKIVVFVNKVDALDDPEMLELVEMEMRELLNSYGFAGDDTPVIMGSALCALNDKRPEIGQQKIDELLEAVDTWIPTPERDLDKPFLMSVEDVFTIGGRGTVVSGRVQRGILKRDAEIEIVGKSDEVVKTKVTDIETFKKSCEESRAGDNSGLLLRGVRREDIKRGQVIAAPGSIKAHKQFLVSLYVLTKEEGGRHTGFQENYMPQMYIRTASEACSLHWPEGTEDASSKMVMPGDNVEMTATLHSPIAVEPGLRINIREGGKTVATGLVTRILK

SEQ ID NO: 2659 - DNA, 1338 bp, Gibberella zeae PH-1
  CDS (1)..(1338)
atgtcgaccgctttccgatctgttgcgcctttcctgcgcactgctcgacaagggctccgggctaaccccgtcaaccctctccagtccgccttcaccaagaagaacgcctctggagtcctcaacctctaccgcacatacgccgtctttgagcgatcaaagccccatgtgaacattggtaccattggtcacgtcgatcacggcaagaccactctctctgctgccatcaccaagcgccaggccgacaagggcctcgccaacttcctcgagtatggtgccattgacaaggctcccgaggagagaaagcgtggtatcaccatctctaccgcccacatcgagtacgccaccgagaaccgccactactcccacgtcgactgccctggtcacgccgattacatcaagaacatgattactggtgctgccaacatggacggtgctatcatcgtcgttgccgcctccgatggtcagatgccccagacccgtgagcacttgctgctcgcccgtcaggtcggtgtccagcgaattgtcgtcttcgtcaacaaggtcgatgccattgacgaccccgagatgcttgagctcgttgagatggagatgcgtgagcttctcaacacctacggcttcgagggtgacgacacccccgtcatcatgggttccgctctcatgtccctccagaatcagcgccccgagatcggtacccagaaggtcgatgagctcctcgccgctgtcgacgagtggatccctacccccgagcgtgaccttgacaagcctttcctcatgtccgtcgaggatgtcttctccattgccggccgtggtactgtcgtctctggccgtgtcgagcgtggtatcctcaagcgtgaccaggagatcgagcttgtcggcaagggtcaagaggtcatcaagaccaaggtcaccgatatcgagaccttcaagaagtcttgcgagcagtcccaggctggagacaactccggtcttctcatccgaggtgtccgccgtgaggatgtccgccgtggtatggtcgtctgcgctcccggcaccgtcaagtctcacactcagttcctcgcttctctctacgttctcaccaaggaggagggtggccgacacaccggtttccaggagcactaccgacctcagctctacctccgaactgctgatgagtccatcgacctgaccttccccgagggtactgaggatgccaccagcaagatgatcatgcccggtgacaacaccgagatggtcgtcaccatgggccatcccaacgctattgaggtcggtcagcgattcaacatccgtgagggtggccgaaccgttgctactggtctctgcactcgcatcatcaagtaa

SEQ ID NO: 2660 - protein, 445 aa, Gibberella zeae PH-1
MSTAFRSVAPFLRTARQGLRANPVNPLQSAFTKKNASGVLNLYRTYAVFERSKPHVNIGTIGHVDHGKTTLSAAITKRQADKGLANFLEYGAIDKAPEERKRGITISTAHIEYATENRHYSHVDCPGHADYIKNMITGAANMDGAIIVVAASDGQMPQTREHLLLARQVGVQRIVVFVNKVDAIDDPEMLELVEMEMRELLNTYGFEGDDTPVIMGSALMSLQNQRPEIGTQKVDELLAAVDEWIPTPERDLDKPFLMSVEDVFSIAGRGTVVSGRVERGILKRDQEIELVGKGQEVIKTKVTDIETFKKSCEQSQAGDNSGLLIRGVRREDVRRGMVVCAPGTVKSHTQFLASLYVLTKEEGGRHTGFQEHYRPQLYLRTADESIDLTFPEGTEDATSKMIMPGDNTEMVVTMGHPNAIEVGQRFNIREGGRTVATGLCTRIIK

SEQ ID NO: 2661 - DNA, 1383 bp, Gibberella zeae PH-1
  CDS (1)..(1383)
atgggtaaggaggagaagactcaccttaacgtcgtcgtcatcggccacgtcgactctggcaagtcgaccactaccggtcacttgatctaccagtgcggtggtatcgacaagcgaaccatcgagaagttcgagaaggaagccgccgagctcggtaagggttccttcaagtacgcctgggttcttgacaagctcaaagccgagcgtgagcgtggtatcaccattgatatcgccctctggaagttcgagactcctcgctactatgtcaccgtcattgacgctcccggtcaccgtgatttcatcaagaacatgatcactggtacttcccaggccgattgcgccattctcatcattgccgccggtactggtgagttcgaggctggtatctccaaggatggccagacccgtgagcacgctctccttgcctacacccttggtgtcaagaacctcattgttgccatcaacaagatggacaccaccaagtggtctgaggcccgttaccaggagatcatcaaggagacctcttctttcatcaagaaggtcggctacaaccccaaggctgtcgctttcgtccccatctccggtttcaacggtgacaacatgcttactgcctccaccaactgcccctggtacaagggttgggagcgtgagatcaagtctggcaagctctccggaaagaccctccttgaggccattgactccatcgagccccccaagcgtcccaacgacaagcccctccgacttcccctccaggatgtctacaagattggcggtattggaacggttcctgtcggccgtatcgagactggtatcatcaagcccggtatggtcgttaccttcgctccttccaacgtcaccactgaagtcaagtccgttgagatgcaccacgagcagctcactgagggacagcccggtgacaacgttggtttcaacgtgaagaacgtttccgtcaaggacatccgacgtggtaacgtcgctggtgactccaagaacgacccccccatgggtgccgcttctttcaccgcccaggtcatcgtcctcaaccaccccggtcaggtcggtgctggttacgctcccgtcctcgattgccacactgcccacattgcctgcaagttcgccgagatccaggagaagatcgaccgccgaaccggtaaggctactgaggccgcccccaagttcatcaagtctggtgactccgccatcgtcaagatggttccctccaagcccatgtgtgttgaggctttcaccgactaccctcctctgggtcgtttcgccgtccgtgacatgcgacagaccgtcgccgtcggtgtcatcaaggccgtcgagaagtccactggcgctgctggcaaggtcaccaagtccgctgccaaggctggtaagaaataa

SEQ ID NO: 2662 - protein, 460 aa, Gibberella zeae PH-1
MGKEEKTHLNVVVIGHVDSGKSTTTGHLIYQCGGIDKRTIEKFEKEAAELGKGSFKYAWVLDKLKAERERGITIDIALWKFETPRYYVTVIDAPGHRDFIKNMITGTSQADCAILIIAAGTGEFEAGISKDGQTREHALLAYTLGVKNLIVAINKMDTTKWSEARYQEIIKETSSFIKKVGYNPKAVAFVPISGFNGDNMLTASTNCPWYKGWEREIKSGKLSGKTLLEAIDSIEPPKRPNDKPLRLPLQDVYKIGGIGTVPVGRIETGIIKPGMVVTFAPSNVTTEVKSVEMHHEQLTEGQPGDNVGFNVKNVSVKDIRRGNVAGDSKNDPPMGAASFTAQVIVLNHPGQVGAGYAPVLDCHTAHIACKFAEIQEKIDRRTGKATEAAPKFIKSGDSAIVKMVPSKPMCVEAFTDYPPLGRFAVRDMRQTVAVGVIKAVEKSTGAAGKVTKSAAKAGKK

SEQ ID NO: 2663 - DNA, 1410 bp, Apis mellifera
  CDS (1)..(1410)
atggcgttgaggtgtacaaaaattatttgcgattctggttttcgatatacaataaagcaaccatttctagttgaatattttgttaaacagttttatggacaatcacgtgcagggacttatttgtcgggtgtgataacgcaaaaattttatagcacgaaaaaagtatttaacagaactaaaccgcactgtaatgtcggtactatcggacatgtggatcatggaaaaacgacacttacagcagctattactaaagttcttgccgagaaagagttggcagaagcgaaagactatgccgatatcgataatgcacctgaagaaaaagaacgtggtataactatcaatgtcgctcacgttgaatatcagacggagaaacgtcattacggtcataccgattgtcctggacacgcggattatattaaaaacatgattactggtacggcacaaatggatggggctattctcgttgttgccgctactgatggtactatgccgcaaacgagagaacatcttttgcttgccaagcagatcggtatccaacatattgtcacatttattaataaggttgatgtcgctgatgaagaaatggtggatttagtagagatggaattaagggagctattaagcgaaatgggttatgatggagataatataccctttattaaaggaagtgccctttgcgcgttaaataattctaatccaaaaataggacatgattctatattaaagttgttagaagctgtggatgactatattcctactcctatcagagatttggacaaaccctttttgttaccgatagaaaatgtttacacgatttcgggtagaggaacagtagtcacaggtagattggaacgtggaaaaataaaaaagggtatggattgtgaattgcttgggtttaataaaatgataaagagcacgataacgggaatagaaatgtttcatcaaacgttggaagaggctgaagcaggagatcaaatgggtgctttgcttagaggtttgaaaagagacgaggttagaagagggatggtattgtgtaaaccaggcactatgaaagctaatgatcatttggaatgtcaagtatatatgttgactagtgcggaaggaggtaaaagaaaacctatcaataatcttgtgcaaattcaaatgttttgcaaaacatgggattgtgcaagtcaattaaatttggtagataagactttggtcatgcctggtgaagattctaccattagattaaaattaataagaccaatggtgtgcgaaaaaggacaacgatttactttaagagatggaaaggtaactatagcaactggagtaattacgaatattttaccaaagctgaacgaacatgaacgactggaaattctcgaaggtaaaaagaaaggattgaaaaaagaaatggcaaaagcttaa

SEQ ID NO: 2664 - protein, 469 aa, Apis mellifera
MALRCTKIICDSGFRYTIKQPFLVEYFVKQFYGQSRAGTYLSGVITQKFYSTKKVFNRTKPHCNVGTIGHVDHGKTTLTAAITKVLAEKELAEAKDYADIDNAPEEKERGITINVAHVEYQTEKRHYGHTDCPGHADYIKNMITGTAQMDGAILVVAATDGTMPQTREHLLLAKQIGIQHIVTFINKVDVADEEMVDLVEMELRELLSEMGYDGDNIPFIKGSALCALNNSNPKIGHDSILKLLEAVDDYIPTPIRDLDKPFLLPIENVYTISGRGTVVTGRLERGKIKKGMDCELLGFNKMIKSTITGIEMFHQTLEEAEAGDQMGALLRGLKRDEVRRGMVLCKPGTMKANDHLECQVYMLTSAEGGKRKPINNLVQIQMFCKTWDCASQLNLVDKTLVMPGEDSTIRLKLIRPMVCEKGQRFTLRDGKVTIATGVITNILPKLNEHERLEILEGKKKGLKKEMAKA

SEQ ID NO: 2665 - DNA, 1299 bp, Candida glabrata CBS 138
  CDS (1)..(1299)
atgactgtattggtgccaaggttgttgccaactgctatgaagttgagaccgctatggtctcaagccagcagaacttttgctacttctatgcgtctgaatgctgctgctttcgacagatcaaagccccacgttaatatcggtactattggtcacgtcgatcacggtaagactacattgacagctgctatcaccaagacattggccaagaacggtggtgctgatttcttggactactcttccattgacaaagctccagaggagagagcccgtggtatcactatctctactgcccatgtcgagtacgagaccgccaagagacattactcccacgtcgactgtccaggtcacgccgactacatcaagaacatgattactggtgctgcccaaatggacggtgctatcatcgttgtcgccgccaccgatggtcaaatgccacaaactagagagcatttgctgttggccagacaagtcggtgttcaacgtatcgttgtctttgtcaacaaggtggacaccatcgatgaccctgaaatgttggaattagtggaaatggaaatgagagaattgttgaacgaatacggttttgacggtgacaatgcccctatcattatgggttccgctttgtgtgccctagaaggtcgtcaacctgaaattggtgagcaagctatcatgaaactattggacgctgttgatgaatacattccaaccccagaaagagacttgaacaagccattcttgatgcctgttgaagacatcttctccatctctggtagaggtaccgtcgtcactggacgtgtcgaaagaggtaacttgaagaagggtgaagaagttgaaattgttggtcacaacactaccccattgaagaccaccgttactggtatcgaaatgttcagaaaggaattggaccaagctatggctggtgacaacgccggtatcctattgagaggtatcagaagagaccaattgaagagaggtatggtcatggccaagccaggtaccgtcaaggctcacaccaagattttggcttctttgtacatcttgtctaaggaagaaggtggtagacattctggtttcggtgaaaactacagacctcagatgtttatcagaaccgcagatgtcactgttgtgatgaagttcccagaatctgtggaagaccactctatgcaagttatgccaggtgacaacgtcgaaatggtctgtgaactagtccacccaacaccaatggaagttggtcaacgtttcaacatcagagaaggtggtaagaccgttggtactggtttgattacccgtatcatcgagtaa

SEQ ID NO: 2666 - protein, 432 aa, Candida glabrata CBS 138
MTVLVPRLLPTAMKLRPLWSQASRTFATSMRLNAAAFDRSKPHVNIGTIGHVDHGKTTLTAAITKTLAKNGGADFLDYSSIDKAPEERARGITISTAHVEYETAKRHYSHVDCPGHADYIKNMITGAAQMDGAIIVVAATDGQMPQTREHLLLARQVGVQRIVVFVNKVDTIDDPEMLELVEMEMRELLNEYGFDGDNAPIIMGSALCALEGRQPEIGEQAIMKLLDAVDEYIPTPERDLNKPFLMPVEDIFSISGRGTVVTGRVERGNLKKGEEVEIVGHNTTPLKTTVTGIEMFRKELDQAMAGDNAGILLRGIRRDQLKRGMVMAKPGTVKAHTKILASLYILSKEEGGRHSGFGENYRPQMFIRTADVTVVMKFPESVEDHSMQVMPGDNVEMVCELVHPTPMEVGQRFNIREGGKTVGTGLITRIIE

SEQ ID NO: 2667 - DNA, 1377 bp, Candida glabrata CBS 138
  CDS (1)..(1377)
atgggtaaggacaagcaacacgttaacgtcgtcgtcattggtcacgtcgattccggtaagtctactaccaccggtcacttgatctacaagtgtggtggtattgacaagagaaccatcgaaaagttcgagaaggaagccgctgaattgggtaagggttctttcaagtacgcttgggttttggacaagttgaaggctgaaagagaaagaggtatcactatcgatatcgctttgtggaagttcgaaactccaaagtaccacgttaccgttatcgatgctccaggtcacagagatttcatcaagaacatgattactggtacttcccaagctgactgtgctatcttgattattgctggtggtgtcggtgaattcgaagctggtatctccaaggacggtcaaaccagagaacacgctctattggctttcaccctaggtgttagacaattgattgtcgctgtcaacaagatggactccgtcaagtgggacgaatccagattcgctgaaatcgtcaaggaaacctccaacttcatcaagaaggtcggttacaacccaaagactgttccattcgtcccaatctctggttggaacggtgacaacatgattgaagccaccaccaacgcttcctggtacaagggttgggaaaaggaaaccaaggctggtgtcgtcaagggtaagaccttgttggaagccattgatgctatcgaaccaccaaccagaccaactgacaagccattgagattgccattgcaagatgtctacaagatcggtggtatcggtacggtgccagtcggtagagtcgaaaccggtgtcatcaagccaggtatggttgttaccttcgccccagctggtgttaccactgaagtcaagtccgttgaaatgcaccacgaacaattgactgaaggtttgccaggtgacaacgttggtttcaacgttaagaacgtttccgttaaggaaatcagaagaggtaacgtctgtggtgactccaagaacgacccaccaaaggctgctgcttctttcaacgctaccgtcattgtcttgaaccacccaggtcaaatctctgctggttactctccagttttggactgtcacaccgcccacattgcttgtaagttcgaagaattgttggaaaagaacgacagaagatccggtaagaagttggaagactctccaaagttcttgaagtccggtgacgctgctttggttaagttcgttccatccaagccaatgtgtgtcgaagctttctccgactacccaccattgggtagattcgctgtcagagacatgagacaaactgtcgctgtcggtgttatcaagtccgttgacaagactgacaaggccggtaaggttaccaaggctgctcaaaaggctgccaagaaataa

SEQ ID NO: 2668 - protein, 458 aa, Candida glabrata CBS 138
MGKDKQHVNVVVIGHVDSGKSTTTGHLIYKCGGIDKRTIEKFEKEAAELGKGSFKYAWVLDKLKAERERGITIDIALWKFETPKYHVTVIDAPGHRDFIKNMITGTSQADCAILIIAGGVGEFEAGISKDGQTREHALLAFTLGVRQLIVAVNKMDSVKWDESRFAEIVKETSNFIKKVGYNPKTVPFVPISGWNGDNMIEATTNASWYKGWEKETKAGVVKGKTLLEAIDAIEPPTRPTDKPLRLPLQDVYKIGGIGTVPVGRVETGVIKPGMVVTFAPAGVTTEVKSVEMHHEQLTEGLPGDNVGFNVKNVSVKEIRRGNVCGDSKNDPPKAAASFNATVIVLNHPGQISAGYSPVLDCHTAHIACKFEELLEKNDRRSGKKLEDSPKFLKSGDAALVKFVPSKPMCVEAFSDYPPLGRFAVRDMRQTVAVGVIKSVDKTDKAGKVTKAAQKAAKK

SEQ ID NO: 2669 - DNA, 1293 bp, Kluyveromyces lactis NRRL Y-1140
  CDS (1)..(1293)
atgtctttcttggcccctagatttttgaccaccaaggttttcagacctatgtctattggtgcaagaaccttttcttcgtcaatccgtgtctctgctgctgcttttgaccgttctaaaccacatttgaacattggtaccatcggccacgtcgatcatggtaagactactttgactgctgccatcaccaagactttggctgaacgtggtggtgctgatttcttggactactcttccattgacaaggctccagaagaaagagcgagaggtatcactatttctactgcacatgttgaatatgaaactgacaagagacattactctcacgtcgactgtccaggtcatgctgattacatcaagaatatgattactggtgctgcccaaatggatggtgctatcattgttgttgctgctacagatggtcaaatgcctcaaaccagagaacatttgttgttggctagacaagttggtgttcaacacatcgttgttttcgttaacaaggttgacactatcgatgaccctgaaatgttagaattggttgaaatggaaatgagagaattattgacccaatacggtttcgatggtgacaacactccagtcatcatgggttctgctttgtgtgctttagaaggtaagcaaccagaaattggtgaacaagcaatcatgaagttattggacgctgttgacgaatacatcccaactccagctcgtgatttggaaaagcctttcttgatgcctgttgaagatatcttctccatctccggtagaggtaccgtcgtaactggtagagttgaacgtggtaacttgaagaagggtgaagaaatcgaaatcgttggtcacaacaccactccattcaagaccactgttactggtattgaaatgttcagaaaggaattggaccaagctatggctggtgataacgctggtgtcttgttgagaggtgtcagaagagaccaattaaagagaggtatggtcttggccaagccaggtactgtcaaggctcacaccaaattcttggcctctttgtatatcttgaccaaggaagaaggtggtagacattccggtttcggtgaaaattacagacctcaaatctacgttagaactgctgatgtcaccgttgttttgaagttcccagaagctgttgaagatcactctatgcaagtcatgccaggtgacaacgtcgaaatggaatgtgaattggttcacccaactcctttggaagctggtcaacgtttcaacatcagagaaggtggtaagactgtcggtactggtctagtcactagaatcttggagtaa

SEQ ID NO: 2670 - protein, 430 aa, Kluyveromyces lactis NRRL Y-1140
MSFLAPRFLTTKVFRPMSIGARTFSSSIRVSAAAFDRSKPHLNIGTIGHVDHGKTTLTAAITKTLAERGGADFLDYSSIDKAPEERARGITISTAHVEYETDKRHYSHVDCPGHADYIKNMITGAAQMDGAIIVVAATDGQMPQTREHLLLARQVGVQHIVVFVNKVDTIDDPEMLELVEMEMRELLTQYGFDGDNTPVIMGSALCALEGKQPEIGEQAIMKLLDAVDEYIPTPARDLEKPFLMPVEDIFSISGRGTVVTGRVERGNLKKGEEIEIVGHNTTPFKTTVTGIEMFRKELDQAMAGDNAGVLLRGVRRDQLKRGMVLAKPGTVKAHTKFLASLYILTKEEGGRHSGFGENYRPQIYVRTADVTVVLKFPEAVEDHSMQVMPGDNVEMECELVHPTPLEAGQRFNIREGGKTVGTGLVTRILE

SEQ ID NO: 2671 - DNA, 1377 bp, Kluyveromyces lactis NRRL Y-1140
  CDS (1)..(1377)
atgggtaaggaaaagtctcacgttaacgttgtcgttattggtcacgtcgattctggtaagtctaccactaccggtcatttgatctacaagtgtggtggtattgacaagagaaccattgaaaagttcgaaaaggaagccgctgaattgggtaagggttctttcaagtacgcttgggttttggacaagttaaaggctgaaagagaaagaggtatcaccatcgatatcgctttgtggaagttcgaaactccaaagtaccaagttaccgttatcgatgctccaggtcacagagatttcatcaagaacatgattactggtacttctcaagctgactgtgctatcttgattattgctggtggtgtcggtgaattcgaagccggtatctccaaggatggtcaaaccagagaacacgctttgttggctttcaccttgggtgttagacaattgattgttgctgttaacaagatggattccgttaagtgggatgaatctcgtttccaagaaattgtcaaggaaacctctaacttcatcaagaaggtcggttacaacccaaagactgttccattcgtcccaatctctggttggaacggtgacaacatgattgaagccaccaccaatgcttcatggtacaagggttgggaaaaggaaaccaagtccggtgtcgtcaagggtaagaccttgttggaagctattgacgctatcgaaccaccatccagaccaactgacaagccattgagattgccattgcaagatgtctacaagattggtggtatcggaactgtgccagtcggtagagtcgaaaccggtgttatcaagccaggtatgattgttaccttcgccccagccggtgttactactgaagttaagtccgtcgaaatgcaccacgaacaattggaagaaggtctaccaggtgacaacgtcggtttcaacgtcaagaacgtttccgttaaggaaatcagaagaggtaacgtctgtggtgactccaagaacgatccaccaaaggctgctgcttctttcaacgccactgttatcgtcttgaaccatccaggtcaaatctctgctggttactctccagttttggattgtcacactgctcacattgcttgtaagttcgacgaattgttggaaaagaacgacagaagatccggtaagaagttggaagactctccaaagttcttgaagtccggtgatgctgctttggttaagttcgttccatctaagccaatgtgtgttgaagccttctctgactacccacctctaggtagattcgctgtcagagacatgagacaaaccgtcgctgtcggtgttatcaagtccgttgacaagactgacaaggccggtaaggtcaccaaggccgctgtcaaggctggtaagaaataa

SEQ ID NO: 2672 - protein, 458 aa, Kluyveromyces lactis NRRL Y-1140
MGKEKSHVNVVVIGHVDSGKSTTTGHLIYKCGGIDKRTIEKFEKEAAELGKGSFKYAWVLDKLKAERERGITIDIALWKFETPKYQVTVIDAPGHRDFIKNMITGTSQADCAILIIAGGVGEFEAGISKDGQTREHALLAFTLGVRQLIVAVNKMDSVKWDESRFQEIVKETSNFIKKVGYNPKTVPFVPISGWNGDNMIEATTNASWYKGWEKETKSGVVKGKTLLEAIDAIEPPSRPTDKPLRLPLQDVYKIGGIGTVPVGRVETGVIKPGMIVTFAPAGVTTEVKSVEMHHEQLEEGLPGDNVGFNVKNVSVKEIRRGNVCGDSKNDPPKAAASFNATVIVLNHPGQISAGYSPVLDCHTAHIACKFDELLEKNDRRSGKKLEDSPKFLKSGDAALVKFVPSKPMCVEAFSDYPPLGRFAVRDMRQTVAVGVIKSVDKTDKAGKVTKAAVKAGKK

SEQ ID NO: 2673 - DNA, 1275 bp, Debaryomyces hansenii CBS767
  CDS (1)..(1275)
atgtttagaaacgttgttaatgctttccgttcaactggacgtacttcattcaaagttcgtccaacttcgattagaacttacgcggcattcgaccgttcgaagccacatgttaacattggtaccatcggacatgtcgatcacggtaagactaccttaacagctgctatcaccaaggttttggccgataagggtggtgcttctttcttagattatcagtctattgatagagctccagaagaaagatccagaggtattaccatttccaccactcatgttgaatacgaaactgagaagagacattatgcccatgttgattgtccaggtcacgctgattacattaagaatatgattactggtgctgctcaaatggatggtgctatcatcgttgttgcagcttctgacggacaaatgccacaaactagagaacatttgttattggccagacaagttggtgttcaacacttagttgttttcgtcaacaaggttgatactattgacgacccagaaatgttggaattagttgaaatggaaatgagagaattattgtcgcaatacggttttgatggtgacaacactccagttgttatgggatctgctttatgtgctttagaaaataagcaaccggaaattggtgtccaagccattgaaaagttgttagacaacgttgatgaatacattccaactccacaacgtgatttggaacaaccattcttgttacctgttgaagatgttttctctatctccggtagaggtactgtcgttaccggtagagttgaaagaggtactttaaagaagggtgaagaaatcgaaattgtcggtaacttcgacaagaccttcaaggccactgttactggtattgaaatgttcaagaaggaattggatgctgctatggctggtgacaatgccggtattttattgagaggtgttaagagagacgaaatcaaccgtggtatggttttagctaagccaggtactgtcacttcccacaagaaggtcttagcctccttgtatattttaagtaaggaagaaggtggtcgtcactcctcattcggtgaaaactacaagccacaattgttccttagaaccaccgatgtcactggtactttaagattcccagaaggtgctgaccactctcaaatggtcatgccaggtgacaacattgaaatggaaatcgaattagtcagaaagaccccaattgaagtcaaccaacgtttcaacatcagagaaggtggtaagaccgttggtactggtttagtcaccagaattcttgagtaa

SEQ ID NO: 2674 - protein, 424 aa, Debaryomyces hansenii CBS767
MFRNVVNAFRSTGRTSFKVRPTSIRTYAAFDRSKPHVNIGTIGHVDHGKTTLTAAITKVLADKGGASFLDYQSIDRAPEERSRGITISTTHVEYETEKRHYAHVDCPGHADYIKNMITGAAQMDGAIIVVAASDGQMPQTREHLLLARQVGVQHLVVFVNKVDTIDDPEMLELVEMEMRELLSQYGFDGDNTPVVMGSALCALENKQPEIGVQAIEKLLDNVDEYIPTPQRDLEQPFLLPVEDVFSISGRGTVVTGRVERGTLKKGEEIEIVGNFDKTFKATVTGIEMFKKELDAAMAGDNAGILLRGVKRDEINRGMVLAKPGTVTSHKKVLASLYILSKEEGGRHSSFGENYKPQLFLRTTDVTGTLRFPEGADHSQMVMPGDNIEMEIELVRKTPIEVNQRFNIREGGKTVGTGLVTRILE

SEQ ID NO: 2675 - DNA, 1377 bp, Debaryomyces hansenii CBS767
  CDS (1)..(1377)
atgggtaaagaaaagactcacgttaatctcgttgtcattggtcacgtcgattccggtaaatctactaccaccggtcacttaatttacaagtgtggtggtatcgataagagaactattgaaaagttcgaaaaggaagccgccgaattaggtaagggttctttcaagtacgcttgggttttagacaagttaaaggctgaaagagaaagaggtatcaccattgatatcgctttatggaagttcgaaactccaaagttccacgtcactattattgatgctccaggtcacagagatttcatcaagaatatgattactggtacttctcaagctgattgtgctattttgattattgctggtggtattggtgaattcgaagccggtatctctaaggatggtcaaaccagagaacacgctttattagcttacaccttaggtgttaagcaattgattgttgctatcaacaagatggactctgtcaaatgggacaagaacagatacgacgaaattgtcaaggaatgttccaacttcgtcaagaaggtcggtttcaacccaaagagtgttccattcgtcccaatctctggttggaacggtgacaacatgattgaagcatctccaaactgtccatggtacaagggttgggaaaaggaaaccaaggctggtaagtcctctggtaagactttgttagaagctattgatgccattgaaccaccaagcagaccaactgataagccattgagattaccattgcaagatgtctacaagattggtggtattggaactgtgccagtcggtagagttgaaaccggtatcatcaaggccggtatggttgtcacctttgccccagctggtgttaccactgaagttaagtccgttgaaatgcatcacgaacaattaaccgaaggtgttccaggtgacaatgttggtttcaacgtcaagaatgtttccgttaaggaaattagaagaggtaacgtctgtggtgactccaagaacgacactccaaagggttgtgattctttcgccgctcaagttattgtcttgaaccacccaggtcaaatctcctctggttactctccagtcttagattgtcacactgctcacattgcctgtaagttcgacaccttaatcgaaaagattgacagaagaactggtaagaagttagaagacaaccctaagttcatcaagtctggtgacgccgctattgtcaagatggttccatctaagccaatgtgtgttgaagctttcactgactacccaccattaggtagattcgctgtcagagatatgagacaaactgttgccgtcggtgttatcaagtctgttgaaaagtctgacaaggctggtaaggttaccaaggctgctcaaaaggctgctaagaaataa

SEQ ID NO: 2676 - protein, 458 aa, Debaryomyces hansenii CBS767
MGKEKTHVNLVVIGHVDSGKSTTTGHLIYKCGGIDKRTIEKFEKEAAELGKGSFKYAWVLDKLKAERERGITIDIALWKFETPKFHVTIIDAPGHRDFIKNMITGTSQADCAILIIAGGIGEFEAGISKDGQTREHALLAYTLGVKQLIVAINKMDSVKWDKNRYDEIVKECSNFVKKVGFNPKSVPFVPISGWNGDNMIEASPNCPWYKGWEKETKAGKSSGKTLLEAIDAIEPPSRPTDKPLRLPLQDVYKIGGIGTVPVGRVETGIIKAGMVVTFAPAGVTTEVKSVEMHHEQLTEGVPGDNVGFNVKNVSVKEIRRGNVCGDSKNDTPKGCDSFAAQVIVLNHPGQISSGYSPVLDCHTAHIACKFDTLIEKIDRRTGKKLEDNPKFIKSGDAAIVKMVPSKPMCVEAFTDYPPLGRFAVRDMRQTVAVGVIKSVEKSDKAGKVTKAAQKAAKK

SEQ ID NO: 2677 - DNA, 1287 bp, Yarrowia lipolytica CLIB122
  CDS (1)..(1287)
atgttcttcaaaacgcttgctagtgtgcgacccgccgcccagcgagtggccacctccgttgccagcaacaaggtcctctttgcccgaggttacgctgcctttgaccgatccaagccccacgtgaacattggaaccattggccacgttgaccacggaaagaccactctgaccgccgctatcaccaaggtgcttgccgagaagggcggcgccaagttcctggactacaattctatcgaccgagctcccgaggagcgagctcgaggtatcaccatttctacctcccacgttgagtacgagactgctaaccgacactacgcccacgttgactgtcccggtcacgccgattacatcaagaacatgatcaccggtgccgcccagatggacggtgctatcattgttgttgctgctggagacggttctaagccccagacccgagagcatctgctgcttgctcgacaggttggtgttcagaacctggttgttttcgttaacaaggttgatcagattgaggataaggagattctggagctcgttgacatggagatgcgagatctgctgacccagtacggatttgatggtgacaacacccccgtcatcatgggctctgctctgtgcgctcttgagggcaagcagaaggacattggtgaagacgccattgtttcccttatggaggccgttgatgagcacatccccacccctaaccgtgatcttgagaagcccttcctgatgcccgttgaggagatttactccatctctggccgaggaaccgtcgttactggtcgagtcgagcgaggaaacctgaagaagggtgaggaaatcgagcttgttggctacaacaagaagcccgtcaaggccgtcgttactggtattgagatgttcaagaaggatctcgactccgccatggctggtgacaatgccggtatcctgctccgaggtatcaagcgagacgagatcaagcgaggtatggtcatcagcaagcctggtaccgtcagcgcccacactaagttccttgcttctctttacgtcatccccaccgaggagggaggccgagccacctcttttggcagcaactaccgaccccagatgtacatccgaacctcttccgtcaccgccatcctgactttccccgagggtaccgacgagtcccagaccgtcaaccccggtgacaacactgagatggttttcgagcttgttcaccctacccctgtggaggtcaaccagcgattcaacatccgagagggtggaaagactgttggtaccggtcttgtgacccgagtcattcagtaa

SEQ ID NO: 2678 - protein, 428 aa, Yarrowia lipolytica CLIB122
MFFKTLASVRPAAQRVATSVASNKVLFARGYAAFDRSKPHVNIGTIGHVDHGKTTLTAAITKVLAEKGGAKFLDYNSIDRAPEERARGITISTSHVEYETANRHYAHVDCPGHADYIKNMITGAAQMDGAIIVVAAGDGSKPQTREHLLLARQVGVQNLVVFVNKVDQIEDKEILELVDMEMRDLLTQYGFDGDNTPVIMGSALCALEGKQKDIGEDAIVSLMEAVDEHIPTPNRDLEKPFLMPVEEIYSISGRGTVVTGRVERGNLKKGEEIELVGYNKKPVKAVVTGIEMFKKDLDSAMAGDNAGILLRGIKRDEIKRGMVISKPGTVSAHTKFLASLYVIPTEEGGRATSFGSNYRPQMYIRTSSVTAILTFPEGTDESQTVNPGDNTEMVFELVHPTPVEVNQRFNIREGGKTVGTGLVTRVIQ

SEQ ID NO: 2679 - DNA, 1389 bp, Anopheles gambiae str. PEST
  CDS (1)..(1389)
atgggaaaggagaagactcatattaacatcgtcgtcatcggtcacgtcgactccggcaagtcgaccaccaccggccatctgatctacaagtgcggcggtatcgacaagcgtacgatcgagaagttcgagaaggaggcgcaggaaatgggcaagggctcgttcaagtacgcctgggtgctggacaagctgaaggcggagcgtgagcgtggtatcaccatcgatatcgcgctgtggaagttcgaaacgtccaagtactacgtgacgatcatcgacgcccctggccatcgcgatttcatcaagaacatgatcaccggcacgtcccaggcggactgtgccgtgctgatcgttgccgccggtaccggcgagttcgaggccggcatctccaagaacggccagacccgcgagcacgccctgctggccttcacgctcggcgtcaagcagctgatcgtcggcgtgaacaagatggactcgaccgatccgccgtaccatgaggcgcgctacgaggaaatcaagaaggaggtgtcgtcgtacatcaagaagatcggctacaacccggcctcggttgcgttcgtgccgatctcgggctggcacggcgacaacatgctcgaaccgtcggacaagatgccgtggttcaagggatgggccgtggagcgcaaggagggcaaggctgagggcaagacgctcatcgaagccctggacaacattctgccgccgtcgcgcccgaccgacaaggcgctgcgtctgccgctgcaggacgtttacaaaatcggcggtatcggtacggtaccggtcggtcgtgttgaaaccggcgttctcaagccaggtatggtggttgtgttcgctccggtcaacatcaccactgaggtaaagtccgtggagatgcaccacgaggctctggccgaggctctgcccggtgacaacgttggcttcaacgtgaagaacgtgtcggtgaaggagctgcgccgtggctacgttgccggtgactccaaggctagcccaccgaagggtgcctccgatttcaccgctcaggtcattgtgctgaatcatccgggccagatctgcaacggctacacgccggtgctcgattgccacaccgctcacattgcgtgcaagtttgcggaaatcaaggagaagtgcgatcgccgttccggcaaggtgaccgaggagaacccgaagtcgatcaagtccggtgacgctgcgatcgtcaacctggtgccaagcaagccgctgtgcgtcgaaagcttccaggagttcccgccgctcggccgcttcgccgtgcgcgacatgcgtcagacggtggccgtcggcgtcatcaagtcggtcaactttaaggaggcttccggtggtaaagtaacgaaggccgccgaaaaggcccagaagaagaaataa

SEQ ID NO: 2680 - protein, 462 aa, Anopheles gambiae str. PEST
MGKEKTHINIVVIGHVDSGKSTTTGHLIYKCGGIDKRTIEKFEKEAQEMGKGSFKYAWVLDKLKAERERGITIDIALWKFETSKYYVTIIDAPGHRDFIKNMITGTSQADCAVLIVAAGTGEFEAGISKNGQTREHALLAFTLGVKQLIVGVNKMDSTDPPYHEARYEEIKKEVSSYIKKIGYNPASVAFVPISGWHGDNMLEPSDKMPWFKGWAVERKEGKAEGKTLIEALDNILPPSRPTDKALRLPLQDVYKIGGIGTVPVGRVETGVLKPGMVVVFAPVNITTEVKSVEMHHEALAEALPGDNVGFNVKNVSVKELRRGYVAGDSKASPPKGASDFTAQVIVLNHPGQICNGYTPVLDCHTAHIACKFAEIKEKCDRRSGKVTEENPKSIKSGDAAIVNLVPSKPLCVESFQEFPPLGRFAVRDMRQTVAVGVIKSVNFKEASGGKVTKAAEKAQKKK

SEQ ID NO: 2681 - DNA, 1386 bp, Aspergillus nidulans FGSC A4
  CDS (1)..(1386)
atgtcgggcctttctagaaccgccaaccttctttttcgcaccaccaagacgtctattctgcgtccccgtggtgtaaaccctgtgcaatatgcgctctccaaagataggcagactgtccgcgcgatggcaactaccttcgagcgcaccaagccccatgtgaacatcggcaccattggacacgtcgatcacggcaagaccacattgaccgctgccatcaccaagcaccaggcctccaaagggcttgcccaattccttgagtatggtgctattgacaaggctcctgaggagcgtaagcgtggtattaccatctctaccgcccacatcgagttctcgaccgacaacaggcactacgctcacgtcgactgtcccggtcacgccgattacattaaaaacatgattactggtgccgccaacatggacggtgctatcgttgttgttgccgcttccgatggacagatgccccagactcgtgagcacttgctgcttgcccgccaagtcggtgtccagaagattgttgttttcgtcaacaaggtcgatgccgtcgatgaccctgagatgttggagctcgttgagctggagatgcgtgagcttcttaacacttacggcttcgagggtgaagagacccctatcatcttcggctccgccttgtgcgctctcgaggaccgccgtcccgaaattggtactgagcaaattgacaaacttctggaggctgttgacacttggatccctactccccagcgtgacttggataagcccttcctgatgtccgtcgaggaagtcttctccattcctggacgtggtaccgtcgcctccggccgtgtcgagcgtggtcttctcaagaaggatagcgaaattgagatccacggtggcggtgaagtccagaagaccaaggtcaccgacatcgagactttcaagaagtcctgtgacgagtcccgtgccggtgacaactccggtctccttctccgtggtacacgccgtgaggatgtcaagcgcggtatggtcatcgctgctcctggctctatcaaggcccacaagaagttcttggtctccatgtatgtcctgaccgaggctgagggtggccgccgcagcggattcggttccaactaccgcccccaggcctacatccgcactgccggtaagtctttctcgaacaatttgaatgccatcttcgggcatcatcgtcgttctaaccaatgtttagacgaggcttgtgatctcaccttccccgatggcgacctaagccgtcgtgtcatgccgggtgacaacgtcgaaatgattttgaaccttaaccgccctgtcgccgccgaggctggtcagcgcttcaacatccgtgagggtggccgtaccgttgctaccggtctgatcacgcgcgtcattgaggagtaa

SEQ ID NO: 2682 - protein, 461 aa, Aspergillus nidulans FGSC A4
MSGLSRTANLLFRTTKTSILRPRGVNPVQYALSKDRQTVRAMATTFERTKPHVNIGTIGHVDHGKTTLTAAITKHQASKGLAQFLEYGAIDKAPEERKRGITISTAHIEFSTDNRHYAHVDCPGHADYIKNMITGAANMDGAIVVVAASDGQMPQTREHLLLARQVGVQKIVVFVNKVDAVDDPEMLELVELEMRELLNTYGFEGEETPIIFGSALCALEDRRPEIGTEQIDKLLEAVDTWIPTPQRDLDKPFLMSVEEVFSIPGRGTVASGRVERGLLKKDSEIEIHGGGEVQKTKVTDIETFKKSCDESRAGDNSGLLLRGTRREDVKRGMVIAAPGSIKAHKKFLVSMYVLTEAEGGRRSGFGSNYRPQAYIRTAGKSFSNNLNAIFGHHRRSNQCLDEACDLTFPDGDLSRRVMPGDNVEMILNLNRPVAAEAGQRFNIREGGRTVATGLITRVIEE

SEQ ID NO: 2683 - DNA, 1377 bp, Candida albicans SC5314
  CDS (1)..(1377): transl_table=12
atgggtaaagaaaaaactcacgttaacgttgttgttattggtcacgtcgattccggtaaatccactaccaccggtcacttaatttacaagtgtggtggtattgataaaagaaccattgaaaagttcgaaaaagaagctgctgaattgggtaaaggttctttcaaatacgcttgggtcttggacaaattgaaggctgaaagagaaagaggtatcaccattgatatcgctttgtggaaattcgaaactccaaaataccacgttaccgtcattgatgctccaggtcacagagatttcatcaagaatatgatcactggtacttctcaagctgattgtgctattttgattattgctggtggtactggtgaattcgaagccggtatttctaaggatggtcaaaccagagaacacgctttgttggcttacactttgggtgtcaaacaattgattgttgctgtcaacaagatggactctgtcaaatgggacaaaaacagatttgaagaaatcatcaaggaaacctccaacttcgtcaagaaggttggttacaacccaaagactgttccattcgttccaatctctggttggaatggtgacaacatgattgaagcatccaccaactgtccatggtacaagggttgggaaaaggaaaccaaatccggtaaagttactggtaagaccttgttagaagctattgacgctattgaaccaccaaccagaccaaccgacaaaccattgagattgccattgcaagatgtttacaagatcggtggtattggtactgtgccagtcggtagagttgaaactggtatcatcaaagccggtatggttgttactttcgccccagctggtgttaccactgaagtcaaatccgttgaaatgcatcacgaacaattggctgaaggtgttccaggtgacaatgttggtttcaacgttaagaacgtttccgttaaagaaattagaagaggtaacgtttgtggtgactccaagaacgatccaccaaagggttgtgactctttcaatgcccaagtcattgttttgaaccatccaggtcaaatctctgctggttactctccagtcttggattgtcacactgcccacattgcttgtaaattcgacactttggttgaaaagattgacagaagaactggtaagaaattggaagaaaatccaaaattcgtcaaatccggtgatgctgctatcgtcaagatggtcccaaccaaaccaatgtgtgttgaagctttcactgactacccaccattaggtagattcgctgtcagagatatgagacaaaccgttgctgttggtgtcatcaaatctgttgaaaaatccgacaaagctggtaaagttaccaaggctgctcaaaaagctgctaagaaataa

SEQ ID NO: 2684 - protein, 458 aa, Candida albicans SC5314
MGKEKTHVNVVVIGHVDSGKSTTTGHLIYKCGGIDKRTIEKFEKEAAELGKGSFKYAWVLDKLKAERERGITIDIALWKFETPKYHVTVIDAPGHRDFIKNMITGTSQADCAILIIAGGTGEFEAGISKDGQTREHALLAYTLGVKQLIVAVNKMDSVKWDKNRFEEIIKETSNFVKKVGYNPKTVPFVPISGWNGDNMIEASTNCPWYKGWEKETKSGKVTGKTLLEAIDAIEPPTRPTDKPLRLPLQDVYKIGGIGTVPVGRVETGIIKAGMVVTFAPAGVTTEVKSVEMHHEQLAEGVPGDNVGFNVKNVSVKEIRRGNVCGDSKNDPPKGCDSFNAQVIVLNHPGQISAGYSPVLDCHTAHIACKFDTLVEKIDRRTGKKLEENPKFVKSGDAAIVKMVPTKPMCVEAFTDYPPLGRFAVRDMRQTVAVGVIKSVEKSDKAGKVTKAAQKAAKK

SEQ ID NO: 2685 - DNA, 1281 bp, Candida albicans SC5314
  CDS (1)..(1281): transl_table=12
atgttaaaaacactaactcaaactttacgcttaactgggaaagctttcccaaaggtccgtccggccttgatcagaacctacgctgccttcgaccgttctaaacctcatgtcaacattggtactattggtcatgttgatcatggtaaaactacattgactgctgctatcaccaaagttttagccgaacaaggtggtgccaacttcttggattatggttctattgatagagctccagaagaaagagctagaggtatcactatttccactgcccacgttgaatacgaaaccaagaacagacactatgcccacgttgattgtccaggacacgctgattatatcaaaaatatgattactggtgccgctcaaatggatggtgctatcattgttgttgctgccactgatggtcaaatgcctcaaaccagagaacatttgttattggccagacaagttggtgttcaagacttggttgtgtttgtcaacaaagtcgatactattgatgaccctgaaatgttggaattagtcgaaatggaaatgagagaattgttatccacctacggttttgatggtgacaacactccagttattatgggatctgctttaatggctttggaagacaagaaaccagaaattggtaaggaagctatcttgaaattgttagatgctgtcgatgaacacattccaactccatcaagagacttggaacaaccatttttgttaccagttgaagacgtgttctccatctccggtagaggaactgttgtcactggtagagttgaaagaggtgttttgaagaagggtgaagaaatcgaaattgttggtggttttgacaaaccttacaagactactgttaccggtattgaaatgttcaaaaaagaattagactctgctatggctggtgacaactgtggtgttttgttaagaggtgttaaaagagatgaaatcaagagaggtatggttttggccaaaccaggtactgctacttctcacaagaagttcttggcttccttgtatattttgacttccgaagaaggtggtcgttccactccatttggtgaaggttacaagcctcaatgcttcttcagaactaacgatgtcactaccacattttcattcccagaaggagaaggtgttgatcattctcaaatgatcatgccaggtgacaacattgaaatggttggtgaattgatcaaatcttgtccattagaagtcaaccaacgtttcaacttgagagaaggtggtaaaactgttggtactggtttgattaccagaatcatcgaataa

SEQ ID NO: 2686 - protein, 426 aa, Candida albicans SC5314
MLKTLTQTLRLTGKAFPKVRPALIRTYAAFDRSKPHVNIGTIGHVDHGKTTLTAAITKVLAEQGGANFLDYGSIDRAPEERARGITISTAHVEYETKNRHYAHVDCPGHADYIKNMITGAAQMDGAIIVVAATDGQMPQTREHLLLARQVGVQDLVVFVNKVDTIDDPEMLELVEMEMRELLSTYGFDGDNTPVIMGSALMALEDKKPEIGKEAILKLLDAVDEHIPTPSRDLEQPFLLPVEDVFSISGRGTVVTGRVERGVLKKGEEIEIVGGFDKPYKTTVTGIEMFKKELDSAMAGDNCGVLLRGVKRDEIKRGMVLAKPGTATSHKKFLASLYILTSEEGGRSTPFGEGYKPQCFFRTNDVTTTFSFPEGEGVDHSQMIMPGDNIEMVGELIKSCPLEVNQRFNLREGGKTVGTGLITRIIE

SEQ ID NO: 2687 - DNA, 1413 bp, Ustilago maydis 521
  CDS (1)..(1413)
atgagcctcctccgaactcaggcttctcgcttcgtcgtcaggccgctggccaccaacaaggtggttgccgccgctcccgctgctgcccgcacctttgttactcgcccttccaccaaccctgcctccaccctcgcaggccgtgctcgagtatgcgctgctccccttccccgcatcgccatcgcctcgcaggtgcgaacttatgctgctgagtcgggcaagttcgaacgtaccaagccgcacatgaacatcggtaccattggccacgtcgatcacggaaagactactctcaccgccgccatcacaaagaccctccacgaggctcagggcaccggcaaattcatcgactatgcctccattgacaaggcgcctgaagagcgcgctcgtggtattaccatctccaccgcccacgtcgagtacgagacgggcaaccgccactacgcccacgtcgactgccccggtcacgccgattacattcgtaacatgattaccggtgccgctcagatggacggtgccatcatcgtcgtctcggcccccgatggccagatgcctcaaacgcgtgagcatcttttgctcgccaagcaagtcggtatcaagaagcttgtcgtcttcatcaacaaggtcgaccagatcgacgacccagagatgctcgagcttgtcgagatggagatgcgcgatcttctctccacctacggctttgacggcgaaaacactcccttcgtctctggctcagcccttgcggcccttgagagccgtgaccccgaagtcggccaacaggctatccttaagctcatggaagagaccgacaagtggctcgaccttccccctcgtgatctcgagaagcctttcctcatgcccgtcgaggacgtcttctctatccccggtcgtggcactgtcgtcaccggtcgtgttgagcgtggtaccatccagaagggtgccgaagttgagatcctcggtctcggcaacaccttcaagaccacccttactggtatcgaaatgttccacaagcagctcgaccagggtatggccggtgacaacatgggtgccttgctgcgtggtgtcaagcgagagcaggtcaagcgtggtcaggtcatggtcatcccaggctctatcaagcctgtcaagaagttccgtgctcaggtctacattctcaagaaggaggagggcggtcgatacacccccttcatgaacaactaccgacctcagctctttatccgaaccgccgatgtcactgtttcgctcactcaccctcccggaaccgaggacgccgacgagaagatggtcatgcccggtgacaatgtcgagctcgacggtgagctcgttcacgacattgcccttgaggagggttcgcgattcaccctccgtgaaggtggtaagaccgtcggtaccggtatcgtgaccaagattcacgcctaa

SEQ ID NO: 2688 - protein, 470 aa, Ustilago maydis 521
MSLLRTQASRFVVRPLATNKVVAAAPAAARTFVTRPSTNPASTLAGRARVCAAPLPRIAIASQVRTYAAESGKFERTKPHMNIGTIGHVDHGKTTLTAAITKTLHEAQGTGKFIDYASIDKAPEERARGITISTAHVEYETGNRHYAHVDCPGHADYIRNMITGAAQMDGAIIVVSAPDGQMPQTREHLLLAKQVGIKKLVVFINKVDQIDDPEMLELVEMEMRDLLSTYGFDGENTPFVSGSALAALESRDPEVGQQAILKLMEETDKWLDLPPRDLEKPFLMPVEDVFSIPGRGTVVTGRVERGTIQKGAEVEILGLGNTFKTTLTGIEMFHKQLDQGMAGDNMGALLRGVKREQVKRGQVMVIPGSIKPVKKFRAQVYILKKEEGGRYTPFMNNYRPQLFIRTADVTVSLTHPPGTEDADEKMVMPGDNVELDGELVHDIALEEGSRFTLREGGKTVGTGIVTKIHA

SEQ ID NO: 2689 - DNA, 1380 bp, Ustilago maydis 521
  CDS (1)..(1380)
atgggtaaagaaaaggctcacgttaacgtcgtcgtcatcggacacgtcgactccggtaagtcgaccaccaccggtcaccttatctacaagtgcggtggtatcgacaagcgtaccgtcgagaagttcgagaaggaggctgccgagctcggtaagggttccttcaagtacgcttgggttcttgacaagctcaaggccgagcgtgaacgtggtatcaccatcgacatcgccctctggaagttcgagacccccaagtacatggttactgtcattgacgcccctggtcaccgtgacttcatcaagaacatgatcactggtacctcgcaggccgactgcgccattctcatcattgccggtggtactggtgagttcgaggctggtatctccaaggacggccagacccgtgagcacgctctcctctcgttcaccctcggtgttcgtcagctcatcgttgccgtcaacaagatggacaccaccaagtactccgaggaccgattcaacgagatcgtcaaggagacctccaacttcatcaagaaggtcggctacaaccccaagaccgtcgccttcgtccccatctccggctggcacggtgacaacatgatcgagcccaccaaggagatgccctggtacaagggatgggagagggagaccaaggccggaaaggtctctggtaagaccctccttgacgccattgacgccatcgagcccccttcgcgccccaccgacaagccccttcgtcttcccctccaggatgtctacaagatcggcggtatcggcactgtgcccgtcggccgtgtcgagactggtatcatcaagggtggtatggttgtcaccttcgccccctcgaacgttaccactgaagtcaagtccgtcgagatgcaccacgagaccctcgccgagggtctgcccggtgacaacgtcggcttcaacgtcaagaacgtttccgtcaaggacattcgccgtggtaacgtctgctctgactccaagaacgaccccgctcaggagaccgagtccttcgtcgcccaggtcatcgtcatgaaccaccctggtcagatcggtaacggttacgcccccgttctcgactgccacaccgcccacattgcttgcaagttcgccgagatcactgagaagatcgaccgccgaactggtaagtcgattgagaacaaccccaagttcatcaagtccggtgacgctgctctcgtcaagatgatccccaccaagcccatgtgcgtcgagtccttctcgacctacccccctcttggccgttttgccgtccgtgacatgcgtcagaccgtcgctgtcggtgtcgtcaagtcgaccacccccgcccagaacaagggtggtaaggtcagcaagtcggccgccaagctcggtgccaagtaa

SEQ ID NO: 2690 - protein, 459 aa, Ustilago maydis 521
MGKEKAHVNVVVIGHVDSGKSTTTGHLIYKCGGIDKRTVEKFEKEAAELGKGSFKYAWVLDKLKAERERGITIDIALWKFETPKYMVTVIDAPGHRDFIKNMITGTSQADCAILIIAGGTGEFEAGISKDGQTREHALLSFTLGVRQLIVAVNKMDTTKYSEDRFNEIVKETSNFIKKVGYNPKTVAFVPISGWHGDNMIEPTKEMPWYKGWERETKAGKVSGKTLLDAIDAIEPPSRPTDKPLRLPLQDVYKIGGIGTVPVGRVETGIIKGGMVVTFAPSNVTTEVKSVEMHHETLAEGLPGDNVGFNVKNVSVKDIRRGNVCSDSKNDPAQETESFVAQVIVMNHPGQIGNGYAPVLDCHTAHIACKFAEITEKIDRRTGKSIENNPKFIKSGDAALVKMIPTKPMCVESFSTYPPLGRFAVRDMRQTVAVGVVKSTTPAQNKGGKVSKSAAKLGAK

SEQ ID NO: 2691 - DNA, 2268 bp, Ustilago maydis 521
  CDS (1)..(2268)
atgaatccaaacgctcctagctttggcggcttcaaccccaacgcctcgggcttcgttcccggcggccagcaacagcagggtcagcagcaacagggcggtactccttatggccagcagggcgcatactaccagcagggtttcggtcagcagcagcagcagcagcaaggcttcaacggcggttacaacagccagtaccagcaataccaacagtaccagcagcagccgtatggtggcggctatgctcagcagggttttaaccaaccgggtttttcgaaccaatacgctcagcagggtttcaacggtctgcctgctcgccccgcagcatcgggttccaaccagcctccagcgcgcccagctcagcccgcagccgctacctctgatgttgcttcccggaagcctgtcagcatctcgatcggcggcggcgccaaacctgccgctcctgcggcttccgatgcaccccgaaagccagtcagcatttccatcggtggaggtgccaagcccgctgctactaccgcagacaagagcgacgccccgcgcaagcctgtcagtatctccattggtggcgccaagaagccagaggctgccaaggaagctgtttccgctgctaccaaagccgagatttcagtacattcggcggccgtcagtgctgtcaaggacaccgaggcaccttcttctaccgctgttactgctccatcctctcgcagtgattcgccagcgccttctgctgctgctgcctcgtcctccgctgccactgcttccaaggccgagtccaaggtggcttcactctcctccaagcctgtcgcaaccgaacgtgctaccacaaatgccgatcagattctcgccgaggcctccaaggtcacggacgaagagacgctcaaggaccttttcggtgagaagagtgacgaactcaagtcgcacttgaacattgtcttcattggccacgtcgatgccggaaagtctaccatgggtggcaacttgctcttcctcaccggcatggtcgacaagcgaaccatggaaaagtacgagcgcgaggccaaggaagctggccgagagtcgtggtacctctcctgggcgctcgactcaacggcgcaagagcgtgagaagggtaagacggtcgaggtgggtcgtgcctacttcgagacgggcaagcgccgctacacgatcctcgatgctccaggacacaagtcgtttgtgcccagtatgatcagtggtgctgcgcaggccgatgtcgccgtcctcgtcatctcggcgcgaaagggcgagttcgagactggttttgaacgtggtggacagacgcgtgagcacgccgttcttgtcaagactgctggtgtccagcgtctcattgtcgtggtcaacaagatggacgagtcgacggtacaatgggaaaagtcgcgctacgaagaaatccaagccaagctcactcccttcctgcgttcggctggcttcaatcccaagaccgatatcacctacattcccgtctcggcgtacgccggccagaatctcaaggaacgtgtgcctaaaagcatctgcgactggtacaatggcccctctctgctcgagttcctcgacaacctcgagctcggcgaccgcaaaatctcggcaccgctcaagatgcccatctcggaaaagtacaatgacatgggtaccgtcgtggtcggcaagctcgaggccggtaagatcaagaagggcgacacgctcctgctcatgcccaacaaggtctcggttgaagcttctgctatcttcaacgagcaggaggaggaagttcctgctgccatctcgggcgacaatgtacgtgtcaagttgaaaggcatcgaccatgaagacgttactgtgggccacgtgttgaccgatcccgtcaacccggtgcatgtagccacacactttgaagctcagctcgccatcctcgagcaccgtaatatcatctgtgccggttacagtgccgtagttcactgccacaccgtgtcacaagaggccaacttggcagcgcttctgcactactacgacaaaaagacgggcaagaagagtcgacgtggtcctcagtttgctaagaagggtatgaagatcatcgcgctcgtcgagcttgctggtccgatctgtgtcgagaggttcaaggactacccgcagctgggccgtttcacgctgcgagacgaaggacgtacggtggctatcggcaaggtgaccaagctcatcacttcggccgacgagttgccggacgttgccaagctcagcgttactgatgctgcttccgctgctgccgccgccaactaa

SEQ ID NO: 2692 - protein, 755 aa, Ustilago maydis 521
MNPNAPSFGGFNPNASGFVPGGQQQQGQQQQGGTPYGQQGAYYQQGFGQQQQQQQGFNGGYNSQYQQYQQYQQQPYGGGYAQQGFNQPGFSNQYAQQGFNGLPARPAASGSNQPPARPAQPAAATSDVASRKPVSISIGGGAKPAAPAASDAPRKPVSISIGGGAKPAATTADKSDAPRKPVSISIGGAKKPEAAKEAVSAATKAEISVHSAAVSAVKDTEAPSSTAVTAPSSRSDSPAPSAAAASSSAATASKAESKVASLSSKPVATERATTNADQILAEASKVTDEETLKDLFGEKSDELKSHLNIVFIGHVDAGKSTMGGNLLFLTGMVDKRTMEKYEREAKEAGRESWYLSWALDSTAQEREKGKTVEVGRAYFETGKRRYTILDAPGHKSFVPSMISGAAQADVAVLVISARKGEFETGFERGGQTREHAVLVKTAGVQRLIVVVNKMDESTVQWEKSRYEEIQAKLTPFLRSAGFNPKTDITYIPVSAYAGQNLKERVPKSICDWYNGPSLLEFLDNLELGDRKISAPLKMPISEKYNDMGTVVVGKLEAGKIKKGDTLLLMPNKVSVEASAIFNEQEEEVPAAISGDNVRVKLKGIDHEDVTVGHVLTDPVNPVHVATHFEAQLAILEHRNIICAGYSAVVHCHTVSQEANLAALLHYYDKKTGKKSRRGPQFAKKGMKIIALVELAGPICVERFKDYPQLGRFTLRDEGRTVAIGKVTKLITSADELPDVAKLSVTDAASAAAAAN

SEQ ID NO: 2693 - DNA, 1395 bp, Cryptococcus neoformans var. neoformans B-3501A
  CDS (1)..(1395)
atgctcagaaacgcccttcagagtcgcctttcctccactctccgaaccgctgagcttagggctgccaggcccgtggctggtccctcggtcctcgctgccaggacattcgtctcaaagccccttccctctcctcgttttcgagctgctgttttgacgccaagacgtctacctactcgtagctacgctgccgaagctggtggtaaattcactagatccaaacctcatttcaacatcggtaccatcggccatgttgaccatggtaaaaccacccttaccgccgccatcactaagcatttggccgagcagggtggcggtaagtttatggactacagccagatcgacaaagctcctgaggagaaagctcgaggtatcaccattagcactgcccatgtcgaatacgagacccccaacaggcactatgcgcatatcgactgtcctggtcatgccgattacatcaaaaacatgattaccggtgccgctcaacttgacggtgctattattgtcgtctctgctactgatggtcaaatgcctcagacccgtgagcatcttcttcttgcccgtcaagttggcatcaagaagttggttgtctttatcaacaaggtcgaccaggtggatgaccccgaaatgctcgagttggttgagatggaaatgagagaattgctaggccagtacggtttcgatggagaggagactcctatcgtcatgggatccgctcttgctgctctcgaaggccgcgaccctgagcgaggcgcgcaaaagattcaggagctcatggagaaggctgatgaatggcttgacgtcccctctcgggacctcgacaagcctttcttgatgtatgttgaggacgtattctctatctctggccgaggcaccgttgttaccgggaaagttgagcgtggtacaatcaccaagggttccgaagtcgaaatcgttggcctcggtgcgcctgtcaaaactattctcactggcattgaaatgttccacaaggagcttgaacgtggtgaagctggtgacaacatgggtgcccttcttcgtggtatcaaacgagagcaggtccgacgaggtcaagttttggtacaacctggctctatcaagagtgttaagaagttcaaggcgcaaatttatatccttaccaaggaggaaggtggtcgttacacccctttcatggctaactaccgacctcagctcttcatccgtactaccgacgtaacttgtgccctcactttcccagagggtaccgagggcgctcatgagaagctcgtcatgcctggtgacaatgttgagatgattggtgaccttgtgcatgacatcgcccttgagcccggatcgcgttttacattgcgagaaggcggtaagactattggcactggtattgtttcagagatctatgaataa

SEQ ID NO: 2694 - protein, 464 aa, Cryptococcus neoformans var. neoformans B-3501A
MLRNALQSRLSSTLRTAELRAARPVAGPSVLAARTFVSKPLPSPRFRAAVLTPRRLPTRSYAAEAGGKFTRSKPHFNIGTIGHVDHGKTTLTAAITKHLAEQGGGKFMDYSQIDKAPEEKARGITISTAHVEYETPNRHYAHIDCPGHADYIKNMITGAAQLDGAIIVVSATDGQMPQTREHLLLARQVGIKKLVVFINKVDQVDDPEMLELVEMEMRELLGQYGFDGEETPIVMGSALAALEGRDPERGAQKIQELMEKADEWLDVPSRDLDKPFLMYVEDVFSISGRGTVVTGKVERGTITKGSEVEIVGLGAPVKTILTGIEMFHKELERGEAGDNMGALLRGIKREQVRRGQVLVQPGSIKSVKKFKAQIYILTKEEGGRYTPFMANYRPQLFIRTTDVTCALTFPEGTEGAHEKLVMPGDNVEMIGDLVHDIALEPGSRFTLREGGKTIGTGIVSEIYE

SEQ ID NO: 2695 - DNA, 2274 bp, Cryptococcus neoformans var. neoformans B-3501A
  CDS (1)..(2274)
atgtccggacagcagccccccagcttcaacccaggcgcattcgagttccgtccaggacaggcacctttcgcccccaggcagcagcagcccttcgacccgtacggccagcagcagggcggatatccccagtacggacagtatggccagcaacagggataccctcaatacggacagtatggcggttaccctcagcagcaaggctaccctgttcccggtgctcccggtgccggacctagggcttaccagcctccacaagccaggaatgtccaaggtttccagcctcccagcttctcttcatcgcctgcgccccctccggacaccaaagctcctgctggaaaacctgtctctttatccattggaggtggtggtgcacccaaagccgctcctagcttgtctatcggtggtggtggtgcgcccaaggctgctcccagcttgagtatcggtggtgcgcccaaggcggcccctagtttgagcattggcggtgctcccaaggccgctcctagcttgagtattggtggtgccaaggcggcccccagtttgagtatcggtggaaagaaagaggagaaaaaggaagagaaggaggcttcctcaaagtcttctcccaaacctgccgctcctacaccaaaacccgccgatgcccctgctgccaagtctgaggccgcctctgcccctgtctctgctgccgagaagaaggctgaaaaggctgttccccttaccagtgacgctcaaggcaaggttgttgctgctgagacttctgctgccagccccgccaagtctggcgctagtactcccgtcgccactgtcagcaccagcaccaccaacttctccaaggtctctgccaagaacgatgctgaagctatctaccgcgagcaaaaccttgctggtgacgctgctttgcgagacctgtacggtgagaacgtcaaggacaccaacatcaagtctcacctaaacatcattttcactggtcacgtcgatgcgggcaagtctactatgggtggtcagttactctacttgactggtgctgttgacaagcgaaccatggaaaagtatgagcaggaggccaaagctgccggtagggagacctggtacctgtcgtgggctttggacagtggtaaggaggagcgagcgaagggtaagaccgttgaggtcggcagggcgtattttgagagtgaaaaacgaaggtataccatcttggacgctcccggtcacaaaacctatgtgcccagtatgatctccggtgccgcccaggccgacgttgctttgcttgtgttgtccgcgcgaaagggcgagtttgagaccggtttcgaacgtgagggtcagaccagagagcacgctatgcttatcaagaacaacggtatcaacaagcttatcgtcgtcgtcaataagatggatgacactactgtgcaatgggacaagggacggtacgatgagattaccactaaaatcactcctttcctcaaggcggttggtttcaaccccaagaccgacatcacttttattcccgtttccgcccagattggtgagaacatgaaggaccgagttgacaaaaagattgctccttggtgggacggcccttcgcttttggagcatcttgacaacatggaaattatggaccgaaacattaatgctcccttcatgcttcccatctctgaaaaatacaacgagttgggtaccatggttatgggcaagattgaatccggccacgtcaagaagggcgacactttgcttatgatgcccaacaagcacactgttgaagtcactggtatcttctctgaacaatcagaggacatggacatggcattctgtggtgacaatatccgaatgcgaatctctggtgtttctgaccgagacattacccccggtttcgtccttacctctgttcaaaagcccgtcaaggctgtcactgccttcaaggcagacattagtttcattgacaccaagaacattatctgtcccggttacagctgtgtcttgcacgtccacacccttgctgaggaagtttccgttacttcattcctccattactacgagaaaaagactaggagaaagtccaagaagccccctcagttcgctaaggctggtatgctggtctctgccctcattgagacttctgcccctatctgtattgaacgattcgaggactataagatgcttggtcgattcactttgcgtgacgaaggtaaaactgttgctattggcaaggtaaccaaacttattgaaaggagcgaggatatgcccgatgttgctgcgctttccttgaaggcggcgtcgtaa

SEQ ID NO: 2696 - protein, 757 aa, Cryptococcus neoformans var. neoformans B-3501A
MSGQQPPSFNPGAFEFRPGQAPFAPRQQQPFDPYGQQQGGYPQYGQYGQQQGYPQYGQYGGYPQQQGYPVPGAPGAGPRAYQPPQARNVQGFQPPSFSSSPAPPPDTKAPAGKPVSLSIGGGGAPKAAPSLSIGGGGAPKAAPSLSIGGAPKAAPSLSIGGAPKAAPSLSIGGAKAAPSLSIGGKKEEKKEEKEASSKSSPKPAAPTPKPADAPAAKSEAASAPVSAAEKKAEKAVPLTSDAQGKVVAAETSAASPAKSGASTPVATVSTSTTNFSKVSAKNDAEAIYREQNLAGDAALRDLYGENVKDTNIKSHLNIIFTGHVDAGKSTMGGQLLYLTGAVDKRTMEKYEQEAKAAGRETWYLSWALDSGKEERAKGKTVEVGRAYFESEKRRYTILDAPGHKTYVPSMISGAAQADVALLVLSARKGEFETGFEREGQTREHAMLIKNNGINKLIVVVNKMDDTTVQWDKGRYDEITTKITPFLKAVGFNPKTDITFIPVSAQIGENMKDRVDKKIAPWWDGPSLLEHLDNMEIMDRNINAPFMLPISEKYNELGTMVMGKIESGHVKKGDTLLMMPNKHTVEVTGIFSEQSEDMDMAFCGDNIRMRISGVSDRDITPGFVLTSVQKPVKAVTAFKADISFIDTKNIICPGYSCVLHVHTLAEEVSVTSFLHYYEKKTRRKSKKPPQFAKAGMLVSALIETSAPICIERFEDYKMLGRFTLRDEGKTVAIGKVTKLIERSEDMPDVAALSLKAAS

SEQ ID NO: 2697 - DNA, 1389 bp, Tribolium castaneum
  CDS (1)..(1389)
atgggtaaagaaaagactcatatcaacatcgtcgttatcggccacgtagattctggtaaatctaccaccactggtcacttgatctacaaatgcggtggcatcgataagcgtacgatcgaaaagttcgagaaggaggcccaggagatgggcaagggttcgttcaaatacgcctgggttttggacaagctcaaagccgagcgtgaacgtggtatcaccatcgatatcgcgctgtggaaattcgaaacttccaaatactacgttactatcattgacgctcccggccacagagatttcatcaagaacatgatcacggggacgtctcaggccgattgcgccgttttgatcgtggccgcaggtaccggtgagttcgaagccggcatctccaagaacggacagacccgcgaacacgcccttctggccttcactctgggagtcaaacaactgatcgttggtgtgaacaagatggactccactgaaccaccatacagcgaagctagatacgaagaaatcaaaaaggaagtgtcttcctacatcaagaagatcggctacaacccagccgctgttgccttcgtacccatctccgggtggcacggggacaacatgttggaaccctccaccaaaatgccctggttcaaggggtggaacatcgaacgcaaggagggcaaagctgagggcaaatgcttgatcgaggcccttgatgccatcctcccgcccacgcgccccaccgacaagcccctccgtcttccgctccaggacgtgtacaagatcggcggtattggaacagtaccagtcggtcgtgtcgaaaccggagtcttgaaacccggaatggtggtcgtgttcgcgcccgctaacatcacgactgaagtcaagtccgtcgaaatgcaccacgaggcgctcccggaggccgtgcccggcgacaacgtcggcttcaacgtgaagaacgtgtccgtgaaggagttgcgtcgtgggtacgtggccggcgactcgaaggccagccccccgaaaggcgcggctgacttcttggcgcaagttatcgtgttgaaccaccctggacaaatttcgaacggttacacccccgttcttgactgtcacaccgctcacatcgcgtgcaagttcgccgaaatcaaagaaaaggtcgaccgtcgttcaggaaagaccactgaagagaatcccaaagctatcaagtctggagacgctgctattgtcactttggtaccgtcgaaaccaatgtgcgtcgaatcattccaggagttcccgccattgggacgtttcgccgtacgtgatatgaggcaaaccgttgccgtaggtgtcatcaagagtgtcaacttcaaggatgctggtgctgggaaagtcacaaaggccgcagaaaaagccgccaagaagaaatga

SEQ ID NO: 2698 - protein, 462 aa, Tribolium castaneum
MGKEKTHINIVVIGHVDSGKSTTTGHLIYKCGGIDKRTIEKFEKEAQEMGKGSFKYAWVLDKLKAERERGITIDIALWKFETSKYYVTIIDAPGHRDFIKNMITGTSQADCAVLIVAAGTGEFEAGISKNGQTREHALLAFTLGVKQLIVGVNKMDSTEPPYSEARYEEIKKEVSSYIKKIGYNPAAVAFVPISGWHGDNMLEPSTKMPWFKGWNIERKEGKAEGKCLIEALDAILPPTRPTDKPLRLPLQDVYKIGGIGTVPVGRVETGVLKPGMVVVFAPANITTEVKSVEMHHEALPEAVPGDNVGFNVKNVSVKELRRGYVAGDSKASPPKGAADFLAQVIVLNHPGQISNGYTPVLDCHTAHIACKFAEIKEKVDRRSGKTTEENPKAIKSGDAAIVTLVPSKPMCVESFQEFPPLGRFAVRDMRQTVAVGVIKSVNFKDAGAGKVTKAAEKAAKKK

SEQ ID NO: 2699 - DNA, 1386 bp, Tribolium castaneum
  CDS (1)..(1386)
atgggtaaggaaaagatccatattaacatcgtcgtgattggtcacgtcgattccggcaagtccacctcgactggtcatttgatttacaaatgcggcggtatcgacaaacgtaccatcgagaaattcgagaaggaggcccaagaaatgggcaagggctctttcaaatacgcctgggttttggacaagctcaaggccgagcgtgagcgtggtatcaccatcgacatcgcgctttggaaattcgaaacctcgaaatactacgttactatcattgacgcccccggccacagggatttcatcaagaacatgatcacgggaacgtcgcaggccgattgtgccgtcttaatcgtagccgcaggcactggcgaattcgaggcagggatttcgaagaacggccaaacgcgcgaacacgcccttttagcgttcactttgggcgtgaaacagctcattgttggagtgaataagatggattcgaccgaaccaccctattccgaggcgcgattcgaggaaatcaagaaggaagtctcgtcgtacatcaagaagatcgggtataatcccgcagctgtggcttttgtccccatttcggggtggcatggggataatatgctcgagccctctgataagatgccctggttcaaggggtggagcgtcgagaggaaggaagggaaggctgaaggaaagacgctgatcgaggcgctggatgcgatcttgccgccgtcaaggcccaccgagaaacctctacgtcttccccttcaggatgtgtacaagattggtggtattggcaccgtgcccgtgggccgagtggagacgggcgtgctgaagcccggcatggtggtgacgttcgcccccgtgggcctgaccactgaagtgaagtcggtggagatgcaccacgaggctctgcaggaggcggtgcccggcgacaacgtcggtttcaacgtgaagaacgtgtccgtaaaggagctgcgtcgcggttacgtggccggagactcgaagaacaatccacccaaaggagctgccgacttcaccgctcaagtcatcgtcctgaaccatcctggccagatcgccaacggatacactccggtattagattgccacactgctcatatcgcttgcaagtttgccgaaatcaaggagaagtgcgatcgccgtacgggcaagacgactgaggagaatccgaagtcgatcaagtctggtgacgccgccatcgtcaacttggtgccgtctaagccactctgcgtcgagtcgttccaagagtttccgcccttgggacgtttcgctgtccgcgatatgcggcaaactgtggccgtcggcgtcatcaagtctgtcaactttaaagatactactgggaaagtaacgaaggccgccgagaaggcacaaaagaagaaataa

SEQ ID NO: 2700 - protein, 461 aa, Tribolium castaneum
MGKEKIHINIVVIGHVDSGKSTSTGHLIYKCGGIDKRTIEKFEKEAQEMGKGSFKYAWVLDKLKAERERGITIDIALWKFETSKYYVTIIDAPGHRDFIKNMITGTSQADCAVLIVAAGTGEFEAGISKNGQTREHALLAFTLGVKQLIVGVNKMDSTEPPYSEARFEEIKKEVSSYIKKIGYNPAAVAFVPISGWHGDNMLEPSDKMPWFKGWSVERKEGKAEGKTLIEALDAILPPSRPTEKPLRLPLQDVYKIGGIGTVPVGRVETGVLKPGMVVTFAPVGLTTEVKSVEMHHEALQEAVPGDNVGFNVKNVSVKELRRGYVAGDSKNNPPKGAADFTAQVIVLNHPGQIANGYTPVLDCHTAHIACKFAEIKEKCDRRTGKTTEENPKSIKSGDAAIVNLVPSKPLCVESFQEFPPLGRFAVRDMRQTVAVGVIKSVNFKDTTGKVTKAAEKAQKKK

SEQ ID NO: 2701 - DNA, 1395 bp, Tribolium castaneum
  CDS (1)..(1395)
atgaccgcttttatcgtcgcacgctcgctcccagtgttaaatcgtgcgattaaacagtttctttcgaatgatttgacgcaccaagcgcgcgtgatccaatgcgttatcccgagcttgacccagagtcggttttacgccgctgagaaaaaagttttcgaccggtcgaagccccactgtaatgtgggcacgatagggcacgtggaccacggcaaaaccactctgactgcggctataactaaagtcctagccgaccaaaagctcgctgaagcgaaaaagtaccaggatattgacaatgcccccgaggagaaggcccgaggcattacgataaatgtggctcatattgagtatcagactgagaacaggcattacgggcatacggactgccccgggcatgccgattatattaaaaatatgatcacgggggctgcgcagatggacgggggcattctcgtggtggcggccaccgatggggtcatgccccaaactagggaacacttgctcctggccaagcaaataggggtggaccacttggtcgtgtttatcaataaagtggacgcggctgataaggagatggtcgagttggtggagatggagattcgggaattgatgacccagatgggctttgacggggataatgtgcccattgttgctgggtcggctctgtgtgcccttgaagggaaaaatcccgagattgggtccgaggcggttcttaaacttttgaaagaagttgataattacattcccactccgacacgggagttggataagccgtttttgctgcccgttgaacatgtctattctattcctggacgggggactgttgtgacggggcgtctggaacgaggggttgtgaaaaaagggaatgattgcgaatttgtggggtacaacaaggttttgaagagtacagtgacgggggtggagatgtttcaccagattttggaggaggcgcaagccggggatcaagtgggggctttggttaggggagtcaaaagggatgatattaagagaggtatggtaatggccaagcccggcactgtgaaaagttacgaccacattgagtctcaagtctatatcttgagcaaggacgagggtggcaggactaagcccttcacttcttacatccaattacagatgttttgtaggacttgggattgcgcaattcaggtcattgtgcccgataaagaaatggtgatgccaggagaggactccaagttgattttgaaattattaagaccgatggtactagaacaaggacaaaggtttactttgagggacggtagccagactcttggtactggggttgtaacaaaagtcttgcccgctctaaaagaaaatgaaagaatacagttgttggaagggaagaaagccagagagaagaggcaggcacagaaataa

SEQ ID NO: 2702 - protein, 464 aa, Tribolium castaneum
MTAFIVARSLPVLNRAIKQFLSNDLTHQARVIQCVIPSLTQSRFYAAEKKVFDRSKPHCNVGTIGHVDHGKTTLTAAITKVLADQKLAEAKKYQDIDNAPEEKARGITINVAHIEYQTENRHYGHTDCPGHADYIKNMITGAAQMDGGILVVAATDGVMPQTREHLLLAKQIGVDHLVVFINKVDAADKEMVELVEMEIRELMTQMGFDGDNVPIVAGSALCALEGKNPEIGSEAVLKLLKEVDNYIPTPTRELDKPFLLPVEHVYSIPGRGTVVTGRLERGVVKKGNDCEFVGYNKVLKSTVTGVEMFHQILEEAQAGDQVGALVRGVKRDDIKRGMVMAKPGTVKSYDHIESQVYILSKDEGGRTKPFTSYIQLQMFCRTWDCAIQVIVPDKEMVMPGEDSKLILKLLRPMVLEQGQRFTLRDGSQTLGTGVVTKVLPALKENERIQLLEGKKAREKRQAQK

SEQ ID NO: 2703 - DNA, 1392 bp, Tribolium castaneum
  CDS (1)..(1392)
atgtccaaattgaaacttctaaagctagtccaagtcttttcgcctcaaaaggcactattttcctcgtcaagtggcacatccttgcaaaacagtttcatattttcgtaccggttatgtcaccgagtgtcacctaacctcaatctgtcacgtccggcgctaaattttcgaaaatattcggatatcgccgacaaaaaacacattaatgtgggtacaattggacatgtcgatcacggaaaaaccaccctaaccgctgccatcactaaaatattgcaaaaagatggtcttgcctcctacgtctcgtacgacgagattgacaaagcccccgaagaaaaggcgcgcggaattacgataaacgcggcccatgtgggctacagcacgaaaaagcgccattacgctcacactgactgtcccgggcatgccgatttcatcaaaaatatgatctcgggggcctcccaaatggatggggctattttagtcgtggcggctaccgacggccaaatgccccaaaccagggaacacctgctgcttgcgaagcaagtcggggtgaagaacattgtggtttttgtgaataaagccgacttggtggataatgaggttttagagttggttgagctcgaaattagggagttgttggaagatttcgggtttgacagtgaaaatgcaccagtgatttgtgggtctgcgttgaaagctttagaaggggaacagtcagaatttggggagaaagcaattaggaaattgttggacactctggatgagtatattccagtgcctgaacgtgattttaagtcaccttttatggtccccattgacaacactttccttgtccccgggagagggacagtcgttgtaggaactattcatagaggaattgtcaagaaaaacgcaagttctgaactcgtgggttttgacacaaaattaaagacaacaatcggagatatacaagttttcaaaaaaagtgtccctgaagcaaaagctggcgaaaacgtcggtcttttgctacgaaacgtgaaactgaaagatatccaaagagggatgctattgtgccaagcaaatagtgttacgttatcgaataggtttgctggaagcatttacttcctagcgaaaaatgaaggcggtagatcgaaacctgtcacgggaaaatacatccaacagttgtttagcaaaacctggagtatatcgtgtagagttgatctagctaaaggtgttgaaatgataatgcccggtgaacatggacaagttgaacttacacttttatcaaaaatggtaatgctgcctgggcaaacctttacaattagggaaaataaagtaacagtagcgactggaattatcactgccactctccctgaagttgtaattacgaaaaatttaggcaaacttgaattgggatga

SEQ ID NO: 2704 - protein, 463 aa, Tribolium castaneum
MSKLKLLKLVQVFSPQKALFSSSSGTSLQNSFIFSYRLCHRVSPNLNLSRPALNFRKYSDIADKKHINVGTIGHVDHGKTTLTAAITKILQKDGLASYVSYDEIDKAPEEKARGITINAAHVGYSTKKRHYAHTDCPGHADFIKNMISGASQMDGAILVVAATDGQMPQTREHLLLAKQVGVKNIVVFVNKADLVDNEVLELVELEIRELLEDFGFDSENAPVICGSALKALEGEQSEFGEKAIRKLLDTLDEYIPVPERDFKSPFMVPIDNTFLVPGRGTVVVGTIHRGIVKKNASSELVGFDTKLKTTIGDIQVFKKSVPEAKAGENVGLLLRNVKLKDIQRGMLLCQANSVTLSNRFAGSIYFLAKNEGGRSKPVTGKYIQQLFSKTWSISCRVDLAKGVEMIMPGEHGQVELTLLSKMVMLPGQTFTIRENKVTVATGIITATLPEVVITKNLGKLELG

SEQ ID NO: 2705 - DNA, 1200 bp, Prochlorococcus marinus str. MIT 9515
  CDS (1)..(1200): transl_table=11
atggctcgcgagaagttcgaaaggaacaaaccacatgtcaacataggtactatcggccacgttgatcatggaaaaacaaccctgactgctgctattaccaatgttttagctaaaaaaggtcaagcacaagctcaagattatggagacattgatggtgctccagaagaaagagaacgtggcataacaattaatacagcccacgttgaatacgaaactgaaggcagacattatgcccacgttgattgtccaggacatgctgattatgtcaaaaacatgatcactggagcggctcaaatggatggtgcaattttagtttgtgctgccacagatggtcctatggcacaaacaaaagaacatatccttttagcaaaacaagttggtgttcctgctttagttgtcgctttaaataaatgtgacatggtagatgacgaagaaatcattgaacttgtggaaatggaaatcagagagctacttgatagttatgatttccccggggatgatatacctatcgtccaggtttcaggcctgaaagctttggaaggagattctaattgggaatctaaaattgaagaattaatgaaagctgttgatgctagtattcctgaaccagaaagagagattgacaagccatttttgatggcaatagaagatgttttctctattacaggtagaggaacagttgctacaggaagaatagaaagaggtaaagtcaaagttggagaagaagtcgaaatagttgggataagagatacaagattgaccactgttactggtgttgagatgttccgtaaacttcttgatgaaggtatggctggagacaatgttggactactcctacgtggtgttcaaaaagaagatattgagagaggaatggtacttgttaagaaaggttcaattactcctcatactaaatttgaaggagaagtttatgttcttaagaaagaagagggagggagacatactcctttctttgctggttatagaccacaattttatataagaaccacagatgtgactggacaaatcaccgcattcacctctgatgatggagctaatgtagaaatggtaatgccaggagacagaataaaaatgactggtgaattaatttgtccagttgctattgaacaaggtatgcgctttgctattcgcgaaggtggtcgtaccattggagctggtgttgtttctaaaattattgaataa

SEQ ID NO: 2706 - protein, 399 aa, Prochlorococcus marinus str. MIT 9515
MAREKFERNKPHVNIGTIGHVDHGKTTLTAAITNVLAKKGQAQAQDYGDIDGAPEERERGITINTAHVEYETEGRHYAHVDCPGHADYVKNMITGAAQMDGAILVCAATDGPMAQTKEHILLAKQVGVPALVVALNKCDMVDDEEIIELVEMEIRELLDSYDFPGDDIPIVQVSGLKALEGDSNWESKIEELMKAVDASIPEPEREIDKPFLMAIEDVFSITGRGTVATGRIERGKVKVGEEVEIVGIRDTRLTTVTGVEMFRKLLDEGMAGDNVGLLLRGVQKEDIERGMVLVKKGSITPHTKFEGEVYVLKKEEGGRHTPFFAGYRPQFYIRTTDVTGQITAFTSDDGANVEMVMPGDRIKMTGELICPVAIEQGMRFAIREGGRTIGAGVVSKIIE

SEQ ID NO: 2707 - DNA, 1233 bp, Chlorokybus atmophyticus
  CDS (1)..(1233): transl_table=11
atggcacgtgaaaaatttgaacgtaaaaaaccgcatgttaatattggtacaattggacatgtcgatcatgggaagactactttaacagcagctattaccatggctttagctgcaagtactggtgcaaaaggtaaaagatatgatgaaattgatgcggcacctgaagaaagagctcgaggtattactataaatactgctcatgtagaatatgagaccgaaaagcgacattatgctcatgtggattgtccgggacatgccgattacgtaaaaaatatgattacaggcgcagcccaaatggatggtgcaatactcgtagtctctggtgctgacggtccaatgcctcaaactaaagaacacattcttttagcaaaacaagttggtgtaccaaatgttgttgtctttttaaataaagaagatcaagtagatgacgccgaattgttagaacttgttgaattagaagtacgtgaaactcttagcgattatgattttccaggggatgaagtcccggtagttgcaggatccgcactactagctttagaatctttaactcagaatccaaaaattgttaaaggtgagaacaaatgggttgataagatttacagtctaatggatcaagttgacgcatatattcctactcctgaacgagatacagataaaccattcttaatggcagtcgaagacgttttttctattactggtaggggtactgtagcaactggtagagttgagcgaggaactgtaaaagtcggcgaagctattgagattgtaggtttaagagaagctccagtaactagtattgttactggtcttgaaatgtttcaaaaaacccttgaagagagtgtggctggagataatgttggaatattactacgtggtatacaaaagaaagatatcgagcgtggtatggttttagctaaaccaggtacaattaaacctcataaatcttttgaagctcaagtttatattcttaataaagaagaaggtggacgtcatactcctttctttcaagggtaccgtcctcaattctatgtacgaactacggatgttacaggcaaaatagagtccttccaagctgatgacggaagtgaaacacaaatggttatgcctggtgaccgcatcaaaatggttgtgcagctaatccaaccaattgcgattgagaaaggaatgcgttttgcgattcgtgaaggtggtcgtactgttggagctggggttgtttttaacatacttgaatag

SEQ ID NO: 2708 - protein, 410 aa, Chlorokybus atmophyticus
MAREKFERKKPHVNIGTIGHVDHGKTTLTAAITMALAASTGAKGKRYDEIDAAPEERARGITINTAHVEYETEKRHYAHVDCPGHADYVKNMITGAAQMDGAILVVSGADGPMPQTKEHILLAKQVGVPNVVVFLNKEDQVDDAELLELVELEVRETLSDYDFPGDEVPVVAGSALLALESLTQNPKIVKGENKWVDKIYSLMDQVDAYIPTPERDTDKPFLMAVEDVFSITGRGTVATGRVERGTVKVGEAIEIVGLREAPVTSIVTGLEMFQKTLEESVAGDNVGILLRGIQKKDIERGMVLAKPGTIKPHKSFEAQVYILNKEEGGRHTPFFQGYRPQFYVRTTDVTGKIESFQADDGSETQMVMPGDRIKMVVQLIQPIAIEKGMRFAIREGGRTVGAGVVFNILE

SEQ ID NO: 2709 - DNA, 1191 bp, Herminiimonas arsenicoxydans
  CDS (1)..(1191): transl_table=11
atggcaaaaggtaaattcgagcggaccaagccgcacgttaacgtcggtacaattggtcacgtcgatcacggcaaaaccacactgacggcagcgattgcgaccgtattgtctaagaaatttggtggcgaagccaagggctacgaccaaatcgataacgcgcctgaagaaaaagcgcgcggcatcaccatcaacacctcgcacgttgaatacgaaaccaccacccgtcactatgcccacgttgactgcccaggccacgccgactatgttaaaaacatgatcaccggcgccgcacagatggacggcgcgatcctggtttgttccgcagctgacggcccaatgccgcaaacacgtgagcacatcctgctggcacgtcaggttggcgttccatacatcatcgtgttcctgaacaagtgcgacatggttgacgatgcagaattgctcgaactggtcgaaatggaagtgcgcgagctcctctccaaatacgaattcccaggcgacgacctgcctatcatcaaaggttcggccaagttggcactcgaaggcgaccaaggtccattgggcgaagccgccattctggccctggctgatgcactcgacagctacattccaacaccagaacgcgcagttgacggcgccttcctgttgccagtggaagacgtgttctcgatctccggtcgcggcaccgttgtaacgggtcgtatcgaacgcggtatcgtcaaagtcggcgaatcgctggaaatcgttggtattcgcgacacccaagtcaccacctgtaccggtgttgaaatgttccgcaaactgcttgaccaaggtcaggcaggcgacaacgtcggcgtattgctgcgtggcaccaagcgtgaagacgtggaacgtggtcaagttctggcgaagccaggttcgatcaagccgcacaaacatttcacgggtgaaatctacgtattgtcgaaagacgaaggcggccgtcacaccccattcttcaacaactaccgtccgcagttctacttccgtactacggacgtgactggttcgatcgagttgccgaaggataaagaaatggtgatgccgggcgacaacgtctcgatcacggtgatgttgatcaacccgattgcgatggaagaaggtctgcgcttcgcgattcgcgaaggcggtcgtaccgtcggtgccggtgttgttgccaagattattgagtaa

SEQ ID NO: 2710 - protein, 396 aa, Herminiimonas arsenicoxydans
MAKGKFERTKPHVNVGTIGHVDHGKTTLTAAIATVLSKKFGGEAKGYDQIDNAPEEKARGITINTSHVEYETTTRHYAHVDCPGHADYVKNMITGAAQMDGAILVCSAADGPMPQTREHILLARQVGVPYIIVFLNKCDMVDDAELLELVEMEVRELLSKYEFPGDDLPIIKGSAKLALEGDQGPLGEAAILALADALDSYIPTPERAVDGAFLLPVEDVFSISGRGTVVTGRIERGIVKVGESLEIVGIRDTQVTTCTGVEMFRKLLDQGQAGDNVGVLLRGTKREDVERGQVLAKPGSIKPHKHFTGEIYVLSKDEGGRHTPFFNNYRPQFYFRTTDVTGSIELPKDKEMVMPGDNVSITVMLINPIAMEEGLRFAIREGGRTVGAGVVAKIIE

SEQ ID NO: 2711 - DNA, 1191 bp, Burkholderia vietnamiensis G4
  CDS (1)..(1191): transl_table=11
atggccaaggaaaagtttgagcggaccaagccgcacgtcaacgttggtacgatcggtcacgttgaccacggcaagacgacgctgacggcagcgatcacgacggtgctgacgaagaagttcggcggcgaagcgaaggcctacgaccagatcgacgcggcaccggaagagaaggcgcgcggcatcacgatcaacacggcacacgtcgagtacgaaacggcgaaccgccactacgcacacgtcgactgcccgggccacgccgactacgtgaagaacatgatcacgggcgcagcgcagatggacggcgcgatcctggtttgctcggcagcagacggcccgatgccgcaaacgcgcgagcacatcctgctggcacgtcaggttggcgttccgtacatcatcgtgttcctgaacaagtgcgacatggtggacgacgctgaactgctcgagctggtcgagatggaagttcgcgaactcctgtcgaagtacgacttcccgggcgacgacacgccgatcgtgaagggttcggccaagctggcgctggaaggcgacacgggcgagctgggcgaagtggcgatcatgaacctggcagacgcactggacacgtacatcccgacgccggagcgtgcggttgacggcgcgttcctgatgccggtggaagacgtgttctcgatctcgggtcgcggcacggtggtgacgggtcgcgtcgagcgcggcatcgtgaaggtcggcgaggaaatcgaaatcgtcggtatcaagccgacggtgaagacgacctgcacgggcgttgaaatgttccgcaagctgctggaccagggtcaggcaggcgacaacgtcggtatcctgctgcgcggcacgaagcgtgaagacgtggagcgcggccaggttctggcgaagccgggttcgatcacgccgcacacgcacttcacggctgaagtgtacgtgctgagcaaggacgaaggcggccgtcacacgccgttcttcaacaactaccgtccgcagttctacttccgtacgacggacgtgacgggctcgatcgagctgccgaaggacaaggaaatggtgatgccgggcgacaacgtgtcgatcacggtgaagctgattgcgccgatcgcgatggaagaaggtctgcgcttcgcaatccgcgaaggcggccgtaccgtcggcgctggcgtcgtcgccaagatcatcgagtaa

SEQ ID NO: 2712 - protein, 396 aa, Burkholderia vietnamiensis G4
MAKEKFERTKPHVNVGTIGHVDHGKTTLTAAITTVLTKKFGGEAKAYDQIDAAPEEKARGITINTAHVEYETANRHYAHVDCPGHADYVKNMITGAAQMDGAILVCSAADGPMPQTREHILLARQVGVPYIIVFLNKCDMVDDAELLELVEMEVRELLSKYDFPGDDTPIVKGSAKLALEGDTGELGEVAIMNLADALDTYIPTPERAVDGAFLMPVEDVFSISGRGTVVTGRVERGIVKVGEEIEIVGIKPTVKTTCTGVEMFRKLLDQGQAGDNVGILLRGTKREDVERGQVLAKPGSITPHTHFTAEVYVLSKDEGGRHTPFFNNYRPQFYFRTTDVTGSIELPKDKEMVMPGDNVSITVKLIAPIAMEEGLRFAIREGGRTVGAGVVAKIIE

SEQ ID NO: 2713 - DNA, 1191 bp, Dichelobacter nodosus VCS1703A
  CDS (1)..(1191): transl_table=11
atgtcaaaagagaaatttgagcgtgcgaaaccccacgtaaacgtaggtaccataggacacgtagaccatggtaaaaccacattaacagcggcgttaacaaaagtaagtgcggcacgatttggaagtgcggcacaagattatgatcaaatcgacggtgcgccggaagaacgtgcgcgcgggattacgatttcaacatcacacgtagaatatgaatccccgcttcgccactatgcacacgtagactgcccaggacacgcggactatgttaaaaacatgattacgggtgcggcacaaatggacggcgcgattttggtttgttcagcagcagacggtccgatgccgcaaacacgtgaacacattctgctttctcgtcaagtaggtgttccttatatcatcgtattcttaaataaagcggatatggttgatgatgcggaattgttagaactggttgaaatggaagttcgtgaattattaaacgaatacgatttcccaggagacgatacaccgattgtcgtgggttctgcattgaaagcgttggaaggcgatacctcagaaattggtattccagcgattgaaaaattggttgacgctttagacgccagcattccggaaccgaaacgcgatattgataaacccttcttgatgccgattgaagacgtattttctatttcaggacgcggtactgtagtaaccggacgggtagaacgcggcgttgttaaagtaggcgatgaattggaaatcgtgggcttgcgtgatactgcaaaaaccacttgtaccggtgtagaaatgttccgtaaattattggatcaaggtcaagctggtgataacgttggtgttttattacgtggaaccaaacgtgaagaagttgaacgcggtcaagttttggcaaaaccgggcaccattactccacatactaaattcgaatcagaagtgtatgttttatctaaggaagaaggcggacgtcatactccattcttcaaaggttaccgtccacaattttatttccgtacaacagacgtcactggtgaatgcgtattgccggaaggcgtggaaatggtaatgccgggagataatgtgaagatgattgtgcaactgattcacccgattgcgatggacgaaggattgcgttttgcgattcgtgaaggcggtcgcaccgtcggagctggggttgttgctaaaattattgagtaa

SEQ ID NO: 2714 - protein, 396 aa, Dichelobacter nodosus VCS1703A
MSKEKFERAKPHVNVGTIGHVDHGKTTLTAALTKVSAARFGSAAQDYDQIDGAPEERARGITISTSHVEYESPLRHYAHVDCPGHADYVKNMITGAAQMDGAILVCSAADGPMPQTREHILLSRQVGVPYIIVFLNKADMVDDAELLELVEMEVRELLNEYDFPGDDTPIVVGSALKALEGDTSEIGIPAIEKLVDALDASIPEPKRDIDKPFLMPIEDVFSISGRGTVVTGRVERGVVKVGDELEIVGLRDTAKTTCTGVEMFRKLLDQGQAGDNVGVLLRGTKREEVERGQVLAKPGTITPHTKFESEVYVLSKEEGGRHTPFFKGYRPQFYFRTTDVTGECVLPEGVEMVMPGDNVKMIVQLIHPIAMDEGLRFAIREGGRTVGAGVVAKIIE

SEQ ID NO: 2715 - DNA, 1221 bp, Thermus thermophilus HB27
  CDS (1)..(1221): transl_table=11
atggcgaagggcgagtttattcggacgaagcctcacgtgaacgtggggacgattgggcacgtggaccacgggaagacgacgctgacggcggcgttgacgtatgtggcggcggcggagaacccgaatgtagaggttaaggactacggggagattgacaaggcgccggaggagcgtgcgcgggggattacgatcaacacggcgcacgtggagtacgagacggcgaagcggcactattcccacgtggattgccctgggcacgcggactacatcaagaacatgatcacgggtgccgcgcagatggacggggcgatccttgtggtgtcggcggcggacgggccgatgccgcagacgcgggagcacattttgctggcgcggcaggtgggggtgccgtacattgtggtgttcatgaacaaggtggacatggtggacgaccccgagttgctggacctggtggagatggaggtgcgggaccttttgaaccagtacgagtttcctggggacgaggttccggtgattcgggggagtgctcttttggcgcttgagcagatgcacaggaacccgaagacgaggcgtggggagaacgagtgggtggacaagatttgggagttgttggacgcgattgacgagtacattcccacgccggtgcgggacgtggacaagccgttcttgatgccggtggaggacgtgtttacgatcacgggtcgtgggacggtggccacgggtcggattgagcggggcaaggtgaaggttggggacgaggtggagattgtgggccttgctccggagacgcggaagacggtggtgacgggtgtggagatgcaccggaagaccctgcaggaggggattgctggggacaatgtgggggtgctcctgcggggtgtgagccgggaggaggtggagcgggggcaggtgctggcgaagcctgggagcattacgccgcacacgaagtttgaggcctcggtgtacgtgttgaagaaggaggagggtggacggcacacggggtttttttcggggtaccgtccgcagttttactttcggacgacggacgtgacgggggtggtgcagttgcctccgggcgtggagatggtgatgcctggggacaacgtgacgtttacggtggagctgatcaagccggtggcgctggaggagggtttgcggtttgccatccgtgagggtgggcggaccgtgggcgccggcgtcgtcaccaagatcctggagtga

SEQ ID NO: 2716 - protein, 406 aa, Thermus thermophilus HB27
MAKGEFIRTKPHVNVGTIGHVDHGKTTLTAALTYVAAAENPNVEVKDYGEIDKAPEERARGITINTAHVEYETAKRHYSHVDCPGHADYIKNMITGAAQMDGAILVVSAADGPMPQTREHILLARQVGVPYIVVFMNKVDMVDDPELLDLVEMEVRDLLNQYEFPGDEVPVIRGSALLALEQMHRNPKTRRGENEWVDKIWELLDAIDEYIPTPVRDVDKPFLMPVEDVFTITGRGTVATGRIERGKVKVGDEVEIVGLAPETRKTVVTGVEMHRKTLQEGIAGDNVGVLLRGVSREEVERGQVLAKPGSITPHTKFEASVYVLKKEEGGRHTGFFSGYRPQFYFRTTDVTGVVQLPPGVEMVMPGDNVTFTVELIKPVALEEGLRFAIREGGRTVGAGVVTKILE

SEQ ID NO: 2717 - DNA, 1176 bp, Bartonella henselae str. Houston-1
  CDS (1)..(1176): transl_table=11
atggcgaagagcaaatttgaacgcacgaaaccgcatgttaatattggtacgattggtcacgttgaccatgggaagacctcgttgacggcagcgattacgaaatattttggtgaatttaaggcctatgaccaaattgatgcagcgcctgaggagcgtgcacgtggaattactatttctacagcgcatgttgaatatgaaacagagaagcggcattatgcacatgttgattgtccaggtcacgcggattatgtgaagaacatgatcacgggcgcggcgcaaatggatggtgcgattttggttgtttcagctgctgatggtccgatgcctcaaacacgtgagcatattcttcttgcccgtcaggttggtgttccagcgattgttgtttttcttaataaggttgatcaggttgatgatgctgagcttttggagcttgttgagcttgaagttcgggagttattgtcgaaatatgattttccaggagacgatattccgatcgttaaaggttctgctttggcagcgcttgaagataaagataaaagcattggtgaagatgcggttcgtcttttgatgagtgaagttgataattatataccgacgcctgaacgtcctgttgatcagccgtttttgatgccaattgaagatgttttttcgatttcgggtcgtggaactgttgtgacgggtcgtgttgagcgtggtgttattaaggttggtgaagaagttgagattatcggcattcgtccaacttctaagacaacagttacaggggttgaaatgttccgcaagcttttagatcaggggcaagcgggtgataatattggagcgctgcttcgtggtattgatcgtgaagggattgagcgtggacaagttttggcgaagcctgcttcggttacacctcatacgagatttaaagcagaggcttacattttgacgaaagatgaaggtggtcgtcatactccatttttcacgaattatcgtcctcagttttatttccgtactacggatgtaacgggaattgttacgcttccagaaggtacagagatggttatgcctggtgataatgttgctatggatgtctctctgattgttccaattgccatggaagaaaaacttcgttttgctatccgtgaaggtggtcgtactgttggtgcaggtatcgtttctaagatcattgagtaa

SEQ ID NO: 2718 - protein, 391 aa, Bartonella henselae str. Houston-1
MAKSKFERTKPHVNIGTIGHVDHGKTSLTAAITKYFGEFKAYDQIDAAPEERARGITISTAHVEYETEKRHYAHVDCPGHADYVKNMITGAAQMDGAILVVSAADGPMPQTREHILLARQVGVPAIVVFLNKVDQVDDAELLELVELEVRELLSKYDFPGDDIPIVKGSALAALEDKDKSIGEDAVRLLMSEVDNYIPTPERPVDQPFLMPIEDVFSISGRGTVVTGRVERGVIKVGEEVEIIGIRPTSKTTVTGVEMFRKLLDQGQAGDNIGALLRGIDREGIERGQVLAKPASVTPHTRFKAEAYILTKDEGGRHTPFFTNYRPQFYFRTTDVTGIVTLPEGTEMVMPGDNVAMDVSLIVPIAMEEKLRFAIREGGRTVGAGIVSKIIE

SEQ ID NO: 2719 - DNA, 1230 bp, Acinetobacter sp. ADP1
  CDS (1)..(1230): transl_table=11
atgagcgatcctcatgagcagtttataaaggaaaaactcatggctaaggctaagtttgaacgtaataaaccacacgtaaacgtgggcacaattggtcacgttgaccatggtaaaacaactcttactgctgcgatcgcaacaatctgtgcgaaaacttacggcggtgaagcgaaagattactcacaaatcgactcagctccagaagaaaaagcacgtggtattaccattaatacttcacacgtagaatacgactctccaattcgtcactacgcgcacgttgactgcccgggccacgccgactacgttaaaaacatgattactggtgctgctcagatggacggcgcgatccttgtttgtgctgcgactgacggtcctatgccacaaactcgtgagcacatccttctttctcgtcaggtaggtgtaccttacatcgttgtattcttgaacaaatgcgaccttgtagacgacgaagagcttcttgagcttgtagaaatggaagttcgtgaacttctttctacttatgacttcccaggcgacgacactccagtgattcgtggttctgcgcttaaagcgttagaaggtgatgctggtcaatatggcgagtcttcagttcttgcgcttgtagaagcacttgacacttacatcccagaaccagagcgcgcaatcgacaaagcattcttgatgccaatcgaagatgtattctcgatttctggtcgtggtacagttgttactggccgtgtagaagctggtatcgtgaaagtgggcgaatcagttgaaatcgtaggtatccgtgatactcaaactacgacagtaactggcgttgaaatgttccgtaaacttcttgacgaaggccgtgcgggcgagaactgtggtgttcttcttcgtggtactaagcgtgaagacgtacaacgtggtcaagtacttgctaaaccaggtacaatcaagccgcacactaaattcgacgcagaagtatacgtactttctaaagaagaaggtggtcgtcatactccattccttaacggttaccgtccacagttctatttccgtaccactgacgtaactggtgcaatccagttgaaagaaggcgttgaaatggtaatgccaggtgacaacgttgaaatgtcagtagaattgatccacccaatcgcaatggacccaggtctacgttttgcgatccgtgaaggtggtcgtactgtaggtgctggtgttgttgcgaaagtaactgcataa

SEQ ID NO: 2720 - protein, 409 aa, Acinetobacter sp. ADP1
MSDPHEQFIKEKLMAKAKFERNKPHVNVGTIGHVDHGKTTLTAAIATICAKTYGGEAKDYSQIDSAPEEKARGITINTSHVEYDSPIRHYAHVDCPGHADYVKNMITGAAQMDGAILVCAATDGPMPQTREHILLSRQVGVPYIVVFLNKCDLVDDEELLELVEMEVRELLSTYDFPGDDTPVIRGSALKALEGDAGQYGESSVLALVEALDTYIPEPERAIDKAFLMPIEDVFSISGRGTVVTGRVEAGIVKVGESVEIVGIRDTQTTTVTGVEMFRKLLDEGRAGENCGVLLRGTKREDVQRGQVLAKPGTIKPHTKFDAEVYVLSKEEGGRHTPFLNGYRPQFYFRTTDVTGAIQLKEGVEMVMPGDNVEMSVELIHPIAMDPGLRFAIREGGRTVGAGVVAKVTA

SEQ ID NO: 2721 - DNA, 1185 bp, Erwinia carotovora subsp. atroseptica SCRI1043
  CDS (1)..(1185): transl_table=11
atgtctaaagaaaaatttgaacgtacaaaaccgcacgttaacgtcggtactatcggccacgttgaccatggtaaaacaacgcttaccgctgcaataactaccgttctggctaaaacctacggtggcagcgcgcgtgcattcgaccagatcgataacgcaccggaagaaaaagcacgtggtatcaccatcaacacctctcacgttgaatacgataccccggctcgccactatgcgcacgttgactgcccaggacacgccgactatgtgaaaaacatgatcaccggtgctgctcagatggatggcgcgatcctggttgttgctgcgactgatggcccaatgcctcagacccgtgagcacatcctgctgggtcgccaggttggcgttcctttcatgatcgtattcatgaacaaatgcgacatggttgatgacgaagagctgctggaactggttgagatggaagtgcgtgagctgctgtctcagtacgatttcccaggcgacgacatcccggttattcgtggttctgcactgaaagcgctggaaggcgaagctgagtgggaagcaaaaatcatcgaactggccggttacctggattcttatattccagaaccagagcgtgcgattgataagccgttcctgctgccaatcgaagatgtattctccatctccggtcgtggtaccgttgttaccggtcgtgtagagcgcggtattgttaaagttggtgaagaagttgaaatcgttggtatcaaagataccgtgaaatcaacctgtaccggcgttgaaatgttccgtaagctgctggacgaaggtcgtgcaggcgagaacgttggtgtcctgctgcgtggtatcaagcgtgaagaaatcgagcgtggtcaggtactggccaaaccgggttcaatcaagccgcacacccagttcgaatcagaagtgtacatcctgagcaaagatgaaggcggccgtcatactccgttcttcaaaggctaccgccctcagttctatttccgtaccactgacgtaacgggtactatcgaactgccagaaggcgtagagatggtaatgccgggcgacaacatcaaaatggttgtaaccctgatccacccaatcgcgatggacgacggtttgcgtttcgcaatccgtgaaggcggccgtactgtaggcgcgggcgttgttgctaaagttatcgcttaa

SEQ ID NO: 2722 - protein, 394 aa, Erwinia carotovora subsp. atroseptica SCRI1043
MSKEKFERTKPHVNVGTIGHVDHGKTTLTAAITTVLAKTYGGSARAFDQIDNAPEEKARGITINTSHVEYDTPARHYAHVDCPGHADYVKNMITGAAQMDGAILVVAATDGPMPQTREHILLGRQVGVPFMIVFMNKCDMVDDEELLELVEMEVRELLSQYDFPGDDIPVIRGSALKALEGEAEWEAKIIELAGYLDSYIPEPERAIDKPFLLPIEDVFSISGRGTVVTGRVERGIVKVGEEVEIVGIKDTVKSTCTGVEMFRKLLDEGRAGENVGVLLRGIKREEIERGQVLAKPGSIKPHTQFESEVYILSKDEGGRHTPFFKGYRPQFYFRTTDVTGTIELPEGVEMVMPGDNIKMVVTLIHPIAMDDGLRFAIREGGRTVGAGVVAKVIA

SEQ ID NO: 2723 - DNA, 1185 bp, Mesoplasma florum L1
  CDS (1)..(1185): transl_table=4
atggcaaaagaagcttttgaccgtagtttacctcacgttaacattggtactattggacacgttgaccacggtaaaactacattaactgctgctattactaaagttttagcagataaaggtggagcagaatttaaagattacgcaaatatcgataacgctccagaagaaagagaacgtggaattacaattaatacttcacacgttgaatataaaacagaaaacagacactacgcacacgtagactgtccaggacacgccgattatgttaaaaacatgattacaggtgctgctcaaatggatggtgggatcttagttgttgctgcaactgatggacctatgcctcaaactcgtgaacacatcttattatcaagacaagttggagttccaaaaattgttgttttcttaaacaaatgtgacatggttgatgatgaagaaatgatcgacttagttgaaatggaagttagagacttattatcagcttacgacttcgatggagacggagcaccagttatccgtggatcagctttaggagctttaaacggagaagctaaatgagttgctgctattgaagaattaatggctgcagttgatgaatacatcccaactccaactcgtgattcagataaaacattcttaatgcctgttgaagacgttttcacaattacaggacgtggaactgttgctacaggacgtgttgaacgtggaacaattaaagttaacgaagaagttgaaatcgttggattagttgaagaagctaaaaaaactgttgttactggattagaaatgttcagaaaattattagattttgctgaagctggagacaacgttggagcattactacgtggtgttgatagagaaagtattgaacgtggacaagttttagctaaacctggaactattaaacctcatactaaattacaagcatcagtttatgctttaactactgaagaaggtggacgtcaaaaaccattctttaacaaataccgtcctcaattctacttccgtacaactgatgttactggtgaagtaatcttacctgcaggaacagacatggttatgcctggagataacgttgaaatgacagttgaattaattaaaccaattgccgttgaagatggaacaaaattctcaatccgtgaaggtggaagaactattggtgctggaacagttatttcagttcaataa

SEQ ID NO: 2724 - protein, 394 aa, Mesoplasma florum L1
MAKEAFDRSLPHVNIGTIGHVDHGKTTLTAAITKVLADKGGAEFKDYANIDNAPEERERGITINTSHVEYKTENRHYAHVDCPGHADYVKNMITGAAQMDGGILVVAATDGPMPQTREHILLSRQVGVPKIVVFLNKCDMVDDEEMIDLVEMEVRDLLSAYDFDGDGAPVIRGSALGALNGEAKWVAAIEELMAAVDEYIPTPTRDSDKTFLMPVEDVFTITGRGTVATGRVERGTIKVNEEVEIVGLVEEAKKTVVTGLEMFRKLLDFAEAGDNVGALLRGVDRESIERGQVLAKPGTIKPHTKLQASVYALTTEEGGRQKPFFNKYRPQFYFRTTDVTGEVILPAGTDMVMPGDNVEMTVELIKPIAVEDGTKFSIREGGRTIGAGTVISVQ

SEQ ID NO: 2725 - DNA, 1185 bp, Mannheimia succiniciproducens MBEL55E
  CDS (1)..(1185): transl_table=11
gtgtctaaagaaaaatttgaacgtacaaaaccgcacgtaaacgtgggtacaatcggccacgttgaccatggtaaaacaactttaacagcggcaatcactaccgtgttatcaaaacactacggtggtgcggctcgcgcattcgaccaaatcgataacgcgccggaagaaaaagcgcgcggtatcaccatcaacacttcacatgttgaatacgatacgccgacccgtcactacgcacacgtagactgcccgggacacgcggactatgttaaaaacatgatcaccggtgcggcacaaatggacggcgcaatcttagtagtagcggcgacagacggcccaatgccgcaaactcgtgagcacatcttattaggtcgccaagtaggcgtaccatacatcatcgtattcttaaacaaatgcgatatggtagatgacgaagagttattagaattagtagaaatggaagttcgcgaacttctttctcaatacgatttcccgggtgacgatacaccaatcatccgtggttcagcgttaaaagcgttagaaggcgaagcgcaatgggaagaaaaaatccttgagttagcaaacgcattggatacatacattccggaaccagaacgtgcgattgaccaaccgttcttattaccgattgaagacgtattctcaatctcaggtcgtggtacggtagtaacgggtcgtgtagagcgcggtatcatccgtacgggtgatgaagttgaaatcgttggtatcaaagaaacggcgaaaacaacggtaacaggtgttgaaatgttccgtaaattactcgacgaaggtcgtgcgggtgaaaacatcggtgcattattacgcggtactaaacgtgaagaaatcgaacgtggtcaagtattagcgaaaccgggttcaatcacaccacacacagacttcgaatcagaagtttacgtattatcaaaagaagaaggcggtcgtcatactccgttcttcaaaggctaccgtccacaattctacttccgtacaacggacgtaacaggtacaatcgaattacctgaaggcgtggaaatggtaatgcctggcgataacatcaaaatgacagtaagcttaatccacccgattgcgatggaccaaggtttacgtttcgcaatccgtgaaggcggccgtacagtaggtgcgggtgttgttgcgaaaatcatcaaataa

SEQ ID NO: 2726 - protein, 394 aa, Mannheimia succiniciproducens MBEL55E
MSKEKFERTKPHVNVGTIGHVDHGKTTLTAAITTVLSKHYGGAARAFDQIDNAPEEKARGITINTSHVEYDTPTRHYAHVDCPGHADYVKNMITGAAQMDGAILVVAATDGPMPQTREHILLGRQVGVPYIIVFLNKCDMVDDEELLELVEMEVRELLSQYDFPGDDTPIIRGSALKALEGEAQWEEKILELANALDTYIPEPERAIDQPFLLPIEDVFSISGRGTVVTGRVERGIIRTGDEVEIVGIKETAKTTVTGVEMFRKLLDEGRAGENIGALLRGTKREEIERGQVLAKPGSITPHTDFESEVYVLSKEEGGRHTPFFKGYRPQFYFRTTDVTGTIELPEGVEMVMPGDNIKMTVSLIHPIAMDQGLRFAIREGGRTVGAGVVAKIIK

SEQ ID NO: 2727 - DNA, 1191 bp, Bacillus licheniformis ATCC 14580
  CDS (1)..(1191): transl_table=11
atggctaaagaaaaattcgaccgttccaaatcacatgccaacattggtacaattggacacgttgaccatggtaaaactacattaacagctgctatcactactgtgcttcataagaaatctggtaaaggtactgctatggcatacgaccaaatcgacggtgctccagaagagcgcgagcgcggtatcacaatttctactgcacacgttgagtacgaaactgacaaccgtcactatgcacacgttgactgcccaggacacgctgactatgttaaaaacatgatcactggtgctgcgcaaatggacggtgcgatccttgttgtttctgctgctgacggcccaatgccacaaactcgtgagcacatccttctttctcgtaacgtaggtgtgccttacatcgtagtattcttgaacaaatgcgacatggtagacgacgaagagcttcttgagctagttgaaatggaagttcgcgatcttctttctgagtatgagttccctggtgacgatgtaccagttatcaaaggttctgctcttaaagctcttgaaggagatgctcagtacgaagaaaaaatctttgaactgatggctgctgttgacgagtacatcccaactccagagcgtgaaactgacaagccattcatgatgcctgttgaggacgtattctcaatcacaggtcgtggaacagttgctactggacgcgtagagcgcggacaagttaaagtcggtgacgaagttgaaatcatcggtcttcaagaagaaaacaagaaaacaactgttacaggtgttgaaatgttccgcaagcttcttgactatgcagaagctggagacaacatcggtgcacttcttcgcggtgtatctcgtgaagaaatccaacgcggtcaagtacttgctcaaccaggtacaatcactccgcacaaaaaattcaaagctgaagtttacgttctttctaaagaagagggtggacgtcacactccattcttctctaactaccgccctcagttctacttccgtacaactgacgtaactggtatcattcagcttccagaaggcgtagaaatggttatgcctggagacaacatcgaaatgactgttgaattgatttcaacaatcgcgatcgaagacggaactcgcttctctatccgtgaaggcggacgtacagttggttctggcgttgtttcttcaatcatcgaataa

SEQ ID NO: 2728 - protein, 396 aa, Bacillus licheniformis ATCC 14580
MAKEKFDRSKSHANIGTIGHVDHGKTTLTAAITTVLHKKSGKGTAMAYDQIDGAPEERERGITISTAHVEYETDNRHYAHVDCPGHADYVKNMITGAAQMDGAILVVSAADGPMPQTREHILLSRNVGVPYIVVFLNKCDMVDDEELLELVEMEVRDLLSEYEFPGDDVPVIKGSALKALEGDAQYEEKIFELMAAVDEYIPTPERETDKPFMMPVEDVFSITGRGTVATGRVERGQVKVGDEVEIIGLQEENKKTTVTGVEMFRKLLDYAEAGDNIGALLRGVSREEIQRGQVLAQPGTITPHKKFKAEVYVLSKEEGGRHTPFFSNYRPQFYFRTTDVTGIIQLPEGVEMVMPGDNIEMTVELISTIAIEDGTRFSIREGGRTVGSGVVSSIIE

SEQ ID NO: 2729 - DNA, 1191 bp, Legionella pneumophila subsp. pneumophila str. Philadelphia 1
  CDS (1)..(1191): transl_table=11
atggcgaaggaaaaatttgaacgtaagaagccgcacgtaaacgtgggcacgattggtcacgtagaccatggtaagacgacattgacagcagctattacaacgattatggcgaagaaatatggtggtacagcgaaggcgtacgatcaaattgatgctgcgccagaagaaagagagcgtgggattactatttctacagcacatgttgaatacgaatcagcgagcagacattatgcacacgtagactgcccgggacatgctgactatgttaagaacatgattactggtgctgcgcaaatggacggagcgatactggttgtatcagcagctgatggtcctatgccacaaacgagggaacacattctattgtctcgccaggtaggtgttccatatattgttgtgttcatgaacaaagcggatatggttgatgaccctgagttattagagttagtggaaatggaagtgcgagatttattaagcagttacgatttcccaggggatgacatacctattgttgttggttcagctttgaaagcattggaaggtgaagacagtgatataggtgttaaggctattgagaaattggttgaaacaatggattcatacattcctgagccagttagaaacatagacaagccatttttgttgccgattgaagacgtattttcaatttctggacgcggaacagtggtaactggtcgtgtagagagtggaattgttaaagttggtgaggaagttgaaattgttggaataagagacacccaaaagacgacttgtacgggtgttgagatgttccgtaaattacttgatgaaggtcgagctggtgataacgttggtgtgttattacgaggtacgaagcgagatgaagtggagcgtggacaggtattggcgaagccaggaaccatcaagccacacaccaagtttgaagcagaagtgtatgtattatccaaggaagaaggcggacgtcacactccattctttaatggataccgtccacaattctatttcagaaccactgacgtgacaggtacttgtgacttgccatcaggagttgaaatggtaatgcctggagataatgtgcaattagttgttagcttgcatgctccgattgcgatggatgaaggtttaagattcgcaattagagagggtggccgaactgttggcgccggtgtagtcgctaaaataatcgagtaa

SEQ ID NO: 2730 - protein, 396 aa, Legionella pneumophila subsp. pneumophila str. Philadelphia 1
MAKEKFERKKPHVNVGTIGHVDHGKTTLTAAITTIMAKKYGGTAKAYDQIDAAPEERERGITISTAHVEYESASRHYAHVDCPGHADYVKNMITGAAQMDGAILVVSAADGPMPQTREHILLSRQVGVPYIVVFMNKADMVDDPELLELVEMEVRDLLSSYDFPGDDIPIVVGSALKALEGEDSDIGVKAIEKLVETMDSYIPEPVRNIDKPFLLPIEDVFSISGRGTVVTGRVESGIVKVGEEVEIVGIRDTQKTTCTGVEMFRKLLDEGRAGDNVGVLLRGTKRDEVERGQVLAKPGTIKPHTKFEAEVYVLSKEEGGRHTPFFNGYRPQFYFRTTDVTGTCDLPSGVEMVMPGDNVQLVVSLHAPIAMDEGLRFAIREGGRTVGAGVVAKIIE

SEQ ID NO: 2731 - DNA, 1191 bp, Methylococcus capsulatus str. Bath
  CDS (1)..(1191): transl_table=11
gtgtccaaagagaaatttacgcgcacgaaaccgcatgtgaatgtgggaacgataggtcacgtggatcatgggaagacgacgctgacggcggccctgaccaagtgcatggcggcgaagtttgggggtgaattcaaggcctacgaccagatcgacgcggcgccggaagagcgtgcgcgcggcatcaccatcgccacggctcacgtggaatacgaatcggcggcgcgtcactacgctcacgtcgactgccctgggcatgccgactacgtcaagaacatgatcaccggagcggcccagatggacggtgccatcctggtcgtgtccgcagccgacggcccgatgccgcagacccgggaacacatcctgctggcgcggcaggtgggtgtgccctacatcgtcgtgttcctgaacaaggccgacatggtggacgatcccgagctgctcgaactggtggagatggaggtgcgtgaactgctctccaagtacgatttcccgggggacgacatcccgatcatcaagggctcggcgctgaaggcgctggaaggcgatggcagcgaaatcggcgtgccggcggtggaagcgctggtgcaggcgctggacgactacattcccgagcccgagcgggcgatcgaccggccgttcctcatgccgatcgaagacgtgttctcgatatccgggcgcggcaccgtggtcaccgggcgggtcgagcgcgggatcatcaaggtgggagaggaaatcgagatcgtcggcatccgtccgacggccaagaccacctgcaccggcgtggaaatgttccggaagctgctggatcagggacaggccggcgacaacatcggcgtgctgttgcgcggcaccaagcgggaagacgtcgagcgcgggcaggtgctggccaagcccggcagcatcaccccgcacacgcacttcgaagccgagatctacgttctgtccaaggaagaaggagggcgtcacacgccgttcttcaacggctaccggccgcagttctactttcggaccactgatgtcaccggcgcggtgacgctgccggaaggggtcgagatggtcatgccgggtgacaacgtcaagatcgaagtgaagctgatcgcgccgattgcaatggacgaaggcttgcggtttgccgtgcgcgagggcggtcgtaccgtcggcgcaggcgttgtctccaagatcatcgagtga

SEQ ID NO: 2732 - protein, 396 aa, Methylococcus capsulatus str. Bath
MSKEKFTRTKPHVNVGTIGHVDHGKTTLTAALTKCMAAKFGGEFKAYDQIDAAPEERARGITIATAHVEYESAARHYAHVDCPGHADYVKNMITGAAQMDGAILVVSAADGPMPQTREHILLARQVGVPYIVVFLNKADMVDDPELLELVEMEVRELLSKYDFPGDDIPIIKGSALKALEGDGSEIGVPAVEALVQALDDYIPEPERAIDRPFLMPIEDVFSISGRGTVVTGRVERGIIKVGEEIEIVGIRPTAKTTCTGVEMFRKLLDQGQAGDNIGVLLRGTKREDVERGQVLAKPGSITPHTHFEAEIYVLSKEEGGRHTPFFNGYRPQFYFRTTDVTGAVTLPEGVEMVMPGDNVKIEVKLIAPIAMDEGLRFAVREGGRTVGAGVVSKIIE

SEQ ID NO: 2733 - DNA, 1191 bp, Azoarcus sp. EbN1
  CDS (1)..(1191): transl_table=11
atggcgaaaggcaagtttgagcggacgaaaccgcacgtaaacgtcgggacgatcggtcacgtcgaccacggcaagaccaccctgacggcggcgatcacgacgatcctgtcgaagaagttcggcggcgaggcgaaagcctacgaccagatcgacgcggcgcccgaagagaaagcgcgcggcatcacgatcaacaccgctcacgtcgagtacgagacggccaaccgtcactacgcgcacgtcgactgcccgggtcacgccgactacgtgaagaacatgatcaccggtgccgcgcagatggacggcgcgatcctggtgtgctcggctgccgacggcccgatgccgcagacgcgcgagcacatcctgctcgcgcgccaggtcggcgtgccgtacatcatcgtgttcctgaacaagtgcgacatggtcgacgacgaagagctcttggagctcgtcgagatggaagtgcgcgagctgctgtcgaagtacgacttcccgggcgacgatgtgccgatcatcaagggctcggcgctcaaggcgctcgaaggcgaccagagcgacatcggcgagccggcgatcttccgcctggccgaagcgctcgacagctacatcccgactccggagcgcgcgatcgaccgcccgttcctgctgccgatcgaagacgtgttctcgatctcgggccgcggcacggtggtgaccggccgcgtcgagcgcggcatcgtcaaggtcggcgaggaagtcgagatcgtcggcatcaaggcgacggtcaagaccacctgcaccggcgtcgagatgttccgcaagctgctcgaccagggccaggcgggcgacaacgtcggcgtgctgctgcgcggcaccaagcgcgaggacgtcgagcgcggccaggtgctgtgcaagcccggttcgatcaagccgcacacgcatttcaccggtgaagtgtacgtgctgtcgaaggaagaaggcgggcgccacacgccgttcttcaacaactatcgtccgcagttctacttccgcacgaccgacgtgaccggttcgatcgagctgcccgaaggcaccgagatggtcatgccgggcgacaacgtgtcgatcaccgtcaagctgatggcgccgatcgcgatggaagaaggcctgcggttcgcgatccgcgaaggcggtcgtaccgtcggcgccggggtcgtcgccaagatcatcgagtaa

SEQ ID NO: 2734 - protein, 396 aa, Azoarcus sp. EbN1
MAKGKFERTKPHVNVGTIGHVDHGKTTLTAAITTILSKKFGGEAKAYDQIDAAPEEKARGITINTAHVEYETANRHYAHVDCPGHADYVKNMITGAAQMDGAILVCSAADGPMPQTREHILLARQVGVPYIIVFLNKCDMVDDEELLELVEMEVRELLSKYDFPGDDVPIIKGSALKALEGDQSDIGEPAIFRLAEALDSYIPTPERAIDRPFLLPIEDVFSISGRGTVVTGRVERGIVKVGEEVEIVGIKATVKTTCTGVEMFRKLLDQGQAGDNVGVLLRGTKREDVERGQVLCKPGSIKPHTHFTGEVYVLSKEEGGRHTPFFNNYRPQFYFRTTDVTGSIELPEGTEMVMPGDNVSITVKLMAPIAMEEGLRFAIREGGRTVGAGVVAKIIE

SEQ ID NO: 2735 - DNA, 1194 bp, Pseudomonas syringae pv. syringae B728a
  CDS (1)..(1194): transl_table=11
gtggctaaagaaaaatttgatcgttccctcccgcacgtcaacgttggcaccattggtcacgttgaccatggtaaaaccacgctgaccgctgctctgactcgcgtctgctccgaagttttcggttcggctgctgttgaattcgacaagatcgacagcgcaccggaagaaaaggctcgtggtattaccatcaacaccgcgcacgtcgaatacaaatcgttgatccgtcactatgctcacgttgactgcccaggtcacgctgactacgtgaagaacatgatcactggtgctgcccagatggacggcgcgattctggtttgttcggccgctgatggtccgatgccacaaacccgtgagcacatcctgctgtcccgtcaggttggcgttccgtacatcgtggtcttcctgaacaaggctgacctggtagacgacgctgagctgctggaactggtcgagatggaagtgcgcgatctgctgagcacttacgacttcccaggcgacgacactccgatcatcatcggttctgctcgtatggctctggaaggtaaagacgacaacgaaatgggcaccactgccgttcgtaaactggttgaaacactggactcctacatcccagaaccagttcgtgttaccgacaagccgttcctgatgccgatcgaagacgtattctcgatctccggtcgcggtactgttgtgactggtcgtattgagcgcggtatcgtcaaggttcaggatccactggaaatcgttggtctgcgtgacactaccgtcaccacctgcaccggtgttgaaatgttccgcaaactgctcgacgaaggtcgtgctggcgagaactgcggcgttctgctgcgcggtaccaagcgtgacgacgttgagcgtggccaggttctggtcaagccaggcagcgtcaagccgcacactcagttcgaagctgaaatctacgttctgagcaaagaagaaggcggtcgtcacactccgttcttcaaaggctaccgtccacagttctacttccgtactaccgacgtaactggtagctgcgaactgccggaaggcgtagaaatggttatgccaggtgataacgttaaagtttccgttaccctgatcaagccaatcgcaatggaagatggtctgcgtttcgcaatccgtgaaggcggtcgtaccgtcggcgctggcgtcgtagccaaaatcatcgcttaa

SEQ ID NO: 2736 - protein, 397 aa, Pseudomonas syringae pv. syringae B728a
MAKEKFDRSLPHVNVGTIGHVDHGKTTLTAALTRVCSEVFGSAAVEFDKIDSAPEEKARGITINTAHVEYKSLIRHYAHVDCPGHADYVKNMITGAAQMDGAILVCSAADGPMPQTREHILLSRQVGVPYIVVFLNKADLVDDAELLELVEMEVRDLLSTYDFPGDDTPIIIGSARMALEGKDDNEMGTTAVRKLVETLDSYIPEPVRVTDKPFLMPIEDVFSISGRGTVVTGRIERGIVKVQDPLEIVGLRDTTVTTCTGVEMFRKLLDEGRAGENCGVLLRGTKRDDVERGQVLVKPGSVKPHTQFEAEIYVLSKEEGGRHTPFFKGYRPQFYFRTTDVTGSCELPEGVEMVMPGDNVKVSVTLIKPIAMEDGLRFAIREGGRTVGAGVVAKIIA

SEQ ID NO: 2737 - DNA, 1194 bp, Pseudomonas fluorescens Pf-5
  CDS (1)..(1194): transl_table=11
atggctaaggaaaagttcgaacgtaataagccgcacgttaacgtgggtactatcggtcacgttgaccacggtaaaaccactctgactgctgctctgactcgcgtttgctccgaagttttcggttcggctcgtgttgacttcgacaagatcgacagcgccccagaagaaaaagctcgtggtatcaccatcaacactgcgcacgtagagtacgactcgaacattcgtcactacgcgcacgttgactgcccaggtcacgccgactacgtcaaaaacatgatcactggtgctgcccagatggacggcgcgatcctggtttgctcggctgccgatggtccgatgccacaaactcgtgagcacatcctgctgtcccgtcaggtaggcgttccgtacatcgttgtcttcctgaacaaggctgacatggttgacgacgctgagctgctggaactggttgagatggaagtgcgcgatctgctgagcacttacgacttcccaggtgacgacactccgatcatcatcggttcggctctgatggctctgaacggccaagacgacaacgaaatgggtaccaccgctgttaagcgtctggtagaaactctggatacctacatcccagagccagagcgtgcaatcgacaagccgttcctgatgccaatcgaagacgtattctcgatctccggccgtggcaccgtggtaactggtcgtgttgagcgtggtatcgttcgcatccaggaagaagttgagatcgttggtctgcgcgacactcagaaaactacctgcaccggcgttgaaatgttccgcaagctgctcgacgaaggtcgtgcaggcgagaactgcggcgttctgctgcgtggtaccaagcgtgacgacgttgagcgtggccaggttctggttaagccaggcaccgttaagccgcacaccaagttcaccgctgaagtttacgttctgagcaaggaagaaggcggccgtcatactccgttcttcaaaggctaccgtccacagttctacttccgtactactgacgtgactggtaactgcgaactgccagaaggcgttgaaatggtaatgccaggtgacaacatccagatgactgtcactctgatcaaaaccatcgcgatggaagatggtctgcgtttcgctatccgtgaaggcggtcgtaccgtcggcgctggcgtcgtagccaaggtcatcgaataa

SEQ ID NO: 2738 - protein, 397 aa, Pseudomonas fluorescens Pf-5
MAKEKFERNKPHVNVGTIGHVDHGKTTLTAALTRVCSEVFGSARVDFDKIDSAPEEKARGITINTAHVEYDSNIRHYAHVDCPGHADYVKNMITGAAQMDGAILVCSAADGPMPQTREHILLSRQVGVPYIVVFLNKADMVDDAELLELVEMEVRDLLSTYDFPGDDTPIIIGSALMALNGQDDNEMGTTAVKRLVETLDTYIPEPERAIDKPFLMPIEDVFSISGRGTVVTGRVERGIVRIQEEVEIVGLRDTQKTTCTGVEMFRKLLDEGRAGENCGVLLRGTKRDDVERGQVLVKPGTVKPHTKFTAEVYVLSKEEGGRHTPFFKGYRPQFYFRTTDVTGNCELPEGVEMVMPGDNIQMTVTLIKTIAMEDGLRFAIREGGRTVGAGVVAKVIE

SEQ ID NO: 2739 - DNA, 1191 bp, Psychrobacter arcticus 273-4
  CDS (1)..(1191): transl_table=11
atggcaaaggccaagtttgaacgtctaaaaccacatgttaacgtcggtaccatcggacacgttgaccacggtaaaacaacccttaccgctgctatcgcaacggtagctgctatcacctctggtggcgaagccaaagactacgcgtctattgactcagcaccagaagaaaaagcacgtggcatcaccatcaacacctcacacgtagaatatgacacaccatcacgtcactatgctcacgttgactgcccaggtcacgccgattatgttaaaaacatgattaccggtgcggcacagatggacggcgcaatcctagtcgtatctgcaactgacggccctatgccacaaactcgtgagcacatcctgctttcacgtcaggttggcgtaccgtacatcgttgtattcatgaacaaatgtgatgttgttgatgacgaagaattgttagagctagtagaaatggaagttcgtgaattattgagcgactatgacttcccaggtgatgacactccaatcatccatggttcagcgactgaagccctaaaaggctcacaagaaaaatatggccaaccagctgttgtagaactattaaacgttcttgacacctacatcccagagccagagcgtgacatcgacaaagcattcctaatgccaatcgaagacgtattctcaatctcaggtcgtggtactgtcgtaactggccgtgttgaatcaggtatcgtacgcgttggcgaagaaatcgaaatcgtcggtatccgtgacactcaaaaaaccacctgtactggtgtagagatgttccgtaaactgcttgacgaaggtcgtgcaggcgaaaactgtggcgtactactacgtggtactaagcgtgaagacgtacaacgtggccaagtacttgctaagccaggttctatcactcctcataccaagtttgacgctgaagtatatgtattgtcaaaagaagagggtggtcgtcacacaccattcctaaacggctatcgtccacagttctacttccgtactactgacgtaactggcgcaatccaattacaagacggtactgaaatggtgatgcctggtgataacgttgagatgggcgtagagcttatccacccaatcgctatggacaaaggtcttcgctttgcaattcgtgaaggcggccgtactgtaggcgctggtgttgttgctaacgttcacgtttaa

SEQ ID NO: 2740 - protein, 396 aa, Psychrobacter arcticus 273-4
MAKAKFERLKPHVNVGTIGHVDHGKTTLTAAIATVAAITSGGEAKDYASIDSAPEEKARGITINTSHVEYDTPSRHYAHVDCPGHADYVKNMITGAAQMDGAILVVSATDGPMPQTREHILLSRQVGVPYIVVFMNKCDVVDDEELLELVEMEVRELLSDYDFPGDDTPIIHGSATEALKGSQEKYGQPAVVELLNVLDTYIPEPERDIDKAFLMPIEDVFSISGRGTVVTGRVESGIVRVGEEIEIVGIRDTQKTTCTGVEMFRKLLDEGRAGENCGVLLRGTKREDVQRGQVLAKPGSITPHTKFDAEVYVLSKEEGGRHTPFLNGYRPQFYFRTTDVTGAIQLQDGTEMVMPGDNVEMGVELIHPIAMDKGLRFAIREGGRTVGAGVVANVHV

SEQ ID NO: 2741 - DNA, 1185 bp, Colwellia psychrerythraea 34H
  CDS (1)..(1185): transl_table=11
atggctaaagaaaaatttgaacgtaataaaccgcatgttaacgttggtactatcggtcacgtagatcacggtaaaacaactttaacagctgctatctctgctgtattaactaaagttcacggtggtgaagttaaagatttcgcacaaatcgataacgctcctgaagaacgtgaacgtggtattacaattaatacttctcacatcgaatacgatactgaagcacgtcactatgcacacgtagattgtcctggtcacgccgattatatcaaaaatatgatcactggtgctgcacaaatggatggcgctatcttagtagttgctgctacagatggtcctatgccacaaacacgtgagcacatcttattgtctcgccaagttggtgttcctttcatcatcgttttcatgaacaaatgtgacgttgtagatgatgaagaattattagaattagtagaaatggaagttcgtgaacttctttctgaatatgacttccctggtgatgatttaccagtaattcaaggttcagctttaggcgctcttcaaggcgatgaagcatgggaagcgaaaattatcgaacttgctgatgcacttgatacttacattccagagccagagcgtgcaattgacggtgcattcatcatgcctatcgaagatgtattctcaatctcaggtcgtggtacagttgtaacaggtcgtgttgaacgtggtatcatcaaaattggtgaagaagtagaagttgttggtatccgtgatacacaaaaatcaacttgtacaggtgttgaaatgttccgtaagcttcttgacgaaggtcgtgctggcgagaactgtggtgttcttctacgtggtcttaagcgtgaagatgttgaacgtggtcaagtactttgtgctccaggttcaatcttacctcacactaaattcgaatcagaagtttatgttctttctaaagatgaaggtggtcgtcatactccattctttaaaggataccgtccacagttttacttccgtacaacagatatcacaggtgctgtagagcttcctgaaggtgttgaaatggtaatgcctggtgacaaccttaagtttgttgttgagctaatcaacccagtagcgatggacgaaggtttacgcttcgcaatccgtgaaggtggtcgtactgttggtgctggtgttgtttctaagattatggcttaa

SEQ ID NO: 2742 - protein, 394 aa, Colwellia psychrerythraea 34H
MAKEKFERNKPHVNVGTIGHVDHGKTTLTAAISAVLTKVHGGEVKDFAQIDNAPEERERGITINTSHIEYDTEARHYAHVDCPGHADYIKNMITGAAQMDGAILVVAATDGPMPQTREHILLSRQVGVPFIIVFMNKCDVVDDEELLELVEMEVRELLSEYDFPGDDLPVIQGSALGALQGDEAWEAKIIELADALDTYIPEPERAIDGAFIMPIEDVFSISGRGTVVTGRVERGIIKIGEEVEVVGIRDTQKSTCTGVEMFRKLLDEGRAGENCGVLLRGLKREDVERGQVLCAPGSILPHTKFESEVYVLSKDEGGRHTPFFKGYRPQFYFRTTDITGAVELPEGVEMVMPGDNLKFVVELINPVAMDEGLRFAIREGGRTVGAGVVSKIMA

SEQ ID NO: 2743 - DNA, 1194 bp, Pseudomonas syringae pv. phaseolicola 1448A
  CDS (1)..(1194): transl_table=11
gtggctaaagaaaaatttgatcgttccctcccgcacgtcaacgttggcaccattggtcacgttgaccacggtaaaaccacgctgaccgctgctctgactcgcgtctgctccgaagttttcggttcggctcgtgttgacttcgacaagatcgacagcgcaccggaagaaaaagctcgtggtatcaccatcaacactgcgcacgttgaatacaactcgctgacccgtcactacgctcacgttgactgcccaggtcacgctgactacgtgaagaacatgatcaccggtgctgcccagatggacggcgctatcctggtttgttcggctgctgatggtccgatgccacaaactcgtgagcacatcctgctgtcccgtcaggtaggcgttccgtacatcgtggtcttcctgaacaaggctgacctggtagacgacgctgagctgctggaactggttgagatggaagtgcgcgatctgctgagcacttacgatttcccgggcgacgacactccgatcatcatcggttctgctcgtatggctctggaaggcaaagacgacaacgaaatgggcaccactgccgttcgtaaactggttgaaacactggacagctacattccagagccagttcgtctgaccgacaagccattcctgatgccaatcgaagacgtgttctcgatctccggtcgcggtactgttgtgactggtcgtgttgagcgcggtatcgtcaaggttcaggatccactggaaatcgttggtctgcgtgacactaccgtcaccacctgcaccggtgttgaaatgttccgcaaactgctcgacgaaggtcgtgctggcgagaactgcggcgttctgctgcgtggtaccaagcgtgacgacgttgagcgtggccaggttctggtcaagccaggcaccgtcaagccgcacactcagttcgaagctgaaatctacgttctgagcaaagaagaaggcggtcgtcacactccgttcttcaaaggctaccgtccgcagttctacttccgtactaccgacgtaactggtagctgcgaactgccggaaggcgtagaaatggttatgccaggtgataacgttaaagtttccgttaccctgatcaagccaatcgcaatggaagacggtctgcgtttcgcaatccgtgaaggcggtcgtaccgtcggcgctggcgtcgtggccaaaatcatcgcgtaa

SEQ ID NO: 2744 - protein, 397 aa, Pseudomonas syringae pv. phaseolicola 1448A
MAKEKFDRSLPHVNVGTIGHVDHGKTTLTAALTRVCSEVFGSARVDFDKIDSAPEEKARGITINTAHVEYNSLTRHYAHVDCPGHADYVKNMITGAAQMDGAILVCSAADGPMPQTREHILLSRQVGVPYIVVFLNKADLVDDAELLELVEMEVRDLLSTYDFPGDDTPIIIGSARMALEGKDDNEMGTTAVRKLVETLDSYIPEPVRLTDKPFLMPIEDVFSISGRGTVVTGRVERGIVKVQDPLEIVGLRDTTVTTCTGVEMFRKLLDEGRAGENCGVLLRGTKRDDVERGQVLVKPGTVKPHTQFEAEIYVLSKEEGGRHTPFFKGYRPQFYFRTTDVTGSCELPEGVEMVMPGDNVKVSVTLIKPIAMEDGLRFAIREGGRTVGAGVVAKIIA

SEQ ID NO: 2745 - DNA, 1191 bp, Dechloromonas aromatica RCB
  CDS (1)..(1191): transl_table=11
atggctaaggaaaaattcgcgcgtacgaaaccgcacgtaaacgttggcacgattggtcacgttgaccacggcaagaccacgctgacggctgcgatcacgacggtgctgtccgccaagttcggtggcgctgccaagaaatatgatgaaattgacgctgcgccggaagaaaaggctcgcggtatcacgattaacaccgcccacgtcgaatacgaaaccgccaaccgtcactacgcccacgttgactgcccgggccacgctgactacgtcaagaacatgattaccggtgctgcccagatggacggcgcgatcctggtctgttccgccgctgacggcccgatgccgcaaacccgcgaacacatcctgctggctcgccaggttggtgtgccgtacgttctggtgttcatgaacaagtgcgacatggttgacgacgccgagctgctcgagctggtcgaaatggaactgcgcgagctgctctccaagtacgacttcccgggcgacgacaccccgatcattcacggctccgccctgaaggccctcgaaggcgaccagtccgaaatcggcgaaccgtcgatcttccgtctggccgacgccctggactcctacatccctgatccggagcgtgctatcgatcagccgttcctgatgccggttgaagacgtcttctccatctctggtcgcggtaccgtggtgaccggtcgtgttgagcgcggcatcgtcaaggttggcgaagaaatcgaaatcgttggtatccgcccgaccgtcaagaccatctgtaccggtgttgaaatgttccgcaagctgctcgaccaaggtcaggctggcgacaacattggcgccctgctgcgtggtaccaagcgtgaagacgtcgagcgtggccaggtgctgtgcaagccgggttcggtcaagccgcacacccacttcacctccgaagtgtacatcctgtccaaggatgaaggcggtcgtcacaccccgttcttcaacggctaccgtccgcagttctacttccgcacgacggacgtgactggctccatcgagctgccggaaggcaccgaaatggttatgccgggcgacaacatcgccatgacgatcaagctgattgcgccgatcgccatggaagaaggtctgcgcttcgccatccgtgaaggcggtcgtaccgtcggcgccggcgtcgtcgccaagatcatcgagtaa

SEQ ID NO: 2746 - protein, 396 aa, Dechloromonas aromatica RCB
MAKEKFARTKPHVNVGTIGHVDHGKTTLTAAITTVLSAKFGGAAKKYDEIDAAPEEKARGITINTAHVEYETANRHYAHVDCPGHADYVKNMITGAAQMDGAILVCSAADGPMPQTREHILLARQVGVPYVLVFMNKCDMVDDAELLELVEMELRELLSKYDFPGDDTPIIHGSALKALEGDQSEIGEPSIFRLADALDSYIPDPERAIDQPFLMPVEDVFSISGRGTVVTGRVERGIVKVGEEIEIVGIRPTVKTICTGVEMFRKLLDQGQAGDNIGALLRGTKREDVERGQVLCKPGSVKPHTHFTSEVYILSKDEGGRHTPFFNGYRPQFYFRTTDVTGSIELPEGTEMVMPGDNIAMTIKLIAPIAMEEGLRFAIREGGRTVGAGVVAKIIE

SEQ ID NO: 2747 - DNA, 1194 bp, Thermobifida fusca YX
  CDS (1)..(1194): transl_table=11
gtggcgaaggccaagttcgagcggaccaagccgcacgtaaacatcggcaccatcggtcacatcgaccacggtaaaaccacgctgaccgcggcgattaccaaggttctgcacgacaagtacccggacctcaacccgttcacgcctttcgaggacatcgacaaggccccggaggagcgcgagcgcggtatcaccatctccatctcgcacgtggagtaccagaccgagagccgccactacgcgcacgtggactgccccggtcacgcggactacgtgaagaacatgatcaccggtgccgcccagatggacggcgcgatcctggtggtcgccgctactgacggtccgatgccgcagaccaaggagcacgtgctcctggctcgccaggtcggcgtcccctacattgtcgtggctctcaacaagtccgacatggtggacgacgaggagatcttcgacctcgttgagctcgaggtccgcgagctgctcaacgagtacgagttcccgggcgacgaggtgcccgtgatccgcgtctccgcgctgaaggccctcgagggtgaccccgagtggggcaagaagatcctcgagctgatggaggccgtggaccagaacatccccgagccgcagcgggacatcgacaagccgttcctcatgccgatcgaggacgtgttctcgatcaccggtcgcggtaccgtcgtcaccggccgtatcgagcgcggtgtcatcaacgtcaacgacaccgtcgagatcgtcggcctcaaggacgacaagatcaccaccaccgtcaccggtgtggagatgttccgcaagctgctcgaccagggccaggccggtgacaacgtcggtctgctgctgcgtggtgtcaagcgcgaggaggtggagcgcggtcaggtcgtcatcaagcctggcaccaccaccccgcacaccgagttcgaggcccaggtcgtcatcctctccaaggacgagggtggccgccacacgcccttcttcaacaactaccgcccgcagttctacttccggaccacggacgtcaccggtgtcgttaccctccccgagggcaccgagatggtcatgcccggtgacaacacctcgatgaccgtcaagctgatccagccggtcgcgatggaagagggtctgaagttcgccatccgtgagggtggacggaccgtaggcgcgggtcgcgtcaccaagatcatcaagtag

SEQ ID NO: 2748 - protein, 397 aa, Thermobifida fusca YX
MAKAKFERTKPHVNIGTIGHIDHGKTTLTAAITKVLHDKYPDLNPFTPFEDIDKAPEERERGITISISHVEYQTESRHYAHVDCPGHADYVKNMITGAAQMDGAILVVAATDGPMPQTKEHVLLARQVGVPYIVVALNKSDMVDDEEIFDLVELEVRELLNEYEFPGDEVPVIRVSALKALEGDPEWGKKILELMEAVDQNIPEPQRDIDKPFLMPIEDVFSITGRGTVVTGRIERGVINVNDTVEIVGLKDDKITTTVTGVEMFRKLLDQGQAGDNVGLLLRGVKREEVERGQVVIKPGTTTPHTEFEAQVVILSKDEGGRHTPFFNNYRPQFYFRTTDVTGVVTLPEGTEMVMPGDNTSMTVKLIQPVAMEEGLKFAIREGGRTVGAGRVTKIIK

SEQ ID NO: 2749 - DNA, 1188 bp, Ehrlichia canis str. Jake
  CDS (1)..(1188): transl_table=11
atggtagaagaaaggaagccgcatataaatgtagggacaatagggcatgttgatcatggtaagacaacattgacagcagcattaacaacagtgttggcaaaaaggttgagtggagaagggaataaaagtgtaaaatatgatgaaatagataaagcaccagaagaaaaagcaagaggaataaccatttcaacagcacatgtagaatatgaaacagaaaatagacattatgcccatgttgattgtccaggacatgctgattatataaaaaatatgataacaggtgctgcacaaatggatgcagcaatattagtagtgtctgcaactgatggagcaatgccacaaacaagagaacatatattattagcaaagcaagtaggtgtaaaagatatagtagtgtggatgaataagtgtgatgttgtagatgatgaagaaatgttgtcattagttgaaatggaaataagggaattgttatcaaaatatgggtatcctggggatgatatagatgtagttagaggatctgcagttaaagcattagaagaagaaacaggctcaggtgtgtggagtgaaaaaataatggaattgatgaatgctttagaaaaaataagtttaccagtaagagaaaaagataagccatttttaatgtcaatagaagatgtgttttcaatacctggaagaggtacagtagtaacaggaagaatagaaagaggagtaattagagtaggggataaaatagagatagtaggattgcgtgagatacaaagtacagtatgtacaggtgttgaaatgtttcataaagcattagatgcaggagaagcaggggataatgctggaatattgttaagagggataaaaaaagaagatgtagaaagagggcaagtattgagtgcacctggacagatacattcatataagagatttaaggcagaggtatatatattgaaaaaagaagaaggaggaagacatactccatttttctcaaattaccagccgcaattttatgttagaacaacagatgtaacagggaatataaagttaccagaaggagtagaaatggtaatgccaggggataatataaatatcgaagtgagtttggataagcctgttgctattgatcaaggattgagatttgcaattcgtgaaggtggtagaactgtaggctcaggtattattactgaaattttggagtag

SEQ ID NO: 2750 - protein, 395 aa, Ehrlichia canis str. Jake
MVEERKPHINVGTIGHVDHGKTTLTAALTTVLAKRLSGEGNKSVKYDEIDKAPEEKARGITISTAHVEYETENRHYAHVDCPGHADYIKNMITGAAQMDAAILVVSATDGAMPQTREHILLAKQVGVKDIVVWMNKCDVVDDEEMLSLVEMEIRELLSKYGYPGDDIDVVRGSAVKALEEETGSGVWSEKIMELMNALEKISLPVREKDKPFLMSIEDVFSIPGRGTVVTGRIERGVIRVGDKIEIVGLREIQSTVCTGVEMFHKALDAGEAGDNAGILLRGIKKEDVERGQVLSAPGQIHSYKRFKAEVYILKKEEGGRHTPFFSNYQPQFYVRTTDVTGNIKLPEGVEMVMPGDNINIEVSLDKPVAIDQGLRFAIREGGRTVGSGIITEILE

SEQ ID NO: 2751 - DNA, 1191 bp, Thiobacillus denitrificans ATCC 25259
  CDS (1)..(1191): transl_table=11
atggctaaggaaaaattcgagcggaccaaaccgcacgtaaacgtaggcacgattggtcacgttgaccacggcaagaccaccttgaccgcggcgatcacgaccattctgtcgaagaaattcggtggtgcggcgaagaagtacgacgagatcgattcctcgcctgaagagaaggcgcgcggcatcaccatcaacaccgcccacgtcgagtacgagaccgccagccgtcactacgcccacgtcgactgcccgggccacgccgactacgtcaagaacatgatcaccggcgctgcccagatggacggcgccattcttgtcgtctcctctgccgacggtcccatgccccagacccgcgagcacatcctgcttgcccgtcaggtcggcgtgccctacatcatcgtctacatgaacaaggccgacatggtcgacgacgccgagctcctcgagctcgtcgaaatggaagtgcgcgaactgctgtccaagtacgacttccctggcgacgacacccccatcatcgtcggtagcgccctgaaggccctcgaaggcgaccagagcgacatcggcgaacccagcatcatcaagctcgccgaagcgctcgacacctacatccccgagcccgagcgcgccatcgacaagcccttcctcatgcccgtcgaagacgtcttctccatctccggtcgcggcaccgtcgtcaccggtcgtgtcgagcgcggcgtcatcaaggtcggcgaagaaatcgagatcgtcggcatcaccccgaccgtcaagaccacctgcaccggcgtcgagatgttcaggaagctcctcgaccagggacaggctggcgacaacgtcggcgtgctgctgcgcggcaccaagcgtgaagaagtccagcgcggccaggttctggccaagcccggctcgatcaagccgcacaccaagttctccgccgagatctatgtgttgagcaaggacgaaggcggtcgtcatacccccttcttcaacggctaccgtccgcagttctatttccgcaccaccgacgtcaccggctcgatcgaactgccggccggcaccgagatggtcatgcctggcgacaacgtcagcatcaaggtctcgctgatccagccgatcgcgatggacgaaggcctgcgtttcgccatccgcgaaggcggccgcaccgtcggtgccggcgtcgttgccaagatcgaagagtaa

SEQ ID NO: 2752 - protein, 396 aa, Thiobacillus denitrificans ATCC 25259
MAKEKFERTKPHVNVGTIGHVDHGKTTLTAAITTILSKKFGGAAKKYDEIDSSPEEKARGITINTAHVEYETASRHYAHVDCPGHADYVKNMITGAAQMDGAILVVSSADGPMPQTREHILLARQVGVPYIIVYMNKADMVDDAELLELVEMEVRELLSKYDFPGDDTPIIVGSALKALEGDQSDIGEPSIIKLAEALDTYIPEPERAIDKPFLMPVEDVFSISGRGTVVTGRVERGVIKVGEEIEIVGITPTVKTTCTGVEMFRKLLDQGQAGDNVGVLLRGTKREEVQRGQVLAKPGSIKPHTKFSAEIYVLSKDEGGRHTPFFNGYRPQFYFRTTDVTGSIELPAGTEMVMPGDNVSIKVSLIQPIAMDEGLRFAIREGGRTVGAGVVAKIEE

SEQ ID NO: 2753 - DNA, 1230 bp, Anabaena variabilis ATCC 29413
  CDS (1)..(1230): transl_table=11
atggcacgcgcaaagtttgaaagaacgaaaccccacgtaaatattggtacgattggccacgttgaccacggtaaaacaaccttaacggcagcaatcaccatgaccttggcagcccttggtcaagcggtcgctaaaggctacgatcaaatcgacaacgcaccagaagaaaaggcgcggggtatcaccattaacacagcccacgttgaatatgagaccgctaatcgtcactatgctcacgtagactgtcctggtcacgctgactatgtgaagaatatgatcacaggtgcggctcagatggatggagcaattctcgtagttgctgctaccgacggccctatgcctcaaacccgtgaacacatcctactagcaaaacaggtaggcgttcctaagctagtagtcttcttaaataaagaagatatgatggaagacgctgaactactagaactagtagaactggaattaagagaactgttgaccgaatacgaattcgatggtgatgatattcccatcgttagaggttcaggtttgcaagctctcgacgttatgaccaagaatcctaagacccaacgtggagaaaatccttgggtagataaaatctacgaattgatggatgctgtagattcttatattcctgatccagagcgggatatagataaaccattcctgatggcggtagaagacgtgttctctattaccggtcgtggtacagttgctaccggtcggattgagcgtggtaaggtgaaagttggtgatgttgtagaactagtaggtattagagatacacgcaacacaactgttaccgggatcgagatgttcaagaagagtctcgatgaaggtatggctggagacaacgccggtgtactgttacgtggtattcaaaaaactgatattgaacggggtatggttttagccaagcctggttccatcactcctcacacccaatttgaaggcgaagtttacgttctcaccgaaaaagaaggtggtcgtaaaactcctttcttcgctggctaccgtcctcaattctatgtgcggacaactgatgtaactggtacaattaaagcctttacttccgatgaaggtgaagcagtagaaatggtgatgccaggagatcgcatcaaagtcactgttgaattaatcaacccgattgcgattgagcaagggatgcgcttcgctattcgtgaaggtggccgcaccatcggtgctggtgtcgtctccaaaatcgtcaagtag

SEQ ID NO: 2754 - protein, 409 aa, Anabaena variabilis ATCC 29413
MARAKFERTKPHVNIGTIGHVDHGKTTLTAAITMTLAALGQAVAKGYDQIDNAPEEKARGITINTAHVEYETANRHYAHVDCPGHADYVKNMITGAAQMDGAILVVAATDGPMPQTREHILLAKQVGVPKLVVFLNKEDMMEDAELLELVELELRELLTEYEFDGDDIPIVRGSGLQALDVMTKNPKTQRGENPWVDKIYELMDAVDSYIPDPERDIDKPFLMAVEDVFSITGRGTVATGRIERGKVKVGDVVELVGIRDTRNTTVTGIEMFKKSLDEGMAGDNAGVLLRGIQKTDIERGMVLAKPGSITPHTQFEGEVYVLTEKEGGRKTPFFAGYRPQFYVRTTDVTGTIKAFTSDEGEAVEMVMPGDRIKVTVELINPIAIEQGMRFAIREGGRTIGAGVVSKIVK

SEQ ID NO: 2755 - DNA, 1176 bp, Rhodobacter sphaeroides 2.4.1
  CDS (1)..(1176): transl_table=11
atggcaaaggcaaagtttgaacgtaacaaaccgcacgtcaacatcggcacgatcggccacgttgaccacggcaagacgactctgacggccgcgatcacgaagtatttcggcgagttccgcgcctacgaccagatcgacggcgcgccggaagagcgggcccgcgggatcacgatctcgaccgcgcacgtggaatacgagtcggacacgcgccactatgcgcacgtcgactgccccggccacgccgactatgtgaagaacatgatcaccggcgccgcgcagatggacggcgcgatcctcgtggtgaacgcggccgacggcccgatgccgcagacgcgcgagcacatcctgctcggccgtcaggtgggcatcccctacatggtcgtctacatgaacaaggtcgaccaggtggacgatccggaactcatcgagctggtcgagatggagatccgcgagcttctgtcgtcctacgactaccccggcgacgacattccgatcatcaagggctcggctctggccgcgatgaacggcaccgacaaggaaatcggcgaggattcgatccgcgcgctgatcgccgccgtggatgaatacatcccgaccccggcgcgtgccgtggaccagcccttcctgatgccggtcgaggacgtgttctcgatctcgggccgcggcaccgtggccacgggccggatcgagcgcggtgtggtgaaggtgggtgaggaactcgagatcgtcggcatccgcccgtcgaagaagacggtctgcaccggcgtcgagatgttccgcaagctcctcgaccagggcgaagcgggcgacaacgtgggcctgctgctccgcggcgtggaccgcgacggcatcgagcgcgggcaggttctctgcaagccgggctcggtgaagccgcacacgaagttcgaggccgaggcctacatcctcacgaaagaggaaggcggccgccacaccccgttcttcgccaactaccgtccgcagttctacttccggaccaccgacgtgaccgggaccgtgcaactgccggaaggcaccgagatggtgatgccgggcgacaacctgaagttcaacgtcgagctgatcgcgccgatcgccatggaagagaagctccgcttcgccatccgtgaaggcggccgcaccgtcggcgccggcgtcgtctcgaaaatcatcgcgtaa

SEQ ID NO: 2756 - protein, 391 aa, Rhodobacter sphaeroides 2.4.1
MAKAKFERNKPHVNIGTIGHVDHGKTTLTAAITKYFGEFRAYDQIDGAPEERARGITISTAHVEYESDTRHYAHVDCPGHADYVKNMITGAAQMDGAILVVNAADGPMPQTREHILLGRQVGIPYMVVYMNKVDQVDDPELIELVEMEIRELLSSYDYPGDDIPIIKGSALAAMNGTDKEIGEDSIRALIAAVDEYIPTPARAVDQPFLMPVEDVFSISGRGTVATGRIERGVVKVGEELEIVGIRPSKKTVCTGVEMFRKLLDQGEAGDNVGLLLRGVDRDGIERGQVLCKPGSVKPHTKFEAEAYILTKEEGGRHTPFFANYRPQFYFRTTDVTGTVQLPEGTEMVMPGDNLKFNVELIAPIAMEEKLRFAIREGGRTVGAGVVSKIIA

SEQ ID NO: 2757 - DNA, 1203 bp, Carboxydothermus hydrogenoformans Z-2901
  CDS (1)..(1203): transl_table=11
atggcgaaggcgaaatttgagcgggtaaaaccgcacgtaaacattgggacgataggtcacgtagaccacgggaagaccaccttgaccgcagcaattactacggtgctggcgaagaagggattagcccagcaaaagaggtacgatgagattgacaatgctccggaagaaagggaaagaggaattaccattaatacagcgcatgtggagtatgagaccgagaagcggcactatgcccacgtagactgtccgggacacgctgactacgtaaagaacatgataactggagcggcgcagatggacggagctatcctggttgtgtctgcagccgatggtccgatgccgcagacgcgggagcacattttgttagcccgtcaggtaggagttccctatattgtagtatttttaaacaaagcggacatggtagatgatccggagttaatggagcttgtagagatggaagtgcgggatcttttaagcacgtacgagtttccgggggatgaagtaccggtagtagcggggtcggcattgaaggcattggagtgcggttgcgggaaagaagattgtccgtggtgtgggaagatattggagttaatggacaaggtagacgaatacattccgacaccgcagcgggatgtagataagccgttcttaatgccggtagaggacgtatttaccattaccggacgtgggacggttgcgaccggccgggtagagcggggacggataaccataggagaagaagtggagatagtaggattgatggatgctccgcggaagacggtagtaacgggactggagatgttccggaaggtattagacgaagcggtagcaggggacaacataggagcgttattacggggagtagaccggaaggaaatcgagcgggggcaggtattggcgaagcctggtacgataaagccgcaccggaagttttttgcggaggtatacgtattgacgaaggaagaagggggacggcacacaccgttctttaatggataccggccgcagttttacttccggacgacggacgtaacgggagtaatccatttaccagaaggtgtagagatggtaatgcccggggataacgtaaagattcatattgagcttatcacaccgattgctattgaagaaggattgagatttgctattcgggaaggtggcagaactgtaggcgcgggcgttgttaccgcgatcgaagagtaa

SEQ ID NO: 2758 - protein, 400 aa, Carboxydothermus hydrogenoformans Z-2901
MAKAKFERVKPHVNIGTIGHVDHGKTTLTAAITTVLAKKGLAQQKRYDEIDNAPEERERGITINTAHVEYETEKRHYAHVDCPGHADYVKNMITGAAQMDGAILVVSAADGPMPQTREHILLARQVGVPYIVVFLNKADMVDDPELMELVEMEVRDLLSTYEFPGDEVPVVAGSALKALECGCGKEDCPWCGKILELMDKVDEYIPTPQRDVDKPFLMPVEDVFTITGRGTVATGRVERGRITIGEEVEIVGLMDAPRKTVVTGLEMFRKVLDEAVAGDNIGALLRGVDRKEIERGQVLAKPGTIKPHRKFFAEVYVLTKEEGGRHTPFFNGYRPQFYFRTTDVTGVIHLPEGVEMVMPGDNVKIHIELITPIAIEEGLRFAIREGGRTVGAGVVTAIEE

SEQ ID NO: 2759 - DNA, 1191 bp, Rhodospirillum rubrum ATCC 11170
  CDS (1)..(1191): transl_table=11
atgtcgaaagaaaagtttgcgcggacgaagccccattgcaacgtcggaacgattggtcacgttgaccatggcaagacgtcgctgacggctgcgatcacgaaggttctggccgaagcgggcggggcgacgttccaggcctacgaccagatcgacaaggcgccggaagagcgtgcgcgcggcatcacgatttcgacggcgcacgttgagtacgagacggaagcgcgtcactacgcccacgtcgactgcccgggccacgccgactatgtgaagaacatgatcaccggcgcggcgcagatggacggggcgatcctggtggtttcggccgccgacggcccgatgccgcagacccgcgagcacattcttctggcccgtcaggtcggcgttccggccctggtggtgttcctgaacaagtgcgacatggtcgacgacgaggagctgcttgagctggtcgagcttgaggtccgcgagttgctgacgagctacgacttccccggcgatgacattcccatcatcaagggctcggctctggccgctctggaagacagcgaccagaagcttggtcacgatgccatcctcgagctgatgaaggcggtggacgattacattccgcagcccgagcgcccgaaggacaagccgttcctgatgccgatcgaagacgtgttctcgatctcgggtcgtggtacggtggtgaccggtcgcgtcgagcgcggcatcgtcaaggttggcgaggaaatcgagatcatcggtatccgcgacacccagaagacgacctgcaccggcgtcgagatgttccgcaagctgcttgatcagggcgaggccggcgacaacatcggcgcgctgctgcgcggcaccaagcgtgatgacgtcgagcgcggtcaggttctggccaagccgggttcgatcaccccgcacaccaagttcaagtgcgaggcctatatcctgacgaaggaagagggtggccgtcacacgccgttcttctccaactatcgtccgcagttctatttccgcacgaccgacgtgaccgggacgatcgagctgccggaaggcaccgagatggttatgcccggtgacaacatcggcatgacggtacagctgatcgcgccgattgccatggacgagggtctgcggttcgctatccgcgagggtggccgtaccgtcggtgccggcgtcgtcgccagcatcgttcagtaa

SEQ ID NO: 2760 - protein, 396 aa, Rhodospirillum rubrum ATCC 11170
MSKEKFARTKPHCNVGTIGHVDHGKTSLTAAITKVLAEAGGATFQAYDQIDKAPEERARGITISTAHVEYETEARHYAHVDCPGHADYVKNMITGAAQMDGAILVVSAADGPMPQTREHILLARQVGVPALVVFLNKCDMVDDEELLELVELEVRELLTSYDFPGDDIPIIKGSALAALEDSDQKLGHDAILELMKAVDDYIPQPERPKDKPFLMPIEDVFSISGRGTVVTGRVERGIVKVGEEIEIIGIRDTQKTTCTGVEMFRKLLDQGEAGDNIGALLRGTKRDDVERGQVLAKPGSITPHTKFKCEAYILTKEEGGRHTPFFSNYRPQFYFRTTDVTGTIELPEGTEMVMPGDNIGMTVQLIAPIAMDEGLRFAIREGGRTVGAGVVASIVQ

SEQ ID NO: 2761 - DNA, 1203 bp, Moorella thermoacetica ATCC 39073
  CDS (1)..(1203): transl_table=11
atggccaaacaaaaatatgaacgcacgaaaccccatgtcaacgttggtaccatcgggcacgttgaccatggcaagacgaccctgacggcagccattaccttctgcctggccaaggccggcggcgctgtacctacggcctacgatcagattgataaggcgccggaagagagagaacgtggaattaccatcgccacggcccacgtagagtacgaaaccgagaaaaggcactatgcccatgttgactgcccgggtcacgccgactacgtcaagaacatgattaccggtgcggcacagatggacggtgccatcctggtagtatcagcggccgacggtcccatgccccagacccgtgaacacatccttctggcccgccaggtaggcgttccttacatcgttgttttcctgaataaagttgaccaggtagacgatcccgaactcctggaactcgtggagatggaagtccgggagcttttaactgaatatgaattcccgggcgatgagattcctattgtcaccggcagcgccctgaaagccatggaatgcggttgcggcaaacgggaatgcgaatggtgcggcaaggtgtgggagctgatggatgccgtagacagctatattcctacacccgagcgtgacaccgacaaacctttcctgatgcccattgaagacgtcttcaccattaccggccgcggtaccgtgaccaccggcagggtggagaggggcaaggtcaaagtcggggatgaagtcgagattatcggcctgcgcgacgagatccgcaagacggtagtcaccggtgtggagatgttccgcaagatcctcgacgaagccgttgctggtgacaatatcggcaccctcctccgtggtgtcgaccgcaaagaggtcgagcgcggtatggtcctggccaaaccgggcagcattaaaccccataccaaattcaatgccgaggtttacgtcctgaccaaagaggaaggtggccggcatactcccttctttaacggctaccggccccagttctatttccggactaccgacgttaccggcgtggtaaacctccccgaaggtgtagagatggtcatgccgggcgataacatccgtatgaccattgagctcattacccccattgctattgaagaaggcctgcgtttcgctatccgcgaaggtggtcgtactgtcggcgccggcgttgttaccgggattatcgaataa

SEQ ID NO: 2762 - protein, 400 aa, Moorella thermoacetica ATCC 39073
MAKQKYERTKPHVNVGTIGHVDHGKTTLTAAITFCLAKAGGAVPTAYDQIDKAPEERERGITIATAHVEYETEKRHYAHVDCPGHADYVKNMITGAAQMDGAILVVSAADGPMPQTREHILLARQVGVPYIVVFLNKVDQVDDPELLELVEMEVRELLTEYEFPGDEIPIVTGSALKAMECGCGKRECEWCGKVWELMDAVDSYIPTPERDTDKPFLMPIEDVFTITGRGTVTTGRVERGKVKVGDEVEIIGLRDEIRKTVVTGVEMFRKILDEAVAGDNIGTLLRGVDRKEVERGMVLAKPGSIKPHTKFNAEVYVLTKEEGGRHTPFFNGYRPQFYFRTTDVTGVVNLPEGVEMVMPGDNIRMTIELITPIAIEEGLRFAIREGGRTVGAGVVTGIIE

SEQ ID NO: 2763 - DNA, 1194 bp, Syntrophus aciditrophicus SB
  CDS (1)..(1194): transl_table=11
atggctaagaagaaatttgaaaggacaaagccgcatttaaatattggcaccattggacatgtcgatcatggcaagacaactttgactgctgcgataacaaagtggcttgcaaagaaaggcttagccgaatttcgagcctttgattcgattgacaatgcaccggaagaaaaagaaagaggcgtcaccatcaacatttcccatgtggaatatcagacggacaagcgtcattatgcccatgtggactgtccggggcacgcggactatattaaaaatatgatctccggtgcagcgcacatggatggcacgatactggtcgtggcagcttccgatggtccgatgccgcagacgcgagagcatatcctccttgcacgtcaggtgcaggttccctctatcgtcgtttttctgaacaaagtagaccttgtcgacgatccggaacttcttgatctcgttgaactggagttgagagaactgctgaatgaatacgagtttcccggggacgatattcccatcatcagaggctccgctttaaaggcccttgaaagcgaaaatccggatgatcccgatgtaaaacagatatatgccctgatggatgccgtggatgcttatatccctgagcctgagcgtgatcttgacaagccgtttctgatgcccgtgggcgacgtttttacgatttcaggtcgcggtacagttgtgactggtcgaattgaccggggaattataaagaccggtgatgaagtcgaaatagtcggcgttcgcccgacacaaaagacagtttgcacaggtgtggaaatgtttcgcaagaccctggatgaagggcgtgccggtgacgatgtcggcttgctgcttcggggaatcaagagggaagacgttgaaagaggccaggttgttgcaaaaccgggttctatcacgccgcataccaaatttatggcccaagtctacgttttgactaaggaggaaggtggaaggcatactcctttcttcaccggctatcgcccgcagttttatttcagaacaaccgatgttaccggagttgccaagttggcggaaggtgtggaaatggttatgccgggggacaatgtagaaatggaagtgacgttgatcacgccgatagccatggaagaacagctgcggttcgctattcgcgaaggcggaagaacggtcggcgccggtgttgtcagtaaagtgattgaatag

SEQ ID NO: 2764 - protein, 397 aa, Syntrophus aciditrophicus SB
MAKKKFERTKPHLNIGTIGHVDHGKTTLTAAITKWLAKKGLAEFRAFDSIDNAPEEKERGVTINISHVEYQTDKRHYAHVDCPGHADYIKNMISGAAHMDGTILVVAASDGPMPQTREHILLARQVQVPSIVVFLNKVDLVDDPELLDLVELELRELLNEYEFPGDDIPIIRGSALKALESENPDDPDVKQIYALMDAVDAYIPEPERDLDKPFLMPVGDVFTISGRGTVVTGRIDRGIIKTGDEVEIVGVRPTQKTVCTGVEMFRKTLDEGRAGDDVGLLLRGIKREDVERGQVVAKPGSITPHTKFMAQVYVLTKEEGGRHTPFFTGYRPQFYFRTTDVTGVAKLAEGVEMVMPGDNVEMEVTLITPIAMEEQLRFAIREGGRTVGAGVVSKVIE

SEQ ID NO: 2765 - DNA, 1194 bp, Frankia sp. CcI3
  CDS (1)..(1194): transl_table=11
gtggcgaagcagaagttcgagcggacgaagccgcacgtcaatatcggcaccattggtcacatcgaccacggcaagacgaccctgaccgcggcgatcaccaaggtcctgcacgacgcctacccagacctcaaccccttcacgccgttcgaccagatcgacaaggcgccggaggagaaggcccgcggcatcacgatctcgatcgcccacgtcgagtaccagaccgacacccggcactatgcgcacgtcgactgcccgggacacgctgactacatcaagaacatgatcaccggtgccgctcagatggacggcgcgatcctggtcgtgtccgccaccgacggcccgatgccgcagacgaaggagcacgtgctcctcgcccgccaggtcggcgtgccctacattgtcgtcgccctgaacaaggccgacatggtcgacgacgaggagatcctcgagctcgtcgagctggaggtccgggagctgctgagctcgtacgagttcccgggcgacgacgttccggtcgtccgggtctccgcgctcaaggcgctggagggcgacaaggagtggggcgccaagctcctcgagctcatggcggcggtcgacgagtcgatccccgagccgcagcgtgacatcgaccggccgttcctcatgccgatcgaggacgtcttcacgatcaccggtcgtggcaccgtggtcaccggtcgcgtcgagcgcggaatcgtcaaggtcaacgagaccgtggagatcgtcggtatcaagccggagaccacctccaccaccgtgaccggtgtcgagatgttccgcaagctgctcgacgaggggcgtgccggcgacaacgtcggtctgctcctgcgcggtatcaagcgggaggacgtcgagcgcggccaggtcatcgtcaagccgaagtcgatcaccccgcacacggtgttcgaggctcgcgtctacatcctcaacaaggatgagggcggacggcacacgccgttcttcaagaactaccgcccgcagttttacttccgcaccaccgacgtgaccggcgtcgtgaccctccccgagggcacggagatggtcatgccgggggacaacaccgagatgacggtcgagctgatccagccgatcgccatggaggagggtctgcgcttcgccatccgcgagggtggccggaccgtcggcgcgggccaggttacgaaggttctcaagtag

SEQ ID NO: 2766 - protein, 397 aa, Frankia sp. CcI3
MAKQKFERTKPHVNIGTIGHIDHGKTTLTAAITKVLHDAYPDLNPFTPFDQIDKAPEEKARGITISIAHVEYQTDTRHYAHVDCPGHADYIKNMITGAAQMDGAILVVSATDGPMPQTKEHVLLARQVGVPYIVVALNKADMVDDEEILELVELEVRELLSSYEFPGDDVPVVRVSALKALEGDKEWGAKLLELMAAVDESIPEPQRDIDRPFLMPIEDVFTITGRGTVVTGRVERGIVKVNETVEIVGIKPETTSTTVTGVEMFRKLLDEGRAGDNVGLLLRGIKREDVERGQVIVKPKSITPHTVFEARVYILNKDEGGRHTPFFKNYRPQFYFRTTDVTGVVTLPEGTEMVMPGDNTEMTVELIQPIAMEEGLRFAIREGGRTVGAGQVTKVLK

SEQ ID NO: 2767 - DNA, 1191 bp, Novosphingobium aromaticivorans DSM 12444
  CDS (1)..(1191): transl_table=11
atggccaaggctaagtttgagcggaacaagccgcactgcaacatcggcaccatcggtcacgtcgaccacggcaagaccacgctgaccgccgcgatcaccaaggtgctcgccgagcagggtggcgctgaattcaccgactacgcgaacatcgacaaggctccggaagagcgcgagcgcggcatcaccatctcgaccgcacacgtcgagtacgagaccgccaaccgccactacgcgcacgtcgactgcccgggtcacgccgactacgtgaagaacatgatcaccggtgccgcccagatggacggcgcgatcctggtcgtgaacgctgctgacggcccgatgccgcagacccgcgagcacatcctgcttgcccgccaggtcggcgtgcccgcgctcgtcgtgtacatgaacaaggtcgaccaggtcgacgacgaggaaatcctcgagctcgtcgaactcgaagttcgcgaactgctgtcgtcgtacgacttcccgggcgacgatattccgatcgtcaagggttcggctctggccgctctcgaaggccgcgacgacaacatcggcaaggactcgatcaacgcgctcatggctgccgttgacgcgtacatcccgcagccgccgcgtccgaccgacaagcccttcctgatgcccgtcgaagacgtgttctcgatctcgggtcgcggcaccgtggtgaccggccgtatcgaaaccggcatcatcaaggtcggcgaagaagtcgagatcatcggtctgaaggacacccagaagaccaccgtgaccggcgtcgaaatgttccgcaagctgctcgaccagggcgaagccggcgacaacatcggtgcgctgatccgcggcatcaagcgtgaagaagtcgagcgtgggcaggttctcgccaagcccggttcggtgaccccgcacaccgaattctcggccgaggtctacgtgctgtcgaaggacgaaggtggccgtcacacgccgttcttcgccaactaccgcccgcagttctacttccgcaccaccgacgtcaccggtgaggtcgtcctccccgagggcaccgagatggtgatgccgggcgacaacgtcaccctggctgtcaagctgatcgctccgatcgcgatggacgaaggtctgcgcttcgcaattcgcgaaggcggccgcaccgtcggttcgggggttgtcagcaagatcacgaagtaa

SEQ ID NO: 2768 - protein, 396 aa, Novosphingobium aromaticivorans DSM 12444
MAKAKFERNKPHCNIGTIGHVDHGKTTLTAAITKVLAEQGGAEFTDYANIDKAPEERERGITISTAHVEYETANRHYAHVDCPGHADYVKNMITGAAQMDGAILVVNAADGPMPQTREHILLARQVGVPALVVYMNKVDQVDDEEILELVELEVRELLSSYDFPGDDIPIVKGSALAALEGRDDNIGKDSINALMAAVDAYIPQPPRPTDKPFLMPVEDVFSISGRGTVVTGRIETGIIKVGEEVEIIGLKDTQKTTVTGVEMFRKLLDQGEAGDNIGALIRGIKREEVERGQVLAKPGSVTPHTEFSAEVYVLSKDEGGRHTPFFANYRPQFYFRTTDVTGEVVLPEGTEMVMPGDNVTLAVKLIAPIAMDEGLRFAIREGGRTVGSGVVSKITK

SEQ ID NO: 2769 - DNA, 1182 bp, Anaplasma phagocytophilum HZ
  CDS (1)..(1182): transl_table=11
atgacagaaggaaggaagccgcatataaacgtagggacaatagggcacgtggatcacggtaagacaacgcttacagctgcgttaactactgttctggctagaaagctaagtggcgcgaacaaagtggtgaagtatgatgagatagacaaggcgccagaagaaaaggcaagaggaataacaatatcaacagcgcatgtggagtatgagactgaaggtagacactatgcgcatgtagactgtccggggcacgctgactacattaagaacatgattactggagcggcgcagatggatgttgcgatactggttgtgtcggcgacagacggagcgatgccgcaaactcgtgagcatatattgttggcgaagcaggttggtgtaaaagacatcgtggtgtggattaacaaatgcgatgtagttgaagatgaagaaatgttatcgctcgtggatatggagatacgcgagttattgagtcagtatggatatgatggtgattctatcgatgctgtaagagggtctgcggttaaggcattggaagaagatgctgatggtccttggagtgataagataatggaattggtaggtgctctggaaaagatagagctgccgatgagagagaaggacaagccgtttttgatgtctgtagaagacgtgttctctatacctggacgtggaacagtggttacaggaagaatagagagaggcgtagtaagagtcggagacaagatagatattgtaggtctgcgtgaattacaaagtacggtttgtactggagtagaaatgttccataaggcattggaagctggtgaagctggtgacaatgctgggatacttctcagaggtataaagaaggaagacgtagagagaggtcaagtactcagtgcgcctgggcaaatgaagtcatataagaagttcaaggcggaagtatacgtattgaagaaggaagagggaggaaggcatactccattctttgctaattaccaacctcagttctacgttagaactacggatgtaacaggaagcatatcgttacctgcgggtgtagaaatggttatgcctggagataatctaagtatagaggtagcgttggataagcctgttgcgatagataaggggcttaggtttgctgtgagagaaggtggaaggactgttggctcaggtattattactgagattttggagtag

SEQ ID NO: 2770 - protein, 393 aa, Anaplasma phagocytophilum HZ
MTEGRKPHINVGTIGHVDHGKTTLTAALTTVLARKLSGANKVVKYDEIDKAPEEKARGITISTAHVEYETEGRHYAHVDCPGHADYIKNMITGAAQMDVAILVVSATDGAMPQTREHILLAKQVGVKDIVVWINKCDVVEDEEMLSLVDMEIRELLSQYGYDGDSIDAVRGSAVKALEEDADGPWSDKIMELVGALEKIELPMREKDKPFLMSVEDVFSIPGRGTVVTGRIERGVVRVGDKIDIVGLRELQSTVCTGVEMFHKALEAGEAGDNAGILLRGIKKEDVERGQVLSAPGQMKSYKKFKAEVYVLKKEEGGRHTPFFANYQPQFYVRTTDVTGSISLPAGVEMVMPGDNLSIEVALDKPVAIDKGLRFAVREGGRTVGSGIITEILE

SEQ ID NO: 2771 - DNA, 1185 bp, Francisella tularensis subsp. holarctica
  CDS (1)..(1185): transl_table=11
atggctaaagaaaaatttgagcgttcgaagccgcatgtaaacgtaggtacaattggtcacgttgaccacggtaaaactactcttacagcagctattacaaaagttatggctgagaagaacggtggtatggcgcgtaaatttgatgagattgatagtgcgccagaagaaaaagcgcgtggtattactattaatacttctcacgttgagtacgagtctcctaatagacactatgctcacgtagactgtccaggacacgctgactacgttaagaacatgattactggtgctgcacagatggatggtgctattctagtatgttctgctgcggatggtcctatgccacaaactcgtgagcacattctgctttctcgtcaagttggtgtaccaaaaatcgttgttttcttaaacaagtgtgacatggttgatgatgaagagttattagagctagttgagatggaagttcgtgagcttttagatcagtatgagttcccaggtgatgacactccagttattatgggttcagctcttagagctattgaaggtgacgaagcttacgttgagaaaattgttgagctagttcaagctatggatgactatattcctgctcctgagcgtgatactgagaagccatttattcttccgatcgaagatgtattctcaatttcaggtcgtggtactgttgtaactggtcgtattgagcgcggtgtagttaacgttggtgatgaagttgaagttgttggtattcgtccaactcaaaaaactacagtaactggtgtggaaatgttccgtaagcttttagatagaggggaagctggtgataacgttggtatcctagttcgtggacttaagagagatgatgttgagcgtggacaagtattatgtaagccaggttcaattaagccacatactaagtttgaagctgaggtttatgtattatctaaagaagagggtggtagacatactccattcttcaagggatatagaccacaattctacttccgtactacagacattactggagctgttgagcttccagagggtgtagaaatggttatgcctggtgataacgttaagatgactatcactctaattaacccaatcgctatggatgaagggttacgttttgcaatccgtgagggtggtagaacagtaggtgctggtgttgtagctaaaattatcgagtaa

SEQ ID NO: 2772 - protein, 394 aa, Francisella tularensis subsp. holarctica
MAKEKFERSKPHVNVGTIGHVDHGKTTLTAAITKVMAEKNGGMARKFDEIDSAPEEKARGITINTSHVEYESPNRHYAHVDCPGHADYVKNMITGAAQMDGAILVCSAADGPMPQTREHILLSRQVGVPKIVVFLNKCDMVDDEELLELVEMEVRELLDQYEFPGDDTPVIMGSALRAIEGDEAYVEKIVELVQAMDDYIPAPERDTEKPFILPIEDVFSISGRGTVVTGRIERGVVNVGDEVEVVGIRPTQKTTVTGVEMFRKLLDRGEAGDNVGILVRGLKRDDVERGQVLCKPGSIKPHTKFEAEVYVLSKEEGGRHTPFFKGYRPQFYFRTTDITGAVELPEGVEMVMPGDNVKMTITLINPIAMDEGLRFAIREGGRTVGAGVVAKIIE

SEQ ID NO: 2773 - DNA, 1203 bp, Desulfitobacterium hafniense Y51
  CDS (1)..(1203): transl_table=11
atggcaaagcaaaaattcgaacgtactaaaccccacgttaacgttggcaccatcggtcacgttgaccatggtaaaaccacctctactgctgctatcaccttagttctttccaaagccggcggcgcagtagcccaagcattcgaccaaatcgacaaggctccggaagaaagagagcgtggaatcaccatctccacttctcacgttgagtatgaaaccgctaaccgccactatgctcacgttgactgcccaggccacgccgactatgttaaaaacatgatcaccggtgctgcccaaatggatggagctatcctggttgtatccgctgctgacggcccgatgccccaaacccgtgagcacatcctccttgcccgtcaagtaggtgttccttacatcgtggtttggctgaacaaagccgacatggtagatgatccggaactcatggaactggttgaaatggaaattcgtgaactcctctccgagtacgaattccctggcgatgatattcccatcattcccggttccggcctgaaagctctccaatgcggttgcggatcccgtgattgtgaatggtgcggcaagatctggaatctgatggatgctgttgactcctatattccaactccagagcgtgctaccgacaagcctttccttatgcctgtggaggacgtattcaccattaccggtcgtggtaccgttgctaccggtcgtgtcgagcgcggtgtgattaaagtcggtgacgagattgaaatcgttggtttgacagaagctcctcgcaaaaccgtttgcaccggcgtggaaatgttccgcaagctccttgaccaagctcaagcaggggacaacatcggagctcttctccgcggtgtggatcgtaaagatatcgaacgcggtcaagtacttgctaaaaccggttctattaaacctcacaccaaatttaccggcgaagttttcgtactgagcaaagaagaaggcggacgtcataccccattcttcaacaactaccgccctcagttctacttccgtacaaccgacgttaccggtgttgtaacccttcctgaaggaacggaaatggttatgcccggagaccgtgttaccatcacttgcgaaattatctcccctatcgctatggaagaaggacttcgtttcgctatccgtgaaggtggccgtactgttggagccggcgttgttgtcagcatcatcgaatag

SEQ ID NO: 2774 - protein, 400 aa, Desulfitobacterium hafniense Y51
MAKQKFERTKPHVNVGTIGHVDHGKTTSTAAITLVLSKAGGAVAQAFDQIDKAPEERERGITISTSHVEYETANRHYAHVDCPGHADYVKNMITGAAQMDGAILVVSAADGPMPQTREHILLARQVGVPYIVVWLNKADMVDDPELMELVEMEIRELLSEYEFPGDDIPIIPGSGLKALQCGCGSRDCEWCGKIWNLMDAVDSYIPTPERATDKPFLMPVEDVFTITGRGTVATGRVERGVIKVGDEIEIVGLTEAPRKTVCTGVEMFRKLLDQAQAGDNIGALLRGVDRKDIERGQVLAKTGSIKPHTKFTGEVFVLSKEEGGRHTPFFNNYRPQFYFRTTDVTGVVTLPEGTEMVMPGDRVTITCEIISPIAMEEGLRFAIREGGRTVGAGVVVSIIE

SEQ ID NO: 2775 - DNA, 1224 bp, Saccharophagus degradans 2-40
  CDS (1)..(1224): transl_table=11
gtggcaaaagaaaaatttgaacgtaataagccccacgtaaacgtgggcacaattggtcacgttgaccacggtaaaactactttgactgcagcgttaacgcgcgtgtgttcagaagtttggggtggtgctgcggtagcgtttgacggtatcgataatgctccagaagagcgtgagcgtggtattactatcgctacctctcacgtagagtacgattcaccgattcgtcactacgcccacgttgactgcccaggtcacgccgactacgtgaaaaacatgattactggtgccgctcagatggatggcgctatcttggtatgtggttctactgacggcccaatgcctcagactcgtgagcacatccttttgtctcgtcaggttggtgtaccttacatcgtagtattcttgaacaaagcagacttgctagcagaagactgtggcggtgttgactctgaagaatacgcagagatgatggaattggttgaaatggaattgcgtgagttgttagacacttacgaattcccaggcgacgacactccaatcattgctggttctgctttgatggcattgaacggcgaagacgagaacgagctaggtactaccgctgttaagaaattggtagaagctttggattcatacattccagagccagagcgtgcaattgatcagccgttcttgatgccagtagaagacgtattctcaatctctggtcgcggtactgttgtgactggtcgtgttgagcgcggtattgttaaagttggtgaagaattggaaatcgttggtattcgcgataccaccaaaactacctgtactggtgttgaaatgttccgtaagttgcttgacgaaggtcgtgcaggtgagaacgttggtgtattgttgcgtggtactaagcgtgatgatgttgagcgtggtcaagtattgtctaagccaggttctgttactccgcacactactttccaatcagaaatctacgtattgtctaaagatgaaggtggtcgtcacactccattcttcaaaggctaccgtccacagttctacttccgtacaactgacgtaactggtgcttgtgagcttccagaaggcgtagaaatggtaatgccaggtgataacgtacaaatgactgttactttgatcgctccaatcgcgatggaagaaggtttgcgcttcgctatccgcgaaggtggccgtacagttggtgctggtgttgttgctaaaatcatcgcttaa

SEQ ID NO: 2776 - protein, 407 aa, Saccharophagus degradans 2-40
MAKEKFERNKPHVNVGTIGHVDHGKTTLTAALTRVCSEVWGGAAVAFDGIDNAPEERERGITIATSHVEYDSPIRHYAHVDCPGHADYVKNMITGAAQMDGAILVCGSTDGPMPQTREHILLSRQVGVPYIVVFLNKADLLAEDCGGVDSEEYAEMMELVEMELRELLDTYEFPGDDTPIIAGSALMALNGEDENELGTTAVKKLVEALDSYIPEPERAIDQPFLMPVEDVFSISGRGTVVTGRVERGIVKVGEELEIVGIRDTTKTTCTGVEMFRKLLDEGRAGENVGVLLRGTKRDDVERGQVLSKPGSVTPHTTFQSEIYVLSKDEGGRHTPFFKGYRPQFYFRTTDVTGACELPEGVEMVMPGDNVQMTVTLIAPIAMEEGLRFAIREGGRTVGAGVVAKIIA

SEQ ID NO: 2777 - DNA, 1191 bp, Methylobacillus flagellatus KT
  CDS (1)..(1191): transl_table=11
atggcaaaaggaaaatttgagcggacgaagccgcacgtcaacgtaggcacgattggtcacgttgaccatggtaagacaacattgacagctgcgatcaccaccgtattgaccaagaaatttggtggcgaagccaaggactactcccagatcgacaacgcgccggaagaaaaggcccgtggcatcaccatcaacacctctcacgtagaatacgaaaccgaaacccgtcactacgcccacgttgactgcccaggccacgccgactacgtcaagaacatgatcactggagctgcccaaatggacggcgccatcctcgttgtatccgctgcagacggccccatgccgcaaacccgcgaacacatcctgctggcccgccaagtgggcgtgccctacatcatcgtcttcctgaacaaggcagacatggttgacgacgcagaactgctcgaactggttgaaatggaagtgcgagaactcctctccaaatacgatttccccggagacgacacccccatcatcaaaggctccgccaagcttgcccttgaaggcgaccaatccgacatcggcgaaccagccatcttccgtttggcagaagccctggacacctacatccccacaccggaacgtgctgttgacggcaccttcctcatgccagtagaagacgtattctccatctctggccgtggtaccgtcgtgaccggtcgagtagagcgcggcatcgtcaaagttggtgacgaaatcgaaattgtcggcctcaagcccaccatcaaaaccacctgtaccggcgtcgaaatgttccgcaaactgctcgaccaaggtcaagcaggtgacaacgttggcgtactcctgcgtggcaccaaacgtgaagaagttgaacgtggccaagtcctcgccaaagtgggctccatcaagccgcacaccaaattcacagctgaaatctacgttctgggcaaagatgaaggtggtcgtcacaccccattcttcaacggctaccgtccccagttctacttccgtaccaccgacgtgacaggtgctgtagaactgccggcaggaaccgaaatggtcatgcctggcgacaacgtctccatctccgtctccctgattgcgccgatcgcgatggaagaaggcctgcgcttcgcgattcgtgaaggtggtcgtaccgtcggtgccggtgtcgtcgctaaaattattgagtaa

SEQ ID NO: 2778 - protein, 396 aa, Methylobacillus flagellatus KT
MAKGKFERTKPHVNVGTIGHVDHGKTTLTAAITTVLTKKFGGEAKDYSQIDNAPEEKARGITINTSHVEYETETRHYAHVDCPGHADYVKNMITGAAQMDGAILVVSAADGPMPQTREHILLARQVGVPYIIVFLNKADMVDDAELLELVEMEVRELLSKYDFPGDDTPIIKGSAKLALEGDQSDIGEPAIFRLAEALDTYIPTPERAVDGTFLMPVEDVFSISGRGTVVTGRVERGIVKVGDEIEIVGLKPTIKTTCTGVEMFRKLLDQGQAGDNVGVLLRGTKREEVERGQVLAKVGSIKPHTKFTAEIYVLGKDEGGRHTPFFNGYRPQFYFRTTDVTGAVELPAGTEMVMPGDNVSISVSLIAPIAMEEGLRFAIREGGRTVGAGVVAKIIE

SEQ ID NO: 2779 - DNA, 1191 bp, Methylobacillus flagellatus KT
  CDS (1)..(1191): transl_table=11
atggcaaaaggaaaatttgagcggacgaagccgcacgtcaacgtaggcacgattggtcacgttgaccatggtaagacaacattgacagctgcgatcaccaccgtattgaccaagaaatttggtggcgaagccaaggactactcccagatcgacaacgcaccggaagaaagggcccgtggcatcaccatcaacacctctcacgtagaatacgaaaccgaaacccgtcactacgcccacgttgactgcccaggccacgccgactacgtcaagaacatgatcactggagctgcccaaatggacggcgccatcctcgtcgtatccgctgcagacggccccatgccacaaacccgcgaacacatcctgctggcccgccaagtgggcgtgccctacatcatcgtcttcctgaacaaggcagacatggttgacgacgcagaactgctcgaactggttgaaatggaagtgcgagaactcctctccaaatacgacttccctggagatgacacccccatcatcaaaggctccgccaagcttgccctcgaaggcgaccaatccgacatcggcgaaccagccatcttccgtttggcagaagccctggacacctacatccccacaccggaacgtgctgttgacggcaccttcctcatgccagtagaagacgtattctccatttctggccgtggtaccgtcgtgaccggtcgagtagagcgcggcatcgtcaaagttggtgacgaaatcgaaattgtcggcctcaagcccaccatcaaaaccacctgtaccggcgtcgaaatgttccgcaaactgctcgaccaaggtcaagcaggtgacaacgttggcgtactcctgcgtggcaccaagcgtgaagaagttgaacgtggccaagtcctcgccaaagtgggctccatcaagccgcacaccaaattcacagccgaaatctacgttctgggcaaagatgaaggtggtcgtcacaccccattcttcaacggctaccgtccccagttctacttccgtaccaccgacgtgacaggtgctgtagaactgccggcaggaaccgaaatggtcatgcctggcgacaacgtctccatctccgtctccctgattgcgccgatcgcgatggaagaaggcctgcgcttcgcgattcgtgaaggtggtcgtaccgtcggtgccggtgtcgtcgctaaaattattgagtaa

SEQ ID NO: 2780 - protein, 396 aa, Methylobacillus flagellatus KT
MAKGKFERTKPHVNVGTIGHVDHGKTTLTAAITTVLTKKFGGEAKDYSQIDNAPEERARGITINTSHVEYETETRHYAHVDCPGHADYVKNMITGAAQMDGAILVVSAADGPMPQTREHILLARQVGVPYIIVFLNKADMVDDAELLELVEMEVRELLSKYDFPGDDTPIIKGSAKLALEGDQSDIGEPAIFRLAEALDTYIPTPERAVDGTFLMPVEDVFSISGRGTVVTGRVERGIVKVGDEIEIVGLKPTIKTTCTGVEMFRKLLDQGQAGDNVGVLLRGTKREEVERGQVLAKVGSIKPHTKFTAEIYVLGKDEGGRHTPFFNGYRPQFYFRTTDVTGAVELPAGTEMVMPGDNVSISVSLIAPIAMEEGLRFAIREGGRTVGAGVVAKIIE

SEQ ID NO: 2781 - DNA, 1191 bp, Burkholderia xenovorans LB400
  CDS (1)..(1191): transl_table=11
atggctaaaggtaaattcgaacggaccaagccgcacgtgaacgtcggcacgatcggtcacgttgaccacggcaagaccacgctgacggcagcgatcacgacggttctgacgcagaagtttggcggcgaagcgaaggcatacgaccagatcgacgcggcgccggaagagaaggcgcgtggtatcacgatcaacacggcacacgtcgagtacgaaacggctaaccgccactacgcacacgtcgactgcccgggccacgctgactatgtgaagaacatgatcacgggcgcagcgcagatggacggcgcgatcctggtgtgctcggccgctgacggcccgatgccgcaaacgcgcgagcacatcctgctggcgcgtcaggttggcgtgccgtacatcatcgtgttcctgaacaagtgcgacatggtggacgacgctgagctgctggagctggtcgagatggaagttcgcgaacttctgtcgaagtacgacttcccgggcgacgagacgccgatcatcaagggttcggcgaagctggcgctggaaggcgacaagggcgagctgggcgaagtggcgatcatgaatctggccgacgcgctggacacgtacatcccgacgccggagcgcgcagttgacggtgcgttcctgatgccggtggaagacgtgttctcgatctcgggtcgcggtacggtggtgacgggtcgcgttgagcgcggcgtcgtgaaggtcggcgaggaaatcgaaattgtcggtatcaagccgacggtgaagacgacctgcacgggcgtggaaatgttccgcaagctgctcgatcaaggtcaggcgggcgacaacgtgggtatcctgctgcgcggcacgaagcgtgaagacgtggagcgtggccaggtgctggccaagccgggttcgatcaacccgcacacgcacttcacggctgaagtgtacgtgctgagcaaggacgaaggtggccgtcacacgccgttcttcaacaactatcgtccgcagttctacttccgtacgacggacgtgacgggctcgatcgagttgccgaaggacaaggaaatggtcatgccgggcgacaacgtgtcgatcacggtgaagctgatcaacccgatcgcgatggaagaaggtctgcgtttcgcaatccgcgaaggcggccgtacggtcggcgcaggtgtggttgccaagattctcgagtaa

SEQ ID NO: 2782 - protein, 396 aa, Burkholderia xenovorans LB400
MAKGKFERTKPHVNVGTIGHVDHGKTTLTAAITTVLTQKFGGEAKAYDQIDAAPEEKARGITINTAHVEYETANRHYAHVDCPGHADYVKNMITGAAQMDGAILVCSAADGPMPQTREHILLARQVGVPYIIVFLNKCDMVDDAELLELVEMEVRELLSKYDFPGDETPIIKGSAKLALEGDKGELGEVAIMNLADALDTYIPTPERAVDGAFLMPVEDVFSISGRGTVVTGRVERGVVKVGEEIEIVGIKPTVKTTCTGVEMFRKLLDQGQAGDNVGILLRGTKREDVERGQVLAKPGSINPHTHFTAEVYVLSKDEGGRHTPFFNNYRPQFYFRTTDVTGSIELPKDKEMVMPGDNVSITVKLINPIAMEEGLRFAIREGGRTVGAGVVAKILE

SEQ ID NO: 2783 - DNA, 1191 bp, Ralstonia metallidurans CH34
  CDS (1)..(1191): transl_table=11
atggcaaaggaaaagttcgagcggaccaagccgcacgtgaacgtaggtacgattggtcacgttgaccacggcaagacgacgctgacggcagcgattgccacggtgctggcagccaagttcggtggcgcagccaagaagtacgacgaaatcgacgcagcgccggaagagaaggcacgcggcatcacgatcaacaccgcgcacgtggaatacgagacggccaaccgtcactacgcccacgttgactgcccgggccacgctgactatgtgaagaacatgatcacgggcgctgcgcagatggacggcgcgattctggtgtgctcggccgctgacggcccgatgccgcagacgcgtgagcacatcctgctggcccgtcaggttggcgtgccgtacatcatcgtgttcctgaacaagtgcgacatggtggacgacgccgagctgctcgagctggtggaaatggaagtgcgcgagctgctgtcgaagtacgaattcccgggcgacgacacgccgatcatcaagggttcggccaagctggcgctggaaggcgacaagggcgaactgggtgaagtggcgatcatgaacctggccgacgcgctggacacgtacatcccgacgccggagcgcgctgtggacggtacgttcctgatgccggtggaagacgtgttctcgatctcgggccgcggtaccgtggtgaccggtcgtatcgagcgtggcgtgatcaaggtcggtgaagaaatcgaaatcgtgggtatccgcccgacggtgaagacgacttgcacgggcgtggaaatgttccgcaagctgctggatcaaggccaggctggtgacaacgttggtctgctgctgcgcggcacgaagcgcgaagacgtggagcgtggtcaagttctgtgcaagccgggctcgatcaagccgcacacgcacttcacgggtgaggtgtacattctgtcgaaggacgaaggtggtcgtcacacgccgttcttcaacaactaccgcccgcagttctatttccgtacgaccgacgtgaccggctcgatcgagctgccgcaggacaaggaaatggtgatgccgggtgacaacgtgtcgatcactgtcaagctgatcgccccgatcgccatggaagaaggtctgcgcttcgctatccgcgaaggtggccgtaccgtcggcgccggcgttgtggcaaagatcctcgactaa

SEQ ID NO: 2784 - protein, 396 aa, Ralstonia metallidurans CH34
MAKEKFERTKPHVNVGTIGHVDHGKTTLTAAIATVLAAKFGGAAKKYDEIDAAPEEKARGITINTAHVEYETANRHYAHVDCPGHADYVKNMITGAAQMDGAILVCSAADGPMPQTREHILLARQVGVPYIIVFLNKCDMVDDAELLELVEMEVRELLSKYEFPGDDTPIIKGSAKLALEGDKGELGEVAIMNLADALDTYIPTPERAVDGTFLMPVEDVFSISGRGTVVTGRIERGVIKVGEEIEIVGIRPTVKTTCTGVEMFRKLLDQGQAGDNVGLLLRGTKREDVERGQVLCKPGSIKPHTHFTGEVYILSKDEGGRHTPFFNNYRPQFYFRTTDVTGSIELPQDKEMVMPGDNVSITVKLIAPIAMEEGLRFAIREGGRTVGAGVVAKILD

SEQ ID NO: 2785 - DNA, 1176 bp, Silicibacter sp. TM1040
  CDS (1)..(1176): transl_table=11
atggctaaggaaaagtttgaacgtaataaaccgcacgtcaacatcggcaccgttggccacgttgaccacggtaaaaccacgctgaccgcagcaatcaccaaatacttcggcgacttcaaggcatacgaccagatcgatggcgcgccggaagaaaaagcgcgtggtatcaccatctccaccgcccacgtggaatacgaaaccgaaggccgtcactacgcacacgtcgactgccccggccacgctgactatgtgaaaaacatgatcaccggtgcggcgcagatggacggcgcgatcctggttgtgaacgcagccgacggcccgatgccccagacccgcgagcacatcctgctggcgcgtcaggttggcgttcccgcgctggtcgtgttcatgaacaaagtggaccaggtcgacgacgaagagctgctcgagctcgtcgagatggaaatccgcgaattgctgtcgtcctacgacttccccggcgacgatatcccgatcatcgcaggttccgctctggcggcgatggaaggccgtgacccggaaatcggcgaaaacaagatcaaggaactgatggcggctgtggatgagtacatcccgacccccgagcgcgctgttgaccagccgttcctgatgccgatcgaagacgtgttctcgatctctggccgtggtaccgttgtgaccggtcgtgttgagcgtggcgtgatcaatgttggcgacaacatcgaaatcgttggcatcaaagacaccaccaccaccacctgtaccggtgtggaaatgttccgcaagctgctggaccgcggtgaagcaggcgacaacatcggcgccctgctgcgtggtatcgaccgtgaagcggttgagcgtggccaggttctgtgtaagccgggctccgtgaccccgcacaccaaattcgaggcagaagcttatattctgaccaaagaagaaggtggccgtcacaccccgttctttgcgaactaccgtccgcagttctacttccgcaccaccgacgtgaccggcaccgtgaccctgccggaaggcaccgaaatggtgatgccgggcgacaacctgaagttcgaagttgaactgatcgccccgatcgcaatggaagacggtctgcgtttcgcgatccgcgaaggcggccgcaccgttggcgcgggcgttgtgtccaagatcctcgcgtaa

SEQ ID NO: 2786 - protein, 391 aa, Silicibacter sp. TM1040
MAKEKFERNKPHVNIGTVGHVDHGKTTLTAAITKYFGDFKAYDQIDGAPEEKARGITISTAHVEYETEGRHYAHVDCPGHADYVKNMITGAAQMDGAILVVNAADGPMPQTREHILLARQVGVPALVVFMNKVDQVDDEELLELVEMEIRELLSSYDFPGDDIPIIAGSALAAMEGRDPEIGENKIKELMAAVDEYIPTPERAVDQPFLMPIEDVFSISGRGTVVTGRVERGVINVGDNIEIVGIKDTTTTTCTGVEMFRKLLDRGEAGDNIGALLRGIDREAVERGQVLCKPGSVTPHTKFEAEAYILTKEEGGRHTPFFANYRPQFYFRTTDVTGTVTLPEGTEMVMPGDNLKFEVELIAPIAMEDGLRFAIREGGRTVGAGVVSKILA

SEQ ID NO: 2787 - DNA, 1191 bp, Myxococcus xanthus DK 1622
  CDS (1)..(1191): transl_table=11
atggccaaggagaagttcgagcgtaacaagccccacgtgaacatcggcacgatcggacacgtggaccacggcaagacgtcgctgacggccgccatcaccaaggtgctggcgaagacgggcggcgccacgttcctggcgtacgacctgattgacaaggcgccggaggagcgtgagcgcggtatcacgatttccacctcgcacgtggagtaccagacgtcgaaccggcactacgcccacgtcgactgtccgggccacgccgactacgtgaagaacatgatcacgggcgcggcgcagatggacggcgccatcctggtggtgtcggcggcggacggcccgatgccgcagacgcgtgagcacatcctgctggcgcgccaggtcggcgttccgtacatcgtggtcttcctgaacaaggtggacatgctggacgaccccgagctgcgcgagctcgtggagatggaagtccgcgacctgctgaagaagtacgagttccctggcgatgacatccccatcatcccgggctcggcgctgaaggcgctggagggtgacaccagcgacatcggcgagccggccatcctgaagctgatggaggcggtggacagctacatcccgacgccgcagcgcgcgacggacaagcccttcctgatgccggtggaggacgtgttctccatctccggccgcggcacggtggccacgggccgcgtcgagcgcggtatcatcaaggtcggcgaggaagtggaagtcgttggtctgcgcccgacgcagaagacggtcgtcacgggcgtggagatgttccgcaagctgctggaccagggcatggcgggcgacaacatcggcgcgctggtgcgcggcctgaagcgcgaggacatggagcgcggccaggtgctggccaagccgggcagcatcaccccgcacaccaagttcaaggcgcagatctacgtgctgtcgaaggaagagggcggtcgtcacaccccgttcttcaagggctaccgcccgcagttctacttccgcaccacggacgtgacgggctcggtgaagctgccggagaacgtcgaaatggtgatgccgggcgacaacatcgccatcgaggtggagctcatcacccccgtggccatggagaaggagctgcgcttcgctgttcgcgagggtggccgcaccgtgggcgccggcgtcgtggcggaaatcatcgagtaa

SEQ ID NO: 2788 - protein, 396 aa, Myxococcus xanthus DK 1622
MAKEKFERNKPHVNIGTIGHVDHGKTSLTAAITKVLAKTGGATFLAYDLIDKAPEERERGITISTSHVEYQTSNRHYAHVDCPGHADYVKNMITGAAQMDGAILVVSAADGPMPQTREHILLARQVGVPYIVVFLNKVDMLDDPELRELVEMEVRDLLKKYEFPGDDIPIIPGSALKALEGDTSDIGEPAILKLMEAVDSYIPTPQRATDKPFLMPVEDVFSISGRGTVATGRVERGIIKVGEEVEVVGLRPTQKTVVTGVEMFRKLLDQGMAGDNIGALVRGLKREDMERGQVLAKPGSITPHTKFKAQIYVLSKEEGGRHTPFFKGYRPQFYFRTTDVTGSVKLPENVEMVMPGDNIAIEVELITPVAMEKELRFAVREGGRTVGAGVVAEIIE

SEQ ID NO: 2789 - DNA, 1230 bp, Helicosporidium sp. ex Simulium jonesii
  CDS (1)..(1230): transl_table=11
atggcacgtgaaaaatttgaacgtataaaaccacatatcaatattggtacaataggacatgtagatcatggtaaaactacattaacagctgctataactatggcattagcaagcataggaaatactaaaggaaaaaattatgctgatattgattcagctcctgaagaaaaagcacgaggaattactataaatacaacacatgttgaatatgaaacagctaagcgccattatgcccatgtagattgtccaggacatgccgactatattaaaaatatgattacaggagctgctcaaatggatggtgctattttagtagtttcaggagctgatggtccaatgcctcaaactcgagaacatatagtattagctaagcaagtaggtgtaccttctatggtagtttttattaataaagaaggtcaagtagatgatccagaaattttagagcttgtagaattagaagttagagatcttctaacaagttacaaatttgaaggagaagaggtacctgtaataacaggttctgctcttttagctttagaagcctttataaaaaatccaaaaatattaaaaggagaaaatccttgggtcgacaaaatatataatttaatggatagtgttgattcatatatacctacaccagttcgtgaaattgataaaccctttttaatggctatagaagacgtcttttctataagtggtcgtggaacagtagctacaggacgcatagagcgtggtaaaataaaaatgggagattctattgaaattattggagggtctttaagaaaaacaactacagtaacaggaatagaaatgtttcaaaaaacattaactgatggtgtagctggcgataatgtaggtattttaatgcgcgggattcaaaaaaaagaaattgaacgaggaatggtattaactaagcctaaatcaatagatccattaacaagttttgaagcacaagtttatttattaactaaagaagaaggaggacgttctaaaggctttacaataggttatagacctcagttttatgttcgtactacagatgtaacaggggctattttaaatatgcttagtgatgataatacaccattaaaaatagcatcacctggagatagaataacaatgtcagttaaacttattcaaccaatcgctcttgaaaaaaatatgagatttgctatacgtgaaggaggtaaaacagtaggagctggagtagtctcaaaattaattaattaa

SEQ ID NO: 2790 - protein, 409 aa, Helicosporidium sp. ex Simulium jonesii
MAREKFERIKPHINIGTIGHVDHGKTTLTAAITMALASIGNTKGKNYADIDSAPEEKARGITINTTHVEYETAKRHYAHVDCPGHADYIKNMITGAAQMDGAILVVSGADGPMPQTREHIVLAKQVGVPSMVVFINKEGQVDDPEILELVELEVRDLLTSYKFEGEEVPVITGSALLALEAFIKNPKILKGENPWVDKIYNLMDSVDSYIPTPVREIDKPFLMAIEDVFSISGRGTVATGRIERGKIKMGDSIEIIGGSLRKTTTVTGIEMFQKTLTDGVAGDNVGILMRGIQKKEIERGMVLTKPKSIDPLTSFEAQVYLLTKEEGGRSKGFTIGYRPQFYVRTTDVTGAILNMLSDDNTPLKIASPGDRITMSVKLIQPIALEKNMRFAIREGGKTVGAGVVSKLIN

SEQ ID NO: 2791 - DNA, 1176 bp, Mesorhizobium sp. BNC1
  CDS (1)..(1176): transl_table=11
atggccaaaggtaaatttgagcgcacgaagccgcatgtgaacatcgggacgattggtcacgtcgaccatgggaagacgtctctgacggccgcgatcacgaagtatttcggtgagttcaaggcttacgatcagattgacgcggcgcctgaggaaaaggcgcgcggcatcacgatctcgacggcgcatgtggaatacgagacggagaaccggcactacgcgcatgtggactgccccggccacgcggactatgtgaagaacatgatcacgggcgcggcgcagatggacggcgcgatcctggttgtttcggccgccgacggcccgatgccgcagacgcgcgagcacattcttcttgcgcgccaggttggcgttccggcgatcgtggtgttcctgaacaaggttgaccaggtggacgacccggagcttctggagctggtggagctggagatccgcgagcttctgtcgaaatacgagttcccgggcgacgacattccgatcgtcaagggctcggcgcttgcggcgcttgaggattcgaacaaggagatcggcgaggacgcggtgcgccagctgatggccgaggtcgacaagtacatcccgacgccggagcgtccgatcgaccagccgttcctgatgcctatcgaggacgtgttctcgatttcgggccgcggcacggtggtgacggggcgcgttgagcgcggcgttgtgaaggtgggcgaggaagtcgagatcgtcggcatccgtccgacctcgaagacgacggtgacgggcgtggagatgttccgcaagctgctcgaccaggggcaggcgggcgacaatatcggcgcgcttttgcgcggcatcgaccgtgagggcgtcgagcgcgggcaggttcttgccaagccgggctcggtgaccccgcacacgaagttcaaggccgaggcctatatcctgaccaaggaggagggcgggcgccacacgccgttcttcaccaactaccggccgcaattctatttccgcacgacggacgtgacgggcgtcgtgacgctgccggaaggcacggagatggtgatgccgggcgacaatgtgacgatggacgtgacgctgatcgtgccgatcgccatggaggagcgcctgcgcttcgccatccgcgaaggcggccgcaccgtcggggccggcatcgtcgccagcatcacagagtaa

SEQ ID NO: 2792 - protein, 391 aa, Mesorhizobium sp. BNC1
MAKGKFERTKPHVNIGTIGHVDHGKTSLTAAITKYFGEFKAYDQIDAAPEEKARGITISTAHVEYETENRHYAHVDCPGHADYVKNMITGAAQMDGAILVVSAADGPMPQTREHILLARQVGVPAIVVFLNKVDQVDDPELLELVELEIRELLSKYEFPGDDIPIVKGSALAALEDSNKEIGEDAVRQLMAEVDKYIPTPERPIDQPFLMPIEDVFSISGRGTVVTGRVERGVVKVGEEVEIVGIRPTSKTTVTGVEMFRKLLDQGQAGDNIGALLRGIDREGVERGQVLAKPGSVTPHTKFKAEAYILTKEEGGRHTPFFTNYRPQFYFRTTDVTGVVTLPEGTEMVMPGDNVTMDVTLIVPIAMEERLRFAIREGGRTVGAGIVASITE

SEQ ID NO: 2793 - DNA, 1185 bp, Haemophilus somnus 129PT
  CDS (1)..(1185): transl_table=11
gtgtctaaagaaaaatttgaacgtacaaaaccgcacgtaaacgtgggtacaatcggccacgttgaccacggtaaaacaactttaacagcagcgatcacgactgtattatccaaacactttggtggtgcggcacgtgcatttgaccaaattgataacgcaccggaagagaaagcacgtggtatcactatcaacacttcacacgttgaatatgatacagcgacacgtcactacgcacacgttgactgtccgggacatgctgactatgtaaaaaatatgattacaggtgcggcacaaatggacggagctattttagtggtagcggcaacagacggtccaatgccacaaactcgtgagcacatcttattaggtcgtcaggtgggtgtaccgtacatcatcgtattcttaaacaaatgcgacatggtagatgacgaagaattattggaattggttgagatggaagtacgtgaattactttctcaatacgacttcccgggcgatgacacaccaattgtacgtggttcagcattacaagcattaaatggagttgctgagtgggaagaaaaaattcttgaattagcatctcacttagacaactatattccggagcctgagcgtgcgattgaccaaccgttcttattaccgattgaagatgttttctcaatttcaggacgtggtacagtagtaaccggacgtgtagagcgtggtattattcgtactggtgaagaagttgaaattgtcggtattaaagagacaacaaaaaccacagtaacgggtgtagaaatgttccgtaaattattagacgaaggtcgtgcgggagaaaacattggagcgttattacgtggaacaaaacgtgaagaaattgaacgtggtcaagtattagcgaaacctggttcaattacaccgcacacagactttgaatcggaagtgtatgtgttgtcaaaagaggaaggaggacgtcatacaccattcttcaaaggttaccgtccacaattctatttccgtactactgacgtaactggtacaattgaattaccggaaggtgttgaaatggtcatgcctggcgataacatcaaaatgacagtaagcttaattcacccgattgcgatggaccaagggttacgttttgcgattcgtgaaggtggacgtactgtaggtgcgggtgttgttgctaagattattaagtaa

SEQ ID NO: 2794 - protein, 394 aa, Haemophilus somnus 129PT
MSKEKFERTKPHVNVGTIGHVDHGKTTLTAAITTVLSKHFGGAARAFDQIDNAPEEKARGITINTSHVEYDTATRHYAHVDCPGHADYVKNMITGAAQMDGAILVVAATDGPMPQTREHILLGRQVGVPYIIVFLNKCDMVDDEELLELVEMEVRELLSQYDFPGDDTPIVRGSALQALNGVAEWEEKILELASHLDNYIPEPERAIDQPFLLPIEDVFSISGRGTVVTGRVERGIIRTGEEVEIVGIKETTKTTVTGVEMFRKLLDEGRAGENIGALLRGTKREEIERGQVLAKPGSITPHTDFESEVYVLSKEEGGRHTPFFKGYRPQFYFRTTDVTGTIELPEGVEMVMPGDNIKMTVSLIHPIAMDQGLRFAIREGGRTVGAGVVAKIIK

SEQ ID NO: 2795 - DNA, 1230 bp, Trichodesmium erythraeum IMS101
  CDS (1)..(1230): transl_table=11
atggcacgtgcaaaatttgaaagaaataaacctcatgtcaatattggaactattggccatgtagaccacggtaaaacaaccttaactgctgcaattacaatgagtctagcagcgcaaggaaaggctaaggcaagaaattatgcagatattgatgcagctccagaagagaaagcacggggtatcacaattaatactgctcatgtagagtatgaaacagaaggacgtcactatgctcatgtagattgtccaggacatgctgactacgtaaaaaatatgattacaggtgcagctcaaatggatggtgcaattctagtagtttcagctgcagatggcccaatgccccaaactcgtgagcatattctgttagcaaaacaagtgggggttcctaatatagttatcttccttaacaagcaagatatggtagatgatgaagaacttttagaactagtggaactggaagttagggaacttttaagcgactatgattttgatggagataatattcctatcgtggctggttctgctttacaggcagtagaagcactaacagcaaacccaggaataggaaagggagaaaatgaatgggtagataaaattctctctctgatggatgaagttgatgggtacattcctcaaccagaacgtgatgttgataagccattcttaatggcggtagaagacgtattttctattacgggtcgcggtactgtagctacaggacggattgaacgtggtaagataaaagttggggaaactgtagaattggttggaattaaagatactcgcaatagtactgttacaggtgtggaaatgttccagaaaattctggacgaaggaatggctggagataatgtaggattactactacgtggtatgcagaaagatgatatccaacgtggtatggttttagctaaatcaggttctattactccccataagaagtttgagtcagaagtatatgttctcaaaaaggaggaaggaggccgtcatacacctttcttcccaaattatcgccctcaattctatattcggacaacagatgtgactggtgctattgagtcttttactgctgatgatggtagtgtggcagagatggtcatgcctggtgacaggattaaaatgacagttcaactaatcaatccagtggccattgaacaaggtatgcgttttgccattcgtgaaggtgggagaactattggcgctggtgttgtctctaagattgtagagtag

SEQ ID NO: 2796 - protein, 409 aa, Trichodesmium erythraeum IMS101
MARAKFERNKPHVNIGTIGHVDHGKTTLTAAITMSLAAQGKAKARNYADIDAAPEEKARGITINTAHVEYETEGRHYAHVDCPGHADYVKNMITGAAQMDGAILVVSAADGPMPQTREHILLAKQVGVPNIVIFLNKQDMVDDEELLELVELEVRELLSDYDFDGDNIPIVAGSALQAVEALTANPGIGKGENEWVDKILSLMDEVDGYIPQPERDVDKPFLMAVEDVFSITGRGTVATGRIERGKIKVGETVELVGIKDTRNSTVTGVEMFQKILDEGMAGDNVGLLLRGMQKDDIQRGMVLAKSGSITPHKKFESEVYVLKKEEGGRHTPFFPNYRPQFYIRTTDVTGAIESFTADDGSVAEMVMPGDRIKMTVQLINPVAIEQGMRFAIREGGRTIGAGVVSKIVE

SEQ ID NO: 2797 - DNA, 1185 bp, Shewanella sp. MR-4
  CDS (1)..(1185): transl_table=11
atggcaaaagctaaatttgaacgtaataagccccatgttaacgtgggcaccatcggtcacgttgaccatggtaaaaccactctgactgcagctatctctcacgtactggctaagacctacggtggtgaagctaaagacttctctcaaatcgataacgctccagaagagcgtgagcgcggtattaccatcaatacctctcacatcgaatacgatactccaactcgccactacgcacacgtagactgcccaggccacgctgactatgttaaaaacatgatcactggtgctgcacagatggacggcgcgatcctggtagtagcttctactgacggtccaatgccacaaactcgtgagcacatcctgctgtctcgccaagtaggcgtaccattcatcatcgtattcatgaacaagtgtgacatggttgacgatgctgaactgttagaattagtagaaatggaagtacgtgaactgttatcagaatacgacttcccaggtgatgacttaccagttatccaaggttctgctctgaaagcgctagaaggcgagccagagtgggaagctaagatcatcgaattagcagaagcactggattcttacattccagaaccagagcgtgatatcgataagccattcctgatgccaatcgaagacgtattctcaatctctggccgtggtacagtagtaactggtcgtgttgagcgtggtatcgtacgtgttggtgacgaagtagaaatcgttggtatccgtgcaaccactaagacaacctgtactggtgttgaaatgttccgtaagctgcttgacgaaggtcgtgcaggtgagaactgtggtatcctgttacgtggtactaagcgtgatgacgtagaacgtggtcaagtattatctaagccaggctcaatcaacccacacactacttttgaatcagaagtatacgttctgtcaaaagaagaaggtggtcgtcacactccattcttcaaaggctaccgtccacagttctacttccgtacaactgacgtgactggaactatcgaactgccagaaggcgtagagatggtaatgccaggcgacaacatcaagatgaaagtcaccctgatctgcccaatcgcgatggacgaaggtttacgcttcgcaatccgtgaaggtggccgtacagtcggtgcaggtgttgtagctaagattttcgcttaa

SEQ ID NO: 2798 - protein, 394 aa, Shewanella sp. MR-4
MAKAKFERNKPHVNVGTIGHVDHGKTTLTAAISHVLAKTYGGEAKDFSQIDNAPEERERGITINTSHIEYDTPTRHYAHVDCPGHADYVKNMITGAAQMDGAILVVASTDGPMPQTREHILLSRQVGVPFIIVFMNKCDMVDDAELLELVEMEVRELLSEYDFPGDDLPVIQGSALKALEGEPEWEAKIIELAEALDSYIPEPERDIDKPFLMPIEDVFSISGRGTVVTGRVERGIVRVGDEVEIVGIRATTKTTCTGVEMFRKLLDEGRAGENCGILLRGTKRDDVERGQVLSKPGSINPHTTFESEVYVLSKEEGGRHTPFFKGYRPQFYFRTTDVTGTIELPEGVEMVMPGDNIKMKVTLICPIAMDEGLRFAIREGGRTVGAGVVAKIFA

SEQ ID NO: 2799 - DNA, 1185 bp, Shewanella sp. MR-4
  CDS (1)..(1185): transl_table=11
gtggcaaaagctaaatttgaacgtaataagcctcacgtaaacgtgggcaccatcggtcacgttgaccatggtaaaaccactctgactgcagctatctctcacgtactggctaagacctacggtggtgaagctaaagacttctctcaaatcgataacgctccagaagagcgtgagcgcggtattaccatcaatacctctcacatcgaatacgatacaccaactcgtcactacgcacacgtagactgcccaggccacgctgactatgttaaaaacatgatcactggtgctgcacagatggacggcgcgatcctggtagtagcttctactgacggtccaatgccacaaactcgtgagcacatcctgctgtctcgccaagtaggcgtacctttcatcatcgtattcatgaacaagtgtgacatggttgacgatgctgaactgttagaattagtagaaatggaagtacgtgaactgttatcagaatacgacttcccaggtgatgacttaccagttatccaaggttctgctctgaaagcgctagaaggcgagccagagtgggaagctaagatcatcgaattagcagcggcactggattcttacattccagaaccagagcgtgatatcgataagccattcctgatgccaatcgaagacgtattctcaatctctggccgtggtacagtagtaactggccgtgttgagcgtggtatcgtacgtgttggtgacgaagtagaaatcgttggtatccgtacaacgactaagacaacctgtactggtgttgaaatgttccgtaagctgcttgacgaaggtcgtgcaggtgagaactgtggtatcctgttacgtggtactaagcgtgatgacgtagaacgtggtcaagtattatctaagccaggttcaatcaacccacacactacttttgaatcagaagtatacgttctgtcaaaagaagaaggtggtcgtcacactccattcttcaaaggctaccgtccacagttctacttccgtacaactgacgtgactggtaccatcgaactgccagaaggcgtagagatggtaatgccaggcgacaacatcaagatggttgttacgctgatctgcccaatcgcgatggacgaaggtttacgcttcgcaatccgtgaaggtggccgtacagtaggtgcaggtgttgtagctaagatcatcgcttaa

SEQ ID NO: 2800 - protein, 394 aa, Shewanella sp. MR-4
MAKAKFERNKPHVNVGTIGHVDHGKTTLTAAISHVLAKTYGGEAKDFSQIDNAPEERERGITINTSHIEYDTPTRHYAHVDCPGHADYVKNMITGAAQMDGAILVVASTDGPMPQTREHILLSRQVGVPFIIVFMNKCDMVDDAELLELVEMEVRELLSEYDFPGDDLPVIQGSALKALEGEPEWEAKIIELAAALDSYIPEPERDIDKPFLMPIEDVFSISGRGTVVTGRVERGIVRVGDEVEIVGIRTTTKTTCTGVEMFRKLLDEGRAGENCGILLRGTKRDDVERGQVLSKPGSINPHTTFESEVYVLSKEEGGRHTPFFKGYRPQFYFRTTDVTGTIELPEGVEMVMPGDNIKMVVTLICPIAMDEGLRFAIREGGRTVGAGVVAKIIA

SEQ ID NO: 2801 - DNA, 1185 bp, Shewanella sp. MR-7
  CDS (1)..(1185): transl_table=11
gtggcaaaagctaaatttgaacgtaataagcctcacgtaaacgtgggcaccatcggtcacgttgaccatggtaaaaccactctgactgcagctatctctcacgtactggctaagacctacggtggtgaagctaaagacttctctcaaatcgataacgctccagaagagcgtgagcgcggtattaccatcaatacctctcacatcgaatacgatacaccaactcgccactacgcacacgtagactgcccaggccacgctgactatgttaaaaacatgatcacaggtgctgcacagatggacggcgcgatcctggtagtagcttctactgacggtccaatgccacaaacacgtgagcacatcctgctgtctcgccaagtaggcgtacctttcatcatcgtattcatgaacaagtgtgacatggttgacgatgctgaactgttagaattagtagaaatggaagtacgtgaactgttatcagaatatgacttcccaggtgatgacttaccagttatccaaggttctgctctgaaagcgctagaaggcgagccagagtgggaagctaagatcatcgaattagcagaagcactggattcttacattccagaaccagagcgtgatatcgataagccattcctgatgccaatcgaagacgtattctcaatctctggtcgtggtacagtagtaactggccgtgttgagcgtggtatcgtacgtgttggtgacgaagtagaaatcgttggtatccgtacaacgactaagacaacctgtactggtgttgaaatgttccgtaagctgcttgacgaaggtcgtgcaggtgagaactgtggtatcctgttacgtggtactaagcgtgatgacgtagaacgtggtcaagtattatctaagccaggttcaatcaacccacacactacttttgaatcagaagtatacgttctgtcaaaagaagaaggtggtcgtcacactccattcttcaaaggctaccgtccacagttctacttccgtacaactgacgtgactggtaccatcgaactgccagaaggcgtagagatggtaatgccaggcgacaacatcaagatggttgttacgctgatctgcccaatcgcgatggacgaaggtttacgcttcgcaatccgtgaaggtggccgtacagtaggtgcaggtgttgtagctaagatcatcgcttaa

SEQ ID NO: 2802 - protein, 394 aa, Shewanella sp. MR-7
MAKAKFERNKPHVNVGTIGHVDHGKTTLTAAISHVLAKTYGGEAKDFSQIDNAPEERERGITINTSHIEYDTPTRHYAHVDCPGHADYVKNMITGAAQMDGAILVVASTDGPMPQTREHILLSRQVGVPFIIVFMNKCDMVDDAELLELVEMEVRELLSEYDFPGDDLPVIQGSALKALEGEPEWEAKIIELAEALDSYIPEPERDIDKPFLMPIEDVFSISGRGTVVTGRVERGIVRVGDEVEIVGIRTTTKTTCTGVEMFRKLLDEGRAGENCGILLRGTKRDDVERGQVLSKPGSINPHTTFESEVYVLSKEEGGRHTPFFKGYRPQFYFRTTDVTGTIELPEGVEMVMPGDNIKMVVTLICPIAMDEGLRFAIREGGRTVGAGVVAKIIA

SEQ ID NO: 2803 - DNA, 1191 bp, Alkalilimnicola ehrlichei MLHE-1
  CDS (1)..(1191): transl_table=11
atgtccaagagcaagtttgagcgtaagaagccacacgtaaacgtagggaccattggtcacgttgaccatggtaagacgacgctgacggcggcgatgacggtggtgctggcggaagcgtttgggggtgacgcccgggcctttgatcagattgacaacgcgccggaggagaaggcgcgtggtatcacgattgcgacggcgcacgtggagtatgagacgagtgagcgtcactatgcgcacgtggactgcccgggtcacgcggattatgtgaagaacatgatcacgggtgcggcgcagatggacggtgccattttggtggtgtctgctgcggacggtccgatgccgcagacgcgggagcacattttgctggcgcgtcaggtgggtgtgccgtacatcgtggtttacctgaacaaggcggacatggtggacgacgaggagcttctggagctggtggagatggaggtccgggagcttctgagtgattacgatttcccgggtgatgacacgccggtgatcacgggttcggcgctgaaggcgctggagggtgatgactcggagattggcaagccgtcgatcatcaagctggcggaggcgatggatgagtacatcccgacgccggagcgtccggtggatcagccgttcctgatgccgattgaggacgtgttctcgatttcgggtcggggcacggtggtgacgggtcgtgtggagcgtggtgtgatcaagaccggtgaggaggttgagattgtgggtctgaaggagacccagaagacgacctgcacgggtgttgagatgttccgcaagatgctggaccagggtgaggccggtgataacatcggtgcgctgctgcgtggcaccaagcgggatgaggtggagcgtggtcaggtgctgtgcaagccgggcagcatcacgccgcacacgaagtttgagtgtgaggtgtacgtgctgagcaaggacgaggggggtcgacacaccccgttctttaacggttaccgtccgcagttttacttccgtaccacggacgtgaccggttcctgcgagctgcccgagggtgtggagatggtgatgccgggtgacaacgtcaagatgacggtgtcgctgattgcgcccatcgccatggaagatgggctgcgtttcgcggtccgcgagggcggccgcaccgtgggtgccggcgtcgtctccaagatcatcgagtaa

SEQ ID NO: 2804 - protein, 396 aa, Alkalilimnicola ehrlichei MLHE-1
MSKSKFERKKPHVNVGTIGHVDHGKTTLTAAMTVVLAEAFGGDARAFDQIDNAPEEKARGITIATAHVEYETSERHYAHVDCPGHADYVKNMITGAAQMDGAILVVSAADGPMPQTREHILLARQVGVPYIVVYLNKADMVDDEELLELVEMEVRELLSDYDFPGDDTPVITGSALKALEGDDSEIGKPSIIKLAEAMDEYIPTPERPVDQPFLMPIEDVFSISGRGTVVTGRVERGVIKTGEEVEIVGLKETQKTTCTGVEMFRKMLDQGEAGDNIGALLRGTKRDEVERGQVLCKPGSITPHTKFECEVYVLSKDEGGRHTPFFNGYRPQFYFRTTDVTGSCELPEGVEMVMPGDNVKMTVSLIAPIAMEDGLRFAVREGGRTVGAGVVSKIIE

SEQ ID NO: 2805 - DNA, 1191 bp, Hyphomonas neptunium ATCC 15444
  CDS (1)..(1191): transl_table=11
atgggcaaggcaaagtttgagcgcaacaagccgcacgtaaacattggcacgattggccacgttgaccacggcaagacgacgctgacagcggcgatcacgatcacgctggcgaagaccggtggcgcgacggcgaagaattacgccgacattgacgcggcgccggaagagaaggcacgcgggatcacgatcaacacggcgcacgtcgagtatgagacgcctgcccgtcactatgcccacgtcgactgccccggccacgctgactatgtgaagaacatgatcaccggcgctgcgcagatggacggcgcgatcctggtgtgttcggccgctgacggcccgatgccgcagacgcgtgagcacatccttctggcccgccaggttggcgtgccggcgctggtggtgttcctcaacaaggtcgacatggtcgacgatgaggagcttctggagctggtcgagatggaagtgcgcgagctgctttcgtcctacaacttccctggcgacgacattccgatcatcaagggctcggctctggccgctgttgaagaccgcaatcctgaaatcggccaggaccgtatcctggagctgatgaaggctgtggacgagtacatcccgacgccggagcgtccgctggacaagccgttcctgatgccggttgaagacgtgttctcgatctcgggccgcggtacggttgtgaccggccgggttgagcagggcatcgtcaaggttggcgaagaaatcgagatcgtcggcatccgcccgacggtgaagacgacctgcacgggcgttgagatgttccgcaagctgctcgaccagggccaggctggcgacaacatcggcgcgctgctgcgcggtgttgaccgtgaaggcgttgagcgcgggcaggttctctgcaagccgggctcgatcacgccgcacacgctgttcgaagccgaagcctacatcctgacgaaggaagagggtggccgtcacacgccgttcttcaccaactaccgtccgcagttctacttccgcaccacggacgtcacaggcatcgtcaagctgcctgaggacaaagagatggttctgccgggcgacaacgtgaaaatggatgtcgagctgatcaacccgatcgccatggacaagggcctgcgcttcgccatccgcgaaggcggccgcaccgtcggcgccggcgtcgtctccgaaatcaagaaataa

SEQ ID NO: 2806 - protein, 396 aa, Hyphomonas neptunium ATCC 15444
MGKAKFERNKPHVNIGTIGHVDHGKTTLTAAITITLAKTGGATAKNYADIDAAPEEKARGITINTAHVEYETPARHYAHVDCPGHADYVKNMITGAAQMDGAILVCSAADGPMPQTREHILLARQVGVPALVVFLNKVDMVDDEELLELVEMEVRELLSSYNFPGDDIPIIKGSALAAVEDRNPEIGQDRILELMKAVDEYIPTPERPLDKPFLMPVEDVFSISGRGTVVTGRVEQGIVKVGEEIEIVGIRPTVKTTCTGVEMFRKLLDQGQAGDNIGALLRGVDREGVERGQVLCKPGSITPHTLFEAEAYILTKEEGGRHTPFFTNYRPQFYFRTTDVTGIVKLPEDKEMVLPGDNVKMDVELINPIAMDKGLRFAIREGGRTVGAGVVSEIKK

SEQ ID NO: 2807 - DNA, 1176 bp, Rhizobium leguminosarum bv. viciae 3841
  CDS (1)..(1176): transl_table=11
atgggaaagagtaagtttgagcgcaacaagccgcacgtcaacattggcacgattggccacgttgaccacggtaagacgtctctgacggcagcgatcacgaagtacttcggtgagtacaaggcgtacgaccagatcgacgcggctccggaagaaaaggcgcgtggcatcacgatttcgacggcccacgttgaatacgagacgccggcccgccactacgcccacgtcgactgccccggccacgccgactacgtcaagaacatgatcaccggtgctgcccagatggacggcgcgatccttgtgtgctcggccgctgacggcccgatgccgcagacgcgcgaacacattctgctggctcgccaggttggcgttccggcaatcgtggtgttcctgaacaaggtcgaccaggtcgacgacgccgagcttctcgaactggtcgagctcgaagttcgcgaactgctgtcgtcctacgacttcccgggcgacgatattccgatcatcaagggttccgcacttgctgcccttgaagattcggacaagaagatcggcgaagacgcgatccgcgagctgatggctgcggttgacgcctacatcccgacgcctgagcgtccgatcaacctgccgttcctgctgccgatcgaagacgtgttctcgatctcgggccgcggcacggttgtgaccggccgcgtcgagcgtggcattgtcaaggttggcgaagaagtcgagatcgtcggcatccgcccgacgacgaagacgacggtgaccggcgttgaaatgttccgcaagctgctcgatcagggccaggctggcgacaacatcggcgcgctgatccgcggcgtcacccgtgacggcgttgagcgtggccagattctgtgcaagccgggttcggtcaagccgcacaagaagttcatggcagaagcctacatcctgacgaaggaagagggtggtcgtcatacgccgttcttcaccaactaccgtccgcagttctacttccgcacgaccgacgtgacgggcatcgtgacgctgccggaaggcacggagatggtcatgccgggcgacaacgtcacggtatcggtcgagctgatcgttccgatcgcgatggaagaaaagctgcgcttcgcgatccgcgaaggcggccgcaccgtcggcgccggtatcgtcgcgtcgatcgtcgagtaa

SEQ ID NO: 2808 - protein, 391 aa, Rhizobium leguminosarum bv. viciae 3841
MGKSKFERNKPHVNIGTIGHVDHGKTSLTAAITKYFGEYKAYDQIDAAPEEKARGITISTAHVEYETPARHYAHVDCPGHADYVKNMITGAAQMDGAILVCSAADGPMPQTREHILLARQVGVPAIVVFLNKVDQVDDAELLELVELEVRELLSSYDFPGDDIPIIKGSALAALEDSDKKIGEDAIRELMAAVDAYIPTPERPINLPFLLPIEDVFSISGRGTVVTGRVERGIVKVGEEVEIVGIRPTTKTTVTGVEMFRKLLDQGQAGDNIGALIRGVTRDGVERGQILCKPGSVKPHKKFMAEAYILTKEEGGRHTPFFTNYRPQFYFRTTDVTGIVTLPEGTEMVMPGDNVTVSVELIVPIAMEEKLRFAIREGGRTVGAGIVASIVE

SEQ ID NO: 2809 - DNA, 1188 bp, Pediococcus pentosaceus ATCC 25745
  CDS (1)..(1188): transl_table=11
atggcaaaagaacattacgaaagaacaaaaccccatgtaaatattggtacaattggccacgttgaccatgggaaaactactttgacagctgctattacaaaagtgttgtcagaaaaaggactagctaaagcttcagattacgctgatattgatgctgctccagaagaaaaggaacgtggtatcacaatcaacacagcccacgttgaatatgaaacagaaaagcgtcattacgctcatatcgatgctccaggacatgctgattacgttaagaacatgatcactggtgctgcacaaatggatggtgctatcttagttgttgctgcaactgatggtcctatgccacaaacacgtgaacatatccttcttgctcaccaagttggtgttgactacatcgttgtcttcttaaacaagactgatcttgttgatgatgatgaattagttgaccttgttgagatggaagttcgtgaacttctatctgaatatgatttccctggtgacgatgttcctgtacttcgcggttcagctttgaaagctcttgaaggcgatgcagaacaagaaaaagttatcatggatcttatggatacaatcgacgaatacattccaacaccagaacgttctacagacaagccattcttgatgcctgttgaagacgtatttacaattactggtcgtggtactgttgcttctggtcgtatcgatcgtggtgaaatcaaagtcggtgacgaagttgaaatcgttggtcttaaagaagacgtaacaaagacaactgttacaggaattgaaatgttccgtaagactcttgatgttggtgaagctggtgataacattggtgcacttctacgtggtgttaaccgtgaagatgttgtccgtggacaagttttggctgctcctggctcaatccaaacacacaagaagttcaagggtgaagtttatatcctttctaaggatgaaggtggacgtcatactccattcttctcaaactaccgtcctcaattctacttccatacaactgatgtaacaggtgttattgaattacctgacaacgttgaaatggttatgcctggtgataacgttacatttactgtagaacttatcgaaccagttgctattgaaaaaggtactaagttcactgttcgtgaaggtggacacactgttggtgctggtgttgtatcagaaattgacgactaa

SEQ ID NO: 2810 - protein, 395 aa, Pediococcus pentosaceus ATCC 25745
MAKEHYERTKPHVNIGTIGHVDHGKTTLTAAITKVLSEKGLAKASDYADIDAAPEEKERGITINTAHVEYETEKRHYAHIDAPGHADYVKNMITGAAQMDGAILVVAATDGPMPQTREHILLAHQVGVDYIVVFLNKTDLVDDDELVDLVEMEVRELLSEYDFPGDDVPVLRGSALKALEGDAEQEKVIMDLMDTIDEYIPTPERSTDKPFLMPVEDVFTITGRGTVASGRIDRGEIKVGDEVEIVGLKEDVTKTTVTGIEMFRKTLDVGEAGDNIGALLRGVNREDVVRGQVLAAPGSIQTHKKFKGEVYILSKDEGGRHTPFFSNYRPQFYFHTTDVTGVIELPDNVEMVMPGDNVTFTVELIEPVAIEKGTKFTVREGGHTVGAGVVSEIDD

SEQ ID NO: 2811 - DNA, 1191 bp, Oenococcus oeni PSU-1
  CDS (1)..(1191): transl_table=11
ttggctgaaaaggaacattacgaaagaactaagccgcacgttaatattggtactatcggtcatgttgatcatggtaaaaccactttaacggctgctatcactaaggtattgtctgaaaagggccttgcgcaagctcaagattatgcctcaattgatgccgctcctgaagagcgtgaacgtggaatcaccatcaatactgcccacgttgaatatgaaactgataagcgtcactatgcacacatcgatgcaccaggtcacgccgactatgttaaaaatatgatcactggagccgcacaaatggatggagccatccttgttgttgctgctactgatggtcctatgccacagactcgtgaacatattttgcttgcccgtcaagttggtgttaactatattgttgtcttcttaaataagactgaccttgttgatgatccagaattaatcgatcttgttgagatggaagttcgtgaacttttgtctgaatatgattttcctggagatgatattcctattattcgcggttctgctttgaaggctcttcaaggcgatccggaacaggaaaaagttatcttgcacttaatggatgttatcgatgaatacatcccaactccagttcgtgatgttgataagccattcttgatgcctgtcgaagatgtcttcactatcactggacgtggtactgttgcgtctggacgtatcgatcgtggaactgtcaagattaacgatccagttgaaattgttggtttgaaggatgaagttaaaaacactgttgttaccggtgttgaaatgttccggaagactttggatcttggtgaagccggagataatatcggagctctgcttcgtggaattgatcgcgatggtgttgaacgtggacaagttttggcaaagccaggttcaattcagacccataaaaagtttaagggtgaagtttatatccttactaaggaagaaggtggacgtcatactccattcttcactaactatcgtcctcaattctatttccacacgactgatgttaccggtgtcgtagaattgcctgaaggtgttgaaatggttatgcctggtgatcacgtcacatttactgttgaattgatgaaaccagtcgctatcgaaaaaggtttgaaattcactatccgtgaaggtggccacactgttggtgccggaactgtctctgaaattgatgactaa

SEQ ID NO: 2812 - protein, 396 aa, Oenococcus oeni PSU-1
MAEKEHYERTKPHVNIGTIGHVDHGKTTLTAAITKVLSEKGLAQAQDYASIDAAPEERERGITINTAHVEYETDKRHYAHIDAPGHADYVKNMITGAAQMDGAILVVAATDGPMPQTREHILLARQVGVNYIVVFLNKTDLVDDPELIDLVEMEVRELLSEYDFPGDDIPIIRGSALKALQGDPEQEKVILHLMDVIDEYIPTPVRDVDKPFLMPVEDVFTITGRGTVASGRIDRGTVKINDPVEIVGLKDEVKNTVVTGVEMFRKTLDLGEAGDNIGALLRGIDRDGVERGQVLAKPGSIQTHKKFKGEVYILTKEEGGRHTPFFTNYRPQFYFHTTDVTGVVELPEGVEMVMPGDHVTFTVELMKPVAIEKGLKFTIREGGHTVGAGTVSEIDD

SEQ ID NO: 2813 - DNA, 1188 bp, Leuconostoc mesenteroides subsp. mesenteroides ATCC 8293
  CDS (1)..(1188): transl_table=11
ttggctaaggaaacttacgttcgcactaagccccacgttaacattggtactattggacacgtcgatcacggaaagacgactttgactgccgctatctcaaaggtattggctgaaaagcaaggtgttgatgctactgattttgctgaaatcgataacgcgcctgaagaaaaagaacgtggtatcacaattaacacttctcatatcgaatatgaaacagagaagcgtcactatgcccacattgatgccccaggtcacgcggattacgttaaaaacatgatcactggtgctgcccaaatggatggtgctatcttggttgttgctgcaactgatggtcctatgccacaaacacgtgaacacatcttgttggcacgtcaagttggtgttgactacttggttgtcttcttgaacaagactgatttggttgatgatgaagaattagttgaattggttgaaatggaagttcgtgaattgttgtcagaatatgacttccctggtgacgatattcctgtacttaagggttcagctttgaaggctttggaaggtgatcctgaacaagttaaggttatcgaagaattgatggatactgttgattcatacattccagaaccagcacgtgaaacagacaagccattcttgatgcctgtcgaagatgtcttcacaatcactggtcgtggtacagttgcttctggtcgtgtcgaccgtggtgtattgactacaggaactgaaattgaaatcgttggtttgaaggacgaagttcaaaagactactgttacaggtatcgaaatgttccgtaagactttggaagaagctcaagcgggtgataacattggtgcattgttgcgtggtgttgatcgtagcaacattgaacgtggtcaagttttggcaaagccaggttcaattaagacacacaagaagttcaaggctgaagtttatgtcttgacaaaggaagaaggtggtcgtcatacaccattcttcactaactaccgtccacaattctacttccacacaactgatgttacaggtgttgttgaattgccagccggtgttgaaatggttatgcctggtgaccaagtgacattcgaaatcgaattgatctcaccagttgccatcgaacaagggttgaagtttactgttcgtgaaggtggccacactgttggtgctggaacagttactgatatcgaagactaa

SEQ ID NO: 2814 - protein, 395 aa, Leuconostoc mesenteroides subsp. mesenteroides ATCC 8293
MAKETYVRTKPHVNIGTIGHVDHGKTTLTAAISKVLAEKQGVDATDFAEIDNAPEEKERGITINTSHIEYETEKRHYAHIDAPGHADYVKNMITGAAQMDGAILVVAATDGPMPQTREHILLARQVGVDYLVVFLNKTDLVDDEELVELVEMEVRELLSEYDFPGDDIPVLKGSALKALEGDPEQVKVIEELMDTVDSYIPEPARETDKPFLMPVEDVFTITGRGTVASGRVDRGVLTTGTEIEIVGLKDEVQKTTVTGIEMFRKTLEEAQAGDNIGALLRGVDRSNIERGQVLAKPGSIKTHKKFKAEVYVLTKEEGGRHTPFFTNYRPQFYFHTTDVTGVVELPAGVEMVMPGDQVTFEIELISPVAIEQGLKFTVREGGHTVGAGTVTDIED

SEQ ID NO: 2815 - DNA, 1185 bp, Shewanella sp. ANA-3
  CDS (1)..(1185): transl_table=11
gtggcaaaagctaaatttgaacgtaataagcctcacgtgaacgtgggcaccatcggtcacgttgaccatggtaaaaccactctgactgcagctatctctcacgtactggctaagacctacggtggtgaagctaaagacttctctcaaatcgataacgctccagaagagcgtgagcgcggtattaccatcaatacctctcacatcgaatacgatacaccaactcgccattacgcacacgtagactgcccaggccacgctgactatgttaaaaacatgatcactggtgctgcacagatggacggcgcgatcctggtagtagcttctactgacggtccaatgccacaaacacgtgagcacatcctgctgtctcgccaagtaggcgtaccattcatcatcgtattcatgaacaaatgtgacatggttgacgatgctgagctgttagaattagtagaaatggaagtacgtgaactgttatcagaatacgacttcccaggtgatgacttaccagttatccaaggttctgctctgaaagcgcttgaaggcgagccagagtgggaagctaagatcatcgaattagccgctgcactggattcttacattccagaaccagagcgtgatatcgataagccattcctgatgccaatcgaagacgtattctcaatctctggccgtggtacagtagtaacaggtcgtgttgagcgtggtatcgtacgtgttggtgacgaagtagaaatcgttggtatccgtgcaactactaagacaacctgtactggtgttgaaatgttccgtaagctgcttgacgaaggtcgtgcaggtgagaactgtggtatcctgttacgtggtactaagcgtgatgacgtagaacgtggtcaagtattatctaagccaggttcaatcaacccacacactacttttgaatcagaagtatacgttctgtcaaaagaagaaggtggtcgtcacactccattcttcaaaggctaccgtccacagttctacttccgtacaactgacgtgacaggtactatcgaactgccagaaggcgtagagatggtaatgccaggcgacaacatcaagatgaaagtgactctgatctgcccaatcgcgatggacgaaggtttacgcttcgcaatccgtgaaggtggccgtacagtaggcgctggtgttgtagctaagattttcgcttaa

SEQ ID NO: 2816 - protein, 394 aa, Shewanella sp. ANA-3
MAKAKFERNKPHVNVGTIGHVDHGKTTLTAAISHVLAKTYGGEAKDFSQIDNAPEERERGITINTSHIEYDTPTRHYAHVDCPGHADYVKNMITGAAQMDGAILVVASTDGPMPQTREHILLSRQVGVPFIIVFMNKCDMVDDAELLELVEMEVRELLSEYDFPGDDLPVIQGSALKALEGEPEWEAKIIELAAALDSYIPEPERDIDKPFLMPIEDVFSISGRGTVVTGRVERGIVRVGDEVEIVGIRATTKTTCTGVEMFRKLLDEGRAGENCGILLRGTKRDDVERGQVLSKPGSINPHTTFESEVYVLSKEEGGRHTPFFKGYRPQFYFRTTDVTGTIELPEGVEMVMPGDNIKMKVTLICPIAMDEGLRFAIREGGRTVGAGVVAKIFA

SEQ ID NO: 2817 - DNA, 1191 bp, Mycobacterium smegmatis str. MC2 155
  CDS (1)..(1191): transl_table=11
gtggcgaaggcgaagttcgagcggacgaagccgcacgtcaacatcgggaccatcggtcacgttgaccacggcaagaccacgctgaccgcggctatcaccaaggttctgcacgacaagttccccgatttgaacgaatcgcgcgcattcgaccagatcgacaatgcgcctgaagagcgtcagcgcggtatcaccatcaacatctcccacgtggagtaccagaccgacaagcgtcactacgcacacgtcgacgcccccggtcacgctgactacatcaagaacatgatcaccggtgccgcccagatggacggcgcgatcctggtggtcgccgccactgacggcccgatgccgcagacccgcgagcacgtgctgctggcccgccaggtgggtgtgccctacatcctggtcgcgctgaacaagtcggacgcggtggacgacgaggagctcatcgagctcgtcgagatggaggtccgcgaactgctggccgcccaggacttcgacgaggaggcccccgtggtccgcgtctcggcgctcaaggcgctcgagggcgatcccaagtgggtcaagtcggtcgaggagctcatggaggccgtcgacgcgtccatcccggatccggtccgcgagaccgacaagccgttcctgatgcccgttgaggacgtcttcacgatcaccggtcgtggcaccgtcgtcaccggccgtgtcgagcgcggtgtgatcaacgtgaacgaggaagtcgagatcgtcggcatccgcccggagaccaccaagaccacggtcaccggtgtcgagatgttccgcaagctgctcgaccagggccaggccggtgacaacgtcggtctgctgctccgcggcatcaagcgcgaggacgtcgagcgtggccaggttgtggtcaagcccggcaccaccaccccgcacaccgagttcgagggccaggtctacatcctgtccaaggacgagggtggccgccacacgccgttcttcaacaactaccgtccgcagttctacttccgcaccacggacgtgaccggcgttgtgaccctgcccgagggcaccgagatggtgatgcccggtgacaacaccgacatctccgtcaagctgatccagcccgtcgccatggacgagggcctgcgcttcgcgatccgcgagggcggccgtaccgtcggcgccggccgcgtcaccaagatcatcaagtga

SEQ ID NO: 2818 - protein, 396 aa, Mycobacterium smegmatis str. MC2 155
MAKAKFERTKPHVNIGTIGHVDHGKTTLTAAITKVLHDKFPDLNESRAFDQIDNAPEERQRGITINISHVEYQTDKRHYAHVDAPGHADYIKNMITGAAQMDGAILVVAATDGPMPQTREHVLLARQVGVPYILVALNKSDAVDDEELIELVEMEVRELLAAQDFDEEAPVVRVSALKALEGDPKWVKSVEELMEAVDASIPDPVRETDKPFLMPVEDVFTITGRGTVVTGRVERGVINVNEEVEIVGIRPETTKTTVTGVEMFRKLLDQGQAGDNVGLLLRGIKREDVERGQVVVKPGTTTPHTEFEGQVYILSKDEGGRHTPFFNNYRPQFYFRTTDVTGVVTLPEGTEMVMPGDNTDISVKLIQPVAMDEGLRFAIREGGRTVGAGRVTKIIK

SEQ ID NO: 2819 - DNA, 1194 bp, Nocardioides sp. JS614
  CDS (1)..(1194): transl_table=11
gtggctaaggcgaagttcgagcggaccaagccgcacgtcaacatcggcaccatcggtcacatcgaccacggcaagacgacgctcacggcggcgatcaccaaggtgctgcacgacaagtacccggacctgaaccccttcacgccgttcgacgagatcgacaaggcccctgaggagcgtcagcgcggtatcaccatctcgatcgcgcacgtcgagtaccagaccgagtcgcggcactacgcgcacgtcgactgcccgggtcacgcggactacatcaagaacatgatcaccggtgccgcgcagatggacggcgcgatcctcgtggtcgccgccaccgacggcccgatgccgcagacccgtgagcacgtgctgctggcccgccaggtcggcgtgcccgccctggtcgtcgcgctcaacaagtgcgacatggtcgacgacgaggagctcatcgagctcgtcgagatggaggtgcgcgagctcctctccgagtacgagttcccgggcgacgacatcccggtcgtgcgcgtggcggccttcccggccctcaacggcgacgccaagtggggcgagtcggtcctcgagctgatgaacgcggtcgacgagtacatcccgaccccggagcgcgacaccgagaagccgttcctgatgccggtcgaggacgtcttcacgatcaccggtcgcggcacggtcatcaccggccggatcgagcgcggcatcgtcaaggtcggcgaggaggtcgagatcctcggcatccgcgaggcctcgcagaagagcaccgtcaccggtgtcgagatgttccgcaagctgctcgacgagggccaggccggtgagaacgtcggtctgctgctccgcggcaccaagcgcgaggacgtcgagcgcggcatggtcgtcgccaagcccggcaccacgaccccgcacaccaacttcgaggcctcggtctacatcctctcgaaggaggagggcggccgccacacgccgttcttcaacaactaccgcccgcagttctacttccggaccacggacgtgaccggcgtggtgaccctccccgagggcaccgagatggtcatgccgggcgacaacaccgagatggccgtcgagctgatccagccgatcgccatggacgagggtctgcgcttcgcgatccgcgagggcggccgcaccgtcggcgccggccgggtcaccaagatcacgaagtga

SEQ ID NO: 2820 - protein, 397 aa, Nocardioides sp. JS614
MAKAKFERTKPHVNIGTIGHIDHGKTTLTAAITKVLHDKYPDLNPFTPFDEIDKAPEERQRGITISIAHVEYQTESRHYAHVDCPGHADYIKNMITGAAQMDGAILVVAATDGPMPQTREHVLLARQVGVPALVVALNKCDMVDDEELIELVEMEVRELLSEYEFPGDDIPVVRVAAFPALNGDAKWGESVLELMNAVDEYIPTPERDTEKPFLMPVEDVFTITGRGTVITGRIERGIVKVGEEVEILGIREASQKSTVTGVEMFRKLLDEGQAGENVGLLLRGTKREDVERGMVVAKPGTTTPHTNFEASVYILSKEEGGRHTPFFNNYRPQFYFRTTDVTGVVTLPEGTEMVMPGDNTEMAVELIQPIAMDEGLRFAIREGGRTVGAGRVTKITK

SEQ ID NO: 2821 - DNA, 1191 bp, Azoarcus sp. BH72
  CDS (1)..(1191): transl_table=11
atggctaagggtaagttcgagcggacgaaaccgcacgtaaacgttggtacgatcggtcacgttgaccacggcaagacgacgctgacggcggcgatcaccacgattctgtcgaagaagttcggcggtgaagcgaaggcctacgaccagatcgacgcggcgccggaagaaaaggcgcgtggtatcacgatcaacaccgcgcacgtcgagtacgaaaccgcgacccgtcactacgcccacgtcgattgcccgggccacgccgactacgtcaagaacatgatcaccggcgctgcgcagatggacggcgcgatcctggtgtgttcggccgcggacggcccgatgccgcagacccgcgagcacatcctgctggcgcgtcaggttggtgtgccgtacatcatcgtcttcctgaacaagtgcgacatggtcgacgacgaagagctgctcgagctggtcgaaatggaagtgcgcgaactgctctccaagtacgacttcccgggcgatgacattcccatcgtcaagggttcggcgctgaaggcgctcgaaggcgaccagtccgacatcggcgagccggcgatcttccgcctggccgacgcgctggacagctacatcccgaccccggagcgtgcgatcgacaagcccttcctgctgccgatcgaagacgtgttctcgatctccggccgcggcaccgtggtgaccggtcgtgtcgagcgcggcatcgtgaaggttggcgaagaaatcgaaatcgtcggcatcaagcccaccgtcaagaccacctgcaccggcgtggaaatgttccgcaagctgctggaccagggtcaggcgggcgacaacgtcggcgtgctgctgcgcggcaccaagcgtgaagacgtcgagcgtggccaggtgctgtgcaagccgggttcgatcaccccgcacacccacttcaccggcgaaatctacgtgctgtcgaaggaagagggcggtcgtcacaccccgttcttcaacaactaccgtccgcagttctacttccgtaccaccgacgtgaccggttcgatctcgctgcccgaaggcaccgagatggtcatgccgggcgacaacgtgtcgatcaccgtgaagctgatcgccccgatcgccatggaagaaggtctgcgtttcgccatccgtgaaggcggtcgtaccgtcggcgccggcgtcgttgccaagatcatcgagtaa

SEQ ID NO: 2822 - protein, 396 aa, Azoarcus sp. BH72
MAKGKFERTKPHVNVGTIGHVDHGKTTLTAAITTILSKKFGGEAKAYDQIDAAPEEKARGITINTAHVEYETATRHYAHVDCPGHADYVKNMITGAAQMDGAILVCSAADGPMPQTREHILLARQVGVPYIIVFLNKCDMVDDEELLELVEMEVRELLSKYDFPGDDIPIVKGSALKALEGDQSDIGEPAIFRLADALDSYIPTPERAIDKPFLLPIEDVFSISGRGTVVTGRVERGIVKVGEEIEIVGIKPTVKTTCTGVEMFRKLLDQGQAGDNVGVLLRGTKREDVERGQVLCKPGSITPHTHFTGEIYVLSKEEGGRHTPFFNNYRPQFYFRTTDVTGSISLPEGTEMVMPGDNVSITVKLIAPIAMEEGLRFAIREGGRTVGAGVVAKIIE

SEQ ID NO: 2823 - DNA, 1191 bp, Acidovorax sp. JS42
  CDS (1)..(1191): transl_table=11
atggcaaaaggtaagtttgaacgtaccaagccccacgtgaacgtgggcacgatcggtcacgtggaccatggcaagacgacgctgacggcggccatcgccacggtgctggccaagaagttcggcggcgaagccaagggctacgaccagatcgacaacgcccctgaagaaaaggcgcgcggcatcacgatcaacacctcgcacgtggaatacgaaacggccacccgccactacgcccacgtcgactgccccggccacgccgactacgtcaagaacatgatcaccggcgccgctcagatggacggcgccatcctggtgtgctcggccgctgacggcccgatgccccagacgcgcgagcacatcctgttggctcgccaggtgggtgtgccctacatcatcgtgttcctgaacaagtgcgacatggtcgacgacgaggaactgctcgagctggtcgagatggaagtgcgcgagctgctggacaagtacgacttccccggcgacgacacccccatcatccgcggctccgccaagttggccctggaaggcgaccagtccgacaagggcgagcccgccatcttgcgcctggccgaagctctggacacctacatccccacgcctgagcgcgctgtggacggtgccttcctgatgcccgtggaagacgtgttctccatctccggccgcggcaccgtggtgaccggccgtgtcgagcgcggcatcatcaaggtcggcgaagaaatcgaaatcgtgggtatccgcgacacgcagaagaccaccgtcaccggcgtggaaatgttccgcaagctgctggaccaaggtcaagctggcgacaacgttggtctgctgctgcgcggcaccaagcgcgaagacgtggaacgcggccaagtgctgtgcaagcccggctcgatcaagccccacacccacttcactgctgaagtgtatgtgttgagcaaggacgaaggcggccgccacacgcccttcttcaacaactaccgcccccagttctacttccgcaccaccgacgtgaccggctccatcgagctgccggccgacaaggaaatggtgatgcccggcgacaacgtgtcgatcactgtgaagctgatcaaccccatcgccatggaagaaggcctgcgcttcgctatccgcgaaggcggccgtaccgtgggcgccggcgtcgttgccaagatcattgcgtaa

SEQ ID NO: 2824 - protein, 396 aa, Acidovorax sp. JS42
MAKGKFERTKPHVNVGTIGHVDHGKTTLTAAIATVLAKKFGGEAKGYDQIDNAPEEKARGITINTSHVEYETATRHYAHVDCPGHADYVKNMITGAAQMDGAILVCSAADGPMPQTREHILLARQVGVPYIIVFLNKCDMVDDEELLELVEMEVRELLDKYDFPGDDTPIIRGSAKLALEGDQSDKGEPAILRLAEALDTYIPTPERAVDGAFLMPVEDVFSISGRGTVVTGRVERGIIKVGEEIEIVGIRDTQKTTVTGVEMFRKLLDQGQAGDNVGLLLRGTKREDVERGQVLCKPGSIKPHTHFTAEVYVLSKDEGGRHTPFFNNYRPQFYFRTTDVTGSIELPADKEMVMPGDNVSITVKLINPIAMEEGLRFAIREGGRTVGAGVVAKIIA

SEQ ID NO: 2825 - DNA, 1191 bp, Acidovorax sp. JS42
  CDS (1)..(1191): transl_table=11
atggcaaaaggtaagtttgaacgtaccaagccccacgtgaacgtgggcacgatcggtcacgtggaccatggcaagacgacgctgacggcggccatcgccaccgtgctgtccaagaagttcggcggcgaagccaagggctacgaccagatcgacaacgcccctgaagaaaaggcgcgcggcatcacgatcaacacctcgcacgtggaatacgaaacggccacccgccactacgcccacgtcgactgccccggccacgccgactacgtcaagaacatgatcaccggcgccgctcaaatggacggcgccatcctggtgtgctcggccgctgacggcccgatgccccagacgcgcgagcacatcctgctggcccgtcaggtgggcgtgccctacatcatcgtgttcctgaacaagtgcgacatggtcgacgacgaggaactgcttgagctggtcgaaatggaagtgcgcgagctgctggacaagtacgacttccccggcgacgacacccccatcatccgcggctccgccaagctggccctggaaggtgaccagtccgacaagggcgaacccgccatcctgcgcctggccgaagccctggacacctacatccccacgcctgagcgcgccgtggacggcgccttcctgatgcctgtggaagacgtgttctccatctccggccgcggcaccgtggtgaccggccgcgtcgagcgcggcatcatcaaggtcggcgaagaaatcgaaatcgtcggtatccgcgacacgcaaaagaccaccgtcaccggcgtggaaatgttccgcaagctgctggaccagggccaggctggcgacaacgtgggcctgctgctgcgcggcaccaagcgcgaagacgtcgagcgcggccaagtgctgtgcaagcccggctccatcaagccccacacccacttcacggctgaggtgtacgtgctgagcaaggacgaaggcggccgtcacacgcccttcttcaacaactaccgtccccagttctacttccgcaccaccgacgtgaccggctccatcgagctgccggccgacaaggaaatggtgatgcccggcgacaacgtgtcgatcactgtgaagctgatcaaccccatcgccatggaagaaggcctgcgcttcgctatccgcgaaggcggccgtaccgtgggcgccggcgtcgttgccaagatcattgcgtaa

SEQ ID NO: 2826 - protein, 396 aa, Acidovorax sp. JS42
MAKGKFERTKPHVNVGTIGHVDHGKTTLTAAIATVLSKKFGGEAKGYDQIDNAPEEKARGITINTSHVEYETATRHYAHVDCPGHADYVKNMITGAAQMDGAILVCSAADGPMPQTREHILLARQVGVPYIIVFLNKCDMVDDEELLELVEMEVRELLDKYDFPGDDTPIIRGSAKLALEGDQSDKGEPAILRLAEALDTYIPTPERAVDGAFLMPVEDVFSISGRGTVVTGRVERGIIKVGEEIEIVGIRDTQKTTVTGVEMFRKLLDQGQAGDNVGLLLRGTKREDVERGQVLCKPGSIKPHTHFTAEVYVLSKDEGGRHTPFFNNYRPQFYFRTTDVTGSIELPADKEMVMPGDNVSITVKLINPIAMEEGLRFAIREGGRTVGAGVVAKIIA

SEQ ID NO: 2827 - DNA, 1191 bp, Magnetospirillum magnetotacticum MS-1
  CDS (1)..(1191): transl_table=11
atggccaaggctaaattcgagcgcaacaagcctcactgcaacatcgggaccatcggtcacgttgaccatggcaagacctcgctgaccgcggcgatcaccaagatcctggccgagaccggcggcgccaccttcaccgcctacgaccagatcgacaaggcgccggaagagaaggcccgtggcatcaccatctcgaccgctcacgtcgagtacgagaccaccaaccgccactacgcccatgtggactgccccggccacgccgactatgtgaagaacatgattaccggcgcggcgcagatggacggcgccatcctggtcgtgtcggccgccgacggccccatgccccagacccgcgagcacatcctgctggcccgtcaggtgggcgtgcccgccctggtggtgttcatgaacaagtgcgacatggtcgatgatcccgagctgctggatctggtcgagctggaagtgcgcgagctgctgagctcgtatgacttccccggcgacgacattccgatcgtgcgcggctcggccctgtgcgccctggaagacaagcagccggaaatcggccgcgaggcgatcctgtcgctgatggccgaagtggacaagtacatcccgcagccggagcgtcccaaggacaagccgttcctgatgcccatcgaagacgtgttctccatctcgggccgcggcaccgtggtgaccggccgtgtcgagcgtggcgtcgtgaaggtgggcgaggaagtcgagatcgtcggcatcaaggcgaccgtcaagaccacctgcaccggcgtggaaatgttccgcaagctgctcgatcagggtgaggctggcgacaatatcggcgccctgctgcgcggcaccaagcgcgaggacgtggagcgcggtcaggttctggcggctccgggctccatcacgccccacaccgacttcgaggccgaagcctacatcctgaacaaggaagaaggcggccgtcataccccgttcttcaccaactaccgtccgcagttctacttccgcaccaccgacgtgaccggtgtggttgctctgccggaaggcaccgagatggtgatgccgggcgacaacgtgaagatgatcgtgaccctgatcgcccccatcgccatggaccagggcctgcgcttcgccatccgcgaaggcggccgtaccgtcggcgccggcgtggtggccaagatcatcaagtag

SEQ ID NO: 2828 - protein, 396 aa, Magnetospirillum magnetotacticum MS-1
MAKAKFERNKPHCNIGTIGHVDHGKTSLTAAITKILAETGGATFTAYDQIDKAPEEKARGITISTAHVEYETTNRHYAHVDCPGHADYVKNMITGAAQMDGAILVVSAADGPMPQTREHILLARQVGVPALVVFMNKCDMVDDPELLDLVELEVRELLSSYDFPGDDIPIVRGSALCALEDKQPEIGREAILSLMAEVDKYIPQPERPKDKPFLMPIEDVFSISGRGTVVTGRVERGVVKVGEEVEIVGIKATVKTTCTGVEMFRKLLDQGEAGDNIGALLRGTKREDVERGQVLAAPGSITPHTDFEAEAYILNKEEGGRHTPFFTNYRPQFYFRTTDVTGVVALPEGTEMVMPGDNVKMIVTLIAPIAMDQGLRFAIREGGRTVGAGVVAKIIK

SEQ ID NO: 2829 - DNA, 1230 bp, Nostoc punctiforme PCC 73102
  CDS (1)..(1230): transl_table=11
atggcacgcgcaaagtttgaaagaaataaaccccacctcaatatcggtactattggccacgttgaccacggtaaaaccacgttaacagcagccatcactatgaccttggcagctcttggtcaagctacagctaaaggctacgaccaaatcgataacgcgccagaagaaaaagcacggggtattaccatcaataccgctcacgttgagtatgaaaccgaaaatcggcactatgctcacgtagactgtccaggccacgctgactatgtgaagaacatgatcactggtgctgctcagatggatggaggtatcctcgtagtagctgctactgatggccctatgccccaaacccgcgaacatattctgttagcaaaacaggtgggcgttcctagtctggttgtattcttgaacaaagaagacttgatggatgacccagaactcttggaactagtagaactagaactcagagaactgttaagtagctatgacttccctggcgatgatatccctattattaaaggctctggtctgcaagctctcgaagcaatgaccaagaatcctaagaccaaaaaaggtgaaaatccttgggtagataaaatctacgaattgatggatgctgtggattcctttatccccactcctgagcgggatgtagataagcccttcttgatggcagtagaagacgtgttcaccatcacaggtcgtggtactgtggctactggacggattgaacgcgggaaagttaaggttggcgatacagtcgagctaattggcctgaaagacactcgtactaccgccgtcaccgggattgagatgttcaagaagagcctcgaagaaggtctggctggagataacgcgggtgtactactgcgtggtctcaaaaaagaagatatcgagcgcggtatggtaatagccaaaccaggttcaattacacctcacactcaatttgaaggggaagtatacgtcctaacagaaaaagaaggtggtcgtaagactccatttttcgctggctaccgtccccagttctatgtacggacaaccgatgtaactggtactatcaaagcctacacctccgatgaaggcaaagaagtagaaatggtgatgccaggcgatcgcatcaagatgacagtagaattgatcaacgcgatcgctattgaacaaggaatgcgtttcgctatccgtgaaggtggacgtaccatcggtgctggtgtcgtctccaaaattatcaaatag

SEQ ID NO: 2830 - protein, 409 aa, Nostoc punctiforme PCC 73102
MARAKFERNKPHLNIGTIGHVDHGKTTLTAAITMTLAALGQATAKGYDQIDNAPEEKARGITINTAHVEYETENRHYAHVDCPGHADYVKNMITGAAQMDGGILVVAATDGPMPQTREHILLAKQVGVPSLVVFLNKEDLMDDPELLELVELELRELLSSYDFPGDDIPIIKGSGLQALEAMTKNPKTKKGENPWVDKIYELMDAVDSFIPTPERDVDKPFLMAVEDVFTITGRGTVATGRIERGKVKVGDTVELIGLKDTRTTAVTGIEMFKKSLEEGLAGDNAGVLLRGLKKEDIERGMVIAKPGSITPHTQFEGEVYVLTEKEGGRKTPFFAGYRPQFYVRTTDVTGTIKAYTSDEGKEVEMVMPGDRIKMTVELINAIAIEQGMRFAIREGGRTIGAGVVSKIIK

SEQ ID NO: 2831 - DNA, 1185 bp, Rickettsia sibirica 246
  CDS (1)..(1185): transl_table=11
atggcaaaagcaaaatttgaacgaactaaaccgcacgttaatataggtacgatcggtcacgtagatcacggtaaaacttccttaacggcagcaataactatagtacttgctaagacaggtggagcacaagctacagcgtatgatcaaattgatgctgcgcctgaagaaaaagaaagaggtataactatttctactgcacacgtagaatatgagactaaaaatagacactatgcacacgtagattgtccgggacacgctgactatgtaaagaacatgataaccggtgccgctcagatggacggtgcaatattagtagtttctgctgctgatggtcctatgccgcaaactagagagcatatattactagcaaaacaggtaggtgtgcctgctatggtagtattcttaaataaaatagatatggtggatgatcctgatctattagaactagtagagatggaagtaagggaattattatcaaaatatggtttcccgggtgatgaaatacctattattaaaggttctgcacttcaagctttagaaggaaagcctgaaggtgaaaaagctattaatgagctaatggatgcagtagatagctatataccgcagcctgtaagagctacggataaacctttcttaatgccaatagaagatgtattctctatttcaggaagaggtactgttgtaactggtagagtagagtcaggaataattaaggtaggtgaggaaattgaaatagtcggtctaaaagatacgcaaaaaactacctgtaccggtgtagaaatgttcaggaaattacttgatgaaggacaagccggagataatgttggcatattactacgcggtacaaaaagagaagaagttgaaagaggacaagttctcgcaaaacctggtagcataaaaccgcatgataagtttgaagctgaagtatatgtgcttagtaaagaagaaggtggacgtcataccccatttactaatgactatcgtccgcagttctattttagaacaacagatgttaccggtacaataaaattgcctgctgataagcagatggttatgcctggagataatgctacttttacagtggaattaattaaaccgattgcgatgcaggaagggttgaaattctctatacgtgaaggtggtagaacagtgggtgccggcgtagtaactaaaataaataattaa

SEQ ID NO: 2832 - protein, 394 aa, Rickettsia sibirica 246
MAKAKFERTKPHVNIGTIGHVDHGKTSLTAAITIVLAKTGGAQATAYDQIDAAPEEKERGITISTAHVEYETKNRHYAHVDCPGHADYVKNMITGAAQMDGAILVVSAADGPMPQTREHILLAKQVGVPAMVVFLNKIDMVDDPDLLELVEMEVRELLSKYGFPGDEIPIIKGSALQALEGKPEGEKAINELMDAVDSYIPQPVRATDKPFLMPIEDVFSISGRGTVVTGRVESGIIKVGEEIEIVGLKDTQKTTCTGVEMFRKLLDEGQAGDNVGILLRGTKREEVERGQVLAKPGSIKPHDKFEAEVYVLSKEEGGRHTPFTNDYRPQFYFRTTDVTGTIKLPADKQMVMPGDNATFTVELIKPIAMQEGLKFSIREGGRTVGAGVVTKINN

SEQ ID NO: 2833 - DNA, 1185 bp, Fusobacterium nucleatum subsp. vincentii ATCC 49256
  CDS (1)..(1185): transl_table=11
atggctaaagaaaaatatgaaagaagtaaaccacatgtaaacattggaacaattggacacgttgaccatggaaaaacaactacaactgctgctatatctaaagtattatctgataaaggattagctagtaaagtagattttgaccaaattgatgctgctcctgaagaaaaagaaagaggaataactatcaatacagctcatattgaatatgaaacagcaaatagacactatgctcacgttgactgtccaggacatgctgactatgttaaaaatatgataactggtgctgcacaaatggatggagctatacttgttgtatcagctgctgatggtcctatgcctcaaacaagagaacatatcttactttctagacaagttggagtaccatatattattgtttatttaaacaaagctgatatggttgatgatgaagaattactagaattagtagaaatggaagttagagaattattaactgaatatggattcccaggagatgaaattcctgtaatcagaggttcatcattaggagctttaaatggtgaagaaaaatggattgaaaaaataatggaacttatggatgcagtagatagctatattcctactccagaaagagcaatagatcaaccattcttgatgccaatagaagatgttttcactatcacaggaagaggaacagttgttactggaagagttgaaagaggagttatcaaagttggagaagaaattgaaatagttggaattaaacctacaactaaaacaacttgtacaggtgttgaaatgtttagaaaacttcttgatcaaggtcaagcaggagataacattggagtattattaagaggaactaagaaagaagaagttgaaagaggacaagttcttgctaaaccaggaagtatccaccctcatacaaactttaaaggtgaagtttatgtattaactaaggatgaaggaggaagacatactccattcttcacaggatacagacctcaattctattttagaactactgacatcactggtgcagtaactttaccagatggagtagaaatggttatgccaggagataatatcactatgactgttgaattaatccacccaatcgctatggaacaaggattaagattcgctatcagagaaggtggaagaactgttgcttctggagttgtttctgaaataattaaatag

SEQ ID NO: 2834 - protein, 394 aa, Fusobacterium nucleatum subsp. vincentii ATCC 49256
MAKEKYERSKPHVNIGTIGHVDHGKTTTTAAISKVLSDKGLASKVDFDQIDAAPEEKERGITINTAHIEYETANRHYAHVDCPGHADYVKNMITGAAQMDGAILVVSAADGPMPQTREHILLSRQVGVPYIIVYLNKADMVDDEELLELVEMEVRELLTEYGFPGDEIPVIRGSSLGALNGEEKWIEKIMELMDAVDSYIPTPERAIDQPFLMPIEDVFTITGRGTVVTGRVERGVIKVGEEIEIVGIKPTTKTTCTGVEMFRKLLDQGQAGDNIGVLLRGTKKEEVERGQVLAKPGSIHPHTNFKGEVYVLTKDEGGRHTPFFTGYRPQFYFRTTDITGAVTLPDGVEMVMPGDNITMTVELIHPIAMEQGLRFAIREGGRTVASGVVSEIIK

SEQ ID NO: 2835 - DNA, 1230 bp, Crocosphaera watsonii WH 8501
  CDS (1)..(1230): transl_table=11
atggcacgcgaaaaatttgaacggactaaaccccacgttaacatcggtactgttggtcacgttgaccacggtaaaacaaccttaaccgctgctattaccatgacattagcggcggcaggtaaagcaaaagcccgtaattacgaagatattgatgcagcccccgaagaaaaagcacggggtatcaccatcaacactgctcacgttgagtacgaaacagataaccgtcactatgctcacgttgactgtccgggtcacgctgactatgtgaaaaacatgatcaccggagcagcacagatggacggtggaatcttagtagtatctgctgctgatggtcccatgccccaaacccgtgaacacatcctcttagctaaacaggttggggttcctggtcttgtggttttcttgaacaaaaaagaccaagtggatgatgaagaactgctcgaactcgtagaactcgaagtaagagaacttctcagtgagtatgattttcctggggatgatattcctatcgtttctggatctgctttaatggcagtggaagctctcaaagagaatcctaacatcggtccaggagagaatgaatggacagatcaaatcctcaaactgatggaaaatgttgattcctatattgcagaacctccacgagaagttgatgaacctttattaatggcagtggaagacgtattctccattactggacggggaactgttgccaccggacggattgaacggggtaaagtgaaagtgggcgaaaccgtcgagattgttggagttagagaaactcgtagtaccactgtaactggggtggaaatgttccaaaaatccctagacgaaggattagcaggggataacgttggtttactcttacggggtattcaaaaagaagacatcgaacggggaatggttatcgctaaacccggttctattactcctcataccaagtttgaaggagaggtttacgttctgactaaggaagaagggggtcgtcacacacctttcttcaagaactatcgccctcagttctatgtacgaaccaccgacgtaaccggaaccattgaagactacactgctgacgatggtagtgccgtagaaatggttatgcctggcgatcgcattaaaatgactgtacagttaattaatgctattgctgttgaacaaggaatgcgttttgcgattcgtgaaggtggccgtactatcggtgcaggtgttgtttctaagattcttgagtag

SEQ ID NO: 2836 - protein, 409 aa, Crocosphaera watsonii WH 8501
MAREKFERTKPHVNIGTVGHVDHGKTTLTAAITMTLAAAGKAKARNYEDIDAAPEEKARGITINTAHVEYETDNRHYAHVDCPGHADYVKNMITGAAQMDGGILVVSAADGPMPQTREHILLAKQVGVPGLVVFLNKKDQVDDEELLELVELEVRELLSEYDFPGDDIPIVSGSALMAVEALKENPNIGPGENEWTDQILKLMENVDSYIAEPPREVDEPLLMAVEDVFSITGRGTVATGRIERGKVKVGETVEIVGVRETRSTTVTGVEMFQKSLDEGLAGDNVGLLLRGIQKEDIERGMVIAKPGSITPHTKFEGEVYVLTKEEGGRHTPFFKNYRPQFYVRTTDVTGTIEDYTADDGSAVEMVMPGDRIKMTVQLINAIAVEQGMRFAIREGGRTIGAGVVSKILE

SEQ ID NO: 2837 - DNA, 1176 bp, Sulfitobacter sp. EE-36
  CDS (1)..(1176): transl_table=11
atggctaaggcaaagtttgaacgtaataaaccacacgttaacatcggtaccattggtcacgttgaccacggcaaaaccacgttgaccgcggcgatcaccaagtacttcggcgacttccgcgcctatgaccagattgacggcgcgcccgaagaaaaagcacgtggcatcaccatctcgaccgcacacgttgagtatgagaccgaaggtcgtcactacgcccacgtcgactgcccaggccacgctgactatgtgaaaaacatgatcaccggtgcggcgcagatggacggcgcgatcctggttgtgaacgctgctgatggccccatgccacagacccgcgagcacatcctgctgggccgtcaggtcggcattcccgccatggttgtctacatgaacaaagtagaccaggtggacgatgaagagctgctggaactggttgaaatggaaatccgcgaactgctgtcttcctacgactacccaggcgacgacatccctgtgatcccaggttccgctctggcggcgatggaaggccgtgacgagaacatcggcgagaactccatccgcaagctgatggaagaagtcgacaactacatcccgacaccagagcgcgctgttgaccagccgttcctgatgcctgtggaagacgtcttctcgatctccggtcgtggtacagttgtgaccggccgtgttgagcgtggcgtgatcaacgttggcgacgaaatcgaaatcgtcggcatccgcgacacaaagaaaaccacatgtaccggcgttgaaatgttccgcaaactgctggaccgtggggaagctggcgacaacatcggcgccctgctgcgcggtatcgaccgtgaaggcgttgagcgtggtcaggttctgtgtaagccaggttcggttaagccgcacaccaagttcacagccgaagcctatatcctcaccaaggaagagggtggccgtcacacgccgttcttcgcgaactaccgtccacagttctacttccggaccacagacgtcaccggtaccgttcagctgccagaaggcactgaaatggttatgcctggcgacaacctgcagttcgacgtcgagctgatcgcccccatcgcgatggaagacggtctgcgcttcgcgatccgcgaaggcggtcgtaccgttggcgcgggcgtggtttccaaaatcaccgagtaa

SEQ ID NO: 2838 - protein, 391 aa, Sulfitobacter sp. EE-36
MAKAKFERNKPHVNIGTIGHVDHGKTTLTAAITKYFGDFRAYDQIDGAPEEKARGITISTAHVEYETEGRHYAHVDCPGHADYVKNMITGAAQMDGAILVVNAADGPMPQTREHILLGRQVGIPAMVVYMNKVDQVDDEELLELVEMEIRELLSSYDYPGDDIPVIPGSALAAMEGRDENIGENSIRKLMEEVDNYIPTPERAVDQPFLMPVEDVFSISGRGTVVTGRVERGVINVGDEIEIVGIRDTKKTTCTGVEMFRKLLDRGEAGDNIGALLRGIDREGVERGQVLCKPGSVKPHTKFTAEAYILTKEEGGRHTPFFANYRPQFYFRTTDVTGTVQLPEGTEMVMPGDNLQFDVELIAPIAMEDGLRFAIREGGRTVGAGVVSKITE

SEQ ID NO: 2839 - DNA, 1176 bp, Oceanicola batsensis HTCC2597
  CDS (1)..(1176): transl_table=11
atggcaaaggaaaagttcgaacgcggcaagccgcactgcaacatcggcacgatcggtcacgtcgaccacggcaagacgacgctgacggcggcgatcacgaagtacttcggcgacttccgcgcctatgaccagatcgacggcgcgccggaagagaaggcccgcgggatcaccatctcgaccgcgcatgtggaatacgagacggacaaccgtcactatgcgcatgtcgactgccccggccacgccgactacgtcaagaacatgatcaccggtgccgcccagatggacggcgcgatcctggtggtgaacgcggccgacggcccgatgccgcagacgcgcgagcacatcctgctcggccgtcaggtcggcattccggccatggtcgtcttcctgaacaaggtcgaccaggtggatgacgaggagcttctcgagctcgtcgagatggaagtgcgcgagcttctgtcggaatacgacttcccgggcgacgacgttccgatcatcgcgggctcggcgcttgcggcgatgaacggcgacaatgccgagatcggcgagaacaagatccgcgagctgatggcggccgtggacgagtacatcccgcagcccgagcgggccgtcgaccagccgttcctgatgccgatcgaggacgtgttctcgatctcgggccgcggcaccgtggtcaccggccgcgtcgagcgtggcgtggtgaacgtgggcgacgaactcgagatcgtcgggatcaaggacaccaagaagacgacctgcaccggcgtcgagatgttccgcaagctgctggaccgcggcgaggcgggcgacaacatcggcgcgctgctgcgcggcatcgaccgtgacggcgtggagcggggccaggttctctgcaagcccggctcggtcaagccgcacaccaagttcgaggccgaggtctacatcctgaccaaggacgagggcggccgtcacacgccgttcttcgcgaactaccgtccgcagttctacttccgcacgacggatgtgaccggcaccgtgacgctgcccgagggcaccgagatggtgatgccgggcgacaacctgaagttctcggtcgagctgatcgcgccgatcgcgatggaagacgggctgcgcttcgccatccgcgaaggcggccggaccgtcggttcgggcgtggtctcgaagatcgtcgagtga

SEQ ID NO: 2840 - protein, 391 aa, Oceanicola batsensis HTCC2597
MAKEKFERGKPHCNIGTIGHVDHGKTTLTAAITKYFGDFRAYDQIDGAPEEKARGITISTAHVEYETDNRHYAHVDCPGHADYVKNMITGAAQMDGAILVVNAADGPMPQTREHILLGRQVGIPAMVVFLNKVDQVDDEELLELVEMEVRELLSEYDFPGDDVPIIAGSALAAMNGDNAEIGENKIRELMAAVDEYIPQPERAVDQPFLMPIEDVFSISGRGTVVTGRVERGVVNVGDELEIVGIKDTKKTTCTGVEMFRKLLDRGEAGDNIGALLRGIDRDGVERGQVLCKPGSVKPHTKFEAEVYILTKDEGGRHTPFFANYRPQFYFRTTDVTGTVTLPEGTEMVMPGDNLKFSVELIAPIAMEDGLRFAIREGGRTVGSGVVSKIVE

SEQ ID NO: 2841 - DNA, 1230 bp, Synechococcus sp. WH 5701
  CDS (1)..(1230): transl_table=11
atggctcgcgagaagtttcagaggaacaaacctcacgtcaacatcggcaccatcgggcacgtcgaccacggcaagaccaccctcactgccgccatcaccaacgtgctggcttcccttggccaggccaaggcccaggcctacgacgacatcgatggtgctcctgaagagaaggagcggggcatcacgatcaacacggcccacgtcgagtacgaaacagaaaaccgtcactacgcccacgtcgactgcccgggtcacgcggactacgtcaagaacatgatcaccggtgccgcccagatggacggcgccatcctggtggtggccgccaccgacggcccgatggcccagaccaaggaacacatcctgctggccaagcaggtgggcgttcccgccctggtggtgttcctcaacaagaaggacatggtcgacgacgaggaaatcctcgagctcgtcgaactggaaatgcgtgagctgctcagcagctacgacttccctggtgatgacatccccatcatcgccggttccgccctcaaggccctcgagcacatccagggcggcggcaagggcatccgtggagagaacgagtgggtcgacaagatcctcgatctgatggatgcggtcgacgagtcgatccccgagcctgagcgtgagatcgacaagcccttcctgatggctgtcgaagacgtcttctcgatcaccggtcgtggcaccgtggccaccggccggatcgagcgtggcaaggtgaaagtgggcgaaaccgtccagatcgtgggcatcaaggacacccgcgaaaccaccgtcaccggcgtggaaatgttccgcaagctgctcgacgagggcatggccggagacaacgtcggcctgctcctgcgcggtgtgcagaaggaagacatcgagcgcggcatggtgctggtcaagccgaactcgatcaagccccacaccaagttcgaaggtgaggtctacgtcctcaagaaagaagaaggcggtcgccacactcccttcttcgctggctaccggccccagttctacatccgcaccacggatgtgaccggtcagatcaccgccttcaccgccgacgacggcaccaacgtggagatggtgatgcccggtgaccgcatcaagatgtctgccgagctgatctgcccggtggccattgagcagggcatgcgcttcgccattcgcgaaggcggccgcaccatcggtgccggcgtggtctccaagatcgtcgcctga

SEQ ID NO: 2842 - protein, 409 aa, Synechococcus sp. WH 5701
MAREKFQRNKPHVNIGTIGHVDHGKTTLTAAITNVLASLGQAKAQAYDDIDGAPEEKERGITINTAHVEYETENRHYAHVDCPGHADYVKNMITGAAQMDGAILVVAATDGPMAQTKEHILLAKQVGVPALVVFLNKKDMVDDEEILELVELEMRELLSSYDFPGDDIPIIAGSALKALEHIQGGGKGIRGENEWVDKILDLMDAVDESIPEPEREIDKPFLMAVEDVFSITGRGTVATGRIERGKVKVGETVQIVGIKDTRETTVTGVEMFRKLLDEGMAGDNVGLLLRGVQKEDIERGMVLVKPNSIKPHTKFEGEVYVLKKEEGGRHTPFFAGYRPQFYIRTTDVTGQITAFTADDGTNVEMVMPGDRIKMSAELICPVAIEQGMRFAIREGGRTIGAGVVSKIVA

SEQ ID NO: 2843 - DNA, 1185 bp, Pseudoalteromonas tunicata D2
  CDS (1)..(1185): transl_table=11
atggcaaaagaaaagtttcaacgtacaaaaccgcacgtaaacgtaggtacaatcggccacgttgaccacggtaaaacaactctaactgcagcaatcacaaacgtattagcgaagcattacggtggtcaagcaaaagatttcgcctcaatcgataacgctccagaagagcgcgagcgcggtatcacaatcaatacatcacacgttgagtatgatacaccatcacgtcactacgcacacgtagactgcccaggccatgctgactatgttaaaaacatgatcactggtgctgcacaaatggacggcgctatcctagttgtagctgcaacagatggtccaatgccacaaacacgtgagcacatccttttatctcgccaagtaggcgtaccttacatcatcgtattcatgaacaaatgtgacatggttgatgatgaagagttactagaattagtagagatggaagtacgtgaattattgtctgagtatgatttcccaggtgatgatttaccactaatccaaggttctgcattaagagcgttagaaggcgatgcggcatgggaagagaaaattcttgagttggcagcagctttagattcttacattccagagccagagcgtgcaattgataagccattcatcatgcctatcgaagacgtattctcaatccaaggccgtggtacagtagtaacaggtcgtgtagaagcgggtatcgtaaacgtaggtaacgaagtagcaatcatcggtatcaaagatacagtaattactacttgtactggtgtagaaatgttccgtaaattactagacgaaggtcgtgctggtgagaacattggtgcattgttacgtggaactaaacgtgaagacgtagaacgtggtcaagtattagcaaaaccaggttcaatcacgccacacacaaaattcgtatcagaagtatacgtattaagcaaaaacgaaggtggtcgtcatacaccattcttcaaaggttaccgtccacagttctacttccgtacaacagacgtaacaggtaatgtagagttaccagaaggcgtagaaatggtaatgccaggcgacaacatcaagatgacagtagagttaatctgcccaatcgcgatgaacgaaggcttacgtttcgcaatccgtgagggtggccgtacagtaggtgctggtgtagtagcacaaatcatcgagtaa

SEQ ID NO: 2844 - protein, 394 aa, Pseudoalteromonas tunicata D2
MAKEKFQRTKPHVNVGTIGHVDHGKTTLTAAITNVLAKHYGGQAKDFASIDNAPEERERGITINTSHVEYDTPSRHYAHVDCPGHADYVKNMITGAAQMDGAILVVAATDGPMPQTREHILLSRQVGVPYIIVFMNKCDMVDDEELLELVEMEVRELLSEYDFPGDDLPLIQGSALRALEGDAAWEEKILELAAALDSYIPEPERAIDKPFIMPIEDVFSIQGRGTVVTGRVEAGIVNVGNEVAIIGIKDTVITTCTGVEMFRKLLDEGRAGENIGALLRGTKREDVERGQVLAKPGSITPHTKFVSEVYVLSKNEGGRHTPFFKGYRPQFYFRTTDVTGNVELPEGVEMVMPGDNIKMTVELICPIAMNEGLRFAIREGGRTVGAGVVAQIIE

SEQ ID NO: 2845 - DNA, 1224 bp, Oceanospirillum sp. MED92
  CDS (1)..(1224): transl_table=11
atggctaaagaacaatttgaacgctcaaaaccgcacgttaacgttggtacaatcggccacgttgaccacggtaaaactacactgactgcagctctgacacgcgtatgtgcagaagtatggggcggcgacgctgttgcattcgacggtatcgataacgcaccggaagagcgtgagcgtggtatcacgatcgcgacttctcacgttgagtacgattctccagatcgccactacgcacacgtagactgcccaggacacgctgactacgttaagaacatgatcactggtgctgcacagatggacggcgcgattctggtatgtggtgctacagacggcccaatgccacagactcgtgagcacatcctgctgtctcgtcaggtaggtgtaccttacatcgtagtattcctgaacaaagcagatcttctggctgaagactgtggaggtgcagactctgaagaatatgcagagatgctagagctggtagaaatggaactgcgtgagctgctggatcagtacgaattcccaggtgatgacactccaatcatcccaggttctgctctgatggcgctgaacggccaggacgacaacgaactgggtactacagctgttaagactctggttgagactcttgactcttacatccctgagccagagcgtgctatcgacggtgcattcatcatgcctatcgaggacgtattctctatccagggtcgtggtactgtggtaacaggtcgtgtagagcgtggtatcgttaacgttggtgacgacgttgagatcgtaggtatcaaagaaactacaacgactacttgtactggtgttgagatgttccgtaagctgcttgacgaaggtcgtgcaggtgagaacattggtgcgctgctgcgtggtactaagcgtgaagacgttgagcgtggtcaggtactggctgctccaggttctatcactcctcacactcgtttcgagggtgaagtatacgtactgtccaaagaagaaggtggtcgtcacactccattcttcaaaggctaccgtccacagttctacttccgtacaactgacatcactggtgcttgtgagctgccagagggtgtagaaatggtaatgccaggtgataacgtacagatggacgttaccctgatcaacccagttgcgatggaagaaggtctgcgttttgcgatccgtgaaggcggtcgtacagtaggtgcaggcgttgtatctaaaattgttgaataa

SEQ ID NO: 2846 - protein, 407 aa, Oceanospirillum sp. MED92
MAKEQFERSKPHVNVGTIGHVDHGKTTLTAALTRVCAEVWGGDAVAFDGIDNAPEERERGITIATSHVEYDSPDRHYAHVDCPGHADYVKNMITGAAQMDGAILVCGATDGPMPQTREHILLSRQVGVPYIVVFLNKADLLAEDCGGADSEEYAEMLELVEMELRELLDQYEFPGDDTPIIPGSALMALNGQDDNELGTTAVKTLVETLDSYIPEPERAIDGAFIMPIEDVFSIQGRGTVVTGRVERGIVNVGDDVEIVGIKETTTTTCTGVEMFRKLLDEGRAGENIGALLRGTKREDVERGQVLAAPGSITPHTRFEGEVYVLSKEEGGRHTPFFKGYRPQFYFRTTDITGACELPEGVEMVMPGDNVQMDVTLINPVAMEEGLRFAIREGGRTVGAGVVSKIVE

SEQ ID NO: 2847 - DNA, 1191 bp, delta proteobacterium MLMS-1
  CDS (1)..(1191): transl_table=11
atggccaaggagaaattcgaacggacaaagccgcatgtcaatgtgggcaccatcggtcatattgaccatggcaagacgaccttgacggcggcgatcacgcgggtgttgtcaaacaagggttacgccagtgcgacggcctttgaccagattgacaaggctccggaggagaaggagcgcggggtgacgatttcgacggcgcatgtggagtacgagtcggacaatcgccattacgcgcatgtggactgcccgggccatgccgactatatcaagaacatgatcaccggggcggcccagatggacggggcgattctggtggtgggggccgatgacggtcccatgccgcagacccgtgagcatatcctgctggcccgccaggtgggggtaccctccattgtggtctttttaaacaagtgcgacatggtggacgatccggagctgatcgagctggtggagatggagctgcgggagttgctgagcaagtatgattttcccggcgacgacaccccgatcatccacggcagcgccctgcaggccctggagaaccccgacgatgaagcggcggccaaaccgatctgggatttgatggccgccctggacgattttattccggcgcccgagcgtgatgtggacaagccctttttgatgccggtggaggatgtcttttcgatttccggtcgtggcacggtggccaccggtcgtatcgagcggggcattgtcaaggtgggcgatgagattgagatagtggggatccgtgatacccagaagacgacggtaaccggggtggagatgttccgcaagatcctggacgagggtcaggccggcgacaacgtgggtatcctgttgcgtggcaccaagcgtgaagagattgagcgcggtcaggtcctggccaagcccaagagcatcacgccgcataccaagttcaaggcggagtgctatattctgagtaaggaagagggaggccgtcataccccgtttttcaatggttaccggccgcagttttattttcggaccaccgacgtcaccggggtagtgaccctgggtgagggggtggagatggtaatgcccggtgacaacgtgaccgttgacgcggagttgatcacgcccatagccatggatgagggtctgcgtttcgcgatccgggaaggcggccggacggtgggcgccggggttatcaataagattatttcgtaa

SEQ ID NO: 2848 - protein, 396 aa, delta proteobacterium MLMS-1
MAKEKFERTKPHVNVGTIGHIDHGKTTLTAAITRVLSNKGYASATAFDQIDKAPEEKERGVTISTAHVEYESDNRHYAHVDCPGHADYIKNMITGAAQMDGAILVVGADDGPMPQTREHILLARQVGVPSIVVFLNKCDMVDDPELIELVEMELRELLSKYDFPGDDTPIIHGSALQALENPDDEAAAKPIWDLMAALDDFIPAPERDVDKPFLMPVEDVFSISGRGTVATGRIERGIVKVGDEIEIVGIRDTQKTTVTGVEMFRKILDEGQAGDNVGILLRGTKREEIERGQVLAKPKSITPHTKFKAECYILSKEEGGRHTPFFNGYRPQFYFRTTDVTGVVTLGEGVEMVMPGDNVTVDAELITPIAMDEGLRFAIREGGRTVGAGVINKIIS

SEQ ID NO: 2849 - DNA, 1224 bp, Oceanobacter sp. RED65
  CDS (1)..(1224): transl_table=11
atggctaagggttcttttgaacgtagcaaaccccatgtaaacgtgggcaccatcggtcacgttgaccacggtaaaactacactaacagcagcgctaactcgcgtatgtgctgaagtattcggcggtgaagcggtagcgttcgacggtatcgacaacgcaccagaagagcgtgatcgtggtattaccatcgcgacgtctcacgttgagtatgaatcaacagatcgtcactacgcacacgtagactgcccagggcacgccgactatgttaaaaacatgatcactggtgctgcacagatggacggtgcgatcctagtatgtggcgcgactgacggcccaatgcctcagactcgtgagcacatcctactatctcgtcaggtaggtgtaccttacatcgtagtattcctaaacaaagcagaccttctagcagaagactgtggtggtttcggtactgaagaatacgaagaaatgctagagctagtagacatggaactacgtgacctactatctgagtacgacttcccaggcgacgacacgccaatcgttccaggttcagcgctaatggctctaaacggtcaagacgacaacgaactaggtacaactgcggttaagaaactagtagaaactctagactcttacatcccagaaccagagcgtgcagtagacggtgcattcatcatgccgatcgaagacgtattctctatccaaggtcgtggtactgtagtaacaggccgtgtagagcgtggtatcgttaagactggtgaagaagtagaaatcgtaggtatcaaagaaactacgaagactaccgtaactggtgttgagatgttccgtaagatgcttgacgaaggtcgtgcaggcgagaactgtggtgtactactacgtggtactaagcgtgatgaagtacagcgtggtcaagtattggctcagcctggttcaatcactccacacaccaagttcgaagcagaagtatacgtactaggtaaagatgaaggtggtcgtcacactccattcttcaaaggttaccgtccacagttctacttccgtacaacagacgtaacaggtgagtgtatcctacctgaaggcgtagaaatggtaatgcctggtgacaacgtacagctaactgctgaattgatcgctccaatcgcgatggacgaaggtctacgtttcgcgatccgtgaaggtggtcgtacagtaggtgcgggtgttgttgctaagatcgttgagtaa

SEQ ID NO: 2850 - protein, 407 aa, Oceanobacter sp. RED65
MAKGSFERSKPHVNVGTIGHVDHGKTTLTAALTRVCAEVFGGEAVAFDGIDNAPEERDRGITIATSHVEYESTDRHYAHVDCPGHADYVKNMITGAAQMDGAILVCGATDGPMPQTREHILLSRQVGVPYIVVFLNKADLLAEDCGGFGTEEYEEMLELVDMELRDLLSEYDFPGDDTPIVPGSALMALNGQDDNELGTTAVKKLVETLDSYIPEPERAVDGAFIMPIEDVFSIQGRGTVVTGRVERGIVKTGEEVEIVGIKETTKTTVTGVEMFRKMLDEGRAGENCGVLLRGTKRDEVQRGQVLAQPGSITPHTKFEAEVYVLGKDEGGRHTPFFKGYRPQFYFRTTDVTGECILPEGVEMVMPGDNVQLTAELIAPIAMDEGLRFAIREGGRTVGAGVVAKIVE

SEQ ID NO: 2851 - DNA, 1185 bp, Alteromonadales bacterium TW-7
  CDS (1)..(1185): transl_table=11
atggcaaaagaaaagtttgaacgcgtaaaaccgcacgtaaacgttggtacaatcggccacgttgaccacggtaaaactacactaactgcagcaatcactaacgtacttgcaaaagtatacggcggtgttgctaaagatttcgcatcaatcgataacgctccagaagagcgcgagcgtggtatcactatctcaacttcacacgttgagtacgacacaccaactcgtcactacgcacacgtagattgtcctggtcacgccgattatgttaaaaacatgatcactggtgctgcacaaatggacggcgctatcttagtagtagctgcgactgatggcccaatgccacaaacgcgtgagcacatccttctttctcgtcaggttggcgtaccttacatcatcgtattcatgaacaaatgtgacatggttgatgacgaagagctacttgaactagtagaaatggaagttcgtgaacttctttctgagtacgatttcccaggtgacgacttaccactaattcaaggttctgcacttaaagcacttgaaggcgagaagcaatgggaagacaagattgtagagcttgcagaagcactagattcttacattccagagccagagcgtgacatcgataagccattcatcatgcctatcgaagacgttttctcaatccaaggtcgtggtactgttgtaactggtcgtgttgaagccggtatcatcaacgtgaatgacgaagttgaaatcgttggtatcaaagagactactaagtctacttgtactggtgttgaaatgttccgtaagcttcttgacgaaggtcgtgctggtgagaacattggtgcactactacgtggtactaagcgtgaagacgttgaacgtggtcaagtactagctaagcctggttcaatcaacccacacactacattcacttcagaagtatacgtactttctaaagatgaaggtggtcgtcatactccattcttcaaaggttaccgtccacagttctacttccgtacaactgacgtaactggtgacgtacagttaccagaaggcgtagaaatggtaatgcctggtgataacatcaagatgacagtaactctaatcgcaccaatcgcgatggatgaaggtcttcgttttgctatccgtgaaggtggccgtactgtaggtgctggtgttgtagcaactatcgtagagtaa

SEQ ID NO: 2852 - protein, 394 aa, Alteromonadales bacterium TW-7
MAKEKFERVKPHVNVGTIGHVDHGKTTLTAAITNVLAKVYGGVAKDFASIDNAPEERERGITISTSHVEYDTPTRHYAHVDCPGHADYVKNMITGAAQMDGAILVVAATDGPMPQTREHILLSRQVGVPYIIVFMNKCDMVDDEELLELVEMEVRELLSEYDFPGDDLPLIQGSALKALEGEKQWEDKIVELAEALDSYIPEPERDIDKPFIMPIEDVFSIQGRGTVVTGRVEAGIINVNDEVEIVGIKETTKSTCTGVEMFRKLLDEGRAGENIGALLRGTKREDVERGQVLAKPGSINPHTTFTSEVYVLSKDEGGRHTPFFKGYRPQFYFRTTDVTGDVQLPEGVEMVMPGDNIKMTVTLIAPIAMDEGLRFAIREGGRTVGAGVVATIVE

SEQ ID NO: 2853 - DNA, 1224 bp, marine gamma proteobacterium HTCC2143
  CDS (1)..(1224): transl_table=11
gtggctaaggaaaaatttgaacgcaccaaaccacacgtcaacgttggtactatcggacacgttgaccacggtaaaacaactttaacagcggcactgacgcgcgtagcggcagaggcttctggcggtacggcggttgatttcgccaatatcgataatgcgcctgaagagcgggaacgtggtatcacgatcgctacgtcacacgtagagtatgacactgcagctcgtcactacgctcacgttgattgcccgggacacgctgattatgtcaagaacatgatcactggtgcggcgcaaatggacggagctattttggtctgtggcgcaactgacggccctatgccgcaaacgcgtgagcacattctgttgtcacgacaggttggcgtgccttacgttgttgtctttctgaataaagctgacctgctggctgaagattgtggcggcgctggttctgaagaatataatgaaatgttggaattggttgaaatggagctgcgtgagctgctcgatacttacgagttccctggtgacgatacgccaatcattcctggttctgcgctaatggcgttgaatggggaagatgaaaacgaattgggtactaccgccgttaagaagttgctggatacgctggacacctacatccctgagccagagcgcgcgattgatggtgatttcatcatgccaatcgaagacgtattttctatctctggtcgcggtacggttgttactggtcgtgttgagcgcggtattgttaatacgggtgacgaagtagagattatcggtattcgcgaaacaacatcaacaacctgtacgggtgttgagatgttccgcaagctgcttgacgaaggtcgtgctggtgagaacattggtgcgctgttgcgtggaactaagcgtgaagacgtggagcgtggtcaggtactggctaagccgggttcaattaagccgcacacaacgtttgaagctgaagtgtatgtgttgggtaaagatgaaggtggtcgtcacacgccattctttaagggataccgtccacagttctacttccgtactacggatatcacaggtgcttgtgagttacctgaaggcactgaaatggttatgcctggtgataacgtgcagatgacagtaacgctgatcaatccaattgcgatggatgagggtttacgcttcgcgattcgtgaaggtggtcgtactgttggtgcaggtgttgttgctaagattatcgaataa

SEQ ID NO: 2854 - protein, 407 aa, marine gamma proteobacterium HTCC2143
MAKEKFERTKPHVNVGTIGHVDHGKTTLTAALTRVAAEASGGTAVDFANIDNAPEERERGITIATSHVEYDTAARHYAHVDCPGHADYVKNMITGAAQMDGAILVCGATDGPMPQTREHILLSRQVGVPYVVVFLNKADLLAEDCGGAGSEEYNEMLELVEMELRELLDTYEFPGDDTPIIPGSALMALNGEDENELGTTAVKKLLDTLDTYIPEPERAIDGDFIMPIEDVFSISGRGTVVTGRVERGIVNTGDEVEIIGIRETTSTTCTGVEMFRKLLDEGRAGENIGALLRGTKREDVERGQVLAKPGSIKPHTTFEAEVYVLGKDEGGRHTPFFKGYRPQFYFRTTDITGACELPEGTEMVMPGDNVQMTVTLINPIAMDEGLRFAIREGGRTVGAGVVAKIIE

SEQ ID NO: 2855 - DNA, 1224 bp, marine gamma proteobacterium HTCC2080
  CDS (1)..(1224): transl_table=11
atggcgaaggaagcatttgagcgttcgaagccccacgtaaacgtgggcacgattggacacgtagaccacggtaaaacgacgctaacggcggcgctgacacgtgtgtgttcagaggtatttggtggtgaggcggtagcgtttgacggtattgataacgctccggaagagcgcgagcgtggtatcacgattgcgacttcgcacgtggagtacgagtcgctagaccgtcactacgcgcacgttgactgtcccggacacgcggattatgtgaagaacatgatcacgggtgcggcgcagatggatggtgctattttggtatgcggcgcgaccgatggtcctatgccccagacgcgtgagcacatcttgctgtcacgtcaggttggcgtaccgtacattgtcgttttcctgaacaaagccgatttgttggcggaagactgcggtggcgttgagtcggaagaatttgaagagatgaaagagctggtagagatggagctgcgcgagctgctcgacacctacgagttccccggtgatgacacgccgatcatttgtggttcagcgctgatggcactgaatggcgaagatgcgaacggtttgggtacgacagcggttaagaccttggttgagacgctggatgcgtatattcctgagcctgagcgtgcgattgaccagcctttcttgatgccagttgaggacgtgttctcaatttcaggtcgtggcacggttgtcacgggtcgtgttgagcgtggcattgttaaggtcggagacgagatcgagattatcggcattaaagatactcagaagtcgacgtgtaccggtgtagagatgttccgtaagctgcttgacgaaggccgtgcgggcgagaacgttggcgttttgttgcgtggtactaagcgtgacgacgttgagcgtggtcaggtactggcgattccaggatcagtaaacccccacaccaagtttgaggcagaggtttatgttttgggcaaggatgaaggcgggcgtcacacgccattcttcaagggctaccgtccgcagttttacttccgtaccaccgatgtaacgggtgcgtgtgagttgcctgaaggtattgagatggtaatgccgggtgacaacatccagatggttgtgacgttgattgcaccgattgcgatggaagatggcctgcgttttgcgatccgcgagggtggccgaacggttggcgctggcgtcgtcgctaaaattatcgagtaa

SEQ ID NO: 2856 - protein, 407 aa, marine gamma proteobacterium HTCC2080
MAKEAFERSKPHVNVGTIGHVDHGKTTLTAALTRVCSEVFGGEAVAFDGIDNAPEERERGITIATSHVEYESLDRHYAHVDCPGHADYVKNMITGAAQMDGAILVCGATDGPMPQTREHILLSRQVGVPYIVVFLNKADLLAEDCGGVESEEFEEMKELVEMELRELLDTYEFPGDDTPIICGSALMALNGEDANGLGTTAVKTLVETLDAYIPEPERAIDQPFLMPVEDVFSISGRGTVVTGRVERGIVKVGDEIEIIGIKDTQKSTCTGVEMFRKLLDEGRAGENVGVLLRGTKRDDVERGQVLAIPGSVNPHTKFEAEVYVLGKDEGGRHTPFFKGYRPQFYFRTTDVTGACELPEGIEMVMPGDNIQMVVTLIAPIAMEDGLRFAIREGGRTVGAGVVAKIIE

SEQ ID NO: 2857 - DNA, 1194 bp, Candidatus Desulfococcus oleovorans Hxd3
  CDS (1)..(1194): transl_table=11
atggcaaaggcaaagtttgagcgaaaaaagccgcatgtaaacgtaggtacgatcggccatatcgaccacggcaagacgacgctgaccgcggcgatcacgaagcactgcagcctgaagggctggggcgagtacgtggcgtttgacaagatcgacaaggcgccggaagagcgcgagcgcggtatcaccattgcgacggcccacgtggagtacgagtcggatacgcgacattacgcgcatgtggactgcccgggccacgcggactacattaagaacatgatcaccggcgcggcccagatggacggggcgatcctggtggtgggcgcggacgacggtcccatgccccagacccgtgagcacattctgctggcgcgtcaggtgggtgtgcccaagatcgtggtgtttttgaacaagtgcgacatggtggacgacgaggagctgatcgagctggtggagctggagcttcgggagcttctggataagtatgattttccgggggacgacaccccgatcattcggggcagcgcgttgaaggccctggagagcgacgatccggccagcgacgaggccaagtgcatatttgagctgctggcggccctggactcttacattccggttccggagcgggatacggacaagcccttcctgatgcccattgaggacgtgttcagcatttccggccgtggcacggtggtgacgggccgtatcgagcgcggtatcgtgaaggtgggtgaagagatcgagctggtgggtattcgggatacggccaagacggtgtgcacgggcgttgagatgttccggaagcttctggacgaaggccgcgccggcgataacgtgggcctgctgctgcggggcaccaagcgcgacgaagtggagcggggccaggtagtggcggcgcccaagagcattacgccgcacaccaagttcaaggccgaggtatacattctgagcaaagaggaaggcgggcgtcatacgccgtttttcaccgggtaccgtccgcagttttattttcgtacaacggacgtgacgggcattctgagcctgccggagaacgtggagatggtgatgccgggcgacaacgtgacgattaccggtgagctgatcacccccatcgccatggaaaaggaactgcggtttgccgtccgtgagggcgggcgtaccgtgggcgccggcgttgtcagtgaaattatcgaataa

SEQ ID NO: 2858 - protein, 397 aa, Candidatus Desulfococcus oleovorans Hxd3
MAKAKFERKKPHVNVGTIGHIDHGKTTLTAAITKHCSLKGWGEYVAFDKIDKAPEERERGITIATAHVEYESDTRHYAHVDCPGHADYIKNMITGAAQMDGAILVVGADDGPMPQTREHILLARQVGVPKIVVFLNKCDMVDDEELIELVELELRELLDKYDFPGDDTPIIRGSALKALESDDPASDEAKCIFELLAALDSYIPVPERDTDKPFLMPIEDVFSISGRGTVVTGRIERGIVKVGEEIELVGIRDTAKTVCTGVEMFRKLLDEGRAGDNVGLLLRGTKRDEVERGQVVAAPKSITPHTKFKAEVYILSKEEGGRHTPFFTGYRPQFYFRTTDVTGILSLPENVEMVMPGDNVTITGELITPIAMEKELRFAVREGGRTVGAGVVSEIIE

SEQ ID NO: 2859 - DNA, 1197 bp, Marinobacter sp. ELB17
  CDS (1)..(1197): transl_table=11
gtgtctaaatctaaattcgaacgtaagaagccacacttgaacgtgggcaccattggtcacgttgaccatggtaagaccactctgacagctgccctgactcgtgtatgccacgatgtatggggaacaggttccgcaagtgcttttgaccagatcgacaatgctcctgaagagcgtgcgcgtggtattaccattgctacgtctcacgttgagtacgattccccgaaccgtcactacgcacacgtagattgcccgggccacgctgactatgtgaaaaacatgatcaccggtgcggcgcagatggacggcgctatcctggtttgctccgctgctgacggccctatgccgcagacccgcgagcacatcctgctgtcacgtcaggtaggcgttccttacatcgttgtgttcctgaacaaagcggacatggttgacgatgaagagctgcttgagctggtagaaatggaagtacgcgatctgctggaaatgtacgacttcccggctgacgacactccgatcatcaccggttctgcgttgatggctctggaaggtcgtgatgacaacgaaatgggcactaccgctgttcgtaagctggtagaagcgctggattcgtacatccctgagcctgagcgtgcgattaatctgccgttcctgatgcctatcgaagacgtattctctatctctggccgtggtacagttgtaaccggtcgtatagagcgtggtattgtcaagattggtgaagaagtggaaatcgttggtctcaaagacacggtcaaaacggtttgcaccggcgttgaaatgttccgtaagctgctggacgaaggtcgtgccggcgagaacgttggtgtattgttgcgcggcaccaagcgtgacgacgttgagcgtggtcaggttctgtgtaagccaggcagcatgaagccgcacaccaagtttgagtgcgaagtgtacgtgctgagcaaaaacgaaggcggccgtcatactccgttcttcaagggctatcgcccgcagttctacttccgtaccaccgatgtcaccggtgcttgtgagttgccagaaggcgtagaaatggttatgccgggtgataacgtgaagatggaagtgacgttgattgctccgatcgccatggaagatggtctgcgcttcgcgattcgcgaaggcggccgtaccgtaggcgccggtgttgttgccaagattctcgagtaa

SEQ ID NO: 2860 - protein, 398 aa, Marinobacter sp. ELB17
MSKSKFERKKPHLNVGTIGHVDHGKTTLTAALTRVCHDVWGTGSASAFDQIDNAPEERARGITIATSHVEYDSPNRHYAHVDCPGHADYVKNMITGAAQMDGAILVCSAADGPMPQTREHILLSRQVGVPYIVVFLNKADMVDDEELLELVEMEVRDLLEMYDFPADDTPIITGSALMALEGRDDNEMGTTAVRKLVEALDSYIPEPERAINLPFLMPIEDVFSISGRGTVVTGRIERGIVKIGEEVEIVGLKDTVKTVCTGVEMFRKLLDEGRAGENVGVLLRGTKRDDVERGQVLCKPGSMKPHTKFECEVYVLSKNEGGRHTPFFKGYRPQFYFRTTDVTGACELPEGVEMVMPGDNVKMEVTLIAPIAMEDGLRFAIREGGRTVGAGVVAKILE

SEQ ID NO: 2861 - DNA, 1176 bp, Erythrobacter sp. SD-21
  CDS (1)..(1176): transl_table=11
atggcgaaggaaaaattcgagcgtaacaagccgcacgtcaacgttggcaccatcggccacgtcgaccacggcaagaccacgctgaccgcagcaatcaccaaggttctcggctcggccgtcgatttcgcaaacatcgacaaggctcccgaagagcgtgagcgcggcatcaccatctcgaccgcgcacgtcgaatacgaaaccgacgcgcgtcactacgcacacgtcgactgcccgggtcacgccgactacgtgaagaacatgatcaccggtgcagcccagatggacggcgccatcctggtcgtgaacgcagctgacggcccgatgccgcagacccgcgagcacatcctgcttgcccgccaggtcggcgttccggctctggtcgtgtacatgaacaaggtcgaccaggtcgacgacgaggagatcctcgagctcgtcgaactcgaagttcgtgaactcctcagctcgtacgacttcgacggcgacaacatcgccatcgtcaagggttcggctctggccgctctcgaaggtcgtgatccggaaatcggcgaaaactcgatcaaggaactgatggacgccgttgacgcgaacatcccgacccccgaccgtccggtcgacaaggacttcctgatgccgatcgaagacgtgttctcgatctcgggtcgcggtacggttgtcaccggccgcgtcgaaaccggcgttgtgaacgttggcgacgaagtcgaaatcgtcggcatcaaggacaccaccaagacgaccgtcaccggcgtcgaaatgttccgcaagctgcttgaccgcggtgaagctggcgacaacatcggtgccctgatccgcggcgttggccgtgaagaagtcgagcgtggccaggttctcgcgaagccgggttcggttacgccgcacaccgagttcagcgcagaagtctacgtcctttcgaaggacgaaggtggccgtcacacgccgttcttcgcgaactaccgtccgcagttctacttccgcaccaccgacgtcaccggcgaagtgatccttcccgaaggcaccgaaatggtgatgccgggcgacaacgtgacgatcgacgtcaagctgatcgctccgatcgccatggaccagggcctgcgcttcgcaattcgcgaaggcggcggtacggtcggctcgggcgtcgttggctcgatcaagaagtaa

SEQ ID NO: 2862 - protein, 391 aa, Erythrobacter sp. SD-21
MAKEKFERNKPHVNVGTIGHVDHGKTTLTAAITKVLGSAVDFANIDKAPEERERGITISTAHVEYETDARHYAHVDCPGHADYVKNMITGAAQMDGAILVVNAADGPMPQTREHILLARQVGVPALVVYMNKVDQVDDEEILELVELEVRELLSSYDFDGDNIAIVKGSALAALEGRDPEIGENSIKELMDAVDANIPTPDRPVDKDFLMPIEDVFSISGRGTVVTGRVETGVVNVGDEVEIVGIKDTTKTTVTGVEMFRKLLDRGEAGDNIGALIRGVGREEVERGQVLAKPGSVTPHTEFSAEVYVLSKDEGGRHTPFFANYRPQFYFRTTDVTGEVILPEGTEMVMPGDNVTIDVKLIAPIAMDQGLRFAIREGGGTVGSGVVGSIKK

SEQ ID NO: 2863 - DNA, 1185 bp, Moritella sp. PE36
  CDS (1)..(1185): transl_table=11
gtgtctaaagaaaaatttgtacgtaataaaacccacgtaaacgtaggtacaattggtcacgttgatcatggtaaaacaactctaacagccgctatcacaaatgtacttgcaaaagcattcggtggtgaagctcaagatttcgcatcaatcgataatgctcctgaagaaagagaacgtggtatcacgatcaatacttcacacgtagagtatgatacagaaaaacgtcattatgcacacgtggattgcccaggccatgccgattatgttaaaaacatgatcactggtgctgctcaaatggacggcgctatcttagttgttgctgcaactgatggtcctatgccacaaacacgtgagcacatcctactttctcgtcaggttggcgttccttacatcatcgtattcatgaacaaatgtgatatggttgatgatgaagaactacttgaactagtagaaatggaagttcgtgaacttctttctgaatatgacttcccaggtgatgacctaccagttatccaaggttctgctcttaaagctcttgaaggcgaagctgaatatgaagctaagattcttgaactagctgaagcgttagattcatacatccctgatccagaacgtgctatcgatatgcctttcattatgcctatcgaagacgttttctcaatctctggccgtggtactgttgtaactggtcgtgttgagcaaggtatcgttaacgttggtgattcagtagaaattattggtatccgtgatactcaaactactacttgtactggtgttgaaatgttccgtaaactgcttgacgaaggtcgtgctggtgagaacattggtgcacttctacgtggtactaaacgtgaagatgttgaacgtggtcaagtactagctaagcctggttcaatcactccacatactaagtttgaatctgaagtatacgtactttctaaagaagagggtggtcgtcacactcctttctttaaaggttaccgtccacagttctacttccgtacaactgacatcactggtgctgtagagcttccagaaggtgttgaaatggttatgcctggtgacaaccttaagtttgttgttgagctaatcaacccaatcgcgatggaagaaggtctacgcttcgctatccgtgaaggtggccgtactgttggtgctggtgttgtttctaaagtaatcgcttaa

SEQ ID NO: 2864 - protein, 394 aa, Moritella sp. PE36
MSKEKFVRNKTHVNVGTIGHVDHGKTTLTAAITNVLAKAFGGEAQDFASIDNAPEERERGITINTSHVEYDTEKRHYAHVDCPGHADYVKNMITGAAQMDGAILVVAATDGPMPQTREHILLSRQVGVPYIIVFMNKCDMVDDEELLELVEMEVRELLSEYDFPGDDLPVIQGSALKALEGEAEYEAKILELAEALDSYIPDPERAIDMPFIMPIEDVFSISGRGTVVTGRVEQGIVNVGDSVEIIGIRDTQTTTCTGVEMFRKLLDEGRAGENIGALLRGTKREDVERGQVLAKPGSITPHTKFESEVYVLSKEEGGRHTPFFKGYRPQFYFRTTDITGAVELPEGVEMVMPGDNLKFVVELINPIAMEEGLRFAIREGGRTVGAGVVSKVIA

SEQ ID NO: 2865 - DNA, 1380 bp, Pichia pastoris
  CDS (1)..(1380)
atgggtaaggaaaagttgcacgttaacgtcgttgttattggacacgtcgatgctggtaaatctaccaccaccggtcacttgatctacaagtgtggtggtattgacaagcgtaccatcgagaagtttgaaaaagaggctgaagagctcggtaagggatctttcaagtacgcctgggttttggacaagcttaaggctgagagagagagaggtatcaccatcgacatcgctttgtggaagttcgagactccaaagtaccacgttaccgtcattgacgctccaggtcacagagatttcattaagaacatgattaccggtacttcccaagccgactgtgccattttggtcattgcttccagtattggtgagttcgaggctggtatctccaaggatggtcaaaccagagagcacgctcttttggctttcaccctgggtgtcaagcaattgattgttgccatcaacaagatggactccgtcaaatggtctcaaaagagatacgaggagattgtcaaggaaacttccaacttcatcaagaaggttggttacaaccctaagactgtcccattcgtcccaatttccggatggaacggtgacaacatgattgagccatcttccaactgtgactggtacaagggatgggagaaggagaccaaggctggtggtgctaccaagggtaagaccttgttggaggctattgactccattgacccaccatccagaccaactgacaagcctctgagattgcctttgcaggatgtctacaagattggtggtatcggaactgtgccagtcggtagagttgagaccggtgtcatcaaggctggtatggtcgtcactttcgccccagctggtgtcactaccgaagtcaagtcggtcgagatgcaccacgagcaattggagcaaggtgtcccaggtgacaacgttggattcaacgtcaagaacgtttccgtcaaggaaatcagaagaggtaacgtctgtggtgactccaagaacgacccaccaaaggccgctgaatctttcaacgcccaggtcattatcttgaaccacccaggtcaaatctctgctggttacgctccagttttggactgtcacaccgctcacattgcttgtaagttcgacgagttgattgagaagattgacagaagaaccggtaagaagactgaggagaaccctaagttcatcaagtccggtgacgccgctatcgtcaagttggtcccatctaagccaatgtgtgttgaggccttcactgactacccacctttaggaagattcgctgtcagagacatgagaacaaatgttgctgtcggtgttatcaagtccgttgtcaagactgacaaggctggtaaggtcaccaaggctgctcaaaaggccgctaagaaatag

SEQ ID NO: 2866 - protein, 459 aa, Pichia pastoris
MGKEKLHVNVVVIGHVDAGKSTTTGHLIYKCGGIDKRTIEKFEKEAEELGKGSFKYAWVLDKLKAERERGITIDIALWKFETPKYHVTVIDAPGHRDFIKNMITGTSQADCAILVIASSIGEFEAGISKDGQTREHALLAFTLGVKQLIVAINKMDSVKWSQKRYEEIVKETSNFIKKVGYNPKTVPFVPISGWNGDNMIEPSSNCDWYKGWEKETKAGGATKGKTLLEAIDSIDPPSRPTDKPLRLPLQDVYKIGGIGTVPVGRVETGVIKAGMVVTFAPAGVTTEVKSVEMHHEQLEQGVPGDNVGFNVKNVSVKEIRRGNVCGDSKNDPPKAAESFNAQVIILNHPGQISAGYAPVLDCHTAHIACKFDELIEKIDRRTGKKTEENPKFIKSGDAAIVKLVPSKPMCVEAFTDYPPLGRFAVRDMRTNVAVGVIKSVVKTDKAGKVTKAAQKAAKK

SEQ ID NO: 2867 - DNA, 1191 bp, Herbaspirillum seropedicae
  CDS (1)..(1191): transl_table=11
atggcaaaaggcaagtttgaacggaccaagccgcacgtgaacgtcggcaccatcggtcacgttgaccacggcaagaccaccctgaccgctgcaatcgcaaccgttctgtcgaagaagttcggcggcgaagcgaaggcctacgaccagatcgacgcagcgcctgaagaaaaggcccgcggcatcaccatcaacaccgcgcacgtcgaatacgaaaccgcaaaccgtcactacgcacacgttgactgcccaggccacgccgactatgtgaagaacatgatcaccggcgcagcgcagatggacggcgcgatcctggtgtgctcggccgctgacggcccgatgccccagacccgtgaacacatcctgctgtcccgccaggttggcgtgccttacatcatcgtcttcctgaacaaggctgacatggtggacgacgctgaactgctggaactggtggaaatggaagtccgtgaactgctgtcgaagtacgagttccctggcgacgacctgcccatcgtgaagggttcggccaagctggcgctggaaggcgacaccggtcccctgggcgagcaagccatcatggccctggccgaagcgctggacacctacatcccgaccccggaacgtgccgttgacggtaccttcctgatgccggtggaagacgtgttctcgatctccggccgtggcaccgtggtgaccggtcgcgttgagcgcggcatcatcaaggtcggcgaagaaatcgaaatcgtcggtatcgctgacacccagaagaccacctgcaccggcgtggaaatgttccgcaagctgctggaccaaggtcaagctggcgacaacgttggcgtgctgctgcgcggcaccaagcgtgaagacgtgcagcgtggccaggttctggccaagccgggttcgatcaagccgcacaagcacttcaccggcgagatctatgttctgtcgaaggatgaaggcggccgtcacaccccgttcttcaacaactaccgtccgcagttctacttccgtaccaccgacgtgaccggtgcgatcgaactgccgaaggacaaggaaatggtcatgccgggcgacaacgtgtcgatcaccgtgcaactgatcaacccgatcgctatggaagaaggtctgcgcttcgctatccgtgaaggcggtcgtaccgtcggcgccggcgtggttgccaagatcttcgactaa

SEQ ID NO: 2868 - protein, 396 aa, Herbaspirillum seropedicae
MAKGKFERTKPHVNVGTIGHVDHGKTTLTAAIATVLSKKFGGEAKAYDQIDAAPEEKARGITINTAHVEYETANRHYAHVDCPGHADYVKNMITGAAQMDGAILVCSAADGPMPQTREHILLSRQVGVPYIIVFLNKADMVDDAELLELVEMEVRELLSKYEFPGDDLPIVKGSAKLALEGDTGPLGEQAIMALAEALDTYIPTPERAVDGTFLMPVEDVFSISGRGTVVTGRVERGIIKVGEEIEIVGIADTQKTTCTGVEMFRKLLDQGQAGDNVGVLLRGTKREDVQRGQVLAKPGSIKPHKHFTGEIYVLSKDEGGRHTPFFNNYRPQFYFRTTDVTGAIELPKDKEMVMPGDNVSITVQLINPIAMEEGLRFAIREGGRTVGAGVVAKIFD

SEQ ID NO: 2869 - DNA, 1344 bp, Unknown
  Unidentified
  CDS (1)..(1344)
  misc_feature (48)..(48): y is t or c
  misc_feature (582)..(582): y is t or c
  misc_feature (831)..(831): s is g or c
atgggtaaggagaaggttcacatcaacattgtcgtcattggccatgtygactctggcaagtcgaccaccactggtcacttgatctacaagcttggaggtattgacaagcgtgttatcgagaggtttgaaaaggaggcagctgaaatgaacaagcggtccttcaagtatgcctgggtgttggacaaactgaaggctgagcgtgaacgtggtatcaccattgatattgccttgtggaagtttgagaccaccaggtactactgcactgttattgatgctcctggtcatcgggacttcatcaagaacatgattactggtacctcacaggcagactgtgctgttctcattattgattccaccactggtggttttgaagccggtatctccaaggatggacaaacccgtgagcatgcactgcttgctttcacccttggtgtgaagcagatgatttgctgctgtaacaagatggatgccacaacaccaaagtactccaaggcaaggtacgatgaaatcgtgaaggaagtttcttcctacctgaagaaggttggatacaaccctgataagattccatttgtccccatctcyggctttgagggcgacaatatgatagagaggtctaccaaccttgactggtacaagggcccaactcttcttgaggccctggacatgatcaatgagcccaagaggcccacagacaagccactgcgactccctcttcaggacgtgtacaagattggtgggattggaactgtcccagtgggacgtgtggagactggtgtcctgaagcccggtatggtggtgacctttggcccctctggactgacaactgaagtsaagtctgttgagatgcaccatgagtctctcccagaggctttgcctggtgacaatgttggcttcaacgtgaagaacgttgctgtgaaggatctcaagcgtgggtttgttgcctcaaactccaaggatgaccctgctaaggaggcagccaacttcacctcccaggtcatcatcatgaaccacccgggtcagatcggaaatggctatgcccctgttctggactgccacacctcccacattgctgttaagtttgctgagatactgaccaagattgacaggcgatctggcaaggagcttgagaaagagcccaagttcttgaagaatggtgatgcagggtttgttaagatgattcccaccaagcccatggtggtggagactttctccgagtatcccccacttggtcgttttgctgttcgtgacatgcgtcaaactgttgctgttggagtcatcaagagcgtggagaagaaggatccatctggagccaaggtcaccaagtctgcagcaaagaagaagtga

SEQ ID NO: 2870 - protein, 447 aa, Unknown
  Unidentified
MGKEKVHINIVVIGHVDSGKSTTTGHLIYKLGGIDKRVIERFEKEAAEMNKRSFKYAWVLDKLKAERERGITIDIALWKFETTRYYCTVIDAPGHRDFIKNMITGTSQADCAVLIIDSTTGGFEAGISKDGQTREHALLAFTLGVKQMICCCNKMDATTPKYSKARYDEIVKEVSSYLKKVGYNPDKIPFVPISGFEGDNMIERSTNLDWYKGPTLLEALDMINEPKRPTDKPLRLPLQDVYKIGGIGTVPVGRVETGVLKPGMVVTFGPSGLTTEVKSVEMHHESLPEALPGDNVGFNVKNVAVKDLKRGFVASNSKDDPAKEAANFTSQVIIMNHPGQIGNGYAPVLDCHTSHIAVKFAEILTKIDRRSGKELEKEPKFLKNGDAGFVKMIPTKPMVVETFSEYPPLGRFAVRDMRQTVAVGVIKSVEKKDPSGAKVTKSAAKKK

SEQ ID NO: 2871 - DNA, 1344 bp, Vitis vinifera
  CDS (1)..(1344)
  misc_feature (123)..(123): r is g or a
  misc_feature (348)..(348): y is t or c
  misc_feature (837)..(837): r is g or a
atgggtaaggagaaggtccacattaacattgtggtcattggccatgttgattctggtaagtcaaccacaactggccatctgatctacaagcttggaggaattgacaagcgtgtcattgagcgrtttgaaaaggaggctgctgagatgaataagcggtcattcaagtatgcctgggtgcttgacaagctcaaggctgagcgggagcgtggtatcactattgacattgcattgtggaagtttgagaccaccaaatactactgcacagtcattgatgctcctggacatcgtgacttcatcaagaatatgattactggaacctcccaagctgactgtgctgtccttatcatygactctactactggaggctttgaagctggcatttccaaggatgggcagactcgtgagcatgctctccttgctttcacccttggtgtcaggcagatgatctgctgctgcaacaagatggatgctacaacccctaagtactcaaaggcgagatatgatgaaattgttaaggaagtctcttcctacttgaagaaggttggctacaaccccgacaagattccttttgttcccatctctggtttcgaaggagacaacatgatagagaggtcaaccaaccttgactggtacaagggccccacccttcttgaggcccttgacatggttcaagagccaaagagaccctcagacaagcccctccgactcccacttcaggatgtctacaagattggtggcattggcactgtcccagtgggacgggttgagactggtatcctcaagcctggtatggttgtgacttttggtcccactggactgaccactgaagtaaagtcrgtggagatgcaccatgagtctctcgtggaggctctccccggtgacaatgttgggttcaatgtgaagaatgtggctgtcaaggatctcaagcgtggctttgttgcatcaaactccaaggatgatcctgccaaggaggcagcaaacttcatatcccaggttattatcatgaaccaccctggccagattggcaatggctatgcccctgttctggattgccacacatcccatattgctgtcaagtttgctgagatcatgaccaagattgacagacggtctggtaaggaacttgagaaggagcccaagttcttgaagaatggtgatgcaggtttggttaagatgattcccaccaagcccatggtggttgagaccttctctgagtatccccctctagggcgattcgctgtgagggacatgcgtcagacagtggctgtaggagtcatcaagaacgtggaaaagaaggatccttccggagccaaggtcacaaagtctgctgccaagaagaagtga

SEQ ID NO: 2872 - protein, 447 aa, Vitis vinifera
MGKEKVHINIVVIGHVDSGKSTTTGHLIYKLGGIDKRVIERFEKEAAEMNKRSFKYAWVLDKLKAERERGITIDIALWKFETTKYYCTVIDAPGHRDFIKNMITGTSQADCAVLIIDSTTGGFEAGISKDGQTREHALLAFTLGVRQMICCCNKMDATTPKYSKARYDEIVKEVSSYLKKVGYNPDKIPFVPISGFEGDNMIERSTNLDWYKGPTLLEALDMVQEPKRPSDKPLRLPLQDVYKIGGIGTVPVGRVETGILKPGMVVTFGPTGLTTEVKSVEMHHESLVEALPGDNVGFNVKNVAVKDLKRGFVASNSKDDPAKEAANFISQVIIMNHPGQIGNGYAPVLDCHTSHIAVKFAEIMTKIDRRSGKELEKEPKFLKNGDAGLVKMIPTKPMVVETFSEYPPLGRFAVRDMRQTVAVGVIKNVEKKDPSGAKVTKSAAKKK

SEQ ID NO: 2873 - DNA, 1350 bp, Vitis vinifera
  CDS (1)..(1350)
atggcttccgttgctctcagaaaccctaattctaggcgctttcttccactttcctctaaaatctactcttcctgtcggggatccatctccactcagttctccatctctccaaatgactcaacctcgtctcctccccccactattccatggtggcgatctatgggcaccttcactcgcacaaagcctcatgttaatgtgggaactattgggcatgttgatcatgggaagactacattgactgctgctattacaaaggtgcttgcagaggaaggaaaagcaaaggcagttgccttcgatgaaattgacaaggctcctgaagagaagaagagaggaattacaattgcaacggcccatgtcgagtatgagactgctaagcggcactatgcccatgtggactgtccaggacatgcggattatgtgaagaatatgattactggagctgcccaaatggatggtggtattctggttgtttctgctcctgatgggcccatgccacagacaaaggaacacattctacttgcacgccaggtcggtgtgccatcattggtctgtttcttaaataaagttgatgctactgatgatccagagttagtggaccttgtagaaatggaactccgtgagcttcttagcttctacaagttccctggggatgaaattcccatcattcggggctcggctttgtgcgctttacagggaactaatgaagaaataggaaaacaggctattttgaagttaatggatgctgttgatgagtatattcctgaccctgtgcgacagcttgacaagccttttctaatgccaattgaagatgttttctcaattcagggacgtggaacagtagctactggtcgtgttgaacaaggaacaattaaagttggagaggaagttgagattttggggttaacacagagtggtcctttgaaatccacagtcacaggtgttgagatgtttaagaaaatcttagatcaaggacaagctggtgacaacgtaggtcttcttcttcgtggcctgaaacgggaagacatccagcgtggacaggtcattgccaagcctggtacttgcaaaacatacaagaggtttgaagcggagatatatgtcctgacaaaagatgaaggtggaagacatactgccttcgtcacaaactacagacctcagttttatatgaggactgcagatgtcactgggaaggttcaattgcctgaagaagttaagatggttatgcctggggacaatgttacagcagttttcgagttgatatctgctgttcctcttgaagctggacaaagatttgctttgagagagggaggtaggacagtcggcgcaggtgtagtttccaaagtaataagttga

SEQ ID NO: 2874 - protein, 449 aa, Vitis vinifera
MASVALRNPNSRRFLPLSSKIYSSCRGSISTQFSISPNDSTSSPPPTIPWWRSMGTFTRTKPHVNVGTIGHVDHGKTTLTAAITKVLAEEGKAKAVAFDEIDKAPEEKKRGITIATAHVEYETAKRHYAHVDCPGHADYVKNMITGAAQMDGGILVVSAPDGPMPQTKEHILLARQVGVPSLVCFLNKVDATDDPELVDLVEMELRELLSFYKFPGDEIPIIRGSALCALQGTNEEIGKQAILKLMDAVDEYIPDPVRQLDKPFLMPIEDVFSIQGRGTVATGRVEQGTIKVGEEVEILGLTQSGPLKSTVTGVEMFKKILDQGQAGDNVGLLLRGLKREDIQRGQVIAKPGTCKTYKRFEAEIYVLTKDEGGRHTAFVTNYRPQFYMRTADVTGKVQLPEEVKMVMPGDNVTAVFELISAVPLEAGQRFALREGGRTVGAGVVSKVIS

SEQ ID NO: 2875 - DNA, 1344 bp, Vitis vinifera
  CDS (1)..(1344)
  misc_feature (267)..(267): s is g or c
atgggtaaggagaaggttcacattaatattgtggtcattggtcatgttgactctggaaagtcgaccaccactggtcatttgatatacaagcttggaggtattgacaagcgtgttattgagcggtttgaaaaagaagccgctgaaatgaataaaagatcattcaagtatgcttgggtcttggacaagctcaaggctgagcgtgagcgcggtattaccattgatattgctttgtggaagtttgagaccactaaatattattgcactgtsattgatgctcctgggcatcgtgacttcatcaagaacatgatcactggtacctcacaggctgattgtgctgtgcttatcattgattctaccactggtggttttgaagctggtatttccaaggatggtcagacccgtgagcatgctttgcttgccttcacccttggtgtcaggcaaatgatctgctgttgcaataagatggatgcgacaacaccgaagtactccaagtccaggtatgatgaaattgtgaaggaagtttcttcctatcttaagaaggtcggttacaaccctgataagatcccctttgttccaatctctggatttgagggtgacaacatgattgagcggtcaacaaaccttgactggtacaagggccctaccctccttgaggctcttgacatgattcacgagcccaagaggccctcggacaagccccttcgtctcccactacaggacgtttacaagattggtggcattggcactgttcctgttggtcgtgttgaaactggtattattaaacccggtatggttgtcacctttgggccaagtggactcactactgaagtcaagtcagttgaaatgcaccatgagtctttggtagagggtctgcctggtgacaatgttggtttcaatgtgaagaatgttgctgtcaaggatctaaaacgtggctttgttgcatctaactccaaagatgatcctgcaaaggaagctgccaacttcacagcccaggtcattatcatgaaccatcctggccaaattggaaatggttatgccccagtccttgactgtcacacctcccacattgcggtgaagtttgctgagattacgaccaagattgacaggcggtctggcaaggagcttgagaaggagcccaagttcttgaagaatggtgatgctggatttgttaagatgattccaaccaagcccatggttgtggaaactttctccgagtaccctccacttggccgttttgctgttagggacatgcgtcaaactgttgctgtcggtgttatcaagagtgttgagaagaaggatccaagtggtgccaaggttaccaagtccgctgccaagaagaaatga

SEQ ID NO: 2876 - protein, 447 aa, Vitis vinifera
MGKEKVHINIVVIGHVDSGKSTTTGHLIYKLGGIDKRVIERFEKEAAEMNKRSFKYAWVLDKLKAERERGITIDIALWKFETTKYYCTVIDAPGHRDFIKNMITGTSQADCAVLIIDSTTGGFEAGISKDGQTREHALLAFTLGVRQMICCCNKMDATTPKYSKSRYDEIVKEVSSYLKKVGYNPDKIPFVPISGFEGDNMIERSTNLDWYKGPTLLEALDMIHEPKRPSDKPLRLPLQDVYKIGGIGTVPVGRVETGIIKPGMVVTFGPSGLTTEVKSVEMHHESLVEGLPGDNVGFNVKNVAVKDLKRGFVASNSKDDPAKEAANFTAQVIIMNHPGQIGNGYAPVLDCHTSHIAVKFAEITTKIDRRSGKELEKEPKFLKNGDAGFVKMIPTKPMVVETFSEYPPLGRFAVRDMRQTVAVGVIKSVEKKDPSGAKVTKSAAKKK

SEQ ID NO: 2877 - DNA, 1341 bp, Litchi chinensis
  CDS (1)..(1341)
atgggaaaggaaaaggttcacatcaacattgttgttattggacatgtcgactctgggaagtcgaccactactggtcacttgatctacaagcttggtggtattgacaagcgtgtgattgagaggtttgagaaggaggctgctgagatgaacaagaggtctttcaagtatgcctgggtgcttgacaagcttaaggctgagcgtgagcgtggtattactattgatattgccttgtggaagtttgagaccaataggtactactgcactgttattgatgctcctggacatcgtgacttcattaagaacatgattacgggtacctcacaggctgactgtgctgttcttatcattgactccaccactggtggtttcgaagccggtatttccaaggatggtcagacccgtgagcatgctttgcttgcttttaccctcggtgtcaagcagatgatttgctgctgtaacaagatggacgctactacccccaagtactccaggctaggtacgatgaaattgaaggaagtctcgtcttacttgaagaaggttggatacaaccctgagaaaatcccctttgtccccatctctggatttgagggtgataacatgattgagaggtccaccaacctcgactggtacaagggtccaactctccttgaggctcttgaccagatcaatgaacccaagaggccctcagacaagcccctccgtctcccacttcaggatgtgtacaagattggaggtattggaactgtcccagtgggtcgtgttgagactggtatcatcaagcccggtatagttgtgactttcggcccatctggactgaccactgaggttaagtctgttgagatgcaccatgaagctcttcaggaggctcttccaggtgacaatgttggattcaacgtgaagaatgatgctgtcaaggatctcaagcgtggattcgtcgcatctaactccaaggacgatcctgccaaggaggctgccaacttcacatcacaggtcatcatcatgaaccaccccggacagatcggaaacggatatgccccagtgctcgactgccacacctcccacattgctgtcaagttcgctgaaatcatgaccaagattgacaggcggtcaggtaaggagcttgagaaggagcccaaattcttgaagaacggtgatgctggttacgtgaagatgattcccaccaagcccatggttgttgagacattctcagagtacccaccacttggacgatttgctgtgagagacatgcgacaaaccgttgcagttggtgtgatcaagagtgttgagaagaaggacccaaccggtgccaaggtcaccaaggctgctgccaagaagaagtga

SEQ ID NO: 2878 - protein, 446 aa, Litchi chinensis
MGKEKVHINIVVIGHVDSGKSTTTGHLIYKLGGIDKRVIERFEKEAAEMNKRSFKYAWVLDKLKAERERGITIDIALWKFETNRYYCTVIDAPGHRDFIKNMITGTSQADCAVLIIDSTTGGFEAGISKDGQTREHALLAFTLGVKQMICCCNKMDATTPKYSRLGTMKLKEVSSYLKKVGYNPEKIPFVPISGFEGDNMIERSTNLDWYKGPTLLEALDQINEPKRPSDKPLRLPLQDVYKIGGIGTVPVGRVETGIIKPGIVVTFGPSGLTTEVKSVEMHHEALQEALPGDNVGFNVKNDAVKDLKRGFVASNSKDDPAKEAANFTSQVIIMNHPGQIGNGYAPVLDCHTSHIAVKFAEIMTKIDRRSGKELEKEPKFLKNGDAGYVKMIPTKPMVVETFSEYPPLGRFAVRDMRQTVAVGVIKSVEKKDPTGAKVTKAAAKKK

SEQ ID NO: 2879 - DNA, 1344 bp, Zea mays
  CDS (1)..(1344)
atgggtaaggagaagactcacatcaacattgtggtcattggccatgtcgactctggcaagtcgaccaccactggccacctgatctacaagcttggaggtattgacaagcgagtgattgagaggttcgagaaagaggctgccgagatgaacaagcggtcattcaagtatgcgtgggtgcttgacaagctcaaggctgagcgtgagagaggtattacaattgatattgccctgtggaagttcgagaccaccaagtactactgcactgttattgatgccccgggacaccgtgacttcatcaagaatatgatcactggcacttcccaagctgactgtgctgttcttatcattgactcaaccactggtggttttgaggctggtatctccaaggatggccagacccgtgagcatgctctccttgctttcacacttggtgtgaagcagatgatttgctgctgcaacaagatggatgctactacacccaagtattcaaaggcccgttatgatgagattgtgaaggaagtctcttcctacctgaagaaggttggatacaaccctgataagatccacttcgttccaatctctggttttgaaggtgacaacatgattgagaggtccaccaaccttgactggtacaagggcccaaccctacttgaggctctggacttgatcaatgagccaaagaggccttcagacaagcccctgcgtctcccccttcaggatgtgtacaagattggtggtattggaactgtccctgttggacgtgttgagactggtgtcattaagcctggtatggttgttacttttgggcctactggtcttactactgaggttaagtccgttgagatgcaccatgaggctctccaggaggcccttcccggtgacaatgttggcttcaacgtgaagaatgttgctgtgaaggatctgaagcgtgggtatgtggcctccaactccaaggatgaccctgccaaggaggctgctagctttacctcccaggtcatcatcatgaaccaccctggccagattggcaatggctatgccccagttctggactgccacacctcacacattgctgtcaagtttgctgagctcgttaccaagattgataggcgatccggcaaggagctggagaaggagcccaaatttctcaagaacggtgatgctggtatggtgaagatggttcccactaagcccatggtggtggagaccttttctcagtatcctcctcttggtcgatttgctgtccgtgacatgaggcaaacggtggctgtcggagtcatcaagagtgtggagaagaaggacccaactggagccaaggtgacgaaggctgctgccaagaagaaatga

SEQ ID NO: 2880 - protein, 447 aa, Zea mays
MGKEKTHINIVVIGHVDSGKSTTTGHLIYKLGGIDKRVIERFEKEAAEMNKRSFKYAWVLDKLKAERERGITIDIALWKFETTKYYCTVIDAPGHRDFIKNMITGTSQADCAVLIIDSTTGGFEAGISKDGQTREHALLAFTLGVKQMICCCNKMDATTPKYSKARYDEIVKEVSSYLKKVGYNPDKIHFVPISGFEGDNMIERSTNLDWYKGPTLLEALDLINEPKRPSDKPLRLPLQDVYKIGGIGTVPVGRVETGVIKPGMVVTFGPTGLTTEVKSVEMHHEALQEALPGDNVGFNVKNVAVKDLKRGYVASNSKDDPAKEAASFTSQVIIMNHPGQIGNGYAPVLDCHTSHIAVKFAELVTKIDRRSGKELEKEPKFLKNGDAGMVKMVPTKPMVVETFSQYPPLGRFAVRDMRQTVAVGVIKSVEKKDPTGAKVTKAAAKKK

SEQ ID NO: 2881 - DNA, 1344 bp, Nicotiana tabacum
  CDS (1)..(1344)
atgggtaaagagaaatttcacatcaacattgtggtcattggccacgtcgactctggtaagtccactaccactggtcacttgatctacaagcttggtggtattgacaagcgtgtcattgagaggtttgagaaagaagctgctgagatgaacaagaggtcattcaagtatgcctgggtgcttgacaagctcaaggctgagcgtgagcgtggtatcaccattgatattgccttgtggaagtttgagaccaccaagtactactgcactgtgattgatgctcctggacacagggacttcatcaagaatatgattactggtacctcccaagctgactgtgctgtcctgattattgactccaccactggtggttttgaagctggtatctctaaggatggacagacccgtgaacatgcattgcttgctttcacccttggtgtcaagcaaatgatttgctgctgtaacaagatggatgctaccacccccaagtactccaaggctaggtatgatgaaatcgtgaaggaggtttcttcctacctcaagaaggtaggatacaaccctgataaaatcccctttgtccccatctctggtttcgagggtgataacatgatcgaaagatcaaccaaccttgactggtacaagggcccaactcttcttgaggctcttgaccagatcaatgagcccaagaggccctcagacaagcccctcaggctcccacttcaggatgtgtacaagattggtggtattggtactgtccctgttggtcgtgtggaaaccggtgtgctcaagcctggtatggttgtgacttttggtcccactggtctgaccactgaagttaaatctgttgagatgcaccacgaagctcttcaggaggcacttcctggtgacaatgttggattcaacgtcaagaacgttgcagttaaggatctcaagcgtgggtttgttgcttcaaactccaaggatgacccagctaagggtgctgccagctttacctcccaagtcatcatcatgaaccatccaggacagattggaaatggatatgctccagtgcttgactgccacacctcccacattgctgtcaagtttgcagaaattttgaccaagatcgacaggcgttctggtaaggagattgagaaggagcccaagttcttgaagaatggtgatgctggtatggttaagatgattcccaccaagcccatggttgttgagaccttctctgagtacccaccattgggacgttttgctgtgagggacatgcgtcaaactgttgctgttggtgttatcaagaacgttgacaagaaggacccaactggtgccaaggtcaccaaggctgctcagaagaagaaatga

SEQ ID NO: 2882 - protein, 447 aa, Nicotiana tabacum
MGKEKFHINIVVIGHVDSGKSTTTGHLIYKLGGIDKRVIERFEKEAAEMNKRSFKYAWVLDKLKAERERGITIDIALWKFETTKYYCTVIDAPGHRDFIKNMITGTSQADCAVLIIDSTTGGFEAGISKDGQTREHALLAFTLGVKQMICCCNKMDATTPKYSKARYDEIVKEVSSYLKKVGYNPDKIPFVPISGFEGDNMIERSTNLDWYKGPTLLEALDQINEPKRPSDKPLRLPLQDVYKIGGIGTVPVGRVETGVLKPGMVVTFGPTGLTTEVKSVEMHHEALQEALPGDNVGFNVKNVAVKDLKRGFVASNSKDDPAKGAASFTSQVIIMNHPGQIGNGYAPVLDCHTSHIAVKFAEILTKIDRRSGKEIEKEPKFLKNGDAGMVKMIPTKPMVVETFSEYPPLGRFAVRDMRQTVAVGVIKNVDKKDPTGAKVTKAAQKKK

SEQ ID NO: 2883 - DNA, 1266 bp, Ostreococcus tauri
  CDS (1)..(1266)
atgacggcgacgacgccggggacgacgacgacgacgacgacgcgcggcatcgcgacgtcgtcggcgcgaacgcgcgcggcgtacgatatcaacacgcgaacgaaaccgcacttacacgtgggaacgatcggacacgtcgatcacgggaagacgacgctgacggcggcgatcacgaaggtcatggcggaggctggcggggcgaaggagatcgcgttcgacgcgatcgataaagctccggaggagaaggcgagaggaatcacgatctctacctcgcacgtggagtacgagacggaaaagagacactacgcgcacgttgattgcccgggacacgcggattacgtgaagaacatgatcacgggggcggcgcaaatggatggagggatcctcgtcgtgagcgcggcggatggaccgatgccgcagacgcgagaacacattttgctcgcgcgacaagtcggcgttccgtctctcgtggtgttcatgaacaaggtggacatggtggacgacgaggagctggtggagttggtcgagatggagcttcgcgagttgttgagcttttaccagtttccgggcgacgacattcccatcatcaagggatcggctttgcacgcgttaaagggaacggaagacaagattgggaaggaaaagatcttcgaactcatgaaggccatcgatgagtacattcccgagcccaagcgggcgttggataagcccttctccatgccggtcgaggacgtgtttagcattcaaggtcgcggcaccgtcgccacgggtcgcgtggaacaaggcatcgttcgtacgggtgacgaagtcgacgtcgtcggtatcacggcgacaaagaagaccaccgtcactggcgtcgaaatgttcaagaagacgctcaacgagggtcaagccggagacaactgtggattgctcctccgcggcttgaagcgagaagacgtcttgcgcggtcaagtgctgtgcaagccgggatcgatcaagccccacagtaagttcgaggccgagatttacgttcttaagaaggaagaaggcggtcgtcacacgccgttcttctccaactaccgcccgcaattctttatgcgaaccgcggatattacagggaacatcacccttccggagggtaccgagatggtcatgccgggcgacaacgtcaccgccgtattcgagctcatcaccccgatcgcgatggaacccggtcttcgcttcgcccttcgtgaaggtggtcgtaccgtcggcgccggcgtcgtgtccaaggttctcaactag

SEQ ID NO: 2884 - protein, 421 aa, Ostreococcus tauri
MTATTPGTTTTTTTRGIATSSARTRAAYDINTRTKPHLHVGTIGHVDHGKTTLTAAITKVMAEAGGAKEIAFDAIDKAPEEKARGITISTSHVEYETEKRHYAHVDCPGHADYVKNMITGAAQMDGGILVVSAADGPMPQTREHILLARQVGVPSLVVFMNKVDMVDDEELVELVEMELRELLSFYQFPGDDIPIIKGSALHALKGTEDKIGKEKIFELMKAIDEYIPEPKRALDKPFSMPVEDVFSIQGRGTVATGRVEQGIVRTGDEVDVVGITATKKTTVTGVEMFKKTLNEGQAGDNCGLLLRGLKREDVLRGQVLCKPGSIKPHSKFEAEIYVLKKEEGGRHTPFFSNYRPQFFMRTADITGNITLPEGTEMVMPGDNVTAVFELITPIAMEPGLRFALREGGRTVGAGVVSKVLN

SEQ ID NO: 2885 - DNA, 1629 bp, Ostreococcus tauri
  CDS (1)..(1629)
atgaagacggcgccgacgcaccggacggtgggaaaggaagagatcgcggcgcggcgacgggcggaggagaacgcgaggcatccgggggggggcaagacgagcgcgcgcgggacgttcgcgttcgacgcgccgtctccggacgcggcggcgaaggcggcgaggaagagaggaacgacgagcgcggagacgacgcagacgcgagcggaggggttgacgagagagttcgatgttaaggcgcgcgttggggggggcgatggcgcgttcgatgggtacgaaccgtcgagcgcggaacgcgcggcgtacgcctcggaggacggcgacgtgcacgtggtggtgatgggacacgtcgacgccgggaaatcgacgctgagcggacgcgtcctctacgcgctcaaggctgtggacgatcgcgcggtgcataagaatttaagggacgccaaggcgagcggcaaatcgtccttcgcctgggcgtgggtcatggactctcgaccagaggagcgcgagcgcggggtgacgatcgacgtgagcgtcaaacgatgcacgttagacgaacgtcgacagctcgttgttttggacgcaccaggacacagggatttcgtgccgagcgccatctccggcatggcccaggcggacgccggaattttagtcatcgacggcgccgtgggtggatttgaaaacggattcgaggtcaccaccggtcacactggacaaacacgtgagcacgcgcgcttggcgaaatatcttggtctgcactctctcatcgtagtggtgaacaagatggactgcgtcgagtactcgctcgagcgttttcaacacatcgtcgacgcgctcacgagatttctggtcggcgacgtcggcttcggcgccgagcagttgacgttcgtcccagcttcgggcatggagggagtgaatatatcgccggacgatttcgccttaccggaagtcttgaaggcgtggtaccgaggaccgacgctcgtggacgctcttcggtcgatcaagattccgtcgcgcggcgagcccaagccgcttcgcctaccgatcgcggacgttgtcacggaggttcgttctctcggtgcgaccgcctgtgggggtaagattgagtcgggaagcgtattcaaaggtcaaaaggtgtcgataatgccagcgaacattacagcgacgatcaagtgcatcgagattgacggattacccgtggacttcgccggcgtcggcgcctccgtcgacgtcggattgagtgatgtcgatccgttgcacttgcaagtggggagtgttttgtgccatacggcgtatccgatgacttccacgaacgagatcgagattagtgttctcaccaccgaagttcttcgcgttccgcttctgaagggctccaaggtggtgttgcactcgcacatgctgtcgtgcgacgcgacggtggatcaactcatcgcgcaagtggacgcgctcacaggtgccgtgataaagccgaaccctaggtgtattacgcgcgaacagagcgcaattttgagattgaagacgtcccaaaacgtgtgcgtcgagcccgtcgaagtttctccgacgttgagccgcgttactttgcgaatgggcggtaaaacgatggcagtcggcgtcgttcgcgcgatttggcgatga

SEQ ID NO: 2886 - protein, 542 aa, Ostreococcus tauri
MKTAPTHRTVGKEEIAARRRAEENARHPGGGKTSARGTFAFDAPSPDAAAKAARKRGTTSAETTQTRAEGLTREFDVKARVGGGDGAFDGYEPSSAERAAYASEDGDVHVVVMGHVDAGKSTLSGRVLYALKAVDDRAVHKNLRDAKASGKSSFAWAWVMDSRPEERERGVTIDVSVKRCTLDERRQLVVLDAPGHRDFVPSAISGMAQADAGILVIDGAVGGFENGFEVTTGHTGQTREHARLAKYLGLHSLIVVVNKMDCVEYSLERFQHIVDALTRFLVGDVGFGAEQLTFVPASGMEGVNISPDDFALPEVLKAWYRGPTLVDALRSIKIPSRGEPKPLRLPIADVVTEVRSLGATACGGKIESGSVFKGQKVSIMPANITATIKCIEIDGLPVDFAGVGASVDVGLSDVDPLHLQVGSVLCHTAYPMTSTNEIEISVLTTEVLRVPLLKGSKVVLHSHMLSCDATVDQLIAQVDALTGAVIKPNPRCITREQSAILRLKTSQNVCVEPVEVSPTLSRVTLRMGGKTMAVGVVRAIWR

SEQ ID NO: 2887 - DNA, 1350 bp, Arabidopsis thaliana
  CDS (1)..(1350)
atgggtaaagagaagtttcacatcaacattgtggtcattggccacgtcggttctggaaagtcgaccaccactggacacttgatctacaagttgggtggtattgacaagcgtgtcattgagaggttcgagaaggaggctgctgagatgaacaagaggtccttcaagtacgcatgggttttggacaaacttaaggctgagcgtgagcgtggtatcaccattgacattgctctctggaagttcgagaccaccaagtactactgcactgtcattgatgctcctggccatcgtgatttcatcaagaacatgatcactggtacctcccaggctgattgtgctgtccttatcattgactccaccactggtggttttgaggctggtatctccaaggatggtcagacccgtgagcacgctctacttgctttcacccttggtgtcaagcagatgatctgctgttgtaacaagatggatgccactacccccaagtactccaaggccaggtacgatgaaatcatcaaggaggtgtcttcctacttgaagaaggttggttacaaccccgacaaaatcccatttgtgcccatctctggatttgagggtgacaacatgattgagaggtccaccaaccttgactggtacaagggaccaactctccttgaggctcttgaccagatcaacgagcccaagaggccgtcagacaagccccttcgtctcccacttcaggatgtctacaagattggtggtattggaacggtgccagtgggacgtgttgagactggtatgatcaagcctggtatggttgtgacctttgctcccacaggattgaccactgaggtcaagtctgttgagatgcaccacgagtctcttcttgaggcacttccaggtgacaacgttgggttcaatgttaagaatgttgctgtcaaggatcttaagagagggtacgtcgcatccaactccaaggatgaccctgccaagggtgctgctaacttcacctcccaggtcatcatcatgaaccaccctggtcagattggtaacggttacgccccagtcctggattgccacacctctcacattgcagtcaagttctctgagatcttgaccaagattgacaggcgttctggtaaggagattgagaaggagcccaagttcttgaagaatggtgatgctggtatggtgaagatgactccaaccaagcccatggttgtggagaccttctctgagtacccaccacttggacgtttcgctgtgagggacatgaggcagactgttgcagtcggtgttatcaagagtgttgacaagaaggacccaaccggagccaaggttaccaaggctgccgtcaagaagggtgcgaagtga

SEQ ID NO: 2888 - protein, 449 aa, Arabidopsis thaliana
MGKEKFHINIVVIGHVGSGKSTTTGHLIYKLGGIDKRVIERFEKEAAEMNKRSFKYAWVLDKLKAERERGITIDIALWKFETTKYYCTVIDAPGHRDFIKNMITGTSQADCAVLIIDSTTGGFEAGISKDGQTREHALLAFTLGVKQMICCCNKMDATTPKYSKARYDEIIKEVSSYLKKVGYNPDKIPFVPISGFEGDNMIERSTNLDWYKGPTLLEALDQINEPKRPSDKPLRLPLQDVYKIGGIGTVPVGRVETGMIKPGMVVTFAPTGLTTEVKSVEMHHESLLEALPGDNVGFNVKNVAVKDLKRGYVASNSKDDPAKGAANFTSQVIIMNHPGQIGNGYAPVLDCHTSHIAVKFSEILTKIDRRSGKEIEKEPKFLKNGDAGMVKMTPTKPMVVETFSEYPPLGRFAVRDMRQTVAVGVIKSVDKKDPTGAKVTKAAVKKGAK

SEQ ID NO: 2889 - DNA, 1185 bp, Candidatus Phytoplasma australiense
  CDS (1)..(1185): transl_table=11
atggctaatgaaaaatttataagaaataaacctcatttaaatgttggaactattggacacgtagaccacggaaaaactactttaacagctgcaataactcaagttttatctactcaaggattggctaaaagtaaagcttatgaccaaattgataacgctcctgaagaaagagaacgtggaatcaccatcaaaacttctcacgttgaatatgaaacttctaaaagacattacgctcacgttgactgccctgggcacgctgactatgttaaaaacatgattactggagccgctcaaatggacgctgccattctagttgtttctggtgcagatagtgtaatgcctcaaactagagaacatattttattggctcgccaagttggagttcctaaaattgttgttttcttaaataaatgtgatctttgccctgatgaagaaattttagaattagtggaaatggaagttcgtgaattattatctaaatacgattttccgggtgatgacacaccaattatcagaggatctgctttaaaagctttagaaggtgacgctcattacgttgctcaagttaatgaattaattcaaactttagatacttatattgaagacccagctcgtgaagttgacaaacctttcttaatgccagttgaagatgttttcactattactggtagaggaacagttgttactggtagagttgaaagaggtcaagtagaagctggtgatgagattgaaatcgtaggtttgaaagaaactaaaaaaacaattgtaacagcagtggaaatgtttaaaaaagacctagattttgctcaagcaggtgataacattggtgctttattacgtgggattaaccgagaagacgttcaacgtggacaagttttggctaaaccaggatctgttaaacctcattctaaattcgttgctcaagtttatgttttgaccaaagaagaaggcggccgtcatactgcatttttctcccaatatcgtcctcaattttatttccgtactactgatattacaggggtggttgaattacaaggtgatgttaaaatggttatgccaggagacaacactgaattagttgttactttaaacaaccctattgcaattgaagaaggaactaaattttctattcgtgaaggcggaaaaacagttggcgctggatcagtttctaagattttaaaataa

SEQ ID NO: 2890 - protein, 394 aa, Candidatus Phytoplasma australiense
MANEKFIRNKPHLNVGTIGHVDHGKTTLTAAITQVLSTQGLAKSKAYDQIDNAPEERERGITIKTSHVEYETSKRHYAHVDCPGHADYVKNMITGAAQMDAAILVVSGADSVMPQTREHILLARQVGVPKIVVFLNKCDLCPDEEILELVEMEVRELLSKYDFPGDDTPIIRGSALKALEGDAHYVAQVNELIQTLDTYIEDPAREVDKPFLMPVEDVFTITGRGTVVTGRVERGQVEAGDEIEIVGLKETKKTIVTAVEMFKKDLDFAQAGDNIGALLRGINREDVQRGQVLAKPGSVKPHSKFVAQVYVLTKEEGGRHTAFFSQYRPQFYFRTTDITGVVELQGDVKMVMPGDNTELVVTLNNPIAIEEGTKFSIREGGKTVGAGSVSKILK

SEQ ID NO: 2891 - DNA, 1344 bp, Gymnadenia conopsea
  CDS (1)..(1344)
atgggcaaggaaaaggtacacataagcattgtggtcatcggccatgttgactcaggcaagtcgactaccactgggcatctcatatacaagcttggtgggatcgacaagcgtgtcattgaaagattcgagaaagaggcggctgagatgaacaagaggtcattcaagtacgcctgggttctcgacaagctgaaggccgagcgcgagcgcggcatcaccatcgacatcgccctctggaagttcgagaccaccaagtactactgcacggttattgatgcacccggtcatcgcgattttatcaagaacatgatcaccggcacctcgcgggcggactgcgccgtcctcatcatcgactccacaactggaggcttcgaagccggcatctctaaggatgggcagacgcgtgagcatgctttgctcgccttcactcttggagtcaagcagatgatctgttgctgcaacaagatggatgcaaccacacccaagtactccaaggcaaggtatgaggaaattgtgaaggaagtctcttcttatctgaagaaggttggctacaacccggacaagattgcctttgtgcccatctctggtttcgagggcgacaacatgatcgagagatccgcgaacctcgattggtacaagggtcccacccttctcgatgccctcgacctcatcctggagccgaagaggcccacagacaagcctcttcgcctccctctccaggacgtctacaaaatcggcggcattgggaccgtccccgtcggccgcgtcgagactggtgtcctcaagcccggcatggtcgtcaccttcggccccaccggcctgtctactgaagtaaagtccgtagagatgcaccacgaagccctcctggaagccctcccgggggacaacgtcgggttcaacgtgaagaatattgccgtgaaagatctgaagcggggtttcgtcgcctcgaactcgaaggatgacccggctaaggaggctgcaaacttcacttcccaggtcatcatcatgaaccaccccgggcagatcggcaacggctacgcgccggtgctcgactgccacacctcgcacatcgctgtcaagttcgctgagatcctcaccaagatcgaccggcggtctggcaaggagctcgagaaggagcccaagttcctgaagaacggcgacgcaggtttcgtgaagatgattccgtcgaagcccatggtggtggaaaccttctccgagtatcctccgctcggccgcttcgccgtgagggacatgaggcagacggtggccgtcggcgttatcaagagtgtggagaagaaggagcccagcggcgccaaggtcaccaagtccgccgccaagaagaagtga

SEQ ID NO: 2892 - protein, 447 aa, Gymnadenia conopsea
MGKEKVHISIVVIGHVDSGKSTTTGHLIYKLGGIDKRVIERFEKEAAEMNKRSFKYAWVLDKLKAERERGITIDIALWKFETTKYYCTVIDAPGHRDFIKNMITGTSRADCAVLIIDSTTGGFEAGISKDGQTREHALLAFTLGVKQMICCCNKMDATTPKYSKARYEEIVKEVSSYLKKVGYNPDKIAFVPISGFEGDNMIERSANLDWYKGPTLLDALDLILEPKRPTDKPLRLPLQDVYKIGGIGTVPVGRVETGVLKPGMVVTFGPTGLSTEVKSVEMHHEALLEALPGDNVGFNVKNIAVKDLKRGFVASNSKDDPAKEAANFTSQVIIMNHPGQIGNGYAPVLDCHTSHIAVKFAEILTKIDRRSGKELEKEPKFLKNGDAGFVKMIPSKPMVVETFSEYPPLGRFAVRDMRQTVAVGVIKSVEKKEPSGAKVTKSAAKKK

SEQ ID NO: 2893 - DNA, 1398 bp, Glugea plecoglossi
  CDS (1)..(1398)
atggcagaagaaaaaccaattcttaacgtttgcttcattggacacgtagatagtggaaaaagtaccacagttggtaacttggctttccaactcggtgcaattgacgcacgtaaaatggataagttgaagaaagaagccgaagaacgtggacgtggtacttttagttacgcatatgtaatggatatgtcagctgcagaaagagagagaggtattaccatcacaacatcactcatgaaattggaaacatcaaaacatatgctcaatgtaattgattgcccggggcatcaagatttcatcaagaacatggtaactggtgcagcacaggctgatgttggtgtagtacttgtaccatgcgcaactggtgaattcgaaagttgtatctcaggaggaacactcaaagatcatatcatgatcagtggtgttcttggatgcagaaaattaattgtatgtgtcaacaaagtcgatacaatcgatgaaaagaatagaatttcaagattcgatgaagtcgcaaaagaaatgaaaggtatcattgcaaaatcacatccagataaggatcctataataatccctatttcagggtatctcggaatcaatatcgtcgaaaaaggagacaaatttgagtggttcaaaggatggaaaccagtatctggtgcaggtgattccattttcactcttgaaggagctcttaactcacaaatacctccaccaagaccaattgataaaccacttcgtatgccaattgattcaatccataagattccaggaatcggaatggtctacactggtagagtcagtacaggtgcaatcaagccaggtatggttgtctcatctcaacctacaggtgtagttgctgaagtcaaaacacttgaaattcacaagcaatccagagcagcagtagtatcaggtgaaaattgcggtgtggcattaaaagcagcatcccaaggaaatccagctctaatcaagcctggtcatgttttttcaaatacaaaagattcaccagttgaaattttcgaagcagcaagagcaaaaatagtcgtagttgcacatccaaaaggtatcaaaccaggatattgcccaacaatggatttaggtacacatcacgttccatgccaaataaccaaattcatcagcaagagaatgccaggtatcaaggaagaaatcccatcaccagatgtagtccagaaaggtgagaatgtcacatgcatcattcatcctcagaaacaagttgtcatggaaacattgaaggaagtcccatcactcgcaagatttgctctcagagatgcaggaagaattgtcggaatcggtgcaattgaagcacgatacaccaaggctgaatatgaaacagaagttccatctacaacaggtaagggaagaaaggcaacacgtggtcccggataa

SEQ ID NO: 2894 - protein, 465 aa, Glugea plecoglossi
MAEEKPILNVCFIGHVDSGKSTTVGNLAFQLGAIDARKMDKLKKEAEERGRGTFSYAYVMDMSAAERERGITITTSLMKLETSKHMLNVIDCPGHQDFIKNMVTGAAQADVGVVLVPCATGEFESCISGGTLKDHIMISGVLGCRKLIVCVNKVDTIDEKNRISRFDEVAKEMKGIIAKSHPDKDPIIIPISGYLGINIVEKGDKFEWFKGWKPVSGAGDSIFTLEGALNSQIPPPRPIDKPLRMPIDSIHKIPGIGMVYTGRVSTGAIKPGMVVSSQPTGVVAEVKTLEIHKQSRAAVVSGENCGVALKAASQGNPALIKPGHVFSNTKDSPVEIFEAARAKIVVVAHPKGIKPGYCPTMDLGTHHVPCQITKFISKRMPGIKEEIPSPDVVQKGENVTCIIHPQKQVVMETLKEVPSLARFALRDAGRIVGIGAIEARYTKAEYETEVPSTTGKGRKATRGPG

SEQ ID NO: 2895 - DNA, 1386 bp, Athalia rosae
  CDS (1)..(1386)
atgggaaaggaaaaggtccacattaacatcgtcgtcattggacacgtcgactccggcaagtcaacaaccacaggacatctcatctacaaatgtggtggtatcgacaagcgtactattgagaagtttgagaaggaagcccaggagatgggaaaaggttccttcaagtatgcgtgggttttggacaagctgaaggcagagcgtgaacgtggtatcacgatcgatattgctctgtggaagtttgagactgctaaatactacgttacgatcattgatgcgcccggacacagagatttcattaagaacatgatcactggtacgtcgcaggccgattgtgcggtgctgatcgttgctgccggtactggagaattcgaagctggtatttccaagagcggacaaacccgtgagcatgcgctccttgccttcactcttggtgtcaagcagctcatcgtaggagtcaacaaaatggactccactgaaccacctttctctgaaagtcgatttgaggaaattaagaaggaagtttcttcctacatcaaaaagatcggttacaatccagctgctgtggcattcgtaccaatctctggatggcatggagacaacatgcttgagccatccagcaaaatgccatggttcaaaggatgggctgttgagcgcaaggaaggcaaggctgacggcaagtgcctcatcgaagctcttgacgccattctgccacccagcagacccactgacaaggctctccgtcttcctcttcaggatgtttacaagattggtggtattggaacggtaccagtcggtcgtgttgaaactggtgtccttaaaccaggtactgtcgtcacctttgccccagctggactcacgactgaagtcaagtccgtcgaaatgcaccacgaagctctccttgaagccgttcccggtgacaatgttggtttcaacgtaaagaacgtctccgttaaggaactccgacgtggatacgtcgctggtgatacaaagaacaacccacccaagggagcagctgactttactgctcaggtcatcgtactgaaccaccccggtcagatcagcaacggatacacgcctgtgttggattgccacacagctcacatcgcttgcaagtttgcagagattaaggagaaggttgacagacgtacgggtaaaacaactgaggagaatcctaaggcgatcaaatctggagatgctgctatcgtcaacctggttcccagcaagccaatgtgcgttgaggctttccaggaattcccacctcttggacgtttcgcagttcgtgacatgcgtcaaacagttgctgttggtgtcatcaaggctgtcaacttcaaggatgcctctggcaaggttaccaaggccgccgagaaggcacagaagaagaaataa

SEQ ID NO: 2896 - protein, 461 aa, Athalia rosae
MGKEKVHINIVVIGHVDSGKSTTTGHLIYKCGGIDKRTIEKFEKEAQEMGKGSFKYAWVLDKLKAERERGITIDIALWKFETAKYYVTIIDAPGHRDFIKNMITGTSQADCAVLIVAAGTGEFEAGISKSGQTREHALLAFTLGVKQLIVGVNKMDSTEPPFSESRFEEIKKEVSSYIKKIGYNPAAVAFVPISGWHGDNMLEPSSKMPWFKGWAVERKEGKADGKCLIEALDAILPPSRPTDKALRLPLQDVYKIGGIGTVPVGRVETGVLKPGTVVTFAPAGLTTEVKSVEMHHEALLEAVPGDNVGFNVKNVSVKELRRGYVAGDTKNNPPKGAADFTAQVIVLNHPGQISNGYTPVLDCHTAHIACKFAEIKEKVDRRTGKTTEENPKAIKSGDAAIVNLVPSKPMCVEAFQEFPPLGRFAVRDMRQTVAVGVIKAVNFKDASGKVTKAAEKAQKKK

SEQ ID NO: 2897 - DNA, 1347 bp, Solanum tuberosum
  CDS (1)..(1347)
atgggtaaagagaagattcatatcagcattgttgtcattgggcatgtcgactctggaaagtcgaccactactggtcacttgatctacaagcttggtggcattgacaagcgtgtcatcgagaggtttgagaaagaagcagctgagatgaacaagaggtccttcaagtatgcgtgggtgcttgacaagcttaaggctgagcgtgaacgtggtattactattgatattgccttgtggaagtttgagaccacaaagtactactgcactgtgattgatgcccctggacacagggatttcatcaagaatatgattactggtacctctcaggctgactgtgctgtcctcatcattgactccacaactggtggttttgaagctggtatttccaaggatggacagacccgtgagcacgcattgcttgctttcacccttggtgtcaagcaaatgatttgctgctgtaacaagatggatgctaccactcctaagtactccaaggctaggtatgatgaaattgtgaaggaagtttcttcctacctcaagaaggtaggatacaaccctgacaaaatcccctttgtccccatctctggttttgaaggagacaacatgattgagcgatcaaccaaccttgactggtacaagggcccaaccctacttgatgctcttgaccagattaacgagcccaagaggccctcagacaagcccctccgtcttccacttcaggatgtctacaagattggtggtattggaactgtgcccgtcggtcgtgttgaaactggtgtcattaagcctggtatggtcgtcacttttggtccaactggtctgaccactgaggttaaatctgttgagatgcaccaccacgaggctcttcaggaggcacttcctggtgacaatgttgggttcaacgtcaagaacgttgcagttaaggatcttaagagaggtttcgttgcctccaactccaaagatgacccagcaaagggtgctgcaagcttcactgcccaagttatcatcatgaaccaccctggtcagattggaaacggatatgccccagtgctcgactgccacacctcccacattgctgtcaagttcgctgagatcttgaccaagattgacagacgttctggtaaggaacttgagaaggagcccaagtttttgaagaacggtgatgccggtatggttaagatgattcccaccaagcccatggttgttgagacctttgctgagtacccaccattgggacgttttgctgtgagggacatgcgtcaaactgttgctgttggtgttgtcaagaacgtcgacaagaaagaccctactggtgccaaagtcaccaaggctgcccaaaagaagaagtga

SEQ ID NO: 2898 - protein, 448 aa, Solanum tuberosum
MGKEKIHISIVVIGHVDSGKSTTTGHLIYKLGGIDKRVIERFEKEAAEMNKRSFKYAWVLDKLKAERERGITIDIALWKFETTKYYCTVIDAPGHRDFIKNMITGTSQADCAVLIIDSTTGGFEAGISKDGQTREHALLAFTLGVKQMICCCNKMDATTPKYSKARYDEIVKEVSSYLKKVGYNPDKIPFVPISGFEGDNMIERSTNLDWYKGPTLLDALDQINEPKRPSDKPLRLPLQDVYKIGGIGTVPVGRVETGVIKPGMVVTFGPTGLTTEVKSVEMHHHEALQEALPGDNVGFNVKNVAVKDLKRGFVASNSKDDPAKGAASFTAQVIIMNHPGQIGNGYAPVLDCHTSHIAVKFAEILTKIDRRSGKELEKEPKFLKNGDAGMVKMIPTKPMVVETFAEYPPLGRFAVRDMRQTVAVGVVKNVDKKDPTGAKVTKAAQKKK

SEQ ID NO: 2899 - DNA, 1281 bp, Aspergillus oryzae
  CDS (1)..(1281)
atgtctagcatctccagaaccgccaacctcctcttccgcgctagcagggcctccctgctgcgccctcgcgctgtcaaccctgtgcagcatgttttgggtaaagacagactggctgcccgtggtaccattggtcacgtcgatcacggcaagaccaccttgactgccgctatcaccaagcaccaggcttccaagggcctcgctcagttcctcgagtatggtgctattgataaggcccctgaggagcgtaagcgtggtatcaccatctcgactgctcacattgagttctccaccgaggacaggcactatgcccacgtcgactgccccggtcacgccgattacatcaagaacatgatcactggtgctgctaacatggacggtgctattgttgtcgttgctgcttcggatggtcagatgccccagacccgggagcacttgctgcttgcccgtcaggtcggtgtccagaagatcgtcgttttcgtcaacaagattgatgccgttgaggaccctgagatgttggagcttgtcgagttggaaatgcgcgagctccttagcagctacggcttcgagggcgaagagactcccatcatcttcggttctgctctgtgtgctttggaggaccgtcgccccgacattggtgccgagcgtatcgacgagctcatgaaggctgttgacacctggatccctacccctcagcgtgatcttgacaagcctttcctcatgtctgtcgaggaagtcttctccatcgccggtcgtggtaccgttgcctccggccgtgtcgaacgtggtatcctgaagaaggacagcgaagtcgagatcatcggaggtagcttcgatgctaccaagaccaaggtcaccgacattgagacctttaagaagtcttgtgacgagtctcgcgctggtgacaactctggcttgcttctccgtggtatccgtcgtgaagacgtccgccgcggaatgatcattgctgctcctggcagcaccaaggcccacgaccagttcttggtgtccatgtacgttctcactgaggctgagggtggtcgtcgtactggcttcggctccaactaccgcccccaggtgttcgttcgcactgctgatgaggctgctgacctcagcttccccgacggtgatgagtcccggagggtgatgcctggtgacaacgtcgagatggtcctcaagactcaccgccccattgctgctgaggctggccagcgcttcaacatccgtgagggtggccgtactgttgccactggtctcgttacccgtgtcatggacggaaaataa

SEQ ID NO: 2900 - protein, 426 aa, Aspergillus oryzae
MSSISRTANLLFRASRASLLRPRAVNPVQHVLGKDRLAARGTIGHVDHGKTTLTAAITKHQASKGLAQFLEYGAIDKAPEERKRGITISTAHIEFSTEDRHYAHVDCPGHADYIKNMITGAANMDGAIVVVAASDGQMPQTREHLLLARQVGVQKIVVFVNKIDAVEDPEMLELVELEMRELLSSYGFEGEETPIIFGSALCALEDRRPDIGAERIDELMKAVDTWIPTPQRDLDKPFLMSVEEVFSIAGRGTVASGRVERGILKKDSEVEIIGGSFDATKTKVTDIETFKKSCDESRAGDNSGLLLRGIRREDVRRGMIIAAPGSTKAHDQFLVSMYVLTEAEGGRRTGFGSNYRPQVFVRTADEAADLSFPDGDESRRVMPGDNVEMVLKTHRPIAAEAGQRFNIREGGRTVATGLVTRVMDGK

SEQ ID NO: 2901 - DNA, 1344 bp, Solanum tuberosum
  CDS (1)..(1344)
atgggtaaagagaagattcatatcagcattgttgtcattggacatgtcgactctggaaagtcgaccactactggtcacttgatctacaagcttggtggtattgacaagcgtgtcatcgagaggtttgagaaggaagcggctgagatgaacaagaggtccttcaagtatgcgtgggtgcttgacaagcttaaggctgagcgtgaacgtggtattactattgatattgccttgtggaagtttgagaccacaaagtactactgcactgtgattgatgcccctggacacagggatttcatcaagaacatgattactggtacctctcaggctgactgtgctgtcctcatcattgactccacaactggtggttttgaagctggtatttcgaaggatgggcagacccgtgagcatgcattgcttgctttcacccttggtgtcaagcaaatgatttgctgctgtaacaagatggatgctaccactcctaagtactccaaggctaggtatgatgaaatcgtgaaggaagtttcttcctacctcaagaaggtaggatacaaccctgacaaaatcccctttgtccccatctctggttttgaaggagacaatatgattgagcgatcaaccaaccttgactggtacaagggcccaaccctacttgatgctcttgaccagattaacgagcccaagaggccctcagacaagcccctccgtcttccacttcaggatgtctacaagattggtggtattggaactgtgcccgtcggtcgtgttgaaactggtgtcattaagcctggtatggttgtcacttttggtccaactggtctgaccactgaagttaaatctgttgagatgcaccacgaggctcttctggaggcacttcctggtgacaatgttgggttcaacgtcaagaacgttgcagttaaggatcttaagagaggtttcgttgcctctaactccaaagatgacccagcaaagggtgctgccagcttcactgcccaagttatcatcatgaaccaccctggtcagattggaaacggatatgccccagtgctggactgccacacctcccacatcgctgtcaagtttgctgagatcttgaccaagattgacagacgttctggtaaggaacttgagaaggagcccaagtttttgaagaatggtgatgccggtatggttaagatgattcccaccaagcccatggttgttgagacctttgccgagtacccaccattgggacgttttgctgtgagggacatgcgtcaaactgttgctgttggtgtggtcaagaacgtcgacaagaaagaccctactggtgccaaagtcaccaaggctgcccaaaagaagaagtga

SEQ ID NO: 2902 - protein, 447 aa, Solanum tuberosum
MGKEKIHISIVVIGHVDSGKSTTTGHLIYKLGGIDKRVIERFEKEAAEMNKRSFKYAWVLDKLKAERERGITIDIALWKFETTKYYCTVIDAPGHRDFIKNMITGTSQADCAVLIIDSTTGGFEAGISKDGQTREHALLAFTLGVKQMICCCNKMDATTPKYSKARYDEIVKEVSSYLKKVGYNPDKIPFVPISGFEGDNMIERSTNLDWYKGPTLLDALDQINEPKRPSDKPLRLPLQDVYKIGGIGTVPVGRVETGVIKPGMVVTFGPTGLTTEVKSVEMHHEALLEALPGDNVGFNVKNVAVKDLKRGFVASNSKDDPAKGAASFTAQVIIMNHPGQIGNGYAPVLDCHTSHIAVKFAEILTKIDRRSGKELEKEPKFLKNGDAGMVKMIPTKPMVVETFAEYPPLGRFAVRDMRQTVAVGVVKNVDKKDPTGAKVTKAAQKKK

SEQ ID NO: 2903 - DNA, 1347 bp, Solanum tuberosum
  CDS (1)..(1347)
atgggtaaagagaagattcacatcagtattgtggtcattggtcatgtcgactctggtaagtcgaccacaactggtcacttgatctacaagcttggtggtattgacaagcgtgttattgagaggtttgagaaggaagctgctgagatgaacaagaggtcattcaagtatgcctgggtgcttgacaaacttaaggctgaacgtgagcgtggtatcactattgatattgccttgtggaagtttgagaccactaagtactactgcactgtgattgatgcccccggacacagggactttatcaagaacatgatcactggtacctcccaggccgactgtgctgtcctcattattgactccaccactggtggttttgaagctggtatctctaaagatggtcagacccgtgaacatgcattgcttgctttcacccttggtgtcaagcaaatgatttgctgctgcaacaagatggatgctaccacccccaagtactccaaggctaggtacgatgaaattgtaaaggaagtttcttcgtacctcaagaaggttggttacaaccctgacaaaatcccatttgtccccatctctggttttgaaggagataatatgattgagaggtctaccaacctcgactggtacaagggaccaaccctccttgatgctctcgaccagattaatgagcccaagaggccatcagacaagccactccgtctcccacttcaggatgtttacaagattggtggtattggaactgtcccagttggtcgtgtagagactggtgtgatcaagcctggtatggttgtgacctttggccctactggtttgccaactgaagtcaagtctgttgagatgcaccacgaagctcttcaggaggcgctccctggtgataatgttgggttcaatgttaagaatgttgctgttaaggatctgaagcgtggttttgttgcctcaaactccaaggatgacccagctaagggtgcagccagtttcactgcccaggtcatcatcatgaaccatcctggccagattggaaatggatatgcaccagtgctcgactgcacactttcccacattgctgtcaagtttgctgagatcttgaccaagattgacaggcgttcaggtaaggaacttgagaaggaagctaagttcttgaagaatggtgatgctggtatggttaagatgattcccactaagcccatggttgttgagacctttgccgaatacccaccattgggtcgtttcgctgttcgagacatgaggcaaactgttgctgttggtgttgtcaagaatgttgacaagaaggacccaactggtgccaaggtcaccaaggctgcccagaagaagggaaagtga

SEQ ID NO: 2904 - protein, 448 aa, Solanum tuberosum
MGKEKIHISIVVIGHVDSGKSTTTGHLIYKLGGIDKRVIERFEKEAAEMNKRSFKYAWVLDKLKAERERGITIDIALWKFETTKYYCTVIDAPGHRDFIKNMITGTSQADCAVLIIDSTTGGFEAGISKDGQTREHALLAFTLGVKQMICCCNKMDATTPKYSKARYDEIVKEVSSYLKKVGYNPDKIPFVPISGFEGDNMIERSTNLDWYKGPTLLDALDQINEPKRPSDKPLRLPLQDVYKIGGIGTVPVGRVETGVIKPGMVVTFGPTGLPTEVKSVEMHHEALQEALPGDNVGFNVKNVAVKDLKRGFVASNSKDDPAKGAASFTAQVIIMNHPGQIGNGYAPVLDCTLSHIAVKFAEILTKIDRRSGKELEKEAKFLKNGDAGMVKMIPTKPMVVETFAEYPPLGRFAVRDMRQTVAVGVVKNVDKKDPTGAKVTKAAQKKGK

SEQ ID NO: 2905 - DNA, 1350 bp, Arabidopsis thaliana
  CDS (1)..(1350)
atgggtaaagagaagtttcacattaacattgtggtcattggtcatgttgattctggaaaatcgaccacaactggtcacttgatctataagcttggtggtattgacaagcgtgtcatcgagaggttcgagaaggaggctgctgagatgaacaagaggtccttcaagtacgcatgggtgttggacaaacttaaggccgagcgtgaccgtggtattaccatcgatattgctctatggaagttcgagaccaccaagtactactgcacagtcattgatgccccaggacatcgtgatttcatcaagaacatgattactggtacctcccaggctgattgtgctgttcttatcattgactccaccactggaggttttgaggctggtatctctaaggatggtcagacccgtgagcacgctcttcttgctttcacccttggtgtcaagcagatgatttgctgttgtaacaagatggatgccaccacccccaaatactccaaggctaggtacgatgaaatcatcaaggaggtgtcttcatacctgaagaaggtcggatacaaccctgacaaaatcccatttgtgccaatctctggattcgagggagacaacatgattgagaggtcaaccaaccttgactggtacaagggaccaactcttcttgaggctcttgaccagatcaacgagcccaagaggccatcagacaagccccttcgtcttccacttcaggatgtctacaagattggtggtattggaacggtgccagtgggacgtgttgagactggtatgatcaagcctggtatggttgttacctttgctcccacagggttgaccactgaggttaagtctgttgagatgcaccacgagtctcttcttgaggcacttcccggtgacaatgttggattcaatgtcaagaatgttgctgtcaaggatcttaagagaggatacgttgcctctaactccaaggatgatccagctaagggtgccgccaacttcacctcccaggtcatcatcatgaaccaccctggtcagattggtaacggttacgccccagttctcgattgccacacctctcacattgcagtaaagttctctgagatcttgaccaagattgacagacgttctggtaaggagattgagaaggagcccaagtttttgaagaatggtgacgctggtatggttaagatgaccccaaccaagcccatggttgttgagactttctccgagtacccacctttgggacgtttcgctgttagggacatgaggcagaccgttgctgttggtgttattaagagcgtggacaagaaggacccaactggagccaaggtcaccaaggctgcagtgaagaagggtgccaaatga

SEQ ID NO: 2906 - protein, 449 aa, Arabidopsis thaliana
MGKEKFHINIVVIGHVDSGKSTTTGHLIYKLGGIDKRVIERFEKEAAEMNKRSFKYAWVLDKLKAERDRGITIDIALWKFETTKYYCTVIDAPGHRDFIKNMITGTSQADCAVLIIDSTTGGFEAGISKDGQTREHALLAFTLGVKQMICCCNKMDATTPKYSKARYDEIIKEVSSYLKKVGYNPDKIPFVPISGFEGDNMIERSTNLDWYKGPTLLEALDQINEPKRPSDKPLRLPLQDVYKIGGIGTVPVGRVETGMIKPGMVVTFAPTGLTTEVKSVEMHHESLLEALPGDNVGFNVKNVAVKDLKRGYVASNSKDDPAKGAANFTSQVIIMNHPGQIGNGYAPVLDCHTSHIAVKFSEILTKIDRRSGKEIEKEPKFLKNGDAGMVKMTPTKPMVVETFSEYPPLGRFAVRDMRQTVAVGVIKSVDKKDPTGAKVTKAAVKKGAK

SEQ ID NO: 2907 - DNA, 1347 bp, Gossypium hirsutum
  CDS (1)..(1347)
atgggtaaggagaaggttcacatcaacattgttgtcattggccatgttgactctggaaagtcaaccacaacaggtcacttgatctacaagcttggaggtattgacaagcgtgtgatcgagaggttcgagaaggaagctgctgagatgaacaaaaggtcattcaagtatgcctgggtgctcgacaaattgaaggctgagcgtgagcgtggtatcaccattgatattgccttgtggaagtttgagacgaccaagtactactgcactgtcattgatgctcctggacatcgcgactttattaagaatatgattacgggtacttctcaagctgactgtgctgtccttatcattgactccacaactggaggttttgaagctggtatttccaaggatgggcagacccgtgagcatgctctccttgccttcacccttggtgtcaaacaaatgatttgctgctgcaacaagatggatgccacaacccccaagtactcaaaggcaaggtatgatgaaattgttaaggaagtttcttcttacctgaagaaggttggctacaaccctgagaagattccattcgtccccatctctggttttgagggtgacaacatgattgagaggtccaccaacctcgattggtacaagggtccaaccctccttgaggctcttgaccagatcaatgagcccaagagaccctctgacaagcccctccgtctcccacttcaggatgtctacaagattggtggtattggaactgtcccagtgggtcgtgttgaaactggaatcctcaagcctggaatggttgttacattcggaccttctggattgaccactgaagttaagtctgttgagatgcatcatgaagctcttcaagaggctcttcctggtgacaatgttgggttcaatgtgaagaatgttgctgtcaaggatctcaagcgtggatatgttgcctccaactccaaggatgatcctgccaaggaggcagccaacttcacctcccaagttatcatcatgaaccacccaggacagattggaaatggctatgcaccggtcctcgattgccacacctcccatattgctgtcaagtttgcagagctcttgaccaagattgacaggcgatctggtaaggagcttgagaaggagcctaagttcttgaagaatggtgatgctggtatgattaagatggttccgaccaagcccatgcttgtggaaactttctccgagtaccctccacttggacgttttgccgttagggacatgagacagactgttgctgttggtgtgatcaagagtgtggagaagaaggacccaactggagccaaggtgacgaagtctgctgccaagaagggcaagtga

SEQ ID NO: 2908 - protein, 448 aa, Gossypium hirsutum
MGKEKVHINIVVIGHVDSGKSTTTGHLIYKLGGIDKRVIERFEKEAAEMNKRSFKYAWVLDKLKAERERGITIDIALWKFETTKYYCTVIDAPGHRDFIKNMITGTSQADCAVLIIDSTTGGFEAGISKDGQTREHALLAFTLGVKQMICCCNKMDATTPKYSKARYDEIVKEVSSYLKKVGYNPEKIPFVPISGFEGDNMIERSTNLDWYKGPTLLEALDQINEPKRPSDKPLRLPLQDVYKIGGIGTVPVGRVETGILKPGMVVTFGPSGLTTEVKSVEMHHEALQEALPGDNVGFNVKNVAVKDLKRGYVASNSKDDPAKEAANFTSQVIIMNHPGQIGNGYAPVLDCHTSHIAVKFAELLTKIDRRSGKELEKEPKFLKNGDAGMIKMVPTKPMLVETFSEYPPLGRFAVRDMRQTVAVGVIKSVEKKDPTGAKVTKSAAKKGK

SEQ ID NO: 2909 - DNA, 1350 bp, Gossypium hirsutum
  CDS (1)..(1350)
atgggtaaggagaaggttcacatcaacattgttgtcattggccatgtcgactctgggaagtcaaccacaacgggtcacttgatctacaagcttggaggtattgacaagcgtgtgattgagaggttcgagaaggaagctgctgagatgaacaaaaggtcattcaagtatgcctgggtgcttgataagttgaaggctgagcgtgagcgtggtatcaccattgatattgccttgtggaagtttgagacaaccaagtactactgcactgtcattgatgctcctggacatcgcgacttcattaagaatatgattacgggtacttctcaagctgactgtgctgtccttatcattgactccacaactggaggttttgaagctggtatttccaaggatgggcagacccgtgagcatgctctccttgccttcactcttggtgtcaagcaaatgatttgctgctgcaacaagatggatgccacaacccccaagtactcaaaggcaaggtatgatgaaattgttaaggaagtttattcctacctgaagaaggttggttacaaccctgagaagattccattcgtccccatctctggttttgagggtgacaacatgattgagaggtccaccaacctcgattggtacaagggtccaaccctccttgaggctcttgaccagatcaatgagcccaagagaccctctgacaagcccctccgtctcccacttcaggatgtctacaagatcggtggtattggaactgtccctgtgggtcgtgttgaaaccggtacccttaagcctggaatggttgttacattcggaccttctggattgaccactgaagttaagtctgttgagatgcatcatgaagctcttcaagaggctcttcctggtgacaatgttgggttcaacgtgaagaatgttgctgtcaaggatctcaagcgtggatttgttgcctccaactccaaggatgatcctgccaaggaggcagccaacttcacctcccaagttatcatcatgaaccacccagggcagattggaaatggctatgcaccggtcctagattgccacacctcccatattgctgtcaagtttgcagagctcttgaccaagattgacaggcgatctggtaaggagcttgagaaggagcctaagttcttgaagaatggtgatgctggtatgattaagatggttccgaccaagcccatggttgtcgaaaccttctccgcgtaccctccacttggacgttttgccgttagggacatgagacagactgttgctgttggtgtgatcaagagtgtggagaagaaggacccatctggagccaaggtgaccaagtctgccgccaagaagggtggcaagtga

SEQ ID NO: 2910 - protein, 449 aa, Gossypium hirsutum
MGKEKVHINIVVIGHVDSGKSTTTGHLIYKLGGIDKRVIERFEKEAAEMNKRSFKYAWVLDKLKAERERGITIDIALWKFETTKYYCTVIDAPGHRDFIKNMITGTSQADCAVLIIDSTTGGFEAGISKDGQTREHALLAFTLGVKQMICCCNKMDATTPKYSKARYDEIVKEVYSYLKKVGYNPEKIPFVPISGFEGDNMIERSTNLDWYKGPTLLEALDQINEPKRPSDKPLRLPLQDVYKIGGIGTVPVGRVETGTLKPGMVVTFGPSGLTTEVKSVEMHHEALQEALPGDNVGFNVKNVAVKDLKRGFVASNSKDDPAKEAANFTSQVIIMNHPGQIGNGYAPVLDCHTSHIAVKFAELLTKIDRRSGKELEKEPKFLKNGDAGMIKMVPTKPMVVETFSAYPPLGRFAVRDMRQTVAVGVIKSVEKKDPSGAKVTKSAAKKGGK

SEQ ID NO: 2911 - DNA, 1347 bp, Gossypium hirsutum
  CDS (1)..(1347)
atgggtaaggagaaggttcacatcaacattgttgtcattggccatgttgactctgggaagtcaaccacaacgggtcacttgatctacaagcttggaggtattgacaagcgtgtgattgagaggtttgagaaggaagctgctgagatgaacaaaaggtcattcaagtatgcctgggtgctcgacaagttgaaggctgagcgtgagcgtggtatcaccattgatattgccttgtggaagtttgagacaaccaagtactactgcactgtcattgatgctcctggacatcgtgacttcattaagaatatgattacgggtacttctcaagctgactgtgctgtccttatcattgactccacaactggaggttttgaagctggtatttccaaggatgggcagacccgtgagcatgctctccttgccttcactcttggtgtcaagcaaatgatttgctgctgcaacaagatggatgccacaacccccaagtactcaaaggcaaggtatgatgaaattgttaaggaagtttcttcctacctgaagaaggttggttacaaccctgagaagattccattcgtccccatatctggttttgagggtgacaacatgattgagaggtccaccaacctcgattggtacaagggtccaaccctccttgaggctcttgaccagatcaatgagcccaagagaccctctgacaagcccctccgtctcccacttcaggatgtctacaagatcgggggtattggaactgtcccggtgggtcgtgttgaaaccggtacccttaagcctggaatggttgttacattcggaccttctggattgaccactgaagttaagtctgttgagatgcatcatgaagctcttcaagaagctcttcctggtgacaatgttgggttcaatgtgaaaaatgttgctgtcaaggatctcaagcgtggatttgttgcctccaactccaaggatgatcctgccaaggaggctgccaacttcacctcccaaggtatcatcatgaaccacccaggccagattggaaatggctatgcaccggtcctcgattgccacacctcccacattgctgtcaagtttgcagagctcttgaccaagattgacaggcgatctggtaaggagcttgagaaggagcctaagttcttgaagaatggtgatgctggtatgattaagatggttccgaccaagcccatggttgtggaaaccttctccgagtaccctccacttggacgttttgccgttagggacatgagacagactgttgctgttggtgtaatcaagagtgtggagaagaaggacccaactggagccaaggtgaccaagtctgctgccaagaagggcaagtga

SEQ ID NO: 2912 - protein, 448 aa, Gossypium hirsutum
MGKEKVHINIVVIGHVDSGKSTTTGHLIYKLGGIDKRVIERFEKEAAEMNKRSFKYAWVLDKLKAERERGITIDIALWKFETTKYYCTVIDAPGHRDFIKNMITGTSQADCAVLIIDSTTGGFEAGISKDGQTREHALLAFTLGVKQMICCCNKMDATTPKYSKARYDEIVKEVSSYLKKVGYNPEKIPFVPISGFEGDNMIERSTNLDWYKGPTLLEALDQINEPKRPSDKPLRLPLQDVYKIGGIGTVPVGRVETGTLKPGMVVTFGPSGLTTEVKSVEMHHEALQEALPGDNVGFNVKNVAVKDLKRGFVASNSKDDPAKEAANFTSQGIIMNHPGQIGNGYAPVLDCHTSHIAVKFAELLTKIDRRSGKELEKEPKFLKNGDAGMIKMVPTKPMVVETFSEYPPLGRFAVRDMRQTVAVGVIKSVEKKDPTGAKVTKSAAKKGK

SEQ ID NO: 2913 - DNA, 1344 bp, Gossypium hirsutum
  CDS (1)..(1344)
atgggtaaggagaaggttcacatcaaccttgttgtcattggccatgtcgactctggcaagtcgaccactaccggtcatttgatctacaagcttggtggtattgacaagcgtgtgattgagaggttcgagaaggaggctgctgaaatgaacaaaaggtcattcaagtatgcttgggtgcttgacaagcttaaggctgagcgtgaacgtggtatcaccattgatattgccctgtggaagtttgagaccaccaaatactattgcaccgttattgatgcacctggacaccgtgactttatcaagaacatgattaccggtacctcacaggctgactgtgctgttctcattattgactcgaccactggtggttttgaagctggtatctctaaagatggtcagactcgtgagcatgctttgcttgcttttaccctcggtgttaggcagatgatttgctgctgcaacaagatggatgcaacaaccccaaagtactcaaaggcaaggtttgatgaaattgtcaaggaagtctcttcttatcttaagaaagttggttacaaccctgagaagatcccatttgtcccaatctctggttttgagggtgacaacatgatcgagagatctacaaacctcgattggtacaagggtcctactctccttgaggctcttgaccagatcaccgagcccaagaggccctcggataagccactccgtcttccacttcaggatgtctacaagattggtggtattggaactgtccctgttggtcgtgttgaaactggtgtcctcaaacccggtatggttgttacttttggtcctactggtctgaccactgaagttaagtctgttgagatgcaccatgaatccctcccggaagctttccctggtgacaatgttgggttcaacgttaaaaacgttgctgttaaggatcttaaacgtggttttgttgcttcaaactccaaggatgatccggccaaggaagctgccaacttcacctctcaggttatcatcatgaaccaccctggccaaattggaaatggttatgccccagtcctcgactgccacacctctcacattgctgtcaaattttccgaactgttgaccaagattgacagacgatctggcaaggaactcgagaaggaacccaagttcttgaagaacggtgatgcaggtatggtaaagatgattcccaccaaacccatggttgttgagactttctctgaatacccaccacttggacgttttgctgtccgtgacatgcgccagactgttgccgtcggtgtcatcaagagtgttgagaagaaggacccaactggtgctaaggtcaccaaatctgctgccaagaagaaatga

SEQ ID NO: 2914 - protein, 447 aa, Gossypium hirsutum
MGKEKVHINLVVIGHVDSGKSTTTGHLIYKLGGIDKRVIERFEKEAAEMNKRSFKYAWVLDKLKAERERGITIDIALWKFETTKYYCTVIDAPGHRDFIKNMITGTSQADCAVLIIDSTTGGFEAGISKDGQTREHALLAFTLGVRQMICCCNKMDATTPKYSKARFDEIVKEVSSYLKKVGYNPEKIPFVPISGFEGDNMIERSTNLDWYKGPTLLEALDQITEPKRPSDKPLRLPLQDVYKIGGIGTVPVGRVETGVLKPGMVVTFGPTGLTTEVKSVEMHHESLPEAFPGDNVGFNVKNVAVKDLKRGFVASNSKDDPAKEAANFTSQVIIMNHPGQIGNGYAPVLDCHTSHIAVKFSELLTKIDRRSGKELEKEPKFLKNGDAGMVKMIPTKPMVVETFSEYPPLGRFAVRDMRQTVAVGVIKSVEKKDPTGAKVTKSAAKKK

SEQ ID NO: 2915 - DNA, 1347 bp, Gossypium hirsutum
  CDS (1)..(1347)
atgggtaaggagaaggttcacatcaacattgttgtcattggccatgttgactctggaaagtcaaccacaacgggtcacttgatatacaagcttggaggtattgacaagcgtgtgatcgagaggttcgagaaggaagctgctgagatgaacaaaaggtcattcaagtatgcctgggtgctcgacaagttgaaggctgagcgtgagcgtggtatcaccattgatattgccttgtggaagtttgagacaaccaagtactactgcactgtcattgatgctcctggacatcgcgactttattaagaatatgattacgggtacttctcaagctgactgtgctgtccttatcattgactccacaactggaggttttgaagctggtatttccaaggatgggcagacccgtgagcatgctctccttgccttcacccttggtgtcaagcaaatgatttgctgctgcaacaagatggatgccacaacccccaagtactcaaaggcaaggtatgatgaaattgttaaggaagtttcttcttacctgaagaaggttggttacaaccctgagaagattccattcgtccccatctctggttttgagggtgacaacatgattgagaggtccaccaacctcgattggtacaagggtccaaccctccttgaggctcttgaccagatcaatgagcccaagagaccctctgacaagcccctccgtctcccacttcaggatgtctacaagattggtggtattggaactgtcccagtgggtcgtgttgaaactggaatcctcaagcctggaatggttgttacattcggaccttctggattgaccactgaagttaagtctgttgagatgcatcatgaagctcttcaagaggctcttcctggtgacaatgttgggttcaatgtgaagaatgttgctgtcaaggatctcaagcgtggatttgttgcctccaactccaaggatgatcctgccaaggaggcagccaacttcacctcccaagttatcatcatgaaccacccaggacagattggaaatggctatgcaccggtcctcgattgccacacctcccatattgctgtcaagtttgcagagctcttgaccaagattgacaggcgatctggtaaggagcttgagaaggagcctaagttcttgaagaatggtgatgctggtatgattaagatggttccgaccaagcccatggttgtggaaactttctccgagtaccctccacttggacgttttgccgttagggacatgagacagactgttgctgttggtgtgatcaagagtgtggagaagaaggacccaactggagccaaggtgacgaagtctgctgccaagaagggcaagtga

SEQ ID NO: 2916 - protein, 448 aa, Gossypium hirsutum
MGKEKVHINIVVIGHVDSGKSTTTGHLIYKLGGIDKRVIERFEKEAAEMNKRSFKYAWVLDKLKAERERGITIDIALWKFETTKYYCTVIDAPGHRDFIKNMITGTSQADCAVLIIDSTTGGFEAGISKDGQTREHALLAFTLGVKQMICCCNKMDATTPKYSKARYDEIVKEVSSYLKKVGYNPEKIPFVPISGFEGDNMIERSTNLDWYKGPTLLEALDQINEPKRPSDKPLRLPLQDVYKIGGIGTVPVGRVETGILKPGMVVTFGPSGLTTEVKSVEMHHEALQEALPGDNVGFNVKNVAVKDLKRGFVASNSKDDPAKEAANFTSQVIIMNHPGQIGNGYAPVLDCHTSHIAVKFAELLTKIDRRSGKELEKEPKFLKNGDAGMIKMVPTKPMVVETFSEYPPLGRFAVRDMRQTVAVGVIKSVEKKDPTGAKVTKSAAKKGK

SEQ ID NO: 2917 - DNA, 1344 bp, Gossypium hirsutum
  CDS (1)..(1344)
atgggtaaggagaaggttcacatcaacattgtggtcatcggccatgtcgactctgggaagtctacaaccactggtcatttgatctacaagcttggtggtattgacaagcgtgtgattgagaggtttgagaaggaggctgctgagatgaacaaaaggtcatttaagtatgcatgggtgcttgacaagcttaaggccgaacgtgaacgtggtattaccatcgatattgccctctggaagtttgaaactaccaaatactactgcactgtcattgatgcccctggacaccgtgacttcatcaagaacatgattactggtacctcacaggctgactgtgctgttctcattatcgactcgaccactggtggtttcgaagctggtatctcaaaggatggtcagacacgtgagcatgctttgcttgcgtttacccttggtgtcaagcagatgatttgctgctgcaacaagatggatgcaacaactccaaaatactccaaggcaaggtatgatgaaattgtgaaggaagtctcctcatatcttaagaaagttggttacaaccctgacaagatcccatttgtcccaatctctggatttgagggtgataacatgattgagaggtctaccaaccttgactggtacaagggtcccactctccttgaggctcttgaccagatcaatgagcccaagaggccttcagacaagccacttcggctcccacttcaggatgtctacaagattggtggcattggaactgtccctgttggtcgtgttgagactggtgtccttaagcctggaatggttgtgacctttggcccctctggtctgaccactgaagttaagtctgttgagatgcaccatgaagccctctctgaggctctccccggtgacaatgttggattcaacgtcaagaacgttgctgttaaggatctcaagcgtggtttcgttgcttcaaactctaaggatgatcctgcaaaggaggctgccagcttcacctctcaggtcatcatcatgaaccaccctgggcagattggaaacggatatgccccagtccttgactgccatacctcccacattgctgtgaagttttctgaattgctgaccaagatcgacaggcgatctggaaaggagcttgagaaggagcccaagttcttgaagaatggtgatgcagggatgataaagatggttcccaccaagcctatggttgtggagactttctctgagtacccaccccttggacggtttgctgtcagggacatgcgtcagactgtggctgttggtgtcatcaagagcgttgagaagaaggatccaaccggtgctaaggtcaccaaatctgctgccaagaagaaatga

SEQ ID NO: 2918 - protein, 447 aa, Gossypium hirsutum
MGKEKVHINIVVIGHVDSGKSTTTGHLIYKLGGIDKRVIERFEKEAAEMNKRSFKYAWVLDKLKAERERGITIDIALWKFETTKYYCTVIDAPGHRDFIKNMITGTSQADCAVLIIDSTTGGFEAGISKDGQTREHALLAFTLGVKQMICCCNKMDATTPKYSKARYDEIVKEVSSYLKKVGYNPDKIPFVPISGFEGDNMIERSTNLDWYKGPTLLEALDQINEPKRPSDKPLRLPLQDVYKIGGIGTVPVGRVETGVLKPGMVVTFGPSGLTTEVKSVEMHHEALSEALPGDNVGFNVKNVAVKDLKRGFVASNSKDDPAKEAASFTSQVIIMNHPGQIGNGYAPVLDCHTSHIAVKFSELLTKIDRRSGKELEKEPKFLKNGDAGMIKMVPTKPMVVETFSEYPPLGRFAVRDMRQTVAVGVIKSVEKKDPTGAKVTKSAAKKK

SEQ ID NO: 2919 - DNA, 1347 bp, Gossypium hirsutum
  CDS (1)..(1347)
atgggtaaggagaaggttcacatcaacattgttgtcattggccatgttgactctgggaagtcaaccacaacgggtcacttgatctacaagcttggaggtattgacaagcgtgtgatcgagagattcgagaaggaagctgctgagatgaacaaaaggtcattcaagtatgcctgggtgctcgacaagttgaaggctgagcgtgagcgcggtataaccattgatattgccttgtggaagtttgagacaaccaagtactactgcactgtcattgatgctcctggacatcgcgacttcattaagaatatgattacgggtacttctcaagctgactgtgctgtccttatcattgactccacaactggaggttttgaagctggtatttccaaggatgggcagacccgtgagcatgctctccttgccttcactcttggtgtcaagcaaatgatttgctgctgcaacaagatggatgccacaacccccaagtactcaaaggcaaggtatgatgaaattgttaaggaagtttcttcctacctgaagaaggttggttacaaccctgagaagattccattcgtccccatctctggttttgagggtgacaacatgattgagaggtccaccaacctcgattggtacaagggtccaaccctccttgaggctcttgaccagatcaatgagcccaagagaccctccgacaagcccctccgtctcccacttcaggatgtctacaagatcggtggtattggaactgtcccggtgggtcgtgttgaaactggtacccttaagcctggaatggttgttacattcggaccttctggattgaccactgaagttaagtctgttgagatgcatcatgaagctcttcaagaggctcttcctggtgacaatgttgggttcaacgtgaagaatgttgctgtcaaggatctcaagcgtggatttgttgcctccaactccaaggatgatcctgccaaggaggcagccaacttcacctcccaagttatcatcatgaaccacccagggcagattggaaatggctatgcaccggtcctagattgccacacctcccatattgctgtcaagtttgcagagctcttgaccaagattgacaggcgatctggtaaggagcttgagaaggagcctaagttcttgaagaatggtgatgctggtatgattaagatggttccgaccaagcccatggttgtagaaaccttctccgcgtaccctccacttggacgttttgccgttagggacatgagacagactgttgctgttggtgtgatcaagagtgtggagaagaaggacccaactggagccaaggtgaccaagtctgctgccaagaagggcaagtga

SEQ ID NO: 2920 - protein, 448 aa, Gossypium hirsutum
MGKEKVHINIVVIGHVDSGKSTTTGHLIYKLGGIDKRVIERFEKEAAEMNKRSFKYAWVLDKLKAERERGITIDIALWKFETTKYYCTVIDAPGHRDFIKNMITGTSQADCAVLIIDSTTGGFEAGISKDGQTREHALLAFTLGVKQMICCCNKMDATTPKYSKARYDEIVKEVSSYLKKVGYNPEKIPFVPISGFEGDNMIERSTNLDWYKGPTLLEALDQINEPKRPSDKPLRLPLQDVYKIGGIGTVPVGRVETGTLKPGMVVTFGPSGLTTEVKSVEMHHEALQEALPGDNVGFNVKNVAVKDLKRGFVASNSKDDPAKEAANFTSQVIIMNHPGQIGNGYAPVLDCHTSHIAVKFAELLTKIDRRSGKELEKEPKFLKNGDAGMIKMVPTKPMVVETFSAYPPLGRFAVRDMRQTVAVGVIKSVEKKDPTGAKVTKSAAKKGK

SEQ ID NO: 2921 - DNA, 1344 bp, Gossypium hirsutum
  CDS (1)..(1344)
atgggtaaggaaaagactcacattaacattgtggtcatcggccacgtcgattctgggaaatcaaccaccactggccacctgatttacaagcttggtggtattgacaagcgtgtgattgaaaggttcgagaaagaagctgctgagatgaacaagaggtcattcaagtatgcttgggtgcttgacaagctcaaggctgagcgtgagcgtggtatcaccattgatattgccttgtggaaatttgagaccaccaaatactactgcactgtgattgatgcacctggacaccgtgactttatcaagaatatgattactggtacgtcacaggctgactgtgctgttttgattattgattccaccactggtggttttgaggctggtatctcaaaggatggtcagactcgtgagcacgcattgcttgcttttacccttggtgtcaagcaaatgatttgctgttgcaacaagatggatgccactacccctaaatactcgaaggctaggtatgatgaaattgtgaaggaagtctcttcctacttgaagaaggtgggatacaaccctgacaagattccatttgttcccatttctggttttgagggtgacaacatgattgagaggtctaccaacttggactggtacaagggccctactcttcttgaggctcttgaccagatcaacgagcccaagaggccttcagacaagcctctccgtctcccacttcaggatgtgtacaagattggtggtattggaactgttccagtcggccgtgttgaaaccggtgtcttgaagcctggtatggttgtgacctttggcccgtctggtctgacaactgaagttaagtcagttgagatgcaccatgaagctcttacagaagcacttcccggtgataatgttgggttcaatgttaaaaacgttgctgttaaggatctcaagcgtggttttgttgcatccaactccaaggatgaccctgctaaggaggctgccaacttcacttctcaggtcatcattatgaaccaccctggacaaattggaaatggatatgccccagtccttgactgccacacgtcacacattgctgttaagtttgctgagcttttgaccaagattgacaggcgatctggtaaggagcttgagaaggaacccaagttcttgaagaacggtgatgctggtatgattaagatgattcctaccaagcccatggttgtggagaccttctctgagtacccacccctgggtcgttttgctgtgagggacatgcgtcagaccgtggctgttggtgttatcaagagtgtcgagaagaaggacccaaccggtgccaaggtcaccaagtctgctgctaagaagaagtga

SEQ ID NO: 2922 - protein, 447 aa, Gossypium hirsutum
MGKEKTHINIVVIGHVDSGKSTTTGHLIYKLGGIDKRVIERFEKEAAEMNKRSFKYAWVLDKLKAERERGITIDIALWKFETTKYYCTVIDAPGHRDFIKNMITGTSQADCAVLIIDSTTGGFEAGISKDGQTREHALLAFTLGVKQMICCCNKMDATTPKYSKARYDEIVKEVSSYLKKVGYNPDKIPFVPISGFEGDNMIERSTNLDWYKGPTLLEALDQINEPKRPSDKPLRLPLQDVYKIGGIGTVPVGRVETGVLKPGMVVTFGPSGLTTEVKSVEMHHEALTEALPGDNVGFNVKNVAVKDLKRGFVASNSKDDPAKEAANFTSQVIIMNHPGQIGNGYAPVLDCHTSHIAVKFAELLTKIDRRSGKELEKEPKFLKNGDAGMIKMIPTKPMVVETFSEYPPLGRFAVRDMRQTVAVGVIKSVEKKDPTGAKVTKSAAKKK

SEQ ID NO: 2923 - DNA, 1344 bp, Gossypium hirsutum
  CDS (1)..(1344)
atgggtaaggagaaggttcacatcaacattgtggtcatcggccatgtcgactctgggaagtctacaaccactggtcatttgatctacaagcttggtggtattgacaagcgtgtgattgagaggtttgagaaggaggctgctgagatgaacaaaaggtcatttaagtatgcatgggtgcttgacaagcttaaggccgaacgtgaacgtggtattaccatcgatattgccctctggaagtttgaaactaccaaatactactgcactgtcattgatgcccctggacaccgtgacttcatcaagaacatgattactggtacctcacaggctgactgtgctgttctcattatcgactcgaccactggtggtttcgaagctggtatctcaaaggatggtcagacacgtgagcatgctttgcttgcgtttacccttggtgtcaagcagatgatttgctgctgcaacaagatggatgcaacaactccaaaatactccaaggcaaggtatgatgaaattgtgaaggaagtctcctcatatcttaagaaagttggttacaaccctgacaagatcccatttgtcccaatctctggatttgagggtgataacatgattgagaggtctaccaaccttgactggcacaagggtcccactctccttgaggctcttgaccagatcaatgagcccaagaggccttcagacaagccacttcggctcccacttcaggatgtctacaagattggtggcattggaactgtccctgttggtcgtgttgagactggtgtccttaagcctggaatggttgtgacctttggcccctctggtctgaccactgaagttaagtctgttgagatgcaccatgaagccctctctgaggctctccccggtgacaatgttggattcaacgtcaagaacgttgctgttaaggatctcaagcgtggtttcgttgcttcaaactctaaggatgatcctgcaaaggaggctgccagcttcacctctcaggtcatcatcatgaaccaccctgggcagattggaaacggatatgccccagtccttgactgccatacctcccacattgctgtgaagttttctgaattgctgaccaagatcgacaggcgatctggaaaggagcttgagaaggagcccaagttcttgaagaatggtgatgcagggatgataaagatggttcccaccaagcctatggttgtggagactttctctgagtacccaccccttggacggtttgctgtcagggacatgcgtcagactgtggctgttggtgtcatcaagagcgttgagaagaaggatccaaccggtgctaaggtcaccaaatctgctgccaagaagaaatga

SEQ ID NO: 2924 - protein, 447 aa, Gossypium hirsutum
MGKEKVHINIVVIGHVDSGKSTTTGHLIYKLGGIDKRVIERFEKEAAEMNKRSFKYAWVLDKLKAERERGITIDIALWKFETTKYYCTVIDAPGHRDFIKNMITGTSQADCAVLIIDSTTGGFEAGISKDGQTREHALLAFTLGVKQMICCCNKMDATTPKYSKARYDEIVKEVSSYLKKVGYNPDKIPFVPISGFEGDNMIERSTNLDWHKGPTLLEALDQINEPKRPSDKPLRLPLQDVYKIGGIGTVPVGRVETGVLKPGMVVTFGPSGLTTEVKSVEMHHEALSEALPGDNVGFNVKNVAVKDLKRGFVASNSKDDPAKEAASFTSQVIIMNHPGQIGNGYAPVLDCHTSHIAVKFSELLTKIDRRSGKELEKEPKFLKNGDAGMIKMVPTKPMVVETFSEYPPLGRFAVRDMRQTVAVGVIKSVEKKDPTGAKVTKSAAKKK

SEQ ID NO: 2925 - DNA, 1344 bp, Musa acuminata
  CDS (1)..(1344)
atgggaaaggagaaggttcacatcaacattgtggttattggccatgtcgattctggtaaatcgacaacaactggacatctgatttacaaactcggggggattgacaagcgtgttatcgagaggtttgagaaggaagctgctgagatgaacaagaggtcattcaagtatgcgtgggtgcttgacaagctgaaggctgagcgtgaacgtggtatcactatcgatatcgctctgtggaagtttgagaccacaaagtactattgcactgtcattgatgctcctggacatcgtgatttcatcaagaacatgattactggaacctctcaggccgattgtgctgtcctcattattgattcgacagctggtggttttgaagctggaatttctaaggatgggcagactcgagagcatgcacttctcgctttcactcttggtgtcagacaaatgatttgctgctgtaacaagatggatgccacaacccccaaatattccaaggcaaggtatgatgaaatcatcaaggaggtttcgtcctatcttaagaaggttggttacaatccggagaagattcctttcgtgccaatctctggttttgaaggcgataacatgattgagagatccaccaaccttgactggtacaaaggcccaactctactggaagcccttgacttgatccaagagcccaagcgacccttggacaagccccttcgtctccccctgcagaacgtgtacaagattggaggaattggaactgtgcctgtaggccgtgttgagactggaatcctgaagcctggtatggttgttacctttggtcctacaggtctcacaactgaagttaagtctgtggagatgcaccatgaggcccttcaggaggcctttcccggtgacaatgttggtttcaatgtcaagaatgttgctgtaaaggacctgaagcgtggtttcgttgcctcgaattccaaggatgacccagcaaaggaggctgccaacttcacctcgcaagtcatcattatgaatcatcccggtcaaattgggaatggctatgctcccgttcttgattgtcacacttctcacatagctgtcaagtttgcggagcttctgaccaagattgacaggcgatccggcaaggagctggagaaggaacccaagttcctcaagaatggagatgcaggtttggtgaagatgattccgacaaagccgatggtggtcgagactttcgccgagtactcgcccctgggtaggtttgctgttagagacatgagacagacggttgccgtgggtgttatcaaaagcgtggagaagaaggatcccaccggagccaaggttaccaaagcagcccaaaagaaaaaatga

SEQ ID NO: 2926 - protein, 447 aa, Musa acuminata
MGKEKVHINIVVIGHVDSGKSTTTGHLIYKLGGIDKRVIERFEKEAAEMNKRSFKYAWVLDKLKAERERGITIDIALWKFETTKYYCTVIDAPGHRDFIKNMITGTSQADCAVLIIDSTAGGFEAGISKDGQTREHALLAFTLGVRQMICCCNKMDATTPKYSKARYDEIIKEVSSYLKKVGYNPEKIPFVPISGFEGDNMIERSTNLDWYKGPTLLEALDLIQEPKRPLDKPLRLPLQNVYKIGGIGTVPVGRVETGILKPGMVVTFGPTGLTTEVKSVEMHHEALQEAFPGDNVGFNVKNVAVKDLKRGFVASNSKDDPAKEAANFTSQVIIMNHPGQIGNGYAPVLDCHTSHIAVKFAELLTKIDRRSGKELEKEPKFLKNGDAGLVKMIPTKPMVVETFAEYSPLGRFAVRDMRQTVAVGVIKSVEKKDPTGAKVTKAAQKKK

SEQ ID NO: 2927 - DNA, 1344 bp, Actinidia deliciosa
  CDS (1)..(1344)
atgggtaaagagaaagttcacattaacattgtggtcattggccatgtcgactctgggaagtcaaccaccaccggtcacttgatctacaagcttggaggtattgacaagcgtgtgattgagaggttcgagaaggaggctgctgagatgaacaaacgttcattcaagtacgcctgggtcttggacaagctcaaggctgaacgtgagcgtggtattaccattgatattgcattgtggaagtttgagaccaccaaatactactgcacagtcattgatgctcctggccatcgcgactttatcaagaacatgatcacaggcacctcacaggctgactgtgcagtccttatcattgactccaccactggtgggtttgaagctggtatttccaaggatggtcagacacgtgagcatgctttgcttgccttcacccttggtgtcaagcaaatgatctgctgttgcaataagatggacgcaactaccccaaaatattcgaaggcaaggtatgatgaaattgttaaggaagtctcctcatatctcaagaaggtggggtacaaccctgataagatcccttttgtcccaatctctgggttcgagggtgacaacatgattgagaggtcaaccaaccttgactggtacaagggcccaaccctgcttgacgcccttgacttgattagtgaacccaagaggccgtcggacaagcctcttcgtctcccacttcaggatgtctacaagattggtgggattggcactgtccctgtgggccgtgttgagactggcgttatcaaacctggcatggttgtcacttttggcccaactggtctcaccactgaagtcaagtccgtagaaatgcaccacgaggctctcttggaggcctcgccaggcgacaatgttgggtttaacgtgaagaatgttgccgtcaaagatctcaagcgtgggtttgttgcctcaaattccaaggatgatcctgcaaaggaagctgccaacttcacttcccaggttattatcatgaaccatccaggtcaaattggaaatgggtatgccccggttttggattgccacacctcccacatcgcagttaagtttgctgagcttttgaccaagattgataggaggtctggcaaagagctcgagaaggagcccaagttcttgaagaatggtgactctgggatggtgaagatgattcccaccaaacccatggtggtggagactttctcggagtacccaccgctcggtcgttttgctgtgagagacatgcgtcaaactgtggcggttggtgtcatcaagagcgtggagaagaaggatccgaccggtgccaaggtcaccaaggctgctctgaagaagaagtga

SEQ ID NO: 2928 - protein, 447 aa, Actinidia deliciosa
MGKEKVHINIVVIGHVDSGKSTTTGHLIYKLGGIDKRVIERFEKEAAEMNKRSFKYAWVLDKLKAERERGITIDIALWKFETTKYYCTVIDAPGHRDFIKNMITGTSQADCAVLIIDSTTGGFEAGISKDGQTREHALLAFTLGVKQMICCCNKMDATTPKYSKARYDEIVKEVSSYLKKVGYNPDKIPFVPISGFEGDNMIERSTNLDWYKGPTLLDALDLISEPKRPSDKPLRLPLQDVYKIGGIGTVPVGRVETGVIKPGMVVTFGPTGLTTEVKSVEMHHEALLEASPGDNVGFNVKNVAVKDLKRGFVASNSKDDPAKEAANFTSQVIIMNHPGQIGNGYAPVLDCHTSHIAVKFAELLTKIDRRSGKELEKEPKFLKNGDSGMVKMIPTKPMVVETFSEYPPLGRFAVRDMRQTVAVGVIKSVEKKDPTGAKVTKAALKKK

SEQ ID NO: 2929 - DNA, 1344 bp, Elaeis guineensis var
  CDS (1)..(1344)
atgggtaaggagaaggtccatatcaacattgtcgtcattggtcatgttgactctggcaagtcgaccaccaccgggcatctcatttacaagcttggtggaattgataagcgtgtgattgagagatttgaaaaggaggctgcggaaatgaacaagaggtctttcaagtatgcatgggttttggacaagctgaaggctgagcgtgagcgtggtatcaccattgatattgctctgtggaagtttgagaccaccaagtactactgcacagtcattgatgcacctggtcatcgtgacttcattaagaacatgatcacaggaacctcccaggctgactgtgctgtccttattattgactccactactggtggttttgaggctggtatatcaaaggatgggcagacccgtgagcatgctttgcttgcctttacccttggtgtgaagcagatgatttgctgttgcaacaagatggatgcaactacaccaaagtactccaaggcaaggtatgatgaaattgttaaagaagtgtcctcctacctgaagaaggtaggttacaatcctgagaagattccttttgttcccatctccggttttgaaggtgacaacatgatcgagaggtccacaaacttagattggtacaagggcccaacacttcttgaggctcttgacatgatccaggagcccaagaggccctccgataagccccttcgcctcccacttcaggatgtctacaagattggtggcattggtactgtccccgttggacgtgttgagactggtatcctcaagcctggtatggttgtcacctttggcccaagtggactgactactgaagttaaatctgttgagatgcaccatgaagccttgcaagaggctctccctggtgacaatgtaggatttaacgttaagaatgttgctgtcaaagatctcaagcgtggttttgttgcctccaactcaaaggatgatcctgcaaaggaggctgccagcttcacttctcaggtcatcatcatgaatcacccgggtcagattggtaatggttatgcccctgtgcttgattgccacacctctcacattgctgtcaaattcgctgagatcctcaccaagattgacaggcgatctggcaaggagcttgagaaggagcctaagttccttaagaatggtgatgctggatttgtgaagatgattcccaccaagcctatggtggttgagactttctctcagtatcctcctcttggtcgttttgctgtcagagacatgagacagacggtggctgtgggagtcatcaagagtgttgagaagaaggaccctagtggtgccaaggtcaccaagtctgctgcaaagaagaagtaa

SEQ ID NO: 2930 - protein, 447 aa, Elaeis guineensis var
MGKEKVHINIVVIGHVDSGKSTTTGHLIYKLGGIDKRVIERFEKEAAEMNKRSFKYAWVLDKLKAERERGITIDIALWKFETTKYYCTVIDAPGHRDFIKNMITGTSQADCAVLIIDSTTGGFEAGISKDGQTREHALLAFTLGVKQMICCCNKMDATTPKYSKARYDEIVKEVSSYLKKVGYNPEKIPFVPISGFEGDNMIERSTNLDWYKGPTLLEALDMIQEPKRPSDKPLRLPLQDVYKIGGIGTVPVGRVETGILKPGMVVTFGPSGLTTEVKSVEMHHEALQEALPGDNVGFNVKNVAVKDLKRGFVASNSKDDPAKEAASFTSQVIIMNHPGQIGNGYAPVLDCHTSHIAVKFAEILTKIDRRSGKELEKEPKFLKNGDAGFVKMIPTKPMVVETFSQYPPLGRFAVRDMRQTVAVGVIKSVEKKDPSGAKVTKSAAKKK

SEQ ID NO: 2931 - DNA, 1347 bp, Cichorium intybus
  CDS (1)..(1347)
  misc_feature (756)..(756): n is a, g, c or t
  misc_feature (931)..(931): n is a, g, c or t
  misc_feature (956)..(956): n is a, g, c or t
  misc_feature (1083)..(1083): n is a, g, c or t
  misc_feature (1221)..(1221): n is a, g, c or t
atgggtaaggaaaagattcacattagcattgtcgtcatcggacatgtcgactccggcaagtctacaaccaccggtcacttgatctacaagcttggaggtatcgacaagcgtgtgatcgaacgtttcgagaaggaagccgctgagatgaacaaacgttcattcaagtacgcatgggtgctcgacaaacttaaggccgagcgtgaacgtggtatcaccatcgatatcgctctatggaagttcgaaacaaccaagtactactgcacagtcatcgatgcccccggacatcgtgatttcatcaagaacatgattactggtacctcccaggccgattgtgccgtcctcatcatcgactccaccactggtggtttcgaagctggtatctccaaggacggtcagacccgtgagcacgctcttcttgccttcacccttggtgtgaaacaaatgatctgctgttgtaacaagatggatgccactacccccaagtactccaagtccaggtacgaggaaatcgtgaaggaagtttcatcatacttgaagaaggtcggatacaacccagacaaaatcccattcgtcccaatctccggattcgaaggtgacaacatgattgagaggtcaaccaaccttgactggtacaagggaccaactctccttgacgctcttgaccagatcaacgagcccaagagaccatcagacaagcccctccgtctcccacttcaagacgtgtacaagatcggtggtattggaactgtgccagtncggcgtgttgaaactggtgtcatcaagccaggtatgtcgtcaccttcggtccatctggttgaccacgagtcaaagtccgttgagatgcaccacgaacgttgcttgaagcctcttcccggagacaatgtcggattcaatgtcaaagaacgttctgtgatggatctcaagcgtgggnatgttgcttccaactccagggacgnccctgctaaaggtgctgctagtttcacttcccaggtcatcatcatgaaccaccctggtcagatcggaaatggttatgctccggtgctcgattgccacacatcccacattgctgttaaattccaaganctgttgaccaagattgacagacgatctggaaaggagcttgagaaggagcctaagtttttgaagaacggagatgctggtatggttaagatgattccaaccaagcctatggtggtggagacttttgctgagtaccccccncttggaaggtttgccgtgagggacatgcgtcagacggttgctgttggtgttaccaagaatgttgacaagaaggacccgactggagctaaggtgaccaaggctgcagccaagaagggagtgaagtga

SEQ ID NO: 2932 - protein, 448 aa, Cichorium intybus
  misc_feature (311)..(311): The Xaa at location 311 stands for Asn, Asp, His, or Tyr.
  misc_feature (319)..(319): The Xaa at location 319 stands for Ala, Asp, Gly, or Val.
  misc_feature (361)..(361): The Xaa at location 361 stands for Asp, or Glu.
MGKEKIHISIVVIGHVDSGKSTTTGHLIYKLGGIDKRVIERFEKEAAEMNKRSFKYAWVLDKLKAERERGITIDIALWKFETTKYYCTVIDAPGHRDFIKNMITGTSQADCAVLIIDSTTGGFEAGISKDGQTREHALLAFTLGVKQMICCCNKMDATTPKYSKSRYEEIVKEVSSYLKKVGYNPDKIPFVPISGFEGDNMIERSTNLDWYKGPTLLDALDQINEPKRPSDKPLRLPLQDVYKIGGIGTVPVRRVETGVIKPGMSSPSVHLVDHESKSVEMHHERCLKPLPGDNVGFNVKERSVMDLKRGXVASNSRDXPAKGAASFTSQVIIMNHPGQIGNGYAPVLDCHTSHIAVKFQXLLTKIDRRSGKELEKEPKFLKNGDAGMVKMIPTKPMVVETFAEYPPLGRFAVRDMRQTVAVGVTKNVDKKDPTGAKVTKAAAKKGVK

SEQ ID NO: 2933 - DNA, 1389 bp, Mytilus galloprovincialis
  CDS (1)..(1389)
atggggaaggaaaagattcatatcaacattgtcgtcattggtcacgtcgactctggaaagtcaacatcaactggccatttgatttacaaatgtggtggaatcgacaaaagaaccattgaaaaattcgagaaggaagcagctgagatgggaaaaggctccttcaagtacgcctgggttttggacaaactgaaggctgagcgtgaacgtggtattaccattgacattgctttgtggaagtttgagaccaccaaatactatgttaccattattgatgccccaggacatagagatttcatcaagaacatgatcactggtacatctcaagctgattgtgctgtgttgattgttgcatctggtactggtgaatttgaagctggtatctcatctaacggtcagaccagagaacacgccctattggctttcactcttggtgtcaaacagatgattgtcggagtcaacaagatggacaacactgaaccaccatacagtgaagcccgattcatggaaatccagaaggaagtcagcagttacttgaaaaaaattggatataatccaaaatgtgtagcttttgttccaatttctggatggcacggagacaacatgattgagtcatctgaaaagatgggttggtacaaggggtgggccattgaaaggaaagaaggaaatgccagtggcaagaccttattcgaggctcttgattctatcctcccaccatcaagacccacagacaaagctctccgtctcccactccaggatgtttacaaaattggaggtattggaacagtgccagtaggtagagtagaaactggaatcatcaaaccaggtatggttgttacctttgctccagccaacatcagtactgaagtaaagtccgtagaaatgcaccacgagtctctcccagaagctttaccaggagacaatgttggtttcaacgtaaagaacgtctctgtcaaggaaattcgtagaggaatggtctgtggtgacagcaaaaatgacccacccaagggagccaaaagttttgttgcacaggtcatcatcttgaaccaccctggagaaattaagaatggatatgcgccagtcttggattgtcatacagctcatattgcctgtaaatttgttgaaatcaaagaaaagatcgacagaagaagtggaaagaaacttgaagaattcccaaaattcatcaaatctggggatgctggtatcgttgacatgacaccatcaaagcctatgtgtgttgaatccttccaaacatatgccccattaggacgttttgctgtccgagacatgagacagactgtcgccgtaggagtcatcaaagaagttacaaaggcagagcctgccagtggcaaggttaccaaatctgcagcaaaggccggtggcaagaaatga

SEQ ID NO: 2934 - protein, 462 aa, Mytilus galloprovincialis
MGKEKIHINIVVIGHVDSGKSTSTGHLIYKCGGIDKRTIEKFEKEAAEMGKGSFKYAWVLDKLKAERERGITIDIALWKFETTKYYVTIIDAPGHRDFIKNMITGTSQADCAVLIVASGTGEFEAGISSNGQTREHALLAFTLGVKQMIVGVNKMDNTEPPYSEARFMEIQKEVSSYLKKIGYNPKCVAFVPISGWHGDNMIESSEKMGWYKGWAIERKEGNASGKTLFEALDSILPPSRPTDKALRLPLQDVYKIGGIGTVPVGRVETGIIKPGMVVTFAPANISTEVKSVEMHHESLPEALPGDNVGFNVKNVSVKEIRRGMVCGDSKNDPPKGAKSFVAQVIILNHPGEIKNGYAPVLDCHTAHIACKFVEIKEKIDRRSGKKLEEFPKFIKSGDAGIVDMTPSKPMCVESFQTYAPLGRFAVRDMRQTVAVGVIKEVTKAEPASGKVTKSAAKAGGKK

SEQ ID NO: 2935 - DNA, 1437 bp, Antonospora locustae
  CDS (1)..(1437)
atggaaggaaaaaagccaaacttaaacgtctgcatcattggccatgtggatagtggaaagagcactaccatgggcaatttggcgtatcagcttggcgtatttgaccagaggcaacttaccaaactcaaagcagaggctgactctcatgggaagggaacgttcgcctatgcgtacttcttcgacaacacagctgcggagcgaaagcgtggaatcacgatcgacatcacgttgaaagaattcaaactgaagaagttcaatgcaaacatcattgattgccccgggcataaggatttcatcaagaacacggtgactggtgctgcgcaagcagatgttgctgttgctttggtgcctgcttcagattttgcagctgcgacatcaccaaaggccacgttgaaggaccacatcatgatttctggcgttatgggaatcaaacgccttataatttgcgtgaataagatggacgagttcccgccggaaaagcagaaggagaagtttgagtggatcaagaaggagatgcttttcatttcccaaagacttcacccggacaaggacccgataatcattccgatatctggtctaaaaggaatcaatattgctgatcatggagagaaatttgaatggttcgaaggatggcagaagaaggatgctaacaacaatttgattggggaaaaggtctttacgctcgagggagccctaaattactgtgatcttcccgaaaggccgattggaaagccattgagaatgccgattacagatattcatacaataacaggaattgggacaatttacacaggaagagttgacacaggtgtgataaggcctggaatgagcatctcaattcagccagcaaatgtatttggagaagtaaagtctctgcagattcaccgccaggaccagaaagaagttatttgtggagagaacattggtcttgcattaaaatcgggcgcaaagggaaatctcacgcaaatcaaaaagggaaacgttatttcggatacgaagacatctccttgtgtaattcaaccggcatgcaaggcacgtgtcatcgttgtggaacatccgaagggaataaaaaccggctactgtccggtgatggatcttggaagtcaccacgttcctgcaaagatagcaaagtttatcaacaagaaaggacccaaggacaaggagcctgtcacagagtttgattcaattcaaaacaaagacaacgcattgtgtgttatcgtcccccaaaagccaattgttatggaagtactcaaggactttccttctctctcacgctttgcattgagagatggcgggaagattgttgcaattggatctattgttgaggttttaacaaaggagcagtgcgaaaagcttggtgcggacgtttccattacacaaggaaaagcagctgctgcatcaaaacctgctgagacatctaaaaagagcaagaaataa

SEQ ID NO: 2936 - protein, 478 aa, Antonospora locustae
MEGKKPNLNVCIIGHVDSGKSTTMGNLAYQLGVFDQRQLTKLKAEADSHGKGTFAYAYFFDNTAAERKRGITIDITLKEFKLKKFNANIIDCPGHKDFIKNTVTGAAQADVAVALVPASDFAAATSPKATLKDHIMISGVMGIKRLIICVNKMDEFPPEKQKEKFEWIKKEMLFISQRLHPDKDPIIIPISGLKGINIADHGEKFEWFEGWQKKDANNNLIGEKVFTLEGALNYCDLPERPIGKPLRMPITDIHTITGIGTIYTGRVDTGVIRPGMSISIQPANVFGEVKSLQIHRQDQKEVICGENIGLALKSGAKGNLTQIKKGNVISDTKTSPCVIQPACKARVIVVEHPKGIKTGYCPVMDLGSHHVPAKIAKFINKKGPKDKEPVTEFDSIQNKDNALCVIVPQKPIVMEVLKDFPSLSRFALRDGGKIVAIGSIVEVLTKEQCEKLGADVSITQGKAAAASKPAETSKKSKK

SEQ ID NO: 2937 - DNA, 1374 bp, Rosellinia sp
  CDS (1)..(1374)
atgtcgaccaaggcgcatcttaacgtcgtcgtcattggccacgtcgacagtggcaagtccaccactaccggccatctgatctaccagtgcggtggtatcgacaagcgaactatcgagaagttcgagaaggaagccgctgaactcggcaagggttctttcaaatatgcctgggttttggacaagctaaaggccgagcgtgagcgtggtatcaccatcgatattgccctctggaagttcgagacccccaagtactacgtcaccgtcattgatgcccccggtcaccgtgatttcatcaagaacatgattactggtacttcccaagccgattgcgccattctcatcatcgctgccggcactggtgagttcgaggccggtatctccaaggatggccagacccgtgagcacgctctgctcgctttcaccctcggtgttaagcagctcatcgttgctatcaacaagatggacactgctcagtgggccgaggctcgttacaacgaaatcgtcaaggagacctcttctttcatcaagaaggtcggtttcaaccccaagcacgtcgctttcgtccccatctcgggcttcaacggcgacaacatgcttgaggtcaccaagaacgcttcctggtacaagggctgggagaaggagagccccaagggcgccaagatctccggcaagaccctccttgatgccattgacgccattgaggagcccaagcgtgccaacgacaagcccctccgtctgccccttcaggatgtctacaagatcggtggtattggcacggtccctgtcggccgtatcgagaccggtgagctcaagcccggtatggtcgtcacattcgcccccgccatggttaccactgaagtcaagtccgtcgaaatgcaccaccagcagctcgagaagggcaaccccggtgacaacgttggtttcaacgtgaagaacgtctccgtcaaggatatccgccgtggtaacgtcgctggtgacagcaagaacgaccccccttacggtgctgagtctttcaacgctcaggtcatcgttctcaaccaccctggccaggtcggtgccggttacgctcccgtcctcgattgccacactgcccacattgcctgcaagttctctgagcttcttgagaagatcgaccgccgtaccggtaagagcgtcgaagccaaccccaagttcgtcaagtctggtgatgccgccatcgtcaagatggttccctccaagcctatgtgcgtggaggccttcactgactaccctcctctgggacgtttcgccgtccgtgacatgcgtcagaccgtcgccgtcggtgtcatcaagtcagttgagaaggacaccaaggtcaagggcaaggagaccaagtccgctaccaagaagaagtaa

SEQ ID NO: 2938 - protein, 457 aa, Rosellinia sp
MSTKAHLNVVVIGHVDSGKSTTTGHLIYQCGGIDKRTIEKFEKEAAELGKGSFKYAWVLDKLKAERERGITIDIALWKFETPKYYVTVIDAPGHRDFIKNMITGTSQADCAILIIAAGTGEFEAGISKDGQTREHALLAFTLGVKQLIVAINKMDTAQWAEARYNEIVKETSSFIKKVGFNPKHVAFVPISGFNGDNMLEVTKNASWYKGWEKESPKGAKISGKTLLDAIDAIEEPKRANDKPLRLPLQDVYKIGGIGTVPVGRIETGELKPGMVVTFAPAMVTTEVKSVEMHHQQLEKGNPGDNVGFNVKNVSVKDIRRGNVAGDSKNDPPYGAESFNAQVIVLNHPGQVGAGYAPVLDCHTAHIACKFSELLEKIDRRTGKSVEANPKFVKSGDAAIVKMVPSKPMCVEAFTDYPPLGRFAVRDMRQTVAVGVIKSVEKDTKVKGKETKSATKKK

SEQ ID NO: 2939 - DNA, 1389 bp, Oncometopia nigricans
  CDS (1)..(1389)
atgggaaaagagaagattcatatcaacattgtcgtcatcggtcacgtagactctggaaagtcaaccaccactggacatttgatttataaatgtggtggtattgacaagcgtaccatcgagaagttcgagaaggaagcccaggaaatgggcaaaggttccttcaaatatgcatgggtcttggacaagctgaaagctgaacgtgagcgtggtattactatcgatattgccctttggaaatttgaaactgccaagtactatgttaccatcattgatgctcccggacacagagatttcatcaagaacatgatcacaggaacttctcaggctgattgtgctgtactgattgtggctgctggtaccggtgagtttgaagctggcatttccaagaacggtcagactcgtgaacatgctctccttgcttttactttgggtgtgaaacaactgattgttggagttaacaagatggattctactgaacccgcttacagtgaaagccgatttgaggaaatcaagaaagaagtcagtaactacatcaagaaaatcggttacaacccagcagctgttgctttcgtgcccatttctggatggcacggagataatatgctggagccctctgacaagatgccatggttcaaggggtgggccatcgagcgtaaggaaggcaaggctgagggcaagtgcttgattgaagctttagatgccattcttcctccatcaagacctactgagaagcccctcaggctgcctcttcaggatgtatacaagattggtggtattggaacagtgcctgtaggccgagtagagactggagtgcttaaacctggtatggtggtcactttcgcccctgctaatctgactactgaagtcaagtctgttgaaatgcaccacgaagctctccaggaggccgtccctggagacaatgtgggcttcaacgttaagaacgtttctgtcaaagaattgaggcgaggttttgttgctggggactccaaatctaacccacccaaggctgccgctgacttcactgcacaggttattgttctgaaccatcctggtcaaatctccaacggatatactcctgtcctcgactgtcacactgctcacattgcgtgcaaattcgcagagatcaaagaaaagtgcgaccgtcgtactggcaagactactgaagataatccaaaatccataaagtctggtgatgcggctatcatcactttggttccttccaaacccatgtgtgtcgagagtttccaggagttcccacctctgggacgtttcgctgtgcgtgacatgaggcaaactgtggctgttggtgtcatcaagagcgtgaatcataaggatctcacatcaggtaaagtcacgaaggctgcagagaaggcccagaagaagaaataa

SEQ ID NO: 2940 - protein, 462 aa, Oncometopia nigricans
MGKEKIHINIVVIGHVDSGKSTTTGHLIYKCGGIDKRTIEKFEKEAQEMGKGSFKYAWVLDKLKAERERGITIDIALWKFETAKYYVTIIDAPGHRDFIKNMITGTSQADCAVLIVAAGTGEFEAGISKNGQTREHALLAFTLGVKQLIVGVNKMDSTEPAYSESRFEEIKKEVSNYIKKIGYNPAAVAFVPISGWHGDNMLEPSDKMPWFKGWAIERKEGKAEGKCLIEALDAILPPSRPTEKPLRLPLQDVYKIGGIGTVPVGRVETGVLKPGMVVTFAPANLTTEVKSVEMHHEALQEAVPGDNVGFNVKNVSVKELRRGFVAGDSKSNPPKAAADFTAQVIVLNHPGQISNGYTPVLDCHTAHIACKFAEIKEKCDRRTGKTTEDNPKSIKSGDAAIITLVPSKPMCVESFQEFPPLGRFAVRDMRQTVAVGVIKSVNHKDLTSGKVTKAAEKAQKKK

SEQ ID NO: 2941 - DNA, 1383 bp, Metarhizium anisopliae
  CDS (1)..(1383)
atgggtaaggacgacaagactcacatcaacgtggtcgttatcggccacgtcgactccggcaagtctaccaccactggtcacttgatctaccagtgcggtggtatcgacaagcgtaccattgagaagttcgagaaggaagccgctgaactcggcaagggttccttcaagtacgcatgggttcttgacaagctcaaggccgagcgtgagcgtggtatcaccatcgacattgccctctggaagttcgagactcccaagtactatgtcaccgtcattgacgctcccggtcaccgtgactttatcaagaacatgatcactggtacttcccaggctgactgcgctattctcattatcgctgccggtactggtgagttcgaggctggtatctccaaggatggccagacccgtgagcacgctctgctcgcctacaccctgggtgtcaagcagctcattgtcgccatcaacaagatggacaccaccaagtggtccgaggcccgttaccaggaaatcatcaaggagacttccaacttcatcaagaaggtcggctacaaccccaagaccgtcgccttcgtccccatctccggtttccacggtgacaacatgcttcaggcctccaccaactgcccctggtacaagggttgggagaaggagaccaaggctggcaagtccaccggcaagaccctcctcgaggccattgacgccattgagccccccaagcgtcccaccgacaagcccctccgtcttcccctccaggatgtttacaagattggcggtattggaactgtccctgtcggccgtatcgagactggtgtcctcaagcccggtatggtcgttacctttgctccctccaacgtcaccactgaagtcaagtccgtggaaatgcaccacgagcagcttaccgagggtgtccccggtgacaacgttggtttcaacgtgaagaacgtttccgtcaaggaaatccgccgtggtaacgttgctggtgactccaagaacgacccccccatgggtgccgcttccttcgatgcccaggtcatcgttctcaaccaccccggccaggtcggtgctggttacgctcccgtcctcgattgccacaccgcccacattgcctgcaagttctctgagatcaaggagaagattgaccgacgtaccggtaaggctgttgagtctgcccccaagttcatcaagtccggtgactctgccatcgtcaagatggttccctccaagcctatgtgcgttgaggctttcaccgactaccctcccctgggtcgtttcgccgtccgtgacatgcgtcagaccgtcgctgtcggtgtcatcaagtccgtcgagaaggctgctgctggttccggcaaggtcaccaagtctgctgccaaggctggcaagaaataa

SEQ ID NO: 2942 - protein, 460 aa, Metarhizium anisopliae
MGKDDKTHINVVVIGHVDSGKSTTTGHLIYQCGGIDKRTIEKFEKEAAELGKGSFKYAWVLDKLKAERERGITIDIALWKFETPKYYVTVIDAPGHRDFIKNMITGTSQADCAILIIAAGTGEFEAGISKDGQTREHALLAYTLGVKQLIVAINKMDTTKWSEARYQEIIKETSNFIKKVGYNPKTVAFVPISGFHGDNMLQASTNCPWYKGWEKETKAGKSTGKTLLEAIDAIEPPKRPTDKPLRLPLQDVYKIGGIGTVPVGRIETGVLKPGMVVTFAPSNVTTEVKSVEMHHEQLTEGVPGDNVGFNVKNVSVKEIRRGNVAGDSKNDPPMGAASFDAQVIVLNHPGQVGAGYAPVLDCHTAHIACKFSEIKEKIDRRTGKAVESAPKFIKSGDSAIVKMVPSKPMCVEAFTDYPPLGRFAVRDMRQTVAVGVIKSVEKAAAGSGKVTKSAAKAGKK

SEQ ID NO: 2943 - DNA, 1380 bp, Pichia angusta
  CDS (1)..(1380)
atgggaaaagaaaagactcacgttaacgtcgttgttattggtcacgtcgactctggtaaatctaccactaccggccacttgatctacaagtgtggtggtatcgacaagagaaccatcgagaagtttgaaaaggaggctgccgagcttggtaagggttccttcaaatacgcttgggttttggacaagttgaaggctgagagagaaagaggtatcaccatcgatatcgctttgtggaaattcgagactccaaagtaccacgtcactgttattgatgctccaggtcacagagatttcatcaagaacatgattactggtacttcccaggctgactgtgctattttgattattgctggtggtaccggtgagttcgaggctggtatttccaaggacggtcaaaccagagagcacgctttgttggctttcacccttggtgtcagacaactgattgttgctgtcaacaagatggactctgttcaatggtctgaggccagattcgaggaaattgtcaaggaaacctctaacttcatcaagaaggttggttacaaccctaagactgttccattcgtcccaatttctggttggaacggtgacaacatgattgagccatcttctaactgcccatggtacaagggatggcaaaaggagaccaagtctggtgtcgtcaagggtaagactcttctcgaggccattgacgccattgagccacctgccagaccatctgacaagccattgagattgccattgcaagatgtctacaagattggtggtatcggtactgttccagtcggtagagttgagactggtgtcatcaaggctggtatggttgttactttcgccccagctggtgttaccaccgaagtcaagtccgtcgagatgcaccacgagcagcttgctgagggtcttccaggtgacaatgttggattcaacgtcaagaacgtttccgtcaaggaaattagaagaggtaacgtctgtggtgactcgaagaacgacccacctcaaggatgtgcttccttcaacgctcaagtcattatcttgaaccacccaggtcagatctctgctggttactctccagttttggactgccacactgcccacattgcctgcagattcgaccaactgctcgagaagatcgacagaagaaccggtaagaagattgaggagaaccctaagtttgtcaagtctggtgacgctgctattgttaagatgatcccatctaagccaatgtgtgttgagaccttcactgagtacccaccattgggaagatttgccgtcagagatatgagacagaccgttgccgttggtgtcatcaagtctgttgagaagactgctgctggtgccggaaaggtcaccaaggctgctcaaaaggctgctaagaaataa

SEQ ID NO: 2944 - protein, 459 aa, Pichia angusta
MGKEKTHVNVVVIGHVDSGKSTTTGHLIYKCGGIDKRTIEKFEKEAAELGKGSFKYAWVLDKLKAERERGITIDIALWKFETPKYHVTVIDAPGHRDFIKNMITGTSQADCAILIIAGGTGEFEAGISKDGQTREHALLAFTLGVRQLIVAVNKMDSVQWSEARFEEIVKETSNFIKKVGYNPKTVPFVPISGWNGDNMIEPSSNCPWYKGWQKETKSGVVKGKTLLEAIDAIEPPARPSDKPLRLPLQDVYKIGGIGTVPVGRVETGVIKAGMVVTFAPAGVTTEVKSVEMHHEQLAEGLPGDNVGFNVKNVSVKEIRRGNVCGDSKNDPPQGCASFNAQVIILNHPGQISAGYSPVLDCHTAHIACRFDQLLEKIDRRTGKKIEENPKFVKSGDAAIVKMIPSKPMCVETFTEYPPLGRFAVRDMRQTVAVGVIKSVEKTAAGAGKVTKAAQKAAKK

SEQ ID NO: 2945 - DNA, 1389 bp, Crassostrea gigas
  CDS (1)..(1389)
atgggtaaggaaaagactcacatcaacattgtcgtcattggtcatgtcgactctggaaaatcaacttccactggccatctcatttacaaatgtggtggtattgaccagagaaccatccaaaagttcgagaaggaagctgctgagatgggaaagggttctttcaaatacgcctgggtgttggacaaactgaaggcagagcgtgaacgtggtatcaccattgacattgctctgtggaagttcgaaaccaccaagtaccatgtcaccattattgatgctcccggccacagagatttcatcaagaacatgattacaggaacttcacaggctgactgtgctgtgttgatcattgctgctggtactggtgaatttgaaactggtatctctgctaacggacaaacccgtgaacacgccttgttggctttcactttgggagtaaagcagctcatcattggtgtcaacaaaatggacagcactgaaccaccatacagtgaggctcgattcaacgaaatcaagggtgaagtagagaagtacatcaagaagattgggtacaaccccaaggctgtccccttcgtccccatctctggatggcacggagataacatgattgaggcttccacaaagatggaatggttcaagggatgggccattgagaggaaagagggaaatgccagcggaaagacccttttggaagctttggattctatcctgccaccaaagagaccaactgacttacctcttcgtcttccacttcaggatgtctacaagattggaggtattggaacagtgccagttggtagagtggaaactggtattatcaaaccaggtatggttgtcacctttgctccacccaacatcaccactgaggtaaaatctgtggaaatgcaccacgaatctctcccagaggctgtccctggtgacaatgttggcttcaacatcaagaacgtgtccgtaaaggaaatccgtcgtggaaatgtctgtggagacagcaaaaatgatccaccaaagggcgccaagaacttccttgcccaggtcatcatcttgaaccaccctggtgagatcaagaatggatatgcgcctgtccttgattgccacactgctcacattgcctgcaagtttgttgaaattaaagagaaatgcgatcgtcgtagtggaaaagtcttggaagaggcaccaaaatgcatcaagaacggagatgctggtatggtcctcatggttcccagcaagcctatgtgtgttgaagctttctctaaatatgcacccctgggacgttttgctgtccgtgacatgaggcagaccgtggctgttggtgtcatcaaggaggttgagaaggctgagccatcacagggcaaagtcaccaaggctgcacagaaagccggtggaaagaagtga

SEQ ID NO: 2946 - protein, 462 aa, Crassostrea gigas
MGKEKTHINIVVIGHVDSGKSTSTGHLIYKCGGIDQRTIQKFEKEAAEMGKGSFKYAWVLDKLKAERERGITIDIALWKFETTKYHVTIIDAPGHRDFIKNMITGTSQADCAVLIIAAGTGEFETGISANGQTREHALLAFTLGVKQLIIGVNKMDSTEPPYSEARFNEIKGEVEKYIKKIGYNPKAVPFVPISGWHGDNMIEASTKMEWFKGWAIERKEGNASGKTLLEALDSILPPKRPTDLPLRLPLQDVYKIGGIGTVPVGRVETGIIKPGMVVTFAPPNITTEVKSVEMHHESLPEAVPGDNVGFNIKNVSVKEIRRGNVCGDSKNDPPKGAKNFLAQVIILNHPGEIKNGYAPVLDCHTAHIACKFVEIKEKCDRRSGKVLEEAPKCIKNGDAGMVLMVPSKPMCVEAFSKYAPLGRFAVRDMRQTVAVGVIKEVEKAEPSQGKVTKAAQKAGGKK

SEQ ID NO: 2947 - DNA, 1185 bp, Ureaplasma urealyticum serovar 2
  CDS (1)..(1185): transl_table=4
atggctaaagctaaatttgaaagaacaaaacctcacgttaacattggtactattggccacgttgaccatggtaaaactactttaacagctgcaattagtacagtacttgctaaaaaaggacaagctattgcacaatcatatgctgatgttgataaaacaccagaagaaagagaacgtggtattacaattaacgcttctcacgttgaatatgaaacaaaaactcgtcactatgcacacgttgactgcccaggacacgccgactacgttaagaatatgattacaggtgcagcacaaatggatggtgcaatcttagttattgctgcatctgatggggttatggctcaaactaaagaacacatcctattagcgcgtcaagttggtgttccaaaaatcgttgtattcttaaataaatgtgatttcatgacagatccagatatgcaagatcttgttgaaatggaagttcgtgaattattaactaaatatggatttgatggcgataacacgccagttatccgtggttcaggtcttaaagctttagagggcgacccagtatgagaagctaaaattgatgaattaatggatgcagttgactcatgaattccattaccagaacgtagtactgacaaaccattcttattagcaattgaagacgtatttacaatttcaggacgtggtacagttgtaactggacgtgttgaacgtggtacattaaaagttaatgatgaagttgaaatcgttggtttaaaagacactcaaaaaactgttgttacaggaattgaaatgtttagaaaatcattagatcaagctgaagctggagataatgctggtattttattacgtggtattaaaaaagaagacgttgaacgtggacaagtacttgtaaaaccaggttcaattaaacctcaccgtacatttactgctaaagtttatattcttaaaaaagaagaaggtggacgtcacacacctatcgtttcaggataccgtccacaattctactttagaacaacagacgtaacaggtgctatttcattaccagctggtgttgacttagtaatgcctggtgatgacgttgaaatgactgtagaattaattgccccagttgcgattgaagatggatctaagttctcaatccgtgaaggtggtaaaactgtaggtcatggtagcgtaattaaaacaagtaattaa

SEQ ID NO: 2948 - protein, 394 aa, Ureaplasma urealyticum serovar 2
MAKAKFERTKPHVNIGTIGHVDHGKTTLTAAISTVLAKKGQAIAQSYADVDKTPEERERGITINASHVEYETKTRHYAHVDCPGHADYVKNMITGAAQMDGAILVIAASDGVMAQTKEHILLARQVGVPKIVVFLNKCDFMTDPDMQDLVEMEVRELLTKYGFDGDNTPVIRGSGLKALEGDPVWEAKIDELMDAVDSWIPLPERSTDKPFLLAIEDVFTISGRGTVVTGRVERGTLKVNDEVEIVGLKDTQKTVVTGIEMFRKSLDQAEAGDNAGILLRGIKKEDVERGQVLVKPGSIKPHRTFTAKVYILKKEEGGRHTPIVSGYRPQFYFRTTDVTGAISLPAGVDLVMPGDDVEMTVELIAPVAIEDGSKFSIREGGKTVGHGSVIKTSN

SEQ ID NO: 2949 - DNA, 1383 bp, Cryptococcus neoformans var
  CDS (1)..(1383)
atgggtaaggacaagctccacgtcaacgtcgttgttatcggtcacgtcgactccggtaagtcgaccaccaccggtcacttgatctacaagtgcggtggtatcgacaagcgaaccattgagaagttcgagaaggaggcccaagagctcggaaagtcttctttcaagtacgcttgggttcttgacaagcttaaggccgagcgagagcgaggtatcaccatcgacattgctctttggaagttcgagacccctaagtaccaggttaccgtcattgacgcccccggtcaccgagacttcatcaagaacatgatcaccggtacctcccaggctgactgtgccatcctcatcattgccaccggtatcggtgagttcgaggctggtatctccaaggacggtcagacccgagagcacgccctcctcgccttcaccctcggtgttaggcagctcattgttgcttgcaacaagatggacacctgcaagtggtctgaggaccgattcaacgaaatcgtcaaggagaccaacggtttcatcaagaaggtcggttacaaccccaaggctgtccccttcgtccccatctctggttggcacggtgacaacatgttggaggagaccaccaacatgccctggtacaagggatggaccaaggagaccaagtccggtgtttccaagggtaagacccttctcgaggccatcgacgccatcgagccccctacccgacccaccgacaagcccctccgtctccctctccaggacgtctacaagatcggtggtatcggcacagtccctgtcggccgagtcgagaccggtgtcatcaaggccggtatggtcgtcaagttcgcccccaccaacgtcaccactgaagtcaagtccgttgagatgcaccacgagcagatccccgagggtctccccggagacaacgttggtttcaacgtcaagaacgtttccatcaaggacatccgacgaggtaacgtctgtggtgactccaagaacgacccccctatggaggctgcttctttcaacgcccaggttatcgtccttaaccaccctggtcagatcggtgccggttacacccccgttctcgactgtcacactgcccacattgcttgcaagttctctgagttgatcgagaagattgaccgacgaaccggtaaggtcatggaggccgcccccaagttcgtcaagtctggtgacgccgccattgtcaagcttgtttcccagaagcctctctgtgttgagacctacgccgactacccccctcttggtcgattcgccgtccgagacatgcgacagaccgttgccgttggtgttattaagagtgtggagaagtccgatggtaagagcggcaaggttaccaaggccgccgagaaggccgccaagaagaagtaa

SEQ ID NO: 2950 - protein, 460 aa, Cryptococcus neoformans var
MGKDKLHVNVVVIGHVDSGKSTTTGHLIYKCGGIDKRTIEKFEKEAQELGKSSFKYAWVLDKLKAERERGITIDIALWKFETPKYQVTVIDAPGHRDFIKNMITGTSQADCAILIIATGIGEFEAGISKDGQTREHALLAFTLGVRQLIVACNKMDTCKWSEDRFNEIVKETNGFIKKVGYNPKAVPFVPISGWHGDNMLEETTNMPWYKGWTKETKSGVSKGKTLLEAIDAIEPPTRPTDKPLRLPLQDVYKIGGIGTVPVGRVETGVIKAGMVVKFAPTNVTTEVKSVEMHHEQIPEGLPGDNVGFNVKNVSIKDIRRGNVCGDSKNDPPMEAASFNAQVIVLNHPGQIGAGYTPVLDCHTAHIACKFSELIEKIDRRTGKVMEAAPKFVKSGDAAIVKLVSQKPLCVETYADYPPLGRFAVRDMRQTVAVGVIKSVEKSDGKSGKVTKAAEKAAKKK

SEQ ID NO: 2951 - DNA, 1344 bp, Solanum tuberosum
  CDS (1)..(1344)
atgggtaaaaaaaaaatccacatcagtattgtggtcattggtcatttcaactctggtaattcaaccacaactggtcacttgatctacaaccttggtggtattgacaacctttttattgaaaggtttgagaaggaacctgctgaaataaacaaaaggtcattcaattatgcctgggtgcttgacaaacttaaggctgaacttgagcgtggtatcactattgatattgctttgtggaattttgaaaccactaattactactgcactgtgattgatgcccccggacacagggactttatcaaaaacataatcactggtacctcccaggccgactgtgctgtcctcattattgactccaccactggtggttttaaacctggtatctctaaaaatggtcaaacccgtgaacatccattgcttgctttcacccttggtgtcaaccaaataatttgctgctgcaacaaaatggatgctaccacccccaagtactccaaggctaggtacgatgaaattgtgaaggaaatttcttcctacctcaagaaggttggttacaaccctgacaaaatcccatttgtccccatctctggttttgaaggagataatatgattgagaggtctaccaacctcgactggtacaagggaccaaccctccttgatgctctcgaccagattaatgagcccaagagaccaacagacaagccactccgtctcccacttcaggatgtttacaagattggtggtattggaactgtcccagttggtcgtgtagagactggtgtgatcaagcctggtatggttgtgacctttggccctactggtttgacaactgaagtcaagtctgttgagatgcaccacgaagctcttctggaggcactccctggtgacaatgttgggttcaatgttaagaatgttgctgttaaggatctgaagcgtggttttgttgcctcaaactccaaggatgacccagctaagggggcagccagtttcactgcccaggtcatcatcatgaaccatccaggacagattggaaatggatatgctccagtgctggactgtcacacatcccatattgctgtcaagtttgctgagatcttgactaagattgacaggcgttctggtaaggaactcgagaaggagcctaagttcttgaagaacggtgatgctggtatggttaagatgattcccaccaagcccatggttgttgagaccttctccgagtacccaccattggggcgttttgctgtgagggacatgcgtcaaactgttgctgttggtgttatcaagagtgttgacaagaaggacccatctggagccaaggtcaccaaggctgctcagaagaaaaaatga

SEQ ID NO: 2952 - protein, 447 aa, Solanum tuberosum
MGKKKIHISIVVIGHFNSGNSTTTGHLIYNLGGIDNLFIERFEKEPAEINKRSFNYAWVLDKLKAELERGITIDIALWNFETTNYYCTVIDAPGHRDFIKNIITGTSQADCAVLIIDSTTGGFKPGISKNGQTREHPLLAFTLGVNQIICCCNKMDATTPKYSKARYDEIVKEISSYLKKVGYNPDKIPFVPISGFEGDNMIERSTNLDWYKGPTLLDALDQINEPKRPTDKPLRLPLQDVYKIGGIGTVPVGRVETGVIKPGMVVTFGPTGLTTEVKSVEMHHEALLEALPGDNVGFNVKNVAVKDLKRGFVASNSKDDPAKGAASFTAQVIIMNHPGQIGNGYAPVLDCHTSHIAVKFAEILTKIDRRSGKELEKEPKFLKNGDAGMVKMIPTKPMVVETFSEYPPLGRFAVRDMRQTVAVGVIKSVDKKDPSGAKVTKAAQKKK

SEQ ID NO: 2953 - DNA, 1350 bp, Avicennia marina
  CDS (1)..(1350)
atgggcaaggaaaagtctcacattaaccttgtggttatcggtcatgttgactctgggaagtccaccacgactggccacttgatctacaagcttggtggtattgacaagcgtgtcattgaaaggtttgagaaggaggctgccgagatgaacaaaagatcattcaagtatgcttgggtgctcgacaagctcaaggctgagcgcgagcgtggcatcaccatcgatattgccttgtggaagtttgaaaccaccaagtactactgcaccgtcatcgatgctcctggacaccgcgactttatcaagaacatgattactggaacctcacaggctgattgtgctgtcctcatcattgactccaccactggtggttttgaagctggtatttccaaggatggacagactcgtgagcatgcattgctttctttcactctaggtgtcaagcaaatgatttgctgctgcaacaagatggatgccaccactccaaaatactcaaaggccagatatgatgaaattgtgaaggaagtctcttcctacatcaagaaggttggatacaaccctgagaagatcccatttgtccccatttctggttttgagggagacaacatgattgagaggtccaccaacctggactggtataagggcccaaccctccttgaagctcttgacatggttcaggagccaaagaggccctcagacaagcccctccgtctcccacttcaggatgtctacaagattggtggtattggaaccgtccctgttggtcgtgtggagactggtatgctgaagcccggtatgcttgtgaccttcggcccctctggcttgacaactgaagttaagtctgttgagatgcaccacgaagccttgcaggaggctcttcctggcgacaatgttgggttcaacgtgaagaatgtttctgttaaggatctcaagcgtggttatgttgcctcaaattctaaggatgatcctgctaagggagccgccagcttcacttcacaggtcattatcatgaaccatcctggtcagattggtaatggctacgcaccagtgcttgactgccacacctcccacattgctgttaagtttgctgagctcgtcaccaagattgacaggcgatctggtaaggaactcgagaaggaacctaagttcttgaagaacggtgatgctggatttgtgaagatgattccaaccaagcccatggttgtggaaaccttctctgaatacccaccactgggtcgttttgctgttcgtgatatgcgtcagacagttgctgttggtgtcataaagagcgtggaaaagaaggagccttcaggtgctaaggtgaccaaggccgctgttaagaagggtgccaagtga

SEQ ID NO: 2954 - protein, 449 aa, Avicennia marina
MGKEKSHINLVVIGHVDSGKSTTTGHLIYKLGGIDKRVIERFEKEAAEMNKRSFKYAWVLDKLKAERERGITIDIALWKFETTKYYCTVIDAPGHRDFIKNMITGTSQADCAVLIIDSTTGGFEAGISKDGQTREHALLSFTLGVKQMICCCNKMDATTPKYSKARYDEIVKEVSSYIKKVGYNPEKIPFVPISGFEGDNMIERSTNLDWYKGPTLLEALDMVQEPKRPSDKPLRLPLQDVYKIGGIGTVPVGRVETGMLKPGMLVTFGPSGLTTEVKSVEMHHEALQEALPGDNVGFNVKNVSVKDLKRGYVASNSKDDPAKGAASFTSQVIIMNHPGQIGNGYAPVLDCHTSHIAVKFAELVTKIDRRSGKELEKEPKFLKNGDAGFVKMIPTKPMVVETFSEYPPLGRFAVRDMRQTVAVGVIKSVEKKEPSGAKVTKAAVKKGAK

SEQ ID NO: 2955 - DNA, 1470 bp, Drosophila melanogaster
  CDS (1)..(1470)
atgtcacatgcatttgccgccgccgtctgccggtccaccgcatccatgtcattggccctgcgctgcagccggcgcgccatgagctctgccagaatgctgcgtatggcgggtgccactgccacctccacggcctgcaaggattggcagagaaacggactacttgctgcgcccagaaccggcaacatgcagcagtacctgcgcgagtacgccaacgagaagaaggtgttcgagcgaaccaagccccattgcaatgtgggcaccattggccatgtggatcacggcaagaccacgctcacggcggccattaccaaggtcctggccgacaagcagctggccgagagcaagaagtacaatgaaatcgacaatgcgcccgaggagaaggctcgtggtattaccatcaatgtagcccacgtggagtaccagacggagacgcgtcactacggccacacagattgtccgggacatgccgattatattaagaacatgatcaccggcacagcccagatggatggcgccattctcgttgtggccgccaccgatggcgccatgccccaaactcgcgagcatatgctgctagccaagcagatcggcattgatcacatcgtggtgttcatcaacaaggtggacgccgccgatgaggagatggtcgacctggtggagatggagatccgagagctgcttaccgagatgggctatgatggtgacaagatccctgtggtaaagggctcggcgatgtgcgccctcgaggacaagagtcccgagatcggcaaggaggcgatcctgaaactgctccaggaggtggatagcttcatccccacgcctgtgcgcgagctggacaagcccttcctgctgcctgttgagaatgtgtattcgattcccggacgcggaaccgtcgtcactggtcgcctggagcgcggagtggtcaagaagggcatggagtgcgagttcgtgggctataacaaggtgctgaagtcgacggtgacgggcgtggagatgttccaccagattctggaggaggcgcaagccggtgatcagctgggagctctggtgcgcggcgttaagcgagatgacatcaagcgcggcatggtcatgtgcaagccgggcagtgtgaaggcactcgatcagctggaggcccaggtgtacatcctgtccaaggatgaaggcggtcgcacaaagcccttcatgtccttcatccaactgcagatgttctcccgcacctgggactgtgccgtgcaggtgcagattcccgataaggagatggtcatgcccggcgaagacaccaagctcattctgcgcctcatccggccaatggtcctggagcagggacaacgcttcacgctgcgtgacggaaacctgaccctgggcactggtgtcgtcaccagcactctgcccccattgactgaatcgcagcgatccgagttgacggagggcaagaaggcgcgcgagaagaaggtggcggctaagaagtag

SEQ ID NO: 2956 - protein, 489 aa, Drosophila melanogaster
MSHAFAAAVCRSTASMSLALRCSRRAMSSARMLRMAGATATSTACKDWQRNGLLAAPRTGNMQQYLREYANEKKVFERTKPHCNVGTIGHVDHGKTTLTAAITKVLADKQLAESKKYNEIDNAPEEKARGITINVAHVEYQTETRHYGHTDCPGHADYIKNMITGTAQMDGAILVVAATDGAMPQTREHMLLAKQIGIDHIVVFINKVDAADEEMVDLVEMEIRELLTEMGYDGDKIPVVKGSAMCALEDKSPEIGKEAILKLLQEVDSFIPTPVRELDKPFLLPVENVYSIPGRGTVVTGRLERGVVKKGMECEFVGYNKVLKSTVTGVEMFHQILEEAQAGDQLGALVRGVKRDDIKRGMVMCKPGSVKALDQLEAQVYILSKDEGGRTKPFMSFIQLQMFSRTWDCAVQVQIPDKEMVMPGEDTKLILRLIRPMVLEQGQRFTLRDGNLTLGTGVVTSTLPPLTESQRSELTEGKKAREKKVAAKK

SEQ ID NO: 2957 - DNA, 1431 bp, Arabidopsis thaliana
  CDS (1)..(1431)
atgccgatttcggctccagccgcttgttcttcctcctctagaattctctgttcctactcctctccttctccttctctctgtcccgccatttccacctctggtaaactcaaaaccctaactctctcttcctccttcctcccttcttactcattaaccaccacctccgcttctcaatccactcgtcgctccttcaccgtccgcgccgctcgtggaaagttcgagaggaagaagcctcatgtcaacatcggaaccatcggtcatgttgaccatgggaaaactactttaaccgcagctctaaccatggctctcgcttccattggttccagcgtcgctaaaaagtacgacgagattgacgctgcgccggaggagagagctcgtggtatcacaatcaacactgctactgttgagtacgagactgagaatcgtcactacgctcacgttgattgtcctggtcacgctgattacgttaagaatatgattaccggagctgcacagatggacggagctatcctcgttgtttccggcgccgatggtcctatgcctcagactaaagagcatatccttttggctaagcaggttggtgttcctgatatggttgtgtttcttaacaaagaggatcaagtagatgatgcagagttgctagagctcgttgagcttgaggttcgtgagcttctctcgtcttatgaatttaacggtgatgatattccgattatctctggttctgctcttttagccgttgagactcttactgagaatcctaaggttaagagaggtgataacaaatgggtagataagatttatgaacttatggatgctgttgatgattacatccctatccctcagagacaaactgaattgccattcttgttagctgttgaggatgtgttctctatcactggacgtggtacggtggctacagggcgtgtcgagagaggtacggttaaggtaggagagactgtagatttagtgggtttgagggagactaggagttacactgtcactggggttgaaatgtttcagaagattcttgatgaggctttagctggtgacaatgtagggttgttgcttaggggtattcaaaaggctgatattcagagaggtatggttttagctaagccgggatcgattactccacataccaagtttgaagcaattatctatgtgttgaagaaagaggaaggtggaaggcattctccattctttgcagggtacaggcctcagttctacatgaggacgactgatgttacgggtaaagtgacgaagatcatgaacgacaaagatgaagagtcgaagatggttatgcccggtgatcgagtgaagattgttgttgagcttattgtgccggtggcttgtgaacaagggatgaggtttgctatcagagaaggaggaaagactgttggtgctggagttattgggacgatcctcgaatga

SEQ ID NO: 2958 - protein, 476 aa, Arabidopsis thaliana
MPISAPAACSSSSRILCSYSSPSPSLCPAISTSGKLKTLTLSSSFLPSYSLTTTSASQSTRRSFTVRAARGKFERKKPHVNIGTIGHVDHGKTTLTAALTMALASIGSSVAKKYDEIDAAPEERARGITINTATVEYETENRHYAHVDCPGHADYVKNMITGAAQMDGAILVVSGADGPMPQTKEHILLAKQVGVPDMVVFLNKEDQVDDAELLELVELEVRELLSSYEFNGDDIPIISGSALLAVETLTENPKVKRGDNKWVDKIYELMDAVDDYIPIPQRQTELPFLLAVEDVFSITGRGTVATGRVERGTVKVGETVDLVGLRETRSYTVTGVEMFQKILDEALAGDNVGLLLRGIQKADIQRGMVLAKPGSITPHTKFEAIIYVLKKEEGGRHSPFFAGYRPQFYMRTTDVTGKVTKIMNDKDEESKMVMPGDRVKIVVELIVPVACEQGMRFAIREGGKTVGAGVIGTILE

SEQ ID NO: 2959 - DNA, 1350 bp, Arabidopsis thaliana
  CDS (1)..(1350)
atgggtaaagagaagtttcacattaacattgtggtcattggtcatgttgattctggaaaatcgaccacaactggtcacttgatctataagcttggtggtattgacaagcgtgtcatcgagaggttcgagaaggaggctgctgagatgaacaagaggtccttcaagtacgcatgggtgttggacaaacttaaggccgagcgtgagcgtggtattaccatcgatattgctctatggaagttcgagaccaccaagtactactgcacagtcattgatgccccaggacatcgtgatttcatcaagaacatgattactggtacctcccaggctgattgtgctgttcttatcattgactccaccactggaggttttgaggctggtatctctaaggatggtcagacccgtgagcacgctcttcttgctttcacccttggtgtcaagcagatgatttgctgttgtaacaagatggatgccaccacccccaaatactccaaggctaggtacgatgaaatcatcaaggaggtgtcttcatacctgaagaaggtcggatacaaccctgacaaaatcccatttgtgccaatctctggattcgagggagacaacatgattgagaggtcaaccaaccttgactggtacaagggaccaactcttcttgaggctcttgaccagatcaacgagcccaagaggccatcagacaagccccttcgtcttccacttcaggatgtctacaagattggtggtattggaacggtgccagtgggacgtgttgagactggtatgatcaagcctggtatggttgttacctttgctcccacagggttgaccactgaggttaagtctgttgagatgcaccacgagtctcttcttgaggcacttcccggtgacaatgttggattcaatgtcaagaattttgctgtcaaggatcttaagagaggatacgttgcctctaactccaaggatgatccagctaagggtgccgccaacttcacctcccaggtcatcatcatgaaccaccctggtcagattggtaacggttacgccccagttctcgattgccacacctctcacattgcagtcaagttctctgagatcttgaccaagattgacaggcgttctggtaaggagattgagaaggagcccaagtttttgaagaatggtgacgctggtatggttaagatgaccccaaccaagcccatggttgttgagactttctccgagtacccacctttgggacgtttcgctgttagggacatgaggcagaccgttgctgttggtgttattaagagcgtggacaagaaggacccaactggagccaaggtcaccaaggctgcagtgaagaagggtgccaaatga

SEQ ID NO: 2960 - protein, 449 aa, Arabidopsis thaliana
MGKEKFHINIVVIGHVDSGKSTTTGHLIYKLGGIDKRVIERFEKEAAEMNKRSFKYAWVLDKLKAERERGITIDIALWKFETTKYYCTVIDAPGHRDFIKNMITGTSQADCAVLIIDSTTGGFEAGISKDGQTREHALLAFTLGVKQMICCCNKMDATTPKYSKARYDEIIKEVSSYLKKVGYNPDKIPFVPISGFEGDNMIERSTNLDWYKGPTLLEALDQINEPKRPSDKPLRLPLQDVYKIGGIGTVPVGRVETGMIKPGMVVTFAPTGLTTEVKSVEMHHESLLEALPGDNVGFNVKNFAVKDLKRGYVASNSKDDPAKGAANFTSQVIIMNHPGQIGNGYAPVLDCHTSHIAVKFSEILTKIDRRSGKEIEKEPKFLKNGDAGMVKMTPTKPMVVETFSEYPPLGRFAVRDMRQTVAVGVIKSVDKKDPTGAKVTKAAVKKGAK

SEQ ID NO: 2961 - DNA, 1350 bp, Stevia rebaudiana
  CDS (1)..(1350)
atgggtaaggaaaagattcatatcagtattgttgtcattggacatgtcgactctggcaagtccacaactaccggccacttaatttacaagttgggtggtattgacaaacgtgtgattgaaagattcgagaaagaagctgctgaaatgaacaaaaggtcattcaaatacgcatgggttcttgacaagctcaaagctgaacgtgaaagaggtatcaccattgatattgcattgtggaagtttgaaaccaccaaatactactgcaccgtcattgatgcacctggacatcgtgacttcatcaagaacatgattactggtacttctcaagctgattgtgcggttctcatcattgattccacaactggtggttttgaagctggtatttcaaaagacggtcaaacccgtgaacatgctcttcttgctttcactcttggtgtgaaacaaatgatttgctgctgtaacaagatggatgccactactccgaagtactcaaaggcgaggtatgaagaaatcgtcaaggaagtttcatcatacttgaagaaggtcggttacaaccccgacaaaatcccattcgtcccaatttctggatttgaaggcgacaacatgattgaaagatccaccaacctcgactggtacaagggtccgaccctacttgaagcacttgaccagatcaatgaaccgaaaagaccatcagacaaacctcttcgtctaccacttcaagacgtgtacaagattggtggtattggaaccgtgccagttggtcgtgttgagaccggtgtgatcaagcccggtatggttgttactttcggaccatctgggttaaccactgaagtcaagtcagttgagatgcaccacgaagcattgaccgaagctcttcccggtgacaatgttgggttcaatgttaagaatgttgcggtcaaggatctcaagcgtggttatgttgcgtcaaactctaaagatgatccggcaaagggtgcggctagtttcacctctcaggttattatcatgaaccatcctggtcagatcggtaacggttatgccccggttctcgattgtcacacctcccacattgctgtcaagttttctgagattttgaccaagattgacagacggtctggtaaggagcttgaaaaggaacccaagttcttaaagaatggagatgcaggtatggttaagatgcttccgactaaacctatggttgttgagacttttgctgagtacccaccgcttggacggtttgctgtgagggacatgcgtcagacggttgcagtcggtgttatcaagagtgttgacaagaaggacccaaccggagccaaggtgaccaaggctgctgtcaagaagggagccaagtga

SEQ ID NO: 2962 - protein, 449 aa, Stevia rebaudiana
MGKEKIHISIVVIGHVDSGKSTTTGHLIYKLGGIDKRVIERFEKEAAEMNKRSFKYAWVLDKLKAERERGITIDIALWKFETTKYYCTVIDAPGHRDFIKNMITGTSQADCAVLIIDSTTGGFEAGISKDGQTREHALLAFTLGVKQMICCCNKMDATTPKYSKARYEEIVKEVSSYLKKVGYNPDKIPFVPISGFEGDNMIERSTNLDWYKGPTLLEALDQINEPKRPSDKPLRLPLQDVYKIGGIGTVPVGRVETGVIKPGMVVTFGPSGLTTEVKSVEMHHEALTEALPGDNVGFNVKNVAVKDLKRGYVASNSKDDPAKGAASFTSQVIIMNHPGQIGNGYAPVLDCHTSHIAVKFSEILTKIDRRSGKELEKEPKFLKNGDAGMVKMLPTKPMVVETFAEYPPLGRFAVRDMRQTVAVGVIKSVDKKDPTGAKVTKAAVKKGAK

SEQ ID NO: 2963 - DNA, 1344 bp, Salsola komarovii
  CDS (1)..(1344)
atgggaaaggaaaagattcatatcagtttggtggtcattggacatgtcgactctggaaagtcgaccaccactggtcacttgatctacaagcttggaggtattgacaagcgtgtgattgagagattcgagaaggaagctgctgagatgaacaagaggtccttcaagtacgcatgggttcttgacaagcttaaggcagagcgtgaacgtggtatcaccatcgatattgccttgtggaagtttgagaccaacaagtactactgcactgtcatcgatgcccctggtcaccgtgactttatcaagaacatgattactggtacctcccaggctgactgtgccatcctcattatcgactccaccactggaggttttgaggctggtatctctaaggatggacagacccgtgagcatgcccttcttgccttcacccttggtgtcaagcaaatgatttgctgctgtaacaagatggatgccaccacacccaagtactcaaagtctaggttcgatgaaattgtcaaggaagtctcatcatacctcaagaaggttggttacaaccctgacaaaatcgcattcgtccccatttctggtttcgagggtgacaacatgattgagaggtccaccaaccttgactggtacaagggaccaacccttcttgaggctcttgacatgatcaacgagccaaagagaccctcagacaagccccttcgtctaccacttcaggatgtctacaagattggtggtattggaactgtgcccgtgggtcgtgttgagactggtgtcttgaagcctggtatggttgttactttcggtcccactggattgactactgaagttaagtcagttgagatgcaccacgagtctctcccagaagctctccctggtgacaacgttgggttcaacgttaagaatgttgctgtcaaggatatcaagcgtggtttcgtggcttctgactccaagaatgaccccgccaaggaggcagcaaacttcactgcccaggtcattatcatgaaccaccctggacagatcggaaacggttacgccccagtgttggattgccacacctctcacattgctgttaagtttgctgagttggtgaccaagatcgacaggcgttcaggtaaggagcttgagaaggagcccaaattcttgaagaatggtgatgctggtatgattaagatggttccaaccaagcctatggtggtggagactttctcggagtacccaccccttggtcgttttgccgtgagggacatgaggcaaactgttgctgttggtgtcatcaagaatgttgagaagaaggacccaactggtgccaaggtcaccaaggctgcccttaagaagaaataa

SEQ ID NO: 2964 - protein, 447 aa, Salsola komarovii
MGKEKIHISLVVIGHVDSGKSTTTGHLIYKLGGIDKRVIERFEKEAAEMNKRSFKYAWVLDKLKAERERGITIDIALWKFETNKYYCTVIDAPGHRDFIKNMITGTSQADCAILIIDSTTGGFEAGISKDGQTREHALLAFTLGVKQMICCCNKMDATTPKYSKSRFDEIVKEVSSYLKKVGYNPDKIAFVPISGFEGDNMIERSTNLDWYKGPTLLEALDMINEPKRPSDKPLRLPLQDVYKIGGIGTVPVGRVETGVLKPGMVVTFGPTGLTTEVKSVEMHHESLPEALPGDNVGFNVKNVAVKDIKRGFVASDSKNDPAKEAANFTAQVIIMNHPGQIGNGYAPVLDCHTSHIAVKFAELVTKIDRRSGKELEKEPKFLKNGDAGMIKMVPTKPMVVETFSEYPPLGRFAVRDMRQTVAVGVIKNVEKKDPTGAKVTKAALKKK

SEQ ID NO: 2965 - DNA, 1344 bp, Suaeda japonica
  CDS (1)..(1344)
atgggtaaggaaaagattcatatcagtttggtggttattggacatgtcgattctggaaagtcgaccaccaccggtcacttgatctacaagcttggtggtattgacaagcgtgtgatcgagagattcgagaaggaagctgctgagatgaacaagaggtccttcaagtacgcttgggttcttgacaagcttaaggcagagcgtgaacgtggtatcaccattgatattgccttgtggaagttcgagaccaacaagtactactgtactgttatcgatgcccctggtcaccgtgactttatcaagaatatgatcactggtacctctcaggctgattgtgctatcctcattattgactccaccaccggaggttttgaggctggtatctccaaggacggtcagactcgtgagcatgctcttctttccttcactcttggtgtgaggcaaatgatttgctgctgtaacaagatggatgccactacccccaagtactcgaaagctaggtacgatgaaatcgtgaaggaagtttcctcttacctcaagaaggttggttacaacccagagaaggttccattcgttcccatctctgggttcgagggtgataacatgattgagaggtctaccaaccttgactggtacaaggggccaactcttcttgaggctcttgacatgatcaacgagccaaagaggccttctgacaagcccctccgtctcccaatccaggatgtctacaagattggtggtattggaactgtccctgtgggtcgtattgagactggtgtcttgaagcctaacatggttgttacctttggtcctactggactgaccactgaagttaagtccgttgagatgcaccacgagtctcttccagaggcactccctggtgacaatgtcggattcaatgttaagaatgtttccatcaaggatctcaagcgtggttacgtggcttctgactccaagaatgaccctgctaagggagcatcaagtttcactgctcaggtcattatcatgaaccaccctggacagattggaaatggttatgcacctgtgcttgactgtcacacctctcacattgctgtcaaatttgctgaactccttaccaagattgacagacgatctggtaaggagctcgagaaggagcccaaattcttgaagaatggtgatgctggtatggttaagatgattcccaccaagcccatggtggtggagacttttgcagagtactcacctcttggtcgttttgccgtgagggacatgaggcagactgttgctgtgggtgtcatcaagagtgttgacaagaaggaaccaactagtgccaaggtcaccaaggctgccatgaagaagaaatga

SEQ ID NO: 2966 - protein, 447 aa, Suaeda japonica
MGKEKIHISLVVIGHVDSGKSTTTGHLIYKLGGIDKRVIERFEKEAAEMNKRSFKYAWVLDKLKAERERGITIDIALWKFETNKYYCTVIDAPGHRDFIKNMITGTSQADCAILIIDSTTGGFEAGISKDGQTREHALLSFTLGVRQMICCCNKMDATTPKYSKARYDEIVKEVSSYLKKVGYNPEKVPFVPISGFEGDNMIERSTNLDWYKGPTLLEALDMINEPKRPSDKPLRLPIQDVYKIGGIGTVPVGRIETGVLKPNMVVTFGPTGLTTEVKSVEMHHESLPEALPGDNVGFNVKNVSIKDLKRGYVASDSKNDPAKGASSFTAQVIIMNHPGQIGNGYAPVLDCHTSHIAVKFAELLTKIDRRSGKELEKEPKFLKNGDAGMVKMIPTKPMVVETFAEYSPLGRFAVRDMRQTVAVGVIKSVDKKEPTSAKVTKAAMKKK

SEQ ID NO: 2967 - DNA, 1350 bp, Bruguiera sexangula
  CDS (1)..(1350)
atgggtaaggagaagattcacattaacattgtggttattggccatgtcgactccggaaagtcaaccacaactggccacttgatttacaagcttggaggtatcgacaagcgtgtgattgagaggtttgagaaggaagctgctgagatgaacaagaggtcattcaagtatgcctgggtgcttgacaagctgaaggctgagcgtgagcgtggtatcaccattgatattgccttgtggaagttcgagacaaccaaatattactgcacggtcattgatgctcctggacatcgtgactttattaagaatatgatcaccgggacttcccaagctgactgtgctgtcctcatcattgactctaccactggtggctttgaggctggtatctctaaagatggtcagacccgcgagcatgccctgcttgccttcacccttggtgttaagcaaatgatttgctgctgcaacaagatggatgctaccacttccaagtattctaaggcaagatatgatgaaattgttaaggaagtgtcatcctacttgaagaaggttggttacaacccagagaagattccttttgtccccatatctggatttgagggtgacaacatgattgagagatccaccaaccttgactggtacaagggcccaactcttcttgaggccctggacatgatccaggagccaaagaggccatcagataagcccctccgtctcccacttcaggatgtgtacaagattggtggtattgggacagtcccagtgggtcgtgttgaaactggtgtcctgaagcctggaatggttgttacttttggtccctcaggactgaccactgaagttaagtctgtggagatgcaccatgaagctctccaagaggctcttcccggagacaacgttggcttcaatgttaagaatgtttccgtgaaggatcttaagcggggttatgttgcctcaaactccaaggatgatcctgccaaggaggcatctagcttcacctcccaagttatcatcatgaaccaccctggtcagattggaaatggttatgcccctgttctggattgccacacctctcacattgctgtcaagttttctgagatcctcacaaagattgataggcgatctggcaaggagcttgaaaaggagcccaagttcttgaagaatggtgatgctgggttcgtgaagatgattccgaccaagcctatggtggtggaaactttctccgagtatcctccgcttggtagatttgccgtcagggacatgcgccagactgttgcagtgggagtcatcaagagtgtcgagaaaaaggaaccttctggagctaaggtgactaaatctgctgccaagaagggtggcaaatga

SEQ ID NO: 2968 - protein, 449 aa, Bruguiera sexangula
MGKEKIHINIVVIGHVDSGKSTTTGHLIYKLGGIDKRVIERFEKEAAEMNKRSFKYAWVLDKLKAERERGITIDIALWKFETTKYYCTVIDAPGHRDFIKNMITGTSQADCAVLIIDSTTGGFEAGISKDGQTREHALLAFTLGVKQMICCCNKMDATTSKYSKARYDEIVKEVSSYLKKVGYNPEKIPFVPISGFEGDNMIERSTNLDWYKGPTLLEALDMIQEPKRPSDKPLRLPLQDVYKIGGIGTVPVGRVETGVLKPGMVVTFGPSGLTTEVKSVEMHHEALQEALPGDNVGFNVKNVSVKDLKRGYVASNSKDDPAKEASSFTSQVIIMNHPGQIGNGYAPVLDCHTSHIAVKFSEILTKIDRRSGKELEKEPKFLKNGDAGFVKMIPTKPMVVETFSEYPPLGRFAVRDMRQTVAVGVIKSVEKKEPSGAKVTKSAAKKGGK

SEQ ID NO: 2969 - DNA, 1347 bp, Solanum tuberosum
  CDS (1)..(1347)
atgggtaaagagaagattcacatcagcattgtggtcattggccacgtcgactctggaaagtcgactaccactggtcacttgatctacaagcttggtggaattgacaagcgtgttattgagaggttcgagaaggaagctgctgagatgaacaagaggtcattcaagtatgcctgggtgcttgacaaacttaaggctgaacgtgagcgtggtatcaccattgatattgctttgtggaagtttgagaccactaagtactactgcactgtgattgatgcccccggacacagagactttatcaagaacatgatcactggtacttcccaggctgactgtgctgtcctcattattgactccaccactggtggttttgaagctggtatctctaaagatggtcagacccgtgaacatgcattgcttgctttcacccttggtgtcaagcaaatgatctgctgctgtaacaagatggatgctaccacccccaagtactccaaggctaggtatgatgaaattgtgaaggaagtttcttcctacctcaagaaggtcggttacaaccctgacaaaatcccctttgtccctatctctggttttgaaggagataacatgattgagaggtctaccaacctcgactggtacaagggaccaaccctccttgacgctcttgaccagattaatgagcccaagaggccatcagacaaacccctccgtcttccactgcaggatgtttacaagattggtggtattggaactgtacctgttggtcgtgttgagactggtgtgatcaagcctggtatggttgtgacctttggccctactggtttgacaactgaagtcaagtctgtagagatgcaccatgaagctctccaggaggcactccccggtgacaatgttgggttcaatgttaagaatgttgctgttaaggatcttaagcgtggttttgttgcatcaaactccaaggatgacccagccaagggggcagccagcttcactgcccaggtcatcatcatgaaccatcctggccagattggaaacggatatgctccagtgcttgactgtcacacttcccacattgctgtcaagtttgctgagatcttgaccaagattgacaggcgttcaggtaaggaacttgagaaggagcctaagttcttgaagaacggtgatgctggtatggttaagatgattcccaccaagcccatggttgttgagacctttgctgaatacccaccattgggtcgttttgctgtgagagacatgaggcaaactgttgctgtcggtgttgtcaagaatgttgacaagaaggacccaactggtgccaaagtgaccaaggctgcccagaagaagggaaagtga

SEQ ID NO: 2970 - protein, 448 aa, Solanum tuberosum
MGKEKIHISIVVIGHVDSGKSTTTGHLIYKLGGIDKRVIERFEKEAAEMNKRSFKYAWVLDKLKAERERGITIDIALWKFETTKYYCTVIDAPGHRDFIKNMITGTSQADCAVLIIDSTTGGFEAGISKDGQTREHALLAFTLGVKQMICCCNKMDATTPKYSKARYDEIVKEVSSYLKKVGYNPDKIPFVPISGFEGDNMIERSTNLDWYKGPTLLDALDQINEPKRPSDKPLRLPLQDVYKIGGIGTVPVGRVETGVIKPGMVVTFGPTGLTTEVKSVEMHHEALQEALPGDNVGFNVKNVAVKDLKRGFVASNSKDDPAKGAASFTAQVIIMNHPGQIGNGYAPVLDCHTSHIAVKFAEILTKIDRRSGKELEKEPKFLKNGDAGMVKMIPTKPMVVETFAEYPPLGRFAVRDMRQTVAVGVVKNVDKKDPTGAKVTKAAQKKGK

SEQ ID NO: 2971 - DNA, 1395 bp, Trichophyton rubrum
  CDS (1)..(1395)
atgggtaaagatgagaagggccacattaacttggtcgttatcggccacgtcgattccggcaaatccaccactactggtcacttgatctacaagtgcggtggtatcgaccagcgtaccattgagaagttcgagaaggaagccgaagagttgggcaagaagtccttcaagtacgcctgggttcttgacaagctcaaggccgagcgtgagcgtggtatcaccatcgatatcgccctctggaagttcgagacccccaagtacaatgtcaccgtcattgacgcccccggtcaccgtgacttcatcaagaacatgatcactggtacctcccaggccgactgtgctattctcatcattgctgccggtactggtgagttcgaggctggtatctccaaggatggccagacccgtgagcaccgctctgctcgccttcacccttgggtgtcaaagcagctcatcgttgccatcaacaagatggacaccaccaactggtccgagacccgtttcaaggaaatcatcaagggaagtcaccaacttcatcaagaaaggttggctaccgaccccaaggggtgttccattttcgttccaatctctggtttcaacggtgacaacatgattgaaggcttcaccaactgcccatggtacaagggatggaacaaggagaccaaggccggtggtgccaagactggcaagaccctcctcgaggccatcgatgccatcgacatgccaacccgtcctaccgacaagcccctccgtctcccactccaggatgtctacaagatctctggtatcggaactgtaccagtcggtcgtgttgagaccggtatcatcaagcccggtatggtcgtcaccttcgcccctgccaacgtcaccactgaagtcaagtccgtcgaaatgcaccaccagcagcttcagcagggtgtccccggtgacaacgtcggcttcaacgtcaagaacgtttccgtcaaggaagtccgccgtggtaacgttgccggtgactccaagaacgacccaccatccggctgtgcctccttcaacgcccaggtcatcgtcctcaaccaccccggccagatcggtgctggttacgccccagtcctcgactgccacactgctcacattgcttgcaagttcgctgagctcctcgagaagattgaccgccgtaccggtaaatccgtcgaagccaaccccaagttcgtcaagtctggtgatgccgctatcgccaagatggttccatccaagcctatgtgcgttgaggctttcactgactaccccccacttggtcgtttcgccgtccgtgacatgagacagaccgttgccgtcggtgtcatcaaggctgttgagaaggccaccggtggtgctggcaaggtcaccaagtccgctgccaaggctggcaagaagtaa

SEQ ID NO: 2972 - protein, 464 aa, Trichophyton rubrum
MGKDEKGHINLVVIGHVDSGKSTTTGHLIYKCGGIDQRTIEKFEKEAEELGKKSFKYAWVLDKLKAERERGITIDIALWKFETPKYNVTVIDAPGHRDFIKNMITGTSQADCAILIIAAGTGEFEAGISKDGQTREHRSARLHPWVSKQLIVAINKMDTTNWSETRFKEIIKGSHQLHQERLATDPKGCSIFVPISGFNGDNMIEGFTNCPWYKGWNKETKAGGAKTGKTLLEAIDAIDMPTRPTDKPLRLPLQDVYKISGIGTVPVGRVETGIIKPGMVVTFAPANVTTEVKSVEMHHQQLQQGVPGDNVGFNVKNVSVKEVRRGNVAGDSKNDPPSGCASFNAQVIVLNHPGQIGAGYAPVLDCHTAHIACKFAELLEKIDRRTGKSVEANPKFVKSGDAAIAKMVPSKPMCVEAFTDYPPLGRFAVRDMRQTVAVGVIKAVEKATGGAGKVTKSAAKAGKK

SEQ ID NO: 2973 - DNA, 1344 bp, Saccharum hybrid cultivar CP65
  CDS (1)..(1344)
atgggtaaggagaagactcacatcaacattgtggtcattggccatgtcgactctggcaagtcgaccaccactggccacctgatctacaagcttggtggtattgacaagcgtgtgatcgagaggttcgagaaagaggctgcggagatgaacaagcgttcattcaagtatgcgtgggtgcttgacaagctcaaggccgagcgtgagagaggtatcacaattgatattgccctgtggaagtttgagaccaccaagtactactgtactgtcattgatgcccctggacaccgtgacttcatcaagaatatgatcactggtacttcccaggctgactgtgctgttcttatcattgacttcaccactggtggttttgaggctggtatcttcaaggatggtcagacccgtgagcatgctctccttgctttcacacttggagtgaagcagatgatttgctgctgcaacaagatggacgccaccacacccaagtactccaaggcccgttatgatgagattgtgaaggaagtctcttcctacctgaagaaggttgggtacaaccctgacaagatccactttgttcccatctctggattcgaaggtgacaacatgattgagaggtccactaaccttgactggtacaagggcccaaccctccttgaggctttggacttgatcaatgagccgaagaggccttcagacaagcccctgcggctcccccttcaggatgtgtacaagattggtggtattggaactgttcctgttgggcgtgttgagactggtgtcatcaagcccggtatggtggttaccttcggtcccagtggccttactactgaggttaagtctgttgagatgcaccacgaggctctccaggaggctcttcctggtgacaacgttggcttcaacgttaagaatgttgctgtgaaggatctgaagcgtgggtatgtggcctccaactccaaggatgaccctgccaaggaggctgctagcttcacctcccaggtcatcatcatgaaccaccctgggcagatcggcaacggctacgccccagtgctggactgccacacctcacacattgctgtcaagtttgctgagcttgtaaccaagattgataggcggtctggcaaggagcttgagaaggagcccaaattcctcaagaacggtgatgctggtatggtgaagatggttcccacaaagcccatggtggtggagaccttctctgaatatcctcctcttggtcgctttgctgtgcgggacatgaggcaaacggtggctgtcggagtcatcaagagtgtggagaagaaggacccaactggagccaaggtgaccaaggctgccgccaagaagaaatga

SEQ ID NO: 2974 - protein, 447 aa, Saccharum hybrid cultivar CP65
MGKEKTHINIVVIGHVDSGKSTTTGHLIYKLGGIDKRVIERFEKEAAEMNKRSFKYAWVLDKLKAERERGITIDIALWKFETTKYYCTVIDAPGHRDFIKNMITGTSQADCAVLIIDFTTGGFEAGIFKDGQTREHALLAFTLGVKQMICCCNKMDATTPKYSKARYDEIVKEVSSYLKKVGYNPDKIHFVPISGFEGDNMIERSTNLDWYKGPTLLEALDLINEPKRPSDKPLRLPLQDVYKIGGIGTVPVGRVETGVIKPGMVVTFGPSGLTTEVKSVEMHHEALQEALPGDNVGFNVKNVAVKDLKRGYVASNSKDDPAKEAASFTSQVIIMNHPGQIGNGYAPVLDCHTSHIAVKFAELVTKIDRRSGKELEKEPKFLKNGDAGMVKMVPTKPMVVETFSEYPPLGRFAVRDMRQTVAVGVIKSVEKKDPTGAKVTKAAAKKK

SEQ ID NO: 2975 - DNA, 1350 bp, Arabidopsis thaliana
  CDS (1)..(1350)
atgggtaaagagaagtttcacatcaacattgtggtcattggccacgtcgattctggaaagtcgacaaccactggacacttgatctacaagttgggtggtattgacaagcgtgtgatcgagaggttcgagaaggaggctgctgagatgaacaagaggtccttcaagtacgcatgggtgttggacaaacttaaggctgagcgtgagcgtggtatcaccattgacattgctctctggaagttcgagaccaccaagtactactgcactgtcattgatgctcctggtcatcgtgatttcatcaagaacatgatcactggtacctcccaggctgattgtgctgtccttatcattgactccaccactggtggttttgaggctggtatctccaaggatggtcagacccgtgagcacgctctccttgctttcacccttggtgtcaagcagatgatctgctgttgtaacaatatcgatgccactacccccaagtactccaaggccaggtacgatgaaatcatcaaggaggtgtcttcctacttgaagaaggttggttacaaccccgacaaaatcccatttgtgcccatctctggatttgagggtgacaacatgattgagaggtccaccaaccttgactggtacaagggaccaactctccttgaggctcttgaccagatcaacgagcccaagaggccgtcagacaagccccttcgtctcccacttcaggatgtctacaagattggtggtattggaacggtgccagtgggacgtgttgagactggtatgatcaagcctggtatggttgtgacctttgctcccacaggattgaccactgaggtcaagtctgttgagatgcaccacgagtctcttcttgaggcacttccaggtgacaacgttgggttcaatgttaagaatgttgccgtgaaggatcttaagagagggtacgtcgcctccaactccaaggatgaccctgccaagggtgctgctaacttcacctcccaggtcatcatcatgaaccaccctggtcagattggtaacggttacgccccagtcttggattgccacacctctcacattgcagtcaagttctctgagatcttgaccaagattgacaggcgttctggtaaggagattgagaaggagcccaaattcttgaagaatggtgatgctggtatggtgaagatgactccaaccaagcccatggttgtggagaccttctctgagtacccaccacttggacgtttcgctgttagggacatgaggcagactgttgcagtcggtgttatcaagagtgttgacaagaaggacccaaccggagccaaggttaccaaggctgcagttaagaagggtgcaaagtga

SEQ ID NO: 2976 - protein, 449 aa, Arabidopsis thaliana
MGKEKFHINIVVIGHVDSGKSTTTGHLIYKLGGIDKRVIERFEKEAAEMNKRSFKYAWVLDKLKAERERGITIDIALWKFETTKYYCTVIDAPGHRDFIKNMITGTSQADCAVLIIDSTTGGFEAGISKDGQTREHALLAFTLGVKQMICCCNNIDATTPKYSKARYDEIIKEVSSYLKKVGYNPDKIPFVPISGFEGDNMIERSTNLDWYKGPTLLEALDQINEPKRPSDKPLRLPLQDVYKIGGIGTVPVGRVETGMIKPGMVVTFAPTGLTTEVKSVEMHHESLLEALPGDNVGFNVKNVAVKDLKRGYVASNSKDDPAKGAANFTSQVIIMNHPGQIGNGYAPVLDCHTSHIAVKFSEILTKIDRRSGKEIEKEPKFLKNGDAGMVKMTPTKPMVVETFSEYPPLGRFAVRDMRQTVAVGVIKSVDKKDPTGAKVTKAAVKKGAK

SEQ ID NO: 2977 - DNA, 1344 bp, Elaeis oleifera
  CDS (1)..(1344)
atgggaaaggaaaaggtacacattaacattgtggtcattggccatgtcgattctggcaagtcaaccaccactgggcaccttatctacaagcttggtggtattgacaagcgtgtgattgagagattcgaaaaggaagcagctgaaatgaacaagaggtcattcaagtatgcttgggttcttgacaagctgaaggccgagcgagaacgtggtatcacaattgatattgctctgtggaagtttgagaccacaaagtactactgcactgtcattgatgcccctgggcatcgcgacttcatcaagaacatgatcactggcacctcccaggctgactgtgctgtccttatcatagactccacaactggtggttttgaagcaggtatcttcaaggatggacagactcgtgaacatgcattgcttgcctttactcttggtgtcaagcagatgatctgctgctgcaacaagatggatgccactacttccaagtattcaaaggctaggtatgatgaaattgtcaaggaagtctcttcctatctgaagaaggtcggttacaatcctgataagattcccttcgttccaatctctgggtttgaaggtgataacatgattgagaggtccaccaaccttgactggtacaagggccaaacccttcttgaggctttggacttgatacaggagcccaagaggccttcagacaagcccctccgtctttcacttcaggatgggtacaaaattggtggtatcggcactgtccaagttggacgtgttgagactggtgtcattaagcctggtatggtggttacttttgggccaactggtcttactactgaggtcaagtccgttgagatgcaccatgaggctctccaggaggcccttccaggtgataatgttggcttcaacgttaagaatgttgctgtcaaggatctcaagcgtgggtatgttgcttccaactccaaggatgatcccgcaaaggaggctgccaactttatcgctcaggtcatcatcatgaaccaccctggccagattggcaatggctatgccccagttctggactgccacacctcccatattgctgttaagtttgccgagctcgttactaagattgacaggcggtctggtaaggaacttgagaaagagcccaagtttttaaagaatggtgatgcaggttttgtgaagatgcttcccaccaagcccatggttgttgagaccttctctgagtacccccctcttggtcgatttgctgtgagggacatgcgccagaccgtagcagtgggtgtcatcaagagcgtggagaagaaggatccaactggtgccaagatcaccaaggcagctgctaagaagaagtga

SEQ ID NO: 2978 - protein, 447 aa, Elaeis oleifera
MGKEKVHINIVVIGHVDSGKSTTTGHLIYKLGGIDKRVIERFEKEAAEMNKRSFKYAWVLDKLKAERERGITIDIALWKFETTKYYCTVIDAPGHRDFIKNMITGTSQADCAVLIIDSTTGGFEAGIFKDGQTREHALLAFTLGVKQMICCCNKMDATTSKYSKARYDEIVKEVSSYLKKVGYNPDKIPFVPISGFEGDNMIERSTNLDWYKGQTLLEALDLIQEPKRPSDKPLRLSLQDGYKIGGIGTVQVGRVETGVIKPGMVVTFGPTGLTTEVKSVEMHHEALQEALPGDNVGFNVKNVAVKDLKRGYVASNSKDDPAKEAANFIAQVIIMNHPGQIGNGYAPVLDCHTSHIAVKFAELVTKIDRRSGKELEKEPKFLKNGDAGFVKMLPTKPMVVETFSEYPPLGRFAVRDMRQTVAVGVIKSVEKKDPTGAKITKAAAKKK

SEQ ID NO: 2979 - DNA, 1350 bp, Arabidopsis thaliana
  CDS (1)..(1350)
atgggtaaagagaagtttcacatcaacattgtggtcattggccacgtcgattctggaaagtcgacaaccactggacacttgatctacaagttgggtggtattgacaagcgtgtgatcgagaggttcgagaaggaggctgctgagatgaacaagaggtccttcaagtacgcatgggtgttggacaaacttaaggctgagcgtgagcgtggtatcaccattgacattgctctctggaagttcgagaccaccaagtactactgcactgtcattgatgctcctggtcatcgtgatttcatcaagaacatgatcactggtacctcccaggctgattgtgctgtccttatcattgactccaccactggtggttttgaggctggtatctccaaggatggtcagacccgtgagcacgctctccttgctttcacccttggtgtcaagcagatgatctgctgttgtaacaagatggatgccactacccccaagtactccaaggccaggtacgatgaaatcatcaaggaggtgtcttcctacttgaagaaggttggttacaaccccgacaaaatcccatttgtgcccatctctggatttgagggtgacaacatgattgagaggtccaccaaccttgactggtacaagggaccaactctccttgaggctcttgaccagatcaacgagcccaagaggccgtcagacaagccccttcgtctcccacttcaggatgtctacaagattggtggtattggaacggtgccagtgggacgtgttgagactggtatgatcaagcctggtatggttgtgacctttgctcccacaggattgaccactgaggtcaagtctgttgagatgcaccacgagtctcttcttgaggcacttccaggtgacaacgttgggttcaatgttaagaatgttgccgtgaaggatcttaagagagggtacgtcgcctccaactccaaggatgaccctgccaagggtgctgctaacttcacctcccaggtcatcatcatgaaccaccctggtcagattggtaacggttacgccccagtcttggattgccacacctctcacattgcagtcaagttctctgagatcttgaccaagattgacaggcgttctggtaaggagattgagaaggagcccaaattcttgaagaatggtgatgctggtatggtgaagatgactccaaccaagcccatggttgtggagaccttctctgagtacccaccacttggacgtttcgctgttagggacatgaggcagactgttacagtcagtgttatcaagagtgttgacaagaaggacccaaccggagccaaggttaccaaggctgcagttaagaagggtgcaaagtga

SEQ ID NO: 2980 - protein, 449 aa, Arabidopsis thaliana
MGKEKFHINIVVIGHVDSGKSTTTGHLIYKLGGIDKRVIERFEKEAAEMNKRSFKYAWVLDKLKAERERGITIDIALWKFETTKYYCTVIDAPGHRDFIKNMITGTSQADCAVLIIDSTTGGFEAGISKDGQTREHALLAFTLGVKQMICCCNKMDATTPKYSKARYDEIIKEVSSYLKKVGYNPDKIPFVPISGFEGDNMIERSTNLDWYKGPTLLEALDQINEPKRPSDKPLRLPLQDVYKIGGIGTVPVGRVETGMIKPGMVVTFAPTGLTTEVKSVEMHHESLLEALPGDNVGFNVKNVAVKDLKRGYVASNSKDDPAKGAANFTSQVIIMNHPGQIGNGYAPVLDCHTSHIAVKFSEILTKIDRRSGKEIEKEPKFLKNGDAGMVKMTPTKPMVVETFSEYPPLGRFAVRDMRQTVTVSVIKSVDKKDPTGAKVTKAAVKKGAK

SEQ ID NO: 2981 - DNA, 1194 bp, Streptomyces aureofaciens
  CDS (1)..(1194): transl_table=11
gtggccaaggcgaagttcgagcggacgaagccccacgtcaacatcggcaccatcggtcacatcgaccacggcaagaccacgctgaccgcggccatcaccaaggtgctgcacgacgcgtacccggagatcaaccccttcacgccgttcgaccagatcgacaaggccccggaggagcgtcagcgcggtatcaccatctcgatcgcgcacgtcgagtaccagaccgaggcgcgtcactacgcccacgtcgactgcccgggtcacgctgactacatcaagaacatgatcaccggtgccgcccagatggacggcgccatcctggtggtcgccgccaccgacggcccgatgccgcagaccaaggagcacgtcctcctggcccgccaggtcggcgttccgtacatcgtcgtcgccctgaacaaggccgacatggtggacgacgaggagatcctggagctcgtcgagctcgaggtgcgcgagctcctctcggagtacgagttcccgggcgacgacctgccggtcgtccgcgtctccgccctgaaggccctcgagggcgacaaggagtggggcgagaagctcctcggcctcatgcacgcggtcgacgagaacatccccaccccggcccgcgccgtggaccagccgttcctgatgccgatcgaggacgtcttcacgatcaccggtcgtggcaccgtcgtcaccggtcgtatcgagcgcggcatcctcaaggtcaacgagaccgtcgacatcatcggcatcaagaccgagaagaccaccaccacggtcaccggcatcgagatgttccgcaagctgctcgacgagggccaggccggtgagaacgtcggtctgctgctccgtggcatcaagcgcgaggacgtcgagcgcggccaggtcatcatcaagccgggttcggttaccccgcacaccgacttcgaggcccaggcctacatcctgtcgaaggacgagggtggccgccacaccccgttcttcaacaactaccgcccgcagttctactttcgtaccacggacgtgaccggcgtcgtgaccctccccgagggcaccgagatggtcatgccgggcgacaacaccgccatgaccgtcgcgctgatccagcccgtcgccatggaggagggcctgaagttcgccatccgtgagggtggccgtaccgtcggcgccggccaggtcaccaagatcgtcaagtaa

SEQ ID NO: 2982 - protein, 397 aa, Streptomyces aureofaciens
MAKAKFERTKPHVNIGTIGHIDHGKTTLTAAITKVLHDAYPEINPFTPFDQIDKAPEERQRGITISIAHVEYQTEARHYAHVDCPGHADYIKNMITGAAQMDGAILVVAATDGPMPQTKEHVLLARQVGVPYIVVALNKADMVDDEEILELVELEVRELLSEYEFPGDDLPVVRVSALKALEGDKEWGEKLLGLMHAVDENIPTPARAVDQPFLMPIEDVFTITGRGTVVTGRIERGILKVNETVDIIGIKTEKTTTTVTGIEMFRKLLDEGQAGENVGLLLRGIKREDVERGQVIIKPGSVTPHTDFEAQAYILSKDEGGRHTPFFNNYRPQFYFRTTDVTGVVTLPEGTEMVMPGDNTAMTVALIQPVAMEEGLKFAIREGGRTVGAGQVTKIVK

SEQ ID NO: 2983 - DNA, 1350 bp, Arabidopsis thaliana
  CDS (1)..(1350)
atgggtaaagagaagtttcacatcaacattgtggtcattggccacgtcgattctggaaagtcgacaaccactggacacttgatctacaagttgggtggtattgacaagcgtgtgatcgagaggttccagaaggaggctgctgagatgaacaagaggtccttcaagtacgcatgggtgttggacaaacttaaggctgagcgtgagcgtggtatcaccattgacattgctctctggaagatcgagaccaccaagtactactgcactggcattgatgctcctggtcatcgtgatttcatcaagaacatgatcactggtacctcccaggctgattgtgctgtccttatcattgactccaccactggtggttttgaggctggtatctccaaggatggtcagacccgtgagcacgctctccttgctttcacccttggtgtcaagcagatgatctgctgttgtaacaagatggatgccactacccccaagtactccaaggccaggtacgatgaaatcatcaaggaggtgtcttcctacttgaagaaggttggttacaaccccgacaaaatcccatttgtgcccatctctggatttgagggtgacaacatgattgagaggtccaccaaccttgactggtacaagggaccaactctccttgaggctcttgaccagatcaacgagcccaagaggccgttagacaagccccttcgtctcccacttcaggatgtctacaagattggtggtattggaacggtgccagtgggacgtgttgagactggtatgatcaagcctggtatggttgtgacctttgctcccacaggattgaccactgaggtcaagtctgttgagatgcaccacgagtctcttcttgaggcacttccaggtgacaacgttgggttcaatgttaagaatgttgccgtgaaggatcttaagagagggtacgtcgcctccaactccaaggatgaccctgccaagggtgctgctaacttcacctcccaggtcatcatcatgaaccaccctggtcagattggtaacggttacgccccagtcttggattgccacacctctcacattgcagtcaagttctctgagatcttgaccaagattgacaggcgttctggtaaggagattgagaaggagcccaaattcttgaagaatggtgatgctggtatggtgaagatgactccaaccaagcccatggttgtggagaccttctctgagtacccaccacttggacgtttcgctgttagggacatgaggcagactgttgcagtcggtgttatcaagagtgttgacaagaaggacccaaccggagccaaggttaccaaggctgcagttaagaagggtgcaaagtga

SEQ ID NO: 2984 - protein, 449 aa, Arabidopsis thaliana
MGKEKFHINIVVIGHVDSGKSTTTGHLIYKLGGIDKRVIERFQKEAAEMNKRSFKYAWVLDKLKAERERGITIDIALWKIETTKYYCTGIDAPGHRDFIKNMITGTSQADCAVLIIDSTTGGFEAGISKDGQTREHALLAFTLGVKQMICCCNKMDATTPKYSKARYDEIIKEVSSYLKKVGYNPDKIPFVPISGFEGDNMIERSTNLDWYKGPTLLEALDQINEPKRPLDKPLRLPLQDVYKIGGIGTVPVGRVETGMIKPGMVVTFAPTGLTTEVKSVEMHHESLLEALPGDNVGFNVKNVAVKDLKRGYVASNSKDDPAKGAANFTSQVIIMNHPGQIGNGYAPVLDCHTSHIAVKFSEILTKIDRRSGKEIEKEPKFLKNGDAGMVKMTPTKPMVVETFSEYPPLGRFAVRDMRQTVAVGVIKSVDKKDPTGAKVTKAAVKKGAK

SEQ ID NO: 2985 - DNA, 1350 bp, Arabidopsis thaliana
  CDS (1)..(1350)
atgggtaaagagaagtttcacatcaacattgtggtcattggccacgtcgattctggaaagtcgacaaccactggacacttgatctacaagttgggtggtattgacaagcgtttgatcgagaggttcgagaaggaggctgctgagatgaacaagaggtccttcaagtacgcatgggtgttggacaaacttaaggctgagcgtgagcgtggtatcaccattgacattgctctctggaagttcgagaccaccaagtactactgcactgtcattgatgctcctggtcatcgtgatttcatcaagaacatgatcactggtacctcccaggctgattgtgctgtccttatcattgactccaccactggtggttttgaggctggtatctccaaggatggtcagacccgtgagcacgctctccttgctttcacccttggtgtcaagcagatgatctgctgttgtaacaagatggatgccactacccccaagtactccaaggccaggtacgatgaaatcatcaaggaggtgtcttcctacttgaagaaggttggttacaaccccgacaaaatcccatttgtgcccatctctggatttgagggtgacaacatgattgagaggtccaccaaccttgactggtacaagggaccaactctccttgaggctcttgaccagatcaacgagcccaagaggccgtcagacaagccccttcgtctcccacttcaggatgtctacaagattggtggtattggaacggtgccagtgggacgtgttgagactggtatgatcaagcctggtatggttgtgacctttgctcccacaggattgaccactgaggtcaagtctgttgagatgcaccacgagtctcttcttgaggcacttccaggtgacaacgttgggttcaatgttaagaatgttgccgtgaaggatcttaagagagggtacgtcgcctccaactccaaggatgaccctgccaagggtgctgctaacttcacctcccaggtcatcatcatgaaccaccctggtcagattggtaacggttacgccccagtcttggattgccacacctctcacattgcagtcaagttctctgagatcttgaccaagattgacaggcgttctggtaaggagattgagaaggagcccaaattcttgaagaatggtgatgctggtatggtgaagatgactccaaccaagcccatggttgtggagaccttctctgagtacccaccacttggacgtttcgctgttagggacatgaggcagactgttgcagtcggtgttatcaagagtgttgacaagaaggacccaaccggagccaaggttaccaaggctgcagttaagaagggtgcaaagtga

SEQ ID NO: 2986 - protein, 449 aa, Arabidopsis thaliana
MGKEKFHINIVVIGHVDSGKSTTTGHLIYKLGGIDKRLIERFEKEAAEMNKRSFKYAWVLDKLKAERERGITIDIALWKFETTKYYCTVIDAPGHRDFIKNMITGTSQADCAVLIIDSTTGGFEAGISKDGQTREHALLAFTLGVKQMICCCNKMDATTPKYSKARYDEIIKEVSSYLKKVGYNPDKIPFVPISGFEGDNMIERSTNLDWYKGPTLLEALDQINEPKRPSDKPLRLPLQDVYKIGGIGTVPVGRVETGMIKPGMVVTFAPTGLTTEVKSVEMHHESLLEALPGDNVGFNVKNVAVKDLKRGYVASNSKDDPAKGAANFTSQVIIMNHPGQIGNGYAPVLDCHTSHIAVKFSEILTKIDRRSGKEIEKEPKFLKNGDAGMVKMTPTKPMVVETFSEYPPLGRFAVRDMRQTVAVGVIKSVDKKDPTGAKVTKAAVKKGAK

SEQ ID NO: 2987 - DNA, 1425 bp, Pelargonium graveolens
  CDS (1)..(1425)
atggcactaccagcaatttcagccaagctcttatgcccacacgcctctccttctcctctctccactctctcactcccctccacctccttctccactaaaccctcaattctcaccccaaccaatctctcctccacctccctcaacccctccaccgccgccatttccacgcgccgccgccgcgccttcaccgtccgcgccgcccgcggcaagttcgagcgcaagaagccccatgtcaacatcggcaccatcggccacgtcgaccacggcaagaccaccctcaccgccgccctcaccatggccctcgcctccttaggcaacagcgcccccaaaaagtacgacgagatcgatgccgcgccggaggagcgagcccgcggcatcaccatcaacaccgccaccgtggagtacgagaccgagaaccgccactacgcccacgtggactgccccggccacgccgattacgtcaagaacatgatcaccggagctgctcagatggacggagccatcctcgtggtctccggcgccgacggcccgatgccacagacgaaggagcacattttgctggccaagcaggttggtgtgcccaacatggtggtgttcctcaacaagcaggaccaggttgatgatgaggagctcttggagcttgttgaattggaggtgcgtgagcttctttctgcatatgaattccctggtgatgaagtgcccatcatttccgggtcggctctgttagctttggaggctcttatggccaatcccgccattaaacgtggcgagaaccaatgggttgacaaaatctttagccttatggattctgtggatagctacattcctctccctcagcgccagactgaccttccgtttttgctagctgttgaggatgtgttttcaatcaccggacgtggtaccgttgccacgggtcgtgttgagaggggtacggttaggatcggagagactgtggagatagttggtttgagggataccagaagtgttactgtcaccggagtggaaatgttccagaaaattcttgatgaggcattggctggggacaatgtcgggttgttgcttagaggtgttcagaaggaggatatcacgagagggatggttctcgccaagcccggcacaatcacaccccacaccaaattctctgccattgtgtatgtcttgaagaaggaagagggtgggaggcattcgcctttctttgccggatacaggccccaattctttgtgagaacgactgatgttactggcaaggttgccaccattatgaatgataaggatgaggagtctaagatggttatgcctggtgatcgtgtcaagatggttgttgagcttattttgcccattgcttgtgagcagggcatgcggtttgctattagagaaggagggaagactgttggagccggtgttatttcatccatcattgagtga

SEQ ID NO: 2988 - protein, 474 aa, Pelargonium graveolens
MALPAISAKLLCPHASPSPLSTLSLPSTSFSTKPSILTPTNLSSTSLNPSTAAISTRRRRAFTVRAARGKFERKKPHVNIGTIGHVDHGKTTLTAALTMALASLGNSAPKKYDEIDAAPEERARGITINTATVEYETENRHYAHVDCPGHADYVKNMITGAAQMDGAILVVSGADGPMPQTKEHILLAKQVGVPNMVVFLNKQDQVDDEELLELVELEVRELLSAYEFPGDEVPIISGSALLALEALMANPAIKRGENQWVDKIFSLMDSVDSYIPLPQRQTDLPFLLAVEDVFSITGRGTVATGRVERGTVRIGETVEIVGLRDTRSVTVTGVEMFQKILDEALAGDNVGLLLRGVQKEDITRGMVLAKPGTITPHTKFSAIVYVLKKEEGGRHSPFFAGYRPQFFVRTTDVTGKVATIMNDKDEESKMVMPGDRVKMVVELILPIACEQGMRFAIREGGKTVGAGVISSIIE

SEQ ID NO: 2989 - DNA, 1350 bp, Arabidopsis thaliana
  CDS (1)..(1350)
atgggtaaagagaagtttcacattaacattgtggtcattggtcatgttgattctggaaaatcgaccacaactggtcacttgatctataagcttggtggtattgacaagcgtgtcatcgagaggttcgagaaggaggctgctgagatgaacaagaggtccttcaagtacgcatgggtgttggacaaacttaaggccgagcgtgagcgtggtattaccatcgatattgctctatggaagttcgagaccaccaagtactactgcacagtcattgatgccccaggacatcgtgatttcatcaagaacatgattactggtacctcccaggctgattgtgctgttcttatcattgactccaccactggaggttttgaggctggtatctctaaggatggtcagacccgtgagcacgcttttcttgctttcacccttggtgtcaagcagatgatttgctgttgtaacaagatggatgccaccacccccaaatactccaaggctaggtacgatgaaatcatcaaggaggtgtcttcatacctgaagaaggtcggatacaaccctgacaaaatcccatttgtgccaatctctggattcgagggagacaacatgattgagaggtcaaccaaccttgactggtacaagggaccaactcttcttgaggctcttgaccagatcaacgagcccaagaggccatcagacaagccccttcgtcttccacttcaggatgtctacaagattggtggtattggaacggtgccagtgggacgtgttgagactggtatgatcaagcctggtatggttgttacctttgctcccacagggttgaccactgaggttaagtctgttgagatgcaccacgagtctcttcttgaggcacttcccggtgacaatgttggattcaatgtcaagaatgttgctgtcaaggatcttaagagaggatacgttgcctctaactccaaggatgatccagctaagggtgccgccaacttcacctcccaggtcatcatcatgaaccaccctggtcagattggtaacggttacgccccagttctcgattgccacacctctcacattgcagtcaagttctctgagatcttgaccaagattgacaggcgttctggtaaggagattgagaaggagcccaagtttttgaagaatggtgacgctggtatggttaagatgaccccaaccaagcccatggttgttgagactttctccgagtacccacctttgggacgtttcgctgttagggacatgaggcagaccgttgctgttggtgttattaagagcgtggacaagaaggacccaactggagccaaggtcaccaaggctgcagtgaagaagggtgccaaatga

SEQ ID NO: 2990 - protein, 449 aa, Arabidopsis thaliana
MGKEKFHINIVVIGHVDSGKSTTTGHLIYKLGGIDKRVIERFEKEAAEMNKRSFKYAWVLDKLKAERERGITIDIALWKFETTKYYCTVIDAPGHRDFIKNMITGTSQADCAVLIIDSTTGGFEAGISKDGQTREHAFLAFTLGVKQMICCCNKMDATTPKYSKARYDEIIKEVSSYLKKVGYNPDKIPFVPISGFEGDNMIERSTNLDWYKGPTLLEALDQINEPKRPSDKPLRLPLQDVYKIGGIGTVPVGRVETGMIKPGMVVTFAPTGLTTEVKSVEMHHESLLEALPGDNVGFNVKNVAVKDLKRGYVASNSKDDPAKGAANFTSQVIIMNHPGQIGNGYAPVLDCHTSHIAVKFSEILTKIDRRSGKEIEKEPKFLKNGDAGMVKMTPTKPMVVETFSEYPPLGRFAVRDMRQTVAVGVIKSVDKKDPTGAKVTKAAVKKGAK

SEQ ID NO: 2991 - DNA, 1359 bp, Zea mays
  CDS (1)..(1359)
atggcttccgccgcggtgctccggaacgccggctcccggcgcctcttctcctaccctactctccgcgccgctgcgatatatgtaccttctgcgctacccgatgcgcccgcggcggcggcagcgccggcccagccgccaccgacggccgggaccctctgggcgaggtctatggccaccttcacgcgcacgaagccccatgtgaccgtcggcaccattgggcacgtcgatcacggcaaaaccactctcactgctgccattaccaaggtcctggccgaggcagggaaggccaaagccgttgctttcgacgagatcgacaaggctccggaggagaaagccagaggaatcaccattgcgacagctcacgtcgagtatgagacggctaaaaggcattatgctcacgttgattgtccaggtcacgcagattatgtcaagaacatgatcactggagctgctcaaatggatggtggtattcttgtcgtgtcagctcctgatggcccgatgccacaaactaaggagcatattcttcttgcccgtcaggttggtgtaccttcccttgtgtgcttcttaaacaaagttgatgctgttgatgatccagagcttctggaacttgtagagatggagcttcgggagctcctcagtttctacaagttccccggtgatgagattccgatcatccgtgggtctgcgttgtctgctttgcaagggaacaatgatgagataggaaagaatgcaattttgaaattaatggacgcagttgatgagtacatccctgatcctgtgaggcagcttgataagcctttcttgatgccgatagaagatgtgttttctattcagggtcgtggaactgttgttactgggcgtgttgaacagggaacaatcaaaactggtgaagatgttgagatcttgggtttggcacagactggtcccttgaagactacagttactggtgttgagatgttcaaaaagatactggaccatgggaaagctggtgacaacgttgggcttcttctccgtggtcttaagcgtggtgatgttgagcgtggccaggtggtgtgcagacctgggtattctgaagactgcaaaaagttcgaggcggaaatatatgtcctgacaaaggatgaaggtggccggcacactgcctttgtcacaaattacagcccccaattctacttcaggacagctgatgtcactggaagggttgagctgcttggggagatgaagatggttttgcccggtgacaatgtaactgcgaattttgacttgatatcacctgttcctcttgaacctgggcaaagatttgcgattagggaaggaggaagaacggtcggtgctggagtcgtctccaaagttcttagctga

SEQ ID NO: 2992 - protein, 452 aa, Zea mays
MASAAVLRNAGSRRLFSYPTLRAAAIYVPSALPDAPAAAAAPAQPPPTAGTLWARSMATFTRTKPHVTVGTIGHVDHGKTTLTAAITKVLAEAGKAKAVAFDEIDKAPEEKARGITIATAHVEYETAKRHYAHVDCPGHADYVKNMITGAAQMDGGILVVSAPDGPMPQTKEHILLARQVGVPSLVCFLNKVDAVDDPELLELVEMELRELLSFYKFPGDEIPIIRGSALSALQGNNDEIGKNAILKLMDAVDEYIPDPVRQLDKPFLMPIEDVFSIQGRGTVVTGRVEQGTIKTGEDVEILGLAQTGPLKTTVTGVEMFKKILDHGKAGDNVGLLLRGLKRGDVERGQVVCRPGYSEDCKKFEAEIYVLTKDEGGRHTAFVTNYSPQFYFRTADVTGRVELLGEMKMVLPGDNVTANFDLISPVPLEPGQRFAIREGGRTVGAGVVSKVLS

SEQ ID NO: 2993 - DNA, 1347 bp, Saccharum officinarum
  CDS (1)..(1347)
atgggtaaggagaagtcccacatcaacattgtggttattggccacgtcgactctggcaagtcgaccactacgggccacctgatctataagcttggaggcattgacaagcgtgtgatcgagaggttcgagaaggaggccgctgaaatgaacaagcggtccttcaagtatgcatgggtgctcgacaagctcaaggctgagcgtgagagaggtatcaccattgatatcgctctgtggaaatttgagaccaccaagtactactgcactgtcattgatgcccctggacatcgcgacttcatcaagaacatgatcaccggtacctcccaggctgactgtgctgtccttatcattgactccaccactggtggttttgaggctggtatctccaaggatggccagacccgtgagcatgccctccttgctttcacccttggagtgaagcagatgatttgctgctgctgctgcaacaagatggatgcgaccactcccaagtactccaaggcccgttatgatgagattgtgaaggaagtctcatcctacctcaagaaggttggatacaaccctgacaagattgctttcgtcccaatctctggttttgagggtgacaacatgattgagaggtccaccaaccttgactggtacaagggcccaaccctgcttgaggctcttgaccagatcaccgagcccaagaggccctcggacaagcctctgcgtctgcccctccaggatgtgtacaagattggtggtattggaactgtaccagttggtcgtgtggagactggtgtcatcaagcctggtatggttgtcaccttcggtccaactggcctgactactgaggtgaagtctgttgagatgcaccacgaggctcttcaggaggcccttcctggtgacaatgttggattcaacgtgaagaacgtcgctgtgaaggatctgaagcgtgggtatgtggcctccaactccaaggatgaccctgccaaggaggctgccagcttcacctcccaggtcatcatgaaccaccctgggcagatcggcaacggctatgctccagtgctggactgccacacctcccacatcgctgtcaagtttgctgagctcattaccaagatcgacaggcggtctggcaaggagcttgagaaggaggccaagttcctgaagaacggtgatgctggtatggtgaagatgattcccaccaagccgatggtggtggagacattctccgagtatcctccccttggtaggtttgctgtccgcgacatgaggcaaacggttgctgttggaatcatcaagagtgtggagaagaaggacccgaccggcgccaaggtgaccaaggctgctgccaagaagaaatga

SEQ ID NO: 2994 - protein, 448 aa, Saccharum officinarum
MGKEKSHINIVVIGHVDSGKSTTTGHLIYKLGGIDKRVIERFEKEAAEMNKRSFKYAWVLDKLKAERERGITIDIALWKFETTKYYCTVIDAPGHRDFIKNMITGTSQADCAVLIIDSTTGGFEAGISKDGQTREHALLAFTLGVKQMICCCCCNKMDATTPKYSKARYDEIVKEVSSYLKKVGYNPDKIAFVPISGFEGDNMIERSTNLDWYKGPTLLEALDQITEPKRPSDKPLRLPLQDVYKIGGIGTVPVGRVETGVIKPGMVVTFGPTGLTTEVKSVEMHHEALQEALPGDNVGFNVKNVAVKDLKRGYVASNSKDDPAKEAASFTSQVIMNHPGQIGNGYAPVLDCHTSHIAVKFAELITKIDRRSGKELEKEAKFLKNGDAGMVKMIPTKPMVVETFSEYPPLGRFAVRDMRQTVAVGIIKSVEKKDPTGAKVTKAAAKKK

SEQ ID NO: 2995 - DNA, 2415 bp, Arabidopsis thaliana
  CDS (1)..(2415)
atgtcaggagtttgggtgttcaataacggagtgatacgtctagtggagaacccgaaccagtccggtggagtttccacacagtcgcacggccggagaaatgtcttggtttacttgccgaccggtgaagccgtctcatcttactcgtcgctcgaacaaatcctaaggagcctcgggtgggaaagatacttcagtggagactccgatctcatccagtaccacaaacgctcctccatcgacctcatctccttaccaagagacttctccaagttcaactccgtttacatgtacgacatcgttgtcaagaaccctaattccttccacaaacaaacgatgcctcgtaaaggattatccaatttcgatgattatgatgatggttttgatgatgatgacgatgcttttgattatgactatgatgttgatatagatgaacatgaagaagaagctgctgctgaaccaaaggaagaaattgctaaaacgcaagggctttggcgatgtgctatctgtacatatgacaatgttgagactatgtttgtgtgtgatatctgcggtgttcttcgtcatcctgtcgccggaaatcaaagtatcaataagaatacagctgttcgtgttgtgagtctctttgcaattgtggtgttgcaaaggcgttattctgacagttccttttcaacttatgtagcacctttcaagtttgatgctccatcgccagatgatttagtctccaatggactaacatcctcaaaaactggtccaaaaggctcaggtgatgctagcatgagacagaaggagaagcaagatagcgtagaacagaaacctttaaagaaaggaggagatagttcagaaacaagctcccgaggtagacatgataaacttgatgataagggcggtgctggcggcataaaatcaggcaaaagtttgccaaaagcaaaagcagatatgtctaatgagacaagttcgtcctctaaatatatggagacgtcggagagtcttactggtactatgaacaagatgtctttgattggggaaacagaaaactctagcgatattaaaattagaggaccaaaatcacaatctaagcataagccagaggagtggatgcttcttgataaagaatcagatgcactaagccagcttaatcttgccatcgtggggcatgttgattccggtaagtctacactttcgggtagattattgcatcttttgggaagaatatcgcagaagcaaatgcacaagtatgagaaagaagcaaagttgcagggcaaagggtcctttgcatatgcctgggcattggatgagagtgctgaagagagggaacgaggaataacaatgactgtggctgttgcttatttcaattccaaaagacatcatgttgttttgctcgactctcctggacacaaagattttgttccaaacatgatagcaggagcaacacaagcagatgctgcgattcttgtcatagatgcatctgttggtgcttttgaagctggttttgataatttgaaagggcagacaagggagcatgcacgggttctgagaggttttggcgtggagcaagtcatagttgcaatcaacaaaatggatattgttggctactcaaaggaaagatttgatttgattaagcagcacgttggatcttttttgcaatcctgtcgttttaaggattcttctctgacatggattccattaagtgccatggaaaaccaaaacttggtggcagctccctctgataaccgcctatcctcatggtatcaaggtccatgtttattggatgccgtcgactctgtcaagtctcctgatagagacgtctcaaagcctctactcatgcctatatgtgacgctgtaagatcaacttcgcaagggcaggtatctgcatgtggcaaacttgaagctggagctgtccggccaggatctaaggtaatggttatgccatcaggagatcaaggaaccatacgatcactagagcgtgactctcaggcttgcaccattgcaagagctggagataacgtagcgttagcgttgcaagggatcgatgcaaatcaagtaatggcaggagatgtattgtgccatcctgatttccctgtatcagtagcaactcatttggaattgatggtgctcgtcttggaaggcgcaacaccgatcttgctcggttctcagttggagtttcatgtgcatcatgcaaaggaagcagcaacagttgtgaaacttgtggcaatgcttgatcccaaaacagggcagccaacaaagaagtctcctcgttgtctaactgctaaacagagcgcaatgcttgaggttagtctccaaaatccagtatgtgtggagacattttctgagagtagagctcttggaagagtgttccttagatcatcgggaagaactgttgctatgggcaaagttactcggattatccaagactcataa

SEQ ID NO: 2996 - protein, 804 aa, Arabidopsis thaliana
MSGVWVFNNGVIRLVENPNQSGGVSTQSHGRRNVLVYLPTGEAVSSYSSLEQILRSLGWERYFSGDSDLIQYHKRSSIDLISLPRDFSKFNSVYMYDIVVKNPNSFHKQTMPRKGLSNFDDYDDGFDDDDDAFDYDYDVDIDEHEEEAAAEPKEEIAKTQGLWRCAICTYDNVETMFVCDICGVLRHPVAGNQSINKNTAVRVVSLFAIVVLQRRYSDSSFSTYVAPFKFDAPSPDDLVSNGLTSSKTGPKGSGDASMRQKEKQDSVEQKPLKKGGDSSETSSRGRHDKLDDKGGAGGIKSGKSLPKAKADMSNETSSSSKYMETSESLTGTMNKMSLIGETENSSDIKIRGPKSQSKHKPEEWMLLDKESDALSQLNLAIVGHVDSGKSTLSGRLLHLLGRISQKQMHKYEKEAKLQGKGSFAYAWALDESAEERERGITMTVAVAYFNSKRHHVVLLDSPGHKDFVPNMIAGATQADAAILVIDASVGAFEAGFDNLKGQTREHARVLRGFGVEQVIVAINKMDIVGYSKERFDLIKQHVGSFLQSCRFKDSSLTWIPLSAMENQNLVAAPSDNRLSSWYQGPCLLDAVDSVKSPDRDVSKPLLMPICDAVRSTSQGQVSACGKLEAGAVRPGSKVMVMPSGDQGTIRSLERDSQACTIARAGDNVALALQGIDANQVMAGDVLCHPDFPVSVATHLELMVLVLEGATPILLGSQLEFHVHHAKEAATVVKLVAMLDPKTGQPTKKSPRCLTAKQSAMLEVSLQNPVCVETFSESRALGRVFLRSSGRTVAMGKVTRIIQDS

SEQ ID NO: 2997 - DNA, 1344 bp, Capsicum annuum
  CDS (1)..(1344)
atgggtaaggagaagattcacatcagcattgtggtcattggccacttgactctggaaaagtcaactaccactggtcacttgatctataagcttggcggtattgacaagcgtgttattgagaggtttgagaaggaagctgctgagatgaacaagagatcattcaagtatgcctgggtgcttgacaagcttaaggctgaacgtgagcgtggtatcaccattgatattgctttgttggaatttgagaccactaagtactactgcaccgtgaatgattgcccccggggcacagggactttatcaagaacaatgttactggtactccaggctgattgtgctgtcttattattacctaccactggtggttttgaagtggtatcttctaaagatggccagacccgtgaacatggtttgcttgctttcaccctggagtcaagcaaaatgatttgttgctgcaacaagatggatgctaccactccaagtactcccaaggctaggtatgatgaaatcgtgaaggaagtttcttcttacctcaagaaggttggttacaaccctgacaagatccccttcgtccctatttctggttttgaaggagataatatgattgagaggtctaccaaccttgactggtacaagggtccaacccttcttgaggctcttgaccagattaatgagcccaagaggccatcagacaagcccttccgccttccacttaaggatgtttacaagattggtggtattggaactgtccctgttggtcgtgtagagactggtgtgatcaagcctggtatggttgtgacctttggaccttctggtttgacaactgaagtcaaatctgtagagatgcaccacgaagctctccaggaggcactccctggtgacaatgttggattcaacgttaagaatgttgctgttaaggatcttaagcgtggttatgttgcctcaaactccaaggatgacccagccaagggggctgccagcttcactgcccaggtcatcatcatgaaccatcctggacagattggaaatggatatgccccagttctcgactgccacacttcccacattgctgtcaagtttggggagattttgaccaagatcgacaggtggtcgggtaaggaacttgagaaggagcctaagttccttaagaatggtgatgctggcatggttaagatgattcccaccaagccaatggtggttgaaacctttgcagaaaacccaccattgggtcgttttgctgtgagagacatgaggcaaactgttgctgttggtgttgtcaagaatgttgacaagaaggacccaactggtgccaaggtcaccaaggctgcccagaagaaggggaagtga

SEQ ID NO: 2998 - protein, 447 aa, Capsicum annuum
MGKEKIHISIVVIGHLTLEKSTTTGHLIYKLGGIDKRVIERFEKEAAEMNKRSFKYAWVLDKLKAERERGITIDIALLEFETTKYYCTVNDCPRGTGTLSRTMLLVLQADCAVLLLPTTGGFEVVSSKDGQTREHGLLAFTLESSKMICCCNKMDATTPSTPKARYDEIVKEVSSYLKKVGYNPDKIPFVPISGFEGDNMIERSTNLDWYKGPTLLEALDQINEPKRPSDKPFRLPLKDVYKIGGIGTVPVGRVETGVIKPGMVVTFGPSGLTTEVKSVEMHHEALQEALPGDNVGFNVKNVAVKDLKRGYVASNSKDDPAKGAASFTAQVIIMNHPGQIGNGYAPVLDCHTSHIAVKFGEILTKIDRWSGKELEKEPKFLKNGDAGMVKMIPTKPMVVETFAENPPLGRFAVRDMRQTVAVGVVKNVDKKDPTGAKVTKAAQKKGK

SEQ ID NO: 2999 - DNA, 1344 bp, Zea mays
  CDS (1)..(1344)
atgggtaaggagaagtcccacatcaacattgtggtcattggccatgtcgactctggcaagtcgaccaccaccggccacctgatctacaagcttggaggcattgacaagcgtgtaattgagaggtttgagaaggaggctgctgacatgaacaagcggtccttcaagtatgcttgggtgctcgacaagctcaaggctgagcgtgagagaggtatcaccattgatattgctctgtggaagtttgagaccaccaagtattactgcaccgtcattgatgcccctggacaccgtgacttcatcaagaacatgatcactggtacctcccaggctgactgtgctgtccttatcattgactccaccactggtggttttgaggctggtatctccaaggatggccagacccgtgagcatgctctccttgcgttcactcttggagtgaaacagatgatttgctgctgcaacaagatggatgcaacgactcccaaatactccaaggcgcgttatgatgagattgtgaaggaagtctcatcctacctcaagaaagttgggtacaaccctgataagattgcctttgtccccatctctggttttgagggcgccaacatgattgagaggtccaccaaccttgactggtacaaaggcccaaccctgcttgaggctcttgaccagatcaccgagccgaagaggccttcagacaagcccctgcgtctccccctgcaggatgtgtacaagattggtggtattggaactgtaccggttggtcgtgtggagactggtgtcatcaagcctggtatggttgtcaccttcggtccaactggcctgactactgaggtgaagtctgttgagatgcaccacgaggcacttcaggaggctcttccgggtgacaatgttggcttcaacgtgaagaacgttgctgtcaaggatctcaagcgtgggtttgtggcctcaaactccaaggatgaccctgccaaggaggctgccagcttcacgtcccaggtcatcatcatgaaccaccctgggcagataggcaatggctatgccccagtgctggactgccacacctcccacatcgctgtcaagtttgctgagctcattaccaagatcgacaggcgctctggcaaggagcttgagaaggagccaaagttcctgaaggacggtgatgctggtatggtgaagatgatacccaccaagcctatggtggtggagacattctccgcgtttcctccccttggtaggtttgctgtccgcgacatgaggcagacagttgctgttggagtcatcaagagtgtggagaagaaggacccgaccggcgccaaggtgaccaaggcggccgccaagaagaaatga

SEQ ID NO: 3000 - protein, 447 aa, Zea mays
MGKEKSHINIVVIGHVDSGKSTTTGHLIYKLGGIDKRVIERFEKEAADMNKRSFKYAWVLDKLKAERERGITIDIALWKFETTKYYCTVIDAPGHRDFIKNMITGTSQADCAVLIIDSTTGGFEAGISKDGQTREHALLAFTLGVKQMICCCNKMDATTPKYSKARYDEIVKEVSSYLKKVGYNPDKIAFVPISGFEGANMIERSTNLDWYKGPTLLEALDQITEPKRPSDKPLRLPLQDVYKIGGIGTVPVGRVETGVIKPGMVVTFGPTGLTTEVKSVEMHHEALQEALPGDNVGFNVKNVAVKDLKRGFVASNSKDDPAKEAASFTSQVIIMNHPGQIGNGYAPVLDCHTSHIAVKFAELITKIDRRSGKELEKEPKFLKDGDAGMVKMIPTKPMVVETFSAFPPLGRFAVRDMRQTVAVGVIKSVEKKDPTGAKVTKAAAKKK

SEQ ID NO: 3001 - DNA, 1344 bp, Zea mays
  CDS (1)..(1344)
atgggtaaggagaagtcccacatcaacattgtggtcattggccatgtcgactctggcaagtcgaccaccaccggccacctgatctacaagcttggaggcattgacaagcgtgtaatagagaggtttgagaaggaggctgctgagatgaacaagcggtccttcaagtatgcttgggtgctcgacaagctcaaggctgagcgtgagaggggtatcaccattgatattgctctgtggaagtttgagaccaccaagtattactgcaccgtcattgatgcccctggacaccgtgacttcatcaagaacatgatcactggtacctcccaggctgactgtgctgtccttatcattgactccaccactggtggttttgaggctggtatctccaaggatggccagacccgtgagcatgctctccttgcgttcactcttggagtgaaacagatgatttgctgctgcaacaagatggatgcaacgactcccaaatactccaaggcacgttatgaagagattgtgaaggacgtctcatcctacctcaagaaagttggctacaaccctgataagattgcctttgttcccatttctggttatgagggcgacaacatgattgagaggtccaccaaccttgactggtacaaaggcccaaccctgcttgaggctcttgaccaaatcaccgagccgaagaggccttcagacaagccgctgcgtctagccttccaggatgtgtacaagattggtggtattggaactgtaccggttggtcgtgtggagactggtgtcatcaagcctggtatggtagtcaccattggtccaactggcctgactaccgaggtgaagtctgttgagatgcaccacgaggcacttcaggaggctcttccgagtgacaatgttggcttcaacgtgaagaatgttgctgtcaaggatctcaagcgtgggtttgtggcctccaactccaagcatgaccctgccaaggaggctgccagcttcacctcccaggtcatcatcatgacccaccctgggcagattggcaacggctatggccctgtgctggactgccacacctcccacatcgctgtcaagtttgctgagctcattaccaagatcgacaggcgctctggcaaggagcttgaaaaggagccaaagttcctgaagaacggtgatgctggtatggtgaagatgatacccaccaagcctatggtggtggagacattctccgcgtatcctcccctgggtaggttagccgtccgcgacatgaggcagacggttgctgttggagtcatcaagagtgtggagaagaaggacccgaccggcgccaaggttaccaaggcagctgccaaaaagaaatga

SEQ ID NO: 3002 - protein, 447 aa, Zea mays
MGKEKSHINIVVIGHVDSGKSTTTGHLIYKLGGIDKRVIERFEKEAAEMNKRSFKYAWVLDKLKAERERGITIDIALWKFETTKYYCTVIDAPGHRDFIKNMITGTSQADCAVLIIDSTTGGFEAGISKDGQTREHALLAFTLGVKQMICCCNKMDATTPKYSKARYEEIVKDVSSYLKKVGYNPDKIAFVPISGYEGDNMIERSTNLDWYKGPTLLEALDQITEPKRPSDKPLRLAFQDVYKIGGIGTVPVGRVETGVIKPGMVVTIGPTGLTTEVKSVEMHHEALQEALPSDNVGFNVKNVAVKDLKRGFVASNSKHDPAKEAASFTSQVIIMTHPGQIGNGYGPVLDCHTSHIAVKFAELITKIDRRSGKELEKEPKFLKNGDAGMVKMIPTKPMVVETFSAYPPLGRLAVRDMRQTVAVGVIKSVEKKDPTGAKVTKAAAKKK

SEQ ID NO: 3003 - DNA, 1344 bp, Zea mays
  CDS (1)..(1344)
atggggaaggagaagtcccacatcaacattgtggtcattggccatgtcgactccggcaagtccacaaccaccggccacctcatctacaagcttggaggcattgacaagcgtgtgatcgagaggtttgagaaggaggctgccgagatgaacaaacggtccttcaagtacgcttgggcgctcgacaagctcaaggctgagcgcgagagaggcatcaccattgacattgccctgtggaagtttgagaccaccaagtactactgcaccgtcattgatgcccctggaccccgtgacttcatcaagaacatgatcactggcacctcccaggctgattgtgctgtccttatcattgactccaccactggtggtttcgaggctggtatctccaaggacggccagacccgtgagcatgccctccttgctttcactcttggtgtgaggcagatgatctgctgctgcaacaagatggatgccactacccccaagtactccaaggcacgttatgaagagattgtgaaggaagtctcatcctacctcaagaaagttggttacaaccctgataagattgcctttgttcccatttctggttttgagggcgacaacatgattgagaggtccaccaaccttgactggtacaatggcccaaccctgcttgaggctcctgaccagatcaccgagcccaagaggccttcagacaagcccatgcgtctagccctccaggatgtgtacaagattggtggttttggaactgtaccggttggtcgtgtggagactggtgtcatcaagcctgttatggtagtcacctttggtccaactggcctgactaccgaggtgaagtctgttgagatgcaccacgaggcaattcaggaggctcttccgggtgacaatgttggcttcaacttgaagaatgttgctgtcaaggatctcaagcgtgggtttgtggcctccaactccaaggatgaccttgccaaggaggctgccagcttcacttcccaggtgatcatcatgaaccacccggggcagatcggcaacggctacgcccctgtgctggactgccacacgtcccacatcgccgtgaagtttgctgagctcattaccaagattgaccggcggtcgggcaaggagctaggagaggagccaaagtttctcaagaacggtgacgccggtttcgtgaagatggtccccacgaagcccatggtggtggagactttctccgagtatcctccactgggtaggtttgcggtccgcgacatgaggcagacggttgcagtcggcgtgatcaagagtgtggagaagaaggacccaaccggcgccaaggtgaccaaggcggccgccaagaagaaatga

SEQ ID NO: 3004 - protein, 447 aa, Zea mays
MGKEKSHINIVVIGHVDSGKSTTTGHLIYKLGGIDKRVIERFEKEAAEMNKRSFKYAWALDKLKAERERGITIDIALWKFETTKYYCTVIDAPGPRDFIKNMITGTSQADCAVLIIDSTTGGFEAGISKDGQTREHALLAFTLGVRQMICCCNKMDATTPKYSKARYEEIVKEVSSYLKKVGYNPDKIAFVPISGFEGDNMIERSTNLDWYNGPTLLEAPDQITEPKRPSDKPMRLALQDVYKIGGFGTVPVGRVETGVIKPVMVVTFGPTGLTTEVKSVEMHHEAIQEALPGDNVGFNLKNVAVKDLKRGFVASNSKDDLAKEAASFTSQVIIMNHPGQIGNGYAPVLDCHTSHIAVKFAELITKIDRRSGKELGEEPKFLKNGDAGFVKMVPTKPMVVETFSEYPPLGRFAVRDMRQTVAVGVIKSVEKKDPTGAKVTKAAAKKK

SEQ ID NO: 3005 - DNA, 1344 bp, Zea mays
  CDS (1)..(1344)
atgggcaaggagaagtcccacatcaacattgtggttattggccatgtcgactctggcaagtcaaccaccaccggccacctgatctacaagcttggaggcattgacaagcgtgtgattgagaggttcgagaaggaagccgctgaaatgaacaaacggtccttcaagtacgcttgggtgcttgacaagctcaaggctgagcgtgagagaggtatcaccattgatattgctctgtggaagtttgagaccaccaagtactactgcactgtcattgatgcccctggacatcgcgacttcatcaagaacatgatcacgggtacctctcaggctgactgtgctgttcttatcattgactccaccactggtggttttgaggccggtatctctaaggatggccagacccgtgagcatgctctccttgctttcacccttggggtcaagcagatgatttgctgctgcaacaagatggatgcaaccactcccaaatattccaaggcccgttacgatgagattgtgaaggaagtttcatcctacctcaagaaggttggatacaaccctgacaagattgcctttgtccctatctctggttttgagggtgacaacatgattgagaggtccaccaaccttgactggtacaaaggtccaaccctgcttgaggctcttgaccagatcaccgagcccaagaggccttcagacaagcccctgcgtctagccctccaggatgtgtacaagattggtggtattggaactgttcaggttggtcgtgtggagactggtgtcatcaagcctgatatggtagtcaccttcggtccaactggcctgaccactgaggtgaagtctgttgagatgcaccacgaggctctccaggaggcccttcctggtgacaatgttggcttcaatgtgaagaacgttgctgtgaaggatctcaatcgtgggtttgtggcctccaactctaaggatgaccctgccaaggaggctgctagcttcacctcccaagtcatcatcatgaaccaccctgggcagattggcaatggctatgccccagtgctggactgccacacctcccacattgctgtcaagtttgctgagctcattaccaagatcgacaggcgctctggcaaggagcttgagaaggagccaaagttcctgaagaatggtgatgccggtatggtgaagatgattcccactaagcccatggtggttgagaccttctctcagtatcctcctctgggtcgttttgctgtcctcgacatgaggcagacggttgctgttggagtcatcaagagcgtggagaagaaggacccaactggtgccaaggtgaccaaggctgcaataaagaagaaatga

SEQ ID NO: 3006 - protein, 447 aa, Zea mays
MGKEKSHINIVVIGHVDSGKSTTTGHLIYKLGGIDKRVIERFEKEAAEMNKRSFKYAWVLDKLKAERERGITIDIALWKFETTKYYCTVIDAPGHRDFIKNMITGTSQADCAVLIIDSTTGGFEAGISKDGQTREHALLAFTLGVKQMICCCNKMDATTPKYSKARYDEIVKEVSSYLKKVGYNPDKIAFVPISGFEGDNMIERSTNLDWYKGPTLLEALDQITEPKRPSDKPLRLALQDVYKIGGIGTVQVGRVETGVIKPDMVVTFGPTGLTTEVKSVEMHHEALQEALPGDNVGFNVKNVAVKDLNRGFVASNSKDDPAKEAASFTSQVIIMNHPGQIGNGYAPVLDCHTSHIAVKFAELITKIDRRSGKELEKEPKFLKNGDAGMVKMIPTKPMVVETFSQYPPLGRFAVLDMRQTVAVGVIKSVEKKDPTGAKVTKAAIKKK

SEQ ID NO: 3007 - DNA, 1344 bp, Zea mays
  CDS (1)..(1344)
atgggtaacgagaagtcccacatcaacattgtggttattggccctgtcgactctggcaagtcgaccaccacaggacaccttatctacaagcttggaggctttgacaagcgtgtgatcgagaggttcgagaaggaggctcctgaaatgaacaagcggtccttcaagtacgcgtgggtgctcgacaagctcaaggctgagcgtgagagaggtttcaccattgatatcgctctgtggaagtttgagaccaccaagtactactgcacggtcattgatgcccgtggacaccgtcacttcatcaagaacatgatcactcgtacctcccaggctgactgtgctgtccttatcattgactcaaccactggtggttttgaggctggtatctccaaggatggccagacccgtgagcatgctctccttgctttcacacttggtgtgaagcagatgatttgctgctgcaacaagatggatgctactacacccaagtattccaaggcccgttatgatgagattgtgaaggaagtctcttcctacctcaagaaagttggatacaaccctgataagattgcctttgttccaatctctggttttgaaggtgacaacatgattgagaggtccaccaaccttgactggtacaagggcccaaccctacttgaggctcttgacaagatcaccgaggccaagaggccttcacacaagcccctgcgtctagccctccaggatgtgtaccagattggtggtattgggactgtaccggttggtcgtgtggaggctggtgtcatcaagcctggtatggtagtcacgtttggtccaacaggcctgactaccgaggtgaagtctgttgagatgcagcacgaggcacttcaggaggctcttccgggtgacaatgttggcttcaacgtgaagaatgttgctgtcaaggatctcaagcgtgggtttgtggcctccaactccagggatgaccctgccaaggaggctggcagcttcacctcccaagtcatcatcatgaaccaccctgggcagattggcaacggctatgcccctgtgctggactgccacacctcccacatcgctgtcaagtttgctgagctcattaccaagatcgacaggcgctctggcaaagagcttgagaaggagccaaagttcctgaagtacggtgatgctggtatggtgaagatgataccaaccaagcctatggtggtggagacattctccgcgtatcctcctctgggtaggtttgccgtccgtgacatgaggcaaacggtggctgtcggagtcatcaagagtgtggagaagaaggacccaactggagccaaggtgacgaaggctgctgccaagaagaaatga

SEQ ID NO: 3008 - protein, 447 aa, Zea mays
MGNEKSHINIVVIGPVDSGKSTTTGHLIYKLGGFDKRVIERFEKEAPEMNKRSFKYAWVLDKLKAERERGFTIDIALWKFETTKYYCTVIDARGHRHFIKNMITRTSQADCAVLIIDSTTGGFEAGISKDGQTREHALLAFTLGVKQMICCCNKMDATTPKYSKARYDEIVKEVSSYLKKVGYNPDKIAFVPISGFEGDNMIERSTNLDWYKGPTLLEALDKITEAKRPSHKPLRLALQDVYQIGGIGTVPVGRVEAGVIKPGMVVTFGPTGLTTEVKSVEMQHEALQEALPGDNVGFNVKNVAVKDLKRGFVASNSRDDPAKEAGSFTSQVIIMNHPGQIGNGYAPVLDCHTSHIAVKFAELITKIDRRSGKELEKEPKFLKYGDAGMVKMIPTKPMVVETFSAYPPLGRFAVRDMRQTVAVGVIKSVEKKDPTGAKVTKAAAKKK

SEQ ID NO: 3009 - DNA, 1344 bp, Zea mays
  CDS (1)..(1344)
atgggtaaagagaagtcccacatcaacattgtggttattggccacgttgactctggcaagtcgaccaccacaggacacctgatctacaagcttggaggcattgacaagcgtgtgatcgagaggttcgagaaggaggctgctgaaatgaacaagcggtccttcaagtacgcatgggtgctcgacaagctcaaggctgagcgtgagagaggtatcaccattgatatcgctctgtggaagtttgagaccaccaagtactactgcacggtcattgatgcccctggacaccgtgacttcatcaagaacatgatcactggtacctcccaggctgactgtgctgtccttatcattgactccaccactggtggttttgaggctggtatctccaaggatggccagacccgtgaacatgctctccttgcgttcacccttggtgtgaagcagatgatttgctgctgcaacaagatggatgcaaccactcccaaatactccaaggcacgttatgatgagattgtgaaggaagtctcatcctacctcaagaaagttgggtacaaccctgataagattgccttcgttcccatttctggttttgagggcgacaacatgattgagaggtccaccaaccttgactggtacaaaggcccaaccctgcttgaggctcttgaccagatcaccgagcccaagaggccttcagacaagcccctgcgtctagccctccaggatgtgtacaagattggtggtattggaactgtaccggttggtcgtgtggagactggtgtcatcaagcctggtatggtagtcacctttggtccaactggcctgactactgaggtgaagtctgttgagatgcaccatgaggcgcttcaggaggctcttccgggcgacaatgttggcttcaacgtgaagaacgttgctgtcaaggatctcaagcgtgggttcgtggcctccaactccaaggatgaccctgccaaggaggctgccagcttcacctcccaggtcatcatcatgaaccaccctgggcagattggcaacggctatgccccagtgctggactgccacacctcccacatcgccgtcaagtttgctgagctcattaccaagatcgacaggcgatctggcaaggagctcgagaaggagcccaagttcctgaagaacggtgatgctggtatggtgaagatgattcccaccaagcctatggtggtggagacattctccgcgtatcctcccctgggtaggtttgccgtccgcgacatgaggcagacggttgctgttggagtcatcaagagtgtggagaagaaggacccaaccggcgccaaggtgaccaaggcggccgccaagaagaaatga

SEQ ID NO: 3010 - protein, 447 aa, Zea mays
MGKEKSHINIVVIGHVDSGKSTTTGHLIYKLGGIDKRVIERFEKEAAEMNKRSFKYAWVLDKLKAERERGITIDIALWKFETTKYYCTVIDAPGHRDFIKNMITGTSQADCAVLIIDSTTGGFEAGISKDGQTREHALLAFTLGVKQMICCCNKMDATTPKYSKARYDEIVKEVSSYLKKVGYNPDKIAFVPISGFEGDNMIERSTNLDWYKGPTLLEALDQITEPKRPSDKPLRLALQDVYKIGGIGTVPVGRVETGVIKPGMVVTFGPTGLTTEVKSVEMHHEALQEALPGDNVGFNVKNVAVKDLKRGFVASNSKDDPAKEAASFTSQVIIMNHPGQIGNGYAPVLDCHTSHIAVKFAELITKIDRRSGKELEKEPKFLKNGDAGMVKMIPTKPMVVETFSAYPPLGRFAVRDMRQTVAVGVIKSVEKKDPTGAKVTKAAAKKK

SEQ ID NO: 3011 - DNA, 1344 bp, Zea mays
  CDS (1)..(1344)
atgggtaaagagaagtcccacatcaacattgtggttattggccatgtcgactctggcaagtcgaccaccacaggacaccttatctacaagcttggaggcattgacaagcgtgtgatcgagaggttcgagaaggaggctgctgaaatgaacaagcggtccttcaagtacgcgtgggtgctcgacaagctcaaggctgagcgtgagagaggtatcaccattgatatcgctctgtggaagtttgagaccaccaagtactactgcacggtcattgatgcccctggacaccgtgacttcatcaagaacatgatcactggtacctcccaggctgactgtgctgtccttatcattgactccaccactggtggttttgaggctggtatctccaaggatggccagacccgtgaacatgctctccttgcgttcacacttggagtgaagcagatgatttgctgctgcaacaagatggatgcaaccactcccaaatactccaaggcacgttatgaagagattgtgaaggaagtctcatcctacctcaagaaagttgggtacaaccctgataagattgcctttgttcccatttctggttttgagggcgacaacatgattgagaggtccaccaaccttgactggtacaaaggcccaaccctgcttgaggctcttgaccagatcaccgagcccaagaggccttcagacaagcccctgcgtctagccctccaggatgtgtacaagattggtggtattggaactgtaccggttggtcgtgtggagactggtgtcatcaagcctggtatggtagtcacctttggtccaactggcctgactaccgaggtgaagtctgttgagatgcaccacgaggcacttcaggaggctcttccgggtgacaatgttggcttcaacgtgaagaatgttgctgtcaaggatctcaagcgtgggtttgtggcctccaactccaaggatgaccctgccaaggaggctgccagcttcacctcccaggtcatcatcatgaaccaccctgggcagattggcaacggctatgcccctgtgctggactgccacacctcccacatcgctgtcaagtttgctgagctcattaccaagatcgacaggcgctctggcaaggagcttgagaaggagccaaagttcctgaagaacggtgatgctggtatggtgaagatgatacccaccaagcctatggtggtggagacattctccgcgtatcctcccctgggtaggtttgccgtccgcgacatgaggcagacggttgctgttggagtcatcaagagtgtggagaagaaggacccaaccggcgccaaggtgaccaaggcggccgccaagaagaaatga

SEQ ID NO: 3012 - protein, 447 aa, Zea mays
MGKEKSHINIVVIGHVDSGKSTTTGHLIYKLGGIDKRVIERFEKEAAEMNKRSFKYAWVLDKLKAERERGITIDIALWKFETTKYYCTVIDAPGHRDFIKNMITGTSQADCAVLIIDSTTGGFEAGISKDGQTREHALLAFTLGVKQMICCCNKMDATTPKYSKARYEEIVKEVSSYLKKVGYNPDKIAFVPISGFEGDNMIERSTNLDWYKGPTLLEALDQITEPKRPSDKPLRLALQDVYKIGGIGTVPVGRVETGVIKPGMVVTFGPTGLTTEVKSVEMHHEALQEALPGDNVGFNVKNVAVKDLKRGFVASNSKDDPAKEAASFTSQVIIMNHPGQIGNGYAPVLDCHTSHIAVKFAELITKIDRRSGKELEKEPKFLKNGDAGMVKMIPTKPMVVETFSAYPPLGRFAVRDMRQTVAVGVIKSVEKKDPTGAKVTKAAAKKK

SEQ ID NO: 3013 - DNA, 1194 bp, Streptoverticillium netropsis
  CDS (1)..(1194): transl_table=11
gtggcgaaggcgaagttcgagcggactaagccgcacgtcaacatcggcaccatcggtcacatcgaccacggtaagacgaccctcacggccgccattaccaaggtgctgcacgacgcgtacccggacctgaacgaggcctcggccttcgaccagatcgacaaggctcccgaggagcgccagcgcggtatcacgatctcgatcgcgcacgtcgagtaccagaccgagtcgcgtcactacgcccacgtcgactgccccggtcacgcggactacatcaagaacatgatcacgggtgccgcgcagatggacggcgccatcctcgtggtcgccgccaccgacggcccgatgccgcagaccaaggagcacgtgctcctggcccgccaggtcggcgttccgtacatcgtcgtcgccctgaacaaggccgacatggtggacgacgaggagatcctggagctcgtcgagctcgaggtgcgtgagctcctctccgagtacgagttcccgggcgacgaccttccggtcgtccgcgtctcggcgctcaaggcgctcgagggcgacaaggagtggggcgagaagctcctcggcctcatgaaggccgtggacgagtccatcccgcagcccgagcgtgacgtcgacaagccgttcctgatgccgatcgaggacgtcttcacgatcaccggtcgtggcaccgtcgtcaccggtcgtatcgagcgcggtgtcctcaaggtcaacgagaccgtcgacatcatcggcatcaagaccgagaagaccaccaccacggtcaccggcatcgagatgttccgcaagctcctcgacgagggccaggccggtgagaacgtcggtctgctcctccgtggcatcaagcgcgaggacgtcgagcgcggccaggtcatcatcaagccgggctcggtcacgccgcacacctccttcgaggcccaggcgtacatcctgtcgaaggacgagggtggccgtcacaccccgttcttcaacaactaccgcccgcagttctacttccgtaccacggacgtgaccggcgtcgtgaccctccccgagggcaccgagatggtcatgccgggcgacaacacctccatgaccgtcgagctgatccagcccgtcgccatggaggagggcctcaagttcgccatccgtgagggtggccggaccgtcggcgccggccaggtcgtcaagatcaacgcctga

SEQ ID NO: 3014 - protein, 397 aa, Streptoverticillium netropsis
MAKAKFERTKPHVNIGTIGHIDHGKTTLTAAITKVLHDAYPDLNEASAFDQIDKAPEERQRGITISIAHVEYQTESRHYAHVDCPGHADYIKNMITGAAQMDGAILVVAATDGPMPQTKEHVLLARQVGVPYIVVALNKADMVDDEEILELVELEVRELLSEYEFPGDDLPVVRVSALKALEGDKEWGEKLLGLMKAVDESIPQPERDVDKPFLMPIEDVFTITGRGTVVTGRIERGVLKVNETVDIIGIKTEKTTTTVTGIEMFRKLLDEGQAGENVGLLLRGIKREDVERGQVIIKPGSVTPHTSFEAQAYILSKDEGGRHTPFFNNYRPQFYFRTTDVTGVVTLPEGTEMVMPGDNTSMTVELIQPVAMEEGLKFAIREGGRTVGAGQVVKINA

SEQ ID NO: 3015 - DNA, 1194 bp, Streptomyces mobaraensis
  CDS (1)..(1194): transl_table=11
gtggcgaaggcgaagttcgagcggactaagccgcacgtcaacatcggcaccatcggtcacgtcgaccacggtaagacgacccttaccgcggcgatcaccaaggtgctgcacgacgcgcacccggagctgaaccccttcacgccgttcgaccagatcgacaaggcgcctgaggagcggcagcgcggtatcaccatctccatcgcgcacgtcgagtaccagaccgagtcgcgtcactacgcccacgtcgactgcccgggtcacgcggactacatcaagaacatgatcaccggtgccgcccagatggacggcgcgatcctcgtggtcgccgcgaccgacggtccgatgccgcagaccaaggagcacgtgctcctggcccgccagtccggcgttccgtacatcgtcgtcgccctgaacaaggccgacatggtggacgacgaggagatcctggagctcgtcgagctcgaggtccgtgagctcctcaacgagtacgagttcccgggcgacgacgctccggtcgtcaaggtctcggcgctgaaggcgctcgagggcgacgccgagtggggccagtcggtcatgaacctcatgaacgccgtcgacgagaacatcccgcagcccgagcgtgacgtcgacaagccgttcctgatgccgatcgaggacgtcttcacgatcaccggtcgtggcaccgtcgtcaccggccgtatcgagcgcggtgtcctgaaggtcaacgagaccgtcgacatcatcggcatcaagaccgagaagaccaccaccacggtcaccggtatcgagatgttccgcaagctgctcgacgagggccaggccggtgagaacgtcggtctgctcctccgtggcatcaagcgcgaggacgtcgagcgcggccagtgcatcatcaagccgggttcggtcaccccgcacaccgagttcgaggccacggcctacatcctgtcgaaggacgagggtggccgtcacaccccgttcttcaacaactaccgtccgcagttctacttccgtacgactgacgtgaccggtgtcgtgaccctcaaggagggcacggagatggtcatgcccggcgacaacgccgagatgtccgtccagctgatccagcccgtcgccatggaggagggcctgcgcttcaccatccgtgagggcggccgtaccgtcggcgccggccaggtcaccaagatcaccaagtaa

SEQ ID NO: 3016 - protein, 397 aa, Streptomyces mobaraensis
MAKAKFERTKPHVNIGTIGHVDHGKTTLTAAITKVLHDAHPELNPFTPFDQIDKAPEERQRGITISIAHVEYQTESRHYAHVDCPGHADYIKNMITGAAQMDGAILVVAATDGPMPQTKEHVLLARQSGVPYIVVALNKADMVDDEEILELVELEVRELLNEYEFPGDDAPVVKVSALKALEGDAEWGQSVMNLMNAVDENIPQPERDVDKPFLMPIEDVFTITGRGTVVTGRIERGVLKVNETVDIIGIKTEKTTTTVTGIEMFRKLLDEGQAGENVGLLLRGIKREDVERGQCIIKPGSVTPHTEFEATAYILSKDEGGRHTPFFNNYRPQFYFRTTDVTGVVTLKEGTEMVMPGDNAEMSVQLIQPVAMEEGLRFTIREGGRTVGAGQVTKITK

SEQ ID NO: 3017 - DNA, 1188 bp, Bacteroides forsythus
  CDS (1)..(1188): transl_table=11
  misc_feature (500)..(500): n is a, g, c or t
atggcaaaagagcattttaacagatcgaaaccccacgttaacgttggtacgatcggacacgtggaccacggtaagactaccttgacggctgcaatcacaactgtgttggcaaagaggggcctttcagaactccgttcatttgattcaatcgataacgctcccgaagaaaaggaacgtggtatcacgattaatacttcacacgttgaataccaaacagctaatcgtcactacgctcacgtagactgtccgggtcacgccgactatgtgaagaacatggttaccggtgctgctcagatggacggtgctataatcgttgtagcagctacagacggccctatgcctcagactcgcgagcacatccttttggctcgccaggtaaacgttcctcgtctggttgttttcatgaacaaatgtgacatggtagacgatgaagagatgctcgagcttgttgaaatggacatgcgcgaactcctttctttctacgatttcgatggtgacantacccctatcatccgtggttctgctctgggcgctttgaatggagagcctcagtgggaagacaaggtgatggagcttatggaagctgttgacaactgggttcccctgcctgagcgcgatatcgataaaccgttcttgatgccggttgaagacgtgttctctatcacgggtcgtggtacggttgctacaggacgtatcgaaaccggtatcgtgaagaccggtgacgaagttcagatcatcggcctcggtgcagaaggaatgaagtcggttgttacgggtgttgaaatgttccgtaagattcttgacgaaggtcaggccggtgacaacgttggtctcctcctgcgtggtatcgataaggatcagatcaagcgtggtatggttatctctcacccgggtaagattactcctcacaagagatttaaggccgaggtttatatcttgaagaaagaagaaggtggtcgccacactcctttccacaacaaatatcgtccgcagttctacatccgtacgcttgacgtgaccggtgaaatcactcttcccgaagggacagaaatggttatgcccggtgacaacgtaacgatcactgtagaactcatctacccggttgcatgtaatgtaggtctccgcttcgctatccgtgaaggtggtcgtacggtaggtgccggtcagattacagagctcatcgactaa

SEQ ID NO: 3018 - protein, 395 aa, Bacteroides forsythus
  misc_feature (167)..(167): The Xaa at location 167 stands for Asn, Ile, Ser, or Thr.
MAKEHFNRSKPHVNVGTIGHVDHGKTTLTAAITTVLAKRGLSELRSFDSIDNAPEEKERGITINTSHVEYQTANRHYAHVDCPGHADYVKNMVTGAAQMDGAIIVVAATDGPMPQTREHILLARQVNVPRLVVFMNKCDMVDDEEMLELVEMDMRELLSFYDFDGDXTPIIRGSALGALNGEPQWEDKVMELMEAVDNWVPLPERDIDKPFLMPVEDVFSITGRGTVATGRIETGIVKTGDEVQIIGLGAEGMKSVVTGVEMFRKILDEGQAGDNVGLLLRGIDKDQIKRGMVISHPGKITPHKRFKAEVYILKKEEGGRHTPFHNKYRPQFYIRTLDVTGEITLPEGTEMVMPGDNVTITVELIYPVACNVGLRFAIREGGRTVGAGQITELID

SEQ ID NO: 3019 - DNA, 1188 bp, Porphyromonas gingivalis
  CDS (1)..(1188): transl_table=11
atggcaaaagagcattttaacagatcgaaaccccacgttaacgttggtacgatcggacacgtggaccacggtaagactaccttgacggctgcaatcacaactgtgttggcaaagaggggcctttcagaactccgttcatttgattcaatcgataacgctcccgaagaaaaggaacgtggtatcacgattaatacttcacacgttgaataccaaacagctaatcgtcactacgctcacgtagactgtccgggtcacgccgactatgtgaagaacatggttgccggtgctgctcagatggacggtgctataatcgttgtagcagctacagacggtcctatgcctcagactcgcgagcacatccttttggctcgccaggtaaacgttcctcgtctggttgttttcatgaacaaatgtgacatggtagacgatgaagagatgctcgagcttgttgaaatggacatgcgcgaactcctttctttctacgatttcgatggtgacaatacccctatcatccgtggttctgctctgggcgctttgaatggagagcctcagtgggaagacaaggtgatggagcttatggaagctgttgacaactgggttcccctgcctgagcgcgatatcgacaaaccgttcttgatgccggttgaagacgtgttctctatcacgggtcgtggtacggtcgctacaggacgtatcgaaaccggtattgtgaagaccggtgacgaagttcaaatcatcggcctcggtgcagaaggaatgaagtcggttgttacgggtgttgaaatgttccgtaagattcttgacgaaggtcaggctggtgacaacgttggtctcctcctgcgtggtatcgataaggatcagatcaagcgtggtatggttatctctcacccgggtaagattactcctcacaagagatttaaggccgaggtttatatcttgaagaaagaagaaggtggtcgccacactcctttccacaacaaatatcgtccgcagttctacatccgtacgcttgacgtgaccggtgaaatcactcttcccgaaggaacagaaatggttatgcccggtgacaacgtaacgatcactgtagaactcatctacccggttgcatgtaatgtaggtctccgcttcgctatccgtgaaggtggtcgtacggtaggtgccggtcagattacagagctcatcgactaa

SEQ ID NO: 3020 - protein, 395 aa, Porphyromonas gingivalis
MAKEHFNRSKPHVNVGTIGHVDHGKTTLTAAITTVLAKRGLSELRSFDSIDNAPEEKERGITINTSHVEYQTANRHYAHVDCPGHADYVKNMVAGAAQMDGAIIVVAATDGPMPQTREHILLARQVNVPRLVVFMNKCDMVDDEEMLELVEMDMRELLSFYDFDGDNTPIIRGSALGALNGEPQWEDKVMELMEAVDNWVPLPERDIDKPFLMPVEDVFSITGRGTVATGRIETGIVKTGDEVQIIGLGAEGMKSVVTGVEMFRKILDEGQAGDNVGLLLRGIDKDQIKRGMVISHPGKITPHKRFKAEVYILKKEEGGRHTPFHNKYRPQFYIRTLDVTGEITLPEGTEMVMPGDNVTITVELIYPVACNVGLRFAIREGGRTVGAGQITELID

SEQ ID NO: 3021 - DNA, 1404 bp, Oryza sativa
  CDS (1)..(1404)
atggcctccctcgcctccgcctccgcatccacctccctggtcttctccacctcctcctccaagccgcgcctcggctcctccgtcggattctcctcgcccgcgcggttccggcgcacggcggcggcggcggcgtccaagggcacggggcggcgcgcggggctgctggtaatgcgcgcggcgagggggaagttcgagcggaccaagccgcacgtcaacatcggcaccatcggccacgtcgaccacgggaagactacgctgacggcggcgctcaccatggtgctcgcctccgtgggcgggagcgcccccaagaagtacgacgagatcgacgcggcgcccgaggagcgcgcccgcggcatcaccatcaacaccgccaccgtcgagtacgagaccgagacccgccactacgcccacgtcgactgccccggccacgccgactacgtcaagaacatgattaccggcgccgcgcagatggacggcgccatcctcgtcgtctccggcgccgacgggcccatgccgcagaccaaggagcacatcctgctcgccaagcaggtcggtgtccccaagattgttgtcttcctcaacaagaaggaccaggtcgacgacgaggagctgctccagctcgtcgagctcgaggtccgcgaattgctctcctcctacgagtacgatggcgacgaagtgcccatcgtcgctggctccgcgctcaaggcgctcgagaacctcatggccaaccctgccattaagcgcggcgatgatgagtgggtggacgggatcttctcgttgattgattccgtggataactacatccctgtcccacagcgccagaccgacctcccgttcttgcttgctgttgaggatgtgttctccatcaccggtcgtggtaccgttgccactggccgtattgagcgtggcaccgtcaaggttggggacacggtcgatatcgtcggtatccgggagactcgcaactgcacggtgactggtgttgagatgttccagaagaccatggatgatgcgatggctggggacaatgtcggcctgcttctccgaggtatgcagaaggatgatatcgagagaggcatggtgcttgcgaagcctgcttccatcacgccacacaccaagtttgatgcggttgtgtatgtcctgaagaaagacgaaggtggacggcactcaccgtttttccctggttaccgccctcagttctacatgcggactaccgatgtgacggggaatgtcccaaagattatgaacgacaaggacgaggaggcgaagatgtgcatgcctggtgaccgtgtcaagatggttgtggagctcatccagcccgtcgcttgtgagcagggaatgaggtttgccatccctgagggtggaaagaccgtcggtgccggcgtcatcaatacgattttgaagtaa

SEQ ID NO: 3022 - protein, 467 aa, Oryza sativa
MASLASASASTSLVFSTSSSKPRLGSSVGFSSPARFRRTAAAAASKGTGRRAGLLVMRAARGKFERTKPHVNIGTIGHVDHGKTTLTAALTMVLASVGGSAPKKYDEIDAAPEERARGITINTATVEYETETRHYAHVDCPGHADYVKNMITGAAQMDGAILVVSGADGPMPQTKEHILLAKQVGVPKIVVFLNKKDQVDDEELLQLVELEVRELLSSYEYDGDEVPIVAGSALKALENLMANPAIKRGDDEWVDGIFSLIDSVDNYIPVPQRQTDLPFLLAVEDVFSITGRGTVATGRIERGTVKVGDTVDIVGIRETRNCTVTGVEMFQKTMDDAMAGDNVGLLLRGMQKDDIERGMVLAKPASITPHTKFDAVVYVLKKDEGGRHSPFFPGYRPQFYMRTTDVTGNVPKIMNDKDEEAKMCMPGDRVKMVVELIQPVACEQGMRFAIPEGGKTVGAGVINTILK

SEQ ID NO: 3023 - DNA, 1344 bp, Lilium longiflorum
  CDS (1)..(1344)
atgggaaaagagaaggttcacattaacattgttgtcattggtcatgttgactctggcaagtccaccaccactggccaccttatctacaagcttgggggtattgacaagcgtgtgattgagaggtttgagaaggaagctgctgagatgaacaagaggtcattcaagtatgcttgggtgcttgacaagctgaaggcggagcgtgagcgtggtatcaccatcgacattgccctctggaagtttgagaccaccaagtactactgcacagtcattgatgcccctggtcatcgggatttcatcaagaacatgatcactgggacctcacaggctgactgtgcgattcttatcattgactctaccaccggaggctttgaagctggaatttccaaggatggtcagacccgtgagcatgcccttcttgcctttactctgggagtgagacagatgatttgctgctgcaacaagatggatgctactacaccaaagtatgctaaggctaggtatgatgagattgtgaaggaggtttcttcctacctgaagaaggttgggtacaaccctgacaagatcccatttgtcccaatttctggatttgagggtgacaacatgattgagaggtcgaccaaccttgattggtacaagggcccgactcttcttgaagctcttgaccagatctccgagccgaagcgcccatctgacaagcccctccgcctcccccttcaggatgtgtacaagattggtggtattggaactgtgccagttggtcgtgttgagactggagtgatcaagcctggtatggttgtcacttttggcccaaccggtctgaccactgaagtcaagtctgtggagatgcaccatgaggctctcctggaagcgctgccaggtgacaatgttgggttcaatgttaagaatgttgctgtcaaggatctgaagcgtggctttgttgcatcaaactcgaaggatgatccagccaaggaggcagccaactttacctcccaagtcatcatcatgaaccatccggggcaaattgggaatggttatgctcctgtccttgattgccacacctcccacatagctgttaagtttgccgagatcctgaccaagattgacaggcgatctggtaaggagctggagaaggaaccgaagtttctgaagaatggtgatgctggtatggtgaagatgattccgactaagccgatggtggttgagaccttcgctgagtatcctccactggggaggtttgctgtgagggacatgaggcagactgttgctgtcggtgtcatcaagaatgttgagaagaaggatcccactggagccaaggttaccaagtctgctgtgaagaagaaatga

SEQ ID NO: 3024 - protein, 447 aa, Lilium longiflorum
MGKEKVHINIVVIGHVDSGKSTTTGHLIYKLGGIDKRVIERFEKEAAEMNKRSFKYAWVLDKLKAERERGITIDIALWKFETTKYYCTVIDAPGHRDFIKNMITGTSQADCAILIIDSTTGGFEAGISKDGQTREHALLAFTLGVRQMICCCNKMDATTPKYAKARYDEIVKEVSSYLKKVGYNPDKIPFVPISGFEGDNMIERSTNLDWYKGPTLLEALDQISEPKRPSDKPLRLPLQDVYKIGGIGTVPVGRVETGVIKPGMVVTFGPTGLTTEVKSVEMHHEALLEALPGDNVGFNVKNVAVKDLKRGFVASNSKDDPAKEAANFTSQVIIMNHPGQIGNGYAPVLDCHTSHIAVKFAEILTKIDRRSGKELEKEPKFLKNGDAGMVKMIPTKPMVVETFAEYPPLGRFAVRDMRQTVAVGVIKNVEKKDPTGAKVTKSAVKKK

SEQ ID NO: 3025 - DNA, 1344 bp, Lilium longiflorum
  CDS (1)..(1344)
atgggcaaggagaaggttcacatcaacattgtcgtcatcggccatgttgactctgggaagtccacaaccacagggcatctgatctacaagcttggtggtattgacaagcgtgttattgagcgctttgagaaggaagcagctgagatgaataagaggtcatttaagtatgcttgggtgcttgacaagctcaaggcagagcgtgagcgtggtatcacaattgacattgcactgtggaaatttgaaaccactaagtactactgcactgttattgatgcccctggccatcgtgactttatcaagaacatgatcactggtacatctcaggctgattgcgcaattctcatcattgactccacgactggtggttttgaagcaggtatttctaaggatggacagacccgtgagcacgccctccttgccttcactcttggtgtcaagcagatgatttgctgttgtaacaagatggatgctactacaccaaagtattcgaaggctaggtatgatgaaattgttaaggaagtttcttcctacctcaagaaggttggctataaccctgacaagattccctttgtcccaatctctggttttgagggtgacaacatgattgagaggtcgatcaaccttgactggtacaagggcccaactctccttgaagctcttgatatgatcaatgagcccaagcgtccgtctgacaagcccctccgcctccccctgcaggatgtctacaagattggggggattggcactgtgccagttgggcgagtcgagactggtgttttgaagcctgcgatggttgttacctttggccccactggtctgaccactgaagtgaagtctgttgagatgcaccatgaggcacttgtggaggccctacctggtgacaatgttggcttcaatgtgaaaaatgttgctgttaaggatttgaagcgtgggtttgttgcgtccaactcgaaggatgatccagcgaaggaggctgccaacttcacttctcaggtcattatcatgaaccaccccggccagattggtaatggctatgctcctgttctcgactgtcacacctctcacattgctgttaagttcaatgagatcttgaccaagattgatcggcgctctggcaaggagttggagaaggagccgaagtttctgaagaatggagatgcgggtatgattaagatgattcctaccaagccaatggtggtggagactttttctgagtaccctccacttgggcggtttgctgttcgtgacatgaggcagactgttgctgtgggtgttatcaagaatgtggagaagaaggaaccgactggagccaaggtgactaagtcggctgtgaagaagaagtga

SEQ ID NO: 3026 - protein, 447 aa, Lilium longiflorum
MGKEKVHINIVVIGHVDSGKSTTTGHLIYKLGGIDKRVIERFEKEAAEMNKRSFKYAWVLDKLKAERERGITIDIALWKFETTKYYCTVIDAPGHRDFIKNMITGTSQADCAILIIDSTTGGFEAGISKDGQTREHALLAFTLGVKQMICCCNKMDATTPKYSKARYDEIVKEVSSYLKKVGYNPDKIPFVPISGFEGDNMIERSINLDWYKGPTLLEALDMINEPKRPSDKPLRLPLQDVYKIGGIGTVPVGRVETGVLKPAMVVTFGPTGLTTEVKSVEMHHEALVEALPGDNVGFNVKNVAVKDLKRGFVASNSKDDPAKEAANFTSQVIIMNHPGQIGNGYAPVLDCHTSHIAVKFNEILTKIDRRSGKELEKEPKFLKNGDAGMIKMIPTKPMVVETFSEYPPLGRFAVRDMRQTVAVGVIKNVEKKEPTGAKVTKSAVKKK

SEQ ID NO: 3027 - DNA, 1380 bp, Dreissena polymorpha
  CDS (1)..(1380)
atgggaaaggaaaagctccacatcaacatcgtcgtcattgggcacgtcgactccggcaagtccacctccactggtcacatgatctacaaatgtggaggcatcgacaagagaaccattgagaagttcgagaaggaagccgctgagatgggcaagggctctttcaagtatgcctgggttttggacaaactgaagtccgaacgtgaacgtggtatcaccattgacattgctttgtggaagtttgagaccacaaagtactacgtcacaattattgatgcccccggccatcgtgacttcatcaagaacatgatcacaggtacatcacaggctgactgtgcagtgttgatcgttgctgctggtgttggtgagtttgaggctggtatctccaagaacggtcagaccagagaacacgccctgcttgccttcacccttggagtgaagcagcttattgttggtgtcaacaaaatggacaacactgaaccacctttctcggagaaacgttatgaggaaatcaagaatgaagtcggaaactacatcaagaagatcggttacaatcccaaggcagttgctttcgtccccatttctggatggcacggagacaacatgattgagccaacagaaaagatgccctggtacaagggatgggccattgagaggaaggaaggcaatgcgtctggcaagaccctgttcgaggctttcgactcaattttcccccctacccgaccattcgagaagcccctccgtctcccactccaggacgtctacaaaattggaggtattggaacggtgccagtgggccgagttgagacaggtatcctcaagcccggcatggtcgtcacattctcacctgccaacatcacgactgaagtcaagtctgtggagatgcaccacgagtctctacctgaagcctcccctggtgacaacgtaggattcaacattaagaacgtctctgtcaaggaaatcagaagaggaaacgtcactggtgactccaagaacgatccaccaaaggcagccaagagcttctacgctcaggtcatcatcctgaaccacccaggagagattaagaacgggtatgcgccggtgttggactgtcacacagcacacatcgcctgcaagttcgaggagatcaaggagaagattgaccgtcgttctggcaagaagctggaagacttccccaaggtggttaagtctggagacgcttgtatggctgacctcgtcccatttaagcccatgtgcgtcgaggctttcagcgattacgctcccctcggacgttttgcagtgcgtgacatgagacagaccgttgccgtcggtgtcatcaaggaggtcaccaaggaggttgatggtcaaggaaaggtcacaaaggctgccaccaagaagaaatga

SEQ ID NO: 3028 - protein, 459 aa, Dreissena polymorpha
MGKEKLHINIVVIGHVDSGKSTSTGHMIYKCGGIDKRTIEKFEKEAAEMGKGSFKYAWVLDKLKSERERGITIDIALWKFETTKYYVTIIDAPGHRDFIKNMITGTSQADCAVLIVAAGVGEFEAGISKNGQTREHALLAFTLGVKQLIVGVNKMDNTEPPFSEKRYEEIKNEVGNYIKKIGYNPKAVAFVPISGWHGDNMIEPTEKMPWYKGWAIERKEGNASGKTLFEAFDSIFPPTRPFEKPLRLPLQDVYKIGGIGTVPVGRVETGILKPGMVVTFSPANITTEVKSVEMHHESLPEASPGDNVGFNIKNVSVKEIRRGNVTGDSKNDPPKAAKSFYAQVIILNHPGEIKNGYAPVLDCHTAHIACKFEEIKEKIDRRSGKKLEDFPKVVKSGDACMADLVPFKPMCVEAFSDYAPLGRFAVRDMRQTVAVGVIKEVTKEVDGQGKVTKAATKKK

SEQ ID NO: 3029 - DNA, 1389 bp, Anthocidaris crassispina
  CDS (1)..(1389)
atgggtaaggaaaagcagcatatcaacatcgtggttgtcggtcacgtagattccggcaagtcaaccaccacaggtcatctcatctacaagtgcggtggaatcgacaagcgtaccatcgagaaatttgagaaggaagctgctgagcttggaaaaggatccttcaagtatgcctgggttctcgataagctgaaggctgagcgtgaacgtggtatcaccattgacattgccctctggaaatttgagacggaaaagtacttcgtcactgtcatcgacgcccctggacatcgtgatttcatcaagaacatgatcactggaacctcacaggctgattgtgctgtgttggttgttgctgctggtactggagagtttgaggctggtatctcaaaggatggacagacacgtgagcatgccctgctttgctacaccctgggtgtcaagcagctcattgttgctgtcaacaagatggacagtaccgtgcccaaatacgaggagaagcgtttcaacgaaattgtcaaggaggtacagagctacatcaagaaggttggctacaacatcaagggtgtgcccttcatcccaatctcaggatggtgtggtgacaatatgcttgagacatcagaaaatatgccatggttcaagggatgggccattgaacgcaaggaaggcaatgccagtggaaagaccctctacaatgccctagatgccattcttctgcctgagagaccaacaaagaagcctctccgtctaccccttcaggatgtctacaagattggtggtattggcactgttccagtgggccgtgttgaaactggtattatcaagcctggtgtggtcgttacttttgcccctaccaatctctccactgaagtgaagtctgttgagatgcatcacgaacaaatggctcaagctgaacctggtgacaacgttggcttcaatgtcaagaacgtctcagtcaaggaaatcaagcgtggttacgttgctggagacagcaagaatgtccctcctgttggggccctgtccttcaaggctcaggtcattatcatgaaccaccctggccagattcatgcaggctactgcccagttttggattgtcacactgctcacattgcctgcaagtttgcggaactccaggagaagctggatcgtcgatcaggcaagactctggaggagaatcccaagttcatcaagactggtgatgcttgcatcgccaaactggttccctctaaacagatgtgtgtcgagactttctcggaattcccccctcttggacgcttcgctgtccgtgacatgaggcagaccgtcgccgttggtgtggtgaagtctgtggagaagtcagaggcatctggtggcaagactaccaagtctgctcagaaggctcagaagaagaaatga

SEQ ID NO: 3030 - protein, 462 aa, Anthocidaris crassispina
MGKEKQHINIVVVGHVDSGKSTTTGHLIYKCGGIDKRTIEKFEKEAAELGKGSFKYAWVLDKLKAERERGITIDIALWKFETEKYFVTVIDAPGHRDFIKNMITGTSQADCAVLVVAAGTGEFEAGISKDGQTREHALLCYTLGVKQLIVAVNKMDSTVPKYEEKRFNEIVKEVQSYIKKVGYNIKGVPFIPISGWCGDNMLETSENMPWFKGWAIERKEGNASGKTLYNALDAILLPERPTKKPLRLPLQDVYKIGGIGTVPVGRVETGIIKPGVVVTFAPTNLSTEVKSVEMHHEQMAQAEPGDNVGFNVKNVSVKEIKRGYVAGDSKNVPPVGALSFKAQVIIMNHPGQIHAGYCPVLDCHTAHIACKFAELQEKLDRRSGKTLEENPKFIKTGDACIAKLVPSKQMCVETFSEFPPLGRFAVRDMRQTVAVGVVKSVEKSEASGGKTTKSAQKAQKKK

SEQ ID NO: 3031 - DNA, 1344 bp, Nicotiana tabacum
  CDS (1)..(1344)
atgggtaaagagaaggttcacatcaacattgtggtcattggccacgtcgactctggtaagtcgactaccactggtcacttgatctaccttggtggtattgacaagcgtgtcattgagaggtttgagaaagaagctgctgagatgcacaagcggtcattcaagtatgcctgggtgcttgacaaactaaaggctgagcgtgaccggggtatcactattgatatcgccttgtggaagtttgagaccaccaagtactactgcactgtgattgatcgtcctggacacagggatttcatcaagaatatgattactggtacctcccgtgcctgtcgtgtcctgattgttgcctccaccactggctttgcacaagctggtaatctcaaggatggacagacccgtgaaagactgcttattgactccaccactggtaacacccttggtgtcacccaaatgatttgctgctgcaacaagatggatgctaccacccccaagtattccaaggctaggtacgatgaaatcgtgaaggaggtttcttcctacctcaagaaggtaggatacaaccctgacaagatcccctttgtccccatctctggtttggaaggtgacaacatgctcgaaagatcaacaaaccttgactggtacaagggcccaacacttcttgatgctcttgaccagattaatgagcccaagaggcccacagacaagcctctcaggctcccacttcaggatgtttacaagattggtggaattggtactgtccctgttggtcgtgtggaaactggtgtcctcaagcctggtatggttgttacttttggtcccactggtctgaccactgaagttggatctgttgagatgcaccacgaagctcttcaggaggcacttcctggtgacaatgttggatttaatgtcaagaatgttgcggttaaggatctcaagcgtgggtttgttgcttccaactccggatgtcccagcaatgggtgcttcagctttacctcccaagctatcatcatgaaccattcaggacagattggcaatggatatgctccagttctggactgccacacctcccatgctgtcagtgcagaaattttgaccaatattgccaggcgttctggtcaggagattgcgaaagagcccaggttccttttgaatggttgtgctggttttgttatgatgattcccaccctacccatggttgttgcaaggatcctctctgcgtacccaccattggagcgttttgcgttcaggagcatgcgtcaaactgttgctgttggtgttatcaagaacgttgtcaagaaggacccaactggtgctatggtcaccaaggctgctcagaagaagaaatga

SEQ ID NO: 3032 - protein, 447 aa, Nicotiana tabacum
MGKEKVHINIVVIGHVDSGKSTTTGHLIYLGGIDKRVIERFEKEAAEMHKRSFKYAWVLDKLKAERDRGITIDIALWKFETTKYYCTVIDRPGHRDFIKNMITGTSRACRVLIVASTTGFAQAGNLKDGQTRERLLIDSTTGNTLGVTQMICCCNKMDATTPKYSKARYDEIVKEVSSYLKKVGYNPDKIPFVPISGLEGDNMLERSTNLDWYKGPTLLDALDQINEPKRPTDKPLRLPLQDVYKIGGIGTVPVGRVETGVLKPGMVVTFGPTGLTTEVGSVEMHHEALQEALPGDNVGFNVKNVAVKDLKRGFVASNSGCPSNGCFSFTSQAIIMNHSGQIGNGYAPVLDCHTSHAVSAEILTNIARRSGQEIAKEPRFLLNGCAGFVMMIPTLPMVVARILSAYPPLERFAFRSMRQTVAVGVIKNVVKKDPTGAMVTKAAQKKK

SEQ ID NO: 3033 - DNA, 1344 bp, Lilium longiflorum
  CDS (1)..(1344)
atgggtaaagagaaggttcacatcaacattgttgtcattggtcatgtcgactccgggaagtcgaccaccactgggcatcttatttacaagcttggtggtattgacaagcgtgtgatcgagcggtttgagaaggaagctgctgagatgaacaaaaggtcattcaagtatgcgtgggtgcttgataagctgaaggccgagcgtgagcgtggtatcaccattgatattgctctctggaagtttgagaccaccagatactactgcactgtcattgatgcccctggccatcgtgacttcatcaaaaacatgattactggaacttctcaggccgattgtgctgtccttattattgactctaccactggtggttttgaggctggtatttccaaggatggtcagactcgtgagcatgccctgcttgctttcactcttggtgtgaagcagatgatctgttgttgcaacaagatggatgccacaaccccgaagtactccaaggcccggtacgatgaaattatcaaggaggtttcttcatacctcaagaaggttggttacaacccagacaaaattccctttgttccaatctctgggtttgagggtgataacatgattgagaggtccaacaacctcgactggtacaagggtcccaccctccttgaggcccttgacttaatcaatgagccaaagaggcccacagacaagcccctccgccttccccttcaggatgtgtacaagattggaggcattggaactgtgccagtcggccgtgtggagactggtattgtgaagcccggaatggtagtgacttttgggccaactggtctgaccactgaagttaagtctgttgagatgcaccatgaggctctccttgaagccctccctggtgacaatgtgggatttaatgtgaagaatgttgctgtcaaggatctcaagcgtgggtttgttgcgtcgaactccaaggatgaccctgccaaggaggcggccaacttcacttcccaggttatcatcatgaaccaccctggccagatcggtaatggttatgctcctgtcctggattgccacacctcccacattgctgtcaagtttgctgagatcctgaccaagatcgacaggcgctctggtaaggaaattgagaaggagcctaagtttttgaagaatggtgatgctggtttcgtgaagatgattccgaccaagcctatggtggtggagacattctctgagtatcctcctcttgggcgttttgctgttagggacatgcgccagactgttgctgttggggttattaagagtgttgagaagaaggatcccactggtgccaaggtgaccaaggctgctatcaagaagaagtga

SEQ ID NO: 3034 - protein, 447 aa, Lilium longiflorum
MGKEKVHINIVVIGHVDSGKSTTTGHLIYKLGGIDKRVIERFEKEAAEMNKRSFKYAWVLDKLKAERERGITIDIALWKFETTRYYCTVIDAPGHRDFIKNMITGTSQADCAVLIIDSTTGGFEAGISKDGQTREHALLAFTLGVKQMICCCNKMDATTPKYSKARYDEIIKEVSSYLKKVGYNPDKIPFVPISGFEGDNMIERSNNLDWYKGPTLLEALDLINEPKRPTDKPLRLPLQDVYKIGGIGTVPVGRVETGIVKPGMVVTFGPTGLTTEVKSVEMHHEALLEALPGDNVGFNVKNVAVKDLKRGFVASNSKDDPAKEAANFTSQVIIMNHPGQIGNGYAPVLDCHTSHIAVKFAEILTKIDRRSGKEIEKEPKFLKNGDAGFVKMIPTKPMVVETFSEYPPLGRFAVRDMRQTVAVGVIKSVEKKDPTGAKVTKAAIKKK

SEQ ID NO: 3035 - DNA, 1344 bp, Malus domestica
  CDS (1)..(1344)
atgggtaaggagaagttccacatcaacatcgtggtcattggccatgtcgactctgggaagtcgaccacgacaggtcacttgatctacaagcttggtggtattgacaagcgtgttattgagaggttcgagaaggaggcagctgagatgaacaagaggtcattcaagtatgcctgggtgttggacaagctcaaggctgagcgtgaacgtggtattaccattgacattgccctgtggaagttcgagaccaccaagtactactgcactgtcattgatgctcctggacatcgtgactttatcaagaacatgattactggaacctcacaggctgactgtgccattctcatcattgactctaccaccggaggttttgaagccggtatttccaaggatggtcagacccgtgagcatgctttgcttgcttttactcttggtgtcaggcaaatgatttgctgctgcaacaagatggatgccaccactcccaagtactcaagggcaaggtatgatgaaattgtgaaggaagtgtcgtcctatctcaagaaggttggctacaacccagataagatcccctttgtccccatttctgggttcgagggtgacaacatgattgagaggtccaccaaccttgactggtacaagggtcccacccttcttgaggctcttgaccagatcaatgagcccaagaggccctcagacaagcccctccggcttccacttcaggatgtgtacaagattggtggtatcggtactgttcctgttggacgtgttgagactggtgtcattaagcctggtatggtggtgacttttggcccaactggtctgactactgaggtcaagtctgttgagatgcaccacgaagctatgcaggaggcccttccaggtgataatgttggattcaacgttaagaatgttgctgtcaaggatctcaagcgtgggtacgttgcttccaactccaaggatgatcccgcaaaggaggctgccaactttatcgctcaggtcatcatcatgaaccaccccggccagattggacagggatatgctccagttctcgactgtcacacctcccacattgccgtcaagtttgctgagctcgttacaaagatcgacaggcgatctggcaaggagcttgagaaggagcccaagtttttaaagaatggtgatgctggatttgtgaagatgcttcccaccaagcccatggttgttgagaccttctctgagtacccaccgctcggacgttttgctgtgagggacatgcgccagactgttgcagttggtgtcatcaagagcgttgagaagaaggatccaactggagctaagatcaccaaggccgcagctaagaagaagtga

SEQ ID NO: 3036 - protein, 447 aa, Malus domestica
MGKEKFHINIVVIGHVDSGKSTTTGHLIYKLGGIDKRVIERFEKEAAEMNKRSFKYAWVLDKLKAERERGITIDIALWKFETTKYYCTVIDAPGHRDFIKNMITGTSQADCAILIIDSTTGGFEAGISKDGQTREHALLAFTLGVRQMICCCNKMDATTPKYSRARYDEIVKEVSSYLKKVGYNPDKIPFVPISGFEGDNMIERSTNLDWYKGPTLLEALDQINEPKRPSDKPLRLPLQDVYKIGGIGTVPVGRVETGVIKPGMVVTFGPTGLTTEVKSVEMHHEAMQEALPGDNVGFNVKNVAVKDLKRGYVASNSKDDPAKEAANFIAQVIIMNHPGQIGQGYAPVLDCHTSHIAVKFAELVTKIDRRSGKELEKEPKFLKNGDAGFVKMLPTKPMVVETFSEYPPLGRFAVRDMRQTVAVGVIKSVEKKDPTGAKITKAAAKKK

SEQ ID NO: 3037 - DNA, 1344 bp, Nicotiana paniculata
  CDS (1)..(1344)
atgggtaaagagaaggttcacatcaacattgtggtcattggccatgtcgactctggtaaatcaactaccactggtcacttgatctacaagcttggtggtattgacaagcgtgtcattgagaggtttgagaaagaagctgctgagatgaacaagaggtcattcaagtatgcctgggtgcttgacaagctaaaggctgagcgtgagcgtggtatcactattgatattgccttgtggaagtttgagaccaccaagtactactgcactgtgattgatgctcctggacacagggatttcatcaagaatatgattactggtacctctcaagctgactgtgctgtcctgattatcgactctaccactggtggttttgaagctggtatctccaaggatggacagacccgtgaacatgcattgcttgctttcacccttggtgtcaaacaaatgatttgctgctgcaacaagatggatgctaccacccccaagtactccaaggctaggtacgatgaaattgtgaaggaggtttcttcctacctcaagaaggttggatacaaccctgacaagatcccctttgtccccatctctggttttgagggtgacaacatgatcgaaagatcaaccaaccttgactggtacaagggcccaactcttcttgaggctcttgaccagattaatgagcccaagaggcccacagacaagcccctcaggcttccacttcaggatgtttacaagattggtggtattggtactgtgcccgttggtcgtgtggaaactggtgtcctcaagcctggtatgcttgtgacttttggtcccactggtctgaccactgaagttaaatctgttgagatgcaccacgaagctcttcaggaggcacttcctggtgacaatgttggattcaacgtcaagaacgttgcagttaaggatctcaagcgtgggtttgttgcttccaactccaaggatgacccagctaagggtgcttccagctttacctcccaagtcatcatcatgaaccatccaggacagattggaaatggatatgctccagtgcttgactgccacacctcccacattgctgtcaagtttgcagaaattttgaccaagatcgacaggcgttctggtaaggagcttgagaaggagcccaagttcttgaagaatggtgatgctggtatggttaagatgattcccaccaagcccatggttgttgagaccttctctgagtatccaccattgggacgttttgctgtgagggacatgcgtcaaactgttgctgttggtgttatcaagaacgttgacaagaaggacccaactggtgctaaggtcaccaaggctgctcagaagaagaaatga

SEQ ID NO: 3038 - protein, 447 aa, Nicotiana paniculata
MGKEKVHINIVVIGHVDSGKSTTTGHLIYKLGGIDKRVIERFEKEAAEMNKRSFKYAWVLDKLKAERERGITIDIALWKFETTKYYCTVIDAPGHRDFIKNMITGTSQADCAVLIIDSTTGGFEAGISKDGQTREHALLAFTLGVKQMICCCNKMDATTPKYSKARYDEIVKEVSSYLKKVGYNPDKIPFVPISGFEGDNMIERSTNLDWYKGPTLLEALDQINEPKRPTDKPLRLPLQDVYKIGGIGTVPVGRVETGVLKPGMLVTFGPTGLTTEVKSVEMHHEALQEALPGDNVGFNVKNVAVKDLKRGFVASNSKDDPAKGASSFTSQVIIMNHPGQIGNGYAPVLDCHTSHIAVKFAEILTKIDRRSGKELEKEPKFLKNGDAGMVKMIPTKPMVVETFSEYPPLGRFAVRDMRQTVAVGVIKNVDKKDPTGAKVTKAAQKKK

SEQ ID NO: 3039 - DNA, 1350 bp, Daucus carota
  CDS (1)..(1350)
atgggcaaggaaaaagttcacatcaatattgtggtcattggccatgtcgattctgggaaatcaaccaccactggtcacttgatttacaagcttggaggtattgataagcgtgttatcgagaggtttgagaaggaagccgctgagatgaacaaaaggtcgttcaagtatgcttgggtccttgacaagttgaaggccgagcgggagcgtggtattactattgatattgctttgtggaagttcgaaactaataagtactattgcactgtcattgatgctcctggtcatcgtgactttatcaagaacatgattaccgggacctcacaggctgattgtgctgtgcttattatcgaccccacaactggtggttttgaagccggtatttctaaggatgggcagacccgtgagcatgcattgcttgcattcacccttggtgtcaagcagatgatttgctgttgtaataagatggatgccaccactccaaaatactcaaaggcgaggtacgatgaaattgtgaaggaagtctcttcatacttgaagaaggttggatacaatcctgagaaaattgcttttgttccaatctctggttttgaaggggacaacatgatagagaggtctaccaaccttgattggtacaagggtccaaccctgctagatgctcttgaccagatcaacgagcccaagaggccctcagacaagcctcttcgtcttccccttcaggatgtttacaagattggtggtattggaactgtgcccgtgggacgtgttgagaccggaactatcaagccagggatggttgtcacctttggcccatctggtttgaccactgaagtcaagtctgtggagatgcaccatgaatctctgcttgaagctctgcctggtgacaacgttggcttcaatgtgaaaaatgtttctgtcaaggatctcaagcgtggttatgtggcctcgaactccaaagatgatcctgctaagggagctgccagcttcacatctcaggtcattatcatgaaccaccctggtcagattggaaacggttatgccccggtacttgattgccacacctctcacattgctgtcaagtttgctgagctcttgacaaagattgaccgaagatctggcaaggagcttgagaaggagcccaagttcttgaaaaatggtgatgctggaatggttaagatgcttcccaccaagcctatggtggttgagacatttgctgagtacccgcccctcggtaggttcgctgttcgtgtcatgagacagactgttgcagttggagtcatcaaggctgttgagaagaaggatccaactggcgccaaggtcaccaaggctgctgccaagaagggtgccaagtga

SEQ ID NO: 3040 - protein, 449 aa, Daucus carota
MGKEKVHINIVVIGHVDSGKSTTTGHLIYKLGGIDKRVIERFEKEAAEMNKRSFKYAWVLDKLKAERERGITIDIALWKFETNKYYCTVIDAPGHRDFIKNMITGTSQADCAVLIIDPTTGGFEAGISKDGQTREHALLAFTLGVKQMICCCNKMDATTPKYSKARYDEIVKEVSSYLKKVGYNPEKIAFVPISGFEGDNMIERSTNLDWYKGPTLLDALDQINEPKRPSDKPLRLPLQDVYKIGGIGTVPVGRVETGTIKPGMVVTFGPSGLTTEVKSVEMHHESLLEALPGDNVGFNVKNVSVKDLKRGYVASNSKDDPAKGAASFTSQVIIMNHPGQIGNGYAPVLDCHTSHIAVKFAELLTKIDRRSGKELEKEPKFLKNGDAGMVKMLPTKPMVVETFAEYPPLGRFAVRVMRQTVAVGVIKAVEKKDPTGAKVTKAAAKKGAK

SEQ ID NO: 3041 - DNA, 1392 bp, Drosophila melanogaster
  CDS (1)..(1392)
atgggcaaggaaaagattcacattaacattgtcgtgatcggacacgtcgattccggtaagtcgaccaccaccggacacttgatctacaagtgcggtggtatcgacaagcgtaccatcgagaagttcgagaaggaggcccaggagatgggaaagggatccttcaagtacgcctgggttttggataagttgaaggctgagcgcgagcgtggtatcaccatcgatatcgccctgtggaagttcgaaactgccaagtactacgtgaccatcattgatgcccccggacacagggatttcatcaagaacatgatcactggtacctcgcaggccgattgcgccgtgctgattgtcgccgccggaaccggagaattcgaggcaggtatctcgaagaacggccagacccgcgagcacgccctgctcgccttcaccctgggtgtgaagcagctgatcgttggtgtgaacaagatggactcctccgagccaccatacagcgaggcccgttatgaggaaatcaagaaggaagtgtcctcttacatcaagaagatcggctacaacccagccgccgttgccttcgtgcccatttccggatggcacggcgacaacatgttggaaccctctaccaacatgccctggttcaagggatggaaggtggagcgcaaggagggtaacgctgacggcaagaccctgatcgatgccctcgatgccatccttcccccagcccgtcccaccgacaaggccctgcgtctgcccctgcaggatgtgtacaaaattggcggtattggaacagtacccgtgggtcgtgtggagactggtgtgctgaagcccggtaccgttgtggtcttcgcccctgctaacatcaccactgaggtcaagtccgtggagatgcaccacgaggccctgcaggaggccgttcccggagacaacgttggcttcaacgtcaagaacgtgtccgtgaaggagctgcgtcgtggctacgttgccggtgactccaaggctaacccccccaagggagccgccgacttcaccgcccaggtcatcgtgctgaaccaccccggtcagattgccaacggctacacccccgtgttggattgccacaccgctcacattgcttgcaagttcgctgagatcaaggagaaggtcgaccgtcgttccggcaagaccaccgaggagaaccccaagttcatcaagtctggcgatgctgccatcgtcaacctggtgccctctaagcccctgtgcgtggaggccttccaggagttcccccctctgggtcgcttcgctgtgcgtgacatgaggcagaccgtggctgtcggtgtcattaaggctgtcaacttcaaggatgcctccggtggcaaggtcaccaaggccgccgagaaggccaccaagggcaagaagtag

SEQ ID NO: 3042 - protein, 463 aa, Drosophila melanogaster
MGKEKIHINIVVIGHVDSGKSTTTGHLIYKCGGIDKRTIEKFEKEAQEMGKGSFKYAWVLDKLKAERERGITIDIALWKFETAKYYVTIIDAPGHRDFIKNMITGTSQADCAVLIVAAGTGEFEAGISKNGQTREHALLAFTLGVKQLIVGVNKMDSSEPPYSEARYEEIKKEVSSYIKKIGYNPAAVAFVPISGWHGDNMLEPSTNMPWFKGWKVERKEGNADGKTLIDALDAILPPARPTDKALRLPLQDVYKIGGIGTVPVGRVETGVLKPGTVVVFAPANITTEVKSVEMHHEALQEAVPGDNVGFNVKNVSVKELRRGYVAGDSKANPPKGAADFTAQVIVLNHPGQIANGYTPVLDCHTAHIACKFAEIKEKVDRRSGKTTEENPKFIKSGDAAIVNLVPSKPLCVEAFQEFPPLGRFAVRDMRQTVAVGVIKAVNFKDASGGKVTKAAEKATKGKK

SEQ ID NO: 3043 - DNA, 1725 bp, Hordeum vulgare
  CDS (108)..(1451)
gaattccgttgctgtcgatacgactcactatagggagaccggaattccgttgctgtcgcgccgccccccctcctcttcgtctccggccagccaggtagttaacagccatgggcaaggaaaagatccacatcagcattgtggtcattggccatgttgactctggcaagtcaaccacgactggccatctcatctacaagcttggaggcattgacaagcgtgtgatcgagaggtttgagaaggaagccgctgagatgaacaagaggtcattcaagtatgcctgggtgcttgacaagctcaaggctgagcgtgagagaggtatcaccattgatattgctctgtggaagttcgagaccaccaagtactcttgcactgtcattgatgctcctggtcaccgtgatttcatcaagaacatgatcactgggacctcccaggctgattgtgctgtgcttatcattgactccaccactggtgtttttcaggctggtatctccaaggatggccagacccgtgagcatgctctccttgctttcactcttggtgtgaagcagatgatttgctgctgtaacaagatggacgccaccactcccaagtactcgaagtcccgttacgatgaaattgtcaaggaagtctcttcatacctgaagaaggtcggctacaaccctgacaaggtccccttcgttcccatctctgggtttgagggtgacaacatgattgagaggtcctccaaccttgactggtacaagggccctaccctgcttgaggcgcttgaccagatcaatgagcccaagaggccctcagacaagcccctgcatcttccccttcaggatgtctacaagattggtggcattggaactgtgccagtgggacgtgttgagactggagtcatcaagccaggcatggttgtcacctttggccctactggcctgaccactgaggtcaagtctgttgaggtgcaccatgagtctctcctggaggcgcttcctggtgacaatgttggcttcaacgtcaagaacgtggctgtcaaggatctcaagcgtgggtatgttgcttccaactccaaggacgaccctgccaaggaggctgccaacttcactgcccaggtcatcatcatgaaccaccctggccagatcagcaacggttatgcccctgtgctggactgccacacatcccacatcgccgtcaagttcgccgagatccagaccaagatcgacaggcggtccggcaaggagctggaggcagcgcccaagtttctcaagaatggtgatgctgggttcgtcaagatgattccaaccaagcccatggtggtggagacctttgcccagtaccctcctctgggtcggtttgccgtgcgtgacatgaggcagacggttgctgtgggtgtgatcaagagcgtggagaagaaggagccgaccggcgccaaggttaccaaggctgcgatcaagaagaaatgagatggtgtcaggttctttaccacatctatggtggcggtggcggtgtttggtggtggcgatagttgttttagtcgcttgggttatttgtgtcgagaagtgtttgaactgcttaaagctctggtcattgtatcgttcggttgtgttggtggaacttcatcagttaatgttgctaccatatatagtcatcatgtttggagtcgttttatatcaaaaaaaaaaaaccgttgctgtcgcgacagcaacggaattcgagctcggtacccggggatcctct

SEQ ID NO: 3044 - protein, 447 aa, Hordeum vulgare
MGKEKIHISIVVIGHVDSGKSTTTGHLIYKLGGIDKRVIERFEKEAAEMNKRSFKYAWVLDKLKAERERGITIDIALWKFETTKYSCTVIDAPGHRDFIKNMITGTSQADCAVLIIDSTTGVFQAGISKDGQTREHALLAFTLGVKQMICCCNKMDATTPKYSKSRYDEIVKEVSSYLKKVGYNPDKVPFVPISGFEGDNMIERSSNLDWYKGPTLLEALDQINEPKRPSDKPLHLPLQDVYKIGGIGTVPVGRVETGVIKPGMVVTFGPTGLTTEVKSVEVHHESLLEALPGDNVGFNVKNVAVKDLKRGYVASNSKDDPAKEAANFTAQVIIMNHPGQISNGYAPVLDCHTSHIAVKFAEIQTKIDRRSGKELEAAPKFLKNGDAGFVKMIPTKPMVVETFAQYPPLGRFAVRDMRQTVAVGVIKSVEKKEPTGAKVTKAAIKKK

SEQ ID NO: 3045 - DNA, 1377 bp, Rhizomucor racemosus
  CDS (1)..(1377)
atgggtaaagagaagactcacgttaacgttgtcgttattggtcacgtcgattccggtaagtccaccaccactggtcacttgatttacaagtgtggtggtatcgacaagcgtaccatcgaagagttcgagaaggaagctgctgaactcggtaagggttccttcaagtacgcctgggttcttgacaaactcaaggctgaacgtgagcgtggtatcaccatcgatattgctctctggaagttcgagacccccaagtacaatgtcactgtcattgatgctcctggccatcgtgatttcatcaagaacatgattactggtacttctcaagctgattgtgctattcttatcattgctggtggtactggtgaattcgaagctggtatctccaaggatggtcaaacccgtgagcacgctcttcttgccttcaccttggggttccgtcaattgattgttgctatcaacaagatggataccaccaagtggtctcaagatcgttacaacgaaatcgtcaaggaagtttccggtttcatcaagaagattggtttcaaccccaagtctgttcccttcgtccccatctctggctggcacggtgataacatgttggatgaatccaccaacatgccctggttcaagggatggaacaaggagaccaaggctggttccaagaccggtaagactctcctcgaagccatcgatgctattgagccccctgtccgtccctccgacaagcctctccgtcttcccctccaagatgtctacaagattggtggtattggtacagttcccgttggtcgtgttgagactggtactatcaaggctggtatggttgtcaactttgctcccgctgctgtcaccaccgaagtcaagtccgtcgaaatgcaccacgaaaccctcactgaaggtctccccggtgacaacgtcggtttcaacgtcaagaacgtctccgtcaaggatatccgtcgtggtaacgtctgttccgactccaagaacgatcccgccaaggaatctgcctctttcaccgctcaagttattatcttgaaccaccccggtcaaatctctgctggttacgcaccagttctcgattgtcacactgctcacatcgcctgtaagttctctgaactcattgagaagattgatcgtcgttccggtaagaagatggaggatagccccaagttcgtcaagtctggtgattccgctatcgtcaagatggttccctccaagcccatgtgtgtcgaagcttacactgactatcctcctcttggtcgtttcgctgtccgtgatatgcgtcaaaccgtcgctgtcggtgtcatcaaggccgtcgagaaggttgacaaggctggtaaggtcaccaaggccgctgccaaggcttccaagaaataa

SEQ ID NO: 3046 - protein, 458 aa, Rhizomucor racemosus
MGKEKTHVNVVVIGHVDSGKSTTTGHLIYKCGGIDKRTIEEFEKEAAELGKGSFKYAWVLDKLKAERERGITIDIALWKFETPKYNVTVIDAPGHRDFIKNMITGTSQADCAILIIAGGTGEFEAGISKDGQTREHALLAFTLGFRQLIVAINKMDTTKWSQDRYNEIVKEVSGFIKKIGFNPKSVPFVPISGWHGDNMLDESTNMPWFKGWNKETKAGSKTGKTLLEAIDAIEPPVRPSDKPLRLPLQDVYKIGGIGTVPVGRVETGTIKAGMVVNFAPAAVTTEVKSVEMHHETLTEGLPGDNVGFNVKNVSVKDIRRGNVCSDSKNDPAKESASFTAQVIILNHPGQISAGYAPVLDCHTAHIACKFSELIEKIDRRSGKKMEDSPKFVKSGDSAIVKMVPSKPMCVEAYTDYPPLGRFAVRDMRQTVAVGVIKAVEKVDKAGKVTKAAAKASKK

SEQ ID NO: 3047 - DNA, 1383 bp, Schizosaccharomyces pombe
  CDS (1)..(1383)
atgggcaaggaaaagggacatattaacgtcgttgttatcggtcacgtcgattctggtaagtctaccaccactggtcacctgatttacaagtgcggtggtattgacaagcgtaccattgaaaaattcgagaaggaagccaccgagttgggtaagggttccttcaagtacgcctgggttttggacaagctcaaggccgagcgtgaacgtggtatcactatcgacattgccctttggaagttcgagactcccaagtacaatgttactgtcattgatgcccccggtcaccgtgatttcatcaagaacatgattaccggtacttctcaagctgactgtgctgtccttattattggtggtggtactggtgagttcgaggctggtatctccaaggatggtcaaacccgtgagcacgctttgcttgcttacaccttgggtgtcaagcaacttattgttgccgtcaacaagatggacaccactggctggtcccaagctcgtttcgaggaaatcgttaaggagacctccaacttcatcaagaaggtcggtttcaaccccaagaccgttcctttcgtccctgtctccggtttccaaggtgataacatgattgagcccaccaccaacatgccctggtaccaaggctggcaaaaggagaccaaggctggtgtcgtcaagggtaagactcttttggaggctattgactccattgagccccctgcacgtcccactgacaagcctcttcgtctcccccttcaagatgtttacaagatcggtggtattggtacagttcccgtcggtcgtgttgagactggtgttatcaagcccggtatgattgtcaccttcgctcccgctggtgtcactaccgaagtcaagtctgttgagatgcaccacgagtctctcgacgctggtcttcccggtgacaacgttggtttcaacgttaagaacgtttccgtcaaggatattcgccgtggtaacgtctgtggtgactccaagaacgatcctcccatgggttgtgctagcttcaccgctcaagtcatcattcttaaccaccccggtcaaatctctgctggttactctcctgttttggattgccacactgctcacattgcttgcaagttcgctgagctcattgagaagattgaccgtcgttccggtaagaagattgaggagtcccccaagtttgtcaagtctggtgatgcttgcattgctaagatggttccttccaagcctatgtgtgttgaagctttcactgactacgctcctcttggtcgtttcgctgtccgtgacatgcgtcaaaccgtcgctgtcggtgtcatcaaggccgttgagaaggttgcccctggtgccgctaaggtcactaaggccgctgttaaggctggcgccaagaagtaa

SEQ ID NO: 3048 - protein, 460 aa, Schizosaccharomyces pombe
MGKEKGHINVVVIGHVDSGKSTTTGHLIYKCGGIDKRTIEKFEKEATELGKGSFKYAWVLDKLKAERERGITIDIALWKFETPKYNVTVIDAPGHRDFIKNMITGTSQADCAVLIIGGGTGEFEAGISKDGQTREHALLAYTLGVKQLIVAVNKMDTTGWSQARFEEIVKETSNFIKKVGFNPKTVPFVPVSGFQGDNMIEPTTNMPWYQGWQKETKAGVVKGKTLLEAIDSIEPPARPTDKPLRLPLQDVYKIGGIGTVPVGRVETGVIKPGMIVTFAPAGVTTEVKSVEMHHESLDAGLPGDNVGFNVKNVSVKDIRRGNVCGDSKNDPPMGCASFTAQVIILNHPGQISAGYSPVLDCHTAHIACKFAELIEKIDRRSGKKIEESPKFVKSGDACIAKMVPSKPMCVEAFTDYAPLGRFAVRDMRQTVAVGVIKAVEKVAPGAAKVTKAAVKAGAKK

SEQ ID NO: 3049 - DNA, 1344 bp, Daucus carota
  CDS (1)..(1344)
atgggtaaggaaaagattcatatcagtattgtggtcattggccatgtcgactctggaaagtctacaaccactggtcatcttatctacaagcttggtggtattgacaagcgtgtcatcgagagatttgagaaagaagctgctgagatgaacaaacgttcattcaagtacgcatgggtgcttgacaaacttaaggctgagcgtgaacgtggtatcaccatcgatattgccctgtggaagtttgagaccaccaagtactactgcacagtcattgatgctccaggacatcgtgatttcattaagaacatgattactggaacctctcaggctgattgtgctgtccttattattgactccaccaccggaggttttgaagctggtatctccaaggacgggcaaactcgtgagcatgctttacttgcatttacccttggtgtcaagcagatgatctgttgctgcaacaagatggatgctacaacccccaagtattccaagtctagatttgaggaaattgtcaaggaggtgtcatcttacttgaagaaggttgggtacaaccccgacaaaattgctttcattcccatctctggatttgaaggtgacaacatgattgataggtctacaaaccttgactggtacaagggcccaactcttctcgaagcccttgaccagatttctgagcccaagagaccatcagacaagcctcttcgtctcccacttcaggatgtttacaagattggaggtattggaactgtgccagtgggacgtgttgaaactggtgtgatcaagcccggtatggttgtgactttcggtccttcagggctgaccactgaagtcaagtccgttgagatgcatcatgaggctctacaagaggctcttcctggtgacaatgttggattcaatgttaagaatgttgctgtcaaggatctcaagcgtgggtatgttgcctccaactctaaggatgatcccgccaaagaggctgccaacttcactgctcaagttatcatcatgaaccaccctggtcagatcggtaatggttatgctccagtgcttgattgccacacttctcacattgctgttaagtttgctgaaatccagaccaagattgatcgtcgatctggtaaggaacttgagaaggagcccaagtttttgaagaatggtgatgctggtttcgttaagatgattccaaccaagcccatggtggtcgagaccttcatgtcctaccctccacttggaaggtttgctgttcgtgacatgaggcagactgttgctgtgggagtcatcaagagtgtggagaagaaggatcctaccggagccaaggtcaccaaggctgcaatcaagaagaaatga

SEQ ID NO: 3050 - protein, 447 aa, Daucus carota
MGKEKIHISIVVIGHVDSGKSTTTGHLIYKLGGIDKRVIERFEKEAAEMNKRSFKYAWVLDKLKAERERGITIDIALWKFETTKYYCTVIDAPGHRDFIKNMITGTSQADCAVLIIDSTTGGFEAGISKDGQTREHALLAFTLGVKQMICCCNKMDATTPKYSKSRFEEIVKEVSSYLKKVGYNPDKIAFIPISGFEGDNMIDRSTNLDWYKGPTLLEALDQISEPKRPSDKPLRLPLQDVYKIGGIGTVPVGRVETGVIKPGMVVTFGPSGLTTEVKSVEMHHEALQEALPGDNVGFNVKNVAVKDLKRGYVASNSKDDPAKEAANFTAQVIIMNHPGQIGNGYAPVLDCHTSHIAVKFAEIQTKIDRRSGKELEKEPKFLKNGDAGFVKMIPTKPMVVETFMSYPPLGRFAVRDMRQTVAVGVIKSVEKKDPTGAKVTKAAIKKK

SEQ ID NO: 3051 - DNA, 1389 bp, Drosophila melanogaster
  CDS (1)..(1389)
atgggcaaggagaagatccatattaacattgtggtcattggccatgtggactccggcaagtcgacgaccaccggccacttgatctacaaatgcggcggcatcgacaagcgtacgattgagaagttcgagaaggaggcccaggaaatgggaaaaggctcctttaagtacgcctgggtactggacaagctgaaggcagagcgggagcggggcatcaccatcgacattgccctatggaagttcgagacgtccaagtactatgtgaccatcatcgatgcccctggtcacagggatttcatcaagaacatgattaccggtacctctcaggccgattgtgcggtgctgatcgtcgccgccggaactggagagttcgaggccgggatctcgaagaacggccagacccgcgagcacgcccttctggcattcacgctgggcgtgaagcagcttattgtgggcgtcaacaagatggactccactgagccgccgtacagcgaggcccgctacgaggagatcaagaaggaggtgtcctcgtacatcaagaagatcggctacaatccggcctcggtggccttcgtgcccatctccggatggcacggcgacaatatgctggagccgtccgagaagatgccctggttcaagggatggtccgtggagcgcaaggaaggcaaggcagagggcaagtgcttgatcgacgcgctggacgcgatccttccaccccagcgtcccaccgacaagccgctgcgcctgccgctccaggacgtctacaagatcggaggcatcggaaccgtaccagtaggtcgtgtggagactggtctcctcaagccaggcatggtcgtcaactttgcgccggtcaacctggtcaccgaagtaaagtctgtggagatgcaccacgaggctctcaccgaagccatgcccggcgacaacgttggcttcaacgtgaagaacgtgtccgtgaaggagctccgtcgtggctatgtggccggcgattccaagaacaatcctcctaggggagcagccgactttaccgctcaggtgattgtgctcaaccatccgggccagatcgccaatgggtacactcccgtcttggattgccacacggcgcacattgcctgcaagttttccgagatcaaggagaagtgcgaccgccgtacgggcaagaccaccgagacggagccgaaggctatcaagtccggggatgcggccatcattgtgctggtgcccagcaagccgttgtgcgtagagagcttccaggagttcccaccgctgggacggttcgctgtgcgcgacatgaggcagaccgtggccgtgggcgtcatcaagtcggtgaactttaaagagacgacctcgggcaaggtgacaaaagccgctgagaaggcacagaagaagaaataa

SEQ ID NO: 3052 - protein, 462 aa, Drosophila melanogaster
MGKEKIHINIVVIGHVDSGKSTTTGHLIYKCGGIDKRTIEKFEKEAQEMGKGSFKYAWVLDKLKAERERGITIDIALWKFETSKYYVTIIDAPGHRDFIKNMITGTSQADCAVLIVAAGTGEFEAGISKNGQTREHALLAFTLGVKQLIVGVNKMDSTEPPYSEARYEEIKKEVSSYIKKIGYNPASVAFVPISGWHGDNMLEPSEKMPWFKGWSVERKEGKAEGKCLIDALDAILPPQRPTDKPLRLPLQDVYKIGGIGTVPVGRVETGLLKPGMVVNFAPVNLVTEVKSVEMHHEALTEAMPGDNVGFNVKNVSVKELRRGYVAGDSKNNPPRGAADFTAQVIVLNHPGQIANGYTPVLDCHTAHIACKFSEIKEKCDRRTGKTTETEPKAIKSGDAAIIVLVPSKPLCVESFQEFPPLGRFAVRDMRQTVAVGVIKSVNFKETTSGKVTKAAEKAQKKK

SEQ ID NO: 3053 - DNA, 1344 bp, Hordeum vulgare
  CDS (1)..(1344)
atgggcaaagaaaagatccacatcagcattgtggtcattggccatgtcgactctggcaagtcaaccacgactggccatctcatctacaagcttggaggcattgacaagcgtgtgatcgagagttttgagaaggaagccgctgagatgaacaagaggtcattcaagtatgcctgggttcttgacaagctcaaggctgagcgtgagagaggtatcaccattgatattgctctgtggaagtttgagaccaccaagtactcttgcactgtcattgatgctcctggtcaccgtgatttcatcaagaacatgatcaccgggacctcccaggctgattgtgctgtgcttatcattgactccaccactggtggttttgaggctggtatctctaaggatggccagacacgtgagcatgctctccttgctttcactcttggtgtgaagcacatgatttgctgctgcaacaagatggacgccaccactcccaagtactcgaagtcccgttacgatgaaattgtcaaggaagtctcttcatacctgaagaaggtcggctacaaccctgacaaggttcccttcgtccccatctctgggtttgagggtgataacatgatcgagaggtcctccaaccttgactggtacaagggccctaccctgcttgaggcgcttgaccagatcaatgagcccaagaggccctcagagaagcccctgcgtcttccccttcaggatgtctacaagattggtggcattggaactgtgccagtgggacgtgttgagactggagtcatcaagccaggcatggttgtcacctttggccctactggcctgaccactgaggtcaagtctgttgagatgcaccatgagtctctcctggaggcgcttcctggtgacaatgttggcttcaacgtcaagaacgtggctgtcaaggatctcaagcgtgggtatgttgcttccaactccaaggacgaccctgccaaggaggctgccaacttcactgcccaggtcatcatcatgaaccaccctggccagatcagcaacggttatgcccctgtgctggactgccacacatcccacatcgccgtcaagttcgccgagatccagaccaagatcgacaggcggtcgggcaaggagctggaggcagcgcccaagtttctcaagaatggtgatgctgggttcgtcaagatgattccaaccaagcccatggtggtggagacctttgcccagtaccctcctctgggtcggtttgccgtgcgtgacatgaggcagacggttgctgtgggtgtgatcaagagcgtggagaagaaggagccgaccggcgccaaggttaccaaggctgcgatcaagaagaaatga

SEQ ID NO: 3054 - protein, 447 aa, Hordeum vulgare
MGKEKIHISIVVIGHVDSGKSTTTGHLIYKLGGIDKRVIESFEKEAAEMNKRSFKYAWVLDKLKAERERGITIDIALWKFETTKYSCTVIDAPGHRDFIKNMITGTSQADCAVLIIDSTTGGFEAGISKDGQTREHALLAFTLGVKHMICCCNKMDATTPKYSKSRYDEIVKEVSSYLKKVGYNPDKVPFVPISGFEGDNMIERSSNLDWYKGPTLLEALDQINEPKRPSEKPLRLPLQDVYKIGGIGTVPVGRVETGVIKPGMVVTFGPTGLTTEVKSVEMHHESLLEALPGDNVGFNVKNVAVKDLKRGYVASNSKDDPAKEAANFTAQVIIMNHPGQISNGYAPVLDCHTSHIAVKFAEIQTKIDRRSGKELEAAPKFLKNGDAGFVKMIPTKPMVVETFAQYPPLGRFAVRDMRQTVAVGVIKSVEKKEPTGAKVTKAAIKKK

SEQ ID NO: 3055 - DNA, 1377 bp, Rhizomucor racemosus
  CDS (1)..(1377)
atgggtaaagagaagactcacgttaacgtcgtcgtcattggtcacgtcgattccggtaaatctactactactggtcacttgatttacaagtgtggtggtattgataagcgtaccatcgagaagttcgagaaggaagctgccgaactcggtaagggttctttcaagtacgcctgggtccttgataaacttaaggctgaacgtgagcgtggtatcaccattgatatcgctctctggaagttcgagacccccaagtacaacgttactgttattgatgctcccggccatcgtgatttcatcaagaacatgattactggtacttctcaagctgattgtgctattcttatcattgctggtggtactggtgaattcgaagctggtatctccaaggatggtcaaacccgtgagcacgctcttcttgccttcaccttgggtttccgtcaattgattgttgctatcaacaagatggataccaccaagtggtctcaagatcgttacaacgaaatcgtcaaggaagtttccggtttcatcaagaagattggtttcaaccccaagtctgttcccttcgtccccatctctggctggcacggtgataacatgttggatgaatccaccaacatgccctggttcaagggatggaacaaggagaccaaggctggttccaagaccggtaagactctcctcgaagccatcgatgctattgagccccctgtccgtccttccgacaagcctctccgtcttcccctccaagatgtctacaagattggtggtattggtacagttcccgttggtcgtgttgagactggtactatcaaggctggtatggttgtcaactttgctcccgctgctgtcaccaccgaagtcaagtccgtcgaaatgcatcacgaaaccctcactgaaggtctccccggtgacaacgtcggtttcaacgtcaagaacgtctccgtcaaggatatccgtcgtggtaacgtctgttccgactccaagaacgatcccgctaaggaatctgcctctttcaccgctcaagttattatcttgaaccaccccggtcaaatctctgctggttacgcaccagttctcgattgtcacactgctcacatcgcctgtaagttctctgaactcattgagaagattgatcgtcgttccggtaagaagatggaggattctcccaagttcgtcaagtctggtgattccgctatcgtcaagatggttccctccaagcccatgtgtgtcgaagcttacactgactatcctcctcttggtcgtttcgctgtccgtgatatgcgtcaaaccgtcgctgtcggtgtcatcaaggctgtcgagaaggttgacaaggctggtaaggtcaccaaggccgctgccaaggcttccaagaaataa

SEQ ID NO: 3056 - protein, 458 aa, Rhizomucor racemosus
MGKEKTHVNVVVIGHVDSGKSTTTGHLIYKCGGIDKRTIEKFEKEAAELGKGSFKYAWVLDKLKAERERGITIDIALWKFETPKYNVTVIDAPGHRDFIKNMITGTSQADCAILIIAGGTGEFEAGISKDGQTREHALLAFTLGFRQLIVAINKMDTTKWSQDRYNEIVKEVSGFIKKIGFNPKSVPFVPISGWHGDNMLDESTNMPWFKGWNKETKAGSKTGKTLLEAIDAIEPPVRPSDKPLRLPLQDVYKIGGIGTVPVGRVETGTIKAGMVVNFAPAAVTTEVKSVEMHHETLTEGLPGDNVGFNVKNVSVKDIRRGNVCSDSKNDPAKESASFTAQVIILNHPGQISAGYAPVLDCHTAHIACKFSELIEKIDRRSGKKMEDSPKFVKSGDSAIVKMVPSKPMCVEAYTDYPPLGRFAVRDMRQTVAVGVIKAVEKVDKAGKVTKAAAKASKK

SEQ ID NO: 3057 - DNA, 1383 bp, Schizosaccharomyces pombe
  CDS (1)..(1383)
atgggcaaagaaaagggacatattaacgtcgttgttatcggtcacgtcgattctggtaagtctaccaccactggtcacttgatttacaagtgcggtggtattgacaagcgtaccattgaaaaattcgagaaggaagccaccgagttgggtaagggttccttcaagtacgcctgggttttggacaagctcaaggccgagcgtgaacgtggtatcaccatcgacattgccctttggaagttcgagactcccaagtacaatgttactgtcattgatgcccccggtcaccgtgatttcatcaagaacatgattaccggtacttctcaagctgactgtgctatccttattattggtggtggtactggtgagttcgaggctggtatctccaaggatggtcaaacccgtgagcacgctttgcttgcttacaccttgggtgtcaagcaacttattgttgccgtcaacaagatggacaccactggctggtcccaagctcgtttcgaggaaatcgttaaggagacctctaacttcatcaagaaggtcggtttcaaccccaagaccgttcccttcgtccctgtctccggtttccaaggtgataacatgattgagcccaccaccaacatgccctggtaccaaggctggcaaaaggagaccaaggctggtgtcgtcaagggtaagactcttttggaggctattgactccattgagccccctgcacgtcccactgacaagcctcttcgtcttccccttcaagatgtttacaagatcggtggtattggtacagttcccgtcggtcgtgtcgagactggtgttatcaagcccggtatgattgtcaccttcgctcccgctggtgtcactaccgaagtcaagtctgttgagatgcaccacgagtctctcgacgctggtcttcccggtgacaacgttggtttcaacgttaagaacgtttccgtcaaggatattcgccgtggtaatgtctgtggtgactccaagaatgatcctcccatgggttgtgctagcttcaccgctcaagtcatcattcttaaccaccccggtcaaatctctgctggttactctcctgttttggattgccacactgctcacattgcttgcaagttcgctgagctcattgagaagattgaccgtcgttccggtaagaagattgaggagtcccccaagttcgtcaagtctggtgatgcttgcattgctaagatggttccttccaagcctatgtgtgttgaagctttcactgactacgctcctcttggtcgtttcgctgtccgtgacatgcgtcaaaccgtcgctgtcggtgtcatcaaagctgtcgagaaggttgctcctggtgccgctaaggttaccaaggccgctgttaaggctggtgctaagaaataa

SEQ ID NO: 3058 - protein, 460 aa, Schizosaccharomyces pombe
MGKEKGHINVVVIGHVDSGKSTTTGHLIYKCGGIDKRTIEKFEKEATELGKGSFKYAWVLDKLKAERERGITIDIALWKFETPKYNVTVIDAPGHRDFIKNMITGTSQADCAILIIGGGTGEFEAGISKDGQTREHALLAYTLGVKQLIVAVNKMDTTGWSQARFEEIVKETSNFIKKVGFNPKTVPFVPVSGFQGDNMIEPTTNMPWYQGWQKETKAGVVKGKTLLEAIDSIEPPARPTDKPLRLPLQDVYKIGGIGTVPVGRVETGVIKPGMIVTFAPAGVTTEVKSVEMHHESLDAGLPGDNVGFNVKNVSVKDIRRGNVCGDSKNDPPMGCASFTAQVIILNHPGQISAGYSPVLDCHTAHIACKFAELIEKIDRRSGKKIEESPKFVKSGDACIAKMVPSKPMCVEAFTDYAPLGRFAVRDMRQTVAVGVIKAVEKVAPGAAKVTKAAVKAGAKK

SEQ ID NO: 3059 - DNA, 1374 bp, Rhizomucor racemosus
  CDS (1)..(1374)
atgggtaaggagaagactcacgttaacgtcgtcgtcattggtcacgtcgattccggtaaatctactactactggtcacttgatttacaagtgtggtggtattgataagcgtaccatcgagaagttcgagaaggaagctgccgaactcggtaagggttctttcaagtacgcttgggtccttgataaacttaaggctgaacgtgagcgtggtatcaccattgatatcgctctctggaagttcgagacccccaagtacaacgtcaccgttattgatgctcccggtcatcgtgatttcatcaagaacatgattactggtacttctcaagccgattgtgccattcttattattgctggtggtactggtgaattcgaagctggtatctccaaggatggtcaaacccgtgagcacgctcttcttgccttcaccttgggtgtccgtcaattgattgttgctatcaacaagatggataccaccaagtggtctcaagatcgttacaacgaaatcgtcaaggaagtttccggtttcatcaagaagattggtttcaaccccaagtctgttcccttcgtccccatctctggctggcacggtgataacatgttggatgaatccaccaacatgccctggttcaagggatggaacaaggagaccaaggctggttccaagaccggtaagactctcctcgaagccatcgatgctattgagccccctgtccgtccttccgacaagcctctccgtcttcccctccaagatgtctacaagattggtggtattggtacagttcccgttggtcgtgttgagactggtactatcaaggctggtatggttgtcaactttgctcccgctgctgtcaccaccgaagtcaagtccgtcgaaatgcaccacgaaaccctcactgaaggtctccccggtgacaacgttggtttcaacgtcaagaacgtctccgtcaaggatatccgtcgtggtaacgtctgttccgactccaagaacgatcccgctaaggaatctgcctctttcaccgctcaagttatcatcttgaaccaccccggtcaaatctctgctggttacgcaccagttctcgattgtcacactgctcacatcgcctgtaagttctctgaactcattgagaagattgatcgtcgttccgagaagatggaggattctcctaagtttgtcaagtctggtgattccgctatcgtcaagatggttccctccaagcccatgtgtgtcgaagcttacactgactatcctcctcttggtcgtttcgctgtccgtgatatgcgtcaaaccgtcgctgtcggtgtcatcaaggccgtcgagaaggttgacaaggctggtaaggtcaccaaggccgctgccaaggcttccaagaaataa

SEQ ID NO: 3060 - protein, 457 aa, Rhizomucor racemosus
MGKEKTHVNVVVIGHVDSGKSTTTGHLIYKCGGIDKRTIEKFEKEAAELGKGSFKYAWVLDKLKAERERGITIDIALWKFETPKYNVTVIDAPGHRDFIKNMITGTSQADCAILIIAGGTGEFEAGISKDGQTREHALLAFTLGVRQLIVAINKMDTTKWSQDRYNEIVKEVSGFIKKIGFNPKSVPFVPISGWHGDNMLDESTNMPWFKGWNKETKAGSKTGKTLLEAIDAIEPPVRPSDKPLRLPLQDVYKIGGIGTVPVGRVETGTIKAGMVVNFAPAAVTTEVKSVEMHHETLTEGLPGDNVGFNVKNVSVKDIRRGNVCSDSKNDPAKESASFTAQVIILNHPGQISAGYAPVLDCHTAHIACKFSELIEKIDRRSEKMEDSPKFVKSGDSAIVKMVPSKPMCVEAYTDYPPLGRFAVRDMRQTVAVGVIKAVEKVDKAGKVTKAAAKASKK

SEQ ID NO: 3061 - DNA, 1377 bp, Absidia glauca
  CDS (1)..(1377)
atgggtaaagaaaagactcacgttaacgtcgttgtcattggtcacgtcgattctggtaaatccaccaccactggtcatttgatctacaagtgcggtggtattgacaagcgtaccattgaaaagttcgaaaaggaagctgctgaactcggtaagggttccttcaagtacgcctgggtgttggacaagctcaaggccgaacgtgaacgtggtatcaccatcgatatcgctctctggaagttcgaaacccccaagtaccacgtcaccgtcattgacgcccctggccatcgtgatttcatcaagaacatgattactggtacttctcaagctgattgcggtattcttatcattgctgccggtactggtgaattcgaagctggtatctccaaggatggtcaaacccgtgaacacgctttgttggctttcaccctcggtgtccgtcaattgatcgtcgccattaacaagatggattccaccaagtggtccgaacaacgcttcaacgaaatcatcaaggaagtgtctggcttcatcaagaagatcggtttcaaccccaagtctgtccccttcgtccccatctctggctggcacggtgacaacatgttggaagaatctaccaacatgccctggtacaagggatggaacaaggaaaccaaggctggtgccaagtctggcaagactctcttggatgccatcgatgctattgatcctcctcaacgtccttccgacaagcccctccgtctccctcttcaagatgtgtacaagatcggtggtattggtactgtccccgtcggtcgtgtcgaaactggtgtcatcaaggccggtatggtcgtcaccttcgctcccgctaacgtcaccactgaagtcaagtccgtcgaaatgcatcacgaacaattggttgaaggtctccccggtgacaacgtcggtttcaacgtcaagaacgtctccgtcaaggatatccgtcgtggtaacgtctgctctgactccaagaacgaccccgccaaggaagccggctccttcactgcccaagtcattgtccttaaccatcctggtcaaatcggtgctggttacgctcctgtcttggattgccacactgctcacattgcctgtaagttcgccgaactcttggaaaagatcgatcgtcgttccggtaagaagctcgaagatgctcccaagttcgtcaagtctggtgattccgctatcgtcaagatgatcccctccaagcccatgtgtgtcgaagcttacactgactaccctcctcttggtcgtttcgccgtccgtgatatgcgtcaaaccgtcgctgttggtgtcatcaaggccgtcgaaaaggttgacaaggctggcaaggtcaccaaggctgctgccaaggctggcgagaaataa

SEQ ID NO: 3062 - protein, 458 aa, Absidia glauca
MGKEKTHVNVVVIGHVDSGKSTTTGHLIYKCGGIDKRTIEKFEKEAAELGKGSFKYAWVLDKLKAERERGITIDIALWKFETPKYHVTVIDAPGHRDFIKNMITGTSQADCGILIIAAGTGEFEAGISKDGQTREHALLAFTLGVRQLIVAINKMDSTKWSEQRFNEIIKEVSGFIKKIGFNPKSVPFVPISGWHGDNMLEESTNMPWYKGWNKETKAGAKSGKTLLDAIDAIDPPQRPSDKPLRLPLQDVYKIGGIGTVPVGRVETGVIKAGMVVTFAPANVTTEVKSVEMHHEQLVEGLPGDNVGFNVKNVSVKDIRRGNVCSDSKNDPAKEAGSFTAQVIVLNHPGQIGAGYAPVLDCHTAHIACKFAELLEKIDRRSGKKLEDAPKFVKSGDSAIVKMIPSKPMCVEAYTDYPPLGRFAVRDMRQTVAVGVIKAVEKVDKAGKVTKAAAKAGEK

SEQ ID NO: 3063 - DNA, 1383 bp, Ajellomyces capsulata
  CDS (1)..(1383)
atgggtaaggaagacaagactcacattaacctcgtcgtcatcggccacgtcgattcgggcaaatctaccaccactggtcatttgatctacaaatgcggtggtattgacagccgtaccattgagaagttcgaaaaggaagccgaagagttgggcaagaaatccttcaaatatgcgtgggtccttgacaaactgaagtctgagcgtgagcgtggtatcaccatcgatattgccctctggaaattcgagactccgaagtacagtgtcactgtcattgatgctcccggccatcgtgacttcatcaagaacatgatcactggtacctcccaggctgactgcgctatcctcatcattgctgccggtactggtgagttcgaggctggtatctccaaggatggccagactcgtgagcacgctctgcttgctttcacccttggtgtgaggcaactcatcgttgccatcaacaagatggacaccaccaagtggtccgagtcccgtttcaacgaaatcatcaaggaggtttccaacttcatcaagaaggtcggatataaccccaaggctgttcccttcgtgccaatctctggtttcgagggtgacaacatgattgaaccctcccccaactgcacatggtacaagggctggaacaaggagactgcctctggcaagtcttctggtaaaacccttctcgatgccattgacgccattgaacccccaacccgtcctaccgataagcccctccgtcttcccctccaggatgtgtacaaaatctctggtattggcactgttcccgtcggacgtgttgagactggtgtcatcaagcccggtatggtcgtgactttcgctccctccaacgtcaccactgaagtcaagtccgtcgaaatgcaccaccaacaactccaggctggttaccctggcgacaacgtcggcttcaacgtcaagaacgtttcagtcaaggaagtccgccgtggcaacgttgctggcgactccaaaaatgatccccctaagggctgcgaatccttcaatgcccaggtcatcgtccttaaccaccccggccaggttggcgctggttatgccccagtcctcgactgccacactgcccacattgcttgcaagttctctgagcttattgagaagatcgaccgccgtaccggaaagtctgttgagaacaaccccaagttcatcaagtctggtgatgctgctatcgtcaagatggttccctccaagcccatgtgcgtggagcccttcactgactatccccctcttggacgtttcgctgtccgtgacatgagacaaaccgtcgctgtcggtgtcatcaagtccgtcatcaagtctgacaagactgctggcaaggtcaccaaggccgcgcagaaggccaccaagaaataa

SEQ ID NO: 3064 - protein, 460 aa, Ajellomyces capsulata
MGKEDKTHINLVVIGHVDSGKSTTTGHLIYKCGGIDSRTIEKFEKEAEELGKKSFKYAWVLDKLKSERERGITIDIALWKFETPKYSVTVIDAPGHRDFIKNMITGTSQADCAILIIAAGTGEFEAGISKDGQTREHALLAFTLGVRQLIVAINKMDTTKWSESRFNEIIKEVSNFIKKVGYNPKAVPFVPISGFEGDNMIEPSPNCTWYKGWNKETASGKSSGKTLLDAIDAIEPPTRPTDKPLRLPLQDVYKISGIGTVPVGRVETGVIKPGMVVTFAPSNVTTEVKSVEMHHQQLQAGYPGDNVGFNVKNVSVKEVRRGNVAGDSKNDPPKGCESFNAQVIVLNHPGQVGAGYAPVLDCHTAHIACKFSELIEKIDRRTGKSVENNPKFIKSGDAAIVKMVPSKPMCVEPFTDYPPLGRFAVRDMRQTVAVGVIKSVIKSDKTAGKVTKAAQKATKK

SEQ ID NO: 3065 - DNA, 1397 bp, Apis mellifera
  CDS (1)..(1386)
atgggtaaggagaagattcatataaacatcgtggtgatcggccacgttgattcgggcaagtcgacgactaccggtcatctgatttacaaatgcggcggcatcgacaagcgtaccatcgaaaagttcgagaaggaggctcaagaaatgggcaagggctcgttcaagtacgcctgggtgttggacaagctgaaggctgaacgcgagcgtggtatcacgatcgatatcgccctgtggaagttcgagactgcgaaatattacgtgacgatcatagacgcgcctgggcatcgcgatttcatcaaaaatatgatcaccgggacgagtcaggccgattgtgccgtgttaatagtcgcggctggtataggtgaattcgaagctggtatctcgaagaacggacagacgcgcgaacacgctttgctggcgttcacgcttggggtcaagcagttgatcgttggagtgaacaagatggacatgaccgatcccccgtattcggaggcccgtttcgaggagatcaagaaagaggtgtcatcgtacataaaaaagatcggttacaacacagcctcggtcgcgttcgtaccgatctccggatggcacggcgacaacatgttggaaccctcgccgaagacaccgtggtacaagggatggaaagtggagcgcaaagatggtaacgctgacggaaagaccctgatcgaagccctcgacgctatattaccgccgtccagacctaccgataaggctcttcgtttaccgcttcaggacgtttataagatcggtggtatcggtactgtaccggtcggtcgggtggagaccggtattttgaaaccaggtatgctggtaacattcgctccagcagcgctcaccaccgaagtgaaatcggtcgagatgcatcacgaggcattgacggaggcgttacccggggacaacgttggcttcaacgtgaagaacatttctgtgaaagagttgaggcgtggttacgtggcgggagattcgaaaaatcaaccgccacggggggcagccgatttcacagcgcaggtgatcgtcctcaatcatcctgggcagataagcaacggttatacaccggtgctcgattgtcacaccgctcatatcgcttgcaaatttgcggagatcaaggagaaatgcgaccgccgtaccggcaagaccaccgaggagaatccgaagagcatcaagagcggagacgccgcgatcgtgatgttgcaacctactaagccgatgtgcgtcgaagctttccaggaattccctccgcttggtcgcttcgcggttcgcgacatgcgtcagactgtcgctgtgggcgtcattaagagtgtcacctttaaagatacccagggcaaggtcacaaaggccgcggagaaagcccagaagaaaaagtaaccatcaaggct

SEQ ID NO: 3066 - protein, 461 aa, Apis mellifera
MGKEKIHINIVVIGHVDSGKSTTTGHLIYKCGGIDKRTIEKFEKEAQEMGKGSFKYAWVLDKLKAERERGITIDIALWKFETAKYYVTIIDAPGHRDFIKNMITGTSQADCAVLIVAAGIGEFEAGISKNGQTREHALLAFTLGVKQLIVGVNKMDMTDPPYSEARFEEIKKEVSSYIKKIGYNTASVAFVPISGWHGDNMLEPSPKTPWYKGWKVERKDGNADGKTLIEALDAILPPSRPTDKALRLPLQDVYKIGGIGTVPVGRVETGILKPGMLVTFAPAALTTEVKSVEMHHEALTEALPGDNVGFNVKNISVKELRRGYVAGDSKNQPPRGAADFTAQVIVLNHPGQISNGYTPVLDCHTAHIACKFAEIKEKCDRRTGKTTEENPKSIKSGDAAIVMLQPTKPMCVEAFQEFPPLGRFAVRDMRQTVAVGVIKSVTFKDTQGKVTKAAEKAQKKK

SEQ ID NO: 3067 - DNA, 1350 bp, Arabidopsis thaliana
  CDS (1)..(1350)
atgggaaaagagaagtttcacatcaacattgtggtcattggccacgtcgattctggaaagtcgaccaccactgggcacttgatctacaagttgggtggtattgacaagcgtgtcattgagaggttcgagaaggaggctgctgagatgaacaagaggtccttcaagtacgcatgggttttggacaaacttaaggctgagcgtgagcgtggtatcaccattgacattgctctctggaagttcgagaccaccaagtactactgcactgtcattgatgctcctggccatcgtgatttcatcaagaacatgatcactggtacctcccaggctgattgtgctgtccttatcattgactccaccactggtggttttgaggctggtatctccaaggatggtcagacccgtgagcacgctctacttgctttcacccttggtgtcaagcagatgatctgctgttgtaacaagatggatgccactacccccaagtactccaaggccaggtacgatgaaatcatcaaggaggtgtcttcctacttgaagaaggttggttacaaccccgacaaaatcccatttgtgcccatctctggatttgagggtgacaacatgattgagaggtccaccaaccttgactggtacaagggaccaactctccttgaggctcttgaccagatcaacgagcccaagaggccgtcagacaagccccttcgtctcccacttcaggatgtctacaagattggtggtattggaacggtgccagtgggacgtgttgagactggtatgatcaagcctggtatggttgtgacctttgctcccacaggattgaccactgaggtcaagtctgttgagatgcaccacgagtctcttcttgaggcacttccaggtgacaacgttgggttcaatgttaagaatgttgctgtcaaggatcttaagagagggtacgtcgcatccaactccaaggatgaccctgccaagggtgctgctaacttcacctcccaggtcatcatcatgaaccaccctggtcagattggtaacggttacgccccagtcctggattgccacacctctcacattgcagtcaagttctctgagatcttgaccaagattgacaggcgttctggtaaggagattgagaaggagcctaaattcttgaagaatggtgatgctggtatggtgaagatgactccaaccaagcccatggttgtggagaccttctctgagtacccaccacttggacgtttcgctgtgagggacatgaggcagactgttgcagtcggtgttatcaagagtgttgacaagaaggacccaactggagccaaggttaccaaggctgcagtcaagaagggtgccaagtga

SEQ ID NO: 3068 - protein, 449 aa, Arabidopsis thaliana
MGKEKFHINIVVIGHVDSGKSTTTGHLIYKLGGIDKRVIERFEKEAAEMNKRSFKYAWVLDKLKAERERGITIDIALWKFETTKYYCTVIDAPGHRDFIKNMITGTSQADCAVLIIDSTTGGFEAGISKDGQTREHALLAFTLGVKQMICCCNKMDATTPKYSKARYDEIIKEVSSYLKKVGYNPDKIPFVPISGFEGDNMIERSTNLDWYKGPTLLEALDQINEPKRPSDKPLRLPLQDVYKIGGIGTVPVGRVETGMIKPGMVVTFAPTGLTTEVKSVEMHHESLLEALPGDNVGFNVKNVAVKDLKRGYVASNSKDDPAKGAANFTSQVIIMNHPGQIGNGYAPVLDCHTSHIAVKFSEILTKIDRRSGKEIEKEPKFLKNGDAGMVKMTPTKPMVVETFSEYPPLGRFAVRDMRQTVAVGVIKSVDKKDPTGAKVTKAAVKKGAK

SEQ ID NO: 3069 - DNA, 1389 bp, Artemia salina
  CDS (1)..(1389)
atgggaaaagaaaagattcacatcaacattgtcgtcattggtcacgtagattctggtaaatccacaacaactggacatttgatctacaaatgtggtggtatcgacaagagaaccattgaaaagttcgaaaaggaagcccaagaaatgggcaaaggctccttcaaatatgcctgggtattggacaaacttaaagctgagcgtgagcgtggtatcacaattgacattgccctttggaaattcgaaactgctaagtactatgttacaattatagatgctccaggccatcgtgattttatcaagaacatgatcactggcacatcccaggctgattgtgctgtcctgattgttgctgctggtgtcggtgaattcgaagccggtatctctaagaacggtcagacacgtgaacatgctctgcttgcctacacccttggtgtcaaacaacttattgttggcgttaacaagatggattctactgaaccccctttcagtgaggctcgttttgaggaaatcaaaaaggaagtctcggcttacattaagaaaattggttacaatccagctgctgttgctttcgtaccaatttctggatggcatggtgacaacatgctggaggcctctgaccggctcccatggtacaagggatggaacattgaacgtaaagagggcaaagctgacggtaagacccttttggatgctcttgatgctattctgcctccatctcgcccgactgagaagcccctgcgtcttccacttcaggatgtttacaagattggaggtattggaacagtacctgtgggtcgggttgaaactggtatcattaagccaggtatgatagtcacatttgccccagccaacataaccactgaagtcaaatccgtcgaaatgcaccacgaatcccttgaacaggcatctccaggtgataacgttggtttcaatgtcaaaaacgtttcagtcaaagaacttcgtcgtggctacgtcgcctcagattcaaagaacaatccagccagaggctctcaagatttctttgctcaggttattgtcttgaaccaccctggtcagatctcaaacggttacactcctgtcttggactgccacacagctcacattgcttgcaagtttgctgagattaaagagaagtgtgacagacgtactggcaaaacaactgaagctgagccaaaatttatcaagtcaggtgatgcggccatgatcactttggtaccttccaagccgttgtgtgttgaagccttttccgacttcccacctcttggtcgatttgctgtccgtgacatgagacaaacagtcgctgtcggagttatcaagtccgtcaacttcaaggaccccaccgccggcaaggtcaccaaagccgcagaaaaggccggtaagaagaagtga

SEQ ID NO: 3070 - protein, 462 aa, Artemia salina
MGKEKIHINIVVIGHVDSGKSTTTGHLIYKCGGIDKRTIEKFEKEAQEMGKGSFKYAWVLDKLKAERERGITIDIALWKFETAKYYVTIIDAPGHRDFIKNMITGTSQADCAVLIVAAGVGEFEAGISKNGQTREHALLAYTLGVKQLIVGVNKMDSTEPPFSEARFEEIKKEVSAYIKKIGYNPAAVAFVPISGWHGDNMLEASDRLPWYKGWNIERKEGKADGKTLLDALDAILPPSRPTEKPLRLPLQDVYKIGGIGTVPVGRVETGIIKPGMIVTFAPANITTEVKSVEMHHESLEQASPGDNVGFNVKNVSVKELRRGYVASDSKNNPARGSQDFFAQVIVLNHPGQISNGYTPVLDCHTAHIACKFAEIKEKCDRRTGKTTEAEPKFIKSGDAAMITLVPSKPLCVEAFSDFPPLGRFAVRDMRQTVAVGVIKSVNFKDPTAGKVTKAAEKAGKKK

SEQ ID NO: 3071 - DNA, 1380 bp, Arxula adeninivorans
  CDS (1)..(1380)
atgggaaaggaaaagactcacgttaacgtcgttgtcattggacacgtcgactctggaaagtccaccaccactggtcaccttatctacaagtgcggtggtatcgacaagcgaaccatcgagaagttcgagaaggaggccgccgagctcggaaagggttccttcaagtacgcttgggtgcttgacaagcttaaggccgagcgtgagagggttatcaccattgacattgctctgtggaagttcgagacccccaagtactacgtcactgtcattgacgcccctggtcaccgtgatttcatcaagaacatgatcactggtacctcccaggccgactgtgccattctcattatcgccggtggtaccggagagttcgaggctggtatctccaaggacggtcagacccgtgagcacgctctgcttgctttcacccttggtgtccgtcagctgattgttgccatcaacaagatggactccgtcaactggtccgaggaccgatacaatgagattgtgaaggagacttccaacttcatcaagaaggtcggtttcaaccccaaggctgttcctttcgtgcccatctctggatggaacggagacaacatgattgaggccaccaccaacgcctcctggtacaagggatggcacaaggagaccaaggagggtaaggccactggtaagacccttcttgaggccatcgacgctgtcgaccctcctacccgtccttctgacaagcccctgcgtctccctctgcaggatgtctacaagatcggtggtatcggaactgtgcccgtcggtcgtgtcgagactggtgtcatcaagcccggtatggttgtcaccttcgcccccgctggtgtgaccactgaagtcaagtccgtcgagatgcaccacgagcagctgcccgagggtctgcccggtgacaacgtcggattcaacgtcaagaacgtctccgtcaaggagatccgacgaggaaacgttgctggtgactccaagaacgatcctcctaagggatgcgactctttcaccgctcaggtcatcatcttcaaccaccctggtcagatctctgccggatactctcccgtgcttgactgtcacactgcccacattgcttgccgattcgatgagctgatcgagaagatcgaccgtcgttccggaaagaaggttgaggactctcccaagttcgtcaaggctggtgatgctgccatcgtccgcatgattccttccaagcccatgtgcgttgagaccttcactgagtacccccctcttggacgattcgccgtccgtgacatgcgtcagaccgttgctgtcggtgtcatcaagtcggtcgagaagtctgacaagggtgccggaaaggtcaccaaggctgcccagaaggccgccaagaaataa

SEQ ID NO: 3072 - protein, 459 aa, Arxula adeninivorans
MGKEKTHVNVVVIGHVDSGKSTTTGHLIYKCGGIDKRTIEKFEKEAAELGKGSFKYAWVLDKLKAERERVITIDIALWKFETPKYYVTVIDAPGHRDFIKNMITGTSQADCAILIIAGGTGEFEAGISKDGQTREHALLAFTLGVRQLIVAINKMDSVNWSEDRYNEIVKETSNFIKKVGFNPKAVPFVPISGWNGDNMIEATTNASWYKGWHKETKEGKATGKTLLEAIDAVDPPTRPSDKPLRLPLQDVYKIGGIGTVPVGRVETGVIKPGMVVTFAPAGVTTEVKSVEMHHEQLPEGLPGDNVGFNVKNVSVKEIRRGNVAGDSKNDPPKGCDSFTAQVIIFNHPGQISAGYSPVLDCHTAHIACRFDELIEKIDRRSGKKVEDSPKFVKAGDAAIVRMIPSKPMCVETFTEYPPLGRFAVRDMRQTVAVGVIKSVEKSDKGAGKVTKAAQKAAKK

SEQ ID NO: 3073 - DNA, 1377 bp, Ashbya gossypii
  CDS (1)..(1377)
atgggtaaggaaaagactcacgttaacgttgtcgtcatcggtcacgtcgactctggtaagtctactaccaccggtcacttgatctacaagtgtggtggtattgacaagagaaccatcgagaagttcgagaaggaggctgccgagttgggtaagggttctttcaagtacgcctgggttttggacaaattgaaggctgagagagagagaggtatcaccatcgacattgcgttgtggaagttcgagactccaaagtaccacgtcactgtcattgacgccccaggccacagagacttcatcaagaacatgattaccggtacttctcaagctgactgtgccatcttgatcattgctggtggtgtcggtgagttcgaggctggtatctccaaggacggtcagaccagagagcacgctttgttggcttacaccttgggtgtcaagcagttgatcgttgccatcaacaagatggactccgtcaagtgggacgagtccagataccaggagattgtcaaggagacctccaacttcatcaagaaggtcggttacaaccctaagactgttccattcgttccaatctccggctggaacggtgacaacatgattgaggccaccaccaacgccccatggtacaagggctgggagaaggagaccaaggctggtgccgtcaagggtaagaccttgttggaggccattgacgccattgagccacctgtcagaccaactgacaaggcattgagattgccattgcaggatgtctacaagatcggtggtattggtacggttccagtcggcagagtcgagaccggtgtcatcaagccaggtatggttgttaccttcgccccatccggtgtcaccactgaagtcaagtccgtcgagatgcaccacgagcaattggaggagggtgtcccaggtgacaacgttggtttcaacgtcaagaacgtctccgtcaaggagatcagaagaggtaacgtttgcggtgactccaagaacgacccaccaaaggctgctgagtccttcaacgctaccgtcattgtcttgaaccacccaggtcaaatctctgccggttactctccagtcttggactgtcacactgcccacattgcttgtaagttcgacgagttgttggagaagaacgacagaagaaccggtaagaagttggaagactctccaaagttcctaaaggccggtgacgctgccatggtcaagtttgtcccatccaagccaatgtgtgttgaggctttcaccgactacccaccattgggtagattcgctgtcagagacatgagacagaccgttgctgtcggtgtcatcaagtctgttgtcaagtccgacaaggctggtaaggtcaccaaggccgcccaaaaggctggtaagaaatag

SEQ ID NO: 3074 - protein, 458 aa, Ashbya gossypii
MGKEKTHVNVVVIGHVDSGKSTTTGHLIYKCGGIDKRTIEKFEKEAAELGKGSFKYAWVLDKLKAERERGITIDIALWKFETPKYHVTVIDAPGHRDFIKNMITGTSQADCAILIIAGGVGEFEAGISKDGQTREHALLAYTLGVKQLIVAINKMDSVKWDESRYQEIVKETSNFIKKVGYNPKTVPFVPISGWNGDNMIEATTNAPWYKGWEKETKAGAVKGKTLLEAIDAIEPPVRPTDKALRLPLQDVYKIGGIGTVPVGRVETGVIKPGMVVTFAPSGVTTEVKSVEMHHEQLEEGVPGDNVGFNVKNVSVKEIRRGNVCGDSKNDPPKAAESFNATVIVLNHPGQISAGYSPVLDCHTAHIACKFDELLEKNDRRTGKKLEDSPKFLKAGDAAMVKFVPSKPMCVEAFTDYPPLGRFAVRDMRQTVAVGVIKSVVKSDKAGKVTKAAQKAGKK

SEQ ID NO: 3075 - DNA, 1383 bp, Aspergillus oryzae
  CDS (1)..(1383)
atgggtaaggaagacaagcagcacatcaacatcgtcgttatcggccacgtcgattccggcaagtccaccaccactggtcacttgatctacaagtgtggtggtatcgaccagcgtaccatcgagaagttcgagaaggaagccgctgagctcggtaagggttccttcaagtacgcctgggttcttgacaagctcaagtccgagcgtgagcgtggtatcaccatcgatatcgccctctggaagttccagacctccaagtatgaggtcaccgtcattgatgcccccggtcaccgtgacttcatcaagaacatgatcactggtacttcccaggctgactgcgctatcctcatcattgcctccggtactggtgaattcgaggctggtatctccaaggatggtcagacccgtgagcacgctctgctcgctttcaccctcggtgtccgtcagctcatcgttgccctcaacaagatggacacctgcaagtggtctcaggatcgttacaacgaaatcgttaaggagacttccaacttcatcaagaaggtcggatacaaccccaagagcgttcctttcgtccccatctccggtttcaacggtgacaacatgattgaggcctccaccaactgcccctggtacaagggctgggagaaggagaccaaggctggcaagtccaccggtaagacccttctcgaggccatcgatgccatcgagccccccgtccgtcccaccgacaagcctctccgtcttcccctccaggatgtctacaagatctctggtatcggtactgtgcccgtcggtcgtgtcgagactggtgtcatcaagcctggtatggtcgttactttcgctcctgccaacgtgaccactgaagtcaagtccgttgaaatgcaccaccagcagctccaggccggtaaccccggtgacaacgttggtttcaacgtcaagaacgtctccgtcaaggaagtccgccgtggtaacgttgccggtgactccaagaacgacccccctgctggctgcgattccttcaacgcccaggtcatcgtccttaaccaccccggtcaggtcggcaacggttacgctcccgtcctggactgccacaccgctcacattgcttgcaagttcgctgagctccttgagaagattgaccgccgtaccggtaaatctgttgaggacaagcccaagttcatcaagtctggtgatgctgccatcgtcaagatgattccctccaagcccatgtgtgtggagtctttcactgacttcccccctcttggtcgtttcgctgtccgtgacatgcgtcaaactgttgccgtcggagttatcaagtcggttgagaagaacactggcggttctggcaaggtcaccaaggccgcccagaaggctggcaagaaataa

SEQ ID NO: 3076 - protein, 460 aa, Aspergillus oryzae
MGKEDKQHINIVVIGHVDSGKSTTTGHLIYKCGGIDQRTIEKFEKEAAELGKGSFKYAWVLDKLKSERERGITIDIALWKFQTSKYEVTVIDAPGHRDFIKNMITGTSQADCAILIIASGTGEFEAGISKDGQTREHALLAFTLGVRQLIVALNKMDTCKWSQDRYNEIVKETSNFIKKVGYNPKSVPFVPISGFNGDNMIEASTNCPWYKGWEKETKAGKSTGKTLLEAIDAIEPPVRPTDKPLRLPLQDVYKISGIGTVPVGRVETGVIKPGMVVTFAPANVTTEVKSVEMHHQQLQAGNPGDNVGFNVKNVSVKEVRRGNVAGDSKNDPPAGCDSFNAQVIVLNHPGQVGNGYAPVLDCHTAHIACKFAELLEKIDRRTGKSVEDKPKFIKSGDAAIVKMIPSKPMCVESFTDFPPLGRFAVRDMRQTVAVGVIKSVEKNTGGSGKVTKAAQKAGKK

SEQ ID NO: 3077 - DNA, 1380 bp, Aureobasidium pullulans
  CDS (1)..(1380)
atgggtaaggaaaagtcccacatcaacgtcgtcgttatcggccacgtcgactccggtaagtcgaccaccaccggtcacttgatctacaagtgcggtggtatcgacaagcgtaccatcgagaagttcgagaaggaagccgccgaactcggcaagggttccttcaagtacgcctgggtcctcgacaagctgaagtctgagcgtgagcgtggtatcactatcgatatcgctctgtggaagttcgagacccccaagtacatggtcaccgtcatcgatgcccccggtcaccgtgatttcatcaagaacatgatcactggtacctcccaggctgactgcgccattctcatcattgccgccggtactggtgagttcgaggctggtatctccaaggatggccagactcgtgagcacgcccttctcgcctacacccttggtgtcaagcagctcatcgtcgctatcaacaagatggacaccaccaagtggtctgaggcccgttaccaggagatcatcaaggagacctccggtttcatcaagaaggtcggctacaaccccaagcacgttccctttgtccccatctcgggtttcaacggtgacaacatgattgaggtttcttccaactgcccctggtacaagggttgggagaaggagaccaaggccaaggccactggtaagactctcctcgaggccattgacgccatcgaccctccttcgcgccccaccgacaagcccctccgtcttcccctccaggatgtctacaagatcggtggtattggcacggtgcccgtcggccgtgtcgagaccggtaccatcaagggtggtatggtcgtcaccttcgcccccgctggtgtcaccactgaggtcaagtccgtcgagatgcaccacgagcagctctccgagggtctccccggtgacaacgtcggcttcaacgtcaagaacgtctccgtcaaggagatccgtcgtggtaacgttgccggtgactccaagaacgacccccccaagggttgcgactccttcaacgcccaggtcatcgtcctcaaccaccccggtcaggtcggtgctggttacgcacccgtcctcgattgccacactgcccacatcgcctgcaagttctccgagcttgttgagaagattgaccgccgtaccggcaagtccgttgaggccgcccccaagttcatcaagtctggtgacgccgccatcgtcaagatggttccctccaagcctatgtgtgttgaggccttcactgactaccctcctctcggtcgtttcgccgtccgtgacatgagacagaccgtcgctgtcggtgtcatcaagtccgtcgccaagtccgacaagcagggtgccggtaaggttaccaaggccgctgtcaaggctggcaagaagtaa

SEQ ID NO: 3078 - protein, 459 aa, Aureobasidium pullulans
MGKEKSHINVVVIGHVDSGKSTTTGHLIYKCGGIDKRTIEKFEKEAAELGKGSFKYAWVLDKLKSERERGITIDIALWKFETPKYMVTVIDAPGHRDFIKNMITGTSQADCAILIIAAGTGEFEAGISKDGQTREHALLAYTLGVKQLIVAINKMDTTKWSEARYQEIIKETSGFIKKVGYNPKHVPFVPISGFNGDNMIEVSSNCPWYKGWEKETKAKATGKTLLEAIDAIDPPSRPTDKPLRLPLQDVYKIGGIGTVPVGRVETGTIKGGMVVTFAPAGVTTEVKSVEMHHEQLSEGLPGDNVGFNVKNVSVKEIRRGNVAGDSKNDPPKGCDSFNAQVIVLNHPGQVGAGYAPVLDCHTAHIACKFSELVEKIDRRTGKSVEAAPKFIKSGDAAIVKMVPSKPMCVEAFTDYPPLGRFAVRDMRQTVAVGVIKSVAKSDKQGAGKVTKAAVKAGKK

SEQ ID NO: 3079 - DNA, 1392 bp, Bombyx mori
  CDS (1)..(1392)
atgggcaaggaaaagactcacattaacattgtcgtcatcggacacgtcgactccggcaagtccaccaccactggtcacttgatctacaaatgtggtggtattgacaaacgtaccatcgagaagttcgagaaggaggcccaggaaatgggtaaaggatccttcaaatatgcttgggtattggacaaactaaaggctgagcgtgagcgtggtatcacaatcgatattgctctctggaagttcgaaactagcaagtactatgttaccatcattgatgctcctggacacagagatttcatcaagaacatgatcacaggaacctctcaggctgattgcgctgtgctcatcgtagctgccggtaccggtgaattcgaagctggtatctctaagaacggtcaaacccgtgagcatgccttgctcgctttcaccctcggtgtcaaacagctcatcgtaggagtaaacaaaatggattccactgaaccaccatacagtgagcccagatttgaggaaatcaagaaggaagtatcctcatacatcaagaagattggctacaacccagctgctgtcgctttcgtgcccatttctggatggcacggagacaacatgttggagccttcaaccaaaatgccttggttcaagggatggcaggtggagcgtaaggaaggcaaagctgacggaaaatccctcattgaagctctcgatgccatcctgccacctgcccgccccactgacaagcccctgcgtcttcccctgcaagacgtatacaaaatcggtggtattggtaccgtgcccgtcggcagagttgaaactggtgtgttgaaaccaggtaccattgttgtctttgcccccgccaacatcactactgaagtcaagtctgtggagatgcaccacgaagctctccaagaagctgtacctggagacaatgtaggtttcaacgtaaagaacgtgtccgtcaaggaattgcgtcgtggttatgttgctggtgactccaaaaacaacccacctaagggtgctgcagattttacagctcaagtcattgtgcttaaccatcctggtcaaatctcaaacggttacacaccagtcttggattgccacactgcccacattgcctgcaaatttgcagaaatcaaagaaaaagttgaccgtcgtactggtaaatctactgaagtcaacccaaaatccatcaagtctggagatgcagccattgtcaacttggtaccttccaagcctctatgtgtagagtccttccaggaattcccacccctcggtcgttttgctgtccgtgacatgaggcagacagttgctgtcggagtcatcaaggctgtcaacttcaaggaggctggtggtggcaaggtcactaaagctgccgaaaaggccaccaagggcaagaagtag

SEQ ID NO: 3080 - protein, 463 aa, Bombyx mori
MGKEKTHINIVVIGHVDSGKSTTTGHLIYKCGGIDKRTIEKFEKEAQEMGKGSFKYAWVLDKLKAERERGITIDIALWKFETSKYYVTIIDAPGHRDFIKNMITGTSQADCAVLIVAAGTGEFEAGISKNGQTREHALLAFTLGVKQLIVGVNKMDSTEPPYSEPRFEEIKKEVSSYIKKIGYNPAAVAFVPISGWHGDNMLEPSTKMPWFKGWQVERKEGKADGKSLIEALDAILPPARPTDKPLRLPLQDVYKIGGIGTVPVGRVETGVLKPGTIVVFAPANITTEVKSVEMHHEALQEAVPGDNVGFNVKNVSVKELRRGYVAGDSKNNPPKGAADFTAQVIVLNHPGQISNGYTPVLDCHTAHIACKFAEIKEKVDRRTGKSTEVNPKSIKSGDAAIVNLVPSKPLCVESFQEFPPLGRFAVRDMRQTVAVGVIKAVNFKEAGGGKVTKAAEKATKGKK

SEQ ID NO: 3081 - DNA, 1377 bp, Candida albicans
  CDS (1)..(1377): transl_table=12
atgggtaaagaaaaaactcacgttaacgttgttgttattggtcacgtcgattccggtaaatctactaccaccggtcacttaatttacaagtgtggtggtatcgataaaagaaccattgaaaaattcgaaaaagaagctgctgaattgggtaaaggttctttcaaatacgcttgggtcttggacaaattgaaggctgaaagagaaagaggtatcaccattgatattgctttgtggaaattcgaaactccaaaataccacgttaccgtcattgatgctccaggtcacagagatttcatcaagaatatgatcactggtacttctcaagctgattgtgctattttgattattgctggtggtactggtgaattcgaagccggtatttctaaggatggtcaaaccagagaacacgctttgttggcttacactttgggtgtcaaacaattgattgttgctgtcaacaagatggactctgtcaaatgggacaaaaacagatttgaagaaatcatcaaggaaacctccaacttcgtcaagaaggttggttacaacccaaagactgttccattcgttccaatctctggttggaatggtgacaacatgattgaaccatccaccaactgtccatggtacaagggttgggaaaaggaaaccaaatccggtaaagttactggtaagaccttgttagaagctattgacgctattgaaccaccaaccagaccaaccgacaaaccattgagattgccattgcaagatgtttacaagattggtggtattggtactgtgccagtcggtagagttgaaactggtatcatcaaagccggtatggttgttactttcgccccagctggtgttaccactgaagtcaagtccgttgaaatgcatcacgaacaattggctgaaggtgttccaggtgacaatgttggtttcaacgttaagaacgtttccgttaaagaaattagaagaggtaacgtttgtggtgactccaagaacgatccaccaaagggttgtgactctttcaatgcccaagtcattgttttgaaccatccaggtcaaatctctgctggttactctccagtcttggattgtcacactgcccacattgcttgtaaattcgacactttggttgaaaagattgacagaagaactggtaagaaattggaagaaaatccaaaattcgtcaaatccggtgatgctgctatcgtcaagatggtcccaaccaaaccaatgtgtgttgaagctttcactgactacccaccattaggtagattcgctgtcagagatatgagacaaaccgttgctgttggtgtcatcaaatctgttgaaaaatccgacaaagctggtaaagttaccaaggctgctcaaaaagctgctaagaaataa

SEQ ID NO: 3082 - protein, 458 aa, Candida albicans
MGKEKTHVNVVVIGHVDSGKSTTTGHLIYKCGGIDKRTIEKFEKEAAELGKGSFKYAWVLDKLKAERERGITIDIALWKFETPKYHVTVIDAPGHRDFIKNMITGTSQADCAILIIAGGTGEFEAGISKDGQTREHALLAYTLGVKQLIVAVNKMDSVKWDKNRFEEIIKETSNFVKKVGYNPKTVPFVPISGWNGDNMIEPSTNCPWYKGWEKETKSGKVTGKTLLEAIDAIEPPTRPTDKPLRLPLQDVYKIGGIGTVPVGRVETGIIKAGMVVTFAPAGVTTEVKSVEMHHEQLAEGVPGDNVGFNVKNVSVKEIRRGNVCGDSKNDPPKGCDSFNAQVIVLNHPGQISAGYSPVLDCHTAHIACKFDTLVEKIDRRTGKKLEENPKFVKSGDAAIVKMVPTKPMCVEAFTDYPPLGRFAVRDMRQTVAVGVIKSVEKSDKAGKVTKAAQKAAKK

SEQ ID NO: 3083 - DNA, 1383 bp, Coccidioides immitis
  CDS (1)..(1383)
atgggtaaggaagagaagacacacatcaacttggtcgtcatcggccacgtcgactccggcaagtcgaccaccaccggtcacttgatctacaagtgcggtggtattgacaaccgtaccattgaaaagttcgagaaggaagccgaagagttgggcaagaagtccttcaaatatgcctgggttcttgacaaactaaaggccgagcgtgagcgtggtatcaccatcgatatcgccctctggaagttcgagacccccaagtaccacgtcactgtcatcgatgcccctggccatcgtgacttcatcaagaacatgattactggtacctcccaggctgattgcgctatccttatcattgctgccggtactggtgagttcgaagctggtatctccaaggatggccagacccgtgagcacgctctgcttgccttcactctcggtgtgaagcagctcatcgtcgctatcaacaagatggacagcaccaactggtccgagcctcgtttcaacgaaatcgtcaaggaagtctccaacttcatcaagaaggtcggatacaaccccaaggctgttccattcgtccccatctctggtttcgaaggtgacaacatgattcaaccctccaccaacgctccttggtacaagggctggaacaaggagaccgcctctggcaagcactctggcaagaccctcctcgacgccattgatgccatcgaccccccaacccgccccaccgagaagcccctccgtctcccacttcaggatgtgtacaagatctctggtatcggaacagtcccagtcggccgtgtcgaaaccggtgttatcaagcctggtatggttgtgaccttcgctccttccaacgtcaccactgaagtcaagtccgtcgaaatgcaccaccagcagctcacccagggtaaccctggtgacaacgttggcttcaacgtcaagaacgtctctgtcaaggaagtccgccgcggtaacgtcgctggtgactccaagaacgacccaccaaagggctgcgactccttcaacgcccaggtcatcgtcctcaaccaccctggtcaagtcggtgctggttatgccccagtccttgactgccacactgcccacattgcttgcaagttctccgagctcctcgagaagatcgaccgccgtaccggtaaatccgttgagaacaaccccaagttcatcaagtctggtgatgccgctatcgtcaagatggttccatccaagcccatgtgcgttgaggctttcactgactacccacctctcggtcgtttcgccgtccgtgacatgagacagactgtcgctgtcggtgtcatcaagtccgttgagaagtctgagaagactggtggcaaggtcaccaaggctgctcagaaggctgctaagaaataa

SEQ ID NO: 3084 - protein, 460 aa, Coccidioides immitis
MGKEEKTHINLVVIGHVDSGKSTTTGHLIYKCGGIDNRTIEKFEKEAEELGKKSFKYAWVLDKLKAERERGITIDIALWKFETPKYHVTVIDAPGHRDFIKNMITGTSQADCAILIIAAGTGEFEAGISKDGQTREHALLAFTLGVKQLIVAINKMDSTNWSEPRFNEIVKEVSNFIKKVGYNPKAVPFVPISGFEGDNMIQPSTNAPWYKGWNKETASGKHSGKTLLDAIDAIDPPTRPTEKPLRLPLQDVYKISGIGTVPVGRVETGVIKPGMVVTFAPSNVTTEVKSVEMHHQQLTQGNPGDNVGFNVKNVSVKEVRRGNVAGDSKNDPPKGCDSFNAQVIVLNHPGQVGAGYAPVLDCHTAHIACKFSELLEKIDRRTGKSVENNPKFIKSGDAAIVKMVPSKPMCVEAFTDYPPLGRFAVRDMRQTVAVGVIKSVEKSEKTGGKVTKAAQKAAKK

SEQ ID NO: 3085 - DNA, 1380 bp, Cryptococcus neoformans
  CDS (1)..(1380)
atgggtaaggacaagctgcacgtcaacgtcgttgttatcggtcacgtcgactccggtaagtcgaccaccaccggtcacttgatctacaagtgcggtggtatcgacaagcgaaccattgagaagttcgagaaggaggctcaagagctcggaaagtcttctttcaagtacgcttgggttcttgacaagcttaaggccgagcgagagcgaggtatcaccatcgacattgctctttggaagttcgagacccccaggtaccaggtcaccgtcattgacgcccccggtcaccgagacttcatcaagaacatgatcaccggtacctcccaggctgactgtgccatcctcatcattgccaccggtatcggtgagttcgaggccggtatctccaaggacggtcagacccgagagcacgccctcctcgccttcaccctcggtgtcaggcagctcattgttgcttgcaacaagatggacacctgcaagtggtccgaggaccgattcaacgaaatcgtcaaggagaccaacggtttcatcaagaaggttggttacaaccccaaggctgtccccttcgtccccatctctggttggcacggtgacaacatgttggaggagaccaccaacatgccctggtacaagggatggaccaaggagaccaagtctggtgtttccaagggtaagaccctcctcgaggccatcgacgccatcgagccccctacccgacccaccgacaagcccctccgtctccctctccaggacgtctacaagatcggtggtatcggcacagtccctgtcggccgagtcgagaccggtgtcatcaaggccggtatggtcgtcaagttcgcccccaccaacgtcaccactgaagtcaagtccgttgagatgcaccacgagcagatccccgagggtcttcccggagacaacgttggtttcaacgtcaagaacgtttccatcaaggacatccgacgaggtaacgtctgtggtgactccaagaacgacccccctatggaggctgcttctttcaacgcccaggttatcgtccttaaccaccctggtcagatcggtgccggttacacccccgttctcgactgtcacactgcccacattgcctgcaagtttgctgagttgatcgagaagattgaccgacgaaccggtaaggtcatggaggccgcccccaagttcgtcaagtctggtgacgccgccattgtcaagcttgttgcccagaagcccctctgtgttgagacctacgccgactacccccctcttggtcgattcgccgtccgagacatgcgacagaccgttgccgttggtgttatcaagagcgtggacaagaccgagaagggtggcaaggtcaccaaggctgctgagaaggctgccaagaagaagtaa

SEQ ID NO: 3086 - protein, 459 aa, Cryptococcus neoformans
MGKDKLHVNVVVIGHVDSGKSTTTGHLIYKCGGIDKRTIEKFEKEAQELGKSSFKYAWVLDKLKAERERGITIDIALWKFETPRYQVTVIDAPGHRDFIKNMITGTSQADCAILIIATGIGEFEAGISKDGQTREHALLAFTLGVRQLIVACNKMDTCKWSEDRFNEIVKETNGFIKKVGYNPKAVPFVPISGWHGDNMLEETTNMPWYKGWTKETKSGVSKGKTLLEAIDAIEPPTRPTDKPLRLPLQDVYKIGGIGTVPVGRVETGVIKAGMVVKFAPTNVTTEVKSVEMHHEQIPEGLPGDNVGFNVKNVSIKDIRRGNVCGDSKNDPPMEAASFNAQVIVLNHPGQIGAGYTPVLDCHTAHIACKFAELIEKIDRRTGKVMEAAPKFVKSGDAAIVKLVAQKPLCVETYADYPPLGRFAVRDMRQTVAVGVIKSVDKTEKGGKVTKAAEKAAKKK

SEQ ID NO: 3087 - DNA, 1344 bp, Zea mays
  CDS (1)..(1344)
atgggtaaggagaagactcacatcaacattgtggtcattggccatgtcgactctggcaagtcgaccaccactggccacctgatctacaagcttggaggtattgacaagcgagtgattgagaggttcgagaaagaggctgccgagatgaacaagcggtcattcaagtatgcgtgggtgcttgacaagctcaaggctgagcgtgagagaggtattacaattgatattgccctgtggaagttcgagaccaccaagtactactgcactgttattgatgccccgggacaccgtgacttcatcaagaatatgatcactggcacttcccaagctgactgtgctgttcttatcattgactcaaccactggtggttttgaggctggtatctccaaggatggccagacccgtgagcatgctctccttgctttcacacttggtgtgaagcagatgatttgctgctgcaacaagatggatgctactacacccaagtattcaaaggcccgttatgatgagattgtgaaggaagtctcttcctacctgaagaaggttggatacaaccctgataagatccacttcgttccaatctctggttttgaaggtgacaacatgattgagaggtccaccaaccttgactggtacaagggcccaaccctacttgaggctctggacttgatcaatgagccaaagaggccttcagacaagcccctgcgtctcccccttcaggatgtgtacaagattggtggtattggaactgtccctgttggacgtgttgagactggtgtcattaagcctggtatggttgttacttttgggcctactggtcttactactgaggttaagtccgttgagatgcaccatgaggctctccaggaggcccttcccggtgacaatgttggcttcaacgtgaagaatgttgctgtgaaggatctgaagcgtgggtatgtggcctccggctccaaggatgaccctgccaaggaggctgctagctttacctcccaggtcatcatcatgaaccaccctggccagattggcaatggctatgccccagttctggactgccacacctcacacattgctgtcaagtttgctgagctcgttaccaagattgataggcgatccggcaaggagctggagaaggagcccaaatttctcaagaacggtgatgctggtatggtgaagatggttcccactaagcccatggtggtggagaccttttctcagtatcctcctcttggtcgatttgctgtccgtgacatgaggcaaacggtggctgtcggagtcatcaagagtgtggagaagaaggacccaactggagccaaggtgacgaaggctgctgccaagaagaaatga

SEQ ID NO: 3088 - protein, 447 aa, Zea mays
MGKEKTHINIVVIGHVDSGKSTTTGHLIYKLGGIDKRVIERFEKEAAEMNKRSFKYAWVLDKLKAERERGITIDIALWKFETTKYYCTVIDAPGHRDFIKNMITGTSQADCAVLIIDSTTGGFEAGISKDGQTREHALLAFTLGVKQMICCCNKMDATTPKYSKARYDEIVKEVSSYLKKVGYNPDKIHFVPISGFEGDNMIERSTNLDWYKGPTLLEALDLINEPKRPSDKPLRLPLQDVYKIGGIGTVPVGRVETGVIKPGMVVTFGPTGLTTEVKSVEMHHEALQEALPGDNVGFNVKNVAVKDLKRGYVASGSKDDPAKEAASFTSQVIIMNHPGQIGNGYAPVLDCHTSHIAVKFAELVTKIDRRSGKELEKEPKFLKNGDAGMVKMVPTKPMVVETFSQYPPLGRFAVRDMRQTVAVGVIKSVEKKDPTGAKVTKAAAKKK

SEQ ID NO: 3089 - DNA, 1350 bp, Manihot esculenta
  CDS (1)..(1350)
atgggtaaggagaaggttcacatcaacatcgtggtcattggccatgtcgactctggcaagtccaccaccactggccatctcatctacaagcttggaggtattgacaagcgtgtgattgagaggtttgagaaggaagctgctgagatgaacaagaggtcattcaagtatgcctgggtgcttgacaagctcaaggccgagcgtgaacgtggtatcaccattgatattgccttatggaagtttgagaccaccaagtactattgcactgtcattgatgctcctgggcatcgtgactttattaagaatatgattactggtacctcacaggctgactgtgctgtccttattattgattccaccactggtggttttgaagccggtatttccaaggacggtcaaacccgtgagcacgcccttcttgcttttacccttggtgtcaaacaaatgatttgctgctgtaacaagatggatgccaccacccccaagtactccaaggctaggtacgatgaaattgtcaaggaagtctcctcctacctcaagaaggttggatacaacccggataagattccttttgttcccatctctgggtttgaaggtgacaatatgattgagagatcaaccaacctcgattggtacaagggcccaactcttcttgaagctctggaccagatccaggagcccaagaggccctcagacaagcctctccgtctcccacttcaggatgtttacaagattggtggtattggaactgtgccagtgggtcgtgtggaaactggtatcctgaagcctggaatggttgtgaccttcggacctactggtctgacgactgaagttaagtctgttgagatgcatcatgaggctctccaggaggccctccctggtgacaatgttgggttcaacgtgaagaacgttgcagtgaaagatctgaagagaggaattgttgcatcaaactctaaggatgatcctgccaaggaagctgccaactttacatcgcaggtcatcatcatgaaccaccctggtcagattggaaatggttatgccccagtgctggattgccacacctcccacattgctgtgaagtttgctgaaatcttgaccaagattgatcgtaggtctggcaaagagcttgagaaggagcccaagtttttgaaaaatggtgatgctgggttcgtgaagatgattccgaccaagcccatggttgtggagactttctctgcgtaccctccactgggtagattcgctgttagggacatgcgccagacggttgctgttggtgtgatcaagagtgttgagaagaaagacccaagtggagctaaagtcaccaagtctgctgccaagaagggagggaaatga

SEQ ID NO: 3090 - protein, 449 aa, Manihot esculenta
MGKEKVHINIVVIGHVDSGKSTTTGHLIYKLGGIDKRVIERFEKEAAEMNKRSFKYAWVLDKLKAERERGITIDIALWKFETTKYYCTVIDAPGHRDFIKNMITGTSQADCAVLIIDSTTGGFEAGISKDGQTREHALLAFTLGVKQMICCCNKMDATTPKYSKARYDEIVKEVSSYLKKVGYNPDKIPFVPISGFEGDNMIERSTNLDWYKGPTLLEALDQIQEPKRPSDKPLRLPLQDVYKIGGIGTVPVGRVETGILKPGMVVTFGPTGLTTEVKSVEMHHEALQEALPGDNVGFNVKNVAVKDLKRGIVASNSKDDPAKEAANFTSQVIIMNHPGQIGNGYAPVLDCHTSHIAVKFAEILTKIDRRSGKELEKEPKFLKNGDAGFVKMIPTKPMVVETFSAYPPLGRFAVRDMRQTVAVGVIKSVEKKDPSGAKVTKSAAKKGGK

SEQ ID NO: 3091 - DNA, 1383 bp, Neurospora crassa
  CDS (1)..(1383)
atgggcaaggaggacaagactcacatcaacgtcgtcgttatcggccacgtcgattccggcaagtctaccactaccggtcacttgatctacaagtgcggtggtatcgacaagcgtaccatcgagaagttcgagaaggaagccgctgagctcggtaagggttccttcaagtatgcctgggttcttgacaagctcaaggccgagcgtgagcgtggtatcaccatcgatatcgccctctggaagttcgagactcccaagtactacgtcaccgtcatcgatgcccccggtcatcgtgatttcatcaagaacatgatcactggtacctcccaggctgattgcgctatcctcatcattgccgccggtactggtgagttcgaggctggtatctccaaggatggccagacccgtgagcacgctctgctcgcctacaccctcggtgtcaagcagctcattgttgccatcaacaagatggacaccacccagtggtcccagactcgtttcgaggagatcatcaaggagaccaagaacttcatcaagaaggttggctacaaccccgctggtgtcgctttcgtccccatctccggcttcaacggcgacaacatgcttgagccctccaccaactgcccctggtacaagggttgggagaaggagaccaaggccggcaaggccactggcaagaccctcctcgaggccatcgacgccattgagccccccaagcgtcctaccgacaagcccctccgtcttcccctccaggatgtctacaagatcggtggtatcggcacagtgcccgtcggccgtatcgagactggtgtcctcaagcccggtatggtcgttaccttcgctccttccaacgtcaccactgaagtcaagtccgtcgagatgcaccacgagcagcttgctcagggtgtccccggtgacaacgtcggcttcaacgtgaagaacgtttccgtcaaggatatccgccgtggtaacgttgccggtgactccaagaacgacccccctgctggcgccgcctctttcaccgcccaggtcatcgttctcaaccaccccggtcaggtcggtgccggctacgcccccgtcctcgactgccacactgcccacattgcctgcaagttcgccgagctcctcgagaagatcgaccgccgtactggtaaggctgttgaggcctcccccaagttcatcaagtctggtgatgctgccatcgtcaagatgattccctccaagcccatgtgcgttgaggctttcaccgactaccctcccctcggccgtttcgccgtccgtgacatgcgtcagaccgtcgccgtcggtgtcatcaaggccgtcgacaagtccaccgctgccgctggcaaggtcaccaagtccgctgccaaggccgccaagaagtaa

SEQ ID NO: 3092 - protein, 460 aa, Neurospora crassa
MGKEDKTHINVVVIGHVDSGKSTTTGHLIYKCGGIDKRTIEKFEKEAAELGKGSFKYAWVLDKLKAERERGITIDIALWKFETPKYYVTVIDAPGHRDFIKNMITGTSQADCAILIIAAGTGEFEAGISKDGQTREHALLAYTLGVKQLIVAINKMDTTQWSQTRFEEIIKETKNFIKKVGYNPAGVAFVPISGFNGDNMLEPSTNCPWYKGWEKETKAGKATGKTLLEAIDAIEPPKRPTDKPLRLPLQDVYKIGGIGTVPVGRIETGVLKPGMVVTFAPSNVTTEVKSVEMHHEQLAQGVPGDNVGFNVKNVSVKDIRRGNVAGDSKNDPPAGAASFTAQVIVLNHPGQVGAGYAPVLDCHTAHIACKFAELLEKIDRRTGKAVEASPKFIKSGDAAIVKMIPSKPMCVEAFTDYPPLGRFAVRDMRQTVAVGVIKAVDKSTAAAGKVTKSAAKAAKK

SEQ ID NO: 3093 - DNA, 1344 bp, Pisum sativum
  CDS (1)..(1344)
atgggtaaggaaaaggttcacattaacattgttgtcattggacatgtcgactctggaaaatcaaccacgactgtccatgtcatctacaagcttggaggtattgacaagcgtgtgatcgagaggtttgagaaggaagctgatgaaatgaacaagcgttcattcaagtatgcctggttgcttgacaagcttaaggccgagcgtgaaagaggaattaccattgatattgccttgttgaaatttgaaaccaccaagtactactccactgtcatggatgcacctggacatcgtgactttatcaagaacatgattactggaacctcccaggctgattgtgctgtccttattattgattccaccactggtggttttgaagccggtatctctaaggatgggcagacccgtgaacatgcactacttgcctttactcttggagtgaagcagatgatttgttgttgtaacaagatggatgctaccacccctaagtactccaagggcaggtatgaggaaatcgtgaaggaagtttcttcctacttgaaagaggttggttacaacccagacaaaattcccttcgttcccatctctggttttgagggagacaacatgattgagaggtccaccaaccttgactggtacaagggaccaactctacttgatgctcttgacaacatcaatgagccaaagagaccctcagacaagcccctcaggcttccattgcaagatgtttacaagattggtggtattggaactgtgccagtgggacgtgttgaaactggtgttgtgaagcccggtatgcttgtaacttttgctcctactggtttgacaactgaggttaagtccgttgagatgcaccacgaggctctcaccgaggctcttccaggagacaatgttcgattcaatgttaagaatgttgcagtcaaggatctcaagcatggtttggttgcttccaactccaaggatgaccctgccaaggatgctgccaacttcacgtcccaggtcatcatcatgaaccaccctggacagattggaaatggttatgcaccagttcttgattgccacacctctcacattgctgtcaagtttgctgagcttatcaccaagattgacaggcgatctggtaaggagattgagaaggagcccaagtttttgaagaatggtgatgccggtatggttaagatgattccaaccaagcccatggtggtggaaacttttgctgagtatcctcctcttggtcgttttgctgtgagggacatgagacaaactgttgctgtcggagtcatcaagagtgtggagaagaaggacccaactggagccaaggtcaccaaagcagcagccaagaagaagtga

SEQ ID NO: 3094 - protein, 447 aa, Pisum sativum
MGKEKVHINIVVIGHVDSGKSTTTVHVIYKLGGIDKRVIERFEKEADEMNKRSFKYAWLLDKLKAERERGITIDIALLKFETTKYYSTVMDAPGHRDFIKNMITGTSQADCAVLIIDSTTGGFEAGISKDGQTREHALLAFTLGVKQMICCCNKMDATTPKYSKGRYEEIVKEVSSYLKEVGYNPDKIPFVPISGFEGDNMIERSTNLDWYKGPTLLDALDNINEPKRPSDKPLRLPLQDVYKIGGIGTVPVGRVETGVVKPGMLVTFAPTGLTTEVKSVEMHHEALTEALPGDNVRFNVKNVAVKDLKHGLVASNSKDDPAKDAANFTSQVIIMNHPGQIGNGYAPVLDCHTSHIAVKFAELITKIDRRSGKEIEKEPKFLKNGDAGMVKMIPTKPMVVETFAEYPPLGRFAVRDMRQTVAVGVIKSVEKKDPTGAKVTKAAAKKK

SEQ ID NO: 3095 - DNA, 1389 bp, Piriformospora indica
  CDS (1)..(1389)
atgggtaaagaaaaggctcacgttaacgtcgtcgtcatcggccacgtcgattccggaaagtcgaccaccactggccatctgatctacaagtgcggtggcattgacaagcgaacgattgaaaagttcgagaaggaagctgccgagcttggaaagggctcgttcaagtatgcttgggtgctcgacaagctcaaggccgagcgtgagcgtggtatcaccatcgatatcgctctctggaagtccgagacccccaaatacatggtcactgtcattgatgcccccggccaccgtgactttatcaagaacatgattaccggtacctcgcaggctgattgcgctatcctcatcatcgccggtggtaccggtgagttcgaggctggtatctccaaggatggccagactcgtgagcatgctttgctcgcctttaccctcggtgtccgacagctcatcgtcgctgtcaacaagatggacaccaccaactggtctgaggcccgcttcaacgaaatcgtcaaggaaacctccaacttcatcaagaaggtcggatacaaccccaagacggtcgccttcgtccccatctctggctggcacggtgacaacatgctcgagccctccaccaacatgccctggtacaagggatggtcgaaggaggtcaagggctcgtcgagtcctgccaccggcaagaccctcgtcgacgccatcgacgccatcgaacccccagtccgcccgtccgacaagcccctccgtctcccactccaggatgtgtacaagattggtggtattggtacggtcccagtcggtcgtgtcgaaactggtatcatcaagcccggcatggtcgtctcctttgctccctcgaacgtcaccactgaagtcaagtccgtcgaaatgcaccacgagcagctcgctgagggcttgcccggagacaacgtcggcttcaacgtcaagaacgtgtcggtcaaggatatccgccgtggagacgtcgcttcggactcgaagaacgaccccgccaaggaggctgcatctttcaacgctcaagtcatcgtcttgaaccaccccggtcagattggcgctggttacgccccagtcttggactgccacaccgctcacattgcctgcaagttctccgagctcatcgagaagattgatcgccgaactggcaagaccatggaagccgcccccaagtttgtcaagtctggtgacgctgccattgtcaagctcgtcccgagcaagccaatgtgtgtggagagctacaacgagtacccaccacttggtcgtttcgccgtccgtgacatgaggcagactgttgccgtcggtgtcatcaagtcggttgagaagaccgagggcaagggtggcaaggttacgaagagcgcggaaaaggctgccaagaagaagtaa

SEQ ID NO: 3096 - protein, 462 aa, Piriformospora indica
MGKEKAHVNVVVIGHVDSGKSTTTGHLIYKCGGIDKRTIEKFEKEAAELGKGSFKYAWVLDKLKAERERGITIDIALWKSETPKYMVTVIDAPGHRDFIKNMITGTSQADCAILIIAGGTGEFEAGISKDGQTREHALLAFTLGVRQLIVAVNKMDTTNWSEARFNEIVKETSNFIKKVGYNPKTVAFVPISGWHGDNMLEPSTNMPWYKGWSKEVKGSSSPATGKTLVDAIDAIEPPVRPSDKPLRLPLQDVYKIGGIGTVPVGRVETGIIKPGMVVSFAPSNVTTEVKSVEMHHEQLAEGLPGDNVGFNVKNVSVKDIRRGDVASDSKNDPAKEAASFNAQVIVLNHPGQIGAGYAPVLDCHTAHIACKFSELIEKIDRRTGKTMEAAPKFVKSGDAAIVKLVPSKPMCVESYNEYPPLGRFAVRDMRQTVAVGVIKSVEKTEGKGGKVTKSAEKAAKKK

SEQ ID NO: 3097 - DNA, 1383 bp, Podospora anserina
  CDS (1)..(1383)
atgggcaaggaggacaagactcacatcaacgtcgtcgttatcggccacgtcgattccggcaagtcgaccaccactggtcacttgatctacaagtgcggtggtattgacaagcgtaccatcgagaagttcgagaaggaagctgctgagctcggcaagggctctttcaagtatgcctgggttcttgacaagttgaaggccgagcgtgagcgtggtatcaccatcgatattgccctctggaagttcgagacccccaagtactatgtcaccgtcattgatgcccccggccatcgtgatttcatcaagaacatgattactggtacttcccaggccgattgcgccattctcatcattgccgccggtactggtgagttcgaggctggtatctccaaggatggccagacccgtgagcacgctctcctcgcctacaccctcggtgtgaagcagctcatcgtcgccatcaacaagatggacaccaccaagtggtccgaggcccgcttcaacgagatcatcaaggagacctccaacttcatcaagaaggtcggctacaaccccaagactgttgccttcgtccccatctccggtttcaacggcgacaacatgcttgaggcttccaccaactgcccctggtacaagggctgggagaaggaggtcaagggtggcaaggccaccggcaagaccctccttgaggccatcgactccatcgagccccccaagcgtcccaccgacaagcccctccgtcttcccctccaggatgtctacaagatcggcggtatcggcacagtccctgtcggccgtatcgagactggtatcctcaagcccggtatggtcgttaccttcgctccttccaacgtcaccactgaagtcaagtccgtcgagatgcaccacgagcagctcgctgagggtgttcccggtgacaacgttggtttcaacgtgaagaacgtctccgtcaaggaaatccgccgtggcaacgttgccggtgactccaagaacgacccccccatgggcgccgcctctttcgatgcccaggtcatcgtcctcaaccaccccggccaggtcggtgctggttacgcccccgtcctcgattgccacactgcccacatcgcctgcaagttctctgagctcctgcagaagatcgaccgccgtactggtaaggccgttgaggagagccccaagttcatcaagtctggtgatgctgccatcgtcaagatggttccctccaagcccatgtgcgttgaggctttcactgagtaccctcccctcggtcgtttcgccgtccgtgacatgcgtcagaccgtcgctgtcggtgtcatcaagaaggtcgagaaggccgctgctggttccggcaaggttaccaagtccgctgccaaggctggcaagaaataa

SEQ ID NO: 3098 - protein, 460 aa, Podospora anserina
MGKEDKTHINVVVIGHVDSGKSTTTGHLIYKCGGIDKRTIEKFEKEAAELGKGSFKYAWVLDKLKAERERGITIDIALWKFETPKYYVTVIDAPGHRDFIKNMITGTSQADCAILIIAAGTGEFEAGISKDGQTREHALLAYTLGVKQLIVAINKMDTTKWSEARFNEIIKETSNFIKKVGYNPKTVAFVPISGFNGDNMLEASTNCPWYKGWEKEVKGGKATGKTLLEAIDSIEPPKRPTDKPLRLPLQDVYKIGGIGTVPVGRIETGILKPGMVVTFAPSNVTTEVKSVEMHHEQLAEGVPGDNVGFNVKNVSVKEIRRGNVAGDSKNDPPMGAASFDAQVIVLNHPGQVGAGYAPVLDCHTAHIACKFSELLQKIDRRTGKAVEESPKFIKSGDAAIVKMVPSKPMCVEAFTEYPPLGRFAVRDMRQTVAVGVIKKVEKAAAGSGKVTKSAAKAGKK

SEQ ID NO: 3099 - DNA, 1386 bp, Podospora curvicolla
  CDS (1)..(1386)
atgggcaaggaggacaagactcacatcaacgtcgtcgttatcggccacgtcgattccggcaagtcgaccaccactggtcacttgatctacaagtgcggtggtattgacaagcgtaccatcgagaagttcgagaaggaagctgctgagctcggcaagggctctttcaagtatgcctgggttcttgacaagttgaaggccgagcgtgagcgtggtatcaccattgatatcgccctctggaagttcgagacccccaagtactatgtcaccgtcatcgatgcccccggccatcgtgatttcatcaagaacatgattactggtacttcccaggccgattgcgccattctcatcattgccgccggtactggtgagttcgaggctggtatctccaaggatggccagacccgtgagcacgctctcctcgcctacaccctcggtgtgaagcagctcatcgtcgccatcaacaagatggacaccaccaaatggtccgaggcccgcttcaacgagatcatcaaggagacctccaacttcatcaagaaggtcggctacaaccccaagactgttgccttcgtccccatctccggtttcaacggcgacaacatgcttgaggcttccaccaactgcccctggtacaagggttgggagaaggaggtcaagggtggcaaggctactggcaagaccctcctcgaggccatcgactccatcgagccccccaagcgtcccaccgacaagcccctccgtcttccccttcaggacgtttacaagatcggcggtatcggcacagtccctgtcggccgtatcgagactggtatcctcaagcccggtatggtcgttaccttcgccccttccaacgtcaccactgaagtcaagtccgtcgagatgcaccacgagcagctctctgagggtgtccccggtgacaacgttggtttcaacgtgaagaacgtctccgtcaaggaaatccgccgtggcaacgttgccggtgactccaagaacgacccccctcttggcgccgcttctttcgatgcccaggtcatcgtcctcaaccaccccggccaggtcggtgctggttacgcccccgtcctcgattgccacactgcccacatcgcctgcaagttcgctgagctcctgcagaagatcgatcgccgtactggtaaggctgttgaggagagccctaagttcatcaagtctggtgatgctgccatcgtcaagatgattccctccaagcccatgtgcgttgaggctttcactgagtaccctcccctcggtcgtttcgctgtccgtgacatgcgtcagaccgtcgctgtcggtgtcatcaagaaggtcgagaaggccgctgctggttccggcaaggtcaccaagtccgctgccaaggctggtggcaagaaataa

SEQ ID NO: 3100 - protein, 461 aa, Podospora curvicolla
MGKEDKTHINVVVIGHVDSGKSTTTGHLIYKCGGIDKRTIEKFEKEAAELGKGSFKYAWVLDKLKAERERGITIDIALWKFETPKYYVTVIDAPGHRDFIKNMITGTSQADCAILIIAAGTGEFEAGISKDGQTREHALLAYTLGVKQLIVAINKMDTTKWSEARFNEIIKETSNFIKKVGYNPKTVAFVPISGFNGDNMLEASTNCPWYKGWEKEVKGGKATGKTLLEAIDSIEPPKRPTDKPLRLPLQDVYKIGGIGTVPVGRIETGILKPGMVVTFAPSNVTTEVKSVEMHHEQLSEGVPGDNVGFNVKNVSVKEIRRGNVAGDSKNDPPLGAASFDAQVIVLNHPGQVGAGYAPVLDCHTAHIACKFAELLQKIDRRTGKAVEESPKFIKSGDAAIVKMIPSKPMCVEAFTEYPPLGRFAVRDMRQTVAVGVIKKVEKAAAGSGKVTKSAAKAGGKK

SEQ ID NO: 3101 - DNA, 1392 bp, Puccinia graminis
  CDS (1)..(1392)
atgggtaaagagaaaaaccacgtcaacgtcgtcgtcatcggacatgtcgattctggtaaatccaccaccaccggccacttgatctacaagtgcggtggtattgacaagcgaacgatcgaaaagttcgagaaggaagccgccgaactgggtaaaggatccttcaagtacgcatgggtgcttgacaagctgaaagccgagcgtgagcgtggtatcaccatcgacattgccttgtggaagtttgaaacccccaagtactacgtcaccgtcattgatgcccccggacatcgtgattttatcaaaaacatgatcactggtacctcccaagccgattgtgctatcctcatcatcgccgccggtactggtgaattcgaagctggtatctccaaggatggccagactcgtgaacacgccctcctagccttcacccttggtgtccgacaactcatcgttgccatcaacaagatggacaccaccaaatggtccgagcagaggtttgaaatcgtcaaggaaacctccaactttgtcaagaaggtcgggtacaaccccaaatctatcgcctttgtccccatctcgggatggcacggtgacaacatgttggaggagtccaccaacatgggctggttcaagggatggaccaaggagaccaaggctggtgtttccaaaggaaagaccctcctcgatgctattgatgccatcgaacctccaagccgacccaccgacaagcccctccgacttcctctccaggatgtctacaagattggtggtatcggtacggtacctgttggtcgtgttgaaaccggtaccatcaaagctggtatggttgttaccttcgcccctgccaacgtgacgactgaagtcaagtctgttgagatgcaccacgaacaattggaggctggtatgccaggtgacaatgtcggtttcaacgtcaagaacgtttccgtcaaggatatccgtcgaggaaatgtttgcggtgacaccaaatgtgaccccccgaaggaagccgcatccttcgttgcccaggtcatcgttttgaaccaccccggtcaaatcggaaatggttactgccccgtacttgattgtcacaccgcccacattgcatgcaagttcgacactctccagcagaagatcgaccgacgtactggtaaggctttggaagaggcccccaaattcgtcaaatccggtgacgcttgccttgtcaagatggtcccttccaaggccatgtgtgtcgagcccttcgccgactacccccctctcggtcgtttcgccgtccgtgacatgagacagactgttgccgtcggtgtcatcaagagcgtcgagaagacggatggcaaggccggaaaggtcaccaaggccgccgtcaagccggtgccaagaagtagttacgctcggtag

SEQ ID NO: 3102 - protein, 463 aa, Puccinia graminis
MGKEKNHVNVVVIGHVDSGKSTTTGHLIYKCGGIDKRTIEKFEKEAAELGKGSFKYAWVLDKLKAERERGITIDIALWKFETPKYYVTVIDAPGHRDFIKNMITGTSQADCAILIIAAGTGEFEAGISKDGQTREHALLAFTLGVRQLIVAINKMDTTKWSEQRFEIVKETSNFVKKVGYNPKSIAFVPISGWHGDNMLEESTNMGWFKGWTKETKAGVSKGKTLLDAIDAIEPPSRPTDKPLRLPLQDVYKIGGIGTVPVGRVETGTIKAGMVVTFAPANVTTEVKSVEMHHEQLEAGMPGDNVGFNVKNVSVKDIRRGNVCGDTKCDPPKEAASFVAQVIVLNHPGQIGNGYCPVLDCHTAHIACKFDTLQQKIDRRTGKALEEAPKFVKSGDACLVKMVPSKAMCVEPFADYPPLGRFAVRDMRQTVAVGVIKSVEKTDGKAGKVTKAAVKPVPRSSYAR

SEQ ID NO: 3103 - DNA, 1383 bp, Schizophyllum commune
  CDS (1)..(1383)
atgggaaaggagaagctccacgttaacgtcgtcgtcatcggtcacgtcgactccggcaagtcgaccaccaccggccatctcatctacaagtgcggtggtatcgacaagcgtacgatcgagaagttcgagaaggaggccgctgagcttggcaagggttccttcaagtatgcgtgggtgcttgacaagctcaaggctgagcgtgagcgtggtatcaccattgatatcgccctctggaagttcgagaccccgaagtacatggtcaccgtcatcgacgccccgggtcaccgtgacttcatcaagaacatgatcaccggtacctcccaggctgactgcgctatcctcaccatcgccggtggcactggtgaattcgaggctggtatctccaaggatggccagacccgcgagcacgctctccttgccttcaccctcggtgtccgtcagctcatcgtcgccgtcaacaagatggacacgaccaagtggagcgaggaccgtttcaacgaaatcgtcaaggagacctccaccttcatcaagaaggtcggctacaacccgaagaccgtcgccttcgtcccgatctccggctggcacggcgacaacatgttggaggagtccaccaacatgccgtggtacaagggctggaccaaggagaccaaggctggtgtcgtcaagggcaagaccctcctcgatgccatcgacgccatcgagccccccgttcgtccctccgacaagcccctccgtctccccctccaggacgtctacaagatcggtggtattgggacggtgcccgtcggccgtgtcgagaccggtatcatcaaggccggcatggtcgtcaccttcgccccctccaacgtcaccactgaggtcaagtccgtcgagatgcaccacgagcagctcgctgagggcaagccgggtgacaacgtcgggttcaacgtcaagaacgtctccgtcaaggacattcgccgtggcaacgtcgcgtctgactccaagaacgaccccgcgaaggaggcggcgtccttcaacgcccaggtcatcgttctcaaccaccccggtcagatcggcgctggctacgcacccgttctcgattgccacaccgcgcacattgcctgcaagttcgccgagctgctcgagaagatcgatcgccggacgggtaagtcgctcgaggcgagccccaagttcgtcaagtccggcgacgcctgcatcgtcaagctcgtcccgagcaagccgatgtgcgttgagtcctacaacgagtacccgccccttggtcgtttcgctgtccgcgacatgaggcagacggttgccgtcggcatcatcaagtcggtcgacaagactgacaagtccggtggcaaggtcaccaagtccgccgagaaggccgccaagaagaagtaa

SEQ ID NO: 3104 - protein, 460 aa, Schizophyllum commune
MGKEKLHVNVVVIGHVDSGKSTTTGHLIYKCGGIDKRTIEKFEKEAAELGKGSFKYAWVLDKLKAERERGITIDIALWKFETPKYMVTVIDAPGHRDFIKNMITGTSQADCAILTIAGGTGEFEAGISKDGQTREHALLAFTLGVRQLIVAVNKMDTTKWSEDRFNEIVKETSTFIKKVGYNPKTVAFVPISGWHGDNMLEESTNMPWYKGWTKETKAGVVKGKTLLDAIDAIEPPVRPSDKPLRLPLQDVYKIGGIGTVPVGRVETGIIKAGMVVTFAPSNVTTEVKSVEMHHEQLAEGKPGDNVGFNVKNVSVKDIRRGNVASDSKNDPAKEAASFNAQVIVLNHPGQIGAGYAPVLDCHTAHIACKFAELLEKIDRRTGKSLEASPKFVKSGDACIVKLVPSKPMCVESYNEYPPLGRFAVRDMRQTVAVGIIKSVDKTDKSGGKVTKSAEKAAKKK

SEQ ID NO: 3105 - DNA, 1347 bp, Solanum lycopersicum
  CDS (1)..(1347)
atgggtaaagagaagattcacatcagcattgtggtcattggtcatgttgactctggaaagtcgactaccactggtcacttgatctacaagcttggtggtattgacaagcgtgttattgagaggttcgagaaggaagctgctgagatgaacaagaggtcattcaagtatgcctgggtgcttgacaaacttaaggcagaacgtgagcgtggtatcaccattgatattgctttgtggaagtttgagaccactaagtactactgcactgttattgatgcccccggccacagggatttcatcaagaacatgatcactggtacctctcaggctgactgtgctgttctcattattgactccactactggtggttttgaagctggtatctccaaagatggtcagacccgtgaacatgcattgcttgctttcacccttggtgtcaagcaaatgatctgctgctgtaacaagatggatgctaccacccccaagtactccaaggctaggtatgatgaaatcgtgaaggaagtttcttcctacctcaagaaggttggttacaaccctgacaaaatcccctttgttccaatctctggttttgaaggagacaacatgattgagaggtctaccaacctcgactggtacaagggaccaaccctccttgaggctcttgaccagattaacgagcccaagaggccatcagacaaacccctccgtcttccacttcaggatgtttacaagattggtggtattggaactgtccctgttggtcgcgttgagactggtgtgatcaagcctggtatggttgtgacctttggccctactggtttgacaactgaagtcaagtctgttgagatgcaccacgaagctctccaggaggcactccctggtgacaatgttgggttcaatgttaagaatgttgctgttaaggatcttaagcgtggttatgttgcctcaaactccaaggatgacccagccaagggggcagccagcttcactgcccaggtcatcatcatgaaccatcctggccagattggaaatggatatgctccagtgcttgattgtcacacttcccacattgctgtcaagtttgctgagatcttgaccaagattgacaggcgttcaggtaaggaacttgagaaggagcctaagttcttgaagaacggtgatgctggtatggttaagatgattcccaccaagcccatggttgttgagacctttgctgaataccctccattgggtcgttttgctgtgagggacatgaggcagactgttgctgttggtgttgtcaagaatgttgacaagaaggacccaactggtgccaaggtgaccaaggctgcccagaagaaggggaagtga

SEQ ID NO: 3106 - protein, 448 aa, Solanum lycopersicum
MGKEKIHISIVVIGHVDSGKSTTTGHLIYKLGGIDKRVIERFEKEAAEMNKRSFKYAWVLDKLKAERERGITIDIALWKFETTKYYCTVIDAPGHRDFIKNMITGTSQADCAVLIIDSTTGGFEAGISKDGQTREHALLAFTLGVKQMICCCNKMDATTPKYSKARYDEIVKEVSSYLKKVGYNPDKIPFVPISGFEGDNMIERSTNLDWYKGPTLLEALDQINEPKRPSDKPLRLPLQDVYKIGGIGTVPVGRVETGVIKPGMVVTFGPTGLTTEVKSVEMHHEALQEALPGDNVGFNVKNVAVKDLKRGYVASNSKDDPAKGAASFTAQVIIMNHPGQIGNGYAPVLDCHTSHIAVKFAEILTKIDRRSGKELEKEPKFLKNGDAGMVKMIPTKPMVVETFAEYPPLGRFAVRDMRQTVAVGVVKNVDKKDPTGAKVTKAAQKKGK

SEQ ID NO: 3107 - DNA, 1383 bp, Sordaria macrospora
  CDS (1)..(1383)
atgggtaaggaagacaaggctcacatcaacgtcgtcgttatcggccacgtcgattccggcaagtccaccactaccggtcacctgatctacaagtgcggtggtatcgacaagcgtaccatcgagaagttcgagaaggaagccgctgagctcggcaagggttccttcaagtatgcctgggttcttgacaagctcaaggccgagcgtgagcgtggtatcaccatcgatatcgccctctggaagttcgagactcccaagtactacgtcaccgtcatcgatgcccccggccatcgtgatttcatcaagaacatgatcactggtacctcccaggctgattgcgctattctcatcattgccgctggtactggtgagttcgaggctggtatctccaaggatggccagactcgtgagcacgctcttctcgcctacaccctcggtgtcaagcagctcatcgttgccatcaacaagatggacaccacccagtggtcccaggctcgtttcgaggagatcatcaaggagaccaagaacttcatcaagaaggtcggctacaaccccgccaccgtcgctttcgtccccatctccggcttcaacggcgacaacatgcttgaggcctccaccaactgcccctggtacaagggttgggagaaggagaccaaggccggcaagtccactggcaagaccctcctcgaggccatcgacgccattgagcagcccaagcgcccgaccgacaagcccctccgtcttcccctccaggatgtctacaagatcggcggtatcggcacagtgcccgtcggccgtatcgagactggtgtcctcaagcccggtatggtcgttaccttcgctccttccaacgtcaccactgaagtcaagtccgtcgagatgcaccacgagcagcttgctcagggtgttcccggtgacaacgtcggcttcaacgtgaagaacgtttccgtcaaggatatccgtcgtggtaacgttgccggtgactccaagaacgacccccctgtcggcgctgcctctttcaccgcccaggtcatcgtccttaaccaccccggtcaggtcggtgccggctacgctcccgtcctcgattgccacactgcccacattgcctgcaagttcgccgagctcctcgagaagatcgatcgccgtactggtaaggctgttgagacttctcccaagttcatcaagtctggtgatgctgccatcgtcaagatgattccctccaagcccatgtgcgtcgaggctttcaccgactaccctcccctcggtcgtttcgccgtccgtgacatgcgtcagaccgtcgctgtcggtgtcatcaaggccgtcgacaagacccaggctgtcgctggcaaggtcaccaagtctgctgccaaggctgccaagaagtaa

SEQ ID NO: 3108 - protein, 460 aa, Sordaria macrospora
MGKEDKAHINVVVIGHVDSGKSTTTGHLIYKCGGIDKRTIEKFEKEAAELGKGSFKYAWVLDKLKAERERGITIDIALWKFETPKYYVTVIDAPGHRDFIKNMITGTSQADCAILIIAAGTGEFEAGISKDGQTREHALLAYTLGVKQLIVAINKMDTTQWSQARFEEIIKETKNFIKKVGYNPATVAFVPISGFNGDNMLEASTNCPWYKGWEKETKAGKSTGKTLLEAIDAIEQPKRPTDKPLRLPLQDVYKIGGIGTVPVGRIETGVLKPGMVVTFAPSNVTTEVKSVEMHHEQLAQGVPGDNVGFNVKNVSVKDIRRGNVAGDSKNDPPVGAASFTAQVIVLNHPGQVGAGYAPVLDCHTAHIACKFAELLEKIDRRTGKAVETSPKFIKSGDAAIVKMIPSKPMCVEAFTDYPPLGRFAVRDMRQTVAVGVIKAVDKTQAVAGKVTKSAAKAAKK

SEQ ID NO: 3109 - DNA, 1344 bp, Glycine max
  CDS (1)..(1344)
atgggtaaggaaaaggttcacatcagtattgtggtcattggccatgtcgactctgggaaatccactaccactggtcacctgatttacaagcttggaggcattgacaagcgtgttattgagaggtttgagaaggaagctgctgagatgaataagaggtctttcaagtatgcctgggtgctggacaaacttaaggctgagcgtgaaagaggaatcaccattgatattgctttgtggaagtttgaaacaacaaagtattattgcacagttattgatgcgcctggacatagggatttcattaagaatatgattactgggacatcccaagctgactgtgctgttcttatcattgattcgaccactggtggttttgaagctggtatttccaaggatggacagactcgtgaacatgctctgctttcattcacccttggtgtgaaacagatgatttgctgctgtaacaaaatggatgctactacacccaagtattccaaggccaggtatgatgaaattgtgaaggaagtctcttcctacttgaagaaagtaggatacaaccctgacaagattccttttgttcctatctctggttttgagggagacaacatgattgagaggtccacaaaccttgactggtacaagggtccaactctgcttgatgcacttgaccagattagtgagcccaagaggccctctgacaagcccctcaggcttccccttcaggatgtgtacaagattggaggtattggaactgtgccagtgggacgtgttgagaccggtgtcttgaagcctggaatggtggtgacttttgcaccaactggactgacaactgaagtcaagtctgtggagatgcaccatgaatctcttacagaggcacatcctggtgacaatgtgggattcaatgttaagaatgttgctgttaaggatttgaagcgtggttatgttgcctcaaactcaaaggatgaccctgcaaaggaggctgctaacttcacagcccaagtcatcatcattaaccaccctggtcagattggaaatggctatgcccctgtcctcgactgccacacttctcacattgctgtcaagtttgctgaactcatgaccaagattgacaggcgatccggcaaagagcttgagaaggagcccaagtttttgaagaacggtgatgctggttttgttaagatgattccaaccaaacccatggttgttgaaactttctccgagtatcctccacttggtaggtttgctgttagggacatgcgtcaaactgttgctgtgggagtcatcaagaacgttgagaagaaggatcctaccggagccaaggtcaccaaggctgcccagaagaagaagtga

SEQ ID NO: 3110 - protein, 447 aa, Glycine max
MGKEKVHISIVVIGHVDSGKSTTTGHLIYKLGGIDKRVIERFEKEAAEMNKRSFKYAWVLDKLKAERERGITIDIALWKFETTKYYCTVIDAPGHRDFIKNMITGTSQADCAVLIIDSTTGGFEAGISKDGQTREHALLSFTLGVKQMICCCNKMDATTPKYSKARYDEIVKEVSSYLKKVGYNPDKIPFVPISGFEGDNMIERSTNLDWYKGPTLLDALDQISEPKRPSDKPLRLPLQDVYKIGGIGTVPVGRVETGVLKPGMVVTFAPTGLTTEVKSVEMHHESLTEAHPGDNVGFNVKNVAVKDLKRGYVASNSKDDPAKEAANFTAQVIIINHPGQIGNGYAPVLDCHTSHIAVKFAELMTKIDRRSGKELEKEPKFLKNGDAGFVKMIPTKPMVVETFSEYPPLGRFAVRDMRQTVAVGVIKNVEKKDPTGAKVTKAAQKKK

SEQ ID NO: 3111 - DNA, 1344 bp, Nicotiana tabacum
  CDS (1)..(1344)
atgggtaaagagaaatttcacatcaacattgtggtcattggccacgtcgactctggtaagtccactaccactggtcacttgatctacaagcttggtggtattgacaagcgtgtcattgagaggtttgagaaagaagctgctgagatgaacaagaggtcattcaagtatgcctgggtgcttgacaagctcaaggctgagcgtgagcgtggtatcaccattgatattgccttgtggaagtttgagaccaccaagtactactgcactgtgattgatgctcctggacacagggacttcatcaagaatatgattactggtacctcccaagctgactgtgctgtcctgattattgactccaccactggtggttttgaagctggtatctctaaggatggacagacccgtgaacatgcattgcttgctttcacccttggtgtcaagcaaatgatttgctgctgtaacaagatggatgctaccacccccaagtactccaaggctaggtatgatgaaatcgtgaaggaggtttcttcctacctcaagaaggtaggatacaaccctgataaaatcccctttgtccccatctctggtttcgagggtgataacatgatcgaaagatcaaccaaccttgactggtacaagggcccaactcttcttgaggctcttgaccagatcaatgacgccaagaggccctcagacaagcccctcaggctcccacttcaggatgtgtacaagattggtggtattggtactgtccctgttggtcgtgtggaaaccggtgtcctcaagcctggtatggttgtgacttttggtcccactggtctgaccactgaagttaaatctgttgagatgcaccacgaagctcttcaggaggcacttcctggtgacaatgttggattcaacgtcaagaacgttgcagttaaggatctcaagcgtgggtttgttgcttcaaactccaaggatgacccagctaagggtgctgccagctttacctcccaagtcatcatcatgaaccatccaggacagattggaaatggatatgctccagtgcttgactgccacacctcccacattgctgtcaagtttgcagaaattttgaccaagatcgacaggcgttctggtaaggagattgagaaggagcccaagttcttgaagaatggtgatgctggtatggttaagatgattcccaccaagcccatggttgttgagaccttctctgagtacccaccattgggacgttttgctgtgagggacatgcgtcaaactgttgctgttggtgttatcaagaacgttgacaagaaggacccaactggtgccaaggtcaccaaggctgctcagaagaagaaatga

SEQ ID NO: 3112 - protein, 447 aa, Nicotiana tabacum
MGKEKFHINIVVIGHVDSGKSTTTGHLIYKLGGIDKRVIERFEKEAAEMNKRSFKYAWVLDKLKAERERGITIDIALWKFETTKYYCTVIDAPGHRDFIKNMITGTSQADCAVLIIDSTTGGFEAGISKDGQTREHALLAFTLGVKQMICCCNKMDATTPKYSKARYDEIVKEVSSYLKKVGYNPDKIPFVPISGFEGDNMIERSTNLDWYKGPTLLEALDQINDAKRPSDKPLRLPLQDVYKIGGIGTVPVGRVETGVLKPGMVVTFGPTGLTTEVKSVEMHHEALQEALPGDNVGFNVKNVAVKDLKRGFVASNSKDDPAKGAASFTSQVIIMNHPGQIGNGYAPVLDCHTSHIAVKFAEILTKIDRRSGKEIEKEPKFLKNGDAGMVKMIPTKPMVVETFSEYPPLGRFAVRDMRQTVAVGVIKNVDKKDPTGAKVTKAAQKKK

SEQ ID NO: 3113 - DNA, 1383 bp, Trichoderma reesei
  CDS (1)..(1383)
atgggtaaggaggacaagactcacatcaacgtggtcgtcatcggccacgtcgactccggcaagtctaccaccactggtcacttgatctaccagtgcggtggtatcgacaagcgtaccattgagaagttcgagaaggaagccgccgaactcggcaagggttccttcaagtacgcgtgggttcttgacaagctcaaggccgagcgtgagcgtggtatcaccatcgacattgccctctggaagttcgagactcccaagtactatgtcaccgtcattgacgctcccggccaccgtgacttcatcaagaacatgatcactggtacttcccaggccgactgcgctatcctcatcatcgctgccggtactggtgagttcgaggctggtatctccaaggatggccagacccgtgagcacgctctgctcgcctacaccctgggtgtcaagcagctcatcgtcgccatcaacaagatggacactgccaactgggccgaggctcgttaccaggaaatcatcaaggagacttccaacttcatcaagaaggtcggcttcaaccccaaggccgttgctttcgtccccatctccggcttcaacggtgacaacatgctcaccccctccaccaactgcccctggtacaagggctgggagaaggagaccaaggctggcaagttcaccggcaagaccctccttgaggccatcgactccatcgagccccccaagcgtcccacggacaagcccctgcgtcttcccctccaggacgtctacaagatcggtggtatcggaacagttcccgtcggccgtatcgagactggtgtcctcaagcccggtatggtcgttaccttcgctccctccaacgtcaccactgaagtcaagtccgtcgagatgcaccacgagcagctcgctgagggccagcctggtgacaacgttggtttcaacgtgaagaacgtttccgtcaaggaaatccgccgtggcaacgttgccggtgactccaagaacgacccccccatgggcgccgcttctttcaccgcccaggtcatcgtcatgaaccaccccggccaggtcggtgccggctacgcccccgtcctcgactgccacactgcccacattgcctgcaagttcgccgagctcctcgagaagatcgaccgccgtaccggtaaggctaccgagtctgcccccaagttcatcaagtctggtgactccgccatcgtcaagatgatcccctccaagcccatgtgcgttgaggctttcaccgactaccctcccctgggtcgtttcgccgtccgtgacatgcgccagaccgtcgctgtcggtgtcatcaaggccgtcgagaagtcctctgccgccgccgccaaggtcaccaagtccgctgccaaggccgccaagaaataa

SEQ ID NO: 3114 - protein, 460 aa, Trichoderma reesei
MGKEDKTHINVVVIGHVDSGKSTTTGHLIYQCGGIDKRTIEKFEKEAAELGKGSFKYAWVLDKLKAERERGITIDIALWKFETPKYYVTVIDAPGHRDFIKNMITGTSQADCAILIIAAGTGEFEAGISKDGQTREHALLAYTLGVKQLIVAINKMDTANWAEARYQEIIKETSNFIKKVGFNPKAVAFVPISGFNGDNMLTPSTNCPWYKGWEKETKAGKFTGKTLLEAIDSIEPPKRPTDKPLRLPLQDVYKIGGIGTVPVGRIETGVLKPGMVVTFAPSNVTTEVKSVEMHHEQLAEGQPGDNVGFNVKNVSVKEIRRGNVAGDSKNDPPMGAASFTAQVIVMNHPGQVGAGYAPVLDCHTAHIACKFAELLEKIDRRTGKATESAPKFIKSGDSAIVKMIPSKPMCVEAFTDYPPLGRFAVRDMRQTVAVGVIKAVEKSSAAAAKVTKSAAKAAKK

SEQ ID NO: 3115 - DNA, 1344 bp, Vicia faba
  CDS (1)..(1344)
atgggtaaagaaaaggttcacattaacattgtcgtcattggacatgtcgactctggaaaatcaaccaccactggtcacttgatctacaagctaggaggtattgacaagcgtgtgattgagaggtttgagaaggaagctgctgaaatgaacaaacgttcattcaagtatgcatgggttcttgacaagcttaaggctgagcgtgaaagaggtattaccattgatattgccttgtggaaatttgaaacctcgaagtactactgcacagtcattgatgctcctggacatcgtgattttatcaagaacatgattactggaacctcccaggctgattgtgctgtcctcattattgattccaccactggaggttttgaggctggtatctctaaggatgggcagactcgtgaacacgctcttcttgcttttactcttggagtgaaacagatgatctgttgttgtaacaagatggatgctaccacccctaagtactccaagggcaggtatgaagaaattgtgaaggaagtttcttcctacttgaagaaggttggatacaacccagacaaaattccattcgttcccatttctggttttgagggtgacaacatgattgagaggtccaccaaccttgactggtacaagggaccaactctccttgatgctcttgacaacatcaacgagcccaagagaccctcagacaagccactcaggcttccattgcaagatgtttacaagattggtggtattggaatcgtgccagtgggacgtgttgaaaccggtgttgtgaagcccggtatgcttgtgacttttgctcctaccggtttgacaactgaggttaagtctgttgagatgcaccacgaggctctcactgaggctcttccaggagacaatgtcggattcaatgttaagaatgttgcagtcaaggatctcaagcgtggttttgttgcatccaactccaaggatgaccctgccaaggaagctgccaacttcacctcccaagtcatcatcatgaaccatcctggacagatcggaaacggttatgcaccagtgctagattgccatacctctcacattgctgtgaagtttgctgaacttatcaccaagattgacaggcgatctggtaaggagattgagaaggagcccaagtttttgaagaatggtgatgcaggtatggttaagatgattcccaccaagcccatggttgtggaaacttttgccgagtatcctccacttggtcgttttgctgttagggacatgagacaaactgttgctgtcggagtcatcaagagtgtggagaagaaggacccaactggagccaaggtcaccaaagctgcagccaagaagaagtga

SEQ ID NO: 3116 - protein, 447 aa, Vicia faba
MGKEKVHINIVVIGHVDSGKSTTTGHLIYKLGGIDKRVIERFEKEAAEMNKRSFKYAWVLDKLKAERERGITIDIALWKFETSKYYCTVIDAPGHRDFIKNMITGTSQADCAVLIIDSTTGGFEAGISKDGQTREHALLAFTLGVKQMICCCNKMDATTPKYSKGRYEEIVKEVSSYLKKVGYNPDKIPFVPISGFEGDNMIERSTNLDWYKGPTLLDALDNINEPKRPSDKPLRLPLQDVYKIGGIGIVPVGRVETGVVKPGMLVTFAPTGLTTEVKSVEMHHEALTEALPGDNVGFNVKNVAVKDLKRGFVASNSKDDPAKEAANFTSQVIIMNHPGQIGNGYAPVLDCHTSHIAVKFAELITKIDRRSGKEIEKEPKFLKNGDAGMVKMIPTKPMVVETFAEYPPLGRFAVRDMRQTVAVGVIKSVEKKDPTGAKVTKAAAKKK

SEQ ID NO: 3117 - DNA, 1344 bp, Triticum aestivum
  CDS (1)..(1344)
atgggtaaggagaagactcacatcaacatcgtggtcattggccatgtcgactctggcaagtcgacgaccactggccacctgatctacaagcttggaggcattgacaagcgtgtcatcgagaggttcgagaaggaagccgctgagatgaacaagaggtctttcaagtacgcgtgggtgcttgacaagctcaaggccgagcgtgagagaggtatcaccatcgatattgctctctggaagttcgagaccaccaagtactactgcaccgtcattgatgcccctggtcaccgtgacttcatcaagaacatgatcaccggtacctcccaggctgactgtgctgttctcatcatcgactccaccactggtggttttgaggctggtatctccaaggatggccagacacgtgagcacgccctccttgctttcactcttggagtgaagcagatgatctgctgctgcaacaagatggacgccaccactcccaagtactcaaaggcgcgttatgaagaaattgtcaaggaggtctcttcctacctgaagaaggtcggctacaaccctgacaaggttcccttcgtccccatctctgggtttgagggtgacaacatgattgagaggtccaccaaccttgactggtacaagggcccaacccttcttgaggcgcttgaccagatcaacgagcccaagaggccctcagacaagcccctccgtcttcccctccaggacgtttacaagattggtggcattggaactgtgcctgttggccgtgttgagactggtgtcatcaagcctggtatggttgtcacctttggtcccactggtctgacaactgaggtcaagtccgttgagatgcaccatgagtctctcctggaggcgcttcctggtgacaacgttggcttcaatgtcaagaatgttgccgtgaaggatctgaagcgtggttttgttgcatccaactccaaggatgaccctgccaaggaggcagccaacttcacctcccaggtcatcatcatgaaccaccctggtcagattggcaacggctacgccccagtgctggactgccacacctcgcacattgctgtcaagtttgctgagctggtgaccaagatcgacaggcgatctggtaaggagctggaggccctgcccaagttcctcaagaatggtgatgctggcatagtgaagatgattcccaccaagcccatggttgtggagacctttgctacttacccacctcttggtcgttttgctgtccgtgacatgaggcaaactgtggctgttggtgtcatcaagggtgtggagaagaaggacccaaccggcgccaaggtgaccaaggctgccatcaagaagaaatga

SEQ ID NO: 3118 - protein, 447 aa, Triticum aestivum
MGKEKTHINIVVIGHVDSGKSTTTGHLIYKLGGIDKRVIERFEKEAAEMNKRSFKYAWVLDKLKAERERGITIDIALWKFETTKYYCTVIDAPGHRDFIKNMITGTSQADCAVLIIDSTTGGFEAGISKDGQTREHALLAFTLGVKQMICCCNKMDATTPKYSKARYEEIVKEVSSYLKKVGYNPDKVPFVPISGFEGDNMIERSTNLDWYKGPTLLEALDQINEPKRPSDKPLRLPLQDVYKIGGIGTVPVGRVETGVIKPGMVVTFGPTGLTTEVKSVEMHHESLLEALPGDNVGFNVKNVAVKDLKRGFVASNSKDDPAKEAANFTSQVIIMNHPGQIGNGYAPVLDCHTSHIAVKFAELVTKIDRRSGKELEALPKFLKNGDAGIVKMIPTKPMVVETFATYPPLGRFAVRDMRQTVAVGVIKGVEKKDPTGAKVTKAAIKKK

SEQ ID NO: 3119 - DNA, 1383 bp, Yarrowia lipolytica
  CDS (1)..(1383)
atgggaaaggaaaagactcacgttaacctcgttgtcatcggtcacgtcgatgccggtaagtccaccaccactggtcaccttatctacaagtgcggtggtatcgataagcgaaccatcgagaagttcgagaaggaggccgacgagcttggaaagggttctttcaagtacgcttgggttcttgacaagcttaaggctgagcgagagcgaggtatcaccattgatattgctctctggaagttccagacccctaagtactacgtcaccgttattgatgctcccggtcaccgagatttcatcaagaacatgatcaccggtacctcccaggccgactgtgccatcctcatcattgctggtggtgttggtgagttcgaggctggtatctccaaggacggtcagacccgagagcacgctctgctcgctttcaccctcggtgtcaagcagctgattgttgccatcaacaagatggactccgtcaagtggtctcaggatcgatacaacgagatctgcaaggagaccgccaacttcgtcaagaaggttggttacaaccctaagtctgtcccctttgtccctatttccggatggaacggtgacaacatgattgaggcctccaccaactgtgactggtacaagggctggaccaaggagaccaaggccggtgaggtcaagggtaagaccctccttgaggccattgacgccattgagccccccgtgcgaccctccgacaagcccctccgacttcctctccaggatgtctacaagatcggtggtatcggcacagtgcccgttggccgagtcgagaccggtgttatcaaggccggtatggttgttaccttcgctcccgccaacgtgaccactgaggtcaagtctgtcgagatgcaccacgagatcctccccgacggaggtttccccggtgacaacgttggcttcaacgtcaagaacgtttccgtcaaggatatccgacgaggtaacgttgccggtgactccaagaacgacccccctaagggctgcgactctttcaacgctcaggtcattgttcttaaccaccccggtcagatcggtgctggttacgctcccgttcttgattgccacactgcccacattgcctgcaagttcgacaccctgatcgagaagatcgaccgacgaaccggtaagaagatggaggactcccccaagttcatcaagtctggtgatgccgccattgtcaagatggtcccctccaagcccatgtgtgttgaggccttcactgagtacccccctcttggtcgattcgccgtccgagacatgcgacagaccgttgctgtcggtgtcatcaagtccgtcgagaagtccgacaaggctggtggaaaggtcaccaaggctgcccagaaggctgccaagaaataa

SEQ ID NO: 3120 - protein, 460 aa, Yarrowia lipolytica
MGKEKTHVNLVVIGHVDAGKSTTTGHLIYKCGGIDKRTIEKFEKEADELGKGSFKYAWVLDKLKAERERGITIDIALWKFQTPKYYVTVIDAPGHRDFIKNMITGTSQADCAILIIAGGVGEFEAGISKDGQTREHALLAFTLGVKQLIVAINKMDSVKWSQDRYNEICKETANFVKKVGYNPKSVPFVPISGWNGDNMIEASTNCDWYKGWTKETKAGEVKGKTLLEAIDAIEPPVRPSDKPLRLPLQDVYKIGGIGTVPVGRVETGVIKAGMVVTFAPANVTTEVKSVEMHHEILPDGGFPGDNVGFNVKNVSVKDIRRGNVAGDSKNDPPKGCDSFNAQVIVLNHPGQIGAGYAPVLDCHTAHIACKFDTLIEKIDRRTGKKMEDSPKFIKSGDAAIVKMVPSKPMCVEAFTEYPPLGRFAVRDMRQTVAVGVIKSVEKSDKAGGKVTKAAQKAAKK

SEQ ID NO: 3121 - DNA, 1377 bp, Saccharomyces cerevisiae
  CDS (1)..(1377)
atgggtaaagagaagtctcacattaacgttgtcgttatcggtcatgtcgattctggtaagtctaccactaccggtcatttgatttacaagtgtggtggtattgacaagagaaccatcgaaaagttcgaaaaggaagccgctgaattaggtaagggttctttcaagtacgcttgggttttggacaagttaaaggctgaaagagaaagaggtatcactatcgatattgctttgtggaagttcgaaactccaaagtaccaagttaccgttattgatgctccaggtcacagagatttcatcaagaacatgattactggtacttctcaagctgactgtgctatcttgattattgctggtggtgtcggtgaattcgaagccggtatctctaaggatggtcaaaccagagaacacgctttgttggctttcaccttgggtgttagacaattgattgttgctgtcaacaagatggactccgtcaaatgggacgaatccagattccaagaaattgtcaaggaaacctccaactttatcaagaaggttggttacaacccaaagactgttccattcgtcccaatctctggttggaacggtgacaacatgattgaagctaccaccaacgctccatggtacaagggttgggaaaaggaaaccaaggccggtgtcgtcaagggtaagactttgttggaagccattgacgccattgaacaaccatctagaccaactgacaagccattgagattgccattgcaagatgtttacaagattggtggtattggtactgtgccagtcggtagagttgaaaccggtgtcatcaagccaggtatggttgttacttttgccccagctggtgttaccactgaagtcaagtccgttgaaatgcatcacgaacaattggaacaaggtgttccaggtgacaacgttggtttcaacgtcaagaacgtttccgttaaggaaatcagaagaggtaacgtctgtggtgacgctaagaacgatccaccaaagggttgcgcttctttcaacgctaccgtcattgttttgaaccatccaggtcaaatctctgctggttactctccagttttggattgtcacactgctcacattgcttgtagattcgacgaattgttggaaaagaacgacagaagatctggtaagaagttggaagaccatccaaagttcttgaagtccggtgacgctgctttggtcaagttcgttccatctaagccaatgtgtgttgaagctttcagtgaatacccaccattaggtagattcgctgtcagagacatgagacaaactgtcgctgtcggtgttatcaagtctgttgacaagactgaaaaggccgctaaggttaccaaggctgctcaaaaggctgctaagaaataa

SEQ ID NO: 3122 - protein, 458 aa, Saccharomyces cerevisiae
MGKEKSHINVVVIGHVDSGKSTTTGHLIYKCGGIDKRTIEKFEKEAAELGKGSFKYAWVLDKLKAERERGITIDIALWKFETPKYQVTVIDAPGHRDFIKNMITGTSQADCAILIIAGGVGEFEAGISKDGQTREHALLAFTLGVRQLIVAVNKMDSVKWDESRFQEIVKETSNFIKKVGYNPKTVPFVPISGWNGDNMIEATTNAPWYKGWEKETKAGVVKGKTLLEAIDAIEQPSRPTDKPLRLPLQDVYKIGGIGTVPVGRVETGVIKPGMVVTFAPAGVTTEVKSVEMHHEQLEQGVPGDNVGFNVKNVSVKEIRRGNVCGDAKNDPPKGCASFNATVIVLNHPGQISAGYSPVLDCHTAHIACRFDELLEKNDRRSGKKLEDHPKFLKSGDAALVKFVPSKPMCVEAFSEYPPLGRFAVRDMRQTVAVGVIKSVDKTEKAAKVTKAAQKAAKK

SEQ ID NO: 3123 - DNA, 1365 bp, Arabidopsis thaliana
  CDS (1)..(1365)
atggcgtccgttgttcttcgaaaccctagctcgaagcgccttgttccattctcttcccagatctactctcgctgtggtgcttccgttacttcctcttactcgatctctcattctatcggtggagatgatctctcttcctctaccttcggaacctcctccttctggagatccatggccacttttactcgaaataaacctcatgtaaatgttggaactattgggcatgttgatcatggcaagaccactttaactgctgcaatcacaaaggttcttgctgaggagggcaaagctaaagctattgcctttgatgaaattgataaagctcctgaagagaagaagagaggaattactattgccacggctcatgtggagtatgaaactgcaaagcgtcactatgctcatgtggattgccctggacacgcagattatgttaaaaatatgattactggagctgcgcaaatggatggcggaattcttgtggtttcaggaccagatggacccatgccgcagacaaaggaacatattctacttgcacgccaggttggtgttccctcacttgtgtgcttcttgaacaaagttgatgtggtggatgaccctgagctcttggagcttgtcgagatggaactacgtgagctcctcagcttctacaagtttcctggggatgatattcccatcatccgaggatctgctctgtccgcattacagggcaccaatgatgaaattggaaggcaagctatattaaagctgatggatgctgttgatgaatatatacctgaccctgttcgcgtccttgacaagcctttcttgatgccaattgaagatgttttctcaattcaaggacgtggaactgttgcaaccggtcgtatcgaacagggagtcattaaagtgggtgaagaagttgagatattgggtttacgtgaggggggtgttccactgaaatcgactgtaactggggttgagatgttcaagaagattttggataatggacaggctggtgataatgtaggacttcttctgcgtgggctaaagagagaagacattcagcgtggaatggtgattgctaagcctggttcatgcaagacatacaagaagtttgaagcagagatttacgtgctcacaaaggatgaaggtggacgtcacactgcatttttctctaactacaggcctcagttttacttgaggactgcagatatcactggcaaagtggaattacccgaaaacgtgaagatggttatgcctggtgacaatgtcacagctgttttcgagttaatcatgcctgtcccactcgaaacaggtcaaagatttgccttaagggaaggaggtagaacagttggagctggtgttgtatcaaaagtgatgacctaa

SEQ ID NO: 3124 - protein, 454 aa, Arabidopsis thaliana
MASVVLRNPSSKRLVPFSSQIYSRCGASVTSSYSISHSIGGDDLSSSTFGTSSFWRSMATFTRNKPHVNVGTIGHVDHGKTTLTAAITKVLAEEGKAKAIAFDEIDKAPEEKKRGITIATAHVEYETAKRHYAHVDCPGHADYVKNMITGAAQMDGGILVVSGPDGPMPQTKEHILLARQVGVPSLVCFLNKVDVVDDPELLELVEMELRELLSFYKFPGDDIPIIRGSALSALQGTNDEIGRQAILKLMDAVDEYIPDPVRVLDKPFLMPIEDVFSIQGRGTVATGRIEQGVIKVGEEVEILGLREGGVPLKSTVTGVEMFKKILDNGQAGDNVGLLLRGLKREDIQRGMVIAKPGSCKTYKKFEAEIYVLTKDEGGRHTAFFSNYRPQFYLRTADITGKVELPENVKMVMPGDNVTAVFELIMPVPLETGQRFALREGGRTVGAGVVSKVMT

SEQ ID NO: 3125 - DNA, 1185 bp, Pasteurella multocida
  CDS (1)..(1185): transl_table=11
gtgtctaaagaaaaatttgaacgtacaaaaccgcacgtaaacgtgggtacaatcggccacgttgaccatggtaaaacaactttaaccgcagcaatcacaaccgtattagcaaaacactacggtggtgcagctcgtgcattcgaccaaatcgataacgcgccagaagaaaaagcgcgtggtatcaccatcaacacatcacacgttgaatacgatacaccaactcgtcactacgcacacgttgactgtccaggacacgcggactatgtgaaaaacatgattaccggtgcagctcaaatggacggtgctatcttagttgttgcggcaactgacggtcctatgccacaaacacgtgagcacatccttttaggtcgccaagtaggtgttccttacatcatcgtattcttaaacaaatgcgacatggtggatgatgaagaattattagaattagttgaaatggaagtgcgtgaacttctttctcaatatgatttcccaggtgatgatacaccaatcgtacgtggttcagcgttacaagcgttaaacggtgtagctgagtgggaagagaaaattcttgagttagccaaccacttagatacttacattccagagccacaacgtgcaatcgaccaaccgttccttcttccgattgaagacgtgttctcaatttctggtcgtggtacagtagtaacaggtcgtgttgagcgtggtatcatccgtacaggtgaagaggttgaaattgttggtattaaagcgacaacgaagaccacagtaacaggtgttgagatgttccgtaaattattagacgaaggtcgtgcgggtgagaacgttggtgctttattacgtggtactaaacgtgaagaaatcgaacgtggtcaagtgttagcgaaaccgggttcaatcacgccacacactgattttgaatcagaagtttacgtgttatcaaaagaggaaggtggtcgtcatacaccattcttcaaaggttaccgtccacagttctacttccgtacaacggacgtaacaggtacaatcgaattaccggaaggtgttgagatggtgatgcctggtgataacatcaagatgactgtaagtttgattcacccaatcgcgatggaccaaggtttacgctttgcgattcgtgaaggtggtcgtacagtaggtgcgggtgttgtagcgaaaattatcaaataa

SEQ ID NO: 3126 - protein, 394 aa, Pasteurella multocida [sequence omitted]

SEQ ID NO: 3127 - DNA, 1194 bp, Pseudomonas putida
  CDS (1)..(1194): transl_table=11
atggctaaggaaaagtttgatcgttcccttccccacgttaacgtcggcactatcggccacgttgaccacggtaagaccactctgaccgcagctctgactcgcgtttgctccgaagttttcggttcggcaatcgttgagttcgacaagatcgactcggctccggaagaaaaagcgcgcggtatcaccatcaacaccgctcacgtcgagtacaactcgaccattcgtcactacgctcacgttgactgcccaggtcacgctgactacgtgaagaacatgatcaccggtgctgcccagatggacggcgcgatcctggtttgctcggccgccgatggtccgatgccacaaacccgtgagcacatcctgttgtcccgtcaggtaggcgttccgtacatcgtggtcttcctgaacaaggctgacctggtagacgacgctgagctgctggagctggtcgagatggaagttcgcgacctgctgtccacctacgacttcccaggcgacgacactccgatcatcatcggttccgctcgtatggcgctggaaggcaaagacgacaacgaaatgggcactaccgctgttaagaagctggtagaaactctggacagctacattcctgagccagttcgtgctatcgaccagccgttcctgatgccgatcgaagacgtgttctcgatctcgggtcgtggtaccgttgttaccggtcgtatcgagcgtggcatcgtccgcgttcaggatccgctggaaatcgttggtctgcgtgacaccaccaccaccacctgcaccggtgttgagatgttccgcaagctgctggacgaaggtcgtgctggcgagaactgcggcgttctgctgcgtggtaccaagcgtgacgacgttgagcgtggccaggttctggtcaagccaggttcggtcaagccgcacaccaagttcaccgcagaagtctacgtcctgtcgaaggaagaaggcggccgtcacactccgttcttcaaaggctaccgtccacagttctacttccgtaccactgacgtgaccggtaactgcgaactgccggaaggcgttgaaatggtaatgccaggtgacaacattcagatgactgttaccctgatcaagaccatcgcaatggaagacggtctgcgcttcgctatccgtgaaggcggtcgtaccgtcggcgccggcgtcgtagcaaaaattattgaataa

SEQ ID NO: 3128 - protein, 397 aa, Pseudomonas putida
MAKEKFDRSLPHVNVGTIGHVDHGKTTLTAALTRVCSEVFGSAIVEFDKIDSAPEEKARGITINTAHVEYNSTIRHYAHVDCPGHADYVKNMITGAAQMDGAILVCSAADGPMPQTREHILLSRQVGVPYIVVFLNKADLVDDAELLELVEMEVRDLLSTYDFPGDDTPIIIGSARMALEGKDDNEMGTTAVKKLVETLDSYIPEPVRAIDQPFLMPIEDVFSISGRGTVVTGRIERGIVRVQDPLEIVGLRDTTTTTCTGVEMFRKLLDEGRAGENCGVLLRGTKRDDVERGQVLVKPGSVKPHTKFTAEVYVLSKEEGGRHTPFFKGYRPQFYFRTTDVTGNCELPEGVEMVMPGDNIQMTVTLIKTIAMEDGLRFAIREGGRTVGAGVVAKIIE

SEQ ID NO: 3129 - DNA, 1440 bp, Glycine max
  CDS (1)..(1440)
atggcagtttcttcagcaacagcttcctccaaactcatactattgccccatgcatcatcatcctcttcccttaattccacacccttccgctcctccaccaccaacacccacaaactaacccctctctcctcctccttcctccaccccaccaccgtcctccgccgcaccccttcttccaccaccaccccgcgtcgcaccttcaccgtccgcgccgcccgcggcaaattcgagcgcaagaagccccacgtgaacatcggcaccatcggccacgtggaccacggcaagaccacccttaccgctgccctgaccatggctcttgccgccctaggcaacagcgcccccaaaaaatacgacgagatcgacgccgccccggaggagcgcgcccgaggcatcaccatcaacaccgccaccgtggagtacgagaccgagaaccgccactacgcccacgtggactgccccggccacgctgactacgtgaaaaacatgatcaccggcgcagcccagatggacggcgccatattagtcgtctccggcgccgacggccccatgccccaaaccaaagaacacataatattagcgaaacaagtcggtgtccccaacatggtcgtgttcttaaacaagcaagaccaagtcgacgacgaagagcttctccaactagtggagatagaagtccgcgaccttctgagctcctacgaattccccggtgacgatacccccattgtctcgggctccgcgctcttagccctagaagcactcatggccaaccctgcaatcaaacgcggcgacaacgagtgggtcgacaagattttccaactcatggacgaggtcgacaactacattcccatcccccagcgccagaccgacctccccttcctcctcgccgtcgaagacgtcttctccatcaccggccgtggcaccgtcgccactggccgtgtagagcgtggcaccatcaaagtaggggaaactgttgaccttgtaggtttgagagaaacaaggaacacaaccgtcacaggtgtagaaatgttccagaagattctagacgaagccctggctggagacaacgtggggctgttgcttagaggggttcagaagactgacattcagaggggaatggtgttggctaaaccaggcacgattacgccgcacaccaagttctcagcgattgtttatgttttgaagaaagaagaaggtggtaggcattcacctttctttgcagggtataggcctcagttttacatgaggaccaccgatgtgactgggaaggttacgtctatcatgaatgataaggatgaggagtccacgatggtgctgcccggtgaccgtgtcaagatggtggtggagcttattgttcctgtggcttgcgaacagggaatgaggtttgctattagggaaggtgggaagaccgttggtgctggtgttatccaatccattattgagtga

SEQ ID NO: 3130 - protein, 479 aa, Glycine max
MAVSSATASSKLILLPHASSSSSLNSTPFRSSTTNTHKLTPLSSSFLHPTTVLRRTPSSTTTPRRTFTVRAARGKFERKKPHVNIGTIGHVDHGKTTLTAALTMALAALGNSAPKKYDEIDAAPEERARGITINTATVEYETENRHYAHVDCPGHADYVKNMITGAAQMDGAILVVSGADGPMPQTKEHIILAKQVGVPNMVVFLNKQDQVDDEELLQLVEIEVRDLLSSYEFPGDDTPIVSGSALLALEALMANPAIKRGDNEWVDKIFQLMDEVDNYIPIPQRQTDLPFLLAVEDVFSITGRGTVATGRVERGTIKVGETVDLVGLRETRNTTVTGVEMFQKILDEALAGDNVGLLLRGVQKTDIQRGMVLAKPGTITPHTKFSAIVYVLKKEEGGRHSPFFAGYRPQFYMRTTDVTGKVTSIMNDKDEESTMVLPGDRVKMVVELIVPVACEQGMRFAIREGGKTVGAGVIQSIIE

SEQ ID NO: 3131 - DNA, 1194 bp, Streptomyces coelicolor
  CDS (1)..(1194): transl_table=11
gtggcgaaggcgaagttcgagcggactaagccgcacgtcaacatcggcaccatcggtcacatcgaccacggtaagacgaccctcacggccgccattaccaaggtgctgcacgacgcgtacccggacatcaacgaggcgtcggcgttcgaccagatcgacaaggctcccgaagagcgccagcgcggtatcaccatctcgatcgcgcacgtcgagtaccagaccgaggcgcgtcactacgcccacgtcgactgccccggtcacgccgactacatcaagaacatgatcacgggtgccgcgcagatggacggcgccatcctcgtggtcgccgccaccgacggcccgatgccgcagaccaaggagcacgtgctcctggcccgccaggtcggcgttccgtacatcgtggtcgccctgaacaaggccgacatggtggacgacgaggagatcctggagctcgtcgagctcgaggtgcgtgagctcctctccgagtacgagttcccgggcgacgacgttcccgtcgtcaaggtctccgctctgaaggccctcgagggcgacaaggagtggggcaactcggtcctcgagctcatgaaggccgtggacgaggccatcccggagcccgagcgcgacgtcgacaagccgttcctgatgccgatcgaggacgtcttcaccatcaccggtcgcggtacggtcgtcaccggccgcatcgagcgtggtgtcctcaaggtcaacgagaccgtcgacatcatcggcatcaagaccgagaagaccaccaccacggtcaccggcatcgagatgttccgcaagctcctcgacgagggccaggccggtgagaacgtcggtctgctgcttcgcggcatcaagcgcgaggacgtcgagcgcggccaggtcatcatcaagccgggctcggtcaccccgcacaccgagttcgaggcccaggcctacatcctgtcgaaggacgagggtggccgtcacacccccttcttcaacaactaccgtccgcagttctacttccgtacgacggacgtgaccggcgtcgtgaccctccccgagggcaccgagatggtcatgccgggtgacaacaccgagatgaaggtggagctcatccagcccgtcgccatggaagagggcctgaagttcgccatccgcgagggtggccggaccgtgggcgccggccaggtcaccaagatcaacaagtaa

SEQ ID NO: 3132 - protein, 397 aa, Streptomyces coelicolor
MAKAKFERTKPHVNIGTIGHIDHGKTTLTAAITKVLHDAYPDINEASAFDQIDKAPEERQRGITISIAHVEYQTEARHYAHVDCPGHADYIKNMITGAAQMDGAILVVAATDGPMPQTKEHVLLARQVGVPYIVVALNKADMVDDEEILELVELEVRELLSEYEFPGDDVPVVKVSALKALEGDKEWGNSVLELMKAVDEAIPEPERDVDKPFLMPIEDVFTITGRGTVVTGRIERGVLKVNETVDIIGIKTEKTTTTVTGIEMFRKLLDEGQAGENVGLLLRGIKREDVERGQVIIKPGSVTPHTEFEAQAYILSKDEGGRHTPFFNNYRPQFYFRTTDVTGVVTLPEGTEMVMPGDNTEMKVELIQPVAMEEGLKFAIREGGRTVGAGQVTKINK

SEQ ID NO: 3133 - DNA, 1194 bp, Streptomyces ramocissimus
  CDS (1)..(1194): transl_table=11
gtggcgaaggcgaagttcgagcggactaagccgcacgtcaacatcggcaccatcggtcacatcgaccacggtaagacgaccctcacggccgccattaccaaggtgctgcacgacgcgtacccggacctgaacgaggccaccccgttcgacaacatcgacaaggctcctgaggagcgtcagcgcggtatcaccatctccatcgcgcacgtcgagtaccagaccgaggcgcgtcactacgcccacgtcgactgcccgggtcacgcggactacatcaagaacatgatcacgggtgcggcgcagatggacggcgccatcctcgtggtcgccgccaccgacggcccgatgccgcagaccaaggagcacgtgctcctggcccgccaggtcggcgttccgtacatcgtggtcgccctgaacaaggccgacatggtggacgacgaggagatcatggagctcgttgagctcgaggtccgtgagctcctctccgagtacgagttcccgggcgacgacctgccggtcgtccgcgtctccgcgctgaaggcgctggagggcgacgctcagtggacgcagtccgtcctcgacctgatgaaggccgtcgacgagtccatcccggagccggagcgcgacgtcgacaagccgttcctcatgccgatcgaggacgtcttcacgatcaccggtcgcggcacggtcgtcaccggccgtatcgagcgtggtgtcctgaaggtcaacgagaccgtcgacatcatcggcatcaagaccgagaagaccaccaccacggtcaccggcatcgagatgttccgcaagctgctcgacgagggccaggccggtgagaacgtcggtctgctgctccgcggcatcaagcgcgaggacgtcgagcgcggccaggtcatcatcaagccgggctcggtcaccccgcacaccgagttcgaggcgcaggcctacatcctctccaaggacgagggtggccgccacacgccgttcttcaacaactaccgcccgcagttctacttccgtaccacggacgtgaccggcgttgtgcacctccccgagggcaccgagatggtcatgccgggcgacaacaccgagatgcgcgtcgagctgatccagcccgtcgccatggaggagggcctgaagttcgccatccgtgagggtggccggaccgtcggcgccggccaggtcaccaagatcgtcaagtaa

SEQ ID NO: 3134 - protein, 397 aa, Streptomyces ramocissimus
MAKAKFERTKPHVNIGTIGHIDHGKTTLTAAITKVLHDAYPDLNEATPFDNIDKAPEERQRGITISIAHVEYQTEARHYAHVDCPGHADYIKNMITGAAQMDGAILVVAATDGPMPQTKEHVLLARQVGVPYIVVALNKADMVDDEEIMELVELEVRELLSEYEFPGDDLPVVRVSALKALEGDAQWTQSVLDLMKAVDESIPEPERDVDKPFLMPIEDVFTITGRGTVVTGRIERGVLKVNETVDIIGIKTEKTTTTVTGIEMFRKLLDEGQAGENVGLLLRGIKREDVERGQVIIKPGSVTPHTEFEAQAYILSKDEGGRHTPFFNNYRPQFYFRTTDVTGVVHLPEGTEMVMPGDNTEMRVELIQPVAMEEGLKFAIREGGRTVGAGQVTKIVK

SEQ ID NO: 3135 - DNA, 1203 bp, Thermoanaerobacter tengcongensis
  CDS (1)..(1203): transl_table=11
atggcaaagcagaaatttgagaggacgaagccgcacgtaaacgtagggacgatagggcacgtagaccatggtaagacgacattgacagcagcgataacattaatactttcgaaagcgggattagcacaggcgaagggatatgacgagatagacaaggcgccagaggagaaggcaaggggtataacaataaacacgacgcacgtagagtatgagacagcgaagaggcactatgcgcacgtagactgtccgggtcacgcggactatgtaaagaacatgataacaggggcagcgcagatggacggagcgatactggtagtatcagcagcagacggtccgatgccgcagacgagggagcacatattattggcaaggcaggtaggagtgccatatatagtagtatttttgaacaaagcggacatggtagacgatccggagttaatagagctagtagagatggaggtaagggacttactgaaccagtacgaatttcctggggatgacacaccgatagtagtaggttcagcgttaaaggcattagagtgtggatgcggcaagagggagtgccagtggtgcggcaagatatgggagttaatggatgtagtagacgaatatataccgacaccggagagggatatagacaagccgttcttgatgccggtagaggacgtatttacgataacgggaagaggtacagttgcgacaggtagagtagagagagggaaagtgaaagtaggggacgaagtagagataataggattgacgacggagtcaaggaagacagtagtgacaggagtagagatgttcaggaagacattagatgaggcacaggcaggagacaacataggggtattgttaagagggatacagagggatgaagtagagagagggcaggtactggcgaaaccagggacgataaagccgcacacgaaatttgaggcacaggtgtacgtattgacgaaggaagagggaggaaggcacacaccatttttcaatggatacaggccgcagttttactttaggacgacagacgtgacgggtacgatacagctaccagagggagtagagatggtaatgccaggagaccacgtgacattgagagtagagcttataacgccgatagcgatggaagaagggcttaagtttgctataagagaaggcggaaggacagttggcgctggtgtcgtatctgctataattgagtag

SEQ ID NO: 3136 - protein, 400 aa, Thermoanaerobacter tengcongensis
MAKQKFERTKPHVNVGTIGHVDHGKTTLTAAITLILSKAGLAQAKGYDEIDKAPEEKARGITINTTHVEYETAKRHYAHVDCPGHADYVKNMITGAAQMDGAILVVSAADGPMPQTREHILLARQVGVPYIVVFLNKADMVDDPELIELVEMEVRDLLNQYEFPGDDTPIVVGSALKALECGCGKRECQWCGKIWELMDVVDEYIPTPERDIDKPFLMPVEDVFTITGRGTVATGRVERGKVKVGDEVEIIGLTTESRKTVVTGVEMFRKTLDEAQAGDNIGVLLRGIQRDEVERGQVLAKPGTIKPHTKFEAQVYVLTKEEGGRHTPFFNGYRPQFYFRTTDVTGTIQLPEGVEMVMPGDHVTLRVELITPIAMEEGLKFAIREGGRTVGAGVVSAIIE

SEQ ID NO: 3137 - DNA, 1185 bp, Vibrio cholerae
  CDS (1)..(1185): transl_table=11
atgtctaaagagaaatttgaacgtacgaaaccgcacgtaaacgttggtactatcggccacgttgaccacggtaaaacaactctaactgcagctatctgtactgtacttgcaaaagtatacggcggtaaagctcgtgacttcgcgtcaatcgacaacgcaccagaagagcgtgagcgtggtattacaatcaatacttctcacgtagagtacgatactccaaaccgtcactacgcacacgtagactgtccaggacacgcggattatgttaagaacatgatcaccggtgcagcacagatggacggcggtatcctagttgtagcggcaactgacggtcgaatgccacaaactcgtgagcacatcctgctgggtcgccaagtaggtattccttacatcatcgtattcatgaacaagtgtgacatggttgacgatgaagagcttctagagctggtagagatggaagttcgtgagctgctgtctgagtacgatttcccaggtgatgacctgccagtaatccaaggttcagcactaggcgcgctaaacggcgaagcacagtgggaagcgaagattgttgagctagcagaagcactggatacttatattccagagccagagcgtgcagtagacatggcattcctgatgccaatcgaagacgtattctcaatccaaggtcgtggtacagtagtaactggccgtatcgagcgcggcatcctgaaagtgggtgacgaagtagcgatcgttggtatcaaagagacagtaaaaacgacctgtacaggtgtagagatgttccgtaagctgcttgacgaaggtcgtgcaggtgagaacgtaggtgcactactacgtggtactaagcgtgaagaagtagagcgtggtcaagtactggcgaagccaggttcaatcacaccacacactaagttcgaatcagaagtatacgtactgtcaaaagatgaaggtggccgtcatactccattcttcaaaggttaccgtccacagttctacttccgtacaactgacgtaacaggcagcatcgagctaccagagggcgtagaaatggtaatgccaggcgacaacgtgaagatggttgtagacctgattgcaccaatcgcgatggacgaaggtctacgcttcgctatccgtgaaggtggccgtactgtaggtgctggtgttgtagctaagatcatcgcttaa

SEQ ID NO: 3138 - protein, 394 aa, Vibrio cholerae
MSKEKFERTKPHVNVGTIGHVDHGKTTLTAAICTVLAKVYGGKARDFASIDNAPEERERGITINTSHVEYDTPNRHYAHVDCPGHADYVKNMITGAAQMDGGILVVAATDGRMPQTREHILLGRQVGIPYIIVFMNKCDMVDDEELLELVEMEVRELLSEYDFPGDDLPVIQGSALGALNGEAQWEAKIVELAEALDTYIPEPERAVDMAFLMPIEDVFSIQGRGTVVTGRIERGILKVGDEVAIVGIKETVKTTCTGVEMFRKLLDEGRAGENVGALLRGTKREEVERGQVLAKPGSITPHTKFESEVYVLSKDEGGRHTPFFKGYRPQFYFRTTDVTGSIELPEGVEMVMPGDNVKMVVDLIAPIAMDEGLRFAIREGGRTVGAGVVAKIIA

SEQ ID NO: 3139 - DNA, 1191 bp, Xanthomonas campestris pv
  CDS (1)..(1191): transl_table=11
atggcaagagctaaatttcttcgcgaaaagctgcacgttaacgtcggcaccatcggtcacgtcgaccatggcaagaccacgttgaccgctgcgctgaccaagatcggtgccgagcgtttcggtggcgagttcaaggcgtacgacgcgatcgacgcagcgccggaagagaaggcgcgtggtatcacgatctcgaccgcgcacgttgaatatgagtccgcagtgcgccattacgcgcacgtcgattgccccggccacgccgactacgtcaagaacatgatcacaggtgctgcgcagatggatggcgcgatcctggtgtgttcggccgctgacggcccgatgccgcagacccgtgagcacatcctgctctcgcgtcaggtcggtgtgccgcacatcgtcgtgttcctgaacaaggccgacatggtcgacgacgccgagctgcttgagctggtcgagatggaagtgcgtgagctcctgagcaagtacgacttcccgggcgacgacaccccgatcatccacggttcggcccgtctggcgctggaaggcgatcagagcgacatcggtgtgccggcgatcctgaagctggtcgaagccctggatacctttattccggatccgacccgcgacgtcgaccgtccgttcctgatgccggtcgaagacgtgttctcgatctcgggtcgtggcaccgtggtgaccggccgtatcgagcgcggcatcatcaaggtcggcgatgaaatcgaaatcgtcggtatccgcgacacgcagaagaccacggtcaccggcgttgaaatgttccgcaagttgctggaccagggccaggcaggcgacaacgccggtctgctgctgcgcggcaccaagcgtgacgacgtggagcgcggccaagtgctgtgcaagccgggttcgatcaagccgcacaccgagttcgaagccgaagtctacgtgctgtcgaaggacgagggcggccgtcacaccccgttcttcaagggctaccgtccgcagttctacttccgcaccaccgacatcactggcgcatgccagctgccggaaggcgtggaaatggtgatgccgggcgataacgtgaagatggtcgtgaccctgatcaacccggtcgcgatggacgaaggtctgcgcttcgcgattcgtgaaggcggtcgtaccgtcggcgccggcgtggttgccaagatcatcaagtaa

SEQ ID NO: 3140 - protein, 396 aa, Xanthomonas campestris pv
MARAKFLREKLHVNVGTIGHVDHGKTTLTAALTKIGAERFGGEFKAYDAIDAAPEEKARGITISTAHVEYESAVRHYAHVDCPGHADYVKNMITGAAQMDGAILVCSAADGPMPQTREHILLSRQVGVPHIVVFLNKADMVDDAELLELVEMEVRELLSKYDFPGDDTPIIHGSARLALEGDQSDIGVPAILKLVEALDTFIPDPTRDVDRPFLMPVEDVFSISGRGTVVTGRIERGIIKVGDEIEIVGIRDTQKTTVTGVEMFRKLLDQGQAGDNAGLLLRGTKRDDVERGQVLCKPGSIKPHTEFEAEVYVLSKDEGGRHTPFFKGYRPQFYFRTTDITGACQLPEGVEMVMPGDNVKMVVTLINPVAMDEGLRFAIREGGRTVGAGVVAKIIK

SEQ ID NO: 3141 - DNA, 1185 bp, Yersinia pestis
  CDS (1)..(1185): transl_table=11
gtgtctaaagaaaaatttgaacgtaccaaaccccatgtaaacgtcggtactatcggccacgttgaccatggtaaaactaccctgacagcagcaatcaccaccgttctggctaaaacctacggcggtagcgctcgtgctttcgatcaaatcgataacgcaccagaagaaaaagcacgtggtatcaccatcaacacttctcacgttgaatatgatactcctgctcgtcactatgcgcacgttgactgcccaggtcacgccgactatgttaaaaacatgatcaccggtgctgctcaaatggatggtgcaatcctggttgttgctgcaactgatggccctatgccacagactcgtgagcacatcctgttgggtcgtcaggttggcgttccttacatcatcgtattcatgaacaaatgtgacatggttgatgatgaagagctgctggaactggtagaaatggaagttcgtgaacttctgtctgcttacgacttccctggcgatgatctgccagttgttcgtggttcagcgctgaaagcactggaaggcgaagctgagtgggaagctaaaatcatcgaactggctggttacctggattcttatatcccagaaccagaacgtgctatcgacaagccgttcctgctgccaatcgaagacgtattctctatctcaggccgtggtactgtagtaactggtcgtgtagagcgcggtatcgttaaagtcggcgaagaagttgaaatcgtcggtatcaaagatactgttaaatctacttgtactggcgttgaaatgttccgcaaattgctggacgaaggccgtgctggtgagaacgttggtgttctgctgcgtggtatcaaacgtgaagatatcgaacgtggtcaagttctggctaaaccaggttctatcaaaccacacactacctttgaatcagaagtttatattctgagcaaagatgaaggcggccgtcatactccgttcttcaaaggctaccgtcctcagttctacttccgtacaactgacgtaaccggtaccatcgaattgccagaaggcgttgaaatggtgatgccaggtgacaacatcaacatgattgttaccctgattcacccaatcgcaatggacgacggcttgcgtttcgcaatccgtgaaggcggccgtactgtaggcgctggtgttgttgctaaagtaatcgcttaa

SEQ ID NO: 3142 - protein, 394 aa, Yersinia pestis
MSKEKFERTKPHVNVGTIGHVDHGKTTLTAAITTVLAKTYGGSARAFDQIDNAPEEKARGITINTSHVEYDTPARHYAHVDCPGHADYVKNMITGAAQMDGAILVVAATDGPMPQTREHILLGRQVGVPYIIVFMNKCDMVDDEELLELVEMEVRELLSAYDFPGDDLPVVRGSALKALEGEAEWEAKIIELAGYLDSYIPEPERAIDKPFLLPIEDVFSISGRGTVVTGRVERGIVKVGEEVEIVGIKDTVKSTCTGVEMFRKLLDEGRAGENVGVLLRGIKREDIERGQVLAKPGSIKPHTTFESEVYILSKDEGGRHTPFFKGYRPQFYFRTTDVTGTIELPEGVEMVMPGDNINMIVTLIHPIAMDDGLRFAIREGGRTVGAGVVAKVIA

SEQ ID NO: 3143 - DNA, 1185 bp, Pasteurella multocida
  CDS (1)..(1185): transl_table=11
atgtctaaagaaaaatttgaacgtacaaaaccgcacgtaaacgtgggtacaatcggccacgttgaccatggtaaaacaactttaaccgcagcaatcacaaccgtattagcaaaacactacggtggtgcagctcgtgcattcgaccaaatcgataacgcgccagaagaaaaagcgcgtggtatcaccatcaacacatcacacgttgaatacgatacaccaactcgtcactacgcacacgttgactgtccaggacacgcggactatgtgaaaaacatgattaccggtgcagctcaaatggacggtgctatcttagttgttgcggcaactgacggtcctatgccacaaacacgtgagcacatccttttaggtcgccaaataggtgttgcttacatcatcgtattcttaaacaaatgcgacatggtggatgatgaagaattattagaattagttgaaatggaagtgcgtgaactcttttctcaatatgatttcccaggtgatgatacaccaatcgtacgtggttcagcgttacaagcgttaaacggtgtagctgagtgggaagagaaaattcttgagttagccaaccacttagatacttacattccagagccacaacgtgcaatcgaccaaccgttccttcttccgattgaagacgtgttctcaatttctggtcgtggtacagtagtaacaggtcgtgttgagcgtggtatcatccgtacaggtgaagaggttgaaattgttggtattaaagcgacaacgaagaccacagtaacaggtgttgagatgttccgtaaattattagacgaaggtcgtgcgggtgagaacgttggtgctttattacgtggtactaaacgtgaagaaatcgaacgtggtcaagtgttagcgaaaccgggttcaatcacgccacacactgattttgaatcagaagtttacgtgttatcaaaagaggaaggtggtcgtcatacaccattcttcaaaggttaccgtccacagttctacttccgtacaacggacgtaacaggtacaatcgaattaccggaaggtgttgagatggtgatgcctggtgataacatcaagatgactgtaagtttgattcacccaatcgcgatggaccaaggtttacgctttgcgattcgtgaaggtggtcgtacagtaggtgcgggtgttgtagcgaaaattatcaaataa

SEQ ID NO: 3144 - protein, 394 aa, Pasteurella multocida
MSKEKFERTKPHVNVGTIGHVDHGKTTLTAAITTVLAKHYGGAARAFDQIDNAPEEKARGITINTSHVEYDTPTRHYAHVDCPGHADYVKNMITGAAQMDGAILVVAATDGPMPQTREHILLGRQIGVAYIIVFLNKCDMVDDEELLELVEMEVRELFSQYDFPGDDTPIVRGSALQALNGVAEWEEKILELANHLDTYIPEPQRAIDQPFLLPIEDVFSISGRGTVVTGRVERGIIRTGEEVEIVGIKATTKTTVTGVEMFRKLLDEGRAGENVGALLRGTKREEIERGQVLAKPGSITPHTDFESEVYVLSKEEGGRHTPFFKGYRPQFYFRTTDVTGTIELPEGVEMVMPGDNIKMTVSLIHPIAMDQGLRFAIREGGRTVGAGVVAKIIK

SEQ ID NO: 3145 - DNA, 1194 bp, Pseudomonas putida
  CDS (1)..(1194): transl_table=11
gtggctaaagaaaaatttgatcgttcccttccccacgttaacgtcggcaccatcggccacgttgaccacggtaagaccactctgaccgcagctctgactcgcgtctgctccgaagttttcggttcggcagtcgttgagttcgacaagatcgactcggctccggaagaaaaagcgcgcggtatcaccatcaacaccgctcacgtcgagtacaactcgaacattcgtcactacgctcacgttgactgcccaggtcacgctgactacgtgaagaacatgatcaccggtgctgcccagatggacggcgcgatcctggtttgctcggccgccgatggtccgatgccgcaaacccgtgagcacatcctgctgtcccgtcaggtaggcgttccgtacatcgtggtcttcctgaacaaggccgacctggtagacgacgctgagctgctggaactggtcgagatggaagttcgcgacctgctgtccacctacgacttcccaggcgacgacactccgatcatcatcggttccgctcgtatggccctggaaggcaaagacgacaacgaaatgggcactaccgctgtcaagaagctggtagaaactctggatgcctacatccctgagccagttcgtgccatcgaccagccgttcctgatgccgatcgaagacgtgttctcgatctcgggtcgtggtaccgttgttaccggtcgtatcgagcgtggcatcgttcgcgttcaggatccgctggaaatcgttggtctgcgtgacaccaccaccaccacctgcaccggtgttgagatgttccgcaagctgctggacgaaggtcgtgctggcgagaactgcggcgttctgctgcgtggtaccaagcgtgacgacgttgagcgtggccaggttctggtcaagccaggttcggtcaagccgcacaccaagttcaccgcagaagtctacgtcctgtcgaaggaagaaggcggccgtcacactccgttcttcaaaggctaccgtccacagttctacttccgtaccactgacgtgaccggtaactgcgaactgccggaaggcgttgaaatggtaatgccaggtgacaacattcagatgactgttaccctgatcaagaccatcgcaatggaagacggtctgcgcttcgctatccgtgaaggcggtcgtaccgtcggcgccggcgttgtggccaaaatcatcgagtaa

SEQ ID NO: 3146 - protein, 397 aa, Pseudomonas putida
MAKEKFDRSLPHVNVGTIGHVDHGKTTLTAALTRVCSEVFGSAVVEFDKIDSAPEEKARGITINTAHVEYNSNIRHYAHVDCPGHADYVKNMITGAAQMDGAILVCSAADGPMPQTREHILLSRQVGVPYIVVFLNKADLVDDAELLELVEMEVRDLLSTYDFPGDDTPIIIGSARMALEGKDDNEMGTTAVKKLVETLDAYIPEPVRAIDQPFLMPIEDVFSISGRGTVVTGRIERGIVRVQDPLEIVGLRDTTTTTCTGVEMFRKLLDEGRAGENCGVLLRGTKRDDVERGQVLVKPGSVKPHTKFTAEVYVLSKEEGGRHTPFFKGYRPQFYFRTTDVTGNCELPEGVEMVMPGDNIQMTVTLIKTIAMEDGLRFAIREGGRTVGAGVVAKIIE

SEQ ID NO: 3147 - DNA, 1440 bp, Glycine max
  CDS (1)..(1440)
atggcaatttcttgggcagcagcaacaacctcaaagctcgcataccctcctcatgtccacttctctccttcaccctcctccaattatctcttccttaaaacccacaaaccctccgccacacacctctcctcttccttcatccaccccaccacaatcctccacctcgccgctgccaacaccaccacccgccgccgctccttcaccgtccgcgccgcccgcggcaagttcgagcgcaagaagccccacgtcaacatcggcaccatcggccacgtcgaccacggtaagaccaccctcaccgccgccctcaccatggccctcgcctccctcggcaatagtgcccctaaaaaatacgacgagatcgacgccgcccccgaggagcgcgcccgcggcatcaccatcaacaccgccaccgtcgagtacgagaccgagaaccgccactacgcccacgtcgactgccccggccacgccgactacgtcaagaacatgatcaccggcgctgcccagatggacggcgccatcctcgtcgtctccggcgccgacggcccaatgccccaaaccaaagaacacattcttttggccaaacaagtcggcgttcccaacattgtcgtcttcctcaacaaacaggaccaggttgatgacgaggagcttcttcagttagtagaattggaggtccgggagcttctttccaagtacgagttccccggagacgatgttccgattatctccggttccgctttgctgtctttggaagctttgatggccaacccgtccatcaagcgcggcgaaaaccaatgggttgataaaatttacgagctcatggaagctgtggatgactacattcccatccctcagcgccaaactgaacttccctttttgctggccattgaggatgttttcaccatcaccggtcgtggaaccgtcgccaccggaagggttgagagaggtactattagggttggagagactgttgatattgttggtgtgaaggacactaggaacaccactgtgactggggtggaaatgtttcagaagattctggatgaggctttggctggggacaatgtgggcttgttgcttaggggtattcagaaaactgatattcagagagggatggttttggctaagcctggaaccattactcctcacaccaagttttctgcaattgtgtatgtcttgaagaaggaagagggtgggaggcactctcccttcttttccggctaccggcctcagttctacatgaggactaccgatgttactggcaaggtaactgaaattatgaatgacaaggatgaagagtccaagatggttatgccgggcgaccgtgttaagctggtggttgaacttattgtgcctgtggcttgtgaacaaggaatgaggtttgctattagagaaggaggcaaaactgttggagctggtgttatccaatccatcattgagtag

SEQ ID NO: 3148 - protein, 479 aa, Glycine max
MAISWAAATTSKLAYPPHVHFSPSPSSNYLFLKTHKPSATHLSSSFIHPTTILHLAAANTTTRRRSFTVRAARGKFERKKPHVNIGTIGHVDHGKTTLTAALTMALASLGNSAPKKYDEIDAAPEERARGITINTATVEYETENRHYAHVDCPGHADYVKNMITGAAQMDGAILVVSGADGPMPQTKEHILLAKQVGVPNIVVFLNKQDQVDDEELLQLVELEVRELLSKYEFPGDDVPIISGSALLSLEALMANPSIKRGENQWVDKIYELMEAVDDYIPIPQRQTELPFLLAIEDVFTITGRGTVATGRVERGTIRVGETVDIVGVKDTRNTTVTGVEMFQKILDEALAGDNVGLLLRGIQKTDIQRGMVLAKPGTITPHTKFSAIVYVLKKEEGGRHSPFFSGYRPQFYMRTTDVTGKVTEIMNDKDEESKMVMPGDRVKLVVELIVPVACEQGMRFAIREGGKTVGAGVIQSIIE

SEQ ID NO: 3149 - DNA, 1194 bp, Streptomyces ramocissimus
  CDS (1)..(1194): transl_table=11
gtggcgaaggcgaagttccagcggaccaaaccgcacgtcaacatcggcaccatcggccacatcgaccacggcaagacgacactcaccgcggcgatcacgaaggtgctgcacgaccggttccccgacctcaacccgttcaccccgttcgaccagatcgacaaggcgcccgaggaacggcagcgcggcatcaccatctcgatcgcccacgtcgagtaccagaccgaggcgcggcactacgcgcacgtcgactgccccggacacgccgactacatcaagaacatgatcaccggcgcggcccagatggacggcgcgatcctggtcgtcgcggccacggacgggccgatgccccagaccaaggaacatgtgctgctggcacggcaggtgggcgtgccctacatcgtcgtcgcgctgaacaagaccgacatggtcgacgacgaggagatcctcgaactcgtggagttggaggtgcgcgagctgctcaccgagtacgagttccccggcgacgacgtcccggtcgtcaaggtgtcggcgctcagggccctggagggcgacccccggtggacccggtcggtactcgaactcctcgacgccgtcgacgagttcgtgcccgagccggtgcgggacgtcgaccggccgttcctgatgccgatcgaggacgtcttcaccatcaccggacgcggcacggtcgtcaccggccggatagagcgcggcacgctgaacgtgaacaccgaggtggagatcatcggcatccacgaacagaggacccggaccacggtcaccggcatcgagatgttccgcaagctcctcgacgagggccgggccggcgagaacgtcggactgctgctgcgcggagtgaagcgggagcaggtcgagcgcggtcaggtcgtcatcaggcccggatcggtcaccccgcacacgcagttcgaggcgcaggcgtacatcctgtccaaggacgagggcggccggcacacgccgttcttcgagaactaccgtccgcagttctacttccgcaccaccgacgtcacgggcgtggtgacgctgccgaagggcaccgagatggtgatgccgggcgacaacaccgccatgcacgtccagctgatccagccgatcgccatggaggaggggctgaagttcgccatccgcgagggcgggcgcacggtcggcgccggccaggtcacgcggatcgtgaagtag

SEQ ID NO: 3150 - protein, 397 aa, Streptomyces ramocissimus
MAKAKFQRTKPHVNIGTIGHIDHGKTTLTAAITKVLHDRFPDLNPFTPFDQIDKAPEERQRGITISIAHVEYQTEARHYAHVDCPGHADYIKNMITGAAQMDGAILVVAATDGPMPQTKEHVLLARQVGVPYIVVALNKTDMVDDEEILELVELEVRELLTEYEFPGDDVPVVKVSALRALEGDPRWTRSVLELLDAVDEFVPEPVRDVDRPFLMPIEDVFTITGRGTVVTGRIERGTLNVNTEVEIIGIHEQRTRTTVTGIEMFRKLLDEGRAGENVGLLLRGVKREQVERGQVVIRPGSVTPHTQFEAQAYILSKDEGGRHTPFFENYRPQFYFRTTDVTGVVTLPKGTEMVMPGDNTAMHVQLIQPIAMEEGLKFAIREGGRTVGAGQVTRIVK

SEQ ID NO: 3151 - DNA, 1185 bp, Vibrio cholerae
  CDS (1)..(1185): transl_table=11
gtgtctaaagaaaaatttgaacgtacgaaaccgcacgtaaacgttggtactatcggccacgttgaccacggtaaaacaactctaactgcagctatctgtactgtacttgcaaaagtatacggcggtaaagctcgtgacttcgcgtcaatcgacaacgcaccagaagagcgtgagcgtggtattacaatcaatacttctcacgtagagtacgatactccaaaccgtcactacgcacacgtagactgtccaggacacgcggattatgttaagaacatgatcaccggtgcagcacagatggacggcggtatcctagttgtagcggcaactgacggtccaatgccacaaactcgtgagcacatcctgctgggtcgccaagtaggtattccttacatcatcgtattcatgaacaagtgtgacatggttgacgatgaagagcttctagagctggtagagatggaagttcgtgagctgctgtctgagtacgatttcccaggtgatgacctgccagtaatccaaggttcagcactaggcgcgctaaacggcgaagcacagtgggaagcgaagattgttgagctagcagaagcactggatacatacattccagagccagagcgtgcagtagacatggcattcctgatgccaatcgaagacgtattctcaatccaaggtcgtggtacagtagtaactggccgtatcgagcgcggcatcctgaaagtgggtgacgaagtagcgatcgttggtatcaaagagacagtaaaaacgacctgtacaggtgtagagatgttccgtaagctgcttgacgaaggtcgtgcaggtgagaacgtaggtgcactgctacgtggtactaagcgtgaagaagtagagcgtggtcaagtactggcgaagccaggttcaatcacaccacacactaagttcgaatcagaagtatacgtactgtcaaaagacgaaggtggccgtcatactccattcttcaaaggttaccgtccacagttctacttccgtacaactgacgtaacaggcagcattgagctaccagaaggcgtagaaatggtaatgccaggcgacaacgtgaagatggttgtagacctgattgcaccaatcgcgatggacgaaggtctacgcttcgctatccgtgaaggtggccgtactgtaggtgctggtgttgtagctaagatcatcgcttaa

SEQ ID NO: 3152 - protein, 394 aa, Vibrio cholerae
MSKEKFERTKPHVNVGTIGHVDHGKTTLTAAICTVLAKVYGGKARDFASIDNAPEERERGITINTSHVEYDTPNRHYAHVDCPGHADYVKNMITGAAQMDGGILVVAATDGPMPQTREHILLGRQVGIPYIIVFMNKCDMVDDEELLELVEMEVRELLSEYDFPGDDLPVIQGSALGALNGEAQWEAKIVELAEALDTYIPEPERAVDMAFLMPIEDVFSIQGRGTVVTGRIERGILKVGDEVAIVGIKETVKTTCTGVEMFRKLLDEGRAGENVGALLRGTKREEVERGQVLAKPGSITPHTKFESEVYVLSKDEGGRHTPFFKGYRPQFYFRTTDVTGSIELPEGVEMVMPGDNVKMVVDLIAPIAMDEGLRFAIREGGRTVGAGVVAKIIA

SEQ ID NO: 3153 - DNA, 1185 bp, Yersinia pestis
  CDS (1)..(1185): transl_table=11
atgtctaaagaaaagtttgaacgtacaaagccgcacgttaatgtgggtactattggccacgttgaccatggtaaaactaccttaactgctgcaatcaccaccgtattggctaaaacctacggcggtagtgctcgtgcattcgaccagatcgacaacgctccggaagaaaaagcgcgtggtatcaccatcaacacttctcacgttgaatatgatactcctgctcgtcactatgcacacgttgactgcccaggtcatgctgactacgttaaaaatatgatcaccggtgctgctcagatggatggagcgatcttggttgttgctgcaaccgatggccctatgccgcagactcgtgagcatatcctgctgggccgccaggttggtgtcccatacattattgtcttcctgaacaaatgtgacatggttgacgatgaagagttgctagagttggttgaaatggaggttcgtgagcttctgtctcaatacgatttcccaggcgacgacactccagtcatccgtggttcagcgttgaaagccctggaaggtgacgctgagtgggaagctaaaattatcgagttggcagaagctctggatagctatattccgcaaccagaacgcgctattgatagaccattcctattgccaattgaagacgtattctctatttctggtcgtggtactgtagttactggtcgtgtagaacgtggtattgttaaggtcggcgaagaagttgaaatcgttggtattatcgatacgattaaaacaacttgtactggcgttgaaatgttccgcaagctgctggatgaaggccgtgctggtgaaaatgttggtgttctgctgcgtggtactaagcgtgacgatgttcagcgtggtcaagtactggcgaaaccaggttctatcaagccacacacgaagtttgagtcagaagtttatattctgagcaaagatgaaggcggccgtcatacaccgttcttcaagggctaccgtcctcagttctacttccgtacaactgacgtgaccggtaccattgagctgccagaaggcgttgaaatggtcatgcctggtgacaacgtaaacatggttgttaacctaattgctcctatcgcaatggatgatggtctgcgcttcgcaattcgtgagggtggccgtactgttggtgctggcgttgttgctaaagtcattgaataa

SEQ ID NO: 3154 - protein, 394 aa, Yersinia pestis
MSKEKFERTKPHVNVGTIGHVDHGKTTLTAAITTVLAKTYGGSARAFDQIDNAPEEKARGITINTSHVEYDTPARHYAHVDCPGHADYVKNMITGAAQMDGAILVVAATDGPMPQTREHILLGRQVGVPYIIVFLNKCDMVDDEELLELVEMEVRELLSQYDFPGDDTPVIRGSALKALEGDAEWEAKIIELAEALDSYIPQPERAIDRPFLLPIEDVFSISGRGTVVTGRVERGIVKVGEEVEIVGIIDTIKTTCTGVEMFRKLLDEGRAGENVGVLLRGTKRDDVQRGQVLAKPGSIKPHTKFESEVYILSKDEGGRHTPFFKGYRPQFYFRTTDVTGTIELPEGVEMVMPGDNVNMVVNLIAPIAMDDGLRFAIREGGRTVGAGVVAKVIE

SEQ ID NO: 3155 - DNA, 1179 bp, Streptomyces coelicolor
  CDS (1)..(1179): transl_table=11
atgtccaagacggcgtacgtccgcaccaaaccgcatctgaacatcggcacgatgggccatgtcgaccacggcaagaccaccctgaccgccgccatcaccaaggtcctcgccgagcgcggggccggcagcaccacccagtacgtttcgttcgaccgcatcgaccgcgccccggaggaggcggcgcgcggcatcaccatcaacatcgcgcacgtcgagtacgaaaccgacacccggcactacgcccacgtcgacatgcccggccacgccgactacgtcaagaacatggtcaccggcgccgcccagctcgacggggcgatcctcgtcgtatccgcgctggacgggatcatgccgcagaccgccgaacacgtgctgctcgcccggcaggtgggcgtcgaccacatcgtggtcgcgctcaacaaggccgacgcgggtgacgaggagctgaccgacctggtcgagctggaggtgcgcgaactgctcaccgcgcacggctacggcggcgacgccgtgcccgtcgtacgggtctcggggctgaaggccctggagggcgacccgcggtggacggcctccgtcgaggcgctgctcgacgccgtggacacgtacgtgcccatgcccgagcggtacctggacgcgccgttcctgctgccggtggagaacgtgctcaccatcaccggccgcggcaccgtcgtcaccggcgccgtcgagcgcggcaccgtgcgcgtcggcgaccgggtcgaggtgctcggggcgtccgtcgagacggtcgtcaccggcctggagaccttcggcaagccgatggaggaggcgcaggccggggacaacgtggcgctgctgctgcgcggggtcgcccgcgacacggtgcgccgcgggcaggtggtcgccgcacccggcagcgtcgtccccgcgcggcgtttccgggcccgggtgtacgtgctctcggcgcgcgagggcgggcgctcgacaccgctcaccaccggataccggccgcagttctacatccgcaccgccgacgtggtcggcgacgtggacctcggcgaggaggccgtcgcccggcccggggacaccgtcaccatgacggtcgagctgggacgggacgtgccgctggagacggggctcggcttcgcgatccgcgagggcggtcgcaccgtgggggcggggaccgtgaccgcggtggagtga

SEQ ID NO: 3156 - protein, 392 aa, Streptomyces coelicolor
MSKTAYVRTKPHLNIGTMGHVDHGKTTLTAAITKVLAERGAGSTTQYVSFDRIDRAPEEAARGITINIAHVEYETDTRHYAHVDMPGHADYVKNMVTGAAQLDGAILVVSALDGIMPQTAEHVLLARQVGVDHIVVALNKADAGDEELTDLVELEVRELLTAHGYGGDAVPVVRVSGLKALEGDPRWTASVEALLDAVDTYVPMPERYLDAPFLLPVENVLTITGRGTVVTGAVERGTVRVGDRVEVLGASVETVVTGLETFGKPMEEAQAGDNVALLLRGVARDTVRRGQVVAAPGSVVPARRFRARVYVLSAREGGRSTPLTTGYRPQFYIRTADVVGDVDLGEEAVARPGDTVTMTVELGRDVPLETGLGFAIREGGRTVGAGTVTAVE

SEQ ID NO: 3157 - DNA, 1170 bp, Streptomyces ramocissimus
  CDS (1)..(1170): transl_table=11
atgtccaagacggcatacgtgcgcaccaaaccgcatctgaacatcggcacgatgggtcatgtcgaccacggcaagaccacgttgaccgccgccatcaccaaggtcctcgccgagcgtggctccgggacgttcgtcccgttcgaccgcatcgaccgggccccggaggaggccgcgcgcggcatcaccatcaacatcgcgcacgtcgagtacgagaccgacacccggcactacgcgcacgtcgacatgccgggccacgccgactacgtcaagaacatggtcaccggcgccgcgcagctcgacggggcgatcctcgtcgtctccgcgctcgacgggatcatgccgcagaccgccgaacacgtcctgctcgcccggcaggtgggcgtcgaccacatcgtcgtcgccctcaacaaggccgacgcgggcgacgaggagctcaccgacctcgtcgagctggaggtccgcgatctgctctccgagcacggctacggcggcgacggtgcccccgtcgtacgggtctcggggctgaaggcgctggagggcgaccccaagtggacggcgtccatcgaggcgctgctcgacgcggtggacacctacgtgccgatgccggagcggtatgtggacgcgccgttcctgctgcccgtggagaacgtgctcaccatcaccggtcgggggaccgtggtcaccggagccgtcgagcggggcaccgtgcgcgtgggcaaccgggtcgaagtgctcggcgccgggctggagaccgtggtcaccggcctggagacgttcggcaagcccatggacgaggcgcaggccggggacaacgtggcgctgttgctgcgtggggttccgcgggacgccgtacggcgtgggcatgtggtcgcggcgccggggagcgtggtgccccggagtcgattctccgcgcaggtgtatgtgctctcggcccgcgagggcggtcgtacgactcctgtcaccagcgggtatcggccgcagttctacatccgtacggcggatgtggtgggggacgtcgacctgggggaggtgggggtcgctcggcctggggagacggtttcgatgatcgtcgagttgggccgggaggttccgctggagcccgggttggggttcgccattcgtgagggcggcaggaccgtgggggcggggaccgttacggcccttgtgtga

SEQ ID NO: 3158 - protein, 389 aa, Streptomyces ramocissimus
MSKTAYVRTKPHLNIGTMGHVDHGKTTLTAAITKVLAERGSGTFVPFDRIDRAPEEAARGITINIAHVEYETDTRHYAHVDMPGHADYVKNMVTGAAQLDGAILVVSALDGIMPQTAEHVLLARQVGVDHIVVALNKADAGDEELTDLVELEVRDLLSEHGYGGDGAPVVRVSGLKALEGDPKWTASIEALLDAVDTYVPMPERYVDAPFLLPVENVLTITGRGTVVTGAVERGTVRVGNRVEVLGAGLETVVTGLETFGKPMDEAQAGDNVALLLRGVPRDAVRRGHVVAAPGSVVPRSRFSAQVYVLSAREGGRTTPVTSGYRPQFYIRTADVVGDVDLGEVGVARPGETVSMIVELGREVPLEPGLGFAIREGGRTVGAGTVTALV

SEQ ID NO: 3159 - DNA, 1437 bp, Nicotiana sylvestris
  CDS (1)..(1437)
atggcttcaatttcagcagccaccgccacctcctccactaagcttgtatcatccaactccaccaatcctcttcttccttcctccactaaaccctctaagcttatcctatcctcttcctttacccctaattgttccacccttttcctccactcacccgctaccccttcttctactgccacccatcgccaccgccgttttactgtccgcgctgcccgtggcaaattcgagcggaaaaaaccccatgtcaacatcggtactattggccatgttgaccacggaaagactactctcaccgctgctttaaccatggctcttgcttctatgggaaactccgcccctaagaaatacgacgaaattgatgccgccccagaagagcgtgctcgtggtattactattaacactgctactgttgagtacgagactgagaaccgtcactacgcccacgtggattgccctggtcacgctgattatgtcaagaatatgattaccggtgctgcccaaatggacggcgctattcttgtttgttcaggtgctgatggtcccatgccacagactaaggaacacattttgcttgctaagcaagtaggtgtccccaacatggttgtgttcttgaacaaacaagatcaggttgatgatgaggagctgcttcagcttgttgagttggaggtaagagagttattgtcaagttatgagtttcctggtgatgatattcctattatttctggctctgctcttttggctttagaggctttgatggctaatcctagtattaagagaggtgaaaatcaatgggttgataagatatatgagttgatggacgctgttgatagttatattcctattccagttaggcaaactgaattgcctttcttgatggctattgaagatgtgttttccattactggtagaggtactgtggcgacggggagggtagagagagggactgttaggattggagacactgttgatattgtaggtttgaaggacactaggagtactaccgtgacgggtgttgagatgtttcaaaagattttggatgaagcaatggctggagacaatgtggggttgttgttgagaggtattcaaaagattgatattcagagaggaatggtgttggcaaaacccggaacaattacccctcacaccaagtttgaagcgattgtgtatgtgttgaagaaggaggagggtggtaggcattcccccttcttttcagggtacaggcctcagttttacatgaggactactgatgtgaccggaaaggttacttccattacgactgataaaggagaggaatctaagatggtcatgcctggtgatcgtgtgaacttggtggttgagctcattatgccggtggcttgtgagcaagggatgagatttgccatcagggaaggaggaaagactgttggagctggtgtcattcagaaaattatcgagtga

SEQ ID NO: 3160 - protein, 478 aa, Nicotiana sylvestris
MASISAATATSSTKLVSSNSTNPLLPSSTKPSKLILSSSFTPNCSTLFLHSPATPSSTATHRHRRFTVRAARGKFERKKPHVNIGTIGHVDHGKTTLTAALTMALASMGNSAPKKYDEIDAAPEERARGITINTATVEYETENRHYAHVDCPGHADYVKNMITGAAQMDGAILVCSGADGPMPQTKEHILLAKQVGVPNMVVFLNKQDQVDDEELLQLVELEVRELLSSYEFPGDDIPIISGSALLALEALMANPSIKRGENQWVDKIYELMDAVDSYIPIPVRQTELPFLMAIEDVFSITGRGTVATGRVERGTVRIGDTVDIVGLKDTRSTTVTGVEMFQKILDEAMAGDNVGLLLRGIQKIDIQRGMVLAKPGTITPHTKFEAIVYVLKKEEGGRHSPFFSGYRPQFYMRTTDVTGKVTSITTDKGEESKMVMPGDRVNLVVELIMPVACEQGMRFAIREGGKTVGAGVIQKIIE

SEQ ID NO: 3161 - DNA, 1458 bp, Nicotiana sylvestris
  CDS (1)..(1458)
atggcttcaatttcagcagcttctgccacagctacagcttctacaaagcttgcatacccttattccccttcttcctcaagcagcagcagcaacactgctgctgtattcccttcaaattcctcaaagcttatcctttcctcttcttttacacccaccccttcaacccttttcctccactcaccaacaactactccttccaccacccacccccgtcggttcactgtccgcgctgcacgtggcaaattcgagcgtaaaaaacctcacgtcaacattggtacaattggccacgttgaccatggaaagaccacactcacagctgctttgaccatggcgcttgcctctatgggcaactccgcccccaagaaatatgacgaaattgatgctgcccctgaagaaagggcgcgtggtattactatcaacactgccactgtggaatatgaaacggaaaacagacattatgcacacgtggactgcccggggcatgctgattatgtcaagaacatgattactggtgctgcccaaatggatggggcaattcttgttgtgtcaggtgctgatggcccaatgccacagactaaagagcatattttgttagctaagcaagttggggtccctaatatggttgttttcttgaacaaacaagaccaagttgatgatgaggagttacttgagcttgttgagttggaggtaagagaattattgtcaagttatgagttccctggtgatgaaattcctattatttctggttctgcacttttagctttagaggctttgatggctaatcctagtattaaaaggggtgaaaatcaatgggttgataagatttatcaattgatggataatgttgatgaatatatccctatcccacaaagacaaactgaattgcctttcttgatggctattgaggatgttttctcgattaccggtagaggtactgtggcgacggggagagtagagagagggactgttaaggttggggaaattgttgatatagttggattgaaggatactaggaatactacagtgacaggggttgagatgtttcagaagattttggatgaagcgatggcgggagataatgtgggattgttgttgagaggtattcagaagattgatattcagagagggatggtgttggcgaagcccggaacaattactccgcacacaaagtttgaagctttggtgtatgtgttgaagaaggaagagggaggaaggcattccccgttctttgcgggttataggcctcaattttacatgaggacaactgatgtgactggaaaggttactgtgattatgagtgacaaaggagaggaatctaagatggtcatgcctggcgatcgtgtaaacatggtggttgagcttatcatgccggttgcatgtgagcaagggatgaggtttgctatcagggaaggaggaaagactgttggagctggtgttattcagaaaatcttagaatga

SEQ ID NO: 3162 - protein, 485 aa, Nicotiana sylvestris
MASISAASATATASTKLAYPYSPSSSSSSSNTAAVFPSNSSKLILSSSFTPTPSTLFLHSPTTTPSTTHPRRFTVRAARGKFERKKPHVNIGTIGHVDHGKTTLTAALTMALASMGNSAPKKYDEIDAAPEERARGITINTATVEYETENRHYAHVDCPGHADYVKNMITGAAQMDGAILVVSGADGPMPQTKEHILLAKQVGVPNMVVFLNKQDQVDDEELLELVELEVRELLSSYEFPGDEIPIISGSALLALEALMANPSIKRGENQWVDKIYQLMDNVDEYIPIPQRQTELPFLMAIEDVFSITGRGTVATGRVERGTVKVGEIVDIVGLKDTRNTTVTGVEMFQKILDEAMAGDNVGLLLRGIQKIDIQRGMVLAKPGTITPHTKFEALVYVLKKEEGGRHSPFFAGYRPQFYMRTTDVTGKVTVIMSDKGEESKMVMPGDRVNMVVELIMPVACEQGMRFAIREGGKTVGAGVIQKILE

SEQ ID NO: 3163 - DNA, 1176 bp, Agrobacterium tumefaciens
  CDS (1)..(1176): transl_table=11
atggcaaagagcaagtttgagcgcaataagccgcacgtcaacattggcacgatcggtcacgtcgaccacggcaagacgtcgttgactgctgcgatcacgaagtatttcggcgagttcaaggcgtatgaccaaatcgacgccgctcctgaggaaaaggcccgtggtatcacgatttcgacggcgcacgttgagtatgagacgcctgcgcgtcactacgcccacgttgactgccccggccacgccgactatgtgaagaacatgatcaccggtgctgcccagatggacggcgcgatcctggtttgctcggctgccgacggcccgatgccacagacccgcgagcacatcctgcttgcccgtcaggttggcgttccggccatcgtcgtgttcctcaacaaggtcgaccaggttgacgacgccgagcttctcgagctcgtcgagcttgaagttcgcgaacttctgtcgtcctacgacttcccgggcgacgatatcccgatcatcaagggttcggcacttgctgctcttgaagattctgacaagaagatcggtgaagacgcgatccgcgagctgatggctgctgtcgacgcctacatcccgacgcctgagcgtccgatcgaccagccgttcctgatgccgatcgaagacgtgttctcgatctcgggtcgtggtacggttgtgacgggtcgcgttgagcgcggtatcgtcaaggttggtgaagaagtcgaaatcgtcggcatccgtccgacctcgaagacgactgttaccggcgttgaaatgttccgcaagctgctcgaccagggccaggccggcgacaacatcggtgcactcgttcgcggcgttacccgtgacggcgtcgagcgtggtcagatcctgtgcaagccgggttcggtcaagccgcacaagaagttcatggcagaagcctacatcctgacgaaggaagaaggcggccgtcatacgccgttcttcacgaactaccgtccgcagttctacttccgtacgactgacgttaccggtatcgtttcgcttcctgaaggcacggaaatggttatgcctggcgacaacgtcactgttgaagtcgagctgatcgttccgatcgcgatggaagaaaagctgcgcttcgctatccgcgaaggcggccgtaccgtcggcgccggcatcgttgcttcgatcgtcgagtaa

SEQ ID NO: 3164 - protein, 391 aa, Agrobacterium tumefaciens
MAKSKFERNKPHVNIGTIGHVDHGKTSLTAAITKYFGEFKAYDQIDAAPEEKARGITISTAHVEYETPARHYAHVDCPGHADYVKNMITGAAQMDGAILVCSAADGPMPQTREHILLARQVGVPAIVVFLNKVDQVDDAELLELVELEVRELLSSYDFPGDDIPIIKGSALAALEDSDKKIGEDAIRELMAAVDAYIPTPERPIDQPFLMPIEDVFSISGRGTVVTGRVERGIVKVGEEVEIVGIRPTSKTTVTGVEMFRKLLDQGQAGDNIGALVRGVTRDGVERGQILCKPGSVKPHKKFMAEAYILTKEEGGRHTPFFTNYRPQFYFRTTDVTGIVSLPEGTEMVMPGDNVTVEVELIVPIAMEEKLRFAIREGGRTVGAGIVASIVE

SEQ ID NO: 3165 - DNA, 1176 bp, Agrobacterium tumefaciens
  CDS (1)..(1176): transl_table=11
atggcaaagagcaagtttgagcgcaataagccgcacgtcaacattggcacgatcggtcacgtcgaccacggcaagacgtcgttgactgctgcgatcacgaagtatttcggcgagttcaaggcgtatgaccaaatcgacgccgctcctgaggaaaaggcccgtggtatcacgatttcgacggcgcacgttgagtatgagacgcctgcgcgtcactacgcccacgttgactgccccggccacgccgactatgtgaagaacatgatcaccggtgctgccgagatggacggcgcgatcctggtttgctcggctgccgacggcccgatgccacagacccgcgagcacatcctgcttgcccgtcaggtgggcgttccggccatcgtcgtgttcctcaacaaggtcgaccaggttgacgacgccgagcttctcgagctcgtcgagcttgaagttcgcgaacttctgtcgtcctacgacttcccgggcgacgatatcccgatcatcaagggttcggcacttgctgctcttgaagattctgacaagaagatcggtgaagacgcgatccgcgagctgatggctgctgtcgacgcctacatcccgacgcctgagcgtccgatcgaccagccgttcctgatgccgatcgaagacgtgttctcgatctcgggtcgtggtacggttgtgacgggtcgcgttgagcgcggtatcgtcaaggttggtgaagaagtcgaaatcgtcggcatccgtccgacctcgaagacgactgttaccggcgttgaaatgttccgcaagctgctcgaccagggccaggccggcgacaacatcggtgcactcgttcgcggcgttacccgtgacggcgtcgagcgtggtcagatcctgtgcaagccgggttcggtcaagccgcacaagaagttcatggcagaagcctacatcctgacgaaggaagaaggcggccgtcatacgccgttcttcacgaactaccgtccgcagttctacttccgtacgactgacgttaccggtatcgtttcgcttcctgaaggcacggaaatggttatgcctggcgacaacgtcactgttgaagtcgagctgatcgttccgatcgcgatggaagaaaagctgcgcttcgctatccgcgaaggcggccgtaccgtcggcgccggcatcgttgcttcgatcgtcgagtaa

SEQ ID NO: 3166 - protein, 391 aa, Agrobacterium tumefaciens
MAKSKFERNKPHVNIGTIGHVDHGKTSLTAAITKYFGEFKAYDQIDAAPEEKARGITISTAHVEYETPARHYAHVDCPGHADYVKNMITGAAEMDGAILVCSAADGPMPQTREHILLARQVGVPAIVVFLNKVDQVDDAELLELVELEVRELLSSYDFPGDDIPIIKGSALAALEDSDKKIGEDAIRELMAAVDAYIPTPERPIDQPFLMPIEDVFSISGRGTVVTGRVERGIVKVGEEVEIVGIRPTSKTTVTGVEMFRKLLDQGQAGDNIGALVRGVTRDGVERGQILCKPGSVKPHKKFMAEAYILTKEEGGRHTPFFTNYRPQFYFRTTDVTGIVSLPEGTEMVMPGDNVTVEVELIVPIAMEEKLRFAIREGGRTVGAGIVASIVE

SEQ ID NO: 3167 - DNA, 1179 bp, Apple proliferation phytoplasma
  CDS (1)..(1179): transl_table=11
atgtctagtaaagtatttttaagagataaagtgcatgttaatgtaggaactattggtcatgttgatcatggaaaaactactttgactgctgctattactaaaattttatcaacaaaaggcttagcagaaaataaatcatatgatcaaattgataaaactaaagaagaaaaagaacgtggtataactattaacactacccatgtttcttatgaaactgtaaaaaggcattatgctcatgttgattgtcctggacacgctgattatgttaaaaatatgattaccggtgctgcgcaaatggacgctggtattttagttgtttcagcttatcatggagtaatgcctcaaactcgtgaacatgttttgttagctggacaagttggtatctctaaattgatagtatttttaaataaatgtgatttagttaaagaagaagaatggattcatttagtagaaatggaagttcgtgaattattaaacgaatataaatttgatggtgataaaactccttttgttagaggttcagctttaaaagctttagaaggcacagatgttgaaggtatcaataaattattagaagttttagatgaatatattgaagatccaattcgtgatgtagaaaaaccatttttaatgccggttgaaggagttcatactattactggtcgtggaactgttgctactggtcgtgtagaaagaggaaaaattaagattagtgaagaagttgaaattattggtttaaaagaaactaaaaaagctattattactggtcttgaaatgtttaaaaaagaattagattttgctcaagctggtgataatgttggtattttattacgcggtattactcgtgatcaaattgaaagaggtcaagttttagctaaaccaggttctttaaatgcttatcataaatttttgtctcaagtttatattttgactcaacaagaaggtggacgtcatactgcatttttttctaattacagaccacaattttattttcgtactacagatgttactggtttcattaaattaaaaaaagatgttaaaatggtattaccaggtgatagaacagaacttattgttgaattaaatcatccaatcgctattgaagcaggcactaaattttctattcgtgaaggtggacgcacaataggagctggtacagtaactgaaattattgaataa

SEQ ID NO: 3168 - protein, 392 aa, Apple proliferation phytoplasma
MSSKVFLRDKVHVNVGTIGHVDHGKTTLTAAITKILSTKGLAENKSYDQIDKTKEEKERGITINTTHVSYETVKRHYAHVDCPGHADYVKNMITGAAQMDAGILVVSAYHGVMPQTREHVLLAGQVGISKLIVFLNKCDLVKEEEWIHLVEMEVRELLNEYKFDGDKTPFVRGSALKALEGTDVEGINKLLEVLDEYIEDPIRDVEKPFLMPVEGVHTITGRGTVATGRVERGKIKISEEVEIIGLKETKKAIITGLEMFKKELDFAQAGDNVGILLRGITRDQIERGQVLAKPGSLNAYHKFLSQVYILTQQEGGRHTAFFSNYRPQFYFRTTDVTGFIKLKKDVKMVLPGDRTELIVELNHPIAIEAGTKFSIREGGRTIGAGTVTEIIE

SEQ ID NO: 3169 - DNA, 1218 bp, Aquifex pyrophilus
  CDS (1)..(1218): transl_table=11
atggccaaggagaagtttgagaggacaaaagaacacgtaaacgtgggtaccataggtcacgttgaccacggaaaatctacgcttacatcagctataacatgcgttctcgcagcaggactcgttgaaggtggtaaagctaagtgcttcaaatacgaagaaattgacaaagctccagaagaaaaagaaagaggtataaccataaacatcactcacgttgagtacgaaaccgctaagagacactacgcacacgttgactgccccggacacgcggactacatcaagaacatgattaccggtgcggcccagatggacggggctatactcgtggtttccgcagctgacggcccgatgccccaaaccagagaacacgtccttctcgcaagacaggttaacgttccctacatagtcgttttcatgaacaagtgtgatatggttgacgacgaagagctccttgagctcgttgagcttgaagtgagagagcttctcagcaaatacgagtatcccggagacgaagttcccgtaataagaggttccgctctgggagcccttcaggagcttgaacaaaactctcccggaaagtgggtaggaagcataaaggaacttctgaacgcgatggacgagtacataccgacacctgagagagaggttgacaagcccttcctgatgcccatagaagacgtgttcagcatatcgggacgtggaacggttgtgaccggaagagtggaaaggggcgtgttgagacccggagatgaggtagagatagtaggactgagggaagagcccttaaagactgtggcaacgtccatagagatgttcaggaaggtgcttgatgaggcgcttcccggagacaatattggagttcttctgaggggagtaggaaaggacgacgtagagaggggacaggtgcttgcccagcccgggagcgtgaaggcacacagaaagttcagggcacaggtatacgttcttagcaaggaggaaggaggaaggcacacgcctttctttgtgaactacaggccacagttttacttcaggaccgctgatgtaacgggaactgtagtgaagctacctgaaggcgttgagatggtgatgcccggggataacgttgagcttgaggtagagcttatagcgcctgtagcacttgaggaaggactgaggtttgcgataagggaaggtggaaggactgtaggtgctggtgtcgttaccaaaatccttgactga

SEQ ID NO: 3170 - protein, 405 aa, Aquifex pyrophilus
MAKEKFERTKEHVNVGTIGHVDHGKSTLTSAITCVLAAGLVEGGKAKCFKYEEIDKAPEEKERGITINITHVEYETAKRHYAHVDCPGHADYIKNMITGAAQMDGAILVVSAADGPMPQTREHVLLARQVNVPYIVVFMNKCDMVDDEELLELVELEVRELLSKYEYPGDEVPVIRGSALGALQELEQNSPGKWVGSIKELLNAMDEYIPTPEREVDKPFLMPIEDVFSISGRGTVVTGRVERGVLRPGDEVEIVGLREEPLKTVATSIEMFRKVLDEALPGDNIGVLLRGVGKDDVERGQVLAQPGSVKAHRKFRAQVYVLSKEEGGRHTPFFVNYRPQFYFRTADVTGTVVKLPEGVEMVMPGDNVELEVELIAPVALEEGLRFAIREGGRTVGAGVVTKILD

SEQ ID NO: 3171 - DNA, 1431 bp, Arabidopsis thaliana
  CDS (1)..(1431)
atggcgatttcggctccagccgcttgttcttcctcctctagaattctctgttcctactcctctccttctccttctctctgtcccgccatttccacctctggtaaactcaaaaccctaactctctcttcctccttcctcccttcttactcattaaccaccacctccgcttctcaatccactcgtcgctccttcaccgtccgcgccgctcgtggaaagttcgagaggaagaagcctcatgtcaacatcggaaccatcggtcatgttgaccatgggaagactactttaaccgcagctctcaccatggctctcgcttcaattggttccagcgtcgctaaaaagtacgacgagattgacgctgcgccggaggagagagctcgtggtatcacaatcaacactgctactgtggagtacgagactgagaatcgtcactacgctcacgttgattgtcctggtcacgctgattacgttaagaatatgattaccggagctgcacagatggacggagctatcctcgttgtttccggcgccgatggtcctatgcctcagactaaagagcatatccttttggctaagcaggttggtgttcctgatatggttgtgtttcttaacaaagaggatcaagtagatgatgcagagttgctagagctcgttgagcttgaggttcgtgagcttctctcgtcttatgaatttaacggtgatgatattccgattatctctggttctgctcttttagctgttgagactcttactgagaatcctaaggttaagagaggtgataacaaatgggtagataagatttatgaacttatggatgctgttgatgattatatccctatccctcagagacaaactgaattgccattcttgttagctgttgaggatgtgttctctatcactggacgtggtactgtggctacagggcgtgttgagagaggtacggttaaggtaggagagactgtagatttagtgggtttaagggagactaggagttacactgtcactggggtggaaatgtttcagaagattcttgatgaggctttagctggtgacaatgtagggttgttgcttaggggtattcaaaaggctgatattcagagaggtatggttttagctaagccgggatcgattactccacataccaagtttgaagcaattatctatgtgttgaagaaagaggaaggtggaaggcattctccattctttgcaggttacaggcctcagttctacatgaggacgactgatgttacgggtaaagtgacgaagatcatgaacgataaagatgaagagtcgaagatggttatgcccggtgatcgagtgaagattgttgttgagcttattgtgccggtggcttgtgaacaagggatgaggtttgctatcagagaaggaggaaagactgttggtgctggagttattgggacgatcctcgaatga

SEQ ID NO: 3172 - protein, 476 aa, Arabidopsis thaliana
MAISAPAACSSSSRILCSYSSPSPSLCPAISTSGKLKTLTLSSSFLPSYSLTTTSASQSTRRSFTVRAARGKFERKKPHVNIGTIGHVDHGKTTLTAALTMALASIGSSVAKKYDEIDAAPEERARGITINTATVEYETENRHYAHVDCPGHADYVKNMITGAAQMDGAILVVSGADGPMPQTKEHILLAKQVGVPDMVVFLNKEDQVDDAELLELVELEVRELLSSYEFNGDDIPIISGSALLAVETLTENPKVKRGDNKWVDKIYELMDAVDDYIPIPQRQTELPFLLAVEDVFSITGRGTVATGRVERGTVKVGETVDLVGLRETRSYTVTGVEMFQKILDEALAGDNVGLLLRGIQKADIQRGMVLAKPGSITPHTKFEAIIYVLKKEEGGRHSPFFAGYRPQFYMRTTDVTGKVTKIMNDKDEESKMVMPGDRVKIVVELIVPVACEQGMRFAIREGGKTVGAGVIGTILE

SEQ ID NO: 3173 - DNA, 1188 bp, Bacillus anthracis
  CDS (1)..(1188): transl_table=11
atggctaaagctaaattcgaacgttctaaaccccatgttaacatcggtacaatcggccacgttgaccatggtaaaactacattaactgctgcgatcactacagtacttgcaaaagctggtggtgctgaagcacgcggatacgatcaaatcgatgctgctccagaagaaagagagcgcggtatcacaatctcaactgcacacgttgagtacgaaactgaaactcgtcactatgcacacgttgactgcccaggtcacgctgactatgttaaaaacatgatcactggtgctgctcaaatggacggcggtatcttagtagtatctgctgctgatggcccaatgcctcaaactcgtgagcacatccttctttctcgtcaagtaggtgtaccttacatcgttgtattcttaaacaaatgcgacatggtagacgacgaagaattattagaattagtagaaatggaagttcgcgacctattatctgaatacggattcccaggcgacgacattcctgtaatcaaaggttctgctcttaaagctcttcaaggagaagctgattgggaagcaaaaatcattgaattaatggctgaagttgatgcttacatcccaactccagaacgtgaaactgacaaaccattcttaatgcctgtagaggacgtattctctatcacaggtcgtggtacagttgctactggtcgtgttgagcgcggtatcgttaaagttggtgacgtagtagaaatcatcggtcttgctgaagaaaatgcttctacaactgtaactggtgtagagatgttccgtaaacttcttgaccaagctcaagctggagacaacatcggtgctttacttcgtggggttgctcgtgaagacatccaacgtggacaagtacttgcaaaaagcggttctgtaaaagctcacgctaaattcaaagctgaagttttcgtattatctaaagaagaaggtggacgtcacactccattcttcgctaactaccgtcctcagttctacttccgtacaactgacgtaactggtatcatccaattaccagaaggtactgaaatggtaatgcctggtgacaacatcgaaatgactatcgaacttatcgctccaatcgctatcgaagagggaactaaattctctattcgtgaaggtggacgtacagtaggttacggtgtagttgctactatcgttgagtaa

SEQ ID NO: 3174 - protein, 395 aa, Bacillus anthracis
MAKAKFERSKPHVNIGTIGHVDHGKTTLTAAITTVLAKAGGAEARGYDQIDAAPEERERGITISTAHVEYETETRHYAHVDCPGHADYVKNMITGAAQMDGGILVVSAADGPMPQTREHILLSRQVGVPYIVVFLNKCDMVDDEELLELVEMEVRDLLSEYGFPGDDIPVIKGSALKALQGEADWEAKIIELMAEVDAYIPTPERETDKPFLMPVEDVFSITGRGTVATGRVERGIVKVGDVVEIIGLAEENASTTVTGVEMFRKLLDQAQAGDNIGALLRGVAREDIQRGQVLAKSGSVKAHAKFKAEVFVLSKEEGGRHTPFFANYRPQFYFRTTDVTGIIQLPEGTEMVMPGDNIEMTIELIAPIAIEEGTKFSIREGGRTVGYGVVATIVE

SEQ ID NO: 3175 - DNA, 1185 bp, Bacteroides fragilis
  CDS (1)..(1185): transl_table=11
atggctaaagagaaatttgaacgtaccaaaccgcacgtaaacattggtacaatcggtcacgttgaccacggtaaaaccactttgactgctgctatcactactgtgttggcaaagaaaggtctttctgaacttcgttctttcgattctatcgataatgctcctgaagaaaaagaaagaggtattactatcaatacttcacacgttgagtatgaaactgctaaccgtcactacgcacacgttgactgtccgggtcacgctgactacgtaaagaacatggttactggtgctgctcagatggacggtgctatcattgtagttgctgctactgatggtccgatgcctcagactcgtgagcacatccttttggctcgtcaggtaaacgttccgaagctggttgtattcatgaacaagtgcgatatggttgaagatgctgagatgttggaacttgttgaaatggaaatgagagaattgctttcattctatgatttcgacggtgacaatactccgatcattcagggttctgctcttggtgcattgaacggcgtagaaaaatgggaagacaaagtaatggaactgatggaagctgttgatacttggattccactgcctccgcgcgatgttgataaacctttcttgatgccggtagaagatgtgttctctatcacaggtcgtggtactgtagctacaggtcgtatcgaaactggtgttatccatgtaggtgatgaaatcgaaatcctcggtttgggtgaagataagaaatcagttgtaacaggtgttgaaatgttccgcaaacttctggatcagggtgaagctggtgacaacgtaggtctgttgcttcgtggtgttgacaagaacgaaatcaaacgtggtatggttctttgtaagccgggtcagattaaacctcactctaaattcaaagcagaggtttatatcctgaagaaagaagaaggtggtcgtcacactccattccataacaaatatcgtcctcagttctatctgcgtactatggactgtacaggtgaaatcactcttccggaaggaactgaaatggtaatgccgggtgataacgtaaccatcactgtagagttgatctatccggttgcactgaacatcggtcttcgtttcgctatccgcgaaggtggacgtacagtaggtgctggtcagattactgaaattatcgactaa

SEQ ID NO: 3176 - protein, 394 aa, Bacteroides fragilis
MAKEKFERTKPHVNIGTIGHVDHGKTTLTAAITTVLAKKGLSELRSFDSIDNAPEEKERGITINTSHVEYETANRHYAHVDCPGHADYVKNMVTGAAQMDGAIIVVAATDGPMPQTREHILLARQVNVPKLVVFMNKCDMVEDAEMLELVEMEMRELLSFYDFDGDNTPIIQGSALGALNGVEKWEDKVMELMEAVDTWIPLPPRDVDKPFLMPVEDVFSITGRGTVATGRIETGVIHVGDEIEILGLGEDKKSVVTGVEMFRKLLDQGEAGDNVGLLLRGVDKNEIKRGMVLCKPGQIKPHSKFKAEVYILKKEEGGRHTPFHNKYRPQFYLRTMDCTGEITLPEGTEMVMPGDNVTITVELIYPVALNIGLRFAIREGGRTVGAGQITEIID

SEQ ID NO: 3177 - DNA, 1188 bp, Bacillus stearothermophilus
  CDS (1)..(1188): transl_table=11
atggctaaagcgaaatttgagcgcacgaaaccgcacgtcaacattggcacgatcggccacgttgaccatgggaaaacgacgctgacagctgcgatcacgacggttcttgcgaaacaagggaaagccgaagcaaaagcgtacgaccaaatcgacgcagctccggaagagcgtgaacgcgggatcacgatttcgacggcccacgtcgagtatgaaacagaggctcgtcactacgcgcacgttgactgcccgggccacgctgactacgtcaaaaacatgatcacgggcgcagcgcaaatggacggtgcaatccttgttgtatcggcagctgacggtccgatgccgcaaacgcgcgaacacattcttctctcccgccaagtcggcgttccgtacatcgttgttttcttgaacaaatgcgacatggtggacgacgaagaattgcttgaactcgttgaaatggaagttcgcgaccttctctctgaatacgacttcccgggcgatgaagtgccggttatcaaaggttcggcattaaaagcgctcgaaggcgatccgaaatgggaagaaaaaatcattgaattgatgaacgcggttgatgagtacatcccgactccgcaacgtgaagttgacaaaccgttcatgatgccgattgaggacgttttctcgatcacaggccgtggtacggttgcgacgggccgtgttgagcgtggtacgctcaaagtcggtgacccggttgaaatcatcggtctttctgacgagccgaaagccacgacggttacgggtgttgaaatgttccgtaaacttcttgaccaagcagaagctggagacaacatcggtgcgcttctccgcggtgtatcgcgcgacgaagttgagcgtggccaagtattggcaaaaccgggctcaatcacgccgcatacgaaatttaaagcacaagtttacgttctgacgaaagaggaaggcggacgccatactccgttcttctcgaactatcgtccgcaattctacttccgcacaacggacgtaacaggcatcatcacgcttccggaaggcgttgaaatggtcatgcctggcgacaacgttgagatgacggttgagctgatcgcgccgatcgcgatcgaggaaggaacgaaattctcgatccgtgaaggcggccgtacagttggcgctggttccgtatcggaaatcatcgagtaa

SEQ ID NO: 3178 - protein, 395 aa, Bacillus stearothermophilus
MAKAKFERTKPHVNIGTIGHVDHGKTTLTAAITTVLAKQGKAEAKAYDQIDAAPEERERGITISTAHVEYETEARHYAHVDCPGHADYVKNMITGAAQMDGAILVVSAADGPMPQTREHILLSRQVGVPYIVVFLNKCDMVDDEELLELVEMEVRDLLSEYDFPGDEVPVIKGSALKALEGDPKWEEKIIELMNAVDEYIPTPQREVDKPFMMPIEDVFSITGRGTVATGRVERGTLKVGDPVEIIGLSDEPKATTVTGVEMFRKLLDQAEAGDNIGALLRGVSRDEVERGQVLAKPGSITPHTKFKAQVYVLTKEEGGRHTPFFSNYRPQFYFRTTDVTGIITLPEGVEMVMPGDNVEMTVELIAPIAIEEGTKFSIREGGRTVGAGSVSEIIE

SEQ ID NO: 3179 - DNA, 1191 bp, Bacillus subtilis
  CDS (1)..(1191): transl_table=11
atggctaaagaaaaattcgaccgttccaaatcacatgccaatattggtacaattggacacgttgaccatggtaaaacaactttaactgctgctatcacaacagtacttcataagaaatctggtaaaggtacagctatggcgtacgatcaaattgatggtgctccagaagaacgcgagcgcggtatcacaatctctactgcacacgttgagtacgaaactgaaactcgtcactatgcacacgttgactgcccaggacacgctgactatgttaaaaacatgatcactggtgctgcgcaaatggacggagctatccttgtagtatctgctgctgatggcccaatgccacaaactcgtgagcacatccttctttctaaaaacgttggtgtaccatacatcgttgtattcttaaacaaatgcgacatggtagacgacgaagagcttcttgaactagttgaaatggaagttcgcgatcttcttagcgaatacgacttccctggtgatgatgtaccagttgttaaaggttctgctcttaaagctcttgaaggagacgctgagtgggaagctaaaatcttcgaacttatggatgcggttgatgagtacatcccaactccagaacgcgacactgaaaaaccattcatgatgccagttgaggacgtattctcaatcactggtcgtggtacagttgctactggccgtgtagaacgcggacaagttaaagtcggtgacgaagttgaaatcatcggtcttcaagaagagaacaagaaaacaactgttacaggtgttgaaatgttccgtaagcttcttgattacgctgaagctggtgacaacattggtgcccttcttcgcggtgtatctcgtgaagaaatccaacgtggtcaagtacttgctaaaccaggtacaatcactccacacagcaaattcaaagctgaagtttacgttctttctaaagaagagggtggacgtcatactccattcttctctaactaccgtcctcagttctacttccgtacaactgacgtaactggtatcatccatcttccagaaggcgtagaaatggttatgcctggagataacactgaaatgaacgttgaacttatttctacaatcgctatcgaagaaggaactcgtttctctattcgtgaaggcggacgtactgttggttcaggcgttgtttctacaatcactgagtaa

SEQ ID NO: 3180 - protein, 396 aa, Bacillus subtilis
MAKEKFDRSKSHANIGTIGHVDHGKTTLTAAITTVLHKKSGKGTAMAYDQIDGAPEERERGITISTAHVEYETETRHYAHVDCPGHADYVKNMITGAAQMDGAILVVSAADGPMPQTREHILLSKNVGVPYIVVFLNKCDMVDDEELLELVEMEVRDLLSEYDFPGDDVPVVKGSALKALEGDAEWEAKIFELMDAVDEYIPTPERDTEKPFMMPVEDVFSITGRGTVATGRVERGQVKVGDEVEIIGLQEENKKTTVTGVEMFRKLLDYAEAGDNIGALLRGVSREEIQRGQVLAKPGTITPHSKFKAEVYVLSKEEGGRHTPFFSNYRPQFYFRTTDVTGIIHLPEGVEMVMPGDNTEMNVELISTIAIEEGTRFSIREGGRTVGSGVVSTITE

SEQ ID NO: 3181 - DNA, 1194 bp, Brevibacterium linens
  CDS (1)..(1194): transl_table=11
gtggcaaaggctagtttcgaacggactaagccgcacgtcaacatcggcaccatcggccacgttgaccacggaaagaccaccctgaccgctgcgatcaccaaggtcctggcggatcagtacccggatctcaatgaggctcgcgccttcgaccaggtcgacaacgcacctgaggagaaggagcgcggcatcaccatcaacgtctcgcacgttgagtaccagacggagaagcgtcactacgctcacgtcgatgccccgggtcacgccgactacgtgaagaacatgatcaccggtgccgctcagatggacggtgcgatcctcgtcgtcgccgctaccgacggaccgatgccccagacccgtgagcacgtgctgctcgcgcgtcaggtcggcgttccctacatcgtcgtggctctgaacaagtccgacatggtcgatgacgaggagctcctcgagctcgtcgaattcgaggtccgcgacctgctctcgagccaggacttcgacggagacaacgctccggtcattccggtgtccgctctcaaggcgctggaaggcgacgagaagtgggtcaagagcgttcaggatctcatggctgccgtcgatgacaacgttccggagccggagcgcgatgtcgacaagccgttcctcatgcccgtcgaggacgtcttcacgatcaccggtcgtggaaccgtcgtcaccggtcgtgtcgagcgcggcgtgctcctgcctaacgacgaaatcgaaatcgtcggcatcaaggagaagtcgtccaagacgactgtcaccgctatcgagatgttccgcaagaccctgccggatgcccgtgcaggtgagaacgtcggtctgctcctccgcggcaccaagcgcgaggatgttgagcgcggtcaggtcatcgtgaagccgggttcgatcaccccgcacaccaagttcgaggctcaggtctacatcctgagcaaggacgagggcggacgtcacaacccgttctactcgaactaccgtccgcagttctacttccggaccacggacgtcaccggtgtcatcacgctgcccgagggcaccgagatggtcatgcccggcgacaacaccgatatgtcggtcgagctcatccagccgatcgctatggaggaccgcctccgcttcgcaatccgcgaaggtggccgcaccgtcggcgccggtcgcgtcaccaagatcaccgcctga

SEQ ID NO: 3182 - protein, 397 aa, Brevibacterium linens [sequence omitted]

SEQ ID NO: 3183 - DNA, 1185 bp, Buchnera aphidicola subsp
  CDS (1)..(1185): transl_table=11
atgtcaaaagaaaaatttcaacgtgtaaaacctcatataaatgtaggtactataggtcatgttgatcatggaaaaacaacattaactgcggcaattacaactgtgttatcaaaaaaatatggaggttctgctcgtgcttttgatcaaatagataacgctccagaagaaaaagcaagaggtattactattaatacctctcatgtagaatatgatactgaactcaggcattatgcacatgtagattgtccaggtcatgctgattatataaaaaatatgatcaccggagcagctcagatggatggtgcaattttagtagttgccgctactgatggacccatgcctcaaactcgagaacatattttacttggtagacaagtgggagtaccttatattattgtttttttaaataaatgtgatatggtagacgatgaagaattactagaattagtagaaatggaagttcgtgatttattaacacaatatgattttcctggagatgatactcctattattcgcggttctgctcttaaagccttagaaggtgatgcagattgggaatcaaaaatacttgatttatctaaatttctagatacttatataccagaaccaaaacgagctattgatcaaccttttttattacctatagaagatgttttttctatatcaggaagaggaactgttgttactggaagggttgaaagaggtattgtaaaagttggagaagaagtagaaattgtaggtattaaaaaaacaactaaaactacctgtacaggtgttgaaatgtttaggaaattattggacgaaggtcgtgctggagaaaatgtaggcgttttacttcgcggtacaaaacgtgatgaaattgaaagaggtcaggttttagcaaaaccaggtagtattcatccacatacaacatttgagtctgaagtttatgttttatccaaagaagaaggtgggcgtcatactccattttttaagggatatcgtcctcagttttattttcgaactactgatgtaacaggttctattgagctacctgaaggagtagaaatggttatgccaggagacaatattaaaatgactgttactttaattcatcctattgctatggcagatggtttgcgatttgctatacgagaaggtggtcgtactgttggagcaggtgttgtttctaaagttttagtttaa

SEQ ID NO: 3184 - protein, 394 aa, Buchnera aphidicola subsp
MSKEKFQRVKPHINVGTIGHVDHGKTTLTAAITTVLSKKYGGSARAFDQIDNAPEEKARGITINTSHVEYDTELRHYAHVDCPGHADYIKNMITGAAQMDGAILVVAATDGPMPQTREHILLGRQVGVPYIIVFLNKCDMVDDEELLELVEMEVRDLLTQYDFPGDDTPIIRGSALKALEGDADWESKILDLSKFLDTYIPEPKRAIDQPFLLPIEDVFSISGRGTVVTGRVERGIVKVGEEVEIVGIKKTTKTTCTGVEMFRKLLDEGRAGENVGVLLRGTKRDEIERGQVLAKPGSIHPHTTFESEVYVLSKEEGGRHTPFFKGYRPQFYFRTTDVTGSIELPEGVEMVMPGDNIKMTVTLIHPIAMADGLRFAIREGGRTVGAGVVSKVLV

SEQ ID NO: 3185 - DNA, 1185 bp, Buchnera aphidicola subsp
  CDS (1)..(1185): transl_table=11
gtgtctaaagaaaaatttaaacgttctaagcctcatatcaatgttggaacaattggtcacgttgatcatggtaaaactactttaacatcagcaattactactgtattatctaaaaagtatggaggtgctgcttgtgcatttgatcaaatagataatgctccagaagaaaaagctagaggtattacaattaatacgtcacatgttgagtatgatacttctataagacattatgcgcatgttgattgtccaggacatgcagattatattaagaacatgattactggtgctgcacagatggatggagctattttggtagttgctgctactgatggcccgatgcctcaaactcgtgagcatattttgttagggcgtcaagtaggtgttccttatattgtagttttcttaaataagtgtgacatggttgatgatgaagaattattagaattagtggaaatggaagtacgtgatttattaacgcaatatgattttcctggtgatagcactcctattgtcagaggatctgccttaaaagcgttagagggtgatcctcaatgggaacaaaaaattttagatttgtccaattatttagatacatatattcctgagcctaaacgatctattgatcaaccttttttattacctattgaagatgtattttctatatcaggacgtggaactgtagttactggacgtattgaaagaggtattataaaagtaggtgaggaagtagaaatagttggtataaaatctactgttaagactatatgcactggtgtagaaatgtttagaaaattattagatgaagggcgagcaggagaaaatgttggtgttttgttaaggggtacgaaaagagatgatattgagcgtggtcaagttttagcgaaacctggaacgattaccccacatataaaatttgaatctgaagtatatgtgttgtctaaagaagaaggcggtcgccatacgccgttttttaaaggttatcgtcctcagttttattttcgaactacagatgtaaccggatcggttgaattaccagaggatatggagatggttatgcctggtgataatgttaaaatggtaattactttaattcatcctattgctatgtctgatggattgagatttgctattcgggaaggcggaaaaactgtaggagctggaattgtagttaaagttctgcagtaa

SEQ ID NO: 3186 - protein, 394 aa, Buchnera aphidicola subsp
MSKEKFKRSKPHINVGTIGHVDHGKTTLTSAITTVLSKKYGGAACAFDQIDNAPEEKARGITINTSHVEYDTSIRHYAHVDCPGHADYIKNMITGAAQMDGAILVVAATDGPMPQTREHILLGRQVGVPYIVVFLNKCDMVDDEELLELVEMEVRDLLTQYDFPGDSTPIVRGSALKALEGDPQWEQKILDLSNYLDTYIPEPKRSIDQPFLLPIEDVFSISGRGTVVTGRIERGIIKVGEEVEIVGIKSTVKTICTGVEMFRKLLDEGRAGENVGVLLRGTKRDDIERGQVLAKPGTITPHIKFESEVYVLSKEEGGRHTPFFKGYRPQFYFRTTDVTGSVELPEDMEMVMPGDNVKMVITLIHPIAMSDGLRFAIREGGKTVGAGIVVKVLQ

SEQ ID NO: 3187 - DNA, 1200 bp, Campylobacter jejuni
  CDS (1)..(1200): transl_table=11
atggctaaagaaaaattttcacgtaataagccacacgtaaatattggtactattggtcacgttgaccatggtaaaactactttaacagctgctatttctgctgttctttctagaagaggtttggcagagcttaaagattatgataatatcgataatgctccagaagaaaaagagcgtggtattactattgctacttctcatattgaatatgaaacagacaatcgtcactatgcacacgttgactgcccaggtcacgcagattatgttaaaaacatgattacaggtgctgcacaaatggatggagcgatcttggttgtttctgctgcagatggccctatgccacaaactagagagcacattcttctttctcgtcaagtaggtgttccatatattgttgtttttatgaataaagcagatatggttgatgatgctgaacttctagagttagttgaaatggaaattagagaattattaagctcttatgatttcccaggcgatgatacacctattatttctggttctgctttaaaagctcttgaagaagctaaagctggacaagatggtgaatggtcagcaaaaattatggatcttatggctgcagttgatagctatattccaactccaactcgtgatactgaaaaagacttcttgatgccaattgaagacgttttctcaatttcaggtcgtggtactgttgttacaggtagaattgaaaaaggtgttgtaaaagtaggtgatactatcgaaatcgttggtattaaagatactcaaacaacaactgtaacaggtgttgaaatgttcagaaaagaaatggatcaaggcgaagcaggagataacgtaggtgttcttcttcgtggtactaaaaaagaagaagttatccgtggtatggttcttgctaaaccaaaatcaattactccacacactgacttcgaagctgaagtttatatcttaaataaagatgaaggtggtagacatactccattctttaacaactatagaccacagttttatgtaagaacaactgatgttacaggttcgattaaattagctgatggtgttgaaatggttatgccaggtgaaaatgtgagaattactgtaagcttgatcgctccagtagcacttgaagaaggaactcgttttgctattcgtgaaggtggtaaaactgttggttcaggtgttgtttctaaaattattaaataa

SEQ ID NO: 3188 - protein, 399 aa, Campylobacter jejuni
MAKEKFSRNKPHVNIGTIGHVDHGKTTLTAAISAVLSRRGLAELKDYDNIDNAPEEKERGITIATSHIEYETDNRHYAHVDCPGHADYVKNMITGAAQMDGAILVVSAADGPMPQTREHILLSRQVGVPYIVVFMNKADMVDDAELLELVEMEIRELLSSYDFPGDDTPIISGSALKALEEAKAGQDGEWSAKIMDLMAAVDSYIPTPTRDTEKDFLMPIEDVFSISGRGTVVTGRIEKGVVKVGDTIEIVGIKDTQTTTVTGVEMFRKEMDQGEAGDNVGVLLRGTKKEEVIRGMVLAKPKSITPHTDFEAEVYILNKDEGGRHTPFFNNYRPQFYVRTTDVTGSIKLADGVEMVMPGENVRITVSLIAPVALEEGTRFAIREGGKTVGSGVVSKIIK

SEQ ID NO: 3189 - DNA, 1227 bp, Chara connivens
  CDS (1)..(1227)
atggcacaagaagtctttcaacgtactaaacctcatgtaaatattggtactataggacatgtagatcatgggaaaactacattaacagctgcaattacaatgacattagcagttaacagtacatgtactcctaagaaatatgatgaaattgatgctgctccagaagaaagagcacgaggtattacaattaatacagctcatgttgaatatgaaacagctttacgtcattatgctcatgtagattgtcctggacatgcagattatatcaaaaatatgataacaggcgctgctcaaatggatggtgctattttagtagtatctgctgctgatggacctatgccccaaactaaagagcacattttattagctaaacaagtaggtgtacctagtattgtagtttttctaaataaagaagaccaagtcgatgatgaagagatacttcaattggtagacttagaagttcgtgagtctctcataaattacgaatttcctggagacaaagtaccagttgtttcaggatctgctttaatggctttacaggctttaaccgaaaaaccgaatacttcaagaggcgaaaataagtgggtagataaaatctatgagttaatggatgcggttgactcttatattcctacccctaagagagatattgaaaaacctttcctaatgccaattgaagacgtattttcaattcaaggccgtggtacagttgccacaggtcgaatagaacgtggtatcttaaaattaggagatatcgttgaattaattggcttaaacgaaaaaattcgtagtactgttgttacaggactagaaatgtttagaagacttttagagcaaggttttgctggagaaaatattggtgtacttttaagaggtattgagaaaaaagatatagaaagaggaatggtaatagctcaaccaggcacaattgaaccacatactcgttttgaagcacaagtttatatacttcgcaaagaagaaggaggtcgtcattctcctttttttgcaggttatcgtcctcaattctttgttcgaactgcagatgtaacaggtgtaattgaagcttttgaatatgacaatggtgataaaacaagaatggttatgccaggagatcgagttaaaatgattgtaaatttaatttgtcctatagctatcgaaaagaaaatgagatttgctattcgcgaaggtggacgtactataggtgctggagttgtttacaaatattag

SEQ ID NO: 3190 - protein, 408 aa, Chara connivens
MAQEVFQRTKPHVNIGTIGHVDHGKTTLTAAITMTLAVNSTCTPKKYDEIDAAPEERARGITINTAHVEYETALRHYAHVDCPGHADYIKNMITGAAQMDGAILVVSAADGPMPQTKEHILLAKQVGVPSIVVFLNKEDQVDDEEILQLVDLEVRESLINYEFPGDKVPVVSGSALMALQALTEKPNTSRGENKWVDKIYELMDAVDSYIPTPKRDIEKPFLMPIEDVFSIQGRGTVATGRIERGILKLGDIVELIGLNEKIRSTVVTGLEMFRRLLEQGFAGENIGVLLRGIEKKDIERGMVIAQPGTIEPHTRFEAQVYILRKEEGGRHSPFFAGYRPQFFVRTADVTGVIEAFEYDNGDKTRMVMPGDRVKMIVNLICPIAIEKKMRFAIREGGRTIGAGVVYKY

SEQ ID NO: 3191 - DNA, 1260 bp, Chara vulgaris
  CDS (1)..(1260): transl_table=11
atggcacaagaagtctttcaacgtactaaacctcatgtaaatattggtactataggacatgtagatcatggaaaaactacattaacagctgcaattacaatgacattagcagttaacagtacatgtactcctaagaaatatgatgaaattgatgctgctccagaagaaagagcacgaggtattacaattaatacagctcatgtggaatatgaaacagcttcacgtcattatgctcatgtagattgtcctggacatgcagattatataaaaaatatgataacaggcgctgctcaaatggatggtgcgattttagtagtatctgctgctgatggacctatgccccaaactaaagagcacattttattagctaaacaagtaggtgtacctagtattgtagtttttttaaataaagaagaccaagtcgatgatgaagagatacttcaattggtagacttagaagttcgtgagtctctgatcaattacgaatttcctggagacaaagtaccagttgttgcaggatctgctttaatggctttacaggctttaaccgaaaaaccgaatactttaagaggcgaaaataagtgggtagataaaatctatgagttaatggatgcggttgattcttatattcctacccctaaaagagatattgaaaagccttttctaatgccaattgaagacgtattttccattcaaggccgtggtacagttgccacaggtcgaatagaacgtggtatcttaaaattaggagatatcgttgaattaattggcttaaacgaaaaaattcgtagtactgttgttacaggactggaaatgtttagaagacttttagagcaaggttttgctggagaaaatattggtgtacttttaagaggtattgagaaaaaagatatagaaagaggaatggtaatagctcaaccagggacaattgaaccacatacccgttttgaagcacaagtttatatacttcgcaaagaagaaggaggtcgtcattctcctttttttgcagggtatcgtcctcaattctttgttcgaactgcagatgtaactggtgtaattgaagcttttgaatatgacaatggtgataaaacaagaatggttatgccaggagatcgagttaaaatgattgtgaatttaatttgtcctatagctatcgaaaagaaaatgagatttgctattcgtgaaggtggacgtactataggtgctggagttgttttacaaatattagattcgactcaactcaaatcaaaaaataaataa

SEQ ID NO: 3192 - protein, 419 aa, Chara vulgaris
MAQEVFQRTKPHVNIGTIGHVDHGKTTLTAAITMTLAVNSTCTPKKYDEIDAAPEERARGITINTAHVEYETASRHYAHVDCPGHADYIKNMITGAAQMDGAILVVSAADGPMPQTKEHILLAKQVGVPSIVVFLNKEDQVDDEEILQLVDLEVRESLINYEFPGDKVPVVAGSALMALQALTEKPNTLRGENKWVDKIYELMDAVDSYIPTPKRDIEKPFLMPIEDVFSIQGRGTVATGRIERGILKLGDIVELIGLNEKIRSTVVTGLEMFRRLLEQGFAGENIGVLLRGIEKKDIERGMVIAQPGTIEPHTRFEAQVYILRKEEGGRHSPFFAGYRPQFFVRTADVTGVIEAFEYDNGDKTRMVMPGDRVKMIVNLICPIAIEKKMRFAIREGGRTIGAGVVLQILDSTQLKSKNK

SEQ ID NO: 3193 - DNA, 1257 bp, Chlamydomonas reinhardtii
  CDS (1)..(1257): transl_table=11
atgtcacgtgctaagtttgaacgtaaaaaaccacacgtaaatattggtactattggtcacgttgaccacggtaaaacaacactaacagcagctattacaatgacattagctgcagctggtggttcagttggtaaaaaatatgatgaaattgactcagctccagaagaaaaagcacgtggtattactattaacacagcacacgtagaatacgaaactgaaaaacgtcactatgctcacgtagactgtccaggtcacgctgactacgttaaaaacatgatcacaggtgctgcacaaatggatggtgctattttagtagtatcaggtgctgacggtcctatgccacaaacaaaagaacacattctattagctaaacaagtaggtgtaccaaacgttgtagtattcttaaacaaagaagaccaagtagatgataaagaacttcttgaattagttgaattagaagtacgtgaaactttagataaatatgaattcccaggtgatgaaattccagtagttcctggttctgcattattagctttagaagctttaattgaaaatccaaaaacacaacgtggtgaaaacaaatgggttgacaaaatttaccaattaatggataacgttgacagctacatcccaactccacaacgtgaaactgataaaccattcttattagctgttgaagacgttttatcaattacaggtcgtggtactgttgctacaggtcgtgtagaacgtggtgcattaagaattagtgataacgttgaaatcgtaggtttaagaccaacacaaacagctgttgttactggtttagaaatgttcaaaaaaacattagatgaaactttagctggtgataacgtaggtgttcttcttcgtggtgtacagaaaaaagacattgaacgtggtatggttattgctaaaccaggtacaattactccgcacactaaatttgaagcacaagtatacgttttaacaaaagaagaaggtggtcgtcactctgctttcatgattggttaccaaccacaattctatgttcgtacaacagatgtaacaggtaaagtagtaggttttaaccacattcaaatgcgtaacccttcatcagtagctgaagaacattcaaacaaaatggctatgcctggtgaccgtattagtatgactgtagaactgatcaacccaattgctattgaaaaaggtatgcgtttcgctattcgtgaaggtggccgtactgtaggtgctggtgttgtaactaatattgttcaataa

SEQ ID NO: 3194 - protein, 418 aa, Chlamydomonas reinhardtii
MSRAKFERKKPHVNIGTIGHVDHGKTTLTAAITMTLAAAGGSVGKKYDEIDSAPEEKARGITINTAHVEYETEKRHYAHVDCPGHADYVKNMITGAAQMDGAILVVSGADGPMPQTKEHILLAKQVGVPNVVVFLNKEDQVDDKELLELVELEVRETLDKYEFPGDEIPVVPGSALLALEALIENPKTQRGENKWVDKIYQLMDNVDSYIPTPQRETDKPFLLAVEDVLSITGRGTVATGRVERGALRISDNVEIVGLRPTQTAVVTGLEMFKKTLDETLAGDNVGVLLRGVQKKDIERGMVIAKPGTITPHTKFEAQVYVLTKEEGGRHSAFMIGYQPQFYVRTTDVTGKVVGFNHIQMRNPSSVAEEHSNKMAMPGDRISMTVELINPIAIEKGMRFAIREGGRTVGAGVVTNIVQ

SEQ ID NO: 3195 - DNA, 1182 bp, Chlorobium tepidum
  CDS (1)..(1182): transl_table=11
atggctaaagagtcatacaagagggataaacctcacgtaaatattggtacaatcggtcacgttgaccacggtaaaaccactcttaccgctgcaatcaccagcgttctcgccaagcagggcatggcaactttacgtgagttcagtgacatcgacaaagctcccgaagagagagagcgcggtatcaccatctcgacggcacacgtcgagtatcagaccgcaaagcgtcactacgctcacattgattgccctggtcacgctgactatatcaaaaacatgatcaccggtgcggcccagatggacggcgctatcctcgtcgttgccggtaccgacggcccgatgccccagacccgtgagcacatcctgcttgcccgtcaggtgaacgttcctgcgctggtcgtcttcctgaacaaggttgacatcgctgatccggaacttcttgagctggtcgagatggagcttcgtgagcttcttaccgaatacggcttccctggcgacgatattccgatcatcaaaggttcggcactcaaggcgctcgagggggatccggaggctgagaagcagattatggaactcatggacgccgttgacagctacattccgcagcctgtccgtgacattgacaagccgttcctaatgccggtcgaagacgtgttctccatctctggtcgcggtaccgtcggtactggtcgtatcgagaggggccgcatcaaggttggcgacgaagtcgagatcgtcggtatcaagccgaccgcaaaatcggttgttaccggtattgaaatgttccagaagaccctcgacgaaggtcaggcaggcgataacgcaggtctgcttctccgtggtgttgacaagaatgcgctcgagcgcggcatggttatcgccaagccgggttcgattaccccacacaccaagttcaaggctgaggtttacatcctgaagaaggaagagggtggccgtcacactccgttcttcaacggctatcgtccgcagttttacttcagaaccaccgacgttaccggttcggtgacccttcctgagggcgtcgaaatggttatgcctggtgacaacctctccatcgatgtcgagctgatcgctcctatcgccatggaagagagcctcaggttcgcaatccgcgaaggcggccgtacggttggtgccggttcggtaaccaaaatcgtcgagtga

SEQ ID NO: 3196 - protein, 393 aa, Chlorobium tepidum
MAKESYKRDKPHVNIGTIGHVDHGKTTLTAAITSVLAKQGMATLREFSDIDKAPEERERGITISTAHVEYQTAKRHYAHIDCPGHADYIKNMITGAAQMDGAILVVAGTDGPMPQTREHILLARQVNVPALVVFLNKVDIADPELLELVEMELRELLTEYGFPGDDIPIIKGSALKALEGDPEAEKQIMELMDAVDSYIPQPVRDIDKPFLMPVEDVFSISGRGTVGTGRIERGRIKVGDEVEIVGIKPTAKSVVTGIEMFQKTLDEGQAGDNAGLLLRGVDKNALERGMVIAKPGSITPHTKFKAEVYILKKEEGGRHTPFFNGYRPQFYFRTTDVTGSVTLPEGVEMVMPGDNLSIDVELIAPIAMEESLRFAIREGGRTVGAGSVTKIVE

SEQ ID NO: 3197 - DNA, 1230 bp, Chlorella vulgaris
  CDS (1)..(1230): transl_table=11
atggcacgtgaaaaatttcaacgtaaaaaaccacatgtaaacattggaactattggacatgtagatcatgggaaaacaacgctaactgcagcaattaccatggctctcgctgcacgcgggggtgcgaaggggcgtaaatacgatgatattgattctgctccagaagaaaaagcacgcggtattaccattaatactgctcacgttgagtacgaaactgaaaaccgtcattatgcccatgtagattgtccaggtcacgcggattatgtaaaaaacatgattacaggtgctgcacaaatggatggtggaattcttgttgtatctggtgcggatgggcctatgccacaaacaaaagaacatctcttattagcaaaacaagttggtgttccaaatatcgtggtatttttaaataaagaagatcaagttgatgatgcagaattacttgaactgttagaactagaaattcgtgaaacattagataaatatgaattccctggtgatgaaattccaattatttctggttcagcgcttttagctttagaagcattaactgaaaacccagaaacaaaacctggtgataacaaatgggtagataaaatttataatctgatggatcaagttgattcatatatcccaacacccgaacgtgaaactgagaaaccatttttaatggctgttgaagacgttttttcaatcactggtcgtggtactgtagctacagggcgtgtagaacgtggatgtgtaaaaattggcgatactgtggaacttgttggactacgtgatactaaaacaactactgttacaggtttagaaatgttccaaaaaacgttagacgaaagtgtagctggagacaatgtaggtattttattacgtggggttcagaaaattgatattgaacgtggtatggttctagcaaaaccaggaagtattttaccacacaccaaatttgaagcacaagtttacgtgttaaataaagaagaaggtggccgtcatactccttttttccctggatatcgtccacagttttatgttcgcacaacagatgttacaggaaaaattgaatctttccgtgcggatgataacactgcaactcaaatggtaatgcctggagatcgtattaaaatgattgtagaacttattcaacccattgcgattgagaaaggaatgcgatttgcgattcgcgaaggtggccgtacagtaggtgcaggtgttgtatctacaattgtcatttaa

SEQ ID NO: 3198 - protein, 409 aa, Chlorella vulgaris
MAREKFQRKKPHVNIGTIGHVDHGKTTLTAAITMALAARGGAKGRKYDDIDSAPEEKARGITINTAHVEYETENRHYAHVDCPGHADYVKNMITGAAQMDGGILVVSGADGPMPQTKEHLLLAKQVGVPNIVVFLNKEDQVDDAELLELLELEIRETLDKYEFPGDEIPIISGSALLALEALTENPETKPGDNKWVDKIYNLMDQVDSYIPTPERETEKPFLMAVEDVFSITGRGTVATGRVERGCVKIGDTVELVGLRDTKTTTVTGLEMFQKTLDESVAGDNVGILLRGVQKIDIERGMVLAKPGSILPHTKFEAQVYVLNKEEGGRHTPFFPGYRPQFYVRTTDVTGKIESFRADDNTATQMVMPGDRIKMIVELIQPIAIEKGMRFAIREGGRTVGAGVVSTIVI

SEQ ID NO: 3199 - DNA, 1194 bp, Clostridium perfringens
  CDS (1)..(1194): transl_table=11
atgtcaaaagcaaaatttgaaagaagcaaaccacacgttaacattggaacaatcggtcacgtagaccacggtaaaacaactttaacagcagctataacaacagttttagcacaagctggtggagcagaagcattcaaatatgatgaaatagataaagctccagaagaaaaagaaagaggaatcacaatcaacacagcacacgttgagtacgaaacagctaacagacactacgctcacgttgactgtccaggacatgctgactacgttaaaaacatgatcactggagcagctcaaatggacggagctatattagtttgttcagcagctgatggtccaatgcctcaaacaagagagcacatcttattatcatcaagagttggagttgaccacatcgtagtattcttaaacaaagcagatatggttgacgacgaagaattattagaattagttgaaatggaagttagagagttattaagcgagtacaacttcccaggagacgacattccagtaatcaaaggatcagctttagtagcattagaaaacccaactgacgaagctgcaacagcttgtatcagagagttaatggatgctgtagatagctacatcccaacaccagaaagagcaacagataagccattcttaatgccagtagaggacgtattcacaatcactggtagaggaacagttgcaacaggaagagttgaaagaggagttctacatgtaggagacgaagtagaagtaatcggattaactgaagaaagaagaaaaacagttgtaacaggaatcgaaatgttcagaaagttattagatgaagcacaagctggagataacatcggagcattattaagaggtatccaaagaactgatatcgaaagaggtcaagttttagctcaagttggaacaatcaacccacacaaaaaattcgtaggtcaagtatacgtacttaaaaaagaagaaggtggaagacacactccattcttcgatggatacagaccacaattctacttcagaacaacagacgttacaggatcaatcaaattaccagaaggaatggaaatggttatgcctggagaccacatcgacatggaagttgaattaatcacagaaatcgctatggatgaaggattaagattcgctatcagagaaggtggaagaactgtaggttcaggagttgttacttcaataatcgagtaa

SEQ ID NO: 3200 - protein, 397 aa, Clostridium perfringens
MSKAKFERSKPHVNIGTIGHVDHGKTTLTAAITTVLAQAGGAEAFKYDEIDKAPEEKERGITINTAHVEYETANRHYAHVDCPGHADYVKNMITGAAQMDGAILVCSAADGPMPQTREHILLSSRVGVDHIVVFLNKADMVDDEELLELVEMEVRELLSEYNFPGDDIPVIKGSALVALENPTDEAATACIRELMDAVDSYIPTPERATDKPFLMPVEDVFTITGRGTVATGRVERGVLHVGDEVEVIGLTEERRKTVVTGIEMFRKLLDEAQAGDNIGALLRGIQRTDIERGQVLAQVGTINPHKKFVGQVYVLKKEEGGRHTPFFDGYRPQFYFRTTDVTGSIKLPEGMEMVMPGDHIDMEVELITEIAMDEGLRFAIREGGRTVGSGVVTSIIE

SEQ ID NO: 3201 - DNA, 1233 bp, Codium fragile
  CDS (1)..(1233)
atgattcgagaaaaatttgaacgtattaaaccacatttaaatattggaacaattgggcatgttgatcatggtaaaacgactttaacggcggcaattactatggctttagcagtcaaaggttatacaaaagctaaaaattatatggatattgattcagcacctgaagaaaaagctcgcggtattactataaatacagcacatgttgaatatgaaacagatgtacgtcattatgctcatgtagattgtccaggccatgcagattatgtaaagaatatgattactggagctgctcaaatggatggagcaattttagttgtttcaggagcagatggacctatgcctcaaacaaaagaacatattttacttgctaaacaagtgggagtgccagcaattgtagtttttttaaataaagctgatcaagtagatgatgacgaattattagaattagtcgaattagaaattcaagaaactttaactacatatgaatatcctggcgaggaaattcccattattactggttctgccattactgctttagaaagtttaactgcaaaatatgtattgagaattggtaataaatgggttcagaaaatttatgatttaatggaaactgttgatgaatatatccctacaccaaaaagagatacagaaaaaccttttttaatggctattgaaaatgttgtctcaattacaggaagaggtacggttgctacaggtagagttgaacgtggtatgatcgaagttggccagacagttgaacttgtagggttaaaaaatacaaaagaggcaataattacaggtttagaaatgtttcacaaaacattagaaaaaagtgttgctggagataatgtaggtatattattacgtcgcattcaaaaagaagaaatccaacgaggtatggttttagctaaaccctcatccattctaccgcatcaacactttaaagctcaagtttatatattaaagaaagaagaaggaggccgccacacttctttttttgctggttatagacctcaattttatgttcgaacaacagatgtgactggtcatattaaaacatttcaaggcaagatagataatacgcaaattcaaatggtaatgcctggcgatcgtattcaaatggaagtagaattaattcgaccaattgctattgaaactaggatgcgttttgctattcgcgaaggaggaaagacagttggagctggagtcgtaactacgattgttcaagcataa

SEQ ID NO: 3202 - protein, 410 aa, Codium fragile
MIREKFERIKPHLNIGTIGHVDHGKTTLTAAITMALAVKGYTKAKNYMDIDSAPEEKARGITINTAHVEYETDVRHYAHVDCPGHADYVKNMITGAAQMDGAILVVSGADGPMPQTKEHILLAKQVGVPAIVVFLNKADQVDDDELLELVELEIQETLTTYEYPGEEIPIITGSAITALESLTAKYVLRIGNKWVQKIYDLMETVDEYIPTPKRDTEKPFLMAIENVVSITGRGTVATGRVERGMIEVGQTVELVGLKNTKEAIITGLEMFHKTLEKSVAGDNVGILLRRIQKEEIQRGMVLAKPSSILPHQHFKAQVYILKKEEGGRHTSFFAGYRPQFYVRTTDVTGHIKTFQGKIDNTQIQMVMPGDRIQMEVELIRPIAIETRMRFAIREGGKTVGAGVVTTIVQA

SEQ ID NO: 3203 - DNA, 1248 bp, Coleochaete orbicularis
  CDS (1)..(1248)
atggagcgtttactgcatatgacgttccgtaacaaaaaaattcatttgaatgtcggtacaattggtcattttagtcatggtaaaacaactctgacagctgccattactgcagtattagcaggtataggatatacacaaccaaaacaaaatgatgcaatcgattcgacttcagaagagaaagcacgaaatatgagtatatatgtacaccatgtggaatatgaaacagcagctcggcactattcacacttagattgcccaggtcatgtaaattatataaataacatgattacaggtgtttctcaaatggatggcgcaatattagtagtctctgctgtagatggtcctatggcacaaacaaaagaacatattttacttgctaaactgttaggtatatctagtattctagttttcataaataaagaagatgaattagatgatcaagaagttttacctatgttaattcaaaatatgcgtcaaatactgatttattatggttttccaggacatacaagtcctattctgtgtggatctgccttattggctttagaagcaatgaatgaaaatccaaatttcaatcgaggcaaaaacaaatgggttgataaaatttcttctttgattgatcatttggatctatatctacccacacctcgacgtaaattgaataaaccatttttgatgccaattgaaagagttattctaattccaagttttggattagttggaacaggtacaatagaaaagggacatattaatataggagaatctgtagaaatagttggctttaaagatactcagcattcaaaagttattagtttaaaaatgttcaataaaactttagagcaagctatagcaggtgatgatataggaatttttctggaagggactaataaaaacaattttcaaaaagggatggttatagcaaaacctaatactatacaatcctggaatcattttgaagcgcaaatttatattttacgtagagaagaaggaggtaggcgtagtcctttttttcaaggatattgccctcaattttattttcgcactattcaaataactggaagaatggaatcatttgaatatgaaataggtggaaaaacatggatggttatgcctggtgaaaaaattaaagcaataattcaattaatttttccaatagcacttaaaaaaaaaatgcgttttgttattcgtgaaggaggatttacaataggagtaggtataatattagaacttattaaaataaaaaattaa

SEQ ID NO: 3204 - protein, 415 aa, Coleochaete orbicularis
MERLLHMTFRNKKIHLNVGTIGHFSHGKTTLTAAITAVLAGIGYTQPKQNDAIDSTSEEKARNMSIYVHHVEYETAARHYSHLDCPGHVNYINNMITGVSQMDGAILVVSAVDGPMAQTKEHILLAKLLGISSILVFINKEDELDDQEVLPMLIQNMRQILIYYGFPGHTSPILCGSALLALEAMNENPNFNRGKNKWVDKISSLIDHLDLYLPTPRRKLNKPFLMPIERVILIPSFGLVGTGTIEKGHINIGESVEIVGFKDTQHSKVISLKMFNKTLEQAIAGDDIGIFLEGTNKNNFQKGMVIAKPNTIQSWNHFEAQIYILRREEGGRRSPFFQGYCPQFYFRTIQITGRMESFEYEIGGKTWMVMPGEKIKAIIQLIFPIALKKKMRFVIREGGFTIGVGIILELIKIKN

SEQ ID NO: 3205 - DNA, 1191 bp, Corynebacterium glutamicum
  CDS (1)..(1191): transl_table=11
gtggcaaaggcgaagttcgagcgtaccaagccccacgtaaacatcggcaccatcggtcacgttgaccacggtaagaccaccaccaccgcggctatcaccaaggttctggctgacacttaccctgagctcaacgaggctttcgccttcgactccatcgataaggctcctgaggagaaggagcgtggcatcacgatcaacatctcccacgttgagtaccagactgaaaagcgccactacgcacacgttgacgctccaggccacgccgactacatcaagaacatgattaccggcgctgctcagatggacggcgcaatcctcgttgttgctgctaccgacggcccaatgcctcagacccgtgagcacgttcttcttgctcgccaggttggcgttccttacatcctcgttgctcttaacaagtgcgacatggttgaggatgaggaaatcatcgagctcgtcgagatggaagttcgtgaacttcttgctgagcaggactacgacgaagaggctccaattgttcacatctccgctctgaaggctcttgagggcgacgagaagtggggcaagcagatccttgagctcatgcaggcttgcgatgacaacatccctgacccagttcgtgagaccgacaagccattcctcatgcctatcgaggacatcttcaccatcaccggtcgtggcaccgttgttaccggtcgtgttgagcgcggtaccctgaacgtgaacgatgatgttgacatcatcggcatcaaggagaagtccacctccaccaccgttaccggtatcgagatgttccgtaagcttcttgactccgctgaggctggcgacaactgtggtctgcttctccgtggtatcaagcgcgaagatgttgagcgtggccaggttatcgttaagccaggcgcttacacccctcacaccgagttcgagggctctgtctacgttctgtccaaggatgaaggtggccgccacaccccattcttcgacaactaccgtcctcagttctacttccgcaccaccgacgttaccggtgttgtgaagcttccagagggcaccgagatggtcatgcctggcgacaacgtcgacatgtccgtcaccctgatccagcctgtcgctatggacgagggcctgcgtttcgctatccgcgaaggctcccgcaccgttggcgctggtcgtgtcaccaagatcatcaagtaa

SEQ ID NO: 3206 - protein, 396 aa, Corynebacterium glutamicum
MAKAKFERTKPHVNIGTIGHVDHGKTTTTAAITKVLADTYPELNEAFAFDSIDKAPEEKERGITINISHVEYQTEKRHYAHVDAPGHADYIKNMITGAAQMDGAILVVAATDGPMPQTREHVLLARQVGVPYILVALNKCDMVEDEEIIELVEMEVRELLAEQDYDEEAPIVHISALKALEGDEKWGKQILELMQACDDNIPDPVRETDKPFLMPIEDIFTITGRGTVVTGRVERGTLNVNDDVDIIGIKEKSTSTTVTGIEMFRKLLDSAEAGDNCGLLLRGIKREDVERGQVIVKPGAYTPHTEFEGSVYVLSKDEGGRHTPFFDNYRPQFYFRTTDVTGVVKLPEGTEMVMPGDNVDMSVTLIQPVAMDEGLRFAIREGSRTVGAGRVTKIIK

SEQ ID NO: 3207 - DNA, 1218 bp, Deinococcus radiodurans
  CDS (1)..(1218): transl_table=11
atggcaaaaggaacgttcgagcgcaccaagccccacgtgaacatcggcaccatcggtcacgtcgaccacggcaagaccaccctcaccgccgccatcaccttcaccgccgcttcggctgaccccaccatcgaaaccctggcctacgaccagatcgacaaggcccccgaagaaaaggcccgcggcatcaccatcaacaccgcccacgtcgagtaccagaccgaaacccggcactactcgcacgtcgactgccccggccacgccgactacgtcaagaacatgatcaccggcgcggcgcagatggacggcgccatcctcgtcgtcagctccgctgacggccccatgccccagacccgcgagcacatcctcctcgcccgtcaggtcggcgtgccctacatcgtcgtcttcatgaacaaggtcgacatggtagacgacgaagaactgctggaactggtcgaaatggaagtccgcgaactcctcagcaagtacgagttccccggcgacgacctccccgtcgtcaagggcagcgctctgcgcgccctcgaagccctgcagtccaaccccaagatggcccgcggcaccgacaagtgggtcgactacatctgggaactgctcgacgcggtcgattcctacatccccacccccgagcgcgacaccgacaagaccttcctgatgcctgtcgaagacgtgttcaccatcaccggtcgcggcaccgtcgccacgggccgcgtggaacgcggcaccgtcaaggtccaggacgaagtcgaaatcgtcggcctgaccgacacccgcaagaccaccgtgaccggcatcgaaatgcaccgcaagctgctcgactccgggatggctggtgacaacgtcggcgtgctgctgcgcggcgtcgcgcgcgacgacgtggaacgtggtcaggtgctcgccaagcccggcagcatcaagccccacaccaagttcgaagccagcgtgtacgtgctgagcaaggacgaagggggccgtcacagcgcgttcttcggtggctaccgcccccagttctacttccgcacgacggacgtgacgggcgtggtggaactgcaagaaggcgtggaaatggtgatgcccggtgacaacgtgaccttcacggtggaactgatcaagccgatcgccatggaagaaggcctgcgcttcgccatccgcgaagggggccgcaccgtcggcgccggcgtcgtctccaaggttctggagtaa

SEQ ID NO: 3208 - protein, 405 aa, Deinococcus radiodurans
MAKGTFERTKPHVNIGTIGHVDHGKTTLTAAITFTAASADPTIETLAYDQIDKAPEEKARGITINTAHVEYQTETRHYSHVDCPGHADYVKNMITGAAQMDGAILVVSSADGPMPQTREHILLARQVGVPYIVVFMNKVDMVDDEELLELVEMEVRELLSKYEFPGDDLPVVKGSALRALEALQSNPKMARGTDKWVDYIWELLDAVDSYIPTPERDTDKTFLMPVEDVFTITGRGTVATGRVERGTVKVQDEVEIVGLTDTRKTTVTGIEMHRKLLDSGMAGDNVGVLLRGVARDDVERGQVLAKPGSIKPHTKFEASVYVLSKDEGGRHSAFFGGYRPQFYFRTTDVTGVVELQEGVEMVMPGDNVTFTVELIKPIAMEEGLRFAIREGGRTVGAGVVSKVLE

SEQ ID NO: 3209 - DNA, 1200 bp, Fervidobacterium islandicum
  CDS (1)..(1200): transl_table=11
atggcaaaggtaacatttgtacgaaccaaacctcacatgaacgttggtacgatcggacagatcgaccacggtaagacaacacttacagcagctattacaaagtactgttcgttcttcggatgggcagactacacaccatacgaaatgattgacaaagcaccggaagaaagagcaagaggtatcaccatcaacatcacacacgttgaataccagacagaaaagagacactacgcacacatcgactgtccaggtcacgctgactacattaagaacatgatcactggtgcagctcagatggacggtgccatccttgtacttgctgcaacagatggtccaatgccacaaacaagggaacacgttcttcttgcaagacaggttaacgttccagcaatgatagttttcattaacaaagttgatatggttgacccagaacttgttgatcttgttgaaatggaagtcagagacctcctcagcaaatacgaattccctggtgacgaagttccagtagttagaggatcagctctcaaagcaatagaagcaccaaacgacccgaacgacccagcatacaaaccaatcaaagaactccttgacgcaatggatacatacttcccggatccagttcgtgaagttgacaaaccattccttatgccaattgaagacgtcttctccatcactggtaggggtacggttgtcactggaagaatcgaacgtggtgtaatcaaaccaggcgttgaagcagaaatcatcggtatgagctacgaaattaaaaagacagttatcacaagtgttgaaatgttcagaaaagaactcgatgaagcaatcgctggtgacaacgttggatgtctgctcagaggatctagcaaggacgaggttgaaagaggacaagttcttgcaaaaccaggctccattacaccactcaagaagttcaaagcaaacatctacgttttgaagaaagaagaaggcggacgccacacgccattcacaaaaggttacaaaccacagttctacatcagaacagcagacgttacaggtgaaatcgttgaccttccagctggagtcgaaatggtcatgcccggtgataacgtcgaaatgacaattgaactcatctacccagttgctatcgaaaaaggtatgaggttcgcagttcgagaaggtggaagaacggttggcgcaggtgtcgtttccgaaataattgagtaa

SEQ ID NO: 3210 - protein, 399 aa, Fervidobacterium islandicum
MAKVTFVRTKPHMNVGTIGQIDHGKTTLTAAITKYCSFFGWADYTPYEMIDKAPEERARGITINITHVEYQTEKRHYAHIDCPGHADYIKNMITGAAQMDGAILVLAATDGPMPQTREHVLLARQVNVPAMIVFINKVDMVDPELVDLVEMEVRDLLSKYEFPGDEVPVVRGSALKAIEAPNDPNDPAYKPIKELLDAMDTYFPDPVREVDKPFLMPIEDVFSITGRGTVVTGRIERGVIKPGVEAEIIGMSYEIKKTVITSVEMFRKELDEAIAGDNVGCLLRGSSKDEVERGQVLAKPGSITPLKKFKANIYVLKKEEGGRHTPFTKGYKPQFYIRTADVTGEIVDLPAGVEMVMPGDNVEMTIELIYPVAIEKGMRFAVREGGRTVGAGVVSEIIE

SEQ ID NO: 3211 - DNA, 1188 bp, Flavobacterium ferrugineum
  CDS (1)..(1188): transl_table=11
atggcaaaagagacctttaagagggaaaaacctcacgttaacattggtaccattggccacgttgaccatggtaaaaccacgctgactgccgccattacagacatcctttcaaagaaaggtctggcgcaggctaaaaaatatgacgaaatcgacggagctcctgaggaaaaagagcgcggtatcactatcaacaccgctcacgtagaatacgaaacagctaatcgtcactatgcacacgtagactgccctggtcacgctgactatgtgaaaaacatgatcaccggtgctgcccagatggacggtgctatcttagttgtggctgcatcagacggtcctatgcctcaaacaaaagaacacatcctgcttgctgcccaggtaggtgtacctaaaatggttgtgtttctgaataaagttgacctcgttgacgacgaagagctcctggagctggttgagatcgaggttcgcgaagaactgactaaacgcggtttcgacggcgacaacactccaatcatcaaaggttccgctacaggcgccctcgctggtgaagaaaagtgggttaaagaaattgaaaacctgatggacgctgttgacagctacatcccactgcctcctcgtccggttgatctgccgttcctgatgagcgtagaggacgtattctctatcactggtcgtggtactgttgctaccggtcgtatcgagcgtggccgtatcaaagttggtgagcctgttgagatcgtaggtctgcaggagtctcccctgaactctaccgttacaggtgttgagatgttccgcaaactcctcgacgaaggtgaagctggtgataacgccggtctcctcctccgtggtgttgaaaaaacacagatccgtcgcggtatggtaatcgttaaacccggttccatcactccgcacacggacttcaaaggcgaagtttacgtactgagcaaagacgaaggtggccgtcacactccattcttcaacaaataccgtcctcaattctacttccgtacaactgacgttacaggtgaagtagaactgaacgcaggaacagaaatggttatgcctggtgataacaccaacctgaccgttaaactgatccaaccgatcgctatggaaaaaggtctgaaattcgcgatccgcgaaggtggccgtaccgtaggtgcaggacaggttactgagatcttgaaataa

SEQ ID NO: 3212 - protein, 395 aa, Flavobacterium ferrugineum
MAKETFKREKPHVNIGTIGHVDHGKTTLTAAITDILSKKGLAQAKKYDEIDGAPEEKERGITINTAHVEYETANRHYAHVDCPGHADYVKNMITGAAQMDGAILVVAASDGPMPQTKEHILLAAQVGVPKMVVFLNKVDLVDDEELLELVEIEVREELTKRGFDGDNTPIIKGSATGALAGEEKWVKEIENLMDAVDSYIPLPPRPVDLPFLMSVEDVFSITGRGTVATGRIERGRIKVGEPVEIVGLQESPLNSTVTGVEMFRKLLDEGEAGDNAGLLLRGVEKTQIRRGMVIVKPGSITPHTDFKGEVYVLSKDEGGRHTPFFNKYRPQFYFRTTDVTGEVELNAGTEMVMPGDNTNLTVKLIQPIAMEKGLKFAIREGGRTVGAGQVTEILK

SEQ ID NO: 3213 - DNA, 1230 bp, Gloeobacter violaceus
  CDS (1)..(1230): transl_table=11
atggctcgcgctaagttcgaacggaataaaccgcacgtcaacatcgggaccatcggtcacgtcgaccatggcaagacgacgctgacggcggccatcaccatgacgctggccgcgctcggccgcgccaaggccaagaagtacgacgaaattgaccaggcccccgaagagaaagcccgcggcatcacgatcaacaccgcccacgtcgagtacgagaccgagaagcgccactacgcccacgtggattgccccggtcacgccgactacgtcaagaacatgatcaccggcgccgcccagatggatggtgccatcctggtggtctcggcggcggacggtccgatgccccagacccgcgagcacatcctgcttgcccgtcaggtcggcgtgcccaatatcgtcgtcttcttgaacaaaaaagaccagctcgacgaccccgaattgctggaactggtcgaactggaagtgcgcgagctgctttctaagtacgactttcccggcgatgacgtcccgatcgtggcgggttcggccctgatggccctcgagaagatggcctccgagccgaagctcatccgcggcaaggacgattgggtcgattgcatctactcgctgatggacgcggtggacgcctacatccccactcccgagcgggcgatcgacaagccgttcttgatggcggtcgaagacgtcttctcgatcaccggccgcggcactgtcgccaccggccgcatcgagcgcggcaaggtcaaagtcggcgagaccatcgagttggtgggcatccgcgggacccgctccaccaccgtcaccggtctggagatgttccagaagtccctcgatgagggcctggcgggcgacaacatcggcgtcctcctgcgcgggatcaaaaaagaggacgtcgagcgcggcatggtgcttgccaagcccggctcgatcaccccccacacccagttcgagggcgaggtctacatcctcagcaaagaagaaggtggccgccatacccccttcttcgccggctaccgcccgcagttctacgtgcgcaccaccgacgtgaccggcaccatcgtcaccttcaccgacgacgaaggcaagtccgccgagatggtgatgcctggcgaccgcatcaagatgaccgttgaactgatcaacccaatcgccatcgaggacggcatgcgctttgccatccgcgagggcggccgcaccgtgggcgcgggcgttgtctccaagatcctgaagtaa

SEQ ID NO: 3214 - protein, 409 aa, Gloeobacter violaceus
MARAKFERNKPHVNIGTIGHVDHGKTTLTAAITMTLAALGRAKAKKYDEIDQAPEEKARGITINTAHVEYETEKRHYAHVDCPGHADYVKNMITGAAQMDGAILVVSAADGPMPQTREHILLARQVGVPNIVVFLNKKDQLDDPELLELVELEVRELLSKYDFPGDDVPIVAGSALMALEKMASEPKLIRGKDDWVDCIYSLMDAVDAYIPTPERAIDKPFLMAVEDVFSITGRGTVATGRIERGKVKVGETIELVGIRGTRSTTVTGLEMFQKSLDEGLAGDNIGVLLRGIKKEDVERGMVLAKPGSITPHTQFEGEVYILSKEEGGRHTPFFAGYRPQFYVRTTDVTGTIVTFTDDEGKSAEMVMPGDRIKMTVELINPIAIEDGMRFAIREGGRTVGAGVVSKILK

SEQ ID NO: 3215 - DNA, 1185 bp, Haemophilus ducreyi
  CDS (1)..(1185): transl_table=11
atgtctaaagaaaaatttgaacgtacaaaaccgcacgttaacgtgggtacaatcggccacgttgaccatggtaaaacaactctaactgcagcaattactaccgtattagcaaaacacttcggtggtgctgcgcgtgcatttgaccaaatcgataacgcgcctgaagaaaaagcgcgcggtatcaccatcaatacttctcacgttgagtacgacactgaaactcgtcactatgctcacgttgactgtccaggacacgccgactatgttaaaaacatgattactggtgcggcacaaatggacggcgctatcttagttgtagcagcaactgatggtcctatgcctcaaactcgtgaacacatcttattaggtcgccaagttggtgttccttacatcatcgtattcttaaataaatgcgatatggtagatgatgaagaattattagaattagttgaaatggaagttcgtgaacttctttctcaatatgatttcccaggtgacgatactcctatcgttcgtggttcagcattacaagcattaaatggtgtgcctgagtgggaagaaaaaatcattgaattagcacaacacttagattcttatatccctgagcctgagcgtgcgattgataaacctttcttattaccaatcgaagacgtattctcaatttcaggtcgtggtacagtagtaaccggtcgtgttgagcgtggtatcatcaaatcaggtgaagaagttgaaatcgtagggattaaagaaacgacaaaaacaacagtaaccggtgttgagatgttccgtaaactattagacgaaggtcgtgcgggtgaaaacgtaggtgccttattacgtggtactaaacgtgaagaaatcgaacgtggtcaagtattagcgaaaccaggtacaattacaccacacactgattttgaatcagaagtttatgtattatcaaaagaagaaggtggccgtcatactccattcttcaaaggctatcgtcctcagttctacttccgtacaacggacgtaacaggaacgattgaattacctgaaggtgttgagatggtaatgcctggtgataatatcaagatgacagtaagcttaattcaccctatcgcgatggacgaaggtcttcgtttcgctattcgtgaaggcggtcgtactgtaggtgccggcgttgttgcgaaaatcattaaataa

SEQ ID NO: 3216 - protein, 394 aa, Haemophilus ducreyi
MSKEKFERTKPHVNVGTIGHVDHGKTTLTAAITTVLAKHFGGAARAFDQIDNAPEEKARGITINTSHVEYDTETRHYAHVDCPGHADYVKNMITGAAQMDGAILVVAATDGPMPQTREHILLGRQVGVPYIIVFLNKCDMVDDEELLELVEMEVRELLSQYDFPGDDTPIVRGSALQALNGVPEWEEKIIELAQHLDSYIPEPERAIDKPFLLPIEDVFSISGRGTVVTGRVERGIIKSGEEVEIVGIKETTKTTVTGVEMFRKLLDEGRAGENVGALLRGTKREEIERGQVLAKPGTITPHTDFESEVYVLSKEEGGRHTPFFKGYRPQFYFRTTDVTGTIELPEGVEMVMPGDNIKMTVSLIHPIAMDEGLRFAIREGGRTVGAGVVAKIIK

SEQ ID NO: 3217 - DNA, 1185 bp, Haemophilus influenzae
  CDS (1)..(1185): transl_table=11
atgtctaaagaaaaatttgaacgtacaaaaccgcacgtaaacgtgggtacaatcggccacgttgaccacggtaaaacaactttaacagcagcaatcacaaccgtattagcaaaacactacggtggtgcagcgcgtgcatttgaccaaattgataacgcgccagaagaaaaagcgcgtggtattaccatcaacacttcacacgttgaatacgatacaccgactcgccactacgcacacgtagactgtccgggacacgccgactatgttaaaaatatgattactggtgcggcacaaatggatggtgctattttagtagtagcagcaacagatggtcctatgccacaaactcgtgaacacatcttattaggtcgccaagtaggtgttccatacatcatcgtattcttaaacaaatgcgacatggtagatgacgaagagttattagaattagtcgaaatggaagttcgtgaacttctatctcaatatgacttcccaggtgacgatacaccaatcgtacgtggttcagcattacaagcgttaaacggcgtagcagaatgggaagaaaaaatccttgagttagcaaaccacttagatacttacatcccagaaccagaacgtgcgattgaccaaccgttccttcttccaatcgaagatgtgttctcaatctcaggtcgtggtactgtagtaacaggtcgtgtagaacgaggtattatccgtacaggtgatgaagtagaaatcgtcggtatcaaagatacagcgaaaactactgtaacgggtgttgaaatgttccgtaaattacttgacgaaggtcgtgcaggtgaaaacatcggtgcattattacgtggtaccaaacgtgaagaaatcgaacgtggtcaagtattagcgaaaccaggttcaatcacaccacacactgacttcgaatcagaagtgtacgtattatcaaaagatgaaggtggtcgtcatactccattcttcaaaggttaccgtccacaattctatttccgtacaacagacgtgactggtacaatcgaattaccagaaggcgtggaaatggtaatgccaggcgataacatcaagatgacagtaagcttaatccacccaattgcgatggatcaaggtttacgtttcgcaatccgtgaaggtggccgtacagtaggtgcaggcgttgttgcgaaaatcatcaaataa

SEQ ID NO: 3218 - protein, 394 aa, Haemophilus influenzae
MSKEKFERTKPHVNVGTIGHVDHGKTTLTAAITTVLAKHYGGAARAFDQIDNAPEEKARGITINTSHVEYDTPTRHYAHVDCPGHADYVKNMITGAAQMDGAILVVAATDGPMPQTREHILLGRQVGVPYIIVFLNKCDMVDDEELLELVEMEVRELLSQYDFPGDDTPIVRGSALQALNGVAEWEEKILELANHLDTYIPEPERAIDQPFLLPIEDVFSISGRGTVVTGRVERGIIRTGDEVEIVGIKDTAKTTVTGVEMFRKLLDEGRAGENIGALLRGTKREEIERGQVLAKPGSITPHTDFESEVYVLSKDEGGRHTPFFKGYRPQFYFRTTDVTGTIELPEGVEMVMPGDNIKMTVSLIHPIAMDQGLRFAIREGGRTVGAGVVAKIIK

SEQ ID NO: 3219 - DNA, 1230 bp, Helicosporidium sp
  CDS (1)..(1230): transl_table=11
atggcacgtgaaaaatttgaacgtataaaaccacatatcaatattggtacaataggacatgtagatcatggtaaaactacattaacagctgctataactatggcattagcaagcataggaaatactaaaggaaaaaattatgctgatattgattcagctcctgaagaaaaagcacgaggaattactataaatacaacacatgttgaatatgaaacagctaagcgccattatgcccatgtagattgtccaggacatgccgactatattaaaaatatgattacaggagctgctcaaatggatggtgctattttagtagtttcaggagctgatggtccaatgcctcaaactcgagaacatatagtattagctaagcaagtaggtgtaccttctatggtagtttttattaataaagaagatcaagtagatgatccagaaattttagagcttgtagaattagaagttagagatcttctaacaagttacaaatttgaaggagaagaggtacctgtaataacaggttctgctcttttagctttagaagcctttataaaaaatccaaaaatattaaaaggagaaaatccttgggtcgacaaaatatataatttaatggatagtgttgattcatatatacctacaccagttcgtgaaattgataaaccctttttaatggctatagaagacgtcttttctataagtggtcgtggaacagtagctacaggacgcatagagcgtggtaaaataaaaatgggagattctattgaaattattggagggtctttaagaaaaacaactacagtaacaggaatagaaatgtttcaaaaaacattaactgatggtgtagctggcgataatgtaggtattttaatgcgcgggattcaaaaaaaagaaattgaccgaggaatggtattaactaagcctaaatcaatagatccattaacaagttttgaagcacaagtttatttattaactaaagaagaaggaggacgttctaaaggctttacaataggttatagacctcagttttatgttcgtactacagatgtaacaggggctattttaaatatgcttagtgatgataatacaccattaaaaatagcatcacctggagatagaataacaatgtcagttaaacttattcaaccaatcgctcttgaaaaaaatatgagatttgctatacgtgaaggaggtaaaacagtaggagctggagtagtctcaaaattaattaattaa

SEQ ID NO: 3220 - protein, 409 aa, Helicosporidium sp
MAREKFERIKPHINIGTIGHVDHGKTTLTAAITMALASIGNTKGKNYADIDSAPEEKARGITINTTHVEYETAKRHYAHVDCPGHADYIKNMITGAAQMDGAILVVSGADGPMPQTREHIVLAKQVGVPSMVVFINKEDQVDDPEILELVELEVRDLLTSYKFEGEEVPVITGSALLALEAFIKNPKILKGENPWVDKIYNLMDSVDSYIPTPVREIDKPFLMAIEDVFSISGRGTVATGRIERGKIKMGDSIEIIGGSLRKTTTVTGIEMFQKTLTDGVAGDNVGILMRGIQKKEIDRGMVLTKPKSIDPLTSFEAQVYLLTKEEGGRSKGFTIGYRPQFYVRTTDVTGAILNMLSDDNTPLKIASPGDRITMSVKLIQPIALEKNMRFAIREGGKTVGAGVVSKLIN

SEQ ID NO: 3221 - DNA, 1188 bp, Lactobacillus plantarum
  CDS (1)..(1188): transl_table=11
atggcaaaagaacattatgaaagaacaaaaccccatgtaaacattggtactattggccacgttgaccatgggaagactactttgaccgctgcaatcactaaggtattagcatctaagggcttggctaaagaacaagactttgcttctatcgatgctgctccggaagaacgtgaacgtggtattactatcaacactgcccacgttgaatacgaaactgaaaagcgtcactacgctcatatcgatgccccaggacatgctgactacgttaagaacatgattactggtgccgctcaaatggacggtgcgatcttagttgttgccgcaactgatggtcctatgccacaaacgcgtgaacacatcctcttggctcgccaagttggtgttgactatatcgttgtcttcttaaacaagactgatcttgttgacgatgacgaattagttgacttggttgaaatggaagtacgtgaattactttcagaatacgatttccctggtgacgatattcctgttatccgtggttcagcgcttaaagcacttgaaggcgacccagaacaagaaaaggttatcatgcacttaatggatgttgttgatgaatacatcccaactccagttcgtgatactgaaaagcctttcttgatgcctgttgaagacgtcttctcaatcactggtcgtgggactgttgcttctggtcgtatcgatcgtgggactgttaaggtcggcgacgaagttgaaatcgttggtttacacgaagatgttcttaagtcaactgttacgggtcttgaaatgttccgtaagacacttgacttaggtgaagccggggataacgttggtgcgttattacgtggtgttaaccgtgaacaagttgttcgtggccaagttttggctaagccaggttcgatccaaacccacaagaagttcaagggtgaagtttatatcttgagcaaagaagaaggtggccgtcatacgccattcttctcaaactatcgtccacaattctacttccacaccactgatatcactggtgttattgaattgccagacggcgttgaaatggttatgcctggtgacaacgtaacgttcactgttgaattgattcaaccagctgccatcgaaaagggtaccaagttcacggttcgtgaaggtggtcatactgtcggtgccggtgttgtttcagaaattgatgactaa

SEQ ID NO: 3222 - protein, 395 aa, Lactobacillus plantarum [sequence omitted]

SEQ ID NO: 3223 - DNA, 1188 bp, Listeria monocytogenes serotype 4b
  CDS (1)..(1188): transl_table=11
atggcaaaagaaaaatttgaccgctctaaaccccatgttaacattggtactattggacacgttgaccatggtaaaacaactttaactgctgcaattacaactgtacttgctaaaaaaggctatgctgatgcacaagcttatgaccaaattgatggtgctccggaagaaagagaacgtggtatcacaatctctactgctcacgttgagtaccaaactgacagccgtcactatgcacacgttgactgcccaggacatgccgattacgttaaaaacatgatcactggtgctgcacaaatggacggagctatcttagtagtatctgctgctgatggcccaatgccacaaactcgtgaacatatcttactttcacgtcaagttggtgttccatacatcgttgtattcatgaacaaatgtgacatggttgacgatgaagaattactagaattagttgaaatggaaattcgtgatctattaactgaatatgaattccctggcgatgacattcctgtaatcaaaggttcagctcttaaagcacttcaaggtgaagctgactgggaagctaaaattgacgagttaatggaagctgtagattcttacattccaactccagaacgtgatactgacaaaccattcatgatgccagttgaggatgtattctcaatcactggtcgtggaacagttgcaactggacgtgttgaacgtggacaagttaaagttggtgacgaagtagaagttatcggtattgaagaagaaagcaaaaaagtagtagtaactggagtagaaatgttccgtaaattactagactacgctgaagctggcgacaacattggcgcacttctacgtggtgttgctcgtgaagatatccaacgtggtcaagtattagctaaaccaggttcgattactccacacactaacttcaaagctgaaacttatgttttaactaaagaagaaggtggacgtcacactccattcttcaacaactaccgcccacaattctatttccgtactactgacgtaactggtattgttacacttccagaaggtactgaaatggtaatgcctggtgataacattgagcttgcagttgaactaattgcaccaatcgctatcgaagacggtactaaattctctatccgtgaaggcggacgtacagtaggcgctggcgttgtttctaacatcagcaaataa

SEQ ID NO: 3224 - protein, 395 aa, Listeria monocytogenes serotype 4b
MAKEKFDRSKPHVNIGTIGHVDHGKTTLTAAITTVLAKKGYADAQAYDQIDGAPEERERGITISTAHVEYQTDSRHYAHVDCPGHADYVKNMITGAAQMDGAILVVSAADGPMPQTREHILLSRQVGVPYIVVFMNKCDMVDDEELLELVEMEIRDLLTEYEFPGDDIPVIKGSALKALQGEADWEAKIDELMEAVDSYIPTPERDTDKPFMMPVEDVFSITGRGTVATGRVERGQVKVGDEVEVIGIEEESKKVVVTGVEMFRKLLDYAEAGDNIGALLRGVAREDIQRGQVLAKPGSITPHTNFKAETYVLTKEEGGRHTPFFNNYRPQFYFRTTDVTGIVTLPEGTEMVMPGDNIELAVELIAPIAIEDGTKFSIREGGRTVGAGVVSNISK

SEQ ID NO: 3225 - DNA, 1233 bp, Mesostigma viride
  CDS (1)..(1233): transl_table=11
atggcacgtgaaaaatttgaacgcaaaaaaccacatattaatattggaaccattggacatgtagatcatggaaaaactactttaactgctgctataacaatggctttagcagttggtacaggcaaatctggtaagagatatgatgaaattgatgctgctcctgaagaaaaagcaagaggtattactattaataccgctcatgtagaatatgagactgaaactcgtcattatgcacatgtggattgtccaggtcatgctgactatgtaaaaaatatgattactggtgctgctcagatggatggcgcgatactggttgtttctggagcagatggtccaatgccacaaactaaagaacatatcttattggcgaaacaagtaggtgttcctaatatggtagtttttttaaataaagaagatcaagtagatgatccagaattattagaacttgtggaattagaagtacgtgaaactttaaattcttatgattttccaggagatgaaattccagtagttgcaggttctgctttaatggcattagaagcattaacccaagattctaaacttgctagaggcagtaatccatgggttgataaaatttatgctttaatggatcaagttgataaatatattccaactcctcaaagagatactgataagccatttttaatggctatagaagatgtgttttctatcacaggtagaggaactgtagcaactggaagagtagaaagaggtaaagttgtagttggagaaaacgtagatattgttggtctagcaaatataccacaaaatactacagtaactggcttagaaatgtttcaaaaaactttagaagaaagtgtcgctggagataatgttggtgttttgttaagaggtattcaaaaagatcaagtagaacgtggtatggttttagctaaaccgaacacaattaaacctcatatacgttttgagtctgaagtttatgtattagctaaagaagaaggtggacgtcatactcctttttttccaggttacagacctcaattttatgtaagaactacagatgtgactggcaaaattgattcttttaaagcagatgatggttctgacacacaaatggttatgccaggcgatcgtgttaaaatggtagtatctttaattcaaccaattgcaattgaaaaaggtatgcgttttgctattagagaaggtggtcgtactgtaggtgcaggaattgtatctgaaatcttagaataa

SEQ ID NO: 3226 - protein, 410 aa, Mesostigma viride
MAREKFERKKPHINIGTIGHVDHGKTTLTAAITMALAVGTGKSGKRYDEIDAAPEEKARGITINTAHVEYETETRHYAHVDCPGHADYVKNMITGAAQMDGAILVVSGADGPMPQTKEHILLAKQVGVPNMVVFLNKEDQVDDPELLELVELEVRETLNSYDFPGDEIPVVAGSALMALEALTQDSKLARGSNPWVDKIYALMDQVDKYIPTPQRDTDKPFLMAIEDVFSITGRGTVATGRVERGKVVVGENVDIVGLANIPQNTTVTGLEMFQKTLEESVAGDNVGVLLRGIQKDQVERGMVLAKPNTIKPHIRFESEVYVLAKEEGGRHTPFFPGYRPQFYVRTTDVTGKIDSFKADDGSDTQMVMPGDRVKMVVSLIQPIAIEKGMRFAIREGGRTVGAGIVSEILE

SEQ ID NO: 3227 - DNA, 1191 bp, Micrococcus luteus
  CDS (1)..(1191): transl_table=11
gtggcaaaggcaaagttcgagcggacgaaggcgcacgtcaacatcggcaccatcggccacgttgaccacggcaagaccacgctgaccgccgccatctcgaaggtcctgtacgacaagtacccggacctgaatgaggcccgtgacttcgcgacgatcgattccgcccccgaggagcgtcagcgcggcatcaccatcaacatctcccacgtggagtaccagaccgagaagcgtcactacgcccacgtggacgcccccggtcacgccgactacatcaagaacatgatcaccggcgccgctcagatggacggcgcgatcctcgtggtcgccgctaccgacggcccgatggcccagacccgtgagcacgtgctcctggcccgccaggtcggcgtgccggccctgctcgtggccctgaacaagtcggacatggtggaggacgaggagctcctcgagcgtgtcgagatggaggtccggcagctgctgtcctccaggagcttcgacgtcgacgaggccccggtcatccgcacctccgctctgaaggccctcgagggcgacccccagtgggtcaagtccgtcgaggacctcatggatgccgtggacgagtacatcccggacccggtgcgcgacaaggacaagccgttcctgatgccgatcgaggacgtcttcacgatcaccggccgtggcaccgtggtgaccggtcgcgccgagcgcggcaccctgaagatcaactccgaggtcgagatcgtcggcatccgcgacgtgcagaagaccactgtcaccggcatcgagatgttccacaagcagctcgacgaggcctgggccggcgagaactgcggtctgctcgtgcgcggtctgaagcgcgacgacgtcgagcgcggccaggtgctggtggagccgggctccatcaccccgcacaccaacttcgaggcgaacgtctacatcctgtccaaggacgagggtgggcgtcacaccccgttctactcgaactaccgcgcgcagttctacttccgcaccaccgacgtcaccggcgtcatcacgctgcccgagggcaccgagatggtcatgcccggcgacaccaccgagatgtcggtcgagctcatccagccgatcgccatggaggagggcctcggcttcgccatccgcgagggtggccgcaccgtgggctccggccgcgtcaccaagatcaccaagtga

SEQ ID NO: 3228 - protein, 396 aa, Micrococcus luteus
MAKAKFERTKAHVNIGTIGHVDHGKTTLTAAISKVLYDKYPDLNEARDFATIDSAPEERQRGITINISHVEYQTEKRHYAHVDAPGHADYIKNMITGAAQMDGAILVVAATDGPMAQTREHVLLARQVGVPALLVALNKSDMVEDEELLERVEMEVRQLLSSRSFDVDEAPVIRTSALKALEGDPQWVKSVEDLMDAVDEYIPDPVRDKDKPFLMPIEDVFTITGRGTVVTGRAERGTLKINSEVEIVGIRDVQKTTVTGIEMFHKQLDEAWAGENCGLLVRGLKRDDVERGQVLVEPGSITPHTNFEANVYILSKDEGGRHTPFYSNYRAQFYFRTTDVTGVITLPEGTEMVMPGDTTEMSVELIQPIAMEEGLGFAIREGGRTVGSGRVTKITK

SEQ ID NO: 3229 - DNA, 1185 bp, Neisseria gonorrhoeae
  CDS (1)..(1185): transl_table=11
atggctaaggaaaaattcgaacgtagcaaaccgcacgtaaacgttggcaccatcggtcacgttgaccatggtaaaaccaccctgactgctgctttgactactattttagctaaaaaattcggcggtgctgcaaaagcttacgaccaaatcgacaacgcacccgaagaaaaagcacgcggtattaccattaacacctcgcacgtagaatacgaaaccgaaacccgccactacgcacacgtagactgtccgggtcacgccgactacgttaaaaacatgattaccggcgccgcacaaatggacggtgcaatcctggtatgttctgctgccgacggccctatgccgcaaacccgcgaacacatcctgctggcccgtcaagtaggcgtaccttacatcatcgtgttcatgaacaaatgcgacatggtcgacgatgccgagctgttccaactggttgaaatggaaatccgcgacctgctgtccagctacgacttccccggcgacgactgcccgatcgtacaaggttccgcactgaaagccttggaaggcgatgccgcttacgaagaaaaaatcttcgaactggctaccgcattggacagatacatcccgactcccgagcgtgccgtggacaaaccattcctgctgcctatcgaagacgtgttctccatttccggccgcggtaccgtagtcaccggccgtgtagagcgaggtatcatccacgttggtgacgagattgaaatcgtcggtctgaaagaaacccaaaaaaccacctgtaccggcgttgaaatgttccgcaaactgctggacgaaggtcaggcgggcgacaacgtaggcgtattgctgcgcggtaccaaacgtgaagacgtagaacgcggtcaggtattggccaaacggggtactatcactcctcacaccaagttcaaagcagaagtgtacgtattgagcaaagaagagggcggcccccataccccgtttttcgccaactaccgtccccaattctacttccgtaccactgacgtaaccggcacgattactttggaaaaaggtgtggaaatggtaatgccgggtgagaacgtaaccattactgtagaactgattgcgcctatcgctatggaagaaggtctgcgctttgcgattcgcgaaggcggccgtaccgtgggtgccggcgtggtttcttctgttatcgcttaa

SEQ ID NO: 3230 - protein, 394 aa, Neisseria gonorrhoeae
MAKEKFERSKPHVNVGTIGHVDHGKTTLTAALTTILAKKFGGAAKAYDQIDNAPEEKARGITINTSHVEYETETRHYAHVDCPGHADYVKNMITGAAQMDGAILVCSAADGPMPQTREHILLARQVGVPYIIVFMNKCDMVDDAELFQLVEMEIRDLLSSYDFPGDDCPIVQGSALKALEGDAAYEEKIFELATALDRYIPTPERAVDKPFLLPIEDVFSISGRGTVVTGRVERGIIHVGDEIEIVGLKETQKTTCTGVEMFRKLLDEGQAGDNVGVLLRGTKREDVERGQVLAKRGTITPHTKFKAEVYVLSKEEGGPHTPFFANYRPQFYFRTTDVTGTITLEKGVEMVMPGENVTITVELIAPIAMEEGLRFAIREGGRTVGAGVVSSVIA

SEQ ID NO: 3231 - DNA, 1185 bp, Neisseria meningitidis serogroup A
  CDS (1)..(1185): transl_table=11
atggctaaggaaaaattcgaacgtagcaaaccgcacgtaaacgttggcaccatcggtcacgttgaccatggtaaaaccaccctgactgccgctttgactactattttggctaaaaaattcggcggtgctgcaaaagcttacgaccaaatcgacaacgcacccgaagaaaaagcacgcggtattaccattaacacctcgcacgtggaatacgaaaccgaaacccgccactacgcacacgtagactgtccggggcacgccgactacgttaaaaacatgattaccggcgcagcacaaatggacggtgcaatcctggtatgttccgcagccgacggccctatgccgcaaacccgcgaacacatcctgctggcccgtcaagtaggcgtaccttacatcatcgtgttcatgaacaaatgcgacatggtcgacgatgccgagctgttggaactggttgaaatggaaatccgcgacctgctgtccagctacgacttccccggcgacgactgcccgatcgtacaaggttccgcactgaaagccttggaaggcgatgccgcttacgaagaaaaaatcttcgaattggctgctgcattggacagctacatcccgactcccgagcgtgccgtggacaaacctttcttgttgcctatcgaagacgtattctctatttccggtcgtggtacagtagtaaccggtcgtgtagagcgcggtatcatccacgtcggtgacgagatcgaaatcgtcggtctgaaagaaactcaaaaaaccacttgtaccggtgttgaaatgttccgcaaactgctggacgaaggtcaagcaggcgacaacgtaggcgtattgctgcgcggtaccaaacgtgaagacgtagagcgtggtcaagtattggctaaaccgggtacaatcactcctcacaccaagttcaaagcagaagtatacgtactgagcaaagaagagggcggccgccataccccgttcttcgccaactaccgtccccaattctacttccgtaccaccgacgtaaccggcgcggttactttggaagaaggtgtggaaatggtaatgccgggcgagaacgtaaccatcaccgtagaactgattgcgcctatcgctatggaagaaggtttgcgctttgcgattcgcgaaggcggccgtaccgtgggtgccggcgtggtttcttctgttatcgcttaa

SEQ ID NO: 3232 - protein, 394 aa, Neisseria meningitidis serogroup A
MAKEKFERSKPHVNVGTIGHVDHGKTTLTAALTTILAKKFGGAAKAYDQIDNAPEEKARGITINTSHVEYETETRHYAHVDCPGHADYVKNMITGAAQMDGAILVCSAADGPMPQTREHILLARQVGVPYIIVFMNKCDMVDDAELLELVEMEIRDLLSSYDFPGDDCPIVQGSALKALEGDAAYEEKIFELAAALDSYIPTPERAVDKPFLLPIEDVFSISGRGTVVTGRVERGIIHVGDEIEIVGLKETQKTTCTGVEMFRKLLDEGQAGDNVGVLLRGTKREDVERGQVLAKPGTITPHTKFKAEVYVLSKEEGGRHTPFFANYRPQFYFRTTDVTGAVTLEEGVEMVMPGENVTITVELIAPIAMEEGLRFAIREGGRTVGAGVVSSVIA

SEQ ID NO: 3233 - DNA, 1233 bp, Nephroselmis olivacea
  CDS (1)..(1233): transl_table=11
atggcacgcgaaaaatttgaacgtacaaaaccacacgtaaatattggtacgatcggtcacgttgaccacgggaaaactacattaacagctgctattactatggttatggcatgtaatacagcaggtagcaaagggaaaaaatatgaagatattgattccgctccagaagaaaaggcacgtgggattacgattaatacagcccatgtcgagtatgagactgcaactcgtcactatgctcacgtcgattgtccaggtcacgctgactatgtgaaaaacatgattactggggctgctcaaatggatggtgctattttagttgtgtctggggcagatggtcctatgccacaaacgaaagaacacattttgcttgcaaaacaagtaggtgttccaaatattgttgtcttcttaaataagcaagatcaggttgacgatgaagaacttctcgagcttgttgaactggaggttcgtgaaactttgtccaactatgaattcccaggagatgaagtgcctgtagtcccagggtctgccctgttagcgcttgaagcgatgacagaaaatccaagcttgaaacgtggtgaaaatgaatgggtagataagattttcgccttgatggatgctgtcgaccaatatattcctacaccaaaacgtgatactgataagagtttcttaatggcagtggaggatgtattctctattacaggccgtggaactgttgcgactggacgtgtagaacgtggaagtgtcaaactcggtgatacgattgaaatcgtaggactcaaaccaacccgagagacgactgtcaccggtttggaaatgttccagaaaacgcttgaccaaagtgtggctggtgataacgtgggaattcttcttcgtggaatccaaaaagaagatattcaacgtggtatggtactcgctgccccacgtactattactcctcatacaaaatttgaatctcaagtttatgtattaacgaaggaagaagggggccgtcatacaccgtttttcccaggctatcgtccacagttctatgttcgtactactgatgtaactggaaagattgattctttccgtgctgatgatggtggtgaagcaactatggttatgccaggtgatcgcgtgaaaatggttgtagaacttattcagccaattgctattgagaaaggaatgagattcgctattcgtgaaggtgggcgtactgtaggtgcaggcgtcgtgtctaatattattgcataa

SEQ ID NO: 3234 - protein, 410 aa, Nephroselmis olivacea
MAREKFERTKPHVNIGTIGHVDHGKTTLTAAITMVMACNTAGSKGKKYEDIDSAPEEKARGITINTAHVEYETATRHYAHVDCPGHADYVKNMITGAAQMDGAILVVSGADGPMPQTKEHILLAKQVGVPNIVVFLNKQDQVDDEELLELVELEVRETLSNYEFPGDEVPVVPGSALLALEAMTENPSLKRGENEWVDKIFALMDAVDQYIPTPKRDTDKSFLMAVEDVFSITGRGTVATGRVERGSVKLGDTIEIVGLKPTRETTVTGLEMFQKTLDQSVAGDNVGILLRGIQKEDIQRGMVLAAPRTITPHTKFESQVYVLTKEEGGRHTPFFPGYRPQFYVRTTDVTGKIDSFRADDGGEATMVMPGDRVKMVVELIQPIAIEKGMRFAIREGGRTVGAGVVSNIIA

SEQ ID NO: 3235 - DNA, 1233 bp, Oltmannsiellopsis viridis
  CDS (1)..(1233): transl_table=11
atggcacgtgaaaagtttgaacgttcaaaaccacacgtaaatattggtactattggtcacgtagaccacggtaaaacaacattaacagctgctattacaatggcaatgtctgttttctctggcgctggtgcgggtaaaaaatatgatgaaattgactctgctccagaggaaaaagctcgtggtattactattaacacagcacacgtagaatacgaaacagaaaaccgtcactacgcacacgtagactgtccaggacacgccgactacgttaaaaacatgattacaggtgccgctcaaatggacggtgctattttagttgtttctggtgcagatggtcctatgccacaaacaaaagaacacttactattagcaaaacaagtaggtgtacctaaaattgttgttttccttaacaaaaaagaccaagtagatgacgacgaattactagaattagttgaattagaagttcgtgaaactttagacaactatgaatttgacggtgatgacatcccaattattccaggttctgctttattagctttagaagctttaattgaaagccctgaagctaaaaaaggtgacaatgaatgggttgactgcatttactcattaatggaaaatgtagactcttacatcccaactccagagcgtgacacagataaaccgttcttaatggccgttgaagacgttttctctattacaggtcgtggtactgtagcaacaggacgtgttgaacgtggtgttgttaaaattggtgacacagtagaacttgtaggtttaaaagacactacagaaacaactgttactggtttagaaatgttccaaaaaacattagatgaaagtgttgctggtgataacgttggtattttattacgtggtgttcaaaaagaaaacattcaacgtggtatggtattagcaaaaccaggtagtatttctccacacactaaatttgaagctcaagtttacgttttaactaaagaagaaggtggtcgtcacactcctttcttccctggttaccgtccacagttctacgtacgaacaactgacgtaacaggtaaaattgaatcattcgtagcagatgatggttctgcttctcaaatggttatgcctggtgaccgtgttaagatgttagttgaattaatcaacccaattgccgttgaaaaaggtatgcgtttcgctattcgtgaaggtggtcgtactgtaggtgcaggtgttgtttctgaaattcttgcttaa

SEQ ID NO: 3236 - protein, 410 aa, Oltmannsiellopsis viridis
MAREKFERSKPHVNIGTIGHVDHGKTTLTAAITMAMSVFSGAGAGKKYDEIDSAPEEKARGITINTAHVEYETENRHYAHVDCPGHADYVKNMITGAAQMDGAILVVSGADGPMPQTKEHLLLAKQVGVPKIVVFLNKKDQVDDDELLELVELEVRETLDNYEFDGDDIPIIPGSALLALEALIESPEAKKGDNEWVDCIYSLMENVDSYIPTPERDTDKPFLMAVEDVFSITGRGTVATGRVERGVVKIGDTVELVGLKDTTETTVTGLEMFQKTLDESVAGDNVGILLRGVQKENIQRGMVLAKPGSISPHTKFEAQVYVLTKEEGGRHTPFFPGYRPQFYVRTTDVTGKIESFVADDGSASQMVMPGDRVKMLVELINPIAVEKGMRFAIREGGRTVGAGVVSEILA

SEQ ID NO: 3237 - DNA, 1230 bp, Ostreococcus tauri
  CDS (1)..(1230): transl_table=11
atggcacgcgaaaagtttgagcgtacaaaaccgcacgtaaacatcggaacaattggacacgtagaccacggtaagacaactcttacagcagctattactatggcaatggcagctcgtggtggttcagctggtaagaagtatgatgaaattgactcttcacctgaagaaaaggcacgtggtattactattaatactgcacacgtagagtatgaaacagcaactcgtcactacgctcacgtagattgtccgggacacgccgactatgtaaaaaatatgattactggtgcagcgcagatggatggagcaattcttgtagtatcgggtgctgatggaccaatgccacaaacgaaagagcacattcttcttgctaagcaagtaggtgtacctaatattgttgttttcttaaacaaagaagaccaagttgacgatgaagaattacttgaactcgtagacatggaaatccgcgagacactttcgagttacgatttcccaggtgatgaaattccagtaattgctggatcagcacttcttgcattagaagcgctttcatcaaatcctaaaattggtgatggggaagacaagtgggtagacaagattttctcattaatggataacgtagacagttatattcctactccagcacgtgaaacagataagactttccttatggccgttgaggatgtattctcaattactggacgtggaacagtagcaactgggcgtgtagagcgtggaacagtaaaagttggagcaagtattgagattattggatacgttgatactcgtgtggcaacagtaacaggtttagaaatgttccaaaagactcttgaagagtctgtagctggtgataacgttggtgtacttcttcgtggtattcagaaagaagatattgagcgtggaatggtacttgctcagccaggaacgattacacctcatactaaatttgaagcccaagtatatgttcttaaaaaagaagaaggtggacgtcacactccattcttccctggataccgtccacaattctatgtacgtacaacagacgtaacaggaaaaattgagtcattcatttctgatgaaggggatgaagcaacaatggtaatgcctggtgaccgtgttaaaatggtagtagaacttatccaaccaattgccattgaaaatggaatgcgttttgcaattcgtgaaggtggtcgtactgttggggcaggtgtagtttcttcaatccttaaataa

SEQ ID NO: 3238 - protein, 409 aa, Ostreococcus tauri
MAREKFERTKPHVNIGTIGHVDHGKTTLTAAITMAMAARGGSAGKKYDEIDSSPEEKARGITINTAHVEYETATRHYAHVDCPGHADYVKNMITGAAQMDGAILVVSGADGPMPQTKEHILLAKQVGVPNIVVFLNKEDQVDDEELLELVDMEIRETLSSYDFPGDEIPVIAGSALLALEALSSNPKIGDGEDKWVDKIFSLMDNVDSYIPTPARETDKTFLMAVEDVFSITGRGTVATGRVERGTVKVGASIEIIGYVDTRVATVTGLEMFQKTLEESVAGDNVGVLLRGIQKEDIERGMVLAQPGTITPHTKFEAQVYVLKKEEGGRHTPFFPGYRPQFYVRTTDVTGKIESFISDEGDEATMVMPGDRVKMVVELIQPIAIENGMRFAIREGGRTVGAGVVSSILK

SEQ ID NO: 3239 - DNA, 1467 bp, Pisum sativum
  CDS (1)..(1467)
  misc_feature (934)..(934): n is a, g, c or t
  misc_feature (935)..(935): n is a, g, c or t
atggcactttcttccaccgccgcaaccacttcttccaaactcaaactatctaacccaccgtcactttcccacactttcaccgcctccgcctccgcctccgtttcaaactcaacatcgttccgtcccaaactaaccctaactcgcctctcttcctccttcctcaacccttccacaatcctccacctcactccctctcaacgcaccaaccgtccttcttcctctcccttcaccgtccgcgccgcccgtggcaaattcgagcgcaagaaacctcatctcaacatcggtacaattggccacgtcgaccatggcaaaaccactctcactgctgctctcactatggctctcgcttgcctcggtaacagcgcccctaaaaagtacgacgaaattgacgctgctcccgaagagcgtgcacgtggaattacaattaacactgcaaccgttgagtacgagactgaaactcgtcactacgctcatgtcgattgtcccggtcacgctgattacgtcaagaatatgatcactggtgccgctcaaatggacggcgctatcctcgttgtctccggcgccgatggtcccatgcctcaaactaaagaacacatccttctcgccaagcaggttggtgttccgagcgtggttgtgtttttgaacaagcaggaccaagtggatgatgaggagcttcttgagcttgtggagcttgaagttcgggagcttctctcatcttatgagtttcctggcgatgacattccgattgtttctggttcggcgctcttggccttggaagcattaatggcaaaccctactcttaaacgtgggaataaccagtgggtggataagatttatcagcttatggatgaagttgataaatatatcccaatccctcaacgtcagacggaactcccctttttgcttgccattgaggatgtgttttcaatcactnntcgtggaacagtcgccactgggagaattgaaagagggctggttaaagttggtgatgtggttgaccttgtcggtttgagggaaacaaggaacactaccgtgacgggtgtagaaatgttccaaaagattttggatgatgctatggcgggtgacaatgtggggttgttgttgagaggtattcagaagattgacattcaaagagggatggttttggctaagcccggaactatcactcctcactctaagtttagtgctattgtatatgttttgaagaaggaagaaggtggaagacactcacctttctttgctggttataggcctcaattttacatgaggacgacagatgtaactggaaaagttacttctattatgaatgataaggatgaggagtcgaagatggtgatgcctggtgatcgtgtgaagatcgtggtggaactcattgttcccgtggctatcgaacaaggaatgaggttcgctattagagaaggagggaagaccgttggagctggtgttattggagctatcattgagtga

SEQ ID NO: 3240 - protein, 488 aa, Pisum sativum
  misc_feature (312)..(312): The Xaa at location 312 stands for Ala, Arg, Asn, Asp, Cys, Gly, His, Ile, Leu, Phe, Pro, Ser, Thr, Tyr, or Val.
MALSSTAATTSSKLKLSNPPSLSHTFTASASASVSNSTSFRPKLTLTRLSSSFLNPSTILHLTPSQRTNRPSSSPFTVRAARGKFERKKPHLNIGTIGHVDHGKTTLTAALTMALACLGNSAPKKYDEIDAAPEERARGITINTATVEYETETRHYAHVDCPGHADYVKNMITGAAQMDGAILVVSGADGPMPQTKEHILLAKQVGVPSVVVFLNKQDQVDDEELLELVELEVRELLSSYEFPGDDIPIVSGSALLALEALMANPTLKRGNNQWVDKIYQLMDEVDKYIPIPQRQTELPFLLAIEDVFSITXRGTVATGRIERGLVKVGDVVDLVGLRETRNTTVTGVEMFQKILDDAMAGDNVGLLLRGIQKIDIQRGMVLAKPGTITPHSKFSAIVYVLKKEEGGRHSPFFAGYRPQFYMRTTDVTGKVTSIMNDKDEESKMVMPGDRVKIVVELIVPVAIEQGMRFAIREGGKTVGAGVIGAIIE

SEQ ID NO: 3241 - DNA, 1230 bp, Phaeodactylum tricornutum
  CDS (1)..(1230): transl_table=11
atggcacgtgaaaaatttgaacgtacaaaaccacatgttaatattggtactattggtcacgtagatcatggaaagacaactttaactgcagcaatcactgcaactttagccctagatggtggtgcacaagcaaaagcttacgctgatattgatggtgctcctgaagaacgtgcacgtggtattactattaatacagcacacgttgaatatgaaacaaaagatcgtcattatgcacatgtagattgtccaggtcacgctgactacgttaaaaatatgattactggtgctgcacaaatggatggtgcaatcttagtagtttctgctgccgatggtccgatgcctcaaacacgtgagcatatcttattatcaaaacaagttggagttccaaacattgttgtatttttaaataaagaagaccaagtagatgatgaggaattattagaattagtagaattagaagttcgtgaattactttctgcttatgatttcccaggtgatgatattccaatctgtcccggatcagctttacaagctatcgaagcaattacagcaaatccaactgtaaaacgtggtgataataaatgggttgataaaatttatgcattaatggatgcggtagacgaatatattcctaccccggagcgtgatgtagaaaaaacattcttaatggcaattgaagatgtgttttcaatcacgggccgtggtacagttgcgacaggacgtatcgaacgtggtgtagtaaaagttggtgaaaacgttgaaatcgtgggtgttaccgatacacaaacaacaacaattacgggtattgaaatgttccaaaaaactttagaggaaggttttgccggtgataacgtaggtattctattacgtggtgttacacgtgaaaatattgaacgtggaatggtattagctaaaccaggtacgattactccacatacaagttttgagtcagaggtttatgttttaacaaaagatgaaggtgggcgtcatactccattctttacaggttatagacctcaattttacgtacgaacaactgatgttactggttcaattacacaatttacagctgatgatggatcagtagttgaaatggtaatgcctggtgatcgtattaaaatgaccgctgaattcatttaccctgtagctattgaagcgggtatgcgatttgcaattcgtgaaggtgggcgtacaattggagcaggtgtagtttctaaaattgttaaataa

SEQ ID NO: 3242 - protein, 409 aa, Phaeodactylum tricornutum
MAREKFERTKPHVNIGTIGHVDHGKTTLTAAITATLALDGGAQAKAYADIDGAPEERARGITINTAHVEYETKDRHYAHVDCPGHADYVKNMITGAAQMDGAILVVSAADGPMPQTREHILLSKQVGVPNIVVFLNKEDQVDDEELLELVELEVRELLSAYDFPGDDIPICPGSALQAIEAITANPTVKRGDNKWVDKIYALMDAVDEYIPTPERDVEKTFLMAIEDVFSITGRGTVATGRIERGVVKVGENVEIVGVTDTQTTTITGIEMFQKTLEEGFAGDNVGILLRGVTRENIERGMVLAKPGTITPHTSFESEVYVLTKDEGGRHTPFFTGYRPQFYVRTTDVTGSITQFTADDGSVVEMVMPGDRIKMTAEFIYPVAIEAGMRFAIREGGRTIGAGVVSKIVK

SEQ ID NO: 3243 - DNA, 1230 bp, Prototheca wickerhamii
  CDS (1)..(1230): transl_table=11
atggcacgcgcaaaatttgaacgtaaaaaaccacatgttaatattggtactattggtcatgtggaccatggtaaaacaacattaacagcagcaattactatggcattagctgcacgtgggggtgggaaaggaaaaaaatatgctgagattgattctgcacctgaagaaaaagctcgcggtattactattaatactgctcatgttgaatatgaaacagaaagtcgtcattatgcccatgtggattgcccaggacatgcagattatgtaaagaatatgattacaggtgctgctcaaatggatggtgctattcttgttgtatctggcgctgatggccctatgccacaaacaaaagagcatattcttttagccaaacaggtaggtgttccgaatattgttgtttttataaacaaagaagatcaagtagacgatatagaattaatagaattagtagaattagaggttcgtgaaacattacaaagatatgattttcctggtgatgaagtacctatgattccggggtcagctctgatggcattaacggcattaacagataatccaaagattaaaccaggtgaaaacaaatgggttgataaaatttataatctaatggatatagtagattcttacataccaaccccaaaacggaatattgaaaaaccttttttaatggcgatagaggatgttttctctattacagggcgaggtactgttgcgactggtcgtgtagagcgtggtgttgttaaaattggtgatagtgtagaaattgttggtctgggtgctactaaaatcactacagtaacaggcttggaaatgtttcaaaaaacactagatgaaagtatagcgggcgataatgttggtattttacttcgtgggattcaaaaaacagaaattcaacgcggaatggttttagctaaaccaaaaagcattaccccacatacaaattttgaagcacaagtttacgtattaaataaagaagaaggtgggcgtgatacaccattttttagtgggtatcgtccacaattttatgtacgaacaacagatgtaactggtaaaatcgaatctttttgtacagatgctggtgaacctattaaaatggtattacccggtgatcgtattaaaatgaaagcagaattaattcaacctattgctattgagcgaaatatgcgatttgctattcgtgaaggaggaaaaacagtaggtgcaggtgttgtaggaaaaattttaaaataa

SEQ ID NO: 3244 - protein, 409 aa, Prototheca wickerhamii
MARAKFERKKPHVNIGTIGHVDHGKTTLTAAITMALAARGGGKGKKYAEIDSAPEEKARGITINTAHVEYETESRHYAHVDCPGHADYVKNMITGAAQMDGAILVVSGADGPMPQTKEHILLAKQVGVPNIVVFINKEDQVDDIELIELVELEVRETLQRYDFPGDEVPMIPGSALMALTALTDNPKIKPGENKWVDKIYNLMDIVDSYIPTPKRNIEKPFLMAIEDVFSITGRGTVATGRVERGVVKIGDSVEIVGLGATKITTVTGLEMFQKTLDESIAGDNVGILLRGIQKTEIQRGMVLAKPKSITPHTNFEAQVYVLNKEEGGRDTPFFSGYRPQFYVRTTDVTGKIESFCTDAGEPIKMVLPGDRIKMKAELIQPIAIERNMRFAIREGGKTVGAGVVGKILK

SEQ ID NO: 3245 - DNA, 1194 bp, Pseudomonas aeruginosa
  CDS (1)..(1194): transl_table=11
gtggctaaggaaaaattcgaacgtaacaaaccgcacgtcaacgtcggcaccatcggtcacgttgaccatggcaagaccactctgaccgctgcactgaccaaggtctgctccgatacctggggtggttccgctcgtgctttcgatcagatcgacaacgcgccggaagaaaaggcccgcggtatcaccatcaacacctcgcacgttgaatacgattccgctgttcgtcactacgcccacgttgactgccccggtcacgccgactacgtgaagaacatgatcaccggtgctgcccagatggacggcgcgatcctggtttgctcggctgccgacggccccatgccgcagacccgcgagcacatcctgctgtcccgccaggtaggcgttccctacatcgtcgtgttcctgaacaaggccgacatggtcgacgacgccgagctgctggaactggtcgagatggaagttcgcgatctgctgaacacctacgacttcccgggcgacgacactccgatcatcatcggttccgcgctgatggcgctggaaggcaaggatgacaacggcatcggcgtaagcgccgtgcagaagctggtagagaccctggactcctacattccggagccggttcgtgccatcgaccagccgttcctgatgccgatcgaagacgtgttctcgatctccggccgcggtaccgtggtaaccggtcgtgtagagcgcggcatcatcaaggtccaggaagaagtggaaatcgtcggcatcaaggcgaccaccaagactacctgcaccggcgttgaaatgttccgcaagctgctcgacgaaggtcgtgctggtgagaacgttggtatcctgctgcgtggcaccaagcgtgaagacgtagagcgtggccaggtactggccaagccgggcaccatcaagccgcacaccaagttcgagtgcgaagtgtacgtgctgtccaaggaagaaggtggtcgtcacaccccgttcttcaagggctaccgtccgcagttctacttccgtaccaccgatgtgaccggtaactgcgaactgccggaaggcgtagagatggtaatgccgggcgacaacatcaagatggttgtcaccctgatcgctccgatcgccatggaagatggcctgcgcttcgcgatccgcgaaggcggccgtaccgttggcgccggcgtggttgccaagatcatcgagtaa

SEQ ID NO: 3246 - protein, 397 aa, Pseudomonas aeruginosa
MAKEKFERNKPHVNVGTIGHVDHGKTTLTAALTKVCSDTWGGSARAFDQIDNAPEEKARGITINTSHVEYDSAVRHYAHVDCPGHADYVKNMITGAAQMDGAILVCSAADGPMPQTREHILLSRQVGVPYIVVFLNKADMVDDAELLELVEMEVRDLLNTYDFPGDDTPIIIGSALMALEGKDDNGIGVSAVQKLVETLDSYIPEPVRAIDQPFLMPIEDVFSISGRGTVVTGRVERGIIKVQEEVEIVGIKATTKTTCTGVEMFRKLLDEGRAGENVGILLRGTKREDVERGQVLAKPGTIKPHTKFECEVYVLSKEEGGRHTPFFKGYRPQFYFRTTDVTGNCELPEGVEMVMPGDNIKMVVTLIAPIAMEDGLRFAIREGGRTVGAGVVAKIIE

SEQ ID NO: 3247 - DNA, 1230 bp, Pseudendoclonium akinetum
  CDS (1)..(1230): transl_table=11
atggctcgtgaaaaatttgagagaaaaaaacaacacgttaacatcggaacaattggacatgttgatcacggaaaaacaaccttaactgcagcaattactatgtgtttacaatcttttagtaaaaataaaggcaaacgctatgatgaaattgactcagcacctgaagaaaaagcgcgtggtattacaattaatactgcccatgttgaatacgaaacagaaaatcgtcattatgctcatgtagattgtcctggtcatgctgattatgtaaagaatatgattacaggcgcggctcaaatggacggtgccattcttgttgtatctggagctgatggaccaatgccccaaactaaagaacatttattattagcaaaacaagtaggagtgcctactttggttgtttttttaaataaagaagatcaagttgatgatcctgagttattagaattagttgaattagaagttcgtgaaactttagataaatatgaatatcctggagatgatattccaattattgcaggatctgctttattagcgttagaagctttaattgaaaaccctaatgtaaaaccgggtgaaaatgagtgggttgataaaattctaaaattaatgcaaaatgtagatacatatattccaacgcccgtacgagaaacggataaaacgtttttaatggcagttgaagatgtcttttctattacaggtcgtggaacagttgcaacgggtcttgttgaacgtggaaccctaaaaacgggtgctacagtggaaattattggattacgtgatacaacaacaactaccgtaacaggattagaaatgtttcaaaaaactttagatgaaaccgttgctggagacaatgttggggtattattacgtggtgtacaaaaagataatattcaacgtggtatggtattagcagccccaggaactattaaaccccatacaaaatttgaagctcaagtttatattttaacgaaagaggaaggaggaagacatactccttttttcccaggctatagacctcaattctatgttcgtacaacagatgttactggtaaaatcgaatcttttacagcagatgatgggtctgaagctttaatggcaacttctggggatcgtctaaaaatggtggttgaattaattcagcccattgcggttgaaaacggtatgcgatttgcgattcgcgaggggggtcgtactgtaggagcaggagtagtttcaactattttaaaataa

SEQ ID NO: 3248 - protein, 409 aa, Pseudendoclonium akinetum
MAREKFERKKQHVNIGTIGHVDHGKTTLTAAITMCLQSFSKNKGKRYDEIDSAPEEKARGITINTAHVEYETENRHYAHVDCPGHADYVKNMITGAAQMDGAILVVSGADGPMPQTKEHLLLAKQVGVPTLVVFLNKEDQVDDPELLELVELEVRETLDKYEYPGDDIPIIAGSALLALEALIENPNVKPGENEWVDKILKLMQNVDTYIPTPVRETDKTFLMAVEDVFSITGRGTVATGLVERGTLKTGATVEIIGLRDTTTTTVTGLEMFQKTLDETVAGDNVGVLLRGVQKDNIQRGMVLAAPGTIKPHTKFEAQVYILTKEEGGRHTPFFPGYRPQFYVRTTDVTGKIESFTADDGSEALMATSGDRLKMVVELIQPIAVENGMRFAIREGGRTVGAGVVSTILK

SEQ ID NO: 3249 - DNA, 1176 bp, Rhizobium meliloti
  CDS (1)..(1176): transl_table=11
atggcaaagagcaaatttgagcgcaataagccgcacgtcaacattggcacgattggccacgttgaccatggcaagacgtcgctgacggcagcgatcacgaagtatttcggcgagttcaaggcgtatgaccagatcgacgccgcgccggaagaaaaggcccgcggcatcaccatttcgacggcgcacgtcgaatacgagacgccgaaccgtcactatgcgcatgtcgactgccccggccacgccgactacgtcaagaacatgatcaccggtgcggcgcagatggacggcgcgatcctggttgtttcggccgctgacggcccgatgccgcagacgcgcgaacacatcctgctggcccgccaggtcggcgttccggcgatcgtcgtgttcctgaacaaggtcgaccaggtcgacgacgcggaactgctcgagctcgtcgagctggaagtgcgcgaactgctgtcgtcctacgaattcccgggcgacgacattccgatcgtcaagggttcggctctggccgcgcttgaagattcggacaagaagatcggcgaagacgcgatccgcgagctgatggctgcggtcgacgcctacatcccgacgcctgagcgtccgatcgaccagccgttcctgatgccgatcgaagacgtgttctcgatctcgggccgcggtacggtcgtgaccggtcgcgtcgagcgcggcatcgtcaaggtcggtgaggaaatcgagatcgtcggcatccgtccgacgacgaagacgacctgcacgggcgttgaaatgttccgcaagctgctcgaccagggccaggccggcgacaacatcggcgcgctgcttcgcggtgtcgaccgcaacggcgtcgagcgcggtcagattctgtgcaagccgggttcggtcaagccgcaccgcaagttcaaggctgaagcctacatcctgacgaaggaagagggtggccgtcacacgccgttcttcaccaactaccgtccgcagttctacttccgcacgacggacgtgaccggcatcgtgacgcttccggaaggcacggaaatggtcatgccgggcgacaacgtcacggttgacgtcgagctgatcgtgccgatcgcgatggaagaaaagctgcgcttcgctatccgcgaaggcggccgcaccgtcggcgcaggcatcgtcgcctccatcgtcgagtaa

SEQ ID NO: 3250 - protein, 391 aa, Rhizobium meliloti
MAKSKFERNKPHVNIGTIGHVDHGKTSLTAAITKYFGEFKAYDQIDAAPEEKARGITISTAHVEYETPNRHYAHVDCPGHADYVKNMITGAAQMDGAILVVSAADGPMPQTREHILLARQVGVPAIVVFLNKVDQVDDAELLELVELEVRELLSSYEFPGDDIPIVKGSALAALEDSDKKIGEDAIRELMAAVDAYIPTPERPIDQPFLMPIEDVFSISGRGTVVTGRVERGIVKVGEEIEIVGIRPTTKTTCTGVEMFRKLLDQGQAGDNIGALLRGVDRNGVERGQILCKPGSVKPHRKFKAEAYILTKEEGGRHTPFFTNYRPQFYFRTTDVTGIVTLPEGTEMVMPGDNVTVDVELIVPIAMEEKLRFAIREGGRTVGAGIVASIVE

SEQ ID NO: 3251 - DNA, 1185 bp, Salmonella typhi
  CDS (1)..(1185): transl_table=11
atgtctaaagaaaagtttgaacgtacaaaaccgcacgttaacgtcggtactatcggccacgttgaccatggtaaaacaacgctgaccgctgccattactaccgtactggctaaaacctacggcggtgccgcccgcgcattcgaccagatcgataacgcgccggaagaaaaagcgcgtggtatcaccatcaacacttctcacgttgaatacgataccccgacccgccactacgcacacgtagactgcccggggcacgccgactatgttaaaaacatgatcaccggtgctgctcagatggacggcgcgatcctggttgttgctgcgactgacggcccgatgccgcagacccgtgagcacatcctgctgggtcgtcaggtaggcgttccgtacatcatcgtgttcctgaacaaatgcgacatggttgatgacgaagagctgctggaactggttgaaatggaagttcgtgaacttctgtctcagtacgacttcccgggcgacgacacgccgatcgttcgtggttctgctctgaaagcgctggaaggcgacgcagagtgggaagcgaaaatcatcgaactggctggcttcctggattcttacatcccggaaccagagcgtgcgattgacaagccgttcctgctgccgatcgaagacgtattctccatctccggtcgtggtaccgttgttaccggtcgtgtagaacgcggtatcatcaaagtgggcgaagaagttgaaatcgttggtatcaaagagactcagaagtctacctgtactggcgttgaaatgttccgcaaactgctggacgaaggccgtgccggtgagaacgtaggtgttctgctgcgtggtatcaaacgtgaagaaatcgaacgtggtcaggtactggctaagccgggcaccatcaagccgcacactaagttcgaatctgaagtgtacattctgtccaaagatgaaggcggccgtcatactccgttcttcaaaggctaccgtccgcagttctacttccgtactactgacgtgactggtaccatcgaactgccggaaggcgtagagatggtaatgccgggcgacaatatcaaaatggttgttaccctgatccacccgatcgcaatggacgacggtctgcgtttcgcaatccgtgaaggcggccgtactgttggcgcgggcgttgttgctaaagttctcggctaa

SEQ ID NO: 3252 - protein, 394 aa, Salmonella typhi
MSKEKFERTKPHVNVGTIGHVDHGKTTLTAAITTVLAKTYGGAARAFDQIDNAPEEKARGITINTSHVEYDTPTRHYAHVDCPGHADYVKNMITGAAQMDGAILVVAATDGPMPQTREHILLGRQVGVPYIIVFLNKCDMVDDEELLELVEMEVRELLSQYDFPGDDTPIVRGSALKALEGDAEWEAKIIELAGFLDSYIPEPERAIDKPFLLPIEDVFSISGRGTVVTGRVERGIIKVGEEVEIVGIKETQKSTCTGVEMFRKLLDEGRAGENVGVLLRGIKREEIERGQVLAKPGTIKPHTKFESEVYILSKDEGGRHTPFFKGYRPQFYFRTTDVTGTIELPEGVEMVMPGDNIKMVVTLIHPIAMDDGLRFAIREGGRTVGAGVVAKVLG

SEQ ID NO: 3253 - DNA, 1260 bp, Scenedesmus obliquus
  CDS (1)..(1260): transl_table=11
atggcacgcgcaaaatttgaacgttcaaaaccgcatgtaaatattggtactattggtcacgtagaccatggaaaaacaactttaacagcagcaatcacaatggctttagcagcattaggtggtgctactggtaaaaaatatgatgaaattgattcagctccagaagaaaaagctcgtggtattacaattaatactgcacacgtagaatacgaaactccaaatcgtcactatgctcacgtggactgtccaggtcacgcagactatgttaaaaacatgattacaggtgctgcccaaatggatggtgctattttagtagtatcaggtgctgatggtccaatgccacaaacaaaagaacacatcttattagcaaaacaagttggtgtaccaaacatggttgttttcttaaacaaagaagatcaagttgatgatgctgaattattagaattagtagaattagaagttcgtgaaacattagacaaatatgaattcccaggagatgaaattccaattgtaagtgggtcagctttattagctttagaagctttagttgaaaatcctaaaattcaacgtggtgataacaaatgggtagataaaatttttgatttaatggataaagttgatgaatatattccaacaccagaccgtgaaactgataaacctttcttattagctgttgaagatgttttatcaattacaggtcgtggaacagttgcaacaggacgtgttgaaagaggaactttaaaagtaggtgaaaacgttgaattaattggattaaaagacacaaaagcaacagttgttacaggtctagaaatgttcaaaaaaacattagatgaaacaatggctggtgataatgttggtgtacttttacgtggtattcaaaaaaaagatgtggaacgtggaatggttttagcaaaaccaggttcaattactcctcacacaaaatttgaagcacaagtttatgttttaacaaaagaagaaggtggacgtcattcaccattcttagtaggctaccaaccacaattctttattcgtacaacagatgttactggaaaaattgtaagctttactcatattcaaatgaaaaacccttcatcagtagctgaagaacattcaaataaaatggcgatgcctggtgaccgtatcgaagttactgttcaattaatttatccagtagctgttgaaaaaggtatgcgttttgctattcgtgaaggtggtcgtacagtaggtgctggtgttgttacaaatattttagaagaataa

SEQ ID NO: 3254 - protein, 419 aa, Scenedesmus obliquus
MARAKFERSKPHVNIGTIGHVDHGKTTLTAAITMALAALGGATGKKYDEIDSAPEEKARGITINTAHVEYETPNRHYAHVDCPGHADYVKNMITGAAQMDGAILVVSGADGPMPQTKEHILLAKQVGVPNMVVFLNKEDQVDDAELLELVELEVRETLDKYEFPGDEIPIVSGSALLALEALVENPKIQRGDNKWVDKIFDLMDKVDEYIPTPDRETDKPFLLAVEDVLSITGRGTVATGRVERGTLKVGENVELIGLKDTKATVVTGLEMFKKTLDETMAGDNVGVLLRGIQKKDVERGMVLAKPGSITPHTKFEAQVYVLTKEEGGRHSPFLVGYQPQFFIRTTDVTGKIVSFTHIQMKNPSSVAEEHSNKMAMPGDRIEVTVQLIYPVAVEKGMRFAIREGGRTVGAGVVTNILEE

SEQ ID NO: 3255 - DNA, 1320 bp, Schizosaccharomyces pombe
  CDS (1)..(1320)
atgaattcagctaaagctacctctctcctctttcaaggctttagaaaaaattgcttgcgattgaaccgcatttctttcgcttcaggtttgattaaccggttcaccgtcccagctcgaacttatgctgacgaaaaggtgttcgttagaaaaaagccgcatgtcaatattggtactattggtcatgttgaccacggtaaaacgacgttgacggctgctattactaaatgcctttctgatcttggtcaagctagttttatggattatagtcaaattgacaaggcccccgaggaaaaggcacgtggtattaccatttcatctgcccatgttgaatacgaaactgctaatcgtcactatgcccatgtggattgtcctggtcacgccgattacattaagaatatgattactggtgctgctacaatggatggcgctatcattgttgtttctgctaccgatggtcaaatgcctcaaactcgtgaacatttgcttctggctcgtcaagtcggtgtaaagcaaattgttgtatacatcaataaagtcgatatggtcgagcctgatatgatcgagcttgtcgaaatggaaatgcgtgagctactctccgaatacggatttgatggtgacaatactccaattgttagcggcagtgctttatgtgccttagagggtcgtgagcctgagattggtctcaatagtattactaaattgatggaagctgttgatagttatattactcttcctgaaagaaaaacggatgtccctttcttgatggccatcgaggacgttttttcaatttcaggtcgcggaactgtagtcactggccgtgtcgagcgcggtactttaaagaagggtgctgaaatcgaaatcgtcggttatggtagccatttaaagactaccgttactggaattgaaatgttcaaaaagcagcttgatgccgccgttgccggtgacaattgtggccttttacttcgttctatcaagcgagagcaattaaaacgtggaatgattgtcgctcaaccaggaaccgttgctcctcatcagaaattcaaggcatcattctatattttgacaaaagaggaaggaggtcgtcgtaccggtttcgttgacaagtatcgtccccaactgtacagtcgtacttccgacgttactgtcgaacttacccaccctgatcctaacgactcagacaaaatggttatgcctggagacaatgtcgagatgatctgtacgcttattcaccccattgtcatcgaaaaaggacaacgcttcacagttcgtgagggtggaagcactgtaggcacagctttggttactgaacttttggattag

SEQ ID NO: 3256 - protein, 439 aa, Schizosaccharomyces pombe
MNSAKATSLLFQGFRKNCLRLNRISFASGLINRFTVPARTYADEKVFVRKKPHVNIGTIGHVDHGKTTLTAAITKCLSDLGQASFMDYSQIDKAPEEKARGITISSAHVEYETANRHYAHVDCPGHADYIKNMITGAATMDGAIIVVSATDGQMPQTREHLLLARQVGVKQIVVYINKVDMVEPDMIELVEMEMRELLSEYGFDGDNTPIVSGSALCALEGREPEIGLNSITKLMEAVDSYITLPERKTDVPFLMAIEDVFSISGRGTVVTGRVERGTLKKGAEIEIVGYGSHLKTTVTGIEMFKKQLDAAVAGDNCGLLLRSIKREQLKRGMIVAQPGTVAPHQKFKASFYILTKEEGGRRTGFVDKYRPQLYSRTSDVTVELTHPDPNDSDKMVMPGDNVEMICTLIHPIVIEKGQRFTVREGGSTVGTALVTELLD

SEQ ID NO: 3257 - DNA, 1185 bp, Shewanella putrefaciens
  CDS (1)..(1185): transl_table=11
atggctaaagctaaatttgaacgtattaagccccatgtaaacgtgggcaccattggtcacgttgaccatggtaaaaccactctgactgcagctatctctcacgtactggctaagacctacggtggcgaagctaaagacttctctcaaatcgataacgctccagaagagcgtgagcgcggtattaccatcaatacctctcacatcgaatatgacacgccatcacgccactacgcccacgtagactgcccaggccacgctgactatgttaaaaacatgatcactggtgctgcacagatggacggcgcgattctggtagtcgcttcaacagacggtccaatgccacagactcgtgagcacatcctgctttctcgtcaggttggcgtaccattcatcatcgtattcatgaacaaatgtgacatggtagatgacgaagagctgttagagctagttgagatggaagtgcgtgaactgttatcagaatacgatttcccaggtgatgacttaccggtaatccaaggttcagctctgaaagcgctagaaggcgagccagagtgggaagcaaaaatccttgaattagcagcggcgctggattcttacattccagaaccacaacgtgacatcgataagccgttcctactgccaatcgaagacgtattctcaatttcaggccgtggtacagtagtaacaggtcgtgttgagcgtggtattgtacgcgtaggcgacgaagttgaaatcgttggtgtacgtgcgacaactaagacaacgtgtactggtgtagaaatgttccgtaaactgcttgacgaaggtcgtgcaggtgagaactgtggtattttgttacgtggtactaagcgtgatgacgtagaacgtggtcaagtattagcgaagccaggttcaatcaacccacacaccacttttgaatcagaagtttacgtactgtcaaaagaagaaggtggccgtcacacgccattcttcaaaggctaccgtccacagttctacttccgtacaactgacgtaaccggtactatcgaactgccagaaggcgtagagatggtaatgccaggcgacaacatcaagatggtagtgacactgatttgcccaatcgcgatggacgaaggtttacgcttcgcaatccgtgaaggcggtcgtacagtgggtgcaggtgtagtagctaaaatcattgcttaa

SEQ ID NO: 3258 - protein, 394 aa, Shewanella putrefaciens
MAKAKFERIKPHVNVGTIGHVDHGKTTLTAAISHVLAKTYGGEAKDFSQIDNAPEERERGITINTSHIEYDTPSRHYAHVDCPGHADYVKNMITGAAQMDGAILVVASTDGPMPQTREHILLSRQVGVPFIIVFMNKCDMVDDEELLELVEMEVRELLSEYDFPGDDLPVIQGSALKALEGEPEWEAKILELAAALDSYIPEPQRDIDKPFLLPIEDVFSISGRGTVVTGRVERGIVRVGDEVEIVGVRATTKTTCTGVEMFRKLLDEGRAGENCGILLRGTKRDDVERGQVLAKPGSINPHTTFESEVYVLSKEEGGRHTPFFKGYRPQFYFRTTDVTGTIELPEGVEMVMPGDNIKMVVTLICPIAMDEGLRFAIREGGRTVGAGVVAKIIA

SEQ ID NO: 3259 - DNA, 1185 bp, Shigella flexneri
  CDS (1)..(1185): transl_table=11
gtgtctaaagaaaagtttgaacgtacaaaaccgcacgttaacgtcggtactatcggccacgttgaccatggtaaaacaacgctgaccgctgcaatcactaccgtactggctaaaacctacggcggtgctgctcgcgcattcgaccagatcgataacgcgccggaagaaaaagctcgtggtatcaccatcaacacttctcacgttgaatacgacaccccgacccgtcactacgcacacgtagactgcccggggcacgccgactatgttaaaaacatgatcaccggtgctgctcagatggacggcgcgatcctggtagttgctgcgactgacggcccgatgccgcagactcgtgagcacatcctgctgggtcgtcaggtaggcgttccgtacatcatcgtgttcctgaacaaatgcgacatggttgatgacgaagagctgctggaactggttgaaatggaagttcgtgaacttctgtctcagtacgacttcccgggcgacgacactccgatcgttcgtggttctgctctgaaagcgctggaaggcgacgcagagtgggaagcgaaaatcctggaactggctggcttcctggattcttatattccggaaccagagcgtgcgattgacaagccgttcctgctgccgatcgaagacgtattctccatctccggtcgtggtaccgttgttaccggtcgtgtagaacgcggtatcatcaaagttggtgaagaagttgaaatcgttggtatcaaagagactcagaagtctacctgtactggcgttgaaatgttccgcaaactgctggacgaaggccgtgctggtgagaacgtaggtgttctgctgcgtggtatcaaacgtgaagaaatcgaacgtggtcaggtactggctaagccgggcaccatcaagccgcacaccaagttcgaatctgaagtgtacattctgtccaaagatgaaggcggccgtcatactccgttcttcaaaggctaccgtccgcagttctacttccgtactactgacgtgactggtaccatcgaactgccggaaggcgtagagatggtaatgccgggcgacaacatcaaaatggttgttaccctgatccacccgatcgcgatggacgacggtctgcgtttcgcaatccgtgaaggcggccgtaccgttggcgcgggcgttgttgctaaagttctgggctaa

SEQ ID NO: 3260 - protein, 394 aa, Shigella flexneri [sequence omitted]

SEQ ID NO: 3261 - DNA, 1233 bp, Spirulina platensis
  CDS (1)..(1233): transl_table=11
atggcacgcgcaaaatttgaacggaacaaacctcacgttaacattggtactatcggtcacgttgaccacggtaaaaccacgctgactgctgctatcaccatgacattggctgcctctggtggtgctaaagctcgtaagtatgatgatattgatgcggctcctgaagaaaagcagcggggtattaccatcaataccgctcacgtagagtatgaaactgaacaacgccactatgctcacgttgactgtccgggacacgctgactatgtgaaaaatatgatcactggtgctgcccaaatggatggtgcaattctggtggtttcagcggctgatggtcctatgcctcaaacccgtgaacatatcctgctggcgaaacaggtaggggttcctagtatcgtggttttcctgaacaaagccgatatggtagatgatgaggaactactggaactggtggaattggaagttcgcgaactgctaagttcatacgatttccccggtgatgatattcccattgtttctggttctgctttgaaagcattggactttctgacagaaaaccccaaaactactcgcggtgagaatgattgggttgacaagattcatgctctgatggatgaagtagatgcttatatccccactcctgagcgcgatatcgataagggccttcttgatgggctgtgggaagatgttttctcgattactggtcggggtacggtgtctacagccgggatcgaacggggtaaagtcaaggtgggtgacactgttgaactgattggaattaaggatacccgcaccactactgtaactggggcggaaatgttccagaaaactcttgaggaggggatggcgggagataacgtcggtctactgctgcggggtattcagaaaaatgatgttcaacggggtatggtaattgctaaacccaaatcaattactccccacactaagtttgaggcggaagtttatatcctcaagaaagaagaaggcggacggcacactcctttctttaaaggttatcgtcctcagttctatgtacggactactgatgtaaccgggactattgatgagtttactgctgatgatggcagcactccggaaatggttatccctggtgaccggattaatatgactgtacaactcatctgcccgatcgctattgagcaagggatgcgtttcgctatccgtgagggtggtcgtactgttggtgcgggtgtagttgctaagattctggcttag

SEQ ID NO: 3262 - protein, 410 aa, Spirulina platensis [sequence omitted]

SEQ ID NO: 3263 - DNA, 1185 bp, Staphylococcus aureus
  CDS (1)..(1185): transl_table=11
atggcaaaagaaaaattcgatcgttctaaagaacatgccaatatcggtactatcggtcacgttgaccatggtaaaacaacattaacagcagcaatcgctactgtattagcaaaaaatggtgactcagttgcacaatcatatgacatgattgacaacgctccagaagaaaaagaacgtggtatcacaatcaatacttctcacattgagtaccaaactgacaaacgtcactacgctcacgttgactgcccaggacacgctgactacgttaaaaacatgatcactggtgctgctcaaatggacggcggtatcttagtagtatctgctgctgacggtccaatgccacaaactcgtgaacacattcttttatcacgtaacgttggtgtaccagcattagtagtattcttaaacaaagttgacatggttgacgatgaagaattattagaattagtagaaatggaagttcgtgacttattaagcgaatatgacttcccaggtgacgatgtacctgtaatcgctggttcagcattaaaagctttagaaggcgatgctcaatacgaagaaaaaatcttagaattaatggaagctgtagatacttacattccaactccagaacgtgattctgacaaaccattcatgatgccagttgaggacgtattctcaatcactggtcgtggtactgttgctacaggccgtgttgaacgtggtcaaatcaaagttggtgaagaagttgaaatcatcggtttacatgacacatctaaaacaactgttacaggtgttgaaatgttccgtaaattattagactacgctgaagctggtgacaacattggtgcattattacgtggtgttgctcgtgaagacgtacaacgtggtcaagtattagctgctcctggttcaattacaccacatactgaattcaaagcagaagtatacgtattatcaaaagacgaaggtggacgtcacactccattcttctcaaactatcgtccacaattctatttccgtactactgacgtaactggtgttgttcacttaccagaaggtactgaaatggtaatgcctggtgataacgttgaaatgacagtagaattaatcgctccaatcgcgattgaagacggtactcgtttctcaatccgtgaaggtggacgtactgtaggatcaggcgttgttactgaaatcattaaataa

SEQ ID NO: 3264 - protein, 394 aa, Staphylococcus aureus
MAKEKFDRSKEHANIGTIGHVDHGKTTLTAAIATVLAKNGDSVAQSYDMIDNAPEEKERGITINTSHIEYQTDKRHYAHVDCPGHADYVKNMITGAAQMDGGILVVSAADGPMPQTREHILLSRNVGVPALVVFLNKVDMVDDEELLELVEMEVRDLLSEYDFPGDDVPVIAGSALKALEGDAQYEEKILELMEAVDTYIPTPERDSDKPFMMPVEDVFSITGRGTVATGRVERGQIKVGEEVEIIGLHDTSKTTVTGVEMFRKLLDYAEAGDNIGALLRGVAREDVQRGQVLAAPGSITPHTEFKAEVYVLSKDEGGRHTPFFSNYRPQFYFRTTDVTGVVHLPEGTEMVMPGDNVEMTVELIAPIAIEDGTRFSIREGGRTVGSGVVTEIIK

SEQ ID NO: 3265 - DNA, 1191 bp, Stigmatella aurantiaca
  CDS (1)..(1191): transl_table=11
atggccaaggagaagttcgagcggaacaaaccccacgtgaacatcgggacgatcggacacgtggaccacgggaagacgtcgctgacggccgccatcaccaaggtgctggccaagacgggcggcgccacgttcctggcctatgaccagatcgacaaggcccccgaggagcgtgagcgcggcatcaccatctccacggcgcacgtggagtaccagacgaagaaccgccactacgcgcacgtggactgtcctggccacgccgactacgtgaagaacatgatcacgggcgcggcgcagatggacggagcgattctggtggtgtccgcggccgacggcccgatgccccagacgcgtgagcacatcctgctggccaggcaggtgggcgtgccctacatcgtcgtcttcctgaacaaggtggacatgctggacgatccggagctgcgcgagctggtggagatggaggtgcgcgacctgctcaagaagtacgagttcccgggcgacagcatccccatcatccctggcagcgcgctcaaggcgctggagggagacaccagcgacatcggcgagggagcgatcctgaagctgatggcggcggtggacgagtacatcccgacgccgcagcgtgcgacggacaagccgttcctgatgccggtggaagacgtgttctccatcgcaggccgaggaacggtggcgacgggccgagtggagcgcggcaagatcaaggtgggcgaggaagtggagatcgtggggatccgtccgacgcagaagacggtcatcacgggggtggagatgttccgcaagctgctggacgagggcatggcgggagacaacatcggagcgctgctgcgaggcctgaagcgcgaggacctggagcgtgggcaggtgctggcgaactgggggagcatcaacccgcacacgaagttcaaggcgcaggtgtacgtgctgtcgaaggaagagggagggcggcacacgccgttcttcaagggataccggccgcagttctacttccggacgacggacgtgaccggaacggtgaagctgccggacaacgtggagatggtgatgccgggagacaacatcgccatcgaggtggagctcattactccggtcgccatggagaaggagctgccgttcgccatccgtgagggtggccgcacggtgggcgccggcgtcgttgccgacatcatcgcctag

SEQ ID NO: 3266 - protein, 396 aa, Stigmatella aurantiaca
MAKEKFERNKPHVNIGTIGHVDHGKTSLTAAITKVLAKTGGATFLAYDQIDKAPEERERGITISTAHVEYQTKNRHYAHVDCPGHADYVKNMITGAAQMDGAILVVSAADGPMPQTREHILLARQVGVPYIVVFLNKVDMLDDPELRELVEMEVRDLLKKYEFPGDSIPIIPGSALKALEGDTSDIGEGAILKLMAAVDEYIPTPQRATDKPFLMPVEDVFSIAGRGTVATGRVERGKIKVGEEVEIVGIRPTQKTVITGVEMFRKLLDEGMAGDNIGALLRGLKREDLERGQVLANWGSINPHTKFKAQVYVLSKEEGGRHTPFFKGYRPQFYFRTTDVTGTVKLPDNVEMVMPGDNIAIEVELITPVAMEKELPFAIREGGRTVGAGVVADIIA

SEQ ID NO: 3267 - DNA, 1260 bp, Stigeoclonium helveticum
  CDS (1)..(1260): transl_table=11
atggcaagagctaaatttgaacgtaaaaaaccgcacgtaaacattggaacaattggtcacgttgaccatggtaaaacaactctaacagctgctattacaatggcattagctgctcgtggaggtgcaacaggaagaaaatatgatgaaattgattctgctcctgaagaaaaagctagaggtattacaattaatgctgctcatgttgagtacgaaacagaaaatcgtcattatgcccatgtagattgtccaggtcatgcagattatgttaaaaatatgattacaggtgccgctcaaatggacggtgctattttagttgtttctggtgcggatggtcctatgcctcaaacaacagaacatgtattattagctaaacaagtaggtgttccagctatcgttgtctttttaaataaagcagaccaggttgatgatccagagttattagaattagtagagttagaagttcgtgatattttagacaaatacggttttgctagtgatgaagttcaaattttatctggttctgctcttttagctttagaagctttagttgaaaatccaaatatcaagccaggtgatagtgaatgggttgataaaatttacaatttaatggcgacggttgatgagcacatccctactccaaaacgtgaaatggataaaccatttttattagctgtagaagatgttttcagtattacaggtcgtggtacagtagctacaggtcgtgttgaacgtggaacactaaaagtgaatgaaacagtagaaattattggattaagagatacaaaaacaacgacagttactgcgattgaaatgttccaaaaaacattagatgaaacaattgctggtgataatgttggtattttattacgtggtgttcaaaaaaaagatattgaacgtggtatggttattgcaaaaccaggtacaattctgccacatactttatttgaaggtcaagtttatgttttaacggcagaagaaggtggtcgtaaaagtggtttttttaaaggttatcaaccacagttttatgttcgtacaacagatgtaactggaaaaattttagatttcagttatattaaacaacgtaatccatctgaactttctacaatgcattctaatcctatggtatgcccaggtgattatgtaaatatgaaaattcaattaattactccaattgctatcgaaaaaggtatgcgttttgctatccgtgaaggtgggcgtacagttggagcaggcatggtactagaaattcttgaatcttaa

SEQ ID NO: 3268 - protein, 419 aa, Stigeoclonium helveticum
MARAKFERKKPHVNIGTIGHVDHGKTTLTAAITMALAARGGATGRKYDEIDSAPEEKARGITINAAHVEYETENRHYAHVDCPGHADYVKNMITGAAQMDGAILVVSGADGPMPQTTEHVLLAKQVGVPAIVVFLNKADQVDDPELLELVELEVRDILDKYGFASDEVQILSGSALLALEALVENPNIKPGDSEWVDKIYNLMATVDEHIPTPKREMDKPFLLAVEDVFSITGRGTVATGRVERGTLKVNETVEIIGLRDTKTTTVTAIEMFQKTLDETIAGDNVGILLRGVQKKDIERGMVIAKPGTILPHTLFEGQVYVLTAEEGGRKSGFFKGYQPQFYVRTTDVTGKILDFSYIKQRNPSELSTMHSNPMVCPGDYVNMKIQLITPIAIEKGMRFAIREGGRTVGAGMVLEILES

SEQ ID NO: 3269 - DNA, 1194 bp, Streptomyces aureofaciens
  CDS (1)..(1194): transl_table=11
gtggcgaaggcgaagttcgagcggactaagccgcacgtcaacatcggcaccatcggtcacattgaccacggtaagacgaccctcacggccgccattaccaaggtgctgcacgacaagtacccggacctgaacgcggcctcggcgttcgaccagatcgacaaggctcccgaggagcgccagcgcggtatcaccatctccatcgcgcacgtcgagtaccagaccgaggcgcgtcactacgcccacgtcgactgcccgggtcacgctgactacatcaagaacatgatcaccggtgccgcccagatggacggtgccatcctcgtggtcgccgccaccgacggcccgatgccgcagaccaaggagcacgtgctcctggcccgccaggtcggcgttccgtacatcgtcgtcgccctgaacaaggccgacatggtggacgacgaggagatcctggagctcgtcgagcttgaggtccgtgagctgctctccgagtacgacttcccgggcgacgacctgccggtcgtccaggtctccgcgctcaaggcgcttgagggcgacaaggagtggggtgacaagctcctcggcctgatggacgccgtggacgaggccatcccgaccccgccgcgtgacaccgacaagccgttcctgatgcccgtcgaggacgtcttcacgatcaccggtcgtggcaccgtcgtcaccggccgcatcgagcgtggtgtcctcaaggtcaacgagaccgtcgacatcatcggcatcaagaccgagaagaccaccaccacggtcaccggcatcgagatgttccgcaagctgctcgacgagggccaggccggtgagaacgtcggtctgctcctccgtggcatcaagcgcgaggacgtcgagcgcggccaggtcatcatcaagcccggttcggtcacgccgcacaccgagttcgaggccgctgcgtacatcctgtcgaaggacgagggtggccgtcacaccccgttcttcaacaactaccgcccgcagttctacttccgtaccacggacgtgaccggcgtcgtgaccctccccgagggcaccgagatggtcatgccgggcgacaacaccgacatgacggtcgcgctgatccagccggtcgccatggaggagggcctgaagttcgccatccgtgagggtggtcgtaccgtgggcgccggccaggtcaccaagatcacgaagtaa

SEQ ID NO: 3270 - protein, 397 aa, Streptomyces aureofaciens
MAKAKFERTKPHVNIGTIGHIDHGKTTLTAAITKVLHDKYPDLNAASAFDQIDKAPEERQRGITISIAHVEYQTEARHYAHVDCPGHADYIKNMITGAAQMDGAILVVAATDGPMPQTKEHVLLARQVGVPYIVVALNKADMVDDEEILELVELEVRELLSEYDFPGDDLPVVQVSALKALEGDKEWGDKLLGLMDAVDEAIPTPPRDTDKPFLMPVEDVFTITGRGTVVTGRIERGVLKVNETVDIIGIKTEKTTTTVTGIEMFRKLLDEGQAGENVGLLLRGIKREDVERGQVIIKPGSVTPHTEFEAAAYILSKDEGGRHTPFFNNYRPQFYFRTTDVTGVVTLPEGTEMVMPGDNTDMTVALIQPVAMEEGLKFAIREGGRTVGAGQVTKITK

SEQ ID NO: 3271 - DNA, 1194 bp, Streptomyces cinnamoneus
  CDS (1)..(1194): transl_table=11
gtggcgaaggcgaagttcgagcggactaagccgcacgtcaacatcggcaccatcggtcacgtcgaccacggtaagacgactcttaccgcggcgatcaccaaggtgctgcacgacgcgatcccggacctgaaccccttcacgccgttcgacgagatcgacaaggcgccggaagagcgtcagcgcggtatcacgatctcgatcgctcacgttgagtaccagaccgagtcgcgtcactacgcccacgtcgactgcccgggtcacgcagactacatcaagaacatgatcaccggtgccgcccagatggacggcgcgatcctcgtggtcgccgcgaccgacggtccgatgccgcagaccaaggagcacgtgctcctggcccgccagtccggcgttccgtacattgtggtggccctgaacaaggccgacatggtggacgacgaggagatcatggagctcgtcgagctcgaggtccgtgagctcctctccgagtacgagttcgacggcgacaactgccccgtcgtccaggtctcggctctcaaggcgctcgagggcgacaaggagtggggcgagaagctcctcggcctcatgaaggccgtggacgagaacatcccgcagcccgagcgtgacgtcgacaagccgttcctgatgccgatcgaggacgtcttcacgatcaccggtcgtggcaccgtcgtcaccggtcgtatcgagcgcggtgtcctcaaggtcaacgagaccgtcgacatcatcggcatcaagaccgagaagaccaccaccacggtcaccggtatcgagatgttccgcaagctgctcgacgagggccaggccggtgagaacgtcggtctgctcctccgtggcatcaagcgcgaggacgtcgagcgcggccagtgcatcatcaagcccggtacggtcacgccgcacaccgagttcgaggccacggcgtacatcctgtcgaaggacgagggtggccgtcacaccccgttcttcaacaactaccgtccgcagttctacttccgtacgactgacgtgaccggtgttgtgaccctcaaggagggcacggagatggtcatgcccggcgacaacgccgagatgaccgtcaacctgatccagcctgtcgcgatggaggagggcctgcgcttcaccatccgtgagggtggccgcaccgtcggcgccggccaggtcgtcaagatcaacaagtaa

SEQ ID NO: 3272 - protein, 397 aa, Streptomyces cinnamoneus
MAKAKFERTKPHVNIGTIGHVDHGKTTLTAAITKVLHDAIPDLNPFTPFDEIDKAPEERQRGITISIAHVEYQTESRHYAHVDCPGHADYIKNMITGAAQMDGAILVVAATDGPMPQTKEHVLLARQSGVPYIVVALNKADMVDDEEIMELVELEVRELLSEYEFDGDNCPVVQVSALKALEGDKEWGEKLLGLMKAVDENIPQPERDVDKPFLMPIEDVFTITGRGTVVTGRIERGVLKVNETVDIIGIKTEKTTTTVTGIEMFRKLLDEGQAGENVGLLLRGIKREDVERGQCIIKPGTVTPHTEFEATAYILSKDEGGRHTPFFNNYRPQFYFRTTDVTGVVTLKEGTEMVMPGDNAEMTVNLIQPVAMEEGLRFTIREGGRTVGAGQVVKINK

SEQ ID NO: 3273 - DNA, 1230 bp, Synechococcus sp
  CDS (1)..(1230): transl_table=11
atggcacgcgctaagtttgaacgcaccaagcctcacgcaaacatcgggaccatcggtcacgttgaccacggtaaaacgacgctgacggcagctatcaccactgtgttggcgaaagctggcatggctaaagcccgcgcttacgctgatatcgacgcagctccggaagaaaaagctcgtggtatcacgatcaacacggctcacgttgaatacgaaaccggcaaccgtcactacgctcacgttgactgtcccggtcacgctgactacgtgaaaaacatgatcacgggtgctgcgcagatggacggcgccatcctcgtggtgtcggctgctgacggccccatgccccaaactcgcgagcacattctgctggcgaaacaggtcggcgttcccaacatcgtcgttttcttgaataaagaagacatggttgatgacgctgaactgttggaattggtggagttggaagtccgtgagctgctgagctcctacgatttccctggcgatgacatccccatcgtggctggttcggctctgcaagccttggaagccattcaaggtggcgcttcgggtcagaaaggtgacaacccttgggttgacaaaatcctgaagctgatggaagaagtcgacgcctacatccccactcctgagcgggaagtcgatcgccccttcctgatggcggtggaagacgtcttcacgattaccggtcgtggcacggtggcgactggccggatcgagcgtggcagcgtcaaggttggcgaaacgatcgaaatcgttggtttgcgtgacacccgcagcaccaccgttaccggtgtggaaatgttccagaagaccctcgacgaaggtctggctggcgacaacgtcggtctgctgctccgcggtatccaaaaaaccgatatcgagcgcggtatggtcttggccaaacccggttcgattacgcctcacaccaagtttgagtctgaggtctacgtgctcaagaaagaagaagggggtcgtcacactccgttcttcccgggctatcgtcctcagttctacgtgcggacaaccgacgtgaccggcgcgatctcggacttcaccgctgacgacggttcggcagctgaaatggtgatcccgggcgatcgcatcaagatgacggttgaactgatcaacccgatcgcaattgagcaaggcatgcgctttgcaatccgtgaaggcggccgcaccatcggtgctggtgtcgtttccaaaatcctccagtag

SEQ ID NO: 3274 - protein, 409 aa, Synechococcus sp
MARAKFERTKPHANIGTIGHVDHGKTTLTAAITTVLAKAGMAKARAYADIDAAPEEKARGITINTAHVEYETGNRHYAHVDCPGHADYVKNMITGAAQMDGAILVVSAADGPMPQTREHILLAKQVGVPNIVVFLNKEDMVDDAELLELVELEVRELLSSYDFPGDDIPIVAGSALQALEAIQGGASGQKGDNPWVDKILKLMEEVDAYIPTPEREVDRPFLMAVEDVFTITGRGTVATGRIERGSVKVGETIEIVGLRDTRSTTVTGVEMFQKTLDEGLAGDNVGLLLRGIQKTDIERGMVLAKPGSITPHTKFESEVYVLKKEEGGRHTPFFPGYRPQFYVRTTDVTGAISDFTADDGSAAEMVIPGDRIKMTVELINPIAIEQGMRFAIREGGRTIGAGVVSKILQ

SEQ ID NO: 3275 - DNA, 1200 bp, Synechocystis sp
  CDS (1)..(1200): transl_table=11
atggcacgcgcaaaatttgaacggacgaaagaccacgtaaacattggcaccattggtcacgttgaccacggtaaaaccaccctaacggcggcgatcaccatgaccttggcggaattgggtggtgccaaagcccggaaatatgaagatattgacgcggctcctgaggaaaaagcccggggcattaccatcaatactgcccacgttgagtatgaaaccgatagccgtcactatgcccacgtagactgtcctggtcacgctgactatgtgaaaaacatgatcaccggtgctgcccagatggacggtgcgattctggtggtttccgccgctgatggccccatgccccaaacccgggaacacattcttttggctaagcaagtaggggttcccaaactggtggtctttttgaataagaaagacatggtggacgacgaagaactgctggaattggtggaactggaagttcgtgaattgctcagcgactacgatttccccggtgatgacattcccatcgttgctggctctgccctcaaggcgatcgaaggagaaaaagaatacaaagatgcgattcttgaactcatgaaagccgttgacgactacatcgacacccctgagcgggaagttgataagcccttcttgatggcggtggaagacgtattctccatcactggtcgtggtaccgttgccaccggtcggattgagcgcggaaaagttaaagttggcgaagaaatttccatcgtcggcattaaagatacccgtaaagccactgttaccggtgtggaaatgttccaaaaaacccttgaagagggaatggctggggacaacgtgggtctgctcctccgggggattcaaaaagaggacatcgaacggggtatggttttggctaaacccggttccatcactccccacaccgaatttgaaggggaagtttacgtgctcaagaaagaagaaggtggccgccacactcctttctttgccaactaccgccctcagttctatgtacggaccactgacgtaaccggtaccatcaaaagctacaccgctgacgacggcagtgctgtggaaatggttatgcctggggatcgtatcaaaatgaccgttgagctcattaacccgatcgccattgaacaggggatgcgttttgctatccgcgaaggtggtcgtaccatcggcgccggtgttgtttctaagattttgaagtag

SEQ ID NO: 3276 - protein, 399 aa, Synechocystis sp
MARAKFERTKDHVNIGTIGHVDHGKTTLTAAITMTLAELGGAKARKYEDIDAAPEEKARGITINTAHVEYETDSRHYAHVDCPGHADYVKNMITGAAQMDGAILVVSAADGPMPQTREHILLAKQVGVPKLVVFLNKKDMVDDEELLELVELEVRELLSDYDFPGDDIPIVAGSALKAIEGEKEYKDAILELMKAVDDYIDTPEREVDKPFLMAVEDVFSITGRGTVATGRIERGKVKVGEEISIVGIKDTRKATVTGVEMFQKTLEEGMAGDNVGLLLRGIQKEDIERGMVLAKPGSITPHTEFEGEVYVLKKEEGGRHTPFFANYRPQFYVRTTDVTGTIKSYTADDGSAVEMVMPGDRIKMTVELINPIAIEQGMRFAIREGGRTIGAGVVSKILK

SEQ ID NO: 3277 - DNA, 1188 bp, Taxeobacter ocellatus
  CDS (1)..(1188): transl_table=11
atggctaaagaaacttttgaccggtccaagccgcacgtaaacatcggcacgatcggtcacgtggaccacggcaaaacgactctgaccgctgctatcaccacggtgctggctaacaaaggtctggccgctaagcgtgacttctcctcgatcgacaacgctccggaggaaaaagagcgcggtatcaccatcaacaccgctcacgttgagtactcgaccgctaatcgtcactacgctcacgttgactgccctggtcacgctgactacgtgaagaacatggtaaccggtgctgctcaaatggacggtgctatcctcgtggtagctgctaccgacgggccgatgccccagacccgtgagcacatcctgctggctcgccaggtaggtgtaccgcagctggttgtgttcatgaacaaagtggacatggtggacgaccccgagctgctcgaactcgttgagatggaaatccgcgagctgctgtcgttctacgacttcgacggtgacaacatcccggtagtgcaaggttcggctctcggcggcctgaacggcgacgccaagtgggtaggcaccatcgagcaactgatggactcggttgacaactggattccgattcccccgcgtctgacggaccagccgttcctgatgccggtagaagacgtgttctcgattaccggccgtggcaccgtagctacgggtcgtatcgagcgcggcgtaatcaactcgggtgagccggttgaaatcctcggtatgggtgctgaaaacctcaagtcgaccgtaacgggcgttgagatgttccgcaagatccttgaccgtggcgaagctggtgacaacgtaggtctgctgctccgtggtattgaaaaagaagccatccgtcgcggcatggttatctgcaaacctggctcggtaaccccccacaaaaagttcaaggctgaagtttacgttctgtcgaaggaagaaggtggccgtcacacgccgttcttcaacaactaccgtccgcagttctacttccgcaccaccgacgttaccggtattatctcgctggctgaaggcgtagaaatggtaatgcccggcgacaacgtgaccatctcggttgagctgatcaacgctgtagctatggagaaaggcctgcgcttcgctatccgcgaaggtggccgcacggtaggtgccggtcaggtaaccgaaatcctcgactaa

SEQ ID NO: 3278 - protein, 395 aa, Taxeobacter ocellatus
MAKETFDRSKPHVNIGTIGHVDHGKTTLTAAITTVLANKGLAAKRDFSSIDNAPEEKERGITINTAHVEYSTANRHYAHVDCPGHADYVKNMVTGAAQMDGAILVVAATDGPMPQTREHILLARQVGVPQLVVFMNKVDMVDDPELLELVEMEIRELLSFYDFDGDNIPVVQGSALGGLNGDAKWVGTIEQLMDSVDNWIPIPPRLTDQPFLMPVEDVFSITGRGTVATGRIERGVINSGEPVEILGMGAENLKSTVTGVEMFRKILDRGEAGDNVGLLLRGIEKEAIRRGMVICKPGSVTPHKKFKAEVYVLSKEEGGRHTPFFNNYRPQFYFRTTDVTGIISLAEGVEMVMPGDNVTISVELINAVAMEKGLRFAIREGGRTVGAGQVTEILD

SEQ ID NO: 3279 - DNA, 1185 bp, Wigglesworthia glossinidia brevipalpis
  CDS (1)..(1185): transl_table=11
atgtctaaagaaaaatttcaaagaattaaaccacatataaatgtgggtacaattggccatgtagatcatggaaagaccacattaactgcagccataactaatgtattagcaaaaaaatatggaggaattccaaaagcttttgatcaaattgataatgctccagaagaaaaagctagaggtattacaataaatacatctcatgtagaatatgatactaaaataagacattacgctcacgtagattgtccaggccatgctgattatgtaaaaaatatgattactggagccgctcaaatggatggagctatacttgtagtagcagctacagatggtccgatgcctcaaactcgtgaacatatacttcttggaaggcaagttggagttccatacatagtagtgtttatgaataaatgcgatatggtagatgacgaagaactattagaattagtagaaattgaaataagagaactattatctcagtatgattttccaggagatgaaatcccaataataagaggatcagctctaaaagctttagaaaaagatcctatttggattcaaaaaataatagatttatctgaacatttagataattatattccagaaccaaaaagaataattgatcaaccatttcttttaccaatagaagatgtattttcaatatctggtagaggaacagtagtaactggtagaatagaaagaggaacagtaaaagtaggagaagaaatagaaattattggcataaaaaatacagtaaaaactacatgtacaggtgtagaaatgtttagaaaactattagatgaaggaagagctggagaaaacgttggaatattattaagaggaacaaaacgagaagatgtagaaagagggcaagttttagctaaaccaggatcaattaaacctcatactcaatttgaatcagaagtatatgtattaaaaaaagaagaaggaggtcgtcacactccattttttaatggatataaaccacaattttattttcgtacaacagatgttacaggaagtgttgaattacaaaaaggaacagaaatggttatgccaggagataatgtgaaaatgttagtaaaattaatttctcctatagccatggatgacggtttaagatttgcaataagagaaggtggaaaaacagtaggagcaggaattgtatctaaaataattgtttga

SEQ ID NO: 3280 - protein, 394 aa, Wigglesworthia glossinidia brevipalpis
MSKEKFQRIKPHINVGTIGHVDHGKTTLTAAITNVLAKKYGGIPKAFDQIDNAPEEKARGITINTSHVEYDTKIRHYAHVDCPGHADYVKNMITGAAQMDGAILVVAATDGPMPQTREHILLGRQVGVPYIVVFMNKCDMVDDEELLELVEIEIRELLSQYDFPGDEIPIIRGSALKALEKDPIWIQKIIDLSEHLDNYIPEPKRIIDQPFLLPIEDVFSISGRGTVVTGRIERGTVKVGEEIEIIGIKNTVKTTCTGVEMFRKLLDEGRAGENVGILLRGTKREDVERGQVLAKPGSIKPHTQFESEVYVLKKEEGGRHTPFFNGYKPQFYFRTTDVTGSVELQKGTEMVMPGDNVKMLVKLISPIAMDDGLRFAIREGGKTVGAGIVSKIIV

SEQ ID NO: 3281 - DNA, 1200 bp, Wolinella succinogenes
  CDS (1)..(1200): transl_table=11
atggctaaggaaaagtttgtaaaaaacaaaccccacgttaatatcggtaccatcggtcacgttgaccacggtaaaaccactcttagtgccgctatttctgcggtacttgcaaccaaaggtctttgcgagcttaaagattatgatgcgatcgacaatgctcctgaagagagagagcgtggtatcaccatcgctacttcacacatcgagtatgaaacagaaaatcgacactacgctcacgttgactgccctggacacgccgactatgttaaaaacatgattacaggtgctgctcaaatggatggcgcgattcttgttgtttctgcggcggatggccccatgccccaaactagggagcacattcttctttctcgacaagtaggcgttccttacatcgtggttttcttgaacaaagaagatatggttgatgacgctgagcttcttgagcttgttgaaatggaagttagagaacttcttagcaactacgacttccctggagatgacactcctatcgttgcaggttccgctcttaaagctcttgaagaggctaagacaggaaatgttggcgagtggggcgagaaagtattgaagcttatggctgaggttgaccgatatattcctacgcctgagcgagatgtggataagcctttccttatgcctgttgaagacgtattctccatcgcgggtcgtggaaccgttgtgacaggaagaattgaaagaggcgtggttaaagtcggtgacgaagtagaaatcgttggtatccgaaacacacaaaaaacaaccgtaactggcgttgagatgttccgaaaagagctcgacaagggtgaggcgggtgacaacgttggtgttcttttgagaggcaccaagaaagaagatgttgagagaggtatggttctttgtaaaataggttctatcactcctcacactaactttgaaggtgaagtttacgttctttccaaagaggaaggcggacgacacactccattcttcaatggataccgacctcagttctatgttagaactacagacgttaccggttctatctctcttcctgagggcgtagagatggttatgcctggtgacaacgttaagatcaatgttgagcttatcgctcctgtagccctcgaagagggaacacgattcgcgatccgtgaaggtggtcgaaccgttggtgcgggtgtcgttaccaagatcactaaataa

SEQ ID NO: 3282 - protein, 399 aa, Wolinella succinogenes
MAKEKFVKNKPHVNIGTIGHVDHGKTTLSAAISAVLATKGLCELKDYDAIDNAPEERERGITIATSHIEYETENRHYAHVDCPGHADYVKNMITGAAQMDGAILVVSAADGPMPQTREHILLSRQVGVPYIVVFLNKEDMVDDAELLELVEMEVRELLSNYDFPGDDTPIVAGSALKALEEAKTGNVGEWGEKVLKLMAEVDRYIPTPERDVDKPFLMPVEDVFSIAGRGTVVTGRIERGVVKVGDEVEIVGIRNTQKTTVTGVEMFRKELDKGEAGDNVGVLLRGTKKEDVERGMVLCKIGSITPHTNFEGEVYVLSKEEGGRHTPFFNGYRPQFYVRTTDVTGSISLPEGVEMVMPGDNVKINVELIAPVALEEGTRFAIREGGRTVGAGVVTKITK

SEQ ID NO: 3283 - DNA, 1191 bp, Xanthomonas axonopodis pv
  CDS (1)..(1191): transl_table=11
atggcaaaagctaaattcgagcgcaccaagccgcacgtgaacgtcggcaccatcggtcacgttgaccatggcaagaccacgttgaccgctgcgctgaccaagatcggtgccgagcgtttcggtggtgagttcaaggcgtacgacgcgatcgacgcggcgccggaagagaaggcgcgcggcatcacgatttcgaccgcacacgtcgaatacgaatccccgacccgccactacgcgcacgtcgactgccccggccacgccgactacgtcaagaacatgatcaccggtgcggcgcagatggacggcgcgatcctggtgtgctcggccgccgacggcccgatgccgcagacccgtgagcacatcctgctctcgcgtcaggtcggtgtgccgcacatcgtggtgttcctgaacaaggccgacatggtcgacgacgccgagctgctcgagctggtcgaaatggaggtgcgcgagctgctgagcaagtacgacttcccgggcgacgacaccccgatcatccacggttcggcgcgtctggcgctggacggcgatcagagcgacatcggtgtgccggcgatcctgaagctggtcgaagcgctggattcgttcattcccgagccgacccgcgacgtcgaccgtccgttcctgatgccggtcgaagacgtgttctcgatctccggccgcggcaccgtggtgaccggtcgtatcgagcgcggcatcatcaaggtgggcgacgaaatcgaaatcgtcggtatccgcgatacgcagaagaccacggtcaccggcgtggaaatgttccgcaagctgctggaccagggccaggcaggcgacaacgccggtctgctgctgcgcggcaccaagcgtgacgacgtcgagcgtgggcaggtgctgtgcaagccgggttcgatcaagccgcacaccgagttcgaagccgaagtctacgtgctgtccaaggatgagggtggccgtcataccccgttcttcaagggctaccgtccgcagttctacttccgcaccaccgacatcactggcgcttgccagttgccggaaggcgtggaaatggtgatgccgggcgacaacgtgaagatggtcgtgaccctgatcaacccggtcgcgatggacgaaggtctgcgcttcgccatccgtgaaggcggtcgtaccgtcggcgccggcgtggttgccaagatcatcaagtaa

SEQ ID NO: 3284 - protein, 396 aa, Xanthomonas axonopodis pv
MAKAKFERTKPHVNVGTIGHVDHGKTTLTAALTKIGAERFGGEFKAYDAIDAAPEEKARGITISTAHVEYESPTRHYAHVDCPGHADYVKNMITGAAQMDGAILVCSAADGPMPQTREHILLSRQVGVPHIVVFLNKADMVDDAELLELVEMEVRELLSKYDFPGDDTPIIHGSARLALDGDQSDIGVPAILKLVEALDSFIPEPTRDVDRPFLMPVEDVFSISGRGTVVTGRIERGIIKVGDEIEIVGIRDTQKTTVTGVEMFRKLLDQGQAGDNAGLLLRGTKRDDVERGQVLCKPGSIKPHTEFEAEVYVLSKDEGGRHTPFFKGYRPQFYFRTTDITGACQLPEGVEMVMPGDNVKMVVTLINPVAMDEGLRFAIREGGRTVGAGVVAKIIK

SEQ ID NO: 3285 - DNA, 1314 bp, Saccharomyces cerevisiae
  CDS (1)..(1314)
atgtcagctttattaccaagattactcacaagaacagcttttaaagcttctgggaaacttctgaggctctcttcagtaatttctaggaccttttctcaaactactacttcctatgcagctgcttttgatcgttccaaaccgcatgtaaatataggtacgatcggccatgttgatcatgggaagacaactttaaccgcagccattacgaaaacgttagccgcaaaaggtggtgccaacttcttggactatgctgccatcgataaggctccggaagaaagagctcgtggtattacaatttctactgcacacgtggaatacgaaacggccaagagacattattctcacgtcgactgtccaggccacgctgattacatcaagaatatgattaccggtgctgctcaaatggatggtgctatcattgttgtagctgctaccgatggacaaatgccccaaactagagaacatttacttttggccagacaagttggtgtccaacatattgtcgtttttgttaacaaggttgataccattgatgatccagaaatgttagagttagtcgaaatggaaatgagagaacttttaaacgaatatgggtttgacggtgataatgctccaattatcatgggttctgccctttgcgctttggaaggtcgccaacctgaaattggggagcaggccatcatgaaacttttggatgcagtggatgagtatattcctacacctgaaagagatttgaacaagcctttcttgatgcccgttgaagatatcttctctatctccggtagaggtactgtggtcactggtcgtgtggaaaggggtaatttaaagaaaggtgaggaattggaaattgttggtcacaactccaccccattgaaaacaacagttactggtattgaaatgtttagaaaggaattggactctgctatggcaggtgacaatgccggtgttttacttagaggtatcaggagagatcaattgaagagaggtatggtcttagctaagccaggtaccgttaaagcccatacaaagattctagcctctttgtacattttatccaaagaggaaggtggtagacattctgggtttggtgaaaactacagaccacaaatgtttataagaacagctgatgttacagttgtgatgagatttcctaaggaggttgaagatcattctatgcaagttatgccaggtgacaatgttgaaatggaatgtgatttgatccatcctaccccattagaagttggtcaacgtttcaatatcagagagggtggaagaactgttggtaccggtctaatcacacgtattattgaatag

SEQ ID NO: 3286 - protein, 437 aa, Saccharomyces cerevisiae [sequence omitted]

SEQ ID NO: 3287 - DNA, 1989 bp, Schizosaccharomyces pombe
  CDS (1)..(1989)
atggctagtaatcagccaaataacggtgaacaggatgagcaactcgccaagcagacttctaaactgtcgatgtctgcaaaggcacctacgtttacgcctaaagctgctcccttcattccttctttccaacgccccggatttgtacctgtgaacaatattgctggtggttatccttatgcccaatatacaggccaaggacaaaacagcaactcgccacatcctacgaagagttatcagcaatactaccaaaagccaacaggaaacactgttgatgaagataaaagccgtgtccctgatttttctaaaaagaagagttttgtgcctcctaaaccagcaattcccaaaggaaaggttttgtccctgggtggaaacacctctgctcctaagtctacaaagcccattagcatcagccttggtggaacaaaagctcctacaactaccaaaccagcagcacctgctgcacaaagcaaaacagagacccctgcacccaaggttacctctgagtcaacaaagaaggagaccgctgctcctcctccccaggaaactcctacaaaatctgctgatgctgaactagcaaaaacaccctctgctccagcagcggctcttaagaaagctgctgaggcagctgaacccgccactgtcactgaggatgccaccgatttacaaaatgaggttgatcaagagcttttgaaggatatgtatggaaaggaacatgtcaatattgtttttataggtcatgttgatgcaggaaagtctaccctgggtggtaatattcttttcttgactggtatggttgacaagcgtactatggagaaaatagagagagaagctaaagaagctggtaaagaaagttggtatctttcttgggctttggacagcacttctgaagaacgtgaaaaaggtaaaaccgttgaagttggtcgtgcttactttgaaaccgaacaccgtcgctttagcttgttggatgctccgggtcataaaggttacgttacaaacatgattaatggtgcttctcaagctgatattggtgttttagtcatttcagcgcgtcgtggtgagtttgaagctggttttgagcgcggtggtcaaactcgtgaacatgccgtattggctcgtacacaaggcatcaatcatctagttgtcgttattaataaaatggacgaacctagcgttcagtggtcggaggagcgttataaggaatgtgtcgataagctcagcatgtttttgcgtcgtgtcgctggatacaactcaaagactgatgttaaatatatgcccgtttctgcttacactggtcaaaacgttaaggatcgtgttgacagttcggtttgcccgtggtatcaaggtccatctttgctagaatacttggattctatgactcatttggaacgcaaagtgaatgctccattcatcatgcctattgcctccaagtataaagatttgggtaccatcttagaaggaaagattgaggctggttcgattaagaaaaattcaaacgtattggttatgccaattaatcaaacccttgaagttacagccatatatgatgaagctgatgaagaaatctcttcttctatttgcggtgaccaagttcgtctccgtgtccgtggtgacgattcggatgtccaaactggttatgttttaacatccactaaaaacccagttcatgctactactcgtttcattgcacaaattgcgatccttgagttgccttcaattttgacaactggttattcttgtgtaatgcacattcataccgctgtcgaggaagtttcatttgccaagttgctccataaacttgacaaaacaaaccgcaaaagcaagaaaccccccatgtttgctaccaagggtatgaaaattattgcagagttggaaacacaaactccggtttgtatggaaaggtttgaggactatcagtatatgggccgtttcactttgcgtgatcagggtactacggttgcagttggcaaagtcgtaaaaattttggattag

SEQ ID NO: 3288 - protein, 662 aa, Schizosaccharomyces pombe
MASNQPNNGEQDEQLAKQTSKLSMSAKAPTFTPKAAPFIPSFQRPGFVPVNNIAGGYPYAQYTGQGQNSNSPHPTKSYQQYYQKPTGNTVDEDKSRVPDFSKKKSFVPPKPAIPKGKVLSLGGNTSAPKSTKPISISLGGTKAPTTTKPAAPAAQSKTETPAPKVTSESTKKETAAPPPQETPTKSADAELAKTPSAPAAALKKAAEAAEPATVTEDATDLQNEVDQELLKDMYGKEHVNIVFIGHVDAGKSTLGGNILFLTGMVDKRTMEKIEREAKEAGKESWYLSWALDSTSEEREKGKTVEVGRAYFETEHRRFSLLDAPGHKGYVTNMINGASQADIGVLVISARRGEFEAGFERGGQTREHAVLARTQGINHLVVVINKMDEPSVQWSEERYKECVDKLSMFLRRVAGYNSKTDVKYMPVSAYTGQNVKDRVDSSVCPWYQGPSLLEYLDSMTHLERKVNAPFIMPIASKYKDLGTILEGKIEAGSIKKNSNVLVMPINQTLEVTAIYDEADEEISSSICGDQVRLRVRGDDSDVQTGYVLTSTKNPVHATTRFIAQIAILELPSILTTGYSCVMHIHTAVEEVSFAKLLHKLDKTNRKSKKPPMFATKGMKIIAELETQTPVCMERFEDYQYMGRFTLRDQGTTVAVGKVVKILD

SEQ ID NO: 3289 - DNA, 1968 bp, Oryza sativa
  CDS (1)..(1968)
atgccgcgcaaggttgtctctgggcctgactacgatgatgagtacaatgatgactatgatgagtatgatgaagactatgatgattacggtgggactgggcacagtgacgacattcagcaccctacgaaggagaaagagtcatcgaagaagtcctcaagtatggtgcctgtgctttggagatgctccatgtgcatgttcgataatcatgaaagcatggtgtattgtgagatgtgtggggtttttcgagaatcctttatgaaatctgccaaggatggttcaataaaagtccatgggataccaagtgattttgggacaccttcgatgccgaaatctgattctacaaagatgccagtgaatactcgtactacagactttggtggtgaccctgagataaagaatgctagcatatctcatgagaaagttggttccacacagtacgcatctgttggtagctcatcaggcgctgggaaaaagctgaaggaggaccagagtagtagggctaccagttctgcacagaatgaggatgtggcccagaaactttcttctgacatacagaagctaggtttagaaaagaatgaagtagatactgcaaaaccttatttacctgaagaatataagcctgagaagtggatgtttgctaatgaggaatcaggagtgctgagccaactaaaccttgcaatagtaggtcatgttgattctggcaagtcaacactctctgggagactgctacatctgttaggaaggatatcgaaaaaagatatgcacaagaatgagaaggaggctaaagaaaaaggaaaaggatcatttgcttatgcgtgggctatggatgaaagcagtgaagaaagagaaagaggtgtgacaatgactgtggctgtggcttatttggagaccaataagtaccgtgtagttttgcttgactctccaggccataaagattttgtaccaaatatgatatctggcgcaacgcaagctgatgcagctattcttgttgttgatgcttgcactggttcatttgaagctggcatggacggtgaaggagggaaaagtgttggccagacaaaagaacatgctcagcttattagaagcttcggcgttgaacagcttattgttgcggtcaacaagatggatgccatcgggtactccaaagaaagattcgagttcatcaaggttcaacttggtagttttctgcgggcatgcaacttcaaagattcatctgttacctggattcctcttagtgctgttgaaaatcagaatttgatcaaaattccttctgatgtccgtttaacttcctggtatcaaggattttgtctcttggatgctatagattccttgcagcttccatctcgggatgtttcaaagcccctcattcttcctatctgtgatgttatcaagtctcagtcaacagggcagttggcagcatttggaaaattagagactggagctattcgaattggttcaaaggttttaatttcaccttgtggggaagtggcgacagtgaaatccatcgagcgggattcaaattcatgtgacatagcaagagctggtgataatgtagcggttagtttacagggcatcgatgggagtaagctaatagcaggtgggattctttgcaaccctggtttcccagtgcctgtctctaacttcttggagctaagggttctagtgttggacgtcaccattcctatccttattggctatcaggtcgagtttcacatacatcatgtgaaggaggctgcgagggttacgaaaatcgtggcattgcttgacaaggctggcaaaccaagcaaaactgcacctcgatttcttaagtcaaagcagaatgcagttgtgcaggttaccttagacgctccggtctgtgttgaagaattctccaaatgccgagctcttggcagggcattcttaaggtctggtggaagcacaatcgctgttggagtcgtaacgcgggtactcgggcaagatcagaactga

SEQ ID NO: 3290 - protein, 655 aa, Oryza sativa
MPRKVVSGPDYDDEYNDDYDEYDEDYDDYGGTGHSDDIQHPTKEKESSKKSSSMVPVLWRCSMCMFDNHESMVYCEMCGVFRESFMKSAKDGSIKVHGIPSDFGTPSMPKSDSTKMPVNTRTTDFGGDPEIKNASISHEKVGSTQYASVGSSSGAGKKLKEDQSSRATSSAQNEDVAQKLSSDIQKLGLEKNEVDTAKPYLPEEYKPEKWMFANEESGVLSQLNLAIVGHVDSGKSTLSGRLLHLLGRISKKDMHKNEKEAKEKGKGSFAYAWAMDESSEERERGVTMTVAVAYLETNKYRVVLLDSPGHKDFVPNMISGATQADAAILVVDACTGSFEAGMDGEGGKSVGQTKEHAQLIRSFGVEQLIVAVNKMDAIGYSKERFEFIKVQLGSFLRACNFKDSSVTWIPLSAVENQNLIKIPSDVRLTSWYQGFCLLDAIDSLQLPSRDVSKPLILPICDVIKSQSTGQLAAFGKLETGAIRIGSKVLISPCGEVATVKSIERDSNSCDIARAGDNVAVSLQGIDGSKLIAGGILCNPGFPVPVSNFLELRVLVLDVTIPILIGYQVEFHIHHVKEAARVTKIVALLDKAGKPSKTAPRFLKSKQNAVVQVTLDAPVCVEEFSKCRALGRAFLRSGGSTIAVGVVTRVLGQDQN

SEQ ID NO: 3291 - DNA, 1404 bp, Oryza sativa
  CDS (1)..(1404)
atggcctccctcgcctccgcctccgcatccacctccctggtcttctccacctcctcctccaagccgcgcctcggctcctccgtcggattctcctcgcccgcgcggttccggcgcacggcggcggcggcggcgtccaggggcacggggcggcgcgcggggctgctggtagtgcgcgcggcgagggggaagttcgagcggaccaagccgcacgtcaacatcggcaccatcggccacgtcgaccacgggaagactacgctgacggcggcgctcaccatggtgctcgcctccgtgggcgggagcgcccccaagaagtacgacgagatcgacgcggcgcccgaggagcgcgcccgcggcatcaccatcaacaccgccaccgtcgagtacgagaccgagacccgccactacgcccacgtcgactgccccggccacgccgactacgtcaagaacatgattaccggcgccgcgcagatggacggcgccatcctcgtcgtctccggcgccgacgggcccatgccgcagaccaaggagcacatcctgctcgccaagcaggtcggtgtccccaagattgttgtcttcctcaacaagaaggaccaggtcgacgacgaggagctgctccagctcgtcgagctcgaggtccgcgaattgctctcctcctacgagtacgatggcgacgaagtgcccatcgtcgctggctccgcgctcaaggcgctcgagaacctcatggccaaccctgccattaagcgcggcgatgatgagtgggtggacgggatcttctcgttgattgattccgtggataactacatccctgtcccacagcgccagaccgacctcccgttcttgcttgctgttgaggatgtgttctccatcaccggtcgtggtaccgttgccactggccgtattgagcgtggcaccgtcaaggttggggacacggtcgatatcgtcggtatccgggagactcgcaactgcacggtgactggtgttgagatgttccagaagaccatggatgatgcgatggctggggacaatgtcggcctgcttctccgaggtatgcagaaggatgatatcgagagaggcatggtgcttgcgaagcctgcttccatcacgccacacaccaagtttgatgcggttgtgtatgtcctgaagaaggacgagggtggacggcactcaccgtttttccctggttaccgccctcagttctacatgcggactaccgatgtgacggggaatgtcacaaagattatgaacgacaaggacgaggaggcgaagatgtgcatgcctggtgaccgtgtcaagatggttgtggagctcatccagcccgtcgcttgtgagcagggaatgaggtttgccatccgtgagggtggaaagaccgtcggtgccggcgtcatcaatacgatcttgaagtaa

SEQ ID NO: 3292 - protein, 467 aa, Oryza sativa
MASLASASASTSLVFSTSSSKPRLGSSVGFSSPARFRRTAAAAASRGTGRRAGLLVVRAARGKFERTKPHVNIGTIGHVDHGKTTLTAALTMVLASVGGSAPKKYDEIDAAPEERARGITINTATVEYETETRHYAHVDCPGHADYVKNMITGAAQMDGAILVVSGADGPMPQTKEHILLAKQVGVPKIVVFLNKKDQVDDEELLQLVELEVRELLSSYEYDGDEVPIVAGSALKALENLMANPAIKRGDDEWVDGIFSLIDSVDNYIPVPQRQTDLPFLLAVEDVFSITGRGTVATGRIERGTVKVGDTVDIVGIRETRNCTVTGVEMFQKTMDDAMAGDNVGLLLRGMQKDDIERGMVLAKPASITPHTKFDAVVYVLKKDEGGRHSPFFPGYRPQFYMRTTDVTGNVTKIMNDKDEEAKMCMPGDRVKMVVELIQPVACEQGMRFAIREGGKTVGAGVINTILK

SEQ ID NO: 3293 - DNA, 1344 bp, Oryza sativa
  CDS (1)..(1344)
atgggtaaggagaagacgcacatcaacatcgtggtcattggccacgtcgactccggcaagtcgaccaccacgggccatctgatttacaagcttggaggtatcgacaagcgtgtgatcgagaggttcgagaaggaagccgctgagatgaacaagaggtccttcaagtacgcgtgggtgcttgacaagctcaaggccgagcgtgagagaggtatcaccatcgatattgccctgtggaagttcgagaccaccaagtactactgcacggtcatcgatgcccctggtcaccgtgacttcatcaagaacatgatcacgggtacctcccaggctgactgtgccgtgctcatcattgactccaccactggtggttttgaggctggtatctccaaggatggccagacccgtgagcacgctcttcttgctttcactcttggagtgaagcagatgatctgctgctgcaacaagatggatgccaccactcccaagtactccaaggcccgttatgatgaaatcgtgaaggaagtctcatcctacctgaagaaggtcggctacaatcctgacaagattcccttcgttcccatctctgggtttgagggtgacaacatgattgagaggtccaccaaccttgactggtacaagggccccaccttgcttgaggctcttgaccagatcaacgagcccaagaggccatcagacaagcccctgcgtcttccccttcaggacgtgtacaagatcggtggtattggcaccgtgcctgtgggtcgtgttgagactggagtcctcaagcctggtatggtggtgacctttggtcccagtggcctgaccactgaggtcaagtcggttgagatgcaccacgaggctctccaggaggctcttcctggtgacaacgtcgggttcaacgtgaagaacgttgcggtgaaggatctgaagcgtgggtacgtggcctccaactccaaggatgaccctgccaaggaggctgccagcttcacctcccaggtgatcatcatgaaccaccctgggcagatcggtaacggctatgctccagtgctggactgccacacctcccacattgctgtcaagtttgctgagctggtgaccaagattgacagacgatctggcaaggagctggagaaggagcccaagttcttgaagaacggtgatgctggtatggtcaagatgattcctaccaagcccatggttgtggagaccttctctgagtaccctcctcttggtcgttttgcggtgcgtgacatgaggcaaacggtggctgttggcgtcatcaagaacgtggagaagaaggacccaaccggtgccaaggtgaccaaggctgccgccaagaagaagtga

SEQ ID NO: 3294 - protein, 447 aa, Oryza sativa
MGKEKTHINIVVIGHVDSGKSTTTGHLIYKLGGIDKRVIERFEKEAAEMNKRSFKYAWVLDKLKAERERGITIDIALWKFETTKYYCTVIDAPGHRDFIKNMITGTSQADCAVLIIDSTTGGFEAGISKDGQTREHALLAFTLGVKQMICCCNKMDATTPKYSKARYDEIVKEVSSYLKKVGYNPDKIPFVPISGFEGDNMIERSTNLDWYKGPTLLEALDQINEPKRPSDKPLRLPLQDVYKIGGIGTVPVGRVETGVLKPGMVVTFGPSGLTTEVKSVEMHHEALQEALPGDNVGFNVKNVAVKDLKRGYVASNSKDDPAKEAASFTSQVIIMNHPGQIGNGYAPVLDCHTSHIAVKFAELVTKIDRRSGKELEKEPKFLKNGDAGMVKMIPTKPMVVETFSEYPPLGRFAVRDMRQTVAVGVIKNVEKKDPTGAKVTKAAAKKK

SEQ ID NO: 3295 - DNA, 1362 bp, Oryza sativa
  CDS (1)..(1362)
atggccgcagccgcagtgctccggagccatggcgcccgccgcatcctctcctaccccaccctccgcgccgccgtgatctcgggccccacggcgctaccggatgcgtcggcggctgcggcggcggcgccccagcagccaccgcctctggctggaaccctgtgggcgaggtccatggccaccttcacccgcacgaagcctcatgtgaatgttggcaccattgggcacgtcgatcatggcaaaaccacactcactgctgcgattaccaaggtgttagctgaggcagggaaggctaaagctgttgcttttgacgagatcgacaaggccccggaggagaaagcaagaggaatcaccattgcaacggctcatgtggagtacgagactgctaaaaggcattatgctcatgtggactgcccagggcatgctgattatgtcaagaatatgatcactggagctgctcaaatggatggtggtattcttgtcgtatcagctcctgatggccccatgccacaaacgaaagagcatattcttctggcccgacaggttggtgtgccatcacttgtatgtttcttaaacaaagttgatgctgttgatgaccccgagctactagagcttgtagagatggagcttcgtgagctcctcagtttctacaagttccctggtgatgagattccaatcatccgtggatccgccttgtcagccttacaggggactaatgatgagattggaaagaatgccattttgaaactaatggatgcagttgacgagtatatccctgatcctgtgaggcagcttgataagtctttcttgatgccgatagaagatgttttctctatccagggccgtggaactgttgtgacagggcgtgttgagcaggggacaatcaaaactggtgaagatgttgagatcctaggtttgactccaagtggtcccttgaagactacagttactggtgttgagatgttcaaaaagatactggatcatggagaggctggtgacaatgttggtcttcttcttcgtggtcttaagcgtggtgatgtacagcgtggccaggtggtgtgcaaacctggtaccgttaagacgtaccaaaagtttgaggcggaaatttacgtccttacaaaggatgaaggtggtcgccacacagccttcttgtcaaattacagtccacagttctactttaggactgccgatgtcactggaaaagttgtgttacctgatggcgtggaaatggttatgcctggtgataatgtaactgcaggatttgagttgatatcacctgttccccttgagccaggccagagatttgcgctgagggaaggagggaggacagttggtgccggagttgtttccaaagtttacagctga

SEQ ID NO: 3296 - protein, 453 aa, Oryza sativa
MAAAAVLRSHGARRILSYPTLRAAVISGPTALPDASAAAAAAPQQPPPLAGTLWARSMATFTRTKPHVNVGTIGHVDHGKTTLTAAITKVLAEAGKAKAVAFDEIDKAPEEKARGITIATAHVEYETAKRHYAHVDCPGHADYVKNMITGAAQMDGGILVVSAPDGPMPQTKEHILLARQVGVPSLVCFLNKVDAVDDPELLELVEMELRELLSFYKFPGDEIPIIRGSALSALQGTNDEIGKNAILKLMDAVDEYIPDPVRQLDKSFLMPIEDVFSIQGRGTVVTGRVEQGTIKTGEDVEILGLTPSGPLKTTVTGVEMFKKILDHGEAGDNVGLLLRGLKRGDVQRGQVVCKPGTVKTYQKFEAEIYVLTKDEGGRHTAFLSNYSPQFYFRTADVTGKVVLPDGVEMVMPGDNVTAGFELISPVPLEPGQRFALREGGRTVGAGVVSKVYS

SEQ ID NO: 3297 - DNA, 1344 bp, Glycine max
  CDS (1)..(1344)
atgggtaaggaaaaggttcacatcagtattgtggttattggccatgttgactctgggaagtccactaccactggccacctgatctacaagcttggaggcattgacaagcgtgttattgagagatttgagaaggaagctgctgagatgaacaagaggtctttcaagtatgcctgggtgcttgataagcttaaggctgagcgtgaaagaggaatcacaattgatattgccttgtggaagtttgaaaccaccaagtactattgcacagtcattgatgcccctggacacagggatttcatcaagaacatgatcactgggacatcccaagctgactgtgctgttcttatcattgattccactactggtggttttgaagctggaatttcaaaggatggacagactcgtgaacatgctctgctttcattcacccttggtgtgaaacagatgatttgttgctgtaacaagatggatgctactacaccaaagtactccaaggccaggtatgatgaaattgtgaaggaagtttcttcctatttgaagaaagtaggatacaaccctgacaagattccttttgttcctatatctggttttgagggagacaacatgattgagaggtccacaaaccttgactggtacaagggtcctactctgctagatgcacttgaccagatctctgagcccaagaggccttctgacaagcccctcaggctaccccttcaggatgtgtacaagattggaggaattggaactgtgcctgtgggacgggttgagactggtgtcttgaagcctggaatggtggtgacttttgcaccaactggactgacaaccgaagttaagtctgtggaaatgcaccatgaagctctcacagaggctcttcccggtgataatgttggattcaatgttaagaatgttgctgttaaggatctcaagcgtggttatgttgcctcgaactcaaaggatgatcctgccaaggaggctgctaacttcactgcccaggttatcatcatgaaccatcctggtcagattggaaatggctatgcccctgttcttgactgccacacttcccacattgctgtcaagtttgctgaactcatgaccaagattgacaggcgatctggcaaagagcttgagaaggaacccaagtttttgaagaatggtgatgctggttttgttaagatgattccgaccaaacccatggtggttgaaactttctctgagtaccccccacttggtcgctttgctgtcagggatatgcgtcaaactgttgctgtgggagtcatcaagaacgtggagaagaaggatcctactggagccaaggtcaccaaggctgcccagaagaagaagtga

SEQ ID NO: 3298 - protein, 447 aa, Glycine max
MGKEKVHISIVVIGHVDSGKSTTTGHLIYKLGGIDKRVIERFEKEAAEMNKRSFKYAWVLDKLKAERERGITIDIALWKFETTKYYCTVIDAPGHRDFIKNMITGTSQADCAVLIIDSTTGGFEAGISKDGQTREHALLSFTLGVKQMICCCNKMDATTPKYSKARYDEIVKEVSSYLKKVGYNPDKIPFVPISGFEGDNMIERSTNLDWYKGPTLLDALDQISEPKRPSDKPLRLPLQDVYKIGGIGTVPVGRVETGVLKPGMVVTFAPTGLTTEVKSVEMHHEALTEALPGDNVGFNVKNVAVKDLKRGYVASNSKDDPAKEAANFTAQVIIMNHPGQIGNGYAPVLDCHTSHIAVKFAELMTKIDRRSGKELEKEPKFLKNGDAGFVKMIPTKPMVVETFSEYPPLGRFAVRDMRQTVAVGVIKNVEKKDPTGAKVTKAAQKKK

SEQ ID NO: 3299 - DNA, 1413 bp, Brassica napus
  CDS (1)..(1413)
atggcgatatcgtctcccgcctattctagactcatctctccctactcctccccttccccttccctctctcccgccatctctacttccgttaaactcaacctctcatcctccttcctcccttcgtacacactctccaccaccccctcagctccccacaccccccgccgctccttcaccgtccgcgctgcgcgcgggaagttcgagaggaaaaagccccacgtcaacatcggaacaatcggccacgtcgaccacggcaaaaccaccctaaccgccgccctcaccatggccctcgcctccatggggaacagcgtcgccaaaaagtacgacgagatcgacgccgcgccggaggagagagcccgcgggatcacgatcaacaccgccaccgtcgagtacgagaccgagaatcgccactacgcccacgttgactgccccggccacgccgattacgtcaagaacatgatcaccggagccgcgcagatggacggagccatcctcgtcgtctccggcgccgacggacctgtgccgcagaccaaagagcacatccttctcgctaaacaggtcggcgtccccgacatggtcgtcttcttgaacaaagaggatcaggtcgatgacgccgagctgcttgagcttgttgagcttgaggtgcgtgagcttttgtcgtcttacgagtttaacggtgatgatatcccgattatctccggatccgcgcttttagctgtggagacgcttactgagaatcctaacgtgaagagaggagataacaagtgggtggataagatctacgagctgatggatgctgttgatagctatattccaattcctcagagacagaccgagttgcctttcttgttagctgttgaagatgtgttctccatcacggggcgtgggactgtggctacagggagggttgagagagggactgttaaggttggagagactgttgatttggttgggttgagggagactaggaactatacagtcactggggtcgaaatgttccagaagattcttgatgaggctttggctggtgacaatgtgggactgttgcttagagggattcaaaaggctgatattcagagggggatggtgttggctaagcctgggagtattactccgcatactaagtttgaggcgattgtgtatgtgttgaagaaggaagaaggtgggaggcattctccgtttttcgcggggtataggcctcagttttacatgaggacgactgatgtgacggggaaagtgacgaagattatgaatgataaagatgaggagtcgaagatggttatgcctggggatagggtgaagattgttgtggagctcattgtgccggttgcttgtgagcaagggatgaggtttgctattagagaaggtgggaagaccgttggtgctggagttattcagtctatcatcgagtga

SEQ ID NO: 3300 - protein, 470 aa, Brassica napus
MAISSPAYSRLISPYSSPSPSLSPAISTSVKLNLSSSFLPSYTLSTTPSAPHTPRRSFTVRAARGKFERKKPHVNIGTIGHVDHGKTTLTAALTMALASMGNSVAKKYDEIDAAPEERARGITINTATVEYETENRHYAHVDCPGHADYVKNMITGAAQMDGAILVVSGADGPVPQTKEHILLAKQVGVPDMVVFLNKEDQVDDAELLELVELEVRELLSSYEFNGDDIPIISGSALLAVETLTENPNVKRGDNKWVDKIYELMDAVDSYIPIPQRQTELPFLLAVEDVFSITGRGTVATGRVERGTVKVGETVDLVGLRETRNYTVTGVEMFQKILDEALAGDNVGLLLRGIQKADIQRGMVLAKPGSITPHTKFEAIVYVLKKEEGGRHSPFFAGYRPQFYMRTTDVTGKVTKIMNDKDEESKMVMPGDRVKIVVELIVPVACEQGMRFAIREGGKTVGAGVIQSIIE

SEQ ID NO: 3301 - DNA, 1350 bp, Brassica napus
  CDS (1)..(1350)
atgggtaaagagaagtttcacatcaacattgtggtcattggccatgtcgattctgggaaatcgactaccactggtcatttgatctacaagcttggtggtattgacaagcgtgtgattgagaggttcgagaaggaagctgctgagatgaacaagaggtccttcaagtatgcgtgggtgttggacaaattgaaggctgagcgtgagcgtggtatcaccattgacattgctctttggaagtttgagaccaccaagtactactgcacagtcattgatgctcctggacatcgtgatttcatcaagaacatgattactggtacctcccaggctgattgtgctgtcttgatcattgactccaccactggtggtttcgaagctggtatctccaaggatggtcagacacgtgagcatgctctccttgctttcacccttggtgtcaagcagatgatttgctgctgtaacgagatggatgccacaactcccaagtactctaaggccaggtacgatgagatcatcaaggaggtgtcttcatacctgaagaaggttgggtacaaccctgacaaaatcccattcgtccccatctctggttttgagggtgacaacatgattgagaggtccaccaaccttgactggtacaagggaccaactctccttgaggcacttgaccagatcaacgagcccaagaggccatcagacaagcccctccgtcttccacttcaggatgtctacaagattggtggaattggaacggtgccagtgggtcgtgttgaaaccggtatgctcaagcctggtatggttgtcacctttgctccttcagggttgaccactgaggttaagtctgttgagatgcaccacgagtctcttgtggaggcacttccaggtgacaacgtcggattcaatgtcaagaatgttgctgtcaaggatctcaagcgtgggtacgttgcatccaactccaaagatgacccagctaagggtgctgctaacttcacttcccaggtcatcatcatgaaccaccccggtcagattggtaacggttacgcaccagttcttgactgccacacttcccacattgccgtcaagttctctgagatcctcaccaagattgacaggcgttctggtaaagagatcgagaaggagcccaagttcttgaagaatggtgatgctggtatggtgaagatgactccaaccaagccaatggttgttgagaccttctctgagtacccaccccttggacgtttcgccgtgagggacatgaggcagactgttgcagtcggcgtcatcaagagcgttgacaagaaggacccaaccggagccaaggtgaccaaggctgccgtcaagaagggtgccaagtga

SEQ ID NO: 3302 - protein, 449 aa, Brassica napus
MGKEKFHINIVVIGHVDSGKSTTTGHLIYKLGGIDKRVIERFEKEAAEMNKRSFKYAWVLDKLKAERERGITIDIALWKFETTKYYCTVIDAPGHRDFIKNMITGTSQADCAVLIIDSTTGGFEAGISKDGQTREHALLAFTLGVKQMICCCNEMDATTPKYSKARYDEIIKEVSSYLKKVGYNPDKIPFVPISGFEGDNMIERSTNLDWYKGPTLLEALDQINEPKRPSDKPLRLPLQDVYKIGGIGTVPVGRVETGMLKPGMVVTFAPSGLTTEVKSVEMHHESLVEALPGDNVGFNVKNVAVKDLKRGYVASNSKDDPAKGAANFTSQVIIMNHPGQIGNGYAPVLDCHTSHIAVKFSEILTKIDRRSGKEIEKEPKFLKNGDAGMVKMTPTKPMVVETFSEYPPLGRFAVRDMRQTVAVGVIKSVDKKDPTGAKVTKAAVKKGAK

SEQ ID NO: 3303 - DNA, 1515 bp, Glycine max
  CDS (1)..(1515)
atggatattgaggaggacatccgttctttgcagctcgattcggcagaagacaataatggggtggtaaatccagaggatggaaagccagaagaagttgagaaatatgataagatggatgaagatccaaagcaggaggttgaggctgagccaaaggctgttgaggctgagccaaaagtgaaagataaggagattccttctgttcaagatgaagaagatgtgcctgagatgacaaaaagacacttgaatgttgtgtttattggtcatgttgatgctggtaagtctacaactggaggccagatacttttccttagtggtcaagttgatgaacggactatccaaaaatacgagaaagaggctaaggacaaaagtcgagaaagctggtatatggcttatataatggacacaaatgaggaagagagggtaaagggaaaaacagttgaagttggaagagcacattttgagactgaaactacgaggtttactattttggatgcacctggtcacaaaagttatgttcccaacatgattagtggtgcatctcaagctgatattggggtgttggttatttctgctcggaagggagagtttgaaactggatacgagagaggtggacaaactcgtgaacatgtccagcttgcaaaaacgctgggtgtgtctaagcttcttgttgttgtcaataaaatggatgagcctacagtgcaatggtcaaaagaaaggtatgatgaaattgagtcaaagatggttccatttctaaagcaatctggatacaacgtaaaaaaagatgtcttgtttttaccaatttctggtctaatgggtgcaaacatgaaaacaagagtggataaaagtgtttgtccatggtggaacgggccttgcttatttgaggcacttgacgctattgaagttccactgcgagatcccaaaggtcctttcaggatgcctattattgacaaattcaaagacatgggaactgttgttatgggcaaagttgaatctggcagtgttcgtgagggagattccttgttggtcatgccaaataaggatcaagtgaaagttgttgccatctttattgatgaagatcgtgttaaacgtgctggacctggtgaaaatttacggattagattatctggtgttgaagatgaagacattttatctgggtttgttctatctagtgttgctaatccaataccagcagttactgagtttgttgctcagttggtgatccttgaactgctagacaatgctatttttactgctgggtacaaggctgttctgcacatccactctgtggttgaggaatgtgagattgttgaactcttgcagcaaatcgatacaaagacaaagaagcctatgaaaaagaaagttctgtttgtgaagaatggtgctgttgtaatgtgccgtgttcaggttaataactctatttgcattgagaagttctctgattttccccaacttgggaggttcactcttcgcactgaaggaaaaactgttgctgtgggaaaagtcactggtctgtga

SEQ ID NO: 3304 - protein, 504 aa, Glycine max
MDIEEDIRSLQLDSAEDNNGVVNPEDGKPEEVEKYDKMDEDPKQEVEAEPKAVEAEPKVKDKEIPSVQDEEDVPEMTKRHLNVVFIGHVDAGKSTTGGQILFLSGQVDERTIQKYEKEAKDKSRESWYMAYIMDTNEEERVKGKTVEVGRAHFETETTRFTILDAPGHKSYVPNMISGASQADIGVLVISARKGEFETGYERGGQTREHVQLAKTLGVSKLLVVVNKMDEPTVQWSKERYDEIESKMVPFLKQSGYNVKKDVLFLPISGLMGANMKTRVDKSVCPWWNGPCLFEALDAIEVPLRDPKGPFRMPIIDKFKDMGTVVMGKVESGSVREGDSLLVMPNKDQVKVVAIFIDEDRVKRAGPGENLRIRLSGVEDEDILSGFVLSSVANPIPAVTEFVAQLVILELLDNAIFTAGYKAVLHIHSVVEECEIVELLQQIDTKTKKPMKKKVLFVKNGAVVMCRVQVNNSICIEKFSDFPQLGRFTLRTEGKTVAVGKVTGL

SEQ ID NO: 3305 - DNA, 1344 bp, Glycine max
  CDS (1)..(1344)
atgggtaaagagaaggttcacattaacattgtggtcattggccatgttgactctgggaagtcaaccaccactggccacttgatttacaagcttggaggtattgacaagcgtgttattgagaggtttgagaaagaagctgctgagatgaacaagaggtcattcaaatacgcctgggtgcttgacaagcttaaggctgagcgtgagagaggaattaccattgatattgcattatggaagtttgagaccaccaaatactactgcactgttattgatgctccaggacatcgtgatttcatcaagaacatgattactggaacttcccaggctgattgtgctgtccttatcattgattccacaactggtggttttgaagctggtatttccaaagatggacagactcgcgagcatgctctacttgccttcacccttggtgtcaagcaaatgatctgttgctgtaacaagatggatgccactaccccaaagtactctaaggccaggtatgaagaaattgtgaaggaagtttcttcctacttgaagaaggtaggttacaacccagacaagattccatttgttcccatctcaggttttgagggtgacaacatgattgagaggtccaccaatcttgattggtacaagggaccaacccttctcgaggctcttgaccagatcaatgagcccaagagaccctcagacaagcctttgaggcttcccttgcaggatgtctacaagattggtggtattggaacagtgccagtgggacgagttgaaactggtgtcttgaagcccggtatggtggtgacttttgctcccactggcctgacaactgaagttaagtctgtggagatgcaccatgaagctctccaggaggcccttccaggtgacaacgtaggatttaatgtgaagaatgttgcagtcaaggatctcaagcgtggttttgttgcctcaaactctaaggatgatcctgccaaggaggctgccaacttcacatcccaagtcattataatgaaccatcctggccaaattggaaatggttatgctcctgtgcttgactgccacacttctcacattgccgtcaagtttgccgaacttgtgaccaagattgacaggcgatctggtaaggagattgagaaggagcccaaattcttgaaaaatggagatgcaggttatgttaagatgattcccaccaagcctatggtggtcgaaactttctccgagtatcctcctcttggtcgttttgccgtgagggacatgcgacaaactgtggctgttggagtcatcaagagtgtggagaagaaggacccaactggagccaaggtcaccaaggctgcacagaagaagaagtga

SEQ ID NO: 3306 - protein, 447 aa, Glycine max
MGKEKVHINIVVIGHVDSGKSTTTGHLIYKLGGIDKRVIERFEKEAAEMNKRSFKYAWVLDKLKAERERGITIDIALWKFETTKYYCTVIDAPGHRDFIKNMITGTSQADCAVLIIDSTTGGFEAGISKDGQTREHALLAFTLGVKQMICCCNKMDATTPKYSKARYEEIVKEVSSYLKKVGYNPDKIPFVPISGFEGDNMIERSTNLDWYKGPTLLEALDQINEPKRPSDKPLRLPLQDVYKIGGIGTVPVGRVETGVLKPGMVVTFAPTGLTTEVKSVEMHHEALQEALPGDNVGFNVKNVAVKDLKRGFVASNSKDDPAKEAANFTSQVIIMNHPGQIGNGYAPVLDCHTSHIAVKFAELVTKIDRRSGKEIEKEPKFLKNGDAGYVKMIPTKPMVVETFSEYPPLGRFAVRDMRQTVAVGVIKSVEKKDPTGAKVTKAAQKKK

SEQ ID NO: 3307 - DNA, 1365 bp, Glycine max
  CDS (1)..(1365)
atggctacaatcgttctcagaaattgctcttccacttctcggcgcctcttccccttaacctctcaaatccactcttccttcactcgttcccctctctctcctcccgttttcaccaatgactccacatcttcttcttcttcttcttcttccagttccaacccctggtggagatccatggccaccttcaccagaacgaaacctcacgttaatgtcggaactattggacacgtggatcacgggaagaccacgcttactgcagcaatcaccagggtgcttgcggatgaagggaaagctaaagctgttgccttcgatgaaatcgataaggctcctgaagagaagaagagaggaatcacgattgcaacggcacatgtggagtatgagactgcgaaaagacattatgctcatgtggactgccctggacacgcagattatgttaaaaatatgattacaggagctgcccagatggatggaggtatacttgttgtatccgcacctgatggacctatgcctcaaaccaaggagcacattcttcttgctcgccaagttggtgtgccatctctggtgtgttttctaaataaagttgatgcagttgatgatccagagttgttagagcttgtagaaatggagctccgtgagcttctgagcttctacaagttccctggggatgaaatccctatcattagaggttcagcattgtctgccttacagggtacaaatgatgagatcggaagacaggccatcctaaaattaatggatgctgtggatgaatacattcctgaccctgttcgccaacttgacaagcctttcctaatgccaattgaagatgtgttctcaattcagggacgtggaacagttgccactggccgtgttgaacaagggatcattaaagttggtgatgaagtggaggtgttgggtctaatgcagggtggtcctctgaaaacaacagtaactggagttgagatgttcaagaagattttggatcaaggacaggctggtgataacgtgggtcttcttctccgtggtctgaagcgggaagacattcaacgtggtcaggtgattgccaaacctggttctgtaaaaacatccaagaaatttgaggcagagatatatgtactcacaaaggatgagggagggcgacacactgctttcttctctaactacaaacctcagttttacttgaggactgctgatgtcactggaaaagtagagttgcccgaaaatgttaaaatggttatgcctggagacaatgttactgccgtgtttgaattgatttcagcagttccacttgaagcaggacaaagatttgccttgagagaaggtggaagaacagttggtgccggtgtggtgtcaaaagtactgagctag

SEQ ID NO: 3308 - protein, 454 aa, Glycine max
MATIVLRNCSSTSRRLFPLTSQIHSSFTRSPLSPPVFTNDSTSSSSSSSSSSNPWWRSMATFTRTKPHVNVGTIGHVDHGKTTLTAAITRVLADEGKAKAVAFDEIDKAPEEKKRGITIATAHVEYETAKRHYAHVDCPGHADYVKNMITGAAQMDGGILVVSAPDGPMPQTKEHILLARQVGVPSLVCFLNKVDAVDDPELLELVEMELRELLSFYKFPGDEIPIIRGSALSALQGTNDEIGRQAILKLMDAVDEYIPDPVRQLDKPFLMPIEDVFSIQGRGTVATGRVEQGIIKVGDEVEVLGLMQGGPLKTTVTGVEMFKKILDQGQAGDNVGLLLRGLKREDIQRGQVIAKPGSVKTSKKFEAEIYVLTKDEGGRHTAFFSNYKPQFYLRTADVTGKVELPENVKMVMPGDNVTAVFELISAVPLEAGQRFALREGGRTVGAGVVSKVLS

SEQ ID NO: 3309 - DNA, 1359 bp, Glycine max
  CDS (1)..(1359)
atggctactctcgttctcaggaattgctcttccacttctcggcgcctcttccctttaacctctcaaatccactcttccttctctcgttcccctctctcccctctcgttttcaccaacgactccgcatcttcttcttcttcttccactcccaacccctggtggagatccatggccactttcaccagaacgaaacctcacgttaatgtcggaactattggacacgtggatcatgggaagaccacgcttaccgcggcaatcaccaaggtgcttgctgatgaagggaaggctaaggctgtggcattcgatgaaatcgataaggctcctgaagagaagaagagaggaatcacgattgcaacggcacatgtggagtatgagactgcaaaacgacattatgctcatgtggactgccccggacacgcggattatgttaaaaatatgattaccggagctgcccagatggatggtggtatacttgttgtatctgcacctgatggaccgatgcctcaaaccaaggagcacattcttcttgctcgccaagttggtgtgccatctctggtgtgttttctgaataaagttgatgcagttgatgatccagagttgttagagcttgtagaaatggagctccgtgagcttctgagcttctacaagttccctggagatgaaatccctatcattagaggttcagcattgtctgctttacagggtacaaatgatgagattggaagacaggccatcctaaaattaatggatgctgttgatgaatacattcctgaccctgttcgccaacttgataagccttttctaatgcccattgaagatgtattttcaattcagggacgaggaacagtagccactggacgtgttgaacaagggatcattaaagttggtgatgaagtggaggtgttgggtctaatgcagggtggtcctctgaaaacaacagtaactggagttgagatgttcaagaagattttggatcaaggacaagctggtgataacgttggtcttcttctccgtggtctgaagcgtgaagatattcaacgtggtcaggtgattgccaaacctggttctgtaaaaacgtccaagaaatttgaggcagatatatatgtactcacaaaggatgagggtggacgacacactgccttcttctctaactacaaacctcagttttacttgaggactgctgatgccactggaaaagtagagttgcccgaaaatgttaaaatggttatgcctggagacaatgttactgccgtgtttgaattgatttctgcagttccacttgaagcaggacaaagatttgccttgagagaaggtggtagaacagttggtgccggtgtggtgtcaaaagtactgagctag

SEQ ID NO: 3310 - protein, 452 aa, Glycine max
MATLVLRNCSSTSRRLFPLTSQIHSSFSRSPLSPLVFTNDSASSSSSSTPNPWWRSMATFTRTKPHVNVGTIGHVDHGKTTLTAAITKVLADEGKAKAVAFDEIDKAPEEKKRGITIATAHVEYETAKRHYAHVDCPGHADYVKNMITGAAQMDGGILVVSAPDGPMPQTKEHILLARQVGVPSLVCFLNKVDAVDDPELLELVEMELRELLSFYKFPGDEIPIIRGSALSALQGTNDEIGRQAILKLMDAVDEYIPDPVRQLDKPFLMPIEDVFSIQGRGTVATGRVEQGIIKVGDEVEVLGLMQGGPLKTTVTGVEMFKKILDQGQAGDNVGLLLRGLKREDIQRGQVIAKPGSVKTSKKFEADIYVLTKDEGGRHTAFFSNYKPQFYLRTADATGKVELPENVKMVMPGDNVTAVFELISAVPLEAGQRFALREGGRTVGAGVVSKVLS

SEQ ID NO: 3311 - DNA, 1350 bp, Linum usitatissimum
  CDS (1)..(1350)
atggcttccgtcgtcctccgaaaccctaattccaagcgtctcttcacatcctctttcccaatctactggggctgccgagggggatcagccattactcatcattcttctatccacggaaatgactccacctctccttctgttgcttcgtggtggagatccatggccaccttcacaaggactaagcctcacgtcaatgttggaacaattggccacgttgatcatggaaagactactcttactgcggcaattaccagggtactggctgaagaaggtaaagctaaagctgttgccttcgacgaaattgataaggccccagaagagaaaaagagaggaattactattgccactgcccatgtggagtatgaaactgcaaagcgtcattatgcacatgttgactgtcctggacacgcagattacgttaaaaacatgattacgggagctgcccaaatggatggtggaattttagtggtatcagcccctgatggtcccatgccgcagacaaaagaacacattttgcttgctcgccaggttggtgtcccatcgctggtttgtttcctaaataaatgtgatgccgttgatgacccagaactactagagcttgtcgaaatggagctccgtgagcttctgagtttctacaagtttcctggagatgatatccctatcattaggggttcagcattgtctgctttacaagggactaacgaagagctggggaaacaagccattttaaagttgatggatgctgtggatgagtatatcccggacccagtccgccaacttgaaaagccattcctcatgcccatcgaagatgttttctccattcagggtcgtggaactgttgcaactggccgtatcgaacaagggacaatcaaagtgggtgaagaagttgaaatcttgggacttacatcgggcggtcctcaaaaaacaacagttactggcgttgagatgttcaagaaaattttggacaatggacaagctggtgacaatgttggtctccttctgcgtggtttgaaacgtgaagatatagaacgaggacaggtgattgccaagcctggatctctgaaaacatacaagaaattcgaggcggagatatatgtcctgaccaaggacgaaggtggtcgccatactgccttcttctctaactacaggccccagttctacatgagaactgcagatattaccggtaaggtggaattgcctgaatccgtgaaaatggtcatgcccggcgacaatgtgactgccaatttcgagctgatccaaccggttcctatggaagcaggacaaagatttgctttgagggaaggaggtaggacagttggagcaggtgttgtctcgaaagtaattagctga

SEQ ID NO: 3312 - protein, 449 aa, Linum usitatissimum
MASVVLRNPNSKRLFTSSFPIYWGCRGGSAITHHSSIHGNDSTSPSVASWWRSMATFTRTKPHVNVGTIGHVDHGKTTLTAAITRVLAEEGKAKAVAFDEIDKAPEEKKRGITIATAHVEYETAKRHYAHVDCPGHADYVKNMITGAAQMDGGILVVSAPDGPMPQTKEHILLARQVGVPSLVCFLNKCDAVDDPELLELVEMELRELLSFYKFPGDDIPIIRGSALSALQGTNEELGKQAILKLMDAVDEYIPDPVRQLEKPFLMPIEDVFSIQGRGTVATGRIEQGTIKVGEEVEILGLTSGGPQKTTVTGVEMFKKILDNGQAGDNVGLLLRGLKREDIERGQVIAKPGSLKTYKKFEAEIYVLTKDEGGRHTAFFSNYRPQFYMRTADITGKVELPESVKMVMPGDNVTANFELIQPVPMEAGQRFALREGGRTVGAGVVSKVIS

SEQ ID NO: 3313 - DNA, 1344 bp, Hordeum vulgare
  CDS (1)..(1344)
atgggcaaggaaaagatccacatcagcattgtggtcattggccatgttgactctggcaagtcaaccacgactggccatctcatctacaagcttggaggcattgacaagcgtgtgatcgagaggtttgagaaggaagcagctgagatgaacaagaggtcattcaagtatgcctgggtgcttgacaagctcaaggctgagcgtgagagaggtatcaccattgatattgctctgtggaagttcgagaccaccaagtactcttgcactgtcattgatgctcctggtcaccgtgatttcatcaagaacatgatcactgggacctcccaggctgattgtgctgtgcttatcattgactccaccactggtggttttgaggctggtatctccaaggatggccagacccgtgagcatgctctccttgctttcactcttggtgtgaagcagatgatttgctgctgtaacaagatggacgccaccactcccaagtactcgaagtcccgttacgatgaaattgtcaaggaagtctcttcatacctgaagaaggtcggctacaaccctgacaaggttcccttcgtccccatctctgggtttgagggtgacaacatgattgagaggtcctccaaccttgactggtacaagggccctaccctgcttgaggcgcttgaccagatcaatgagcccaagaggccctcagacaagcccctgcgtcttccccttcaggatgtctacaagattggtggcattggaactgtgccagtgggacgtgttgagactggagtcatcaagccaggcatggttgtcacctttggccctactggccttaccactgaggtcaagtctgttgagatgcaccatgagtctctcctggaggcgcttcctggtgacaatgttggcttcaacgtcaagaacgtggctgtcaaggatctcaagcgtgggtatgttgcttccaactccaaggacgaccctgccaaggaggctgccaacttcactgcccaggtcatcatcatgaaccaccctggccagatcagcaacggttatgcccctgtgctggactgccacacatcccacatcgccgtcaagtttgccgagatccagaccaagatcgacaggcggtccggcaaggagctggaggcggcgcccaagttcctcaagaacggtgatgctgggttcgtcaagatgattccaaccaagcccatggtggtggagacctttgcccagtaccctcctctgggtcggtttgccgtgcgtgacatgaggcagacggttgctgtgggtgtgatcaagagcgtggagaagaaggagccgaccggcgccaaggttaccaaggctgcgatcaagaagaaatga

SEQ ID NO: 3314 - protein, 447 aa, Hordeum vulgare
MGKEKIHISIVVIGHVDSGKSTTTGHLIYKLGGIDKRVIERFEKEAAEMNKRSFKYAWVLDKLKAERERGITIDIALWKFETTKYSCTVIDAPGHRDFIKNMITGTSQADCAVLIIDSTTGGFEAGISKDGQTREHALLAFTLGVKQMICCCNKMDATTPKYSKSRYDEIVKEVSSYLKKVGYNPDKVPFVPISGFEGDNMIERSSNLDWYKGPTLLEALDQINEPKRPSDKPLRLPLQDVYKIGGIGTVPVGRVETGVIKPGMVVTFGPTGLTTEVKSVEMHHESLLEALPGDNVGFNVKNVAVKDLKRGYVASNSKDDPAKEAANFTAQVIIMNHPGQISNGYAPVLDCHTSHIAVKFAEIQTKIDRRSGKELEAAPKFLKNGDAGFVKMIPTKPMVVETFAQYPPLGRFAVRDMRQTVAVGVIKSVEKKEPTGAKVTKAAIKKK

SEQ ID NO: 3315 - DNA, 1350 bp, Brassica napus
  CDS (1)..(1350)
atgggtaaagagaagtttcacatcaacattgtggtcattggccatgtcgactctggcaaatcgaccacaactggtcacttgatctacaagcttggtggtattgacaagcgtgtcatcgagaggttcgagaaggaggctgctgagatgaacaagaggtccttcaagtacgcgtgggtgttggacaaacttaaggccgagcgtgagcgtggtatcaccattgacattgctctctggaagttcgagaccaccaagtactactgcactgtcattgatgcccctggacatcgtgatttcatcaagaacatgattactggtacctcccaggctgattgtgctgttcttatcattgactccaccactggtggttttgaggctggtatctccaaggatggtcagacccgtgagcatgctcttcttgctttcacccttggtgtcaagcaaatgatttgctgctgtaacaagatggatgccactacccccaagtactccaaggctaggtacgatgagatcatcaaggaggtgtcttcctacttgaagaaggttgggtacaaccctgacaaaatcccattcgtccccatctctggattcgagggtgacaacatgattgagaggtccaccaaccttgactggtacaagggaccaactctccttgaggctcttgaccagatcaacgagccaaagaggccttcagacaagcccctccgtcttccacttcaggatgtctacaagattggtggtattggaacggtgccggttggtcgtgttgagactggtatgctcaagcctggtatggttgtgacattcgctccttcgggtttgaccactgaggttaagtctgttgagatgcaccacgagtctcttgtggaggcgcttccaggtgacaacgtgggattcaatgtcaagaacgttgccgtcaaggatctcaagcgtgggtatgttgcatccaactccaaggatgatcctgccaagggagctgctaacttcacctcccaggtcatcatcatgaaccaccctggtcagatcggtaacggttacgcccctgtccttgattgccacacctcccacattgcagtcaagttctctgagatccttaccaagattgacagacggtctggtaaagagatcgagaaggagcctaagtttttgaagaatggagatgctggtatggtgaagatgactccaaccaagcccatggttgttgagactttctcagagtacccaccactgggacgattcgctgttagggatatgaggcagaccgtggctgttggtgtcatcaagagtgttgacaagaaggacccaaccggtgccaaggtcaccaaggctgcagtcaagaagggtgccaaatga

SEQ ID NO: 3316 - protein, 449 aa, Brassica napus
MGKEKFHINIVVIGHVDSGKSTTTGHLIYKLGGIDKRVIERFEKEAAEMNKRSFKYAWVLDKLKAERERGITIDIALWKFETTKYYCTVIDAPGHRDFIKNMITGTSQADCAVLIIDSTTGGFEAGISKDGQTREHALLAFTLGVKQMICCCNKMDATTPKYSKARYDEIIKEVSSYLKKVGYNPDKIPFVPISGFEGDNMIERSTNLDWYKGPTLLEALDQINEPKRPSDKPLRLPLQDVYKIGGIGTVPVGRVETGMLKPGMVVTFAPSGLTTEVKSVEMHHESLVEALPGDNVGFNVKNVAVKDLKRGYVASNSKDDPAKGAANFTSQVIIMNHPGQIGNGYAPVLDCHTSHIAVKFSEILTKIDRRSGKEIEKEPKFLKNGDAGMVKMTPTKPMVVETFSEYPPLGRFAVRDMRQTVAVGVIKSVDKKDPTGAKVTKAAVKKGAK

SEQ ID NO: 3317 - DNA, 1362 bp, Brassica napus
  CDS (1)..(1362)
atggcctccgtcgctcttcgaaacccaacctcgaagcgtctacttcccttctctactcagatctactcacgctgcggtggttccatctcttcgtctccctcgatctctcactcgatcggaggaggagatgatctctctccctcaagcttcggagcttccctgtggagatccatggccacctttacacgaaataaacctcatgtaaatgtcggaacgatcgggcatgtggatcacgggaagaccactttaactgctgcaatcacaaaggttcttgctgaagagggcaaagctaaagctattgcctttgatgaaattgataaagctcctgaggagaagaagagaggaattaccattgccacggctcatgtggagtatgagactgctaagcgtcactatgctcatgttgattgccctggacacgctgattatgttaagaatatgattactggagctgcacaaatggatggtgggattcttgtggtttcaggtccagatggacccatgcctcagaccaaggaacatattctacttgcccgtcaggttggtgttccatcacttgtgtgcttcctgaacaaagtcgatgtggtggatgatccagagttattggagcttgtagagatggaactacgtgaacttctcagcttctacaagttccctggggatgatatcccaatcatccggggatctgctctgtgtgcacttcagggcacaaacgatgaaattggaaggcaagctatattgaagcttatggatgctgtcgatgagtacatacctgaccctgttcgtgtgcttgacaaggctttcttgatgcctattgaagatgttttctcaatccaaggacgtggaactgttgcaaccggacgtattgagcaaggagtcatcaaagtgggtgaagaagtcgagatattgggtttaaaagacggacctccaatgaaatctactgtaactggggtcgagatgttcaagaagattttggataatggacaggctggtgacaatgtaggacttcttctgcgtgggctaaagagagaagacatccagcgtggaatggtaattgctaagcctggctcatgcaagacatacaagaagtttgaagcagagatttatgtgctcacaaaggacgaaggtggacgtcacactgcttttctctccaactacaggcctcagttttacttgaggactgcagatatcacgggaagagtagagttaccagaagaagtgaagatggttatgcctggtgacaatgtcactgcagttttcgagcttatcatgcctgtcccactcgaaataggtcaaagatttgctctgagggaaggaggtagaacagttggagctggtgttgtgtcaaaagtgatgacttag

SEQ ID NO: 3318 - protein, 453 aa, Brassica napus
MASVALRNPTSKRLLPFSTQIYSRCGGSISSSPSISHSIGGGDDLSPSSFGASLWRSMATFTRNKPHVNVGTIGHVDHGKTTLTAAITKVLAEEGKAKAIAFDEIDKAPEEKKRGITIATAHVEYETAKRHYAHVDCPGHADYVKNMITGAAQMDGGILVVSGPDGPMPQTKEHILLARQVGVPSLVCFLNKVDVVDDPELLELVEMELRELLSFYKFPGDDIPIIRGSALCALQGTNDEIGRQAILKLMDAVDEYIPDPVRVLDKAFLMPIEDVFSIQGRGTVATGRIEQGVIKVGEEVEILGLKDGPPMKSTVTGVEMFKKILDNGQAGDNVGLLLRGLKREDIQRGMVIAKPGSCKTYKKFEAEIYVLTKDEGGRHTAFLSNYRPQFYLRTADITGRVELPEEVKMVMPGDNVTAVFELIMPVPLEIGQRFALREGGRTVGAGVVSKVMT

SEQ ID NO: 3319 - DNA, 1605 bp, Brassica napus
  CDS (1)..(1605)
atggatattgaggctgatatccgcgcattacagctagattccgcagaagaaaacaatggagttggagttgtcattccgacagatcagaactcagatggagttgagatagtggataaaatggatgaagacctgaaagatgaggttcaagaatcagtgcctgcccctgatgtgcaacaagctcccgaggatcatgatcaggaaatgctccatccagtgcataacccagcgaaagctaaagagaaggcagcccaggagaaggctgccaaagaggaagctgaagaagaggcagaggcaaacaaaaagagacacttgaatgtggtgttcattggacatgttgatgctgggaagtctacaattggaggacaaattctcttccttagcggtcaggtggacgaccgacaaatccaaaagtatgaaaaggaagcaaaagaaaaaagtagagaaagctggtatatggcttatataatggacacaaatgaagaagagagggccaagggtaaaactgttgaagttggaagggctcattttgaaactgagaccactaggtttacaatcctagatgctccgggtcataagagttatgtaccaaatatgattagtggagcatctcaggccgacattggtgtgctggtgatctccgctcgtaaaggtgaatttgaaacaggatatgagaggggtgggcagacgcgtgaacatgttcaactggcaaaaacattgggcgtgtcaaagctggtggttgttgtgaacaaaatggatgacccaactgtgaactggtcgaaagagaggtacgatgaaatagaacaaaaaatggtaccatttcttaaatcctctggctacaacacaaagaaagatgttatcttcctgcctatatctggtctaatggggattaatatagacaagaggatggatccaaaagtttgtccttggttcagtggccctagcttttttgaagtcttggattcaattgaagttccgccacgagatcctaacggcccattcaggatgcccatcattgataaattcaaagacatggggactgtggttatgggaaaagtagaatcgggcagcattcgggagggtgattccttggtcattatgccaaataaggaacccgtgaaagttgttgcaatatattgtgatgaagataaagttaagcgtgctggaccgggtgagaatttgagagtccgtataactggcattgaggacgaggatatcctttcaggttttgttttatccagcgcggtaaagcctgtacctgccgttactgagttcgttgcccaattacaaatcctcgagctgcttgacaacgctatttttacagctggttacaaggctattctccacattcatgctgttgttgaggaatgtgacataattgaattgataagccaaattgatatgaagactaggaaacccatgaaaaagaaaattctgtttgtgaagaatggtgctgctgttgtctgccgtatacaggttagcaattcaatctgtgttgaaaaattctcagattttccgcaacttggaagattcactctgcgaactgaagggaaaacaattgctgttggaaaagtgactgcgctctcaggtgcttcctcaagcgcttga

SEQ ID NO: 3320 - protein, 534 aa, Brassica napus
MDIEADIRALQLDSAEENNGVGVVIPTDQNSDGVEIVDKMDEDLKDEVQESVPAPDVQQAPEDHDQEMLHPVHNPAKAKEKAAQEKAAKEEAEEEAEANKKRHLNVVFIGHVDAGKSTIGGQILFLSGQVDDRQIQKYEKEAKEKSRESWYMAYIMDTNEEERAKGKTVEVGRAHFETETTRFTILDAPGHKSYVPNMISGASQADIGVLVISARKGEFETGYERGGQTREHVQLAKTLGVSKLVVVVNKMDDPTVNWSKERYDEIEQKMVPFLKSSGYNTKKDVIFLPISGLMGINIDKRMDPKVCPWFSGPSFFEVLDSIEVPPRDPNGPFRMPIIDKFKDMGTVVMGKVESGSIREGDSLVIMPNKEPVKVVAIYCDEDKVKRAGPGENLRVRITGIEDEDILSGFVLSSAVKPVPAVTEFVAQLQILELLDNAIFTAGYKAILHIHAVVEECDIIELISQIDMKTRKPMKKKILFVKNGAAVVCRIQVSNSICVEKFSDFPQLGRFTLRTEGKTIAVGKVTALSGASSSA

SEQ ID NO: 3321 - DNA, 1362 bp, Brassica napus
  CDS (1)..(1362)
atggcctccgtcgctcttcgaaacccaacctcgaagcgtctacttcccttctctactcagacctactcacgctgcggtggttccatctcttcgtctccctcgatctctcactcgatcggaggaggagatgatctctctccctcaagcttcggagcttccctgtggagatccatggccacctttacacgaaataaacctcatgttaatgtcggaacgatcgggcatgtggatcacgggaagaccactttgactgctgcaatcacaaaggttcttgctgaggagggcaaagctaaagctattgcctttgatgagattgataaagctcctgaggagaagaagagaggaattaccattgccacggctcatgtggagtatgagactgctaagcgtcactatgctcatgttgattgccctggacacgctgattatgttaagaatatgattactggagctgcacaaatggatggtgggattcttgtggtttcaggtccagatggacccatgcctcagaccaaggaacatattctacttgcccgtcaggttggtgttccatcacttgtgtgtttcttgaacaaagtcgatgtggtggatgatccagagttattggagcttgtagagatggaactacgtgaactcctcagcttctacaagttccctggtgatgatatcccaatcatccggggatctgctctgtgtgcacttcagggcacaaacgatgaaattggaaggcaagctatattgaagcttatggatgctgtcgatgagtacatacctgaccctgttcgtgtgcttgacaaggctttcttgatgcctattgaagatgttttctcaatccaaggacgtggaactgttgcaaccggacgtattgagcaaggagtcatcaaagttggtgaagaagttgagatattgggtttaaaagacggacctccaatgaaatctactgtaactggggttgagatgttcaagaagattttggataatggacaggctggtgacaatgttggacttcttctgcgtgggctcaagagagaagacattcagcgtggaatggtgattgctaagcctggttcatgcaagacatacaagaagtttgaagcggagatctatgtgctcacaaaggacgaaggtggacgtcacactgcttttctctccaactacaggcctcagttctacttgaggactgcagatatcactgggagagtagagttaccagatgacgtgaagatggttatgcctggtgacaatgtcactgctgttttcgagcttatcatgcctgtcccactcgaaataggtcaaagatttgccctgagggaaggaggtagaacagttggagctggtgttgtatcaaaagtgatgacttga

SEQ ID NO: 3322 - protein, 453 aa, Brassica napus
MASVALRNPTSKRLLPFSTQTYSRCGGSISSSPSISHSIGGGDDLSPSSFGASLWRSMATFTRNKPHVNVGTIGHVDHGKTTLTAAITKVLAEEGKAKAIAFDEIDKAPEEKKRGITIATAHVEYETAKRHYAHVDCPGHADYVKNMITGAAQMDGGILVVSGPDGPMPQTKEHILLARQVGVPSLVCFLNKVDVVDDPELLELVEMELRELLSFYKFPGDDIPIIRGSALCALQGTNDEIGRQAILKLMDAVDEYIPDPVRVLDKAFLMPIEDVFSIQGRGTVATGRIEQGVIKVGEEVEILGLKDGPPMKSTVTGVEMFKKILDNGQAGDNVGLLLRGLKREDIQRGMVIAKPGSCKTYKKFEAEIYVLTKDEGGRHTAFLSNYRPQFYLRTADITGRVELPDDVKMVMPGDNVTAVFELIMPVPLEIGQRFALREGGRTVGAGVVSKVMT

SEQ ID NO: 3323 - DNA, 1359 bp, Zea mays
  CDS (1)..(1359)
atggcttccgccgcggtgctccggaacgccggctcccggcgcctcttctcctaccctactctccgcgccgctgcgatatatgtaccttctgcgctacccgatgcgcccgcggcggcggcagcgccggcccagccgccaccgacggccgggaccctctgggcgaggtctatggccaccttcacgcgcacgaagccccatgtgaacgtcggcaccattgggcacgtcgatcacggcaaaaccactctcactgctgccattaccaaggtcctggccgaggcagggaaggccaaagccgttgctttcgacgagatcgacaaggctccggaggagaaagccagaggaatcaccattgcgacagctcacgtcgagtatgagacggctaaaaggcattatgctcacgttgattgtccaggtcacgcagattatgtcaagaacatgatcactggagctgctcaaatggatggtggtattcttgtcgtgtcagctcctgatggcccgatgccacaaactaaggagcatattcttcttgcccgtcaggttggtgtaccttcccttgtgtgcttcttaaacaaagttgatgctgttgatgatccagagcttctggaacttgtagagatggagcttcgggagctcctcagtttctacaagttccccggtgatgagattccgatcatccgtgggtctgcgttgtctgctttgcaagggaacaatgatgagataggaaagaatgcaattttgaaattaatggacgcagttgatgagtacatccctgatcctgtgaggcagcttgataagcctttcttgatgccgatagaagatgtgttttctattcagggtcgtggaactgttgttactgggcgtgttgaacagggaacaatcaaaactggtgaagatgttgagatcttgggtttggcacagactggtcccttgaagactacagttactggtgttgagatgttcaaaaagatactggaccatggagaggctggtgacaacgttggtcttcttcttcgtggtctaaagcgtggtgatgtcgagcgtggccaggtggtgtgcaaacctggtagtctgaagacatacaaaaagtttgaggcagaaatatacgtcctgacaaaggatgaaggtggccggcacactgcctttgtcacaaattacacaccccaattctacttcaggactgctgatgtcactggaaaggttgagttgcttggtgagacgaagatggttttgcccggtgacaatgtaaccgcgaatttcgagttgatatcgcctgttcctcttgaaactgggcaaagatttgcgatgagggaaggagggaggacagttggtgccggggttgtctccaaagttattagctga

SEQ ID NO: 3324 - protein, 452 aa, Zea mays
MASAAVLRNAGSRRLFSYPTLRAAAIYVPSALPDAPAAAAAPAQPPPTAGTLWARSMATFTRTKPHVNVGTIGHVDHGKTTLTAAITKVLAEAGKAKAVAFDEIDKAPEEKARGITIATAHVEYETAKRHYAHVDCPGHADYVKNMITGAAQMDGGILVVSAPDGPMPQTKEHILLARQVGVPSLVCFLNKVDAVDDPELLELVEMELRELLSFYKFPGDEIPIIRGSALSALQGNNDEIGKNAILKLMDAVDEYIPDPVRQLDKPFLMPIEDVFSIQGRGTVVTGRVEQGTIKTGEDVEILGLAQTGPLKTTVTGVEMFKKILDHGEAGDNVGLLLRGLKRGDVERGQVVCKPGSLKTYKKFEAEIYVLTKDEGGRHTAFVTNYTPQFYFRTADVTGKVELLGETKMVLPGDNVTANFELISPVPLETGQRFAMREGGRTVGAGVVSKVIS

SEQ ID NO: 3325 - DNA, 1515 bp, Glycine max
  CDS (1)..(1515)
atggatattgaggaggacatccgttctttacagctcgattcagcagaagacaataatggggtggtaaatgcagaggatggaaggccagaagaagttgagaaatctgataagatggatgaagatccaaagcaggatgttgaggctgagccaaaggctgttgaggctgagccaaaagtgaaggataaggaggttccttctgttcaagatgaagaagatgaaccagagatgacaaaaagacacttgaatgttgtttttattggtcatgttgatgctggtaagtctacaactggaggccagatacttttccttagtggtcaagttgatgagcggactatccaaaaatacgagaaagaggctaaggacaaaagtcgagaaagctggtatatggcttatataatggacacgaatgaggaggagagggtaaagggaaagacagttgaagttggaagagcacattttgagactgaaacaacaaggtttactattttggatgcacctggtcacaaaagctatgttcctaacatgattagtggtgcatctcaagctgatattggagtgttggttatttctgctcggaagggagagtttgaaactggatacgagagaggtggacaaactcgtgaacatgtccagcttgcaaaaacgctgggtgtgtctaagcttcttgttgtcgtcaataaaatggatgagcctacagtgcaatggtcgaaagaaaggtatgatgaaattgagtcgaagatggttccatttttaaagcaatctggatacaacgtaaaaaaagatgtcttgtttttaccaatatctggtctaatgggtgcaaacatgaaaacaagagtggataaaagcgtttgtccatggtggaatggaccttgcttatttgaggcacttgacgctattgaagttccactgcgagatcccaaaggtcctttcaggatgcctattattgacaaattcaaagacatgggaactgttgttatgggcaaagttgaatctggcagtgttcgtgagggagattccttgttggtcatgccaaataaggatccagtgaaagttgttgccatatttattgatgaagatcgtgttaaacgtgctggacctggtgaaaatttacggattagattatctggtgttgaagaagaagacatattgtctgggtttgttctatctagtgttgctaatccaataccagcagttaccgagtttgttgctcagttggtgatccttgaattgctagacaatgctatttttactgctgggtacaaggctgttctgcacatccactctgtggttgaggaatgcgagattgttgaactcttgcagcaaatcgatacaaagacaaagaagcctatgaaaaagaaagttttgtttgtgaagaatggagctgttgtagtgtgccgtgttcaggttaataactctatttgcatcgagaagttctctgattttccccagcttgggaggttcactcttcgcactgaaggaaaaactgttgctgtgggaaaagtcactggtctgtga

SEQ ID NO: 3326 - protein, 504 aa, Glycine max
MDIEEDIRSLQLDSAEDNNGVVNAEDGRPEEVEKSDKMDEDPKQDVEAEPKAVEAEPKVKDKEVPSVQDEEDEPEMTKRHLNVVFIGHVDAGKSTTGGQILFLSGQVDERTIQKYEKEAKDKSRESWYMAYIMDTNEEERVKGKTVEVGRAHFETETTRFTILDAPGHKSYVPNMISGASQADIGVLVISARKGEFETGYERGGQTREHVQLAKTLGVSKLLVVVNKMDEPTVQWSKERYDEIESKMVPFLKQSGYNVKKDVLFLPISGLMGANMKTRVDKSVCPWWNGPCLFEALDAIEVPLRDPKGPFRMPIIDKFKDMGTVVMGKVESGSVREGDSLLVMPNKDPVKVVAIFIDEDRVKRAGPGENLRIRLSGVEEEDILSGFVLSSVANPIPAVTEFVAQLVILELLDNAIFTAGYKAVLHIHSVVEECEIVELLQQIDTKTKKPMKKKVLFVKNGAVVVCRVQVNNSICIEKFSDFPQLGRFTLRTEGKTVAVGKVTGL

SEQ ID NO: 3327 - DNA, 1440 bp, Glycine max
  CDS (1)..(1440)
atggcaatttcttgggcagcagcaacaacctcaaagctcgcataccctcctcatgtccacttctctccttcaccctcctccaattatctcttccttaaaacccacaaaccctccgccacacacctctcctcttccttcatccaccccaccacaatcctccacctcgccgctgccaacaccaccacccgccgccgctccttcaccgtccgcgccgcccgcggcaagttcgagcgcaagaagccccacgtcaacatcggcaccatcggccacgtcgaccacggtaagaccaccctcaccgccgccctcaccatggccctcgcctccctcggcaatagtgcccctaaaaaatacgacgagatcgacgccgcccccgaggagcgcgcccgcggcatcaccatcaacaccgccaccgtcgagtacgagaacgagaaccgccactacgcccacgtcgactgccccggccacgccgactacgtcaagaacatgatcaccggcgctgcccagatggacggcgccatcctcgtcgtctccggcgccgacggcccaatgccccaaaccaaagaacacattcttttggccaaacaagtcggcgttcccaacattgtcgtcttcctcaacaaacaggaccaggttgatgacgaggagcttcttcagttagtagaattggaggtccgggagcttctttccaagtacgagttccccggagacgatgttccgattatctccggttccgctttgctgtctttggaagctttgatggccaaccctgccatcaagcgcggcgaaaaccaatgggttgataaaatttacgagctcatggaagctgtggatgactacattcccatccctcagcgccaaactgaacttccctttttgctggccattgaggatgttttcaccatcaccggtcgtggaaccgtcgccaccggaagggttgagagaggtactattagggttggagagactgttgatattgttggtgtgaaggagactaggaacaccactgtgactggggtggaaatgtttcagaagattctggatgaggctttggctggggacaatgtgggcttgttgcttaggggtattcagaaaactgatattcagagagggatggttttggctaagcctggaaccattactcctcacaccaagttttctgcaattgtgtatgtcttgaagaaggaagagggtgggaggcactctcccttcttttccggctaccggcctcagttctacatgaggactaccgatgttactggcaaggtaactgaaattatgaatgacaaggatgaagagtccaagatggttatgccgggcgaccgtgttaagctggtggttgaacttattgtgcctgtggcttgtgaacaaggaatgaggtttgctattagagaaggaggcaaaactgttggagctggtgttatccaatccatcattgagtag

SEQ ID NO: 3328 - protein, 479 aa, Glycine max
MAISWAAATTSKLAYPPHVHFSPSPSSNYLFLKTHKPSATHLSSSFIHPTTILHLAAANTTTRRRSFTVRAARGKFERKKPHVNIGTIGHVDHGKTTLTAALTMALASLGNSAPKKYDEIDAAPEERARGITINTATVEYENENRHYAHVDCPGHADYVKNMITGAAQMDGAILVVSGADGPMPQTKEHILLAKQVGVPNIVVFLNKQDQVDDEELLQLVELEVRELLSKYEFPGDDVPIISGSALLSLEALMANPAIKRGENQWVDKIYELMEAVDDYIPIPQRQTELPFLLAIEDVFTITGRGTVATGRVERGTIRVGETVDIVGVKETRNTTVTGVEMFQKILDEALAGDNVGLLLRGIQKTDIQRGMVLAKPGTITPHTKFSAIVYVLKKEEGGRHSPFFSGYRPQFYMRTTDVTGKVTEIMNDKDEESKMVMPGDRVKLVVELIVPVACEQGMRFAIREGGKTVGAGVIQSIIE

SEQ ID NO: 3329 - DNA, 1365 bp, Glycine max
  CDS (1)..(1365)
atggctacaatcgttctcagaaattgctcttccacttctcggcgcctcttccccttaacctctcaaatccactcttccttcactcgttcccctctctctcctcccgttttcaccaatgactccacatcttcttcttcttcttcttcttccagttccaacccctggtggagatccatggccaccttcaccagaacgaaacctcacgttaatgtcggaactattggacacgtggatcatgggaagaccacgcttaccgcggcaatcaccaaggtgcttgctgatgaagggaaagctaaagctgtggcattcgatgaaatcgataaggctcctgaagagaagaagagaggaatcacgattgcaacggcacatgtggagtatgagactgcaaaacgacattatgctcatgtggactgccccggacacgcggattatgttaaaaatatgattaccggagctgcccagatggatggtggtatacttgttgtatctgcacctgatggaccgatgcctcaaaccaaggagcacattcttcttgctcgccaagttggtgtgccatctctggtgtgttttctgaataaagttgatgcagttgatgatccagagttgttagagcttgtagaaatggagctccgtgagcttctgagcttctacaagttccctggagatgaaatccctatcattagaggttcagcattgtctgccttacagggtacaaatgatgagatcggaagacaggccatcctaaaattaatggatgctgtggatgaatacattcctgaccctgttcgccaacttgacaagcctttcctaatgccaattgaagatgtgttctcaattcagggacgtggaacagttgccactggccgtgttgaacaagggatcattaaagttggtgatgaagtggaggtgttgggtctaatgcagggtggtcctctgaaaacaacagtaactggagttgagatgttcaagaagattttggatcaaggacaggctggtgataacgtgggtcttcttctccgtggtctgaagcgggaagacattcaacgtggtcaggtgattgccaaacctggttctgtaaaaacatccaagaaatttgaggcagagatatatgtactcacaaaggatgagggagggcgacacactgctttcttctctaactacaaacctcagttttacttgaggactgctgatgtcactggaaaagtagagttgcccgaaaatgttaaaatggttatgcctggagacaatgttactgccgtgtttgaattgatttcagcagttccacttgaagcaggacaaagatttgccttgagagaaggtggaagaacagttggtgccggtgtggtgtcaaaagtactgagctag

SEQ ID NO: 3330 - protein, 454 aa, Glycine max
MATIVLRNCSSTSRRLFPLTSQIHSSFTRSPLSPPVFTNDSTSSSSSSSSSSNPWWRSMATFTRTKPHVNVGTIGHVDHGKTTLTAAITKVLADEGKAKAVAFDEIDKAPEEKKRGITIATAHVEYETAKRHYAHVDCPGHADYVKNMITGAAQMDGGILVVSAPDGPMPQTKEHILLARQVGVPSLVCFLNKVDAVDDPELLELVEMELRELLSFYKFPGDEIPIIRGSALSALQGTNDEIGRQAILKLMDAVDEYIPDPVRQLDKPFLMPIEDVFSIQGRGTVATGRVEQGIIKVGDEVEVLGLMQGGPLKTTVTGVEMFKKILDQGQAGDNVGLLLRGLKREDIQRGQVIAKPGSVKTSKKFEAEIYVLTKDEGGRHTAFFSNYKPQFYLRTADVTGKVELPENVKMVMPGDNVTAVFELISAVPLEAGQRFALREGGRTVGAGVVSKVLS

SEQ ID NO: 3331 - DNA, 1440 bp, Glycine max
  CDS (1)..(1440)
atggcaatttcttcagcaacagcttcctccaaactcatactattcccccatgcatcatcatcctcttcccttaattccacacccttccgctcctccaccaccaacacccacaaactaacccctctctcctcctccttcctccaccccaccaccgtcctccgccgcaccccttcttccaccaccaccccgcgtcgcaccttcaccgtccgcgccgcccgcggcaaattcgagcgcaagaagccccacgtgaacatcggcaccatcggccacgtcgaccacggcaagaccacccttaccgccgccctgaccatggctcttgccgccctaggcaacagcgcccccaaaaaatacgacgagatcgacgccgccccggaggaacgcgcccgaggcatcaccatcaacaccgccaccgtggagtacgagaccgagaaccgccactacgcccacgtggactgccccggccacgctgactacatgaaaaacatgatcaccggcgcagcccaaatggacggcgccatattagtcgtctccggcgccgacggccccatgccccaaaccaaagaacacatcctcttagcgaaacaagtcggtgtccccaacatggtcgtgttcttaaacaagcaagaccaagtcgacgacgaagagcttctccaactagtggagctcgaagtccgcgaccttctgagctcctacgaattccccggtgacgatacccccattgtctcgggctccgcgctcttagccctagaagcactcatggccaaccctgcaatcaaacgcggcgacaacgagtgggtcgacaagattttccaactcatggacgaggtcgacaactacattcccatcccccagcgccagaccgacctccccttcctcctcgccgtcgaagacgtcttttccatcaccggccgtggcaccgtcgccactggccgtgtagagcgtggcaccatcaaagtaggggaaactgttgaccttgtaggtttgagagaaacaaggaacacaaccgtcacaggtgtagaaatgttccagaagattctagacgaagccctggctggagacaacgtggggctgttgcttagaggggttcagaagactgacattcagaggggaatggtgttggctaaaccaggcacgattacgccgcacaccaagttctcagcgattgtttatgttttgaagaaagaagaaggtggtaggcattcacctttctttgcagggtataggcctcagttttacatgaggaccaccgatgtgactgggaaggttacgtctatcatgaatgataaggatgaggagtccacgatggtgctgcccggtgaccgtgtcaagatggtggtggagcttattgttcctgtggcttgcgaacagggaatgaggtttgctattagggaaggtgggaagaccgttggtgctggtgttatccaatccattattgagtga

SEQ ID NO: 3332 - protein, 479 aa, Glycine max
MAISSATASSKLILFPHASSSSSLNSTPFRSSTTNTHKLTPLSSSFLHPTTVLRRTPSSTTTPRRTFTVRAARGKFERKKPHVNIGTIGHVDHGKTTLTAALTMALAALGNSAPKKYDEIDAAPEERARGITINTATVEYETENRHYAHVDCPGHADYMKNMITGAAQMDGAILVVSGADGPMPQTKEHILLAKQVGVPNMVVFLNKQDQVDDEELLQLVELEVRDLLSSYEFPGDDTPIVSGSALLALEALMANPAIKRGDNEWVDKIFQLMDEVDNYIPIPQRQTDLPFLLAVEDVFSITGRGTVATGRVERGTIKVGETVDLVGLRETRNTTVTGVEMFQKILDEALAGDNVGLLLRGVQKTDIQRGMVLAKPGTITPHTKFSAIVYVLKKEEGGRHSPFFAGYRPQFYMRTTDVTGKVTSIMNDKDEESTMVLPGDRVKMVVELIVPVACEQGMRFAIREGGKTVGAGVIQSIIE

SEQ ID NO: 3333 - DNA, 1347 bp, Glycine max
  CDS (1)..(1347)
atgggtaaggaaaaggttcacattaacatcgtggtcattggccatgtcgactctgggaagtcaaccaccaccggtcaccttatctacaagctcggaggtattgacaagcgtgtcatcgagagattcgagaaggaagctgctgagatgaataagaggtctttcaagtatgcctgggtgcttgacaagctcaaggctgagcgtgaaagaggaatcaccattgatattgctctgtggaagtttgagaccacaaagtactactgcacagtcattgatgcccctggacatagggatttcatcaagaacatgattactggaacatcccaagctgactgtgctgttcttattattgattccaccactggtggttttgaagctggtatttccaaggatggacagactcgtgagcatgctctccttgcattcactcttggtgtgaggcagatgatttgctgctgcaacaagatggatgccactacacctaagtactccaaggcaaggtacgatgaaattgtcaaggaagtttcttcctacatgaagaaggtcggatacaaccctgacaaaattccttttgttcccatctctggttttgagggagataacatgattgagaggtctacaaaccttgactggtacaagggtccaacccttcttgaggcccttgatcagatcaatgagcccaagaggccatcggacaagcctctccgattgccccttcaggatgtctacaagattggtgggataggaactgtgcctgttggacgggttgaaaccggtgtcttgaaacctggaatggtggttacctttgcaccaactggactaacaactgaagttaagtctgtggagatgcaccatgaaactctcactgaggcccatcctggtgacaatgtgggattcaatgttaagaatgttgctgtcaaggatctcaagcgtggttttgttgcgtctaactctaaggatgaccctgccaaggaggctgctaacttcacatcccaagttatcatcatgaaccaccctggacagattggaaatggctatgcacctgttcttgattgccacacctcccacattgccgtcaagtttgctgaactcttgaccaagattgacaggcgatctggtaaggaacttgagaaggagcccaaattcctgaagaatggtgatgctggtttggtcaagatgattcccaccaagcccatggtggttgaaaccttctccgagtatcctccacttggtcgttttgctgtgagagacatgcgtcaaactgtggctgtgggagtcatcaagagcgtcgagaagaaggaccctactggagctaaggtcaccaaggctgcacagaagaaggccaaatga

SEQ ID NO: 3334 - protein, 448 aa, Glycine max
MGKEKVHINIVVIGHVDSGKSTTTGHLIYKLGGIDKRVIERFEKEAAEMNKRSFKYAWVLDKLKAERERGITIDIALWKFETTKYYCTVIDAPGHRDFIKNMITGTSQADCAVLIIDSTTGGFEAGISKDGQTREHALLAFTLGVRQMICCCNKMDATTPKYSKARYDEIVKEVSSYMKKVGYNPDKIPFVPISGFEGDNMIERSTNLDWYKGPTLLEALDQINEPKRPSDKPLRLPLQDVYKIGGIGTVPVGRVETGVLKPGMVVTFAPTGLTTEVKSVEMHHETLTEAHPGDNVGFNVKNVAVKDLKRGFVASNSKDDPAKEAANFTSQVIIMNHPGQIGNGYAPVLDCHTSHIAVKFAELLTKIDRRSGKELEKEPKFLKNGDAGLVKMIPTKPMVVETFSEYPPLGRFAVRDMRQTVAVGVIKSVEKKDPTGAKVTKAAQKKAK

SEQ ID NO: 3335 - DNA, 1440 bp, Glycine max
  CDS (1)..(1440)
atggcaatttcttcagcaacagcttcctccaaactcatactattcccccatgcatcatcatcctcttcccttaattccacacccttccgctcctccaccaccaacacccacaaactaacccctctctcctcctccttcctccaccccaccaccgtcctccgccgcaccccttcttccaccaccaccccgcgtcgcaccttcaccgtccgcgccgcccgcggcaaattcgagcgcaagaagccccacgtgaacatcggcaccatcggccacgtcgaccacggcaagaccacccttaccgccgccctgaccatggctcttgccgccctaggcaacagcgcccccaaaaaatacgacgagatcgacgccgccccggaggaacgcgcccgaggcatcaccatcaacaccgccaccgtggagtacgagaccgagaaccgccactacgcccacgtggactgccccggccacgctgactacatgaaaaacatgatcaccggcgcagcccaaatggacggcgccatattagtcgtctccggcgccgacggccccatgccccaaaccaaagaacacatcctcttagcgaaacaagtcggtgtccccaacatggtcgtgttcttaaacaagcaagaccaagtcgacgacgaagagcttctccaactagtggagctcgaagtccgcgaccttctgagctcctacgaattccccggtgacgatacccccattgtctcgggctccgcgctcttagccctagaagcactcatggccaaccctgcaatcaaacgcggcgacaacgagtgggtcgacaagattttccaactcatggacgaggtcgacaactacattcccatcccccagcgccagaccgacctccccttcctcctcgccgtcgaagacgtcttttccatcaccggccgtggcaccgtcgccactggccgtgtagagcgtggcaccatcaaagtaggggaaactgttgaccttgtaggtttgagagaaacaaggaacacaaccgtcacaggtgtagaaatgttccagaagattctagacgaagccctggctggagacaacgtggggctgttgcttagaggggttcagaagactgacattcagaggggaatggtgttggctaaaccaggcacgattacgccgcacaccaagttctcagcgattgtttatgttttgaagaaagaacaaggtggtaggcattcacctttctttgcagggtataggcctcagttttacatgaggaccaccgatgtgactgggaaggttacgtctatcatgaatgataaggatgaggagtccacgatggtgctgcccggtgaccgtgtcaagatggtggtggagcttattgttcctgtggcttgcgaacagggaatgaggtttgctattagggaaggtgggaagaccgttggtgctggtgttatccaatccattattgagtga

SEQ ID NO: 3336 - protein, 479 aa, Glycine max
MAISSATASSKLILFPHASSSSSLNSTPFRSSTTNTHKLTPLSSSFLHPTTVLRRTPSSTTTPRRTFTVRAARGKFERKKPHVNIGTIGHVDHGKTTLTAALTMALAALGNSAPKKYDEIDAAPEERARGITINTATVEYETENRHYAHVDCPGHADYMKNMITGAAQMDGAILVVSGADGPMPQTKEHILLAKQVGVPNMVVFLNKQDQVDDEELLQLVELEVRDLLSSYEFPGDDTPIVSGSALLALEALMANPAIKRGDNEWVDKIFQLMDEVDNYIPIPQRQTDLPFLLAVEDVFSITGRGTVATGRVERGTIKVGETVDLVGLRETRNTTVTGVEMFQKILDEALAGDNVGLLLRGVQKTDIQRGMVLAKPGTITPHTKFSAIVYVLKKEQGGRHSPFFAGYRPQFYMRTTDVTGKVTSIMNDKDEESTMVLPGDRVKMVVELIVPVACEQGMRFAIREGGKTVGAGVIQSIIE

SEQ ID NO: 3337 - DNA, 1344 bp, Glycine max
  CDS (1)..(1344)
atgggtaaggaaaaggttcacatcactattgcggttattggccatgttgactctgggaagtccactaccactggccacctgatctacaagcttggaggcattgacaagcgtgttattgagagatttgagaaggaagctgctgagatgaacaagaggtctttcaagtatgcctgggtgcttgataagcttaaggctgagcgtgaaagaggaatcacaattgatattgccttgtggaagtttgaaaccaccaagtactattgcacagtcattgatgcccctggacacagggatttcatcaagaacatgatcactgggacatcccaagctgactgtgctgttcttatcattgattccactactggtggttttgaagctggaatttcaaaggatggacagactcgtgaacatgctctgctttcattcacccttggtgtgaaacagatgatttgttgctgtaacaagatggatgctactacaccaaagtactccaaggccaggtatgatgaaattgtgaaggaagtttcttcctatttgaagaaagtaggatacaaccctgacaagattccttttgttcctatatctggttttgagggagacaacatgattgagaggtccacaaaccttgactggtacaagggtcctactctgctagatgcacttgaccagatctctgagcccaagaggccttctgacaagcccctcaggctaccccttcaggatgtgtacaagattggaggaattggaactgtgcctgtgggacgggttgagactggtgtcttgaagcctggaatggtggtgacttttgcaccaactggactgacaaccgaagttaagtctgtggaaatgcaccatgaagctctcacagaggctcttcccggtgataatgttggattcaatgttaagaatgttgctgttaaggatctcaagcgtggttatgttgcctcgaactcaaaggatgatcctgccaaggaggctgctaacttcactgcccaggttatcatcatgaaccatcctggtcagattggaaatggctatgcccctgttcttgactgccacacttcccacattgctgtcaagtttgctgaactcatgaccaagattgacaggcgatctggcaaagagcttgagaaggaacccaagtttttgaagaatggtgatgctggttttgttaagatgattccgaccaaacccatggtgggtgaaactttctctgagtaccccccacttggtcgctttgctgtcagggatatgcgtcaaactgttgctgtgggagtcatcaagaacgtggagaagaaggatcctactggagccaaggtcaccaaggctgcccaaaagaagaagtga

SEQ ID NO: 3338 - protein, 447 aa, Glycine max
MGKEKVHITIAVIGHVDSGKSTTTGHLIYKLGGIDKRVIERFEKEAAEMNKRSFKYAWVLDKLKAERERGITIDIALWKFETTKYYCTVIDAPGHRDFIKNMITGTSQADCAVLIIDSTTGGFEAGISKDGQTREHALLSFTLGVKQMICCCNKMDATTPKYSKARYDEIVKEVSSYLKKVGYNPDKIPFVPISGFEGDNMIERSTNLDWYKGPTLLDALDQISEPKRPSDKPLRLPLQDVYKIGGIGTVPVGRVETGVLKPGMVVTFAPTGLTTEVKSVEMHHEALTEALPGDNVGFNVKNVAVKDLKRGYVASNSKDDPAKEAANFTAQVIIMNHPGQIGNGYAPVLDCHTSHIAVKFAELMTKIDRRSGKELEKEPKFLKNGDAGFVKMIPTKPMVGETFSEYPPLGRFAVRDMRQTVAVGVIKNVEKKDPTGAKVTKAAQKKK

SEQ ID NO: 3339 - DNA, 1344 bp, Glycine max
  CDS (1)..(1344)
atgggtaaggaaaaggttcacatcagtattgtggtcattggccatgtcgactctgggaaatccactaccactggtcacctgatttacaagcttggaggcattgacaagcgtgttattgagaggtttgagaaggaagctgctgagatgaacaagaggtctttcaagtatgcctgggtgctggacaaacttaaggctgagcgtgaaagaggaatcaccattgatattgctttgtggaagtttgaaacaacaaagtattattgcacagttattgatgcgcctggacatagggatttcattaagaatatgattactgggacatcccaagctgactgtgctgttcttatcattgattcgaccactggtggttttgaagctggtatttccaaggatggacagactcgtgaacatgctctgctttcattcacccttggtgtgaaacagatgatttgctgctgtaacaaaatggatgctactacacccaagtattccaaggccaggtatgatgaaattgtgaaggaagtctcttcctacttgaagaaagtaggatacaaccctgacaagattccttttgttcctatctctggttttgagggagacaacatgattgagaggtccacaaaccttgactggtacaagggtccaactctgcttgatgcacttgaccagattagtgagcccaagaggccctctgacaagcccctcaggcttccccttcaggatgtgtacaagattggaggtattggaactgtgccagtgggacgtgttgagaccggtgtcttgaagcctggaatggtggtgacttttgcaccaactggactgacaactgaagtcaagtctgtggagatgcaccatgaatctcttacagaggcacatcctggtgacaatgtgggattcaatgttaagaatgttgctgttaaggatttgaagcgtggttatgttgcctcaaactcaaaggatgaccctgcaaaggaggctgctaacttcacagcccaagtcatcatcatgaaccaccctggtcagattggaaatggctatgcccctgtcctcgactgccacacttctcacattgctgtcaagtttgctgaactcatgaccaagattgacaggcgatccggcaaagagcttgagaaggagcccaagtttttgaagaacggtgatgctggttttgttaagatgattccaaccaaacccatggttgttgaaactttctccgagtatcctccacttggtaggtttgctgttagggacatgcgtcaaactgttgctgtgggagtcatcaagaacgttgagaagaaggatcctaccggagccaaggtcaccaaggctgcccagaagaagaagtga

SEQ ID NO: 3340 - protein, 447 aa, Glycine max
MGKEKVHISIVVIGHVDSGKSTTTGHLIYKLGGIDKRVIERFEKEAAEMNKRSFKYAWVLDKLKAERERGITIDIALWKFETTKYYCTVIDAPGHRDFIKNMITGTSQADCAVLIIDSTTGGFEAGISKDGQTREHALLSFTLGVKQMICCCNKMDATTPKYSKARYDEIVKEVSSYLKKVGYNPDKIPFVPISGFEGDNMIERSTNLDWYKGPTLLDALDQISEPKRPSDKPLRLPLQDVYKIGGIGTVPVGRVETGVLKPGMVVTFAPTGLTTEVKSVEMHHESLTEAHPGDNVGFNVKNVAVKDLKRGYVASNSKDDPAKEAANFTAQVIIMNHPGQIGNGYAPVLDCHTSHIAVKFAELMTKIDRRSGKELEKEPKFLKNGDAGFVKMIPTKPMVVETFSEYPPLGRFAVRDMRQTVAVGVIKNVEKKDPTGAKVTKAAQKKK

SEQ ID NO: 3341 - DNA, 1443 bp, Glycine max
  CDS (1)..(1443)
atggcagtttcttctgcatctgcttcctccaaacttatactattcccccatgcttcatcttcttcccttatctccacacccttccgttcctccaccaacacccacaaactatcccctctctcctcctccttcctccaccccaccaccgtcctccgccgcaccccctcctccaccactaccaccacctccccgcgccgacccctcaccgtccgcgccgcccgcggcaagttcgagcgcaagaagccccacgtgaacatcggcaccatcggccacgtggaccacggcaagaccaccctgaccgccgccctcaccatggcccttgccgccctcggcaacagcgccccgaagaagtacgacgagatcgacgccgccccggaggaacgcgcccgcggcatcaccatcaacaccgccaccgtcgagtacgagaccgagaaccgccactacgcccacgtggactgccccggccacgccgactacgtcaagaacatgatcaccggcgccgcccagatggacggcgccatccttgtcgtctccggcgccgacggccccatgccccaaaccaaagaacacatcctcttagccaagcaagtcggtgtccccaacatggtcgtcttcctcaacaagcaagaccaagtcgacgacgaagagcttctccaactagtcgaactcgaagttcgcgaccttcttacctcctacgaattccccggtgacgatacccccatcgtctccggctccgcactcttagccctagaagcccttatggcgaaccctgccatcaaacgcggcgacaacgagtgggtcgacaaaatctacaaactcatggacgaagtcgacgactacattcccatcccccagcgccagaccgacctcccattcctcctcgccgtcgaagacgttttctccatcaccggccgtgggaccgtcgccaccggccgcgtagagcgtggcaccgtcaaagtaggggaaactgttgaccttgtaggattgagagagacaagaaacacaacggtcacaggtgtggaaatgttccagaagattctagacgaagccctcgccggggacaacgtggggctgttgctgagaggggttcaaaagacggacatccagagagggatggtgttggcgaagcctggcacgattacgccgcacaccaagttctcagcgattgtgtatgttttgaagaaggaagaaggtgggagacattcacctttctttgcagggtataggcctcagttttacatgaggaccaccgatgtgactgggaaggttacggctatcaccaacgatagggatgaagagtcgcagatggtgatgcccggtgaccgtgtgaagatggtggtggagctcattgtgcctgtggcttgcgaacagggaatgaggtttgctattagggaaggtggcaagaccgttggtgcaggtgttatccaatccatcattgagtga

SEQ ID NO: 3342 - protein, 480 aa, Glycine max
MAVSSASASSKLILFPHASSSSLISTPFRSSTNTHKLSPLSSSFLHPTTVLRRTPSSTTTTTSPRRPLTVRAARGKFERKKPHVNIGTIGHVDHGKTTLTAALTMALAALGNSAPKKYDEIDAAPEERARGITINTATVEYETENRHYAHVDCPGHADYVKNMITGAAQMDGAILVVSGADGPMPQTKEHILLAKQVGVPNMVVFLNKQDQVDDEELLQLVELEVRDLLTSYEFPGDDTPIVSGSALLALEALMANPAIKRGDNEWVDKIYKLMDEVDDYIPIPQRQTDLPFLLAVEDVFSITGRGTVATGRVERGTVKVGETVDLVGLRETRNTTVTGVEMFQKILDEALAGDNVGLLLRGVQKTDIQRGMVLAKPGTITPHTKFSAIVYVLKKEEGGRHSPFFAGYRPQFYMRTTDVTGKVTAITNDRDEESQMVMPGDRVKMVVELIVPVACEQGMRFAIREGGKTVGAGVIQSIIE

SEQ ID NO: 3343 - DNA, 1344 bp, Glycine max
  CDS (1)..(1344)
atgggtaaggaaaaggttcacatcaacattgtcgtcattggacatgtcgactctgggaagtcaactaccactggtcacttgatctacaagcttggaggtattgacaagcgtgtgattgagaggttcgagaaggaggctgccgagatgaacaagaggtcattcaagtatgcctgggtgctcgacaagctcaaagctgagcgtgaaagaggaattaccattgatattgctttgtggaagtttgaaaccaccaagtactactgcacggtcattgatgctcctggacatcgtgactttatcaagaacatgattactggtacctcccaggccgactgtgctgtccttattattgactccaccactggtggttttgaagctggtatttctaaggatggacagacccgtgagcatgctcttcttgctttcaccctaggtgtgaagcagatgatctgttgctgtaacaagatggatgccactacccccaagtactctaaggctaggtatgatgaaatcgtgaaggaagtctcttcttacttgaagaaggttggttacaacccagacaagattccctttgttcccatctctggttttgagggtgacaacatgattgagaggtccaccaaccttgactggtacaagggaccaactctccttgaggctcttgaccaaatcaatgagcccaagaggccctccgacaagcctctaaggcttccattgcaggatgtctacaagattggtggtattggtactgtgccagtgggacgtgtagagactggggttgtgaagcctggtatggtggtgacttttggtcccactgggctgacaactgaggttaagtctgttgagatgcaccatgaggctctcacagaggctcttccaggtgacaatgttggatttaatgtgaagaatgttgcagtcaaggatctcaagcgtggttttgttgcatccaactccaaggacgaccctgccaaggaagctgccaacttcacatcccaagtcattatcatgaaccatcctggccagattggtaatggatacgcaccagtccttgactgccacacttctcacattgctgtgaagttttctgaaatcttgaccaagattgacaggcgatctggtaaggagcttgagaaggagcccaaatttttgaagaatggtgatgctggtatggttaagatggttccaaccaagcccatggtggttgaaactttctctgagtatcctccccttggtcgttttgctgtgagggacatgcgtcagaccgtagctgttggagtcatcaagagtgttgagaagaaagaccccaccggagccaaggtcacaaaggctgccgccaagaagaagtga

SEQ ID NO: 3344 - protein, 447 aa, Glycine max
MGKEKVHINIVVIGHVDSGKSTTTGHLIYKLGGIDKRVIERFEKEAAEMNKRSFKYAWVLDKLKAERERGITIDIALWKFETTKYYCTVIDAPGHRDFIKNMITGTSQADCAVLIIDSTTGGFEAGISKDGQTREHALLAFTLGVKQMICCCNKMDATTPKYSKARYDEIVKEVSSYLKKVGYNPDKIPFVPISGFEGDNMIERSTNLDWYKGPTLLEALDQINEPKRPSDKPLRLPLQDVYKIGGIGTVPVGRVETGVVKPGMVVTFGPTGLTTEVKSVEMHHEALTEALPGDNVGFNVKNVAVKDLKRGFVASNSKDDPAKEAANFTSQVIIMNHPGQIGNGYAPVLDCHTSHIAVKFSEILTKIDRRSGKELEKEPKFLKNGDAGMVKMVPTKPMVVETFSEYPPLGRFAVRDMRQTVAVGVIKSVEKKDPTGAKVTKAAAKKK

SEQ ID NO: 3345 - DNA, 1365 bp, Glycine max
  CDS (1)..(1365)
atggctactctcgttctcaggaattgctcttccacttctcggcgcctcttccctttaacctctcaaatccactcttccttctctcgttcccctctctcccctcccgttttcaccaatgactccacatcttcttcttcttcttcttcttccagttccaacccctggtggagatccatggccaccttcaccagaacgaaacctcacgttaatgtcggaactattggacacgtggatcatgggaagaccacgcttaccgcggcaatcaccaaggtgcttgctgatgaagggaaggctaaggctgtggcattcgatgaaatcgataaggctcctgaagagaagaagagaggaatcacgattgcaacggcacatgtggagtatgagactgcaaaacgacattatgctcatgtggactgccccggacacgcggattatgttaaaaatatgattaccggagctgcccagatggatggtggtatacttgttgtatctgcacctgatggaccgatgcctcaaaccaaggagcacattcttcttgctcgccaagttggtgtgccatctctggtgtgttttctgaataaagttgatgcagttgatgatccagagttgttagagcttgtagaaatggagctccgtgagcttctgagcttctacaagttccctggagatgaaatccctatcattagaggttcagcattgtctgccttacagggtacaaatgatgagatcggaagacaggccatcctaaaattaatggatgctgtggatgaatacattcctgaccctgttcgccaacttgacaagcctttcctaatgccaattgaagatgtgttctcaattcagggacgtggaacagttgccactggccgtgttgaacaagggatcattaaagttggtgatgaagtggaggtgttgggtctaatgcagggtggtcctctgaaaacaacagtaactggagttgagatgttcaagaagattttggatcaaggacaggctggtgataacgtgggtcttcttctccgtggtctgaagcgggaagacattcaacgtggtcaggtgattgccaaacctggttctgtaaaaacatccaagaaatttgaggcagagatatatgtactcacaaaggatgagggagggcgacacactgctttcttctctaactacaaacctcagttttacttgaggactgctgatgtcactggaaaagtagagttgcccgaaaatgttaaaatggttatgcctggagacaatgttactgccgtgtttgaattgatttcagcagttccacttgaagcaggacaaagatttgccttgagagaaggtggaagaacagttggtgccggtgtggtgtcaaaagtactgagctag

SEQ ID NO: 3346 - protein, 454 aa, Glycine max
MATLVLRNCSSTSRRLFPLTSQIHSSFSRSPLSPPVFTNDSTSSSSSSSSSSNPWWRSMATFTRTKPHVNVGTIGHVDHGKTTLTAAITKVLADEGKAKAVAFDEIDKAPEEKKRGITIATAHVEYETAKRHYAHVDCPGHADYVKNMITGAAQMDGGILVVSAPDGPMPQTKEHILLARQVGVPSLVCFLNKVDAVDDPELLELVEMELRELLSFYKFPGDEIPIIRGSALSALQGTNDEIGRQAILKLMDAVDEYIPDPVRQLDKPFLMPIEDVFSIQGRGTVATGRVEQGIIKVGDEVEVLGLMQGGPLKTTVTGVEMFKKILDQGQAGDNVGLLLRGLKREDIQRGQVIAKPGSVKTSKKFEAEIYVLTKDEGGRHTAFFSNYKPQFYLRTADVTGKVELPENVKMVMPGDNVTAVFELISAVPLEAGQRFALREGGRTVGAGVVSKVLS

SEQ ID NO: 3347 - DNA, 1344 bp, Glycine max
  CDS (1)..(1344)
atgggtaaggaaaagactcacatcaacattgtcgtcattggacatgtcgactctgggaagtcaactaccactggtcatttgatctacaagcttggaggtattgacaagcgtgtgattgagaggttcgagaaggaggctgctgagatgaacaagaggtcattcaagtatgcctgggtgcttgacaagctcaaggctgagcgcgaaagaggaattaccattgatattgctttgtggaagtttgaaaccaccaagtactactgcacagtcatcgatgcccccggacatcgtgactttatcaagaacatgattactggtacctcccaggctgattgtgctgtccttatcattgactccaccactggtggttttgaagctggtatttctaaggatggacagactcgtgagcatgctcttcttgctttcacccttggtgtgaagcagatgatctgctgctgtaacaagatggatgccactaccccgaagtactctaaggctaggtatgatgaaattgtgaaggaagtctcttcctacttgaagaaggttggttacaacccagacaagattccatttgtgcccatctctggtttcgagggtgacaacatgattgagaggtccaccaaccttgactggtacaagggaccaactctccttgaggctcttgaccaaatcaatgagcccaagaggccctcagacaagccactcaggcttccattgcaggatgtctacaaaattggtggtattggtaccgtgccagtgggacgtgttgagactggtgtcgtgaagcccggtatggtggtgacttttggtcccactgggctgacaactgaggttaagtctgttgagatgcaccatgaggctctcacagaggctcttccaggtgacaatgttggctttaatgtgaagaatgttgcagtcaaggatctcaagcgtggttttgttgcatccaactccaaggatgaccctgccaaggaagctgccaacttcacatctcaagtcattatcatgaaccaccctggccagattggaaatggatacgcaccggtgcttgattgccacacttctcacattgctgtcaagttttctgaaatcttgaccaagattgacaggcgatctggtaaggagcttgagaaggagcccaaatttttgaagaatggtgatgcaggtatggttaagatgattccaaccaagcccatggtggttgaaactttctctgagtatcctccccttggtcgttttgctgtgagggacatgcgtcaaactgtggctgtcggagtcatcaagagtgttgagaagaaagaccccaccggagccaaggtcaccaaggccgctgccaagaagaagtga

SEQ ID NO: 3348 - protein, 447 aa, Glycine max
MGKEKTHINIVVIGHVDSGKSTTTGHLIYKLGGIDKRVIERFEKEAAEMNKRSFKYAWVLDKLKAERERGITIDIALWKFETTKYYCTVIDAPGHRDFIKNMITGTSQADCAVLIIDSTTGGFEAGISKDGQTREHALLAFTLGVKQMICCCNKMDATTPKYSKARYDEIVKEVSSYLKKVGYNPDKIPFVPISGFEGDNMIERSTNLDWYKGPTLLEALDQINEPKRPSDKPLRLPLQDVYKIGGIGTVPVGRVETGVVKPGMVVTFGPTGLTTEVKSVEMHHEALTEALPGDNVGFNVKNVAVKDLKRGFVASNSKDDPAKEAANFTSQVIIMNHPGQIGNGYAPVLDCHTSHIAVKFSEILTKIDRRSGKELEKEPKFLKNGDAGMVKMIPTKPMVVETFSEYPPLGRFAVRDMRQTVAVGVIKSVEKKDPTGAKVTKAAAKKK

SEQ ID NO: 3349 - DNA, 1350 bp, Oryza sativa
  CDS (1)..(1350)
atgggtaaggagaagacgcacatcaacattgtggtcattggccacgtcgactccggaattcccgggtcgaccaccacgggccatctgatctacaagcttggaggtatcgacaagcgtgtgatcgagaggttcgagaaggaagccgctgagatgaacaagaggtccttcaagtacgcgtgggtgctcgacaagctcaaggccgagcgtgagagaggtatcaccatcgatattgccctgtggaagttcgagaccaccaagtactactgcacggtcatcgatgcccctggtcaccgtgacttcatcaagaacatgatcacgggtacctcccaggctgactgtgccgtgctcatcattgactccaccactggtggttttgaggctggtatctccaaggatggccagacccgtgagcacgctcttcttgctttcactcttggagtgaagcagatgatctgctgctgcaacaagatggatgccaccactcccaagtactccaaggcccgttatgatgaaatcgtgaaggaagtctcatcctacctgaagaaggtcggctacaaccctgacaagattcccttcgttcccatctctgggtttgagggtgacaacatgattgagaggtccaccaaccttgactggtacaagggccccaccttgcttgaggctcttgaccagatcaacgagcccaagaggccatcagacaagcccctgcgtcttccccttcaggacgtgtacaagatcggtggtattggcaccgtgcctgtgggtcgtgttgagactggagtcctcaagcctggtatggtggtgacctttggtcccagcggcctgaccactgaggtcaagtcggttgagatgcaccacgaggctctccaggaggctcttcctggtgacaacgtcgggttcaacgtgaagaacgttgcggtgaaggatctgaagcgtgggtacgtggcctccaactccaaggatgaccctgccaaggaggctgccagcttcacctcccaggtgatcatcatgaaccaccctgggcagatcggcaacggctatgctccagtgctggactgccacacctcccacattgccgtcaagtttgctgagctggtgaccaagatcgacagacgatctggcaaggagctggagaaggagcccaagttcctcaagaacggtgatgctggtatggttaagatgattcccaccaagcccatggttgtggagaccttctctgagtaccctcctcttggtcgttttgccgtgcgtgacatgaggcaaacggtggctgttggcgtcatcaagaacgtggagaagaaggacccaaccggtgccaaggtgaccaaggctgccgccaagaagaaatga

SEQ ID NO: 3350 - protein, 449 aa, Oryza sativa
MGKEKTHINIVVIGHVDSGIPGSTTTGHLIYKLGGIDKRVIERFEKEAAEMNKRSFKYAWVLDKLKAERERGITIDIALWKFETTKYYCTVIDAPGHRDFIKNMITGTSQADCAVLIIDSTTGGFEAGISKDGQTREHALLAFTLGVKQMICCCNKMDATTPKYSKARYDEIVKEVSSYLKKVGYNPDKIPFVPISGFEGDNMIERSTNLDWYKGPTLLEALDQINEPKRPSDKPLRLPLQDVYKIGGIGTVPVGRVETGVLKPGMVVTFGPSGLTTEVKSVEMHHEALQEALPGDNVGFNVKNVAVKDLKRGYVASNSKDDPAKEAASFTSQVIIMNHPGQIGNGYAPVLDCHTSHIAVKFAELVTKIDRRSGKELEKEPKFLKNGDAGMVKMIPTKPMVVETFSEYPPLGRFAVRDMRQTVAVGVIKNVEKKDPTGAKVTKAAAKKK

SEQ ID NO: 3351 - DNA, 1359 bp, Zea mays
  CDS (1)..(1359)
atggcttccgccgcggtgctccggaacgccggctcccggcgcctcttctcctaccctactctccgcgccgctgcgatatatgtaccttctgcgctacccgatgcgcccgcggcggcggcagcgccggcccagccgccaccgatggccgggaccatctgggcgaggtccatggccaccttcacgcgcacgaagccccatgtgaacgtcggcaccattgggcacgtcgatcacggcaaaaccactctcactgctgccattaccaaggtcctggccgaggcagggaaggccaaagccgttgctttcgacgagatcgacaaggctccggaggagaaagccagaggaatcaccattgcgacagctcacgtcgagtatgagacggctaaaaggcattatgctcacgttgattgtccaggtcacgcagattatgtcaagaacatgatcactggagctgctcaaatggatggtggtattcttgtcgtgtcagctcctgatggcccgatgccacaaactaaggagcatattcttcttgcccgtcaggttggtgtaccttcccttgtgtgcttcttaaacaaagttgatgctgttgatgatccagagcttctggaacttgtagagatggagcttcgggagctcctcagtttctacaagttccccggtgatgagattccgatcatccgtgggtctgcgttgtctgctttgcaagggaacaatgatgagataggaaagaatgcaattttgaaattaatggacgcagttgatgagtacatccctgatcctgtgaggcagcttgataagcctttcttgatgccgatagaagatgtgttttctattcagggtcgtggaactgttgttactgggcgtgttgaacagggaacaatcaaaactggtgaagatgttgagatcttgggtttggcacagactggtcccttgaagactacagttactggtgttgagatgttcaaaaagatactggaccatggagaggctggtgacaacgttggccttcttctccgtggtcttaagcgtggtgatgttgagcgtggccaggtggtgtgcaaacctggtagtctgaagacatgcaaaaagttcgaggcggaaatatatgtcctgacaaaggatgaaggtggccggcacactgcctttgtcacaaattacagcccccaattctacttcaggacagctgatgtcactggaagggttgagctgcttggggagatgaagatggttttgcccggtgacaatgtaactgcgaattttgagttgatatcacctgttcctcttgaacctgggcaaagatttgcgattagggaaggaggaagaacggtcggtgctggagtcgtctccaaagttcttagctga

SEQ ID NO: 3352 - protein, 452 aa, Zea mays
MASAAVLRNAGSRRLFSYPTLRAAAIYVPSALPDAPAAAAAPAQPPPMAGTIWARSMATFTRTKPHVNVGTIGHVDHGKTTLTAAITKVLAEAGKAKAVAFDEIDKAPEEKARGITIATAHVEYETAKRHYAHVDCPGHADYVKNMITGAAQMDGGILVVSAPDGPMPQTKEHILLARQVGVPSLVCFLNKVDAVDDPELLELVEMELRELLSFYKFPGDEIPIIRGSALSALQGNNDEIGKNAILKLMDAVDEYIPDPVRQLDKPFLMPIEDVFSIQGRGTVVTGRVEQGTIKTGEDVEILGLAQTGPLKTTVTGVEMFKKILDHGEAGDNVGLLLRGLKRGDVERGQVVCKPGSLKTCKKFEAEIYVLTKDEGGRHTAFVTNYSPQFYFRTADVTGRVELLGEMKMVLPGDNVTANFELISPVPLEPGQRFAIREGGRTVGAGVVSKVLS

SEQ ID NO: 3353 - DNA, 1344 bp, Zea mays
  CDS (1)..(1344)
atgggtaaggagaagtcccacatcaacattgtggttattggccatgtcgactctggcaagtcaaccaccaccggccacctgatctacaagcttggaggcattgacaagcgtgtgattgagaggttcgagaaggaagccgctgaaatgaacaaacggtccttcaagtacgcttgggtgcttgacaagctcaaggctgagcgtgagagaggtatcaccattgatatcgctctgtggaagtttgagaccaccaagtactactgcactgtcattgatgcccctggacatcgcgacttcatcaagaacatgatcacgggtacctcccaggctgactgtgctgtcctgatcattgactccaccactggtggttttgaggccggtatctctaaggatggccagacccgtgagcatgctctccttgctttcacccttggggtcaagcagatgatttgctgctgcaacaagatggatgcgaccactcccaagtattccaaggcccgttacgatgagattgtgaaggaagtttcatcctacctcaagaaggttggatacaaccctgacaagattgcctttgtccctatctctggttttgagggtgacaacatgattgagaggtccaccaaccttgactggtacaagggtccaaccctgcttgaggctcttgaccagatcaccgagcccaagaggccttcagacaagcccctgcgtctgcccctccaggatgtgtacaagattggtggtattggaactgttccggttggtcgtgtggagactggtgtcatcaagcctggaatggttgtcaccttcggtccaactggcctgaccactgaggtgaagtctgttgagatgcaccacgaggctctccaggaggcccttcctggtgacaacgttggcttcaatgtgaagaacgttgctgtgaaggatctcaaacgtgggtacgtggcctccaactctaaggatgaccctgccaaggaggctgctagcttcacctcccaagtcatcatcatgaaccaccctgggcagattggcaatggctatgccccagtgctggactgccacacctcccacattgctgtcaagtttgctgagctcataaccaagatcgataggcggtctggcaaggagcttgagaaggagcccaagttcctgaagaatggtgatgccggtatggtgaagatgattcccactaagcccatggtggttgagaccttctctcagtatcctcctctgggtcgttttgctgtccgtgacatgaggcagacggttgctgttggagtcatcaagagcgtggagaagaaggacccaactggtgccaaggtgaccaaggctgcaataaagaagaaatga

SEQ ID NO: 3354 - protein, 447 aa, Zea mays
MGKEKSHINIVVIGHVDSGKSTTTGHLIYKLGGIDKRVIERFEKEAAEMNKRSFKYAWVLDKLKAERERGITIDIALWKFETTKYYCTVIDAPGHRDFIKNMITGTSQADCAVLIIDSTTGGFEAGISKDGQTREHALLAFTLGVKQMICCCNKMDATTPKYSKARYDEIVKEVSSYLKKVGYNPDKIAFVPISGFEGDNMIERSTNLDWYKGPTLLEALDQITEPKRPSDKPLRLPLQDVYKIGGIGTVPVGRVETGVIKPGMVVTFGPTGLTTEVKSVEMHHEALQEALPGDNVGFNVKNVAVKDLKRGYVASNSKDDPAKEAASFTSQVIIMNHPGQIGNGYAPVLDCHTSHIAVKFAELITKIDRRSGKELEKEPKFLKNGDAGMVKMIPTKPMVVETFSQYPPLGRFAVRDMRQTVAVGVIKSVEKKDPTGAKVTKAAIKKK

SEQ ID NO: 3355 - DNA, 1344 bp, Zea mays
  CDS (1)..(1344)
atggggaaggagaaggttcacatcaacattgtggtcattggccatgtcgactccggcaagtccacaaccaccggccacctcatctacaagcttggaggcattgacaagcgtgtcatcgagaggtttgagaaggaggctgccgagatgaacaagaggtccttcaagtacgcctgggtccttgacaagctcaaggccgagcgcgagaggggcatcaccattgacattgccctgtggaagtttgagacaaccaagtactactgcaccgtgattgatgcccctgggcaccgtgacttcatcaagaacatgatcaccggcacctcccaggctgattgtgcggtgctcatcattgactccaccactggtggcttcgaggctggtatctccaaggacggccagacccgtgagcatgcgctccttgctttcactcttggtgtgaggcagatgatctgctgctgcaacaagatggatgccactacccccaagtactccaaggctcggtacgacgagatcgtcaaggaagtgggttcctacctgaagaaggtggggtacaacccggacaagatccccttcgtgcccatctctgggttcgagggtgacaacatgatcgagaggtcgacgaacctggactggtacaagggccccaccctccttgaggcgctggaccagatcaacgagcccaagcggccctcggacaagcccctgcggcttcctctgcaggacgtgtacaagatcggcggcatcggcaccgtcccggtgggccgcgtggaaactgggctcctgaagcccggcatggtggtcacctttgcgcccacgggcctgacgacggaggtcaagtcggtggagatgcaccacgagacgatgcaggaggcgctgcccggcgacaacgtcggcttcaacgtcaagaacgtggcggtcaaggacctgaagcgcggttacgtggcctccaactccaaggacgaccccgccaaggaggctgccagcttcaccgcgcaggtgatcatcatgaaccacccggggcagatcggcaacggctacgccccggtgctggactgccacacgtcccacatcgccgtgaagttctcggagctgctcaccaagattgaccggcggtcgggcaaggagctggagagcgcccccaagtttctcaagaacggtgacgccggcttcgtcaagatgatccccacgaagcccatggtggtggagactttctccgagtatcctccactggggcgcttcgcggttcgcgacatgaggcagacggttgcagtcggcgtgataaagagcgtggagaagaaggacccaacgggagccaaggtgaccaaggcggctgccaagaagaaatga

SEQ ID NO: 3356 - protein, 447 aa, Zea mays
MGKEKVHINIVVIGHVDSGKSTTTGHLIYKLGGIDKRVIERFEKEAAEMNKRSFKYAWVLDKLKAERERGITIDIALWKFETTKYYCTVIDAPGHRDFIKNMITGTSQADCAVLIIDSTTGGFEAGISKDGQTREHALLAFTLGVRQMICCCNKMDATTPKYSKARYDEIVKEVGSYLKKVGYNPDKIPFVPISGFEGDNMIERSTNLDWYKGPTLLEALDQINEPKRPSDKPLRLPLQDVYKIGGIGTVPVGRVETGLLKPGMVVTFAPTGLTTEVKSVEMHHETMQEALPGDNVGFNVKNVAVKDLKRGYVASNSKDDPAKEAASFTAQVIIMNHPGQIGNGYAPVLDCHTSHIAVKFSELLTKIDRRSGKELESAPKFLKNGDAGFVKMIPTKPMVVETFSEYPPLGRFAVRDMRQTVAVGVIKSVEKKDPTGAKVTKAAAKKK

SEQ ID NO: 3357 - DNA, 1344 bp, Zea mays
  CDS (1)..(1344)
atgggcaaggagaagactcacatcaacattgtggtcattggacatgtcgactctggcaagtcgaccaccactggccacctgatctacaagctcggcggtattgacaagcgtgtgattgagaggttcgagaaagaggccgcggagatgaacaagcggtcattcaagtatgcctgggtgcttgacaagctcaaggccgagcgtgagagaggtatcacaattgatattgctttgtggaagttcgagaccaccaagtactactgcactgtcattgatgcccctggacaccgtgacttcatcaagaatatgattactggcacttcccaagctgactgcgctgttcttatcattgactccactactggtggttttgaggctggtatctccaaggatggacagacccgcgagcatgctctccttgctttcacgcttggagtgaagcagatgatttgctgttgcaacaagatggatgccaccacacccaagtactccaaggcccgttatgatgagattgtgaaggaagtctcttcctacctgaagaaggttggatacaaccctgacaagatccactttgttcccatctctggtttcgaaggtgacaacatgattgagaggtccaccaaccttgactggtacaagggcccaaccctacttgaggctttggacttgatcaatgagccgaagaggccttcagacaagcccctgcgtctccccctacaggatgtgtacaagattggtggtattggaactgttcctgttgggcgtgttgagactggtatcatcaagcctggtatggttgttacctttggtcctagtggccttactactgaggtgaagtctgttgaaatgcaccatgaggctctccaggaggcccttcctggtgacaatgttggcttcaatgttaagaatgttgctgtgaaggatctgaagcgtgggtatgtggcctccaactccaaggatgaccctgccaaggaggctgctagcttcacgtcccaggtcatcatcatgaaccaccctgggcagattggcaacggctatgccccagtgctggactgccacacctcgcacattgctgtcaagtttgcggagctcattaccaagattgataggcggtctggcaaagagcttgagaaggagcccaaattcctcaagaatggtgatgctggtatggtgaagatggttcccactaagcccatggtagtggagaccttttctgaatatcctcctcttggtcgctttgctgtccgtgacatgaggcaaacggtggctgtcggagtcatcaagagtgtggagaagaaggatccaactggagccaaggtgaccaaggctgccgcaaagaagaaatga

SEQ ID NO: 3358 - protein, 447 aa, Zea mays
MGKEKTHINIVVIGHVDSGKSTTTGHLIYKLGGIDKRVIERFEKEAAEMNKRSFKYAWVLDKLKAERERGITIDIALWKFETTKYYCTVIDAPGHRDFIKNMITGTSQADCAVLIIDSTTGGFEAGISKDGQTREHALLAFTLGVKQMICCCNKMDATTPKYSKARYDEIVKEVSSYLKKVGYNPDKIHFVPISGFEGDNMIERSTNLDWYKGPTLLEALDLINEPKRPSDKPLRLPLQDVYKIGGIGTVPVGRVETGIIKPGMVVTFGPSGLTTEVKSVEMHHEALQEALPGDNVGFNVKNVAVKDLKRGYVASNSKDDPAKEAASFTSQVIIMNHPGQIGNGYAPVLDCHTSHIAVKFAELITKIDRRSGKELEKEPKFLKNGDAGMVKMVPTKPMVVETFSEYPPLGRFAVRDMRQTVAVGVIKSVEKKDPTGAKVTKAAAKKK

SEQ ID NO: 3359 - DNA, 1344 bp, Zea mays
  CDS (1)..(1344)
atggggaaggagaagactcacatcaacattgtggtcattggccatgtcgactctggcaagtcgaccaccactggccacctgatctacaagcttggcggtattgacaagcgtgtgatcgagaggttcgagaaggaggctgcggaaatgaacaagcgttcattcaagtatgcctgggtgcttgacaagcttaaggctgagcgtgagagaggtatcacaattgatattgccctgtggaagttcgagaccaccaagtactactgcacggtcattgatgcccctggccaccgtgacttcatcaagaatatgatcactggcacttctcaggctgactgtgctgttcttatcattgactccaccactggtggttttgaggctggtatctccaaggatggccagacccgtgagcatgctctccttgctttcacacttggagtgaagcagatgatttgctgctgcaataagatggatgccaccacacccaagtactcgaaggcccgttatgatgaaattgtgaaggaagtctcttcctacctgaagaaggttggatacaacccagacaagatccactttgttcccatctctggttttgaaggtgacaacatgattgagaggtccaccaaccttgactggtacaagggcccaaccctgcttgaggctctggacttaatcaatgagccaaagaggccttcagacaagcccctgcgtctcccccttcaggatgtgtacaagattggtggtattggaactgttcctgtgggacgtgttgagactggtatcatcaagccgggtatggttgtcaccttcggtcctagtggccttacaactgaggttaagtctgttgagatgcaccacgaggctctccaggaggcccttcctggtgacaatgttggcttcaacgttaagaatgttgctgtgaaggatctgaagcgtgggtatgtggcctccaactccaaggatgaccctgccaaggaggctgctagcttcacctcacaggtcatcatcatgaaccaccctgggcagattggcaatggctatgccccagtgctggactgccacacctcacacatcgctgtcaagtttgctgagcttgttaccaagattgataggcgatctggcaaggagcttgagaaggagcccaaattcctcaagaacggtgatgctggtatggtgaagatggttcccactaagcccatggtggtggagaccttctctgagtatcctcctcttggtcgatttgctgtccgtgacatgaggcaaacggtggctgttggagtcatcaagagtgtggagaagaaggacccaactggagccaaggtgaccaaggctgctgccaagaagaaatga

SEQ ID NO: 3360 - protein, 447 aa, Zea mays
MGKEKTHINIVVIGHVDSGKSTTTGHLIYKLGGIDKRVIERFEKEAAEMNKRSFKYAWVLDKLKAERERGITIDIALWKFETTKYYCTVIDAPGHRDFIKNMITGTSQADCAVLIIDSTTGGFEAGISKDGQTREHALLAFTLGVKQMICCCNKMDATTPKYSKARYDEIVKEVSSYLKKVGYNPDKIHFVPISGFEGDNMIERSTNLDWYKGPTLLEALDLINEPKRPSDKPLRLPLQDVYKIGGIGTVPVGRVETGIIKPGMVVTFGPSGLTTEVKSVEMHHEALQEALPGDNVGFNVKNVAVKDLKRGYVASNSKDDPAKEAASFTSQVIIMNHPGQIGNGYAPVLDCHTSHIAVKFAELVTKIDRRSGKELEKEPKFLKNGDAGMVKMVPTKPMVVETFSEYPPLGRFAVRDMRQTVAVGVIKSVEKKDPTGAKVTKAAAKKK

SEQ ID NO: 3361 - DNA, 1401 bp, Zea mays
  CDS (1)..(1401)
atggcctccctcacctcggcgtccacttcactcctcttcccgcaggcctcctcatccaggagccgcatccggctctccacccccctgggcttctccgcgcagcctgcgcggctgcggagccagggggcggcagtgggcgcgcggcggcgcgggcgcctgctggtggtgcgcgcggcgaggggcaagttcgagcgcaccaaaccacacgtcaacataggcaccatcggccatgtcgaccacggaaagaccactctcaccgccgcgctcaccatggtgctcgcctccgtcggcggcagcgcgcctaagaagtacgacgagatcgacgccgcccccgaggagcgcgcccgcggtatcaccatcaacaccgccaccgtcgagtacgagaccgagacccgccactacgcacacgtcgactgccccggccacgccgactatgtcaagaacatgatcaccggcgctgcgcagatggacggtgccatcctcgtcgtatccggcgccgacgggcccatgccgcagaccaaagagcacattctcctcgccaagcaagtcggcgttcccaagatcgttgtcttcctcaacaagaaggacatggtcgacgacgaggagctgctcgagctcgtcgagctggaagtccgcgagctgctcagcaactatgagtacgacggcgacgaggtaccaatcgtcgctggctccgccctcaaggcgctcgaggctctcatggtcaaccctgccctgaagcgcggcgacgatgagtgggtcgactacatcttctcgttggttgataaagtggattcctacattccagtcccacagaggcagaccgacctcccgttcttactcgctgttgaagatgtcttctccatcaccggtcgtggtacagttgccactggccgtatagagcgtggcaccgtcaagattggtgacacagtcgatatcgttggaatccgggacacccggaactgcaccgtgactggcgttgagatgttccagaagaccatggacgatgccatggctggagacaatgtcggactgctgctccgtggtatgcagaaggatgacattgagagaggcatggtgctggcaaagcccggctctatcacaccgcacaccaagtttgaggctgttgtgtatgtgcttaagaaggaagagggtggccggcactcacctttcttccctggttaccgcccgcagttctacatgaggacaaccgatgtgacagggaatgtgactgtgattatgaatgacaaagatgaggaggcgaagatgtgcatgcctggtgaccgtatcaagatggttgttcagctcatccagcctgttgcttgtgagcagggtatgaggtttgctatccgtgagggtggtaagactgttggtgctggtgtcatcaacaaaatcattgagtaa

SEQ ID NO: 3362 - protein, 466 aa, Zea mays
MASLTSASTSLLFPQASSSRSRIRLSTPLGFSAQPARLRSQGAAVGARRRGRLLVVRAARGKFERTKPHVNIGTIGHVDHGKTTLTAALTMVLASVGGSAPKKYDEIDAAPEERARGITINTATVEYETETRHYAHVDCPGHADYVKNMITGAAQMDGAILVVSGADGPMPQTKEHILLAKQVGVPKIVVFLNKKDMVDDEELLELVELEVRELLSNYEYDGDEVPIVAGSALKALEALMVNPALKRGDDEWVDYIFSLVDKVDSYIPVPQRQTDLPFLLAVEDVFSITGRGTVATGRIERGTVKIGDTVDIVGIRDTRNCTVTGVEMFQKTMDDAMAGDNVGLLLRGMQKDDIERGMVLAKPGSITPHTKFEAVVYVLKKEEGGRHSPFFPGYRPQFYMRTTDVTGNVTVIMNDKDEEAKMCMPGDRIKMVVQLIQPVACEQGMRFAIREGGKTVGAGVINKIIE

SEQ ID NO: 3363 - DNA, 1344 bp, Zea mays
  CDS (1)..(1344)
atgggcaaggagaagactcacatcaacattgtggtcattggacatgtcgactctggcaagtcgaccaccactggccacctgatctacaagctcggcggtattgacaagcgtgtgattgagaggttcgagaaagaggccgcggagatgaacaagcggtcattcaagtatgcctgggtgcttgacaagctcaaggccgagcgtgagagaggtatcacaattgatattgctttgtggaagttcgagaccaccaagtactactgcactgtcattgatgcccctggacaccgtgacttcatcaagaatatgattactggcacttcccaagctgactgcgctgttcttatcattgactccaccactggtggttttgaggctggtatctccaaggatggacagacccgtgagcatgctctccttgctttcacgcttggagtgaagcagatgatttgctgttgcaacaagatggatgccaccacacccaagtactccaaggcccgttatgatgagattgtgaaggaagtctcttcctacctgaagaaggttggatacaaccctgacaagatccacttcgttcccatctctggtttcgaaggtgacaacatgattgagaggtccaccaaccttgactggtacaagggcccaaccctacttgaggctttggacttgatcaacgagccgaagaggccttcagacaagcccctgcgtctccccctacaggatgtgtacaagattggcggtattggaactgttcctgttgggcgtgttgagactggtatcatcaagcctggtatggttgttacctttggtcctagtggccttactactgaggtgaagtctgttgaaatgcaccatgaggctctccaggaggccctacctggtgacaatgttggcttcaatgttaagaatgttgctgtgaaggatctgaagcgtgggtatgtggcctccaactccaaggatgaccctgccaaggaggctgctagcttcacatcccaggtcatcatcatgaaccaccctgggcagattggcaacggctatgccccagtgctggactgccacaccccgcacattgctgtcaagtttgcagagctcattaccaaaattgataggcggtctggcaaggagcttaaaaaggagcccaaatttctcaaaaatggtgatgctggtatggtaaaaatggttccccctaagcccatggtagtggagcccttttttgaaaacccccctcttggtcgctttgctgtccgtgacatgaggcaaacggtggctgtcggagtcatcaaaagtgtggaaaaaaaggatccaactggagccaaggtgaccaaggctgccccaaaaaaaaaataa

SEQ ID NO: 3364 - protein, 447 aa, Zea mays
MGKEKTHINIVVIGHVDSGKSTTTGHLIYKLGGIDKRVIERFEKEAAEMNKRSFKYAWVLDKLKAERERGITIDIALWKFETTKYYCTVIDAPGHRDFIKNMITGTSQADCAVLIIDSTTGGFEAGISKDGQTREHALLAFTLGVKQMICCCNKMDATTPKYSKARYDEIVKEVSSYLKKVGYNPDKIHFVPISGFEGDNMIERSTNLDWYKGPTLLEALDLINEPKRPSDKPLRLPLQDVYKIGGIGTVPVGRVETGIIKPGMVVTFGPSGLTTEVKSVEMHHEALQEALPGDNVGFNVKNVAVKDLKRGYVASNSKDDPAKEAASFTSQVIIMNHPGQIGNGYAPVLDCHTPHIAVKFAELITKIDRRSGKELKKEPKFLKNGDAGMVKMVPPKPMVVEPFFENPPLGRFAVRDMRQTVAVGVIKSVEKKDPTGAKVTKAAPKKK

SEQ ID NO: 3365 - DNA, 1344 bp, Zea mays
  CDS (1)..(1344)
atgggtaaggagaagtcccacatcaacattgtggtcattggccatgtcgactctggcaagtcgaccaccaccggccacctgatctacaagcttggaggcattgacaagcgtgtaattgagaggtttgagaaggaggctgctgacatgaacaagcggtccttcaagtatgcttgggtgctcgacaagctcaaggctgagcgtgagagaggtatcaccattgatattgctctgtggaagtttgagaccaccaagtattactgcaccgtcattgatgcccctggacaccgtgacttcatcaagaacatgatcactggtacctcccaggctgactgtgctgtccttatcattgactccaccactggtggttttgaggctggtatctccaaggatggccagacccgtgagcatgctctccttgcgttcactcttggagtgaaacagatgatttgctgctgcaacaagatggatgcaacgactcccaaatactccaaggcgcgttatgatgagattgtgaaggaagtctcatcctacctcaagaaagttgggtacaaccctgataagattgcctttgtccccatctctggttttgagggcgccaacatgattgagaggtccaccaaccttgactggtacaaaggcccaaccctgcttgaggctcttgaccagatcaccgagccgaagaggccttcagacaagcccctgcgtctccccctgcaggatgtgtacaagattggtggtattggaactgtaccggttggtcgtgtggagactggtgtcatcaagcctggtatggttgtcaccttcggtccaactggcctgactactgaggtgaagtctgttgagatgcaccacgaggcacttcaggaggctcttccgggtgacaatgttggcttcaacgtgaagaacgttgctgtcaaggatctcaagcgtgggtttgtggcctcaaactccaaggatgaccctgccaaggaggctgccagcttcacgtcccaggtcatcatcatgaaccaccctgggcagataggcaatggctatgccccagttctggactgcctcacctcacacattgctgtcaagtttgctgagctcgttaccaagattgataggcgatccggcaaggagctggagaaggagcccaaatttctcaagaacggtgatgctggtatggtgaagatggttcccactaagcccatggtggtggagaccttttctcagtatcctccccttggtcgatttgctgtccgtgacatgaggcaaacggtggctgtcggagtcatcaagagtgtggagaagaaggacccaactggagccaaggtgacgaaggctgctgccaagaagaaatga

SEQ ID NO: 3366 - protein, 447 aa, Zea mays
MGKEKSHINIVVIGHVDSGKSTTTGHLIYKLGGIDKRVIERFEKEAADMNKRSFKYAWVLDKLKAERERGITIDIALWKFETTKYYCTVIDAPGHRDFIKNMITGTSQADCAVLIIDSTTGGFEAGISKDGQTREHALLAFTLGVKQMICCCNKMDATTPKYSKARYDEIVKEVSSYLKKVGYNPDKIAFVPISGFEGANMIERSTNLDWYKGPTLLEALDQITEPKRPSDKPLRLPLQDVYKIGGIGTVPVGRVETGVIKPGMVVTFGPTGLTTEVKSVEMHHEALQEALPGDNVGFNVKNVAVKDLKRGFVASNSKDDPAKEAASFTSQVIIMNHPGQIGNGYAPVLDCLTSHIAVKFAELVTKIDRRSGKELEKEPKFLKNGDAGMVKMVPTKPMVVETFSQYPPLGRFAVRDMRQTVAVGVIKSVEKKDPTGAKVTKAAAKKK

SEQ ID NO: 3367 - DNA, 1344 bp, Zea mays
  CDS (1)..(1344)
atgggtaaggagaagtcccacatcaacattgtggtcattggccacgtcgactctggcaagtcgaccaccaccggccacctgatctacaagcttggaggcattgacaagcgtgtaatagagaggtttgagaaggaggctgctgagatgaacaagcggtccttcaagtatgcttgggtgctcgacaagctcaaggctgagcgtgagaggggtatcaccattgatattgctctgtggaagtttgagaccaccaagtattactgcaccgtcattgatgcccctggacaccgtgacttcatcaagaacatgatcactggtacctcccaggctgactgtgctgtccttatcattgactccaccactggtggttttgaggctggtatctccaaggatggccagacccgtgagcatgctctccttgcgttcactcttggagtgaaacagatgatttgctgctgcaacaagatggatgcaacgactcccaaatactccaaggcgcgttatgatgagattgtgaaggaagtctcatcctacctcaagaaagttgggtacaaccctgataagattgcctttgtccccatctctggttttgagggcgacaacatgattgagaggtccaccaaccttgactggtacaaaggcccgaccctgcttgaggctcttgaccagatcaccgagcccaagagaccttcggacaagcccctgcgtctccccctgcaggatgtgtacaagattggtggtattggaactgtaccggttggtcgtgtggagactggtgtcatcaagcctggtatggttgtcaccttcggtccaactggcctgactactgaggtgaagtctgttgagatgcaccacgaggctcttcaggaggcccttcctggtgacaatgttggcttcaacgtgaagaacgttgctgtgaaggatctcaagcgtggttttgtggcctcaaactccaaggatgaccctgccaaggaggctgccagcttcacgtcccaggtcatcatcatgaaccaccctgggcagataggcaatggctatgccccagtgctggactgccacacctcccacattgctgtcaagtttgctgaactcattaccaagatcgacaggcggtctggcaaggagcttgagaaggagcccaagttcctgaagaacggtgatgctggtatggtgaagatgattcccaccaagcccatggtggtggagacattctcgcagtatcctccccttggtaggtttgctgtccgcgacatgaggcagacagttgctgttggagtcatcaagagtgtggagaagaaggacccgaccggcgccaaggttaccaaggcagctgccaaaaagaaatga

SEQ ID NO: 3368 - protein, 447 aa, Zea mays
MGKEKSHINIVVIGHVDSGKSTTTGHLIYKLGGIDKRVIERFEKEAAEMNKRSFKYAWVLDKLKAERERGITIDIALWKFETTKYYCTVIDAPGHRDFIKNMITGTSQADCAVLIIDSTTGGFEAGISKDGQTREHALLAFTLGVKQMICCCNKMDATTPKYSKARYDEIVKEVSSYLKKVGYNPDKIAFVPISGFEGDNMIERSTNLDWYKGPTLLEALDQITEPKRPSDKPLRLPLQDVYKIGGIGTVPVGRVETGVIKPGMVVTFGPTGLTTEVKSVEMHHEALQEALPGDNVGFNVKNVAVKDLKRGFVASNSKDDPAKEAASFTSQVIIMNHPGQIGNGYAPVLDCHTSHIAVKFAELITKIDRRSGKELEKEPKFLKNGDAGMVKMIPTKPMVVETFSQYPPLGRFAVRDMRQTVAVGVIKSVEKKDPTGAKVTKAAAKKK

SEQ ID NO: 3369 - DNA, 1344 bp, Zea mays
  CDS (1)..(1344)
atgggtaaagagaagtcccacatcaacattgtggttattggccatgtcgactctggcaagtcgaccaccacaggacaccttatctacaagcttggaggcattgacaagcgtgtgatcgagaggttcgagaaggaggctgctgaaatgaacaagcggtccttcaagtacgcgtgggtgctcgacaagctcaaggctgagcgtgagagaggtatcaccattgatatcgctctgtggaagtttgagaccaccaagtactactgcacggtcattgatgcccctggacaccgtgacttcatcaagaacatgatcactggtacctcccaggctgactgtgctgtccttatcattgactccaccactggtggttttgaggctggtatctccaaggatggccagacccgtgaacatgctctccttgcgttcacccttggagtgaagcagatgatttgctgctgcaacaagatggatgcaaccactcccaaatactccaaggcacgttatgaagagattgtgaaggaagtctcatcctacctcaagaaagttgggtacaaccctgataagattgcctttgttcccatttctggttttgagggcgacaacatgattgagaggtccaccaaccttgactggtacaaaggcccaaccctgcttgaggctcttgaccagatcaccgagcccaagaggccttcagacaagcccctgcgtctgcccctccaggatgtgtacaagattggtggtattggaactgtaccggttggtcgtgtggagactggtgtcatcaagcctggtatggtagtcacctttggtccaactggcctgactaccgaggtgaagtctgttgagatgcaccacgaggcacttcaggaggctcttccgggtgacaatgttggcttcaacgtgaagaatgttgctgtcaaggatctcaagcgtgggtttgtggcctccaactccaaggatgaccctgccaaggaggctgccagcttcacctcccaggtcatcatcatgaaccaccctgggcagattggcaacggctatgccccagtgctggactgccacacctcccacatcgctgtcaagtttgctgagctcattaccaagatcgacaggcggtctggcaaggagcttgagaaggagccaaagttcctgaagaacggtgatgctggtatggtgaagatgatacccaccaagcccatggtggtggagacattctcagcgtatcctccccttggtaggtttgctgtccgtgacatgaggcagacggttgctgttggagttatcaagagtgtggagaagaaggacccaaccggcgccaaggtgaccaaggctgctgccaagaagaaatga

SEQ ID NO: 3370 - protein, 447 aa, Zea mays
MGKEKSHINIVVIGHVDSGKSTTTGHLIYKLGGIDKRVIERFEKEAAEMNKRSFKYAWVLDKLKAERERGITIDIALWKFETTKYYCTVIDAPGHRDFIKNMITGTSQADCAVLIIDSTTGGFEAGISKDGQTREHALLAFTLGVKQMICCCNKMDATTPKYSKARYEEIVKEVSSYLKKVGYNPDKIAFVPISGFEGDNMIERSTNLDWYKGPTLLEALDQITEPKRPSDKPLRLPLQDVYKIGGIGTVPVGRVETGVIKPGMVVTFGPTGLTTEVKSVEMHHEALQEALPGDNVGFNVKNVAVKDLKRGFVASNSKDDPAKEAASFTSQVIIMNHPGQIGNGYAPVLDCHTSHIAVKFAELITKIDRRSGKELEKEPKFLKNGDAGMVKMIPTKPMVVETFSAYPPLGRFAVRDMRQTVAVGVIKSVEKKDPTGAKVTKAAAKKK

SEQ ID NO: 3371 - DNA, 1344 bp, Zea mays
  CDS (1)..(1344)
atgggtaaggagaagtctcacatcaacattgtggttattggccacgtcgactctggcaagtcgacaaccaccggccacctgatctacaagcttggaggcattgacaagcgtgtgatcgagaggtttgagaaggaggccgctgaaatgaacaagcggtcctttaagtatgcttgggtgcttgacaagctcaaggctgagcgtgagaggggtatcaccattgatattgctctgtggaagtttgagaccaccaagtactattgcaccgttattgatgcccctggacaccgtgactttatcaagaacatgatcactggtacctcccaggctgactgtgctgtccttatcattgactccaccactggtggttttgaggctggtatctccaaggatggccagacacgtgagcatgctctccttgcgttcacacttggagtgaagcagatgatttgctgctgcaacaagatggatgcaaccactcccaaatactccaaggcacgttatgatgagattgtgaaggaagtctcatcttacctcaagaaagttgggtacaaccctgataagatagcatttgttcccatctctggttttgagggtgacaacatgattgagaggtccaccaaccttgactggtacaaaggcccaaccctgcttgaggctcttgaccagatcaccgagcccaagagaccctcggacaagcccctgcgtctccccctccaggatgtgtacaagattggtggtattggaactgtgccagttggtcgtgtggagactggtgtcatcaagcctggtatggttgtcacctttggtccaactggcctgactactgaggtgaagtctgttgagatgcaccatgaggctcttcaggaggcccttcctggtgacaatgttggcttcaacgtgaagaacgtcgctgtgaaggatatcaagcgtggttatgtggcctccaactccaaggatgaccctgccaaggaggctgccagcttcacctcccaggtcatcatcatgaaccaccctgggcagatcggtaacggttatgccccagtgctggactgccacacctcccatattgctgtcaagtttgctgagctcattaccaagatcgacaggcgttctggcaaggagcttgagaaagagcccaagttcttgaagaacggtgatgctggtatggtgaagatgattcccaccaagcccatggtggtggagacattctcgcagtatcctcccctgggtaggtttgctgtccgtgacatgagacagacggttgctgttggagtcatcaagagtgtggagaagaaggacccgaccggtgccaaggtgaccaaggctgctgccaagaagaaatga

SEQ ID NO: 3372 - protein, 447 aa, Zea mays
MGKEKSHINIVVIGHVDSGKSTTTGHLIYKLGGIDKRVIERFEKEAAEMNKRSFKYAWVLDKLKAERERGITIDIALWKFETTKYYCTVIDAPGHRDFIKNMITGTSQADCAVLIIDSTTGGFEAGISKDGQTREHALLAFTLGVKQMICCCNKMDATTPKYSKARYDEIVKEVSSYLKKVGYNPDKIAFVPISGFEGDNMIERSTNLDWYKGPTLLEALDQITEPKRPSDKPLRLPLQDVYKIGGIGTVPVGRVETGVIKPGMVVTFGPTGLTTEVKSVEMHHEALQEALPGDNVGFNVKNVAVKDIKRGYVASNSKDDPAKEAASFTSQVIIMNHPGQIGNGYAPVLDCHTSHIAVKFAELITKIDRRSGKELEKEPKFLKNGDAGMVKMIPTKPMVVETFSQYPPLGRFAVRDMRQTVAVGVIKSVEKKDPTGAKVTKAAAKKK

SEQ ID NO: 3373 - DNA, 1344 bp, Zea mays
  CDS (1)..(1344)
atgggtaaagagaagtcccacatcaacattgtggttattggccatgtcgactctggcaagtcgaccaccacaggacaaaatatctacaagcttggaggcattgacaagcgtgtgatcgagaggttcgagaaggaggctcctgaaatgaacaagcggtccttcaagtacgcgtgggtgctcgacaagctcaaggctgagcgtgagagaggtttcaccattgatatcgctctgtggaagtttgagaccaccaagtactactgcacggtcattgatgcccgtggacaccgtcacttcatcaagaacatgatcactcgtacctcccaggctgactgtgctgtccttatcattgactcaaccactggtggttttgaggctggtatctccaaggatggccagacccgtgagcatgctctccttgctttcacacttggtgtgaagcagatgatttgctgctgcaacaagatggatgctactacacccaagtattccaaggcccgttatgatgagattgtgaaggaagtctcttcctacctcaagaaagttggatacaaccctgataagattgcctttgttccaatctctggttttgaaggtgacaacatgattgagaggtccaccaaccttgactggtacaagggcccaaccctacttgaggctcttgacaagatcaccgaggccaagaggccttcacacaagcccctgcgtctagccctccaggatgtgtaccagattggtggtattgggactgtaccggttggtcgtgtggaggctggtgtcatcaagcctggtatggtagtcacgtttggtccaacaggcctgactaccgaggtgaagtctgttgagatgcagcacgaggcacttcaggaggctcttccgggtgacaatgttggcttcaacgtgaagaatgttgctgtcaaggatctcaagcgtgggtttgtggcctccaactccagggatgaccctgccaaggaggctggcagcttcacctcccaagtcatcatcatgaaccaccctgggcagattggcaacggctatgcccctgtgctggactgccacacctcccacatcgctgtcaagtttgctgagctcattaccaagatcgacaggcgctctggcaaagagcttgagaaggagccaaagttcctgaagtacggtgatgctggtatggtgaagatgataccaaccaagcctatggtggtggagacattctccgcgtatcctcctctgggtaggtttgccgtccgtgacatgaggcaaacggtggctgtcggagtcatcaagagtgtggagaagaaggacccaactggagccaaggtgacgaaggctgctgccaagaagaaatga

SEQ ID NO: 3374 - protein, 447 aa, Zea mays
MGKEKSHINIVVIGHVDSGKSTTTGQNIYKLGGIDKRVIERFEKEAPEMNKRSFKYAWVLDKLKAERERGFTIDIALWKFETTKYYCTVIDARGHRHFIKNMITRTSQADCAVLIIDSTTGGFEAGISKDGQTREHALLAFTLGVKQMICCCNKMDATTPKYSKARYDEIVKEVSSYLKKVGYNPDKIAFVPISGFEGDNMIERSTNLDWYKGPTLLEALDKITEAKRPSHKPLRLALQDVYQIGGIGTVPVGRVEAGVIKPGMVVTFGPTGLTTEVKSVEMQHEALQEALPGDNVGFNVKNVAVKDLKRGFVASNSRDDPAKEAGSFTSQVIIMNHPGQIGNGYAPVLDCHTSHIAVKFAELITKIDRRSGKELEKEPKFLKYGDAGMVKMIPTKPMVVETFSAYPPLGRFAVRDMRQTVAVGVIKSVEKKDPTGAKVTKAAAKKK

SEQ ID NO: 3375 - DNA, 1344 bp, Zea mays
  CDS (1)..(1344)
atgggtaaagagaagtcccacatcaacattgtggttattggccatgtcgactctggcaagtcgaccaccacaggacaccttatctacaagcttggaggcattgacaagcgtgtgatcgagaggttcgggaaggaggctgctgaaatgaacaagcggtccttcaagtacgcgtgggtgctcgacaagctcaaggctgagcgtgagagaggtatcaccattgatatcgctctgtggaagtttgagaccaccaagtactactgcacggtcattgatgcccctggacaccgtgacttcatcaagaacatgatcactggtacctcccaggctgactgtgctgtccttatcattgactccaccactggtggttttgaggctggtatctccaaggatggccagacacgtgagcatgctctccttgcgttcacacttggagtgaagcagatgatttgctgctgcaacaagatggatgcaaccactcccaaatactccaaggcacgttatgatgagattgtgaaggaagtctcatcttacctcaagaaagttgggtacaaccctgataagatagcatttgttcccatctctggttttgagggtgacaacatgattgagaggtccaccaaccttgactggtacaaaggcccaaccctgcttgaggctcttgaccagatcaccgagcccaagagaccctcggacaagcccctgcgtctccccctgcaggatgtgtacaagattggtggtattggaactgtgccagttggtcgtgtggagactggtgtcatcaagcctggtatggttgtcaccttcggtccaactggcctgactactgaggtgaagtctgttgagatgcaccacgaggctcttcaggaggcccttcctggtgacaatgttggcttcaacgtgaagaacgttgctgtgaaggatctcaagcgtggttttgtggcctcaaactccaaggatgaccctgccaaggaggctgccagcttcacgtcccaggtcatcatcatgaaccaccctggccagatcggtaacggctatgccccagtgctggactgccatacctcccatattgctgtcaagtttgctgagctgattaccaagatcgacaggcgttctggcaaggagcttgagaaagagcccaagttcttgaagaacggcgatgctggtatggtgaagatgattcccaccaagcccatggtggtggagacattctcgcagtatcctccccttggtaggtttgctgtccgcgacatgaggcagacagttgctgttggagtcatcaagagtgtggagaagaaggacccgaccggcgccaaggttaccaaggcagctgccaaaaagaaatga

SEQ ID NO: 3376 - protein, 447 aa, Zea mays
MGKEKSHINIVVIGHVDSGKSTTTGHLIYKLGGIDKRVIERFGKEAAEMNKRSFKYAWVLDKLKAERERGITIDIALWKFETTKYYCTVIDAPGHRDFIKNMITGTSQADCAVLIIDSTTGGFEAGISKDGQTREHALLAFTLGVKQMICCCNKMDATTPKYSKARYDEIVKEVSSYLKKVGYNPDKIAFVPISGFEGDNMIERSTNLDWYKGPTLLEALDQITEPKRPSDKPLRLPLQDVYKIGGIGTVPVGRVETGVIKPGMVVTFGPTGLTTEVKSVEMHHEALQEALPGDNVGFNVKNVAVKDLKRGFVASNSKDDPAKEAASFTSQVIIMNHPGQIGNGYAPVLDCHTSHIAVKFAELITKIDRRSGKELEKEPKFLKNGDAGMVKMIPTKPMVVETFSQYPPLGRFAVRDMRQTVAVGVIKSVEKKDPTGAKVTKAAAKKK

SEQ ID NO: 3377 - DNA, 1353 bp, Zea mays
  CDS (1)..(1353)
atggcttccaccgttgtgctccggaacgcctgctcccgccgactcttctgctactccactctccgcgccgccgcaatattgggacccgccgcgccacctgatgcgcccgcggcggcgtcggcccagccgccaccgatggcaggaaccctctgggcgaggtccatggccactttcacgcgcacgaagccacatgtgaacgtcggcaccattgggcacgtcgatcacggcaaaaccacactcactgctgccattaccaaggttctggcagaggcagggaaggccaaagcagttgcttttgacgagatcgacaaggccccggaagagagagccagaggaatcaccattgcaacagctcatgtcgagtatgagactgctaaaaggcattatgctcatgttgattgtccaggtcacgcagattatgtcaagaacatgatcactggagctgctcaaatggatggtggtattcttgtcgtgtcagctcctgatggcccaatgccacaaacaaaggagcacattcttcttgcccgtcaggttggtgtaccttcccttgtgtgcttcttaaacaaagttgatgctgttgatgacccagagcttctggaacttgtagagatggagcttcgggagctcctcagtttctacaagttccctggtgatgagatttcgatcatccgtgggtctgcgttgtctgctttgcaagggaacaacgatgagataggaaagaatgccattttgaaactaatggatgcagttgatgagtacattcctgatcctgtaaggcagcttgataaggctttcttgatgccgatagaagatgtgttttctatccagggtcgtggaactgttgttactgggcgtgttgagcagggaacaattaaaactggcgaagatgttgagatcttgggtttgacacagagtggtcccttgaagactacagttactggtgttgagatgttcaaaaagatactggaccatggagaggctggtgacaacgttggtcttcttcttcgtggtctaaagcgtggtgatgttgagcgtggccaggtggtgtgcaaacctggtagtctgaagacatacaaaaagtttgaggcagaaatatacgtcctgacaaaggatgaaggtggccggcacactgcctttgtcacaaattacacaccccaattctacttcaggactgctgatgtcactggaaaggttgagttgcttggtgagacgaagatggttttgcccggtgacaatgtaaccgcgaatttcgagttgatatcgcctgttcctcttgaaactgggcaaagatttgcgatgagggaaggagggagaacagttggtgccggggttgtctccaaagttattagctga

SEQ ID NO: 3378 - protein, 450 aa, Zea mays
MASTVVLRNACSRRLFCYSTLRAAAILGPAAPPDAPAAASAQPPPMAGTLWARSMATFTRTKPHVNVGTIGHVDHGKTTLTAAITKVLAEAGKAKAVAFDEIDKAPEERARGITIATAHVEYETAKRHYAHVDCPGHADYVKNMITGAAQMDGGILVVSAPDGPMPQTKEHILLARQVGVPSLVCFLNKVDAVDDPELLELVEMELRELLSFYKFPGDEISIIRGSALSALQGNNDEIGKNAILKLMDAVDEYIPDPVRQLDKAFLMPIEDVFSIQGRGTVVTGRVEQGTIKTGEDVEILGLTQSGPLKTTVTGVEMFKKILDHGEAGDNVGLLLRGLKRGDVERGQVVCKPGSLKTYKKFEAEIYVLTKDEGGRHTAFVTNYTPQFYFRTADVTGKVELLGETKMVLPGDNVTANFELISPVPLETGQRFAMREGGRTVGAGVVSKVIS

SEQ ID NO: 3379 - DNA, 1344 bp, Zea mays
  CDS (1)..(1344)
atgggcaaggagaagactcacatcaacattgtggtcattggacatgtcgactctggcaagtcgaccaccactggccacctgatctacaagctcggcggtattgacaagcgtgtgattgagaggttcgagaaagaggccgcggagatgaacaagcggtcattcaagtatgcgtgggtgcttgacaagctcaaggctgagcgtgagagaggtattacaattgatattgccctgtggaagttcgagaccaccaagtactactgcactgttattgatgccccgggacaccgtgacttcatcaaaaatatgatcactggcacttcccaagctgactgtgctgttcttatcattgactcaaccactggtggttttgaggctggtatctccaaggatggccagacccgtgagcatgctctccttgctttcacacttggtgtgaagcagatgatttgctgctgcaacaagatggatgctactacacccaagtattcaaaggcccgttatgatgagattgtgaaggaagtctcttcctacctgaagaaggttggatacaaccctgataagatctacttcgttccaatctctggttttgaaggtgacaacatgattgagaggtccaccaaccttgactggtacaagggcccaaccctacttgaggctctggacttgatcaatgagccaaagaggccttcagacaagcccctgcgtctcccccttcaggatgtgtacaagattggtggtattggaactgtccctgttggacgtgttgagactggtgtcattaagcctggtatggttgttacttttgggcctactggtcttactactgaggttaagtccgttgagatgcaccatgaggctctccaggaggcccttcccggtgacaatgttggcttcaacgtgaagaatgttgctgtgaaggatctgaagcgtgggtatgtggcctccaactccaaggatgaccctgccaaggaggctgctagcttcacctcccaggtcatcatcatgaaccaccctggccagattggcaatggctatgccccagttctggactgccacacctcacacattgctgtcaagtttgctgagctcgttaccaagattgataggcgatccggcaaggagctggagaaggagcccaaatttctcaagaacggtgatgctggtatggtgaagatggttcccactaagcccatggtggtggagaccttttctcagtatcctcctcttggtcgatttgctgtccgtgacatgaggcaaacggtggctgtcggagtcatcaagagtgtggagaagaaggacccaactggagccaaggtgacgaaggctgctgccaagaagaaatga

SEQ ID NO: 3380 - protein, 447 aa, Zea mays
MGKEKTHINIVVIGHVDSGKSTTTGHLIYKLGGIDKRVIERFEKEAAEMNKRSFKYAWVLDKLKAERERGITIDIALWKFETTKYYCTVIDAPGHRDFIKNMITGTSQADCAVLIIDSTTGGFEAGISKDGQTREHALLAFTLGVKQMICCCNKMDATTPKYSKARYDEIVKEVSSYLKKVGYNPDKIYFVPISGFEGDNMIERSTNLDWYKGPTLLEALDLINEPKRPSDKPLRLPLQDVYKIGGIGTVPVGRVETGVIKPGMVVTFGPTGLTTEVKSVEMHHEALQEALPGDNVGFNVKNVAVKDLKRGYVASNSKDDPAKEAASFTSQVIIMNHPGQIGNGYAPVLDCHTSHIAVKFAELVTKIDRRSGKELEKEPKFLKNGDAGMVKMVPTKPMVVETFSQYPPLGRFAVRDMRQTVAVGVIKSVEKKDPTGAKVTKAAAKKK

SEQ ID NO: 3381 - DNA, 1401 bp, Zea mays
  CDS (1)..(1401)
atggcctccctcacctcggcgtccacctcactcctcttcccgcaggcctcctcatccaggagccgcatccggctctccacccccctgggcttctccgcgcagcctgcgcggctgcggagccagggggcggcagtgggcgcgcggcggcgcgggcgcctgctggtggtgcgcgcggcgaggggcaagttcgagcgcaccaaaccacacgtcaacataggcaccatcggccatgtcgaccacggaaagaccaccctcaccgccgcgctcaccatggtgctcgcctccgtcggcggcagcgcgcccaagaagtacgacgagatcgacgccgcccccgaggagcgcgcccgcggtatcaccatcaacaccgccaccgtcgagtacgagaccgagacccgccactacgcacacgtcgactgccccggccacgccgactatgtcaagaacatgatcaccggcgctgcgcagatggacggtgccatcctcgtcgtatccggcgccgacgggcccatgccgcagaccaaagagcacattctcctcgccaagcaagtcggcgttcccaagatcgttgtcttcctcaacaagaaggacatggtcgacgacgaggagctgctcgagctcgtcgagctggaagtccgcgagctgctcagcaactatgagtacgacggcgacgaggtgccaatcgtcgctggctccgccctcaaggcgctcgaggccctcatgggcaaccctaccctgaagcgcggcgacgatgagtgggtggactgcatcttcaagctggttgattctgtggattcctacattccagtcccacagaggcagaccgacctcccgttcttactcgctgttgaagatgtcttctccatcaccggtcgtggtacagttgccactggccgtatagagcgtggcaccgtcaagattggtgacacagtcgatatcgtcggaatccgggacacccggaactgcaccgtcactggcgttgagatgttccagaagaccatggacgatgccatggccggagacaatgtcggactgctgctccgtggtatgcagaaggatgacattgaaagaggcatggtgctggcaaagcccggctctatcacaccgcacaccaagtttgaggctgttgtgtatgtgcttaagaaggaagagggtggccggcactcacctttcttccctggttaccgcccgcagttctacatgaggacaaccgatgtgacagggaatgtgactgtgattatgaatgacaaagatgaggaggcgaagatgtgcatgcctggtgaccgtatcaagatggttgttcagctcatccagcctgttgcttgtgagcagggtatgaggtttgctatccgtgagggtggtaagactgttggtgctggtgtcatcaacaaaatcattgagtaa

SEQ ID NO: 3382 - protein, 466 aa, Zea mays
MASLTSASTSLLFPQASSSRSRIRLSTPLGFSAQPARLRSQGAAVGARRRGRLLVVRAARGKFERTKPHVNIGTIGHVDHGKTTLTAALTMVLASVGGSAPKKYDEIDAAPEERARGITINTATVEYETETRHYAHVDCPGHADYVKNMITGAAQMDGAILVVSGADGPMPQTKEHILLAKQVGVPKIVVFLNKKDMVDDEELLELVELEVRELLSNYEYDGDEVPIVAGSALKALEALMGNPTLKRGDDEWVDCIFKLVDSVDSYIPVPQRQTDLPFLLAVEDVFSITGRGTVATGRIERGTVKIGDTVDIVGIRDTRNCTVTGVEMFQKTMDDAMAGDNVGLLLRGMQKDDIERGMVLAKPGSITPHTKFEAVVYVLKKEEGGRHSPFFPGYRPQFYMRTTDVTGNVTVIMNDKDEEAKMCMPGDRIKMVVQLIQPVACEQGMRFAIREGGKTVGAGVINKIIE

SEQ ID NO: 3383 - DNA, 1344 bp, Zea mays
  CDS (1)..(1344)
atgggtaaggagaagtcccacatcaacattgtggtcattggccacgtcgactctggcaagtcgaccaccaccggccacctgatctacaagcttggaggcattgacaagcgtgtaatagagaggtttgagaaggaggctgctgagatgaacaagcggtccttcaagtatgcttgggtgctcgacaagctcaaggctgagcgtgagaggggtatcaccattgatattgctctgtggaagtttgagaccaccaagtattactgcaccgtcattgatgcccctggacaccgtgacttcatcaagaacatgatcactggtacctcccaggctgactgtgctgtccttatcattgactccaccactggtggttttgaggctggtatctccaaggatggccagacccgtgagcatgctctccttgcgttcactcttggagtgaaacagatgatttgctgctgcaacaagatggatgcaacgactcccaaatactccaaggcgcgttatgatgagattgtgaaggaagtctcatcctacctcaagaaagttgggtacaaccctgataagattgcctttgtccccatctctggttttgagggcgacaacatgattgagaggtccaccaaccttgactggtacaaaggcccgaccctgcttgaggctcttgaccagatcaccgagcccaagagaccttcggacaagcccctgcgtctccccctgcaggatgtgtacaagattggtggtattggaactgtgccagttggtcgtgtggagactggtgtcatcaagcctggtatggttgtcacctttggtccaactggcctgactactgaggtgaagtctgttgagatgcaccatgaggctcttcaggaggcccttcctggtgacaatgttggcttcaacgtgaagaacgtcgctgtgaaggatatcaagcgtggttatgtggcctccaactccaaggatgaccctgccaaggaggctgccagcttcacctcccaggtcatcatcatgaaccaccctgggcagatcggtaacggttatgccccagtgctggactgccacacctcccatattgctgtcaagtttgctgagctcattaccaagatcgacaggcgttctggcaaggagcttgagaaagagcccaagttcttgaagaacggtgatgctggtatggtgaagatgattcccaccaagcccatggtggtggagacattctcgcagtatcctcccctgggtaggtttgctgtccgtgacatgagacagacggctgctgttggagtcatcaagagtgtggagaagaaggacccgaccggtgccaaggtgaccaaggctgctgccaagaagaaatga

SEQ ID NO: 3384 - protein, 447 aa, Zea mays
MGKEKSHINIVVIGHVDSGKSTTTGHLIYKLGGIDKRVIERFEKEAAEMNKRSFKYAWVLDKLKAERERGITIDIALWKFETTKYYCTVIDAPGHRDFIKNMITGTSQADCAVLIIDSTTGGFEAGISKDGQTREHALLAFTLGVKQMICCCNKMDATTPKYSKARYDEIVKEVSSYLKKVGYNPDKIAFVPISGFEGDNMIERSTNLDWYKGPTLLEALDQITEPKRPSDKPLRLPLQDVYKIGGIGTVPVGRVETGVIKPGMVVTFGPTGLTTEVKSVEMHHEALQEALPGDNVGFNVKNVAVKDIKRGYVASNSKDDPAKEAASFTSQVIIMNHPGQIGNGYAPVLDCHTSHIAVKFAELITKIDRRSGKELEKEPKFLKNGDAGMVKMIPTKPMVVETFSQYPPLGRFAVRDMRQTAAVGVIKSVEKKDPTGAKVTKAAAKKK

SEQ ID NO: 3385 - DNA, 1344 bp, Zea mays
  CDS (1)..(1344)
atgggtaaagagaagtcccacatcaacattgtggttattggccacgttgactctggcaagtcgaccaccacaggacacctgatctacaagcttggaggcattgacaagcgtgtgatcgagaggtttgagaaggaggctgctgaaatgaacaagcggtccttcaagtacgcgtgggtgctcgacaagctcaaggctgagcgtgagagaggtatcaccattgatatcgctctgtggaagtttgagaccaccaagtactactgcacggtcattgatgcccctggacaccgtgacttcatcaagaacatgatcactggtacctcccaggctgactgtgctgtccttatcattgactccaccactggtggttttgaggctggtatctccaaggatggccagacccgtgaacatgctctccttgcgttcacccttggagtgaagcagatgatttgctgctgcaacaagatggatgcaaccactccgaaatactccaaggcacgttatgatgagattgtgaaggaagtctcatcctacctcaagaaagttgggtacaaccctgataagattgcctttgttcccatttctggttttgagggcgacaacatgattgagaggtccaccaaccttgactggtacaaaggcccaaccctgcttgaggctcttgaccagatcaccgagcccaagaggccttcggacaagcccctgcgtctgcccctccaggatgtgtacaagattggtggtattggaactgtaccggttggtcgtgtggagactggtgtcatcaagcctggtatggtagtcacctttggtccaactggcctgactactgaggtgaagtctgttgagatgcaccacgaggcgcttcaggaggctcttccgggcgacaatgttggcttcaacgtgaagaacgttgctgtcaaggatctcaagcgtgggttcgtggcctccaactccaaggatgaccctgccaaggaggctgccagcttcacctcccaggtcatcatcatgaaccaccctgggcagattggcaacggctatgccccagtgctggactgccacacctcccacatcgccgtcaagtttgctgagctcattaccaagatcgacaggcgatctggcaaggagctcgagaaggagcccaagttcctgaagaacggtgatgctggtatggtgaagatgattcccaccaagcctatggtggtggagacattctccgcgtatcctcccctgggtaggtttgccgtccgcgacatgaggcagacggttgctgttggagtcatcaagagtgtggagaagaaggacccaaccggcgccaaggtgaccaaggctgctgccaagaagaaatga

SEQ ID NO: 3386 - protein, 447 aa, Zea mays
MGKEKSHINIVVIGHVDSGKSTTTGHLIYKLGGIDKRVIERFEKEAAEMNKRSFKYAWVLDKLKAERERGITIDIALWKFETTKYYCTVIDAPGHRDFIKNMITGTSQADCAVLIIDSTTGGFEAGISKDGQTREHALLAFTLGVKQMICCCNKMDATTPKYSKARYDEIVKEVSSYLKKVGYNPDKIAFVPISGFEGDNMIERSTNLDWYKGPTLLEALDQITEPKRPSDKPLRLPLQDVYKIGGIGTVPVGRVETGVIKPGMVVTFGPTGLTTEVKSVEMHHEALQEALPGDNVGFNVKNVAVKDLKRGFVASNSKDDPAKEAASFTSQVIIMNHPGQIGNGYAPVLDCHTSHIAVKFAELITKIDRRSGKELEKEPKFLKNGDAGMVKMIPTKPMVVETFSAYPPLGRFAVRDMRQTVAVGVIKSVEKKDPTGAKVTKAAAKKK

SEQ ID NO: 3387 - DNA, 1359 bp, Zea mays
  CDS (1)..(1359)
atggcttccgccgcggtgctccggaacgccggctcccggcgcctcttctcctaccctactctccgcgccgctgcgatatatgtaccttctgcgctacccgatgcgcccgcggcggcggcagcgccggcccagccgccaccgacggccgggaccctctgggcgaggtctatggccaccttcacgcgcacgaagccccatgtgaacgtcggcaccattgggcacgtcgatcacggcaaaaccactctcactgctgccattaccaaggtcctggccgaggcagggaaggccaaagccgttgctttcgacgagatcgacaaggctccggaggagaaagccagaggaatcaccattgcgacagctcacgtcgagtatgagacggctaaaaggcattatgctcacgttgattgtccaggtcacgcagattatgtcaagaacatgatcactggagctgctcaaatggatggtggtattcttgtcgtgtcagctcctgatggcccgatgccacaaactaaggagcatattcttcttgcccgtcaggttggtgtaccttcccttgtgtgcttcttaaacaaagttgatgctgttgatgatccagagcttctggaacttgtagagatggagcttcgggagctcctcagtttctacaagttccccggtgatgagattccgatcatccgtgggtctgcgttgtctgctttgcaagggaacaatgatgagataggaaagaatgcaattttgaaattaatggacgcagttgatgagtacatccctgatcctgtgaggcagcttgataagcctttcttgatgccgatagaagatgtgttttctattcagggtcgtggaactgttgttactgggcgtgttgaacagggaacaatcaaaactggtgaagatgttgagatcttgggtttggcacagactggtcccttgaagactacagttactggtgttgagatgttcaaaaagatactggaccatggagaggctggtgacaacgttggccttcttctccgtggtcttaagcgtggtgatgttgagcgtggccaggtggtgtgcaaacctggtagtctgaagacatgcaaaaagttcgaggcggaaatatatgtcctgacaaaggatgaaggtggccggcacactgcctttgtcacaaattacagcccccaattctacttcaggacagctgatgtcactggaagggttgagctgcttggggagatgaagatggttttgcccggtgacaatgtaactgcgaattttgagttgatatcacctgttcctcttgaacctgggcaaagatttgcgattagggaaggaggaagaacggtcggtgctggagtcgtctccaaagttcttagctga

SEQ ID NO: 3388 - protein, 452 aa, Zea mays
MASAAVLRNAGSRRLFSYPTLRAAAIYVPSALPDAPAAAAAPAQPPPTAGTLWARSMATFTRTKPHVNVGTIGHVDHGKTTLTAAITKVLAEAGKAKAVAFDEIDKAPEEKARGITIATAHVEYETAKRHYAHVDCPGHADYVKNMITGAAQMDGGILVVSAPDGPMPQTKEHILLARQVGVPSLVCFLNKVDAVDDPELLELVEMELRELLSFYKFPGDEIPIIRGSALSALQGNNDEIGKNAILKLMDAVDEYIPDPVRQLDKPFLMPIEDVFSIQGRGTVVTGRVEQGTIKTGEDVEILGLAQTGPLKTTVTGVEMFKKILDHGEAGDNVGLLLRGLKRGDVERGQVVCKPGSLKTCKKFEAEIYVLTKDEGGRHTAFVTNYSPQFYFRTADVTGRVELLGEMKMVLPGDNVTANFELISPVPLEPGQRFAIREGGRTVGAGVVSKVLS

SEQ ID NO: 3389 - DNA, 1401 bp, Zea mays
  CDS (1)..(1401)
atggcctccctcacctcggcgtccacttcactcctcttcccgcaggcctcctcatccaggagccgcatccgtctctccacccccctgggcttctccgcgcagcctgcgcggctgcggagccagggggcggcagtgggcgcgcggcggcgcgggcgcctgctggtggtgcgcgcggcgaggggcaagttcgagcgcaccaaaccacacgtcaacataggcaccatcggccatgtcgaccacggaaagaccactctcaccgccgcgctcaccatggtgctcgcctccgtcggtggcagcgcgcctaagaagtacgacgagatcgacgccgcccccgaggagcgcgcccgcggtatcaccatcaacaccgccaccgtcgagtacgagaccgagacccgccactacgcacacgtcgactgccccggccacgccgactatgtcaagaatatgatcaccggcgctgcgcagatggacggtgccatcctcgtcgtatccggtgccgacgggcccatgccgcagaccaaagagcacatcctcctcgccaagcaagtcggtgttcccaagatcgttgtcttcctcaacaagaaggacatggtcgacgacgaggagctgctcgagctcgtcgagctcgaggtccgcgagctgctcagcaactacgagtacgacggcgacgacgtaccaatcgtcgctggctccgccctcaaggcgctcgaggctctcatggtcaaccctgccctgaagcgcggcgacgatgagtgggtcgactacatcttctcgttggttgataaagtggattcctatattccagtcccgcagaggcagactgacctcccgttcttgctcgctgttgaagatgtcttctccatcaccggtcgtggtacagttgccactggccgtatagatcgtggcaccgtcaagattggtgacacagtcgatatcgtcggaatccgggacacccggaactgcacggtcactggtgttgagatgttccagaagaccatggatgatgccatggccggagacaatgttgggctgctgctccgtggtatgcagaaggatgacattgaaagaggcatggtgctggcaaagcctggctctatcacaccgcacaccaagtttgaggctgttgtgtatgtgcttaagaaggaagagggtggccgacactcacctttcttccctggttaccgcccacagttctacatgcggacaactgatgtgacagggagtgtgactacgattatgaatgacaaggatgaggaggcgaagatgtgcatgcctggtgaccgtatcaaaatgattgttcagctcatccagcctgttgcttgtgagcagggtatgaggtttgctatccgtgagggtggtaagaccgttggtgccggtgtcatcaacaaaatcattgagtaa

SEQ ID NO: 3390 - protein, 466 aa, Zea mays
MASLTSASTSLLFPQASSSRSRIRLSTPLGFSAQPARLRSQGAAVGARRRGRLLVVRAARGKFERTKPHVNIGTIGHVDHGKTTLTAALTMVLASVGGSAPKKYDEIDAAPEERARGITINTATVEYETETRHYAHVDCPGHADYVKNMITGAAQMDGAILVVSGADGPMPQTKEHILLAKQVGVPKIVVFLNKKDMVDDEELLELVELEVRELLSNYEYDGDDVPIVAGSALKALEALMVNPALKRGDDEWVDYIFSLVDKVDSYIPVPQRQTDLPFLLAVEDVFSITGRGTVATGRIDRGTVKIGDTVDIVGIRDTRNCTVTGVEMFQKTMDDAMAGDNVGLLLRGMQKDDIERGMVLAKPGSITPHTKFEAVVYVLKKEEGGRHSPFFPGYRPQFYMRTTDVTGSVTTIMNDKDEEAKMCMPGDRIKMIVQLIQPVACEQGMRFAIREGGKTVGAGVINKIIE

SEQ ID NO: 3391 - DNA, 1353 bp, Zea mays
  CDS (1)..(1353)
atggcttccaccgttgtgctccggaacgcctgctcccgccgactcttctgctactccactctccgcgccgccgcaatattgggacccgccgcgccacctgatgcgcccgcggcggcgtcggcccagccgccaccgatggcaggaaccctctgggcgaggtccatggccactttcacgcgcacgaagccacatgtgaacgtcggcaccattgggcacgtcgatcacggcaaaaccacactcactgctgccattaccaaggttctggcagaggcagggaaggccaaagcagttgcttttgacgagatcgacaaggccccggaagagagagccagaggaatcaccattgcaacagctcatgtcgagtatgagactgctaaaaggcattatgctcatgttgattgtccaggtcacgcagattatgtcaagaacatgatcactggagctgctcaaatggatggtggtattcttgtcgtgtcagctcctgatggcccaatgccacaaacaaaggagcacattcttcttgcccgtcaggttggtgtaccttcccttgtgtgtttcttaaacaaagttgatgctgttgatgacccagagctactggaacttgtagagatggagcttcgggagctcctcagtttctacaagttccctggtgatgagattccgatcatccgtgggtctgcgttgtctgctttgcaagggaacaacgatgagataggaaagaatgccattttgaaactaatggatgcagttgatgagtacattcctgatcctgtaaggcagcttgataaggctttcttgatgccgatagaagatgtgttttctatccagggtcgtggaactgttgttactgggcgtgttgagcagggaacaattaaaactggcgaagatgttgagatcttgggtttgacacagagtggtcccttgaagactacagttactggtgttgagatgttcaaaaagatactggaccatggagaggctggtgacaacgttggtcttcttcttcgtggtctaaagcgtggtgatgttgagcgtggccaggtggtgtgcaaacctggtagtctgaagacatacaaaaagtttgaggcagaaatatacgtcctgacaaaggatgaaggtggccggcacactgcctttgtcacaaattacacaccccaattctacttcaggactgctgatgtcactggaaaggttgagttgcttggtgagacgaagatggttttgcccggtgacaatgtaaccgcgaatttcgagttgatatcgcctgttcctcttgaaactgggcaaagatttgcgatgagggaaggagggagaacagttggtgccggggttgtctccaaagttattagctga

SEQ ID NO: 3392 - protein, 450 aa, Zea mays
MASTVVLRNACSRRLFCYSTLRAAAILGPAAPPDAPAAASAQPPPMAGTLWARSMATFTRTKPHVNVGTIGHVDHGKTTLTAAITKVLAEAGKAKAVAFDEIDKAPEERARGITIATAHVEYETAKRHYAHVDCPGHADYVKNMITGAAQMDGGILVVSAPDGPMPQTKEHILLARQVGVPSLVCFLNKVDAVDDPELLELVEMELRELLSFYKFPGDEIPIIRGSALSALQGNNDEIGKNAILKLMDAVDEYIPDPVRQLDKAFLMPIEDVFSIQGRGTVVTGRVEQGTIKTGEDVEILGLTQSGPLKTTVTGVEMFKKILDHGEAGDNVGLLLRGLKRGDVERGQVVCKPGSLKTYKKFEAEIYVLTKDEGGRHTAFVTNYTPQFYFRTADVTGKVELLGETKMVLPGDNVTANFELISPVPLETGQRFAMREGGRTVGAGVVSKVIS

SEQ ID NO: 3393 - DNA, 1344 bp, Zea mays
  CDS (1)..(1344)
atgggtaaagagaagtcacatttcaacattgtggtcattggacatgtcgactctggcaagtcgaccaccactggccacctgatctacaagctcggcggtattgacaagcgtgtgattgagaggttcgagaaagaggccgcggagatgaacaagcggtcattcaagtatgcctgggtgcttgacaagctcaaggccgagcgtgagagaggtatcacaattgatattgctttgtggaagttcgagaccaccaagtactactgcactgtcattgatgcccctggacaccgtgacttcatcaagaatatgattactggcacttcccaagctgactgcgctgttcttatcattgactccactactggtggttttgaggctggtatctccaaggatggacagacccgcgagcatgctctccttgctttcacgcttggagtgaagcagatgatttgctgttgcaacaagatggatgccaccacacccaagtactccaaggcccgttatgatgagattgtgaaggaagtctcttcctacctgaagaaggttggatacaaccctgacaagatccactttgttcccatctctggtttcgaaggtgacaacatgattgagaggtccaccaaccttgactggtacaagggcccaaccctacttgaggctttggacttgatcaatgagccgaagaggccttcagacaagcccctgcgtctccccctacaggatgtgtacaagattggtggtattggaactgttcctgttgggcgtgttgagactggtatcatcaagcctggtatggttgttacctttggtcctagtggccttactactgaggtgaagtctgttgaaatgcaccatgaggctctccaggaggcccttcctggtgacaatgttggcttcaatgttaagaatgttgctgtgaaggatctgaagcgtgggtatgtggcctccaactccaaggatgaccctgccaaggaggctgctagcttcacgtcccaggtcatcatcatgaaccaccctgggcagattggcaacggctatgccccagtgctggactgccacacctcgcacattgctgtcaagtttgcggagctcattaccaagattgataggcggtctggcaaagagcttgagaaggagcccaaattcctcaagaatggtgatgctggtatggtgaagatggttcccactaagcccatggtagtggagaccttttctgaatatcctcctcttggtcgctttgctgtccgtgacatgaggcaaacggtggctgtcggagtcatcaagagtgtggagaagaaggatccaactggagccaaggtgaccaaggctgccgcaaagaagaaatga

SEQ ID NO: 3394 - protein, 447 aa, Zea mays
MGKEKSHFNIVVIGHVDSGKSTTTGHLIYKLGGIDKRVIERFEKEAAEMNKRSFKYAWVLDKLKAERERGITIDIALWKFETTKYYCTVIDAPGHRDFIKNMITGTSQADCAVLIIDSTTGGFEAGISKDGQTREHALLAFTLGVKQMICCCNKMDATTPKYSKARYDEIVKEVSSYLKKVGYNPDKIHFVPISGFEGDNMIERSTNLDWYKGPTLLEALDLINEPKRPSDKPLRLPLQDVYKIGGIGTVPVGRVETGIIKPGMVVTFGPSGLTTEVKSVEMHHEALQEALPGDNVGFNVKNVAVKDLKRGYVASNSKDDPAKEAASFTSQVIIMNHPGQIGNGYAPVLDCHTSHIAVKFAELITKIDRRSGKELEKEPKFLKNGDAGMVKMVPTKPMVVETFSEYPPLGRFAVRDMRQTVAVGVIKSVEKKDPTGAKVTKAAAKKK

SEQ ID NO: 3395 - DNA, 1467 bp, Zea mays
  CDS (1)..(1467)
atgaacaagtcattgagctgttactattggcgacgactacaaagaattcggcgaccacgccgtctgccttctgcgcctccatttcggcctctgtcccttgcaagttcaatctcacctccaaccatgggtaaagagaagtcccacatcaacattgtggttattggccacgttgactctggcaagtcgaccaccacaggacacctgatctacaagcttggaggcattgacaagcgtgtgatcgagaggtttgagaaggaggctgctgaaatgaacaagcggtccttcaagtacgcatgggtgctcgacaagctcaaggctgagcgtgagagaggtatcaccattgatatcgctctgtggaagtttgagaccaccaagtactactgcacggtcattgatgcccctggacaccgtgacttcatcaagaacatgatcactggtacctcccaggctgactgtgctgtccttatcattgactccaccactggtggttttgaggctggtatctccaaggatggccagacccgtgaacatgctctccttgcgttcacccttggagtgaagcagatgatttgctgctgcaacaagatggatgcaaccactccgaaatactccaaggcacgttatgatgagattgtgaaggaagtctcatcctacctcaagaaagttgggtacaaccctgataagattgccttcgttcccatttctggttttgagggtgacaacatgattgagaggtccaccaaccttgactggtacaaaggcccaaccctgcttgaggctcttgaccagatcaccgagcccaagaggccttcggacaagcccctgcgtctgcccctccaggatgtgtacaagattggtggtattggaactgtaccggttggtcgtgtggagactggtgtcatcaagcctggtatggtagtcacctttggtccaactggcctgactactgaggtgaagtctgttgagatgcaccacgaggcgcttcaggaggctcttccgggcgacaatgttggcttcaacgtgaagaacgttgctgtcaaggatctcaagcgtgggttcgtggcctccaactccaaggatgaccctgccaaggaggctgccagcttcacctcccaggtcatcatcatgaaccaccctgggcagattggcaacggctatgccccagtgctggactgccacacctcccacatcgccgtcaagtttgctgagctcattaccaagatcgacaggcgatctggcaaggagctcgagaaggagcccaagttcctgaagaacggtgatgctggtatggtgaagatgattcccaccaagcctatggtggtggagacattctccgcgtatcctcccctgggtaggtttgccgtccgcgacatgaggcagacggttgctgttggagtcatcaagagtgtggagaagaaggacccaaccggcgccaaggtgaccaaggcggccgccaagaagaaatga

SEQ ID NO: 3396 - protein, 488 aa, Zea mays
MNKSLSCYYWRRLQRIRRPRRLPSAPPFRPLSLASSISPPTMGKEKSHINIVVIGHVDSGKSTTTGHLIYKLGGIDKRVIERFEKEAAEMNKRSFKYAWVLDKLKAERERGITIDIALWKFETTKYYCTVIDAPGHRDFIKNMITGTSQADCAVLIIDSTTGGFEAGISKDGQTREHALLAFTLGVKQMICCCNKMDATTPKYSKARYDEIVKEVSSYLKKVGYNPDKIAFVPISGFEGDNMIERSTNLDWYKGPTLLEALDQITEPKRPSDKPLRLPLQDVYKIGGIGTVPVGRVETGVIKPGMVVTFGPTGLTTEVKSVEMHHEALQEALPGDNVGFNVKNVAVKDLKRGFVASNSKDDPAKEAASFTSQVIIMNHPGQIGNGYAPVLDCHTSHIAVKFAELITKIDRRSGKELEKEPKFLKNGDAGMVKMIPTKPMVVETFSAYPPLGRFAVRDMRQTVAVGVIKSVEKKDPTGAKVTKAAAKKK

SEQ ID NO: 3397 - DNA, 21 bp, Artificial sequence
  primer
atggctaaggaaaagttcgag

SEQ ID NO: 3398 - DNA, 21 bp, Artificial sequence
  primer
ttactcgatgatcttggccac

SEQ ID NO: 3399 - protein, 552 aa, Artificial sequence
  consensus sequence
  Variant (2)..(2): Xaa in position 2 is any amino acid
  Variant (3)..(54): Xaa in position 3 to 54 is any or no amino acid
  Variant (56)..(56): Xaa in position 56 is any amino acid
  Variant (58)..(58): Xaa in position 58 is any amino acid
  Variant (60)..(61): Xaa in position 60 to 61 is any amino acid
  Variant (62)..(62): Xaa in position 62 is any or no amino acid
  Variant (68)..(68): Xaa in position 68 is any amino acid
  Variant (71)..(71): Xaa in position 71 is any amino acid
  Variant (72)..(73): Xaa in position 72 to 73 is any or no amino acid
  Variant (75)..(75): Xaa in position 75 is any amino acid
  Variant (77)..(92): Xaa in position 77 to 92 is any amino acid
  Variant (93)..(112): Xaa in position 93 to 112 is any or no amino acid
  Variant (114)..(117): Xaa in position 114 to 117 is any amino acid
  Variant (119)..(120): Xaa in position 119 to 120 is any amino acid
  Variant (126)..(133): Xaa in position 126 to 133 is any amino acid
  Variant (135)..(142): Xaa in position 135 to 142 is any amino acid
  Variant (143)..(143): Xaa in position 143 is any or no amino acid
  Variant (145)..(145): Xaa in position 145 is any amino acid
  Variant (149)..(149): Xaa in position 149 is any amino acid
  Variant (151)..(152): Xaa in position 151 to 152 is any amino acid
  Variant (159)..(160): Xaa in position 159 to 160 is any amino acid
  Variant (162)..(162): Xaa in position 162 is any amino acid
  Variant (164)..(164): Xaa in position 164 is any amino acid
  Variant (166)..(166): Xaa in position 166 is any amino acid
  Variant (168)..(172): Xaa in position 168 to 172 is any amino acid
  Variant (173)..(173): Xaa in position 173 is any or no amino acid
  Variant (175)..(183): Xaa in position 175 to 183 is any amino acid
  Variant (184)..(196): Xaa in position 184 to 196 is any or no amino acid
  Variant (199)..(201): Xaa in position 199 to 201 is any amino acid
  Variant (202)..(206): Xaa in position 202 to 206 is any or no amino acid
  Variant (209)..(215): Xaa in position 209 to 215 is any amino acid
  Variant (216)..(217): Xaa in position 216 to 217 is any or no amino acid
  Variant (220)..(220): Xaa in position 220 is any amino acid
  Variant (222)..(233): Xaa in position 222 to 233 is any amino acid
  Variant (234)..(244): Xaa in position 234 to 244 is any or no amino acid
  Variant (246)..(249): Xaa in position 246 to 249 is any amino acid
  Variant (251)..(254): Xaa in position 251 to 254 is any amino acid
  Variant (255)..(257): Xaa in position 255 to 257 is any or no amino acid
  Variant (259)..(261): Xaa in position 259 to 261 is any amino acid
  Variant (262)..(262): Xaa in position 262 is any or no amino acid
  Variant (264)..(267): Xaa in position 264 to 267 is any amino acid
  Variant (269)..(291): Xaa in position 269 to 291 is any amino acid
  Variant (292)..(321): Xaa in position 292 to 321 is any or no amino acid
  Variant (323)..(324): Xaa in position 323 to 324 is any amino acid
  Variant (326)..(326): Xaa in position 326 is any amino acid
  Variant (328)..(329): Xaa in position 328 to 329 is any amino acid
  Variant (331)..(331): Xaa in position 331 is any amino acid
  Variant (333)..(335): Xaa in position 333 to 335 is any amino acid
  Variant (337)..(338): Xaa in position 337 to 338 is any amino acid
  Variant (339)..(339): Xaa in position 339 is any or no amino acid
  Variant (342)..(343): Xaa in position 342 to 343 is any amino acid
  Variant (345)..(345): Xaa in position 345 is any amino acid
  Variant (346)..(347): Xaa in position 346 to 347 is any or no amino acid
  Variant (349)..(349): Xaa in position 349 is any amino acid
  Variant (353)..(354): Xaa in position 353 to 354 is any amino acid
  Variant (357)..(357): Xaa in position 357 is any amino acid
  Variant (359)..(359): Xaa in position 359 is any amino acid
  Variant (361)..(362): Xaa in position 361 to 362 is any amino acid
  Variant (364)..(364): Xaa in position 364 is any amino acid
  Variant (366)..(375): Xaa in position 366 to 375 is any amino acid
  Variant (376)..(381): Xaa in position 376 to 381 is any or no amino acid
  Variant (383)..(387): Xaa in position 383 to 387 is any amino acid
  Variant (390)..(399): Xaa in position 390 to 399 is any amino acid
  Variant (400)..(400): Xaa in position 400 is any or no amino acid
  Variant (404)..(404): Xaa in position 404 is any amino acid
  Variant (406)..(417): Xaa in position 406 to 417 is any amino acid
  Variant (418)..(420): Xaa in position 418 to 420 is any or no amino acid
  Variant (423)..(423): Xaa in position 423 is any amino acid
  Variant (425)..(448): Xaa in position 425 to 448 is any amino acid
  Variant (449)..(449): Xaa in position 449 is any or no amino acid
  Variant (451)..(455): Xaa in position 451 to 455 is any amino acid
  Variant (456)..(459): Xaa in position 456 to 459 is any or no amino acid
  Variant (461)..(461): Xaa in position 461 is any amino acid
  Variant (463)..(467): Xaa in position 463 to 467 is any amino acid
  Variant (469)..(485): Xaa in position 469 to 485 is any amino acid
  Variant (486)..(510): Xaa in position 486 to 510 is any or no amino acid
  Variant (513)..(522): Xaa in position 513 to 522 is any amino acid
  Variant (524)..(526): Xaa in position 524 to 526 is any amino acid
  Variant (528)..(530): Xaa in position 528 to 530 is any amino acid
  Variant (531)..(537): Xaa in position 531 to 537 is any or no amino acid
  Variant (541)..(541): Xaa in position 541 is any amino acid
  Variant (543)..(546): Xaa in position 543 to 546 is any amino acid
  Variant (549)..(550): Xaa in position 549 to 550 is any amino acid
MXXXXXXXXXXXXXXXXXXXXXXXXXXXXXXXXXXXXXXXXXXXXXXXXXXXXXKXHXNXXXIGHVDXGKXXXTXTXXXXXXXXXXXXXXXXXXXXXXXXXXXXXXXXXXXXDXXXXEXXRGITIXXXXXXXXTXXXXXXXXXDXPGHXDXXKNMITGXXQXDXAXLXXXXXXGXXXXXXXXXXXXXXXXXXXXXXLLXXXXXXXXGVXXXXXXXXXNKXDXXXXXXXXXXXXXXXXXXXXXXXEXXXXLXXXXXXXPXXXXPXXXXSXXXXXXXXXXXXXXXXXXXXXXXXXXXXXXXXXXXXXXXXXXXXXXXXXXXXXIXXPXRXXDXPXXXPXXXDVXXIXXXGXGTVXXGRXEXGXXKXGXXXXXXXXXXXXXXXXTXXXXXEMXXXXXXXXXXXGDNXGXXXXXXXXXXXXXXXRGXVXXXXXXXXXXXXXXXXXXXXXXXXXGXXXXXXXXXYXPXXXXXTXXXXXXXXXXXXXXXXXXXXXXXXXXXXXXXXXXXXXXXXXXGDXXXXXXXXXXPXXXEXXXXXXXXXXRFAXRXXXXTVXXGV

SEQ ID NO: 3400 - protein, 15 aa, Artificial sequence
  protein pattern
  Variant (2)..(2): Xaa in position 2 is Ala or Cys
  Variant (6)..(6): Xaa in position 6 is any amino acid
  Variant (8)..(8): Xaa in position 8 is Phe or Tyr
  Variant (9)..(9): Xaa in position 9 is Ile or Val
DXPGHXDXXKNMITG

SEQ ID NO: 3401 - protein, 21 aa, Artificial sequence
  protein pattern
  Variant (2)..(2): Xaa in position 2 is any amino acid
  Variant (4)..(4): Xaa in position 4 is Ile, Leu or Val
  Variant (5)..(5): Xaa in position 5 is Gly or Val
  Variant (6)..(6): Xaa in position 6 is Thr or Val
  Variant (12)..(12): Xaa in position 12 is any amino acid
  Variant (15)..(15): Xaa in position 15 is any or no amino acid
  Variant (18)..(18): Xaa in position 18 is any amino acid
  Variant (19)..(19): Xaa in position 19 is Gly, Ser or Thr
  Variant (20)..(20): Xaa in position 20 is any amino acid
  Variant (21)..(21): Xaa in position 21 is Ala or Leu
HXNXXXIGHVDXGKXTTXXXX

SEQ ID NO: 3402 - protein, 20 aa, Artificial sequence
  protein pattern
  Variant (3)..(3): Xaa in position 3 is Lys or Arg
  Variant (6)..(6): Xaa in position 6 is any or no amino acid
  Variant (9)..(12): Xaa in position 9 to 12 is any amino acid
  Variant (13)..(13): Xaa in position 13 is any or no amino acid
  Variant (16)..(17): Xaa in position 16 to 17 is any amino acid
  Variant (18)..(18): Xaa in position 18 is Ile, Leu or Met
  Variant (19)..(19): Xaa in position 19 is Ile or Val
  Variant (20)..(20): Xaa in position 20 is Cys or Val
QTXEHXLLXXXXXGVXXXXX

SEQ ID NO: 3403 - protein, 20 aa, Artificial sequence
  protein pattern
  Variant (2)..(2): Xaa in position 2 is any amino acid
  Variant (3)..(3): Xaa in position 3 is Ala or Leu
  Variant (4)..(4): Xaa in position 4 is any amino acid
  Variant (5)..(5): Xaa in position 5 is Ala or Glu
  Variant (7)..(7): Xaa in position 7 is Lys or Arg
  Variant (8)..(8): Xaa in position 8 is Ala or Glu
  Variant (14)..(14): Xaa in position 14 is Ala, Asp, Asn or Ser
  Variant (15)..(15): Xaa in position 15 is any amino acid
  Variant (16)..(16): Xaa in position 16 is Ala or Ser
  Variant (17)..(18): Xaa in position 17 to 18 is any amino acid
  Variant (19)..(19): Xaa in position 19 is Glu or Lys
  Variant (20)..(20): Xaa in position 20 is Phe or Tyr
DXXXXEXXRGITIXXXXXXX

SEQ ID NO: 3404 - protein, 18 aa, Artificial sequence
  protein pattern
  Variant (2)..(2): Xaa in position 2 is Phe or Leu
  Variant (3)..(3): Xaa in position 3 is any amino acid
  Variant (4)..(4): Xaa in position 4 is Leu or Met
  Variant (5)..(5): Xaa in position 5 is Ala, Pro or Ser
  Variant (6)..(6): Xaa in position 6 is Ile, Leu or Val
  Variant (7)..(7): Xaa in position 7 is Glu or Gln
  Variant (8)..(8): Xaa in position 8 is Ala, Asp, Glu, Asn or Ser
  Variant (10)..(11): Xaa in position 10 to 11 is any amino acid
  Variant (13)..(13): Xaa in position 13 is any amino acid
  Variant (15)..(15): Xaa in position 15 is any amino acid
PXXXXXXXVXXIXGXGTV

SEQ ID NO: 3405 - protein, 15 aa, Artificial sequence
  protein pattern
  Variant (2)..(3): Xaa in position 2 to 3 is any or no amino acid
  Variant (5)..(5): Xaa in position 5 is Cys or Gly
  Variant (7)..(7): Xaa in position 7 is Ile or Val
  Variant (9)..(9): Xaa in position 9 is Ile or Val
  Variant (10)..(10): Xaa in position 10 is any amino acid
  Variant (11)..(11): Xaa in position 11 is Ala, Asp, Gly or Ser
  Variant (12)..(12): Xaa in position 12 is Ala, Gly, Ser or Thr
  Variant (13)..(14): Xaa in position 13 to 14 is any amino acid
AXXDXAXLXXXXXXG

SEQ ID NO: 3406 - protein, 14 aa, Artificial sequence
  protein pattern
  Variant (2)..(2): Xaa in position 2 is Ala or Thr
  Variant (3)..(3): Xaa in position 3 is Ile, Leu or Val
  Variant (5)..(5): Xaa in position 5 is Asp or Glu
  Variant (6)..(8): Xaa in position 6 to 8 is any amino acid
  Variant (9)..(9): Xaa in position 9 is Asn or Thr
  Variant (11)..(11): Xaa in position 11 is any or no amino acid
  Variant (13)..(13): Xaa in position 13 is any or no amino acid
FXXRXXXXXVXAXG

SEQ ID NO: 3407 - protein, 18 aa, Artificial sequence
  protein pattern
  Variant (3)..(3): Xaa in position 3 is Ile or Val
  Variant (5)..(5): Xaa in position 5 is any amino acid
  Variant (7)..(7): Xaa in position 7 is any amino acid
  Variant (8)..(8): Xaa in position 8 is Ile, Leu or Val
  Variant (9)..(10): Xaa in position 9 to 10 is any amino acid
  Variant (12)..(13): Xaa in position 12 to 13 is any amino acid
  Variant (14)..(14): Xaa in position 14 is Ile, Leu or Val
  Variant (15)..(15): Xaa in position 15 is any amino acid
  Variant (16)..(16): Xaa in position 16 is Phe, Ile, Leu or Val
  Variant (17)..(17): Xaa in position 17 is Ala, Gly, Ile, Leu or Val
  Variant (18)..(18): Xaa in position 18 is Gly or Pro
GRXEXGXXXXGXXXXXXX

SEQ ID NO: 3408 - DNA, 744 bp, Azotobacter vinelandii
  CDS (1)..(744): transl_table=11
atggattacaactgggactggggcgtgttcttcaggtccaccgggatcggcgacgagatctacctcgactggttcgtcgccggcttcggctggaccctcgccgtcgccctggtcggctggatcatcgccctgctgctgggctcgctgctcggcgtgctgcgcaccctgccaaaccgctggctgtccggcatcgccagcgcctacgtggagctgtttcgcaacgtgccgctgctggtgcaactgttcctctggtacttcctggtgccggacctcttgcccacgccgctggagctgtggttcaagcaggacctcagcccggccacctcggcctacctgagcgtggtggtgtgcctcggcctgttcaccgccgcacgggtctgcgaacaggtacgcaccggcatccaggcgctgcccaggggccagaccgccgcggcccaggcgctgggcctgcggagcggacagatctaccgccaggtgctgctgccacaggcctttcgcatcatcatcccgccgctgacctcggagttcctcaacatcatcaagaactcctcggtggcttcgctgatcggcctgatggaactgctcgcgcagacccgccagacagcggaattcaccaccaacctgttcgaggccttcaccctggccacgctgatctacttcaccctgaacatgagcctgatgctgttcatgcgctggatcgagaaaaaggtcgcggtgccgggtctgatcgggggaggcaagtga

SEQ ID NO: 3409 - protein, 247 aa, Azotobacter vinelandii
MDYNWDWGVFFRSTGIGDEIYLDWFVAGFGWTLAVALVGWIIALLLGSLLGVLRTLPNRWLSGIASAYVELFRNVPLLVQLFLWYFLVPDLLPTPLELWFKQDLSPATSAYLSVVVCLGLFTAARVCEQVRTGIQALPRGQTAAAQALGLRSGQIYRQVLLPQAFRIIIPPLTSEFLNIIKNSSVASLIGLMELLAQTRQTAEFTTNLFEAFTLATLIYFTLNMSLMLFMRWIEKKVAVPGLIGGGK

SEQ ID NO: 3410 - DNA, 741 bp, Klebsiella pneumoniae subsp. pneumoniae MGH 78578
  CDS (1)..(741): transl_table=11
atgtcaatagactggaactgggggatattcctgcaacaggcccccttcggcaacactacctacctgggctggctgtggagcggttttcaaatcaccgtcgccctctccatctcggcctggatcatcgcttttctcgtcggctcactgttcggcattttacgcacggtacccaatcgcttcctctcgggcattggcacctgctatgtcgaactgtttcgcaacgtgccgctgatcgtgcagttctttacctggtacctggtggtgccggagttcctgccggaaaatatcggcatgtggtttaaatcggagctggacccaaacattcaattctttgtctcctccatgctgtgcctggggctgtttaccgccgctcgcgtctgcgagcaggtacgcgccgccatccagtcgctgccgcgcgggcagaagaacgccggcctggcgatgggcctgaccctgccgcaaacctaccgctacgtgctgctgccgaacgcctaccgcgttattgtgccgccgatgacctcggagatgatgaacctggtgaaaaactcggccatcgcctccaccatcggtctggccgatatggccgcgcaggcgggcaaactgctggactactccgctcatgcctgggagtcttttaccgccatcaccctggcctatgttttcatcaacgcggtgattatgctgattatgtatgtggtcgagcgtaaggttcgcctgcctggcaatatgggaggcaaataa

SEQ ID NO: 3411 - protein, 246 aa, Klebsiella pneumoniae subsp. pneumoniae MGH 78578
MSIDWNWGIFLQQAPFGNTTYLGWLWSGFQITVALSISAWIIAFLVGSLFGILRTVPNRFLSGIGTCYVELFRNVPLIVQFFTWYLVVPEFLPENIGMWFKSELDPNIQFFVSSMLCLGLFTAARVCEQVRAAIQSLPRGQKNAGLAMGLTLPQTYRYVLLPNAYRVIVPPMTSEMMNLVKNSAIASTIGLADMAAQAGKLLDYSAHAWESFTAITLAYVFINAVIMLIMYVVERKVRLPGNMGGK

SEQ ID NO: 3412 - DNA, 741 bp, Escherichia coli O157:H7 EDL933
  CDS (1)..(741): transl_table=11
  misc_feature (471)..(471): m is a or c
atgtctatagactggaactggggtatttttttacaacaagccccgttcggcaacaccacctatcttggttggatctggagtggttttcaggtgacgatcgctttgtcgatctgcgcctggattatcgctttcctcgtcggttcatttttcggtattttacgtaccgttccaaaccgttttctctccggtctgggtacgttgtatgtcgaactgttccgcaacgtgccgttgattgtgcaattctttacctggtatctggtgatcccggagctgctgccggagaaaatcggcatgtggtttaaggccgagctggatcccaatattcagtttttcctttcatccatgctctgcctggggctgtttaccgccgcccgtgtttgcgaacaggtacgcgccgcgattcagtcgctgccgcgtgggcagaagaatgccgcgctggctatgggtctgacgctgccgcaggcttaccgmtacgtactgctgcctaatgcttatcgcgttatcgtcccgccgatgacctcagagatgatgaacctggtgaaaaactccgccatcgcctcgaccatcggtctggtagatatggcagcgcaggcgagtaaattgctcgattactcggctcacgcctgggagtcgtttaccgccattacgctagcgtatgtgtttattaacgcttttatcatgctggtgatgacgctggttgaacgtaaagttcgcctgcctggcaacatggggggcaaataa

SEQ ID NO: 3413 - protein, 246 aa, Escherichia coli O157:H7 EDL933
MSIDWNWGIFLQQAPFGNTTYLGWIWSGFQVTIALSICAWIIAFLVGSFFGILRTVPNRFLSGLGTLYVELFRNVPLIVQFFTWYLVIPELLPEKIGMWFKAELDPNIQFFLSSMLCLGLFTAARVCEQVRAAIQSLPRGQKNAALAMGLTLPQAYRYVLLPNAYRVIVPPMTSEMMNLVKNSAIASTIGLVDMAAQASKLLDYSAHAWESFTAITLAYVFINAFIMLVMTLVERKVRLPGNMGGK

SEQ ID NO: 3414 - DNA, 669 bp, Escherichia coli O157:H7 EDL933
  CDS (1)..(669): transl_table=11
  misc_feature (144)..(144): m is a or c
atgcaagaaagtatacaactggttattgattccttgccgttcctgctgaaaggggctgggtatacgctgcaactcagtatcggcggcatgttttttggtttactgctagggtttattctcgcgctgatgcgcctgtcgccaatmtggcccgtgcgctggctggcgcgtttttatatctctatttttcgtggtacgccgctcatcgcacaactgtttatgatctattacggcctgccgcagtttggtatcgaattagatcccattccgtcagcaatgattggtctgtcgctcaacactgccgcctatactgccgaaacgcttcgcgccgccatttcttctattgataaaggtcagtgggaagcagctgccagtattggtatgacgccatggcagactatgcgtcgcgcgattttgccacaggcggcgcgggtggcgttgccgccgctctcgaacagctttatcagtctggtaaaagatacgtcgctggccgcgacaatccaggtgccggagctgttccgtcaggcgcagttgattacctcgcgtacgctggaggtattcaccatgtatctggcggcttcgctcatctactggatcatggcgactgtgttatcgacgttgcagaaccattttgagaatcaacttaatcgccaggagagagaacccaaatga

SEQ ID NO: 3415 - protein, 222 aa, Escherichia coli O157:H7 EDL933
MQESIQLVIDSLPFLLKGAGYTLQLSIGGMFFGLLLGFILALMRLSPIWPVRWLARFYISIFRGTPLIAQLFMIYYGLPQFGIELDPIPSAMIGLSLNTAAYTAETLRAAISSIDKGQWEAAASIGMTPWQTMRRAILPQAARVALPPLSNSFISLVKDTSLAATIQVPELFRQAQLITSRTLEVFTMYLAASLIYWIMATVLSTLQNHFENQLNRQEREPK

SEQ ID NO: 3416 - DNA, 693 bp, Agrobacterium tumefaciens str. C58
  CDS (1)..(693): transl_table=11
atgatgtatggttacgaatgggacacgaccacctggatcacctacacaacctcgatcctgcccatcattctgatcggcctgaccgtaacgctgaaagcagccgccgccggttttgccatcgcgcttgttctggggctggtttttgcgctgctacgccgcagccgggtgaagttgatttcctggccgaccgcggtggttgtcgaattccttcgcgatacgccgcttctggtgcagcttttcttcctctattacgtgcttccggaattcggcatcgttctgccggcgtttctcaccggtgcgctggcgctcggcctgcaatatgccgcctatacctccgaggtctatcgcggtggcatggaggcggtgcatcacggccagtgggaagcggcgacggcgcttaatctcacgcgcatgcagacctatcgggacatcatcatcccgcaggccatcccgcgcatcgtcccggccatgggcaactatcttgtcgccatgatcaaggaaacgccggtgctttccgtcgtcacggttctcgagatgatggggctggcaaatatgatcggcgagcgcaccttcgaatatctggtgccactgacgcttgtcggtctgatcttccttctcctgaccataatctgctcggcaggcctcagccgcctgcaaagggcgcttccaaaagcaggaataccgttgcgatga

SEQ ID NO: 3417 - protein, 230 aa, Agrobacterium tumefaciens str. C58
MMYGYEWDTTTWITYTTSILPIILIGLTVTLKAAAAGFAIALVLGLVFALLRRSRVKLISWPTAVVVEFLRDTPLLVQLFFLYYVLPEFGIVLPAFLTGALALGLQYAAYTSEVYRGGMEAVHHGQWEAATALNLTRMQTYRDIIIPQAIPRIVPAMGNYLVAMIKETPVLSVVTVLEMMGLANMIGERTFEYLVPLTLVGLIFLLLTIICSAGLSRLQRALPKAGIPLR

SEQ ID NO: 3418 - DNA, 705 bp, Agrobacterium tumefaciens str. C58
  CDS (1)..(705): transl_table=11
atgtcctatacatttcaattcggcgcacttgcccaatatcagaacgaattgttgagcggcatatggctgacgatcaagctatcggtcctctccatcgtgctcggctgtgctttcggcattcttctggcctcactgcggtccatcaatggcggcatcgtccgcatcatcgtggacggctatgtcgaggtgatccgcaacacgccatttctggtgcagctctttatcgtctatttcggcctgccgggtctcggctttcgcgttggagccgatacggcagcacttatcggcatgacgatcaatcttgccgcctactcgacggaaatcatccgcgccggcatcgaggcggtgcacaagtcgcagatcgaggctggcgaggcgctcggatttacgaagtaccagatctatcgccacgttatcatcgtgccagcgattgccaaggtctatccttcgctgtgcagccagttcgtgctgatgatgctggcatcgagcatatgttcggccatttccacccatgaactcgcggccgccgcagccttcgtggaatcgcagacctatcgctccttcgaggtctatatcgtcgtcacgctcatctatcttgcgctggcgctcagcctgcggctcatccttgcccttgtcggcatgtggctgttcggccgccgcgtggcccgcaagacgatgaccgccttgccggaggtgcagtcatga

SEQ ID NO: 3419 - protein, 234 aa, Agrobacterium tumefaciens str. C58
MSYTFQFGALAQYQNELLSGIWLTIKLSVLSIVLGCAFGILLASLRSINGGIVRIIVDGYVEVIRNTPFLVQLFIVYFGLPGLGFRVGADTAALIGMTINLAAYSTEIIRAGIEAVHKSQIEAGEALGFTKYQIYRHVIIVPAIAKVYPSLCSQFVLMMLASSICSAISTHELAAAAAFVESQTYRSFEVYIVVTLIYLALALSLRLILALVGMWLFGRRVARKTMTALPEVQS

SEQ ID NO: 3420 - DNA, 651 bp, Agrobacterium tumefaciens str. C58
  CDS (1)..(651): transl_table=11
atggcatcaatcggtcccaacgaactcttcttcctgatgcaaggcctgaaatggacccttgcgctgaccttgatcggcttcataggcggcggtgtcttcggcctttgcgtggcgctggcccgcgtcgcggacagcccggcaatccagcgtgcgagcatggctttcatcgccgttttccagggcacgccgctcctgatgcagcttttcgtggtttattacggcgtggcgcttgcgggcctcaacgtcgatgcctggatcgcggtcgccattgcctttaccctgcatgccagcgccttcctcggcgaaatctggcgcggcggcatccaggcagtgccgaagggccagaccgaggctgccaatgcgctcggcctgcattacgtgtcacgcatgaaggacgtggttctgccgcaggccttcaagatttcgctgccggccaccatcggtttcctcgtgcagctcatcaagggcacctcgcttgcggcaatcgtcggcttcgtcgagctgtcgcgcgccggccagatcgtctccaaccagacgttccgtccgctcaccgtcttcgccatcgtcggcatcatttatttcctgatctgctggccgctttccctgtggggcgccggcgttgaaaagcggctgcaggccgcatcccgctaa

SEQ ID NO: 3421 - protein, 216 aa, Agrobacterium tumefaciens str. C58
MASIGPNELFFLMQGLKWTLALTLIGFIGGGVFGLCVALARVADSPAIQRASMAFIAVFQGTPLLMQLFVVYYGVALAGLNVDAWIAVAIAFTLHASAFLGEIWRGGIQAVPKGQTEAANALGLHYVSRMKDVVLPQAFKISLPATIGFLVQLIKGTSLAAIVGFVELSRAGQIVSNQTFRPLTVFAIVGIIYFLICWPLSLWGAGVEKRLQAASR

SEQ ID NO: 3422 - DNA, 708 bp, Agrobacterium tumefaciens str. C58
  CDS (1)..(708): transl_table=11
gtgagcggctttgatctttcggctatcctgagcaatcaggaatatatcgcgatgctgctgcacggcatcgagatgaccttcattatcttcatcggttcgtggtcgcttgccatgtcgctcgcgctcatcctgctctgcatccgcttttcgccttcccgcttcggagatcggctggtcgcagcctatgtttcctatcatcgcaacgtgccgacgctggtgcagttgatgctatggtacttcggcatcttcactctgttgccttccggcctgacaggctggctgacggaacataacgcagaagcaatcttcgcggtggttggcctcggcctgtgtcaggcggcgtatttcagtgaggatctgcgttccggtctgcgctcggtcagtccggggcagatggaagcggcaaaggcgctgggacacagctatctctcggcgatgcgtttcatcatcatgccgcagggcgtgcgcaacgcgctgcctccgctcatcaatcacagcgtctccctgttcaagaacagtagtctggcgcttgtcatcggcgcgtctgaattgacccatgcggtcaaggaaatcgaaaatctgagtttccagaccttcgaaatctacctcgtcggcacggttctctatctcttcttttcgctgttgatcatgggggccggcgcctatctgtccatgcgccttgatccggcctggagggcgcgcgcatga

SEQ ID NO: 3423 - protein, 235 aa, Agrobacterium tumefaciens str. C58
MSGFDLSAILSNQEYIAMLLHGIEMTFIIFIGSWSLAMSLALILLCIRFSPSRFGDRLVAAYVSYHRNVPTLVQLMLWYFGIFTLLPSGLTGWLTEHNAEAIFAVVGLGLCQAAYFSEDLRSGLRSVSPGQMEAAKALGHSYLSAMRFIIMPQGVRNALPPLINHSVSLFKNSSLALVIGASELTHAVKEIENLSFQTFEIYLVGTVLYLFFSLLIMGAGAYLSMRLDPAWRARA

SEQ ID NO: 3424 - DNA, 702 bp, Agrobacterium tumefaciens str. C58
  CDS (1)..(702): transl_table=11
ttggagaaagacgtgaagggttggaactgggaaggtttcttcgaatatctgacgaattattatctgttcgagggcgcgctggtgacgctcggtctcacggtgtttgccatgacggcgggtcttgcgctgggtttcgtcattgcggtcatgcgcatgtctaaataccggttcttgtccggtccggcctatttctacacctggatctttcgcggcactccgcttctggtgcagctcatcatcatctataccggcctgccgcaaatgggcatcaagctgacggtgctgcaatccacccttatcggcctgtcgctctgcgaagcggcctatctttctgaaatcgtccgggcgggcatcgccgccgtgccgaagggccagatcaatgcggcgcgggccatcggcatgaccgaggcgcaggtgatgcgctacatcgttgccccgcaggccttccgcatcatcatcccgccgcttggcaactccgtgaacggcgttttgaagacgacatcgatcgcctcgatcatttccatggaggagcttctgcgccgcacgcaggtgctcattcaggaaaagttcctcgtgctggagctgttcaccgtcgcggcgctttattatctggccatgacgaccgcctgggaactcattcagcgccgtatcgagaagcgcttcggcaaggcctatggtcccatgtcgactgacatacattaa

SEQ ID NO: 3425 - protein, 233 aa, Agrobacterium tumefaciens str. C58
MEKDVKGWNWEGFFEYLTNYYLFEGALVTLGLTVFAMTAGLALGFVIAVMRMSKYRFLSGPAYFYTWIFRGTPLLVQLIIIYTGLPQMGIKLTVLQSTLIGLSLCEAAYLSEIVRAGIAAVPKGQINAARAIGMTEAQVMRYIVAPQAFRIIIPPLGNSVNGVLKTTSIASIISMEELLRRTQVLIQEKFLVLELFTVAALYYLAMTTAWELIQRRIEKRFGKAYGPMSTDIH

SEQ ID NO: 3426 - DNA, 744 bp, Agrobacterium tumefaciens str. C58
  CDS (1)..(744): transl_table=11
atgcaggattcgtttacagcgcgcttcattgaactcgccgcgcatctcggcctcaactatgattttctgaacagcggttacgaggttcagatctggcttgatggcatgaagatgacgctcatcctcgtcgccgttaccttgccgctcagcctcgttttcggcttcattttcgcggccatgctcacgtcaggcaaagtctggctcgccggtcccgtgcgcgcctatgtcgaactgacacgcaacacgccgacgctggtacagctgatgtgcggtttcctcgtgctcaacatgctgatttccaatgcgctgggcggtgcgcagaacaatccgctgacaccttttttctgggttgttgccatcacctgcctgcacgttgccgccttccatgcggaagcgttgcgtggcggtatcgaggcggtgccgaccaccaccatcgaggcggcgcgcgccatcggtttcagttcgctggagattttgcgttacgtcgagtttccgctggcaatccgcacggcgctcccctcgatcatcaacaatctcgtcaacctggtgaagctcacaacggtcggttcggcgattgcggtgggtgaaatcacctatgcctcgatcctgatctggacgcagcgcgacaatgtggtcgagttgatgctcgtcatcctcatcttcttcagcgtcatcaatttcatcgtcgcaagggccggtctctggcttgaacgacgccttgcggttccggggttcggccaatga

SEQ ID NO: 3427 - protein, 247 aa, Agrobacterium tumefaciens str. C58
MQDSFTARFIELAAHLGLNYDFLNSGYEVQIWLDGMKMTLILVAVTLPLSLVFGFIFAAMLTSGKVWLAGPVRAYVELTRNTPTLVQLMCGFLVLNMLISNALGGAQNNPLTPFFWVVAITCLHVAAFHAEALRGGIEAVPTTTIEAARAIGFSSLEILRYVEFPLAIRTALPSIINNLVNLVKLTTVGSAIAVGEITYASILIWTQRDNVVELMLVILIFFSVINFIVARAGLWLERRLAVPGFGQ

SEQ ID NO: 3428 - DNA, 855 bp, Agrobacterium tumefaciens str. C58
  CDS (1)..(855): transl_table=11
atggcactctttgcgcaaccgatcagcatgaccgtcgccccgccaaacggcaaacctgtacggtggggccaacttgcaactggcagcatcgcgatcctcatgctggccctcatgaccttggctatcgggcgcaatcagagcgtccagtggagcgagatcccgcgctacatgatcgaccccgtcattcttggcggcgtcattctgaccctcgaactgacagccggcgccatggtcgccggcatcatcatcggttgtctcgtcgccgtcatggcaacgagccagaacatcgttctcaaggcgatcgccgtcgcctttgtctggtggtttcgcggcgtaccgctaatcgttcagatattcttctggttcaacatcgcgctcttcgtccccgagatcggatttggttcatggtcggtttcggtaaacgacatcgtaacacccgctttcgcaggctttttggcgctgggtctgcacgaggcggcaaatatgagtgagatcattcgcagcggcctgactgccgtggatcggggacagcgcgaggccgcatcgtctctgggcctcagaccactacagactctgcgaaccgtggtcctccctcaggcaatacgtctgatcgtgccgccgaccggaaaccaggcgattggcatgctgaaggcgagtgccatcgtctcggttatcggcatgcaggatttgttgacgcaggcgcaggccatctacgcccgtaacttcctggtcatcgaactcctgtgcgttgcctcgctttggtatcttgggatcaccacgatcgcatcgataggccagcactatctggaacggaaactcgcgccgaaaggccgctcgaacagcgacaagatttga

SEQ ID NO: 3429 - protein, 284 aa, Agrobacterium tumefaciens str. C58
MALFAQPISMTVAPPNGKPVRWGQLATGSIAILMLALMTLAIGRNQSVQWSEIPRYMIDPVILGGVILTLELTAGAMVAGIIIGCLVAVMATSQNIVLKAIAVAFVWWFRGVPLIVQIFFWFNIALFVPEIGFGSWSVSVNDIVTPAFAGFLALGLHEAANMSEIIRSGLTAVDRGQREAASSLGLRPLQTLRTVVLPQAIRLIVPPTGNQAIGMLKASAIVSVIGMQDLLTQAQAIYARNFLVIELLCVASLWYLGITTIASIGQHYLERKLAPKGRSNSDKI

SEQ ID NO: 3430 - DNA, 741 bp, Yersinia pestis CO92
  CDS (1)..(741): transl_table=11
atggcaatagactggaactggggcatttttttacagccagcccctttcggcaataccacctatctcggttggatttggtccggctttcaggtcacggtcgcattatcattatgtgcttgggtgatcgccttcttcgtcggttcactatttggtattttaagaacggtgcccaaccgaatcctttcaggaataggggcttgttacgttgaattgtttcgtaacgtaccactgatcgtgcaatttcttacctggtatctggtggttcccgaactattgccagtgaaccttggcacatggtttaaaagtgaactggcacccaatatacagttcttcctctcatctatgatttgccttggattattcactgcggcgcgggtttgtgaacaggttcgcgcaggaattcaatcactgcctcgtggtcaaaaagcagcgggcctggcaatggggctcaccctcacacagacttaccgctatgttttactgcccaatgcatatcgggtgattattcccccgatgacctcagaaatgctcaatctggtaaaaaactccgcaattgcctcaaccatcgggctagtcgaaatggcggcacaagcgggtaaattgctggattattcagcgcatgcctatgaatccttcaccgccatcaccctaggttatgtactgatcaatgccgtgatcatgctgttaatgcgcttagttgaaaagaaagtgcaattacccggcaatctggggagtaaataa

SEQ ID NO: 3431 - protein, 246 aa, Yersinia pestis CO92
MAIDWNWGIFLQPAPFGNTTYLGWIWSGFQVTVALSLCAWVIAFFVGSLFGILRTVPNRILSGIGACYVELFRNVPLIVQFLTWYLVVPELLPVNLGTWFKSELAPNIQFFLSSMICLGLFTAARVCEQVRAGIQSLPRGQKAAGLAMGLTLTQTYRYVLLPNAYRVIIPPMTSEMLNLVKNSAIASTIGLVEMAAQAGKLLDYSAHAYESFTAITLGYVLINAVIMLLMRLVEKKVQLPGNLGSK

SEQ ID NO: 3432 - DNA, 675 bp, Salmonella typhimurium LT2
  CDS (1)..(675): transl_table=11
atgtacgaatttgactggagttcgattatcccctcactgccttacctactggccgggttggtcatcacgctgaagatcaccgtcaccgccgttatcgtggggatagtctggggaaccattctggccgtcatgcgcctctcaagctttgcccctatcgcctggtttgctaaagcgtatgttaacgttttccgttccatcccgttggtgatggtcttgctgtggttctatctgattgtacccggctttctgcaaaacgtgctgggactatcgccgaaaaccgatatccgcctgatctccgcgatggtggcattctccatgtttgaagcggcctactattccgagattattcgcgccggtattcaaagtatttcccgcgggcagtccagcgccgcgctggcgctggggatgacccactggcagtcgatgaagctcattattctgccgcaggcgtttcgggcgatggtgccgctgttgcttacgcagggcatcgtgctatttcaggacacctctttagtttatgtactcagcctggcggacttcttccgcaccgcgtcgactatcggcgagcgtgacggtactcaggtcgaaatgattctgttcgccggcgccgtttattttgttatcagcctgagcgcgtcgttgctggtcagctatttgaagaaaaggactgtttaa

SEQ ID NO: 3433 - protein, 224 aa, Salmonella typhimurium LT2
MYEFDWSSIIPSLPYLLAGLVITLKITVTAVIVGIVWGTILAVMRLSSFAPIAWFAKAYVNVFRSIPLVMVLLWFYLIVPGFLQNVLGLSPKTDIRLISAMVAFSMFEAAYYSEIIRAGIQSISRGQSSAALALGMTHWQSMKLIILPQAFRAMVPLLLTQGIVLFQDTSLVYVLSLADFFRTASTIGERDGTQVEMILFAGAVYFVISLSASLLVSYLKKRTV

SEQ ID NO: 3434 - DNA, 741 bp, Salmonella typhimurium LT2
  CDS (1)..(741): transl_table=11
atgtcaatagactggaactggggtatttttttacaggaagcccccttcggcaataccacctatctcggctggctatggagtggttttcaggtcaccgtcgccctttcgattaccgcctggattatcgctttcctggtaggatctattttcggcattttacgtaccgttcccaaccgtttcctctccggactgggcacgttgtacgtagaactgttccgtaatgtgccgctgatcgtgcaattcttcacctggtacctggtggtgcctgaactgttgccggaagatcttggcatgtggtttaaggcggaactcgatcccaatattcagtttttcctctcctcaatgatctgtctgggactgtttaccgccgcccgcgtttgcgaacaggtgcgcgccgcgattcagtctctgcctcgcgggcagaagaacgcggcgctggcgatggggctaacgctgccgcaggcttatcgctatgtcctgctgccgaatgcctatcgcgttatcgtaccgccaatgacgtcagagatgatgaacctggtgaaaaactcggctattgcctcaaccatcggcctggtggatatggcggcgcaggcaggcaaactgttggattactcggcgcacgcctgggaatccttcaccgccattacgctggcctatgtgctgattaacgccgttatcatgctggtcatgagcctggttgaacgcaaagtccgcctgccgggcaacgtggggagcaaataa

SEQ ID NO: 3435 - protein, 246 aa, Salmonella typhimurium LT2
MSIDWNWGIFLQEAPFGNTTYLGWLWSGFQVTVALSITAWIIAFLVGSIFGILRTVPNRFLSGLGTLYVELFRNVPLIVQFFTWYLVVPELLPEDLGMWFKAELDPNIQFFLSSMICLGLFTAARVCEQVRAAIQSLPRGQKNAALAMGLTLPQAYRYVLLPNAYRVIVPPMTSEMMNLVKNSAIASTIGLVDMAAQAGKLLDYSAHAWESFTAITLAYVLINAVIMLVMSLVERKVRLPGNVGSK

SEQ ID NO: 3436 - DNA, 669 bp, Salmonella typhimurium LT2
  CDS (1)..(669): transl_table=11
atgcttgagtatttacctgaactgctaaaagggctacacaccagcctgacgctgaccgtggcttctattgccgtcgctttggtgctggcgttagtttttaccatcatcctgacgctaaaaacaccgttcgtggtgtggctggtgcgcggctatatcacgctgtttaccggtacgccgttgttggtgcaaattttcctgatctactacggacccggtcaattcccgacgctgcaagagtatccactactctggcatctactgtctgaaccgtggctgtgcgcactgatcgcgttgtcgctaaacagcgccgcttacaccacgcagctattttatggcgcgattcgcgcgattccggaaggtcagtggcagtcctgtagcgcgctggggatgagtaagaaagatacgctggcgattttgttgccctatgcgtttaaacgcgccctctcctcctattctaatgaggtggtactggtcttcaaaagtacctcgctggcctataccatcaccttgatggaagtcatggggtacagtcagttgctctatggtcgtacctacgatgtggtggtatttggcgcggcaggcgtaatttacctggtcgtcaacggtctattgacgctgatgatgcgtttgattgagcgtaaagctctggcgtttgagcggcgcaattaa

SEQ ID NO: 3437 - protein, 222 aa, Salmonella typhimurium LT2
MLEYLPELLKGLHTSLTLTVASIAVALVLALVFTIILTLKTPFVVWLVRGYITLFTGTPLLVQIFLIYYGPGQFPTLQEYPLLWHLLSEPWLCALIALSLNSAAYTTQLFYGAIRAIPEGQWQSCSALGMSKKDTLAILLPYAFKRALSSYSNEVVLVFKSTSLAYTITLMEVMGYSQLLYGRTYDVVVFGAAGVIYLVVNGLLTLMMRLIERKALAFERRN

SEQ ID NO: 3438 - DNA, 669 bp, Salmonella typhimurium LT2
  CDS (1)..(669): transl_table=11
atgcaagaaagtatccaactggttattgaatcgctgccgtatttgcttaaaggcgccgtctttaccctgcaactgagtattggcggtatgttttttggtctgctgctgggatttgtgctggcgctgatgcggatgtctccgctatggccggttcgctggctggcgcgcttttatatctcgatttttcgcggtacgccgcttatcgcccagttatttatgatctattacggcctgccgcaatttggtattgagctggaccctatcccggcggcgatgattggtttatcgctcaataccgcggcttacacgtccgagacgctgcgcgcggcgatctcggctatcgacaagggacaatgggaagcggcggcgagcattggcatgacgccgtggcaaacgctacgtcgcgctattttgccgcaggccgctcgcgtcgcgcttccgccgttgagcaacagctttatcagcctggtgaaagatacgtcgctcgccgcgacgattcaggtgccggagttgttccgccaggcgcagttaattacctcgcgaacgctggaggtgtttaccatgtatctggccgcgtcgttaatctactgggtaatggcgaccgtcttatcggcactgcaaaactattttgaaaaccagcttaaccgccaggagagagagccaaaatga

SEQ ID NO: 3439 - protein, 222 aa, Salmonella typhimurium LT2
MQESIQLVIESLPYLLKGAVFTLQLSIGGMFFGLLLGFVLALMRMSPLWPVRWLARFYISIFRGTPLIAQLFMIYYGLPQFGIELDPIPAAMIGLSLNTAAYTSETLRAAISAIDKGQWEAAASIGMTPWQTLRRAILPQAARVALPPLSNSFISLVKDTSLAATIQVPELFRQAQLITSRTLEVFTMYLAASLIYWVMATVLSALQNYFENQLNRQEREPK

SEQ ID NO: 3440 - DNA, 729 bp, Ralstonia solanacearum GMI1000
  CDS (1)..(729): transl_table=11
atgaattaccactggaactggggcgtcttcttcaccgaagccgcgcagaatcagacctaccttgactggctgctttcggggttgaagaccacgatcgcgctgggcctgtcctcctggatcatcgcgctcgtccttggctccgtgctgggcgtgctgcgcaccgtgcccagcaaggcgctgtcgggccttgccacggcctacgtggagctgttccgcaacatcccgctgatcgtgcagctgttcatctggtatttcgtcatgccggaactggtgccgggcggcgactacatcaagcagatgaaccccgccacggcgatgttcctgtgcgcgatgctgtgcctcggtacttttaccgcggcgcgggtgtgcgaacaggtgcgctcgggcatcaactcgctgccgcgcggccagcgcaacgccggcctggcgatgggcttcacgctggcgcagacgtaccgccacgtcatgctgccgatggcgttccgcatcatcgtgccgccgctcacctccgagttcctgaacatcttcaagaactccgcggtggcgtcgaccatcggtctgctggagctcgcggcacaggggcgccaactggtggactacaccgcgcagccctacgagtcgttcatcgccgtgacactgatgtacatgctgatcaacctgaccgtcatgggaatcatgcgctgggttgaagcacgtacccggctgcccggtttcatcggcggcaagtaa

SEQ ID NO: 3441 - protein, 242 aa, Ralstonia solanacearum GMI1000
MNYHWNWGVFFTEAAQNQTYLDWLLSGLKTTIALGLSSWIIALVLGSVLGVLRTVPSKALSGLATAYVELFRNIPLIVQLFIWYFVMPELVPGGDYIKQMNPATAMFLCAMLCLGTFTAARVCEQVRSGINSLPRGQRNAGLAMGFTLAQTYRHVMLPMAFRIIVPPLTSEFLNIFKNSAVASTIGLLELAAQGRQLVDYTAQPYESFIAVTLMYMLINLTVMGIMRWVEARTRLPGFIGGK

SEQ ID NO: 3442 - DNA, 672 bp, Agrobacterium tumefaciens str. C58
  CDS (1)..(672): transl_table=11
gtgaaatacacattcgattttggatggcttctcgaatattacccgcagatcgccaagggcattgccatcacgctggaattgattgccattggcggcgttcttggcatcgcgctcggcatattctgcgcctgggtgcgcgcgctcgggcccaaatggctgcggccgccggttgcgacctatgtggagctcattcgcaatacgccatttctcatacaactgttttttatcttcttcggcctgccgtcgcttggcctgcaactgtcggaactgagcgcggccaacattgccatggtggtcaatctcggtgcttatagctgcgaaatcattcgcgccggcattcaggcgacgcccaaggggcagtttgaggcgggagcaagccttgccatgacccgtttcgaaaccttccggcatgtggtgctggtgccgtccctgcaacgcatctggccggcgctgtcgtcgcaggtggtgatcgtcatgctcggctcgtccgttgtgtcgcagatcgctgccgaagacctgacctttgccgccaatttcatccagtcgcgcaccttccgcgccttcgaagcctacatggtctccaccgtcatctatcttgtgctggccattctcttgaggcagttgctggtcatgggcggcaacctcatttttccgcgcaggagtgtccgatga

SEQ ID NO: 3443 - protein, 223 aa, Agrobacterium tumefaciens str. C58
MKYTFDFGWLLEYYPQIAKGIAITLELIAIGGVLGIALGIFCAWVRALGPKWLRPPVATYVELIRNTPFLIQLFFIFFGLPSLGLQLSELSAANIAMVVNLGAYSCEIIRAGIQATPKGQFEAGASLAMTRFETFRHVVLVPSLQRIWPALSSQVVIVMLGSSVVSQIAAEDLTFAANFIQSRTFRAFEAYMVSTVIYLVLAILLRQLLVMGGNLIFPRRSVR

SEQ ID NO: 3444 - DNA, 660 bp, Agrobacterium tumefaciens str. C58
  CDS (1)..(660): transl_table=11
atgatcgaattctccacctgggatattctcagaaacctgttgctcgccacgcgctggaccgttctgctgtcgctcgtttcctttgccggcggcggtctcgtggcgctgcttctgctgttcatgcgcatttcccgcaaaaaatcgatgcgggttttcgcgcgctattatgtcgagcttttccagggaacgccgcttttgatgcagcttttcatcgcctttttcggcctcggcctcgtcggcatcgatgtgccggcctggctggcggcgggcctgacgctgatcctgtgggcggctgcctttcttaccgaaatctggcgcggctgtgtcgaatccgtcgcgaaaggccaatgggaggcgtcggcaagccttgccatgggacgcctgcaacagatgcgctacgtcatcctgccgcaggctatgcgggtggccattccgccgaccgtcgggtttttcgtacaggttatcaagggaacggctgtaacgtcgatcatcggcttcgtggaactgtccaaggctggcacggtcgtcaccaacgccaccttccagcccttcactgtttatggcctcgtcgccctcatctatttcgcgctgtgctggcctctgtcgaagagcagccagatcctcgaaaggaagctcaatgtcgctcatcgaaatcactga

SEQ ID NO: 3445 - protein, 219 aa, Agrobacterium tumefaciens str. C58
MIEFSTWDILRNLLLATRWTVLLSLVSFAGGGLVALLLLFMRISRKKSMRVFARYYVELFQGTPLLMQLFIAFFGLGLVGIDVPAWLAAGLTLILWAAAFLTEIWRGCVESVAKGQWEASASLAMGRLQQMRYVILPQAMRVAIPPTVGFFVQVIKGTAVTSIIGFVELSKAGTVVTNATFQPFTVYGLVALIYFALCWPLSKSSQILERKLNVAHRNH

SEQ ID NO: 3446 - DNA, 831 bp, Agrobacterium tumefaciens str. C58
  CDS (1)..(831): transl_table=11
atgagccatatccaggaactcattccgccgcggcccgcccccgttgtcgccgacaagccgctcaatctttcccgcgtcgtcggcattgccgtcatcacgctttggctgctgctcgccgccgggctgatcttcgccatgatcgaaggctgggactgggataaattccaacgttatggccctcgttacatcgatggcctcatcaccaccatcacgctggtcggcagctcgatcattctcggcgcaatcctgtccgtgccgatcgcctttgcccgcatgtcggaaaaccgcatcatcggcgcgttcgcttatgcctatgtctatgtgttccgcagcacgccgttgctcgcacagctcttcctgatctattacggccttggcagcttccgcccggcgctggaagccgtcgatctgtggtggttcttccgcgaagcctggtattgcggcctcctgtcgctaacgctcaacaccgccgcctatcaggccgagatcctgcgcggcgccatccggagcgtgccgcgcggccagcatgagggggccgcctccctcggcatttcgaaattcattaccttccgcaaggtcatcctgccgcaggcgctgatcgtcgcattgcgcccctatggcaacgagatcatcctgatgatcaagggctcggcagtcgtttccatcgtcacggtcttcgacctgatgggacagacccgttacgccttttcccgcaccttcgattatcaggcctatctctgggccgcgatcttctacctgacgatcgtcgaaacgctgcggcatatctgggcgtggctggaagcccgcctgacgcgacacctcaagcgctga

SEQ ID NO: 3447 - protein, 276 aa, Agrobacterium tumefaciens str. C58
MSHIQELIPPRPAPVVADKPLNLSRVVGIAVITLWLLLAAGLIFAMIEGWDWDKFQRYGPRYIDGLITTITLVGSSIILGAILSVPIAFARMSENRIIGAFAYAYVYVFRSTPLLAQLFLIYYGLGSFRPALEAVDLWWFFREAWYCGLLSLTLNTAAYQAEILRGAIRSVPRGQHEGAASLGISKFITFRKVILPQALIVALRPYGNEIILMIKGSAVVSIVTVFDLMGQTRYAFSRTFDYQAYLWAAIFYLTIVETLRHIWAWLEARLTRHLKR

SEQ ID NO: 3448 - DNA, 951 bp, Corynebacterium glutamicum ATCC 13032
  CDS (1)..(951): transl_table=11
atgtcagatcttaatcaagggcctggagcttcaacggcccaaccgaaaccgattgaagccaagccactacgccaccctggccggtgggtcgcagccgctatcatcgtggcactgctcgcatggtttatcatcagcgcgctcaacaatgaggcctacggttgggatacctaccgctcgtatctttttgacacccgcattgccaccgcggcacttcacaccattgcgctgaccttgctgtccatgatcttgggtgtggttctcggcgcaatcttggccgtcatgcgtatgtccggcaaccctgtcatgcagggcgtagcgtggctgtacctgtggattttccgcggcaccccaatttatgtgcagttggtgttctggggcctgctgggttccttgtaccagtcgatcaacctcggtttcgcagagatcgatctgcaaagcttgctgtctaatatgttcctgctcgcggtgatcggtctgggtctcaacgaggctgcgtacatggcggaaatcgtgcgctcgggcatccaagcggtgcctgagggccagatggaggcgtcgaaagctttgggtatgaactggtcaatgaccatgcgtcgcaccatcttgccgcaggccatgcgcatcatcattccgccaaccggcaatgaactgatctccatgctcaagaccacctctctggttgttgcgattccttattctctcgagctgtacggccgcagcatggatattgcgtactccctcttcgagccagttccaatgcttctggttgctgcgagctggtacttggtcatcacctctattcttatggttggtcagtactacctggagaagcacttcgaaaagggcagcacccgcaccctgaccgcacgtcagctcgctgcgttggctgatgctgaaggcgcaatcccgggcaatgtcaccgttgttcctgaaacttccaaggagaactag

SEQ ID NO: 3449 - protein, 316 aa, Corynebacterium glutamicum ATCC 13032
MSDLNQGPGASTAQPKPIEAKPLRHPGRWVAAAIIVALLAWFIISALNNEAYGWDTYRSYLFDTRIATAALHTIALTLLSMILGVVLGAILAVMRMSGNPVMQGVAWLYLWIFRGTPIYVQLVFWGLLGSLYQSINLGFAEIDLQSLLSNMFLLAVIGLGLNEAAYMAEIVRSGIQAVPEGQMEASKALGMNWSMTMRRTILPQAMRIIIPPTGNELISMLKTTSLVVAIPYSLELYGRSMDIAYSLFEPVPMLLVAASWYLVITSILMVGQYYLEKHFEKGSTRTLTARQLAALADAEGAIPGNVTVVPETSKEN

SEQ ID NO: 3450 - DNA, 951 bp, Streptomyces coelicolor A3(2)
  CDS (1)..(951): transl_table=11
gtgactgttgacatcgacaagacggcgggcggcccggccggcaccccgccgaccccgcccgaggccatcaaggccatcccggtgaggcactacgggcggtacgtctccgcggtcgtcgcgatcgcgctgctggccgcggtcgtctacgccttctcccagggcaagatcaactggggcgcgatcccggactacttcttcgacgaccgtgtcctgaccggcatgggcaagacgctcctgatcaccgtcctcgcgatgctgatcggtgtcgtcggcggcatcctgctcgccgtgatgcggctgtcgaagaacccggtgacctcgtccatcgcgtggttctacatctggttcttccgcggcaccccggtcctggtgcagctggtggtctggttcaacctcggcctggtcttcgagtacatcaacctcggcccgttctaccgcgacgagtggtcggacttcatgacgccgttcctgacggcgctgctcggcctcggcctcaacgaggcggcgtacatggcggagatctgccgcgccggcctgctcgcggtcgacgagggccagaccgaggcggcgcacgcgctcggcatgagccacaccaagacgctgcgccggatcgtggtcccgcaggcgatgcgcgtgatcgtgccgccgacgggcaacgaggtcatcaacatgctgaagacgacctcgctggtgtcggtcgtccagtacgccgagttgttcagagtcgcccaggacatcggccagacctctggcgcaccggccgagatgctgttcctcgcggcggcctggtacctgctgctgacctccgtcttcagcgtcggccagtactacctggagcgctactacgcccgcggctccagccgcagtctgccgcccaccccgatgcagaagatcagggccaacctgttctccctgtcgaaccgctccagcacgacgggaggtgcggcatga

SEQ ID NO: 3451 - protein, 316 aa, Streptomyces coelicolor A3(2)
MTVDIDKTAGGPAGTPPTPPEAIKAIPVRHYGRYVSAVVAIALLAAVVYAFSQGKINWGAIPDYFFDDRVLTGMGKTLLITVLAMLIGVVGGILLAVMRLSKNPVTSSIAWFYIWFFRGTPVLVQLVVWFNLGLVFEYINLGPFYRDEWSDFMTPFLTALLGLGLNEAAYMAEICRAGLLAVDEGQTEAAHALGMSHTKTLRRIVVPQAMRVIVPPTGNEVINMLKTTSLVSVVQYAELFRVAQDIGQTSGAPAEMLFLAAAWYLLLTSVFSVGQYYLERYYARGSSRSLPPTPMQKIRANLFSLSNRSSTTGGAA

SEQ ID NO: 3452 - DNA, 900 bp, Streptomyces coelicolor A3(2)
  CDS (1)..(900): transl_table=11
atgagttccgttctctacgacgcgcaggggccgcgcgccaagcgacgcaacgtcgtgttcacggccgtcttcgtggtggtcgtcctggccctgctgtggtgggtctacgcgaccctcgacgagaagggccagctcgagtgggcgaagtggcagatgttcttcaccagcgacgagccctggtcgacgtacatctggcccggcctgcagaacaccctcaaggccgcggctctctccatggtcatcgcgctgccgctcggtgccgtgctcggcatcgcccggctgtcggaccacgcgtgggtccggatcccggtcgcgatcgtggtggagttcttccgctcgatccccgtgctggtcctgatgatcttcggtctggccctgttcgccgagtacaccgacgtcagttcggacgaccgtccgctgtacgcggtcgtcacgggcctggtgctgtacaacgcctccgtcctcgcggagatcgtccgggcaggcatcctcgcgctgcccaaggggcaggccgagggagcgatggcgatcgggttgcgcaaggggcagtcgatgcggctgatcctgctgccgcaggcggtcaccacgatgctcccggccatcgtcagccagctcgtcgtgatcctcaaggacaccgcgctcggtggtgcggtcctcaccttccccgagctgctcgcctcggccaacacgatgagcggctactacggcgccaacgtgatcgccagcttcaccgtggtcgcggtgatctacatcgcgctcaacttctccctcaccaccttcgcgagctggctggagcgccggctgcggcgggcgaagaagtcgaccggtgcggtgctcaaggcggacgacgccgggatccccggcggtgcggccaccggtgccggtgggggcggcaactga

SEQ ID NO: 3453 - protein, 299 aa, Streptomyces coelicolor A3(2)
MSSVLYDAQGPRAKRRNVVFTAVFVVVVLALLWWVYATLDEKGQLEWAKWQMFFTSDEPWSTYIWPGLQNTLKAAALSMVIALPLGAVLGIARLSDHAWVRIPVAIVVEFFRSIPVLVLMIFGLALFAEYTDVSSDDRPLYAVVTGLVLYNASVLAEIVRAGILALPKGQAEGAMAIGLRKGQSMRLILLPQAVTTMLPAIVSQLVVILKDTALGGAVLTFPELLASANTMSGYYGANVIASFTVVAVIYIALNFSLTTFASWLERRLRRAKKSTGAVLKADDAGIPGGAATGAGGGGN

SEQ ID NO: 3454 - DNA, 669 bp, Streptomyces coelicolor A3(2)
  CDS (1)..(669): transl_table=11
gtgttcgactttcttcaggattacgacctgttgggagccttctggacgacagtgcagctcgctgcactctcagccgtcggctccctgatctggggcaccatactggccgccatgcgcgtcggcccggtgccgttgatgcgcggcctcggcgccgcgtacgtgaacaccgtgcggaacatcccgctcaccgtcatcatcttgttcgcgtccctcggtctcaaccagaccctcggcgtcacactcggcggcggcgacagcttcgagacgatcaacttccggctcgccgtcctgggtctggtcctctacacctcggccttcgtgtgtgaagccctgcgttccggcatcaacaccgtgcccgtcggtcaggcggaggcggcccgggcgatcgggctgagcttcggtcaggtgctgcgcctggtggtgctgcctcaggcgttccgctccacggtcggcccgctggcgaacgtactgatcgcactcatcaagaacaccacggtcgccgcggccatcggcgttgccgaagccgccgcgctgatgaaggacatgatcgagaacgaggcgcagctgctgctgatctccgcgatcatcgccgtcggcttcgtgatcctgacgctgccgaccggtctgatcctcggctgggtgggcaagaaggtggcggtgaagcgatga

SEQ ID NO: 3455 - protein, 222 aa, Streptomyces coelicolor A3(2)
MFDFLQDYDLLGAFWTTVQLAALSAVGSLIWGTILAAMRVGPVPLMRGLGAAYVNTVRNIPLTVIILFASLGLNQTLGVTLGGGDSFETINFRLAVLGLVLYTSAFVCEALRSGINTVPVGQAEAARAIGLSFGQVLRLVVLPQAFRSTVGPLANVLIALIKNTTVAAAIGVAEAAALMKDMIENEAQLLLISAIIAVGFVILTLPTGLILGWVGKKVAVKR

SEQ ID NO: 3456 - DNA, 741 bp, Shigella flexneri 2a str. 301
  CDS (1)..(741): transl_table=11
atgtctatagactggaactggggtatttttttacaacaagccccgttcggcaataccacctatcttggttgggtctggagtggttttcaggtgacgatcgctttgtcgatctgcgcctggattatcgctttcctcgtcggttcatttttcggcattttacgtaccgttccaaaccgttttctctccggtctgggtacgttgtatgtcgaactgttccgcaacgtgccgttgattgtgcaattctttacctggtatctggtgatcccggagctgctgccggagaaaatcggcatgtggtttaaggccgagctggatcccaatattcagtttttcctttcatccatgctctgcctggggctgtttaccgccgcccgtgtttgcgaacaggtacgcgccgctattcagtcgctaccgcgtgggcagaagaatgccgcgctggcgatgggcctgacgctaccgcagacttatcgatacgtactgctgcctaatgcttatcgcgttatcgtcccgccgatgacttccgagatgatgaacctggtgaaaaactccgccatcgcctcgaccatcggtctggtggatatggcggcgcaggcgggtaaattgctcgactactcggctcacgcctgggagtcgtttaccgccatcacgcttgcgtatgtgttgattaacgcttttatcatgctggtgatgacgctggttgaacgtaaagttcgcctgcccggcaacatggggggcaaataa

SEQ ID NO: 3457 - protein, 246 aa, Shigella flexneri 2a str. 301
MSIDWNWGIFLQQAPFGNTTYLGWVWSGFQVTIALSICAWIIAFLVGSFFGILRTVPNRFLSGLGTLYVELFRNVPLIVQFFTWYLVIPELLPEKIGMWFKAELDPNIQFFLSSMLCLGLFTAARVCEQVRAAIQSLPRGQKNAALAMGLTLPQTYRYVLLPNAYRVIVPPMTSEMMNLVKNSAIASTIGLVDMAAQAGKLLDYSAHAWESFTAITLAYVLINAFIMLVMTLVERKVRLPGNMGGK

SEQ ID NO: 3458 - DNA, 669 bp, Pseudomonas putida KT2440
  CDS (1)..(669): transl_table=11
atgatcgctgaaagcctgcaactcgttgtcgactccgcgcccttcctgctgaagggcgcgggttatacggtgctgctcagtgtcggcggcatgttcttcggtctggtgctgggctttgccctggcgctgatgcggctgtcgaagattctgccgctgaactggctggcgcgggtctacgtgtcgttcttccgcggcacgccgctgctggtgcagctgttcgtcatctatttcggcatgccgcaaatcggcatcgagctggacccgatccccgcttcgctgatcggcctgtcgctgaacatggcggcctatatctgcgagatcctgcgcgcagccatttcctcgatcgaccggggccagtgggaagcagccgccagcatcggcatgacccgcgtgcaagccatgcgccgggcgatcctgccacaggccttgcgcaccgcgttgccaccgctgggcaacagcttcatctcgctggtaaaggacaccgccctggcggcgaccatccaggtgcccgagctgttccgccaagcccagctgattaccgcgcgcacgttcgaagtgttcaccatgtacgtggcggtcgcggtcatctactgggtgctgtgcagcatccttgcgcacttccagaaccgcatggaagcgcgggtcaaccagcatgaccaggagcattga

SEQ ID NO: 3459 - protein, 222 aa, Pseudomonas putida KT2440
MIAESLQLVVDSAPFLLKGAGYTVLLSVGGMFFGLVLGFALALMRLSKILPLNWLARVYVSFFRGTPLLVQLFVIYFGMPQIGIELDPIPASLIGLSLNMAAYICEILRAAISSIDRGQWEAAASIGMTRVQAMRRAILPQALRTALPPLGNSFISLVKDTALAATIQVPELFRQAQLITARTFEVFTMYVAVAVIYWVLCSILAHFQNRMEARVNQHDQEH

SEQ ID NO: 3460 - DNA, 690 bp, Pseudomonas putida KT2440
  CDS (1)..(690): transl_table=11
atgaattgggaagtcatcttcaaatggctgccacgcctggccgaaggcgcgaccctgacccttgagctggtggccatcgccgtggttgccgggttgatcctggccataccgctgggcatcgcccgctcctcgcgccactggtacgtgcgcgcggtgccgttcagctacattttcttcttccgtggcacgccgctgctggtgcaattgttcctggtctattacggcctggcgcagttcgatgcggtgcgctccagttcgctgtggccgtacctgcgcgatccgttctggtgcacggtgctgaccatgaccctgcacaccgctgcgtacatcgccgagattctgcgtggcgcgctgcaggcgatccctaaaggtgagattgaagcggcacgggcgctgggcatgtcgcgtggcaaaacgctgttctacatcatgctgccacgcgctgcgcgcatcggcctgccggcgtacagcaacgaagtgatcctgatgctcaaggccagtgccctggccagtaccgtgaccctgctggaactgaccggcatggcccgtaccatcatcgcccgcacctacctgccggtggaaatcttcttcgccgcaggcgtgttctacctggtgatctcgttcatgctggtgcaaggcttcaagctgctggagcgctggttgcgcgtggatgcctgccaaggccgctga

SEQ ID NO: 3461 - protein, 229 aa, Pseudomonas putida KT2440
MNWEVIFKWLPRLAEGATLTLELVAIAVVAGLILAIPLGIARSSRHWYVRAVPFSYIFFFRGTPLLVQLFLVYYGLAQFDAVRSSSLWPYLRDPFWCTVLTMTLHTAAYIAEILRGALQAIPKGEIEAARALGMSRGKTLFYIMLPRAARIGLPAYSNEVILMLKASALASTVTLLELTGMARTIIARTYLPVEIFFAAGVFYLVISFMLVQGFKLLERWLRVDACQGR

SEQ ID NO: 3462 - DNA, 693 bp, Pseudomonas putida KT2440
  CDS (1)..(693): transl_table=11
atgaatatcgacctgcacggattcggtccggccatgatggccggcaccctgatgaccgtaaaactggcgctttgcgccttgctgctggggctggtcctgggcctgctcggcgccctggccaagacctccccgttcaagccgctgcaatggcttggcggcttctactcgaccctggttcgcggcgtgcccgaactgctgtgggtactgcttatctatttcggcaccgtcgggctgatgaacagcctcggcgaagccctgaacatgcccggccttgagctcagcgcctttgccgcgggcgtgatcgccctgggcctgtgctttggcgcctacgccaccgaagtgttccgtggcgctatcctggcgatccccaagggccaccgcgaagccggcctggcgctgggcttgtcaaagggccgcatcctctcgcggatcatcctgccgcagatgtggcgcatcgccctgcccggccttggcaacctgttcatgatcctgatgaaggacaccgccctggtatcggtaatcggccttgaagaaatcatgcgtcattcgcaaattggcgtgaccgtgaccaaagagccgttcaccttctacatggtcgcggcctgcatctacctgggcctgaccgtgcttgccatgaccggtatgcatttcatggaaaaacgcgccgctcgcggctttgcgagggctgaataa

SEQ ID NO: 3463 - protein, 230 aa, Pseudomonas putida KT2440
MNIDLHGFGPAMMAGTLMTVKLALCALLLGLVLGLLGALAKTSPFKPLQWLGGFYSTLVRGVPELLWVLLIYFGTVGLMNSLGEALNMPGLELSAFAAGVIALGLCFGAYATEVFRGAILAIPKGHREAGLALGLSKGRILSRIILPQMWRIALPGLGNLFMILMKDTALVSVIGLEEIMRHSQIGVTVTKEPFTFYMVAACIYLGLTVLAMTGMHFMEKRAARGFARAE

SEQ ID NO: 3464 - DNA, 822 bp, Pseudomonas putida KT2440
  CDS (1)..(822): transl_table=11
atgagcaccttccctcactcccccaagcccgtggcaaagcctgcgggcgccggcctgttcggctttcgcacccggttactgctgacctggctggcgctgttcgggctgtttgtcgccttcttcctcagctttgacctgaagttcgccatcattctggagaagtttcccaacctggccggtttcaagctggggcccaatggttttctgcaaggcgccgcactgaccctgttcctgtgcctgtgctcgatggtggtatccgtgctgctcggctttgccgccgcgctggcacggttatccaacagcgcggtgctggtgggtgtggccagcttctacacctcgttcttccgtggcacgccgctgctgatccagattctgctgatctacctggggctgccgcaggtgggcctggtacccggcgccatcagcgccggcatcattgccttgtcgctgaactacggggcctacctgagcgagatcttccgcgccggcatcctcggcgtggcccgtgggcaacgtgaagcagcattggcgctgggcatgcgcacgccgcagatcttctgccacatcatcctgccccaggccatgcgggtgatcattccgcccaccgccaaccagttcatttcgatgctcaaggactcgtcgctgatttccgtgatgggggtttgggaggtgatgtttctggcgcagtcgtatgggcgttcgagctatcgctacctggaaatgctgaccaccgccgccgtgatctactgggtgctgtcgatactgctggagctgctgcaggcgcgcctggaacggcattttggcaaggcttatcagcgctga

SEQ ID NO: 3465 - protein, 273 aa, Pseudomonas putida KT2440
MSTFPHSPKPVAKPAGAGLFGFRTRLLLTWLALFGLFVAFFLSFDLKFAIILEKFPNLAGFKLGPNGFLQGAALTLFLCLCSMVVSVLLGFAAALARLSNSAVLVGVASFYTSFFRGTPLLIQILLIYLGLPQVGLVPGAISAGIIALSLNYGAYLSEIFRAGILGVARGQREAALALGMRTPQIFCHIILPQAMRVIIPPTANQFISMLKDSSLISVMGVWEVMFLAQSYGRSSYRYLEMLTTAAVIYWVLSILLELLQARLERHFGKAYQR

SEQ ID NO: 3466 - DNA, 672 bp, Pseudomonas putida KT2440
  CDS (1)..(672): transl_table=11
atggaaatggatttcagcgaaatcatccccgccctgcctgccctctgggagggcatggtcatgaccctcaaactgatggtcatgggagtcatcggcggtatcgtgctgggcaccatcctggcactgatgcgcctgtcgtcaagcaaactgctgtcgaacctggccggcgcctacgtcaactacttccgctcgattccgctgctgctggtgatcacctggttctacctggcggtaccgttcgtgctgcgctggatcaccggcgaagataccccggtgggtgccttcacctcctgcgtggtcgccttcatgatgttcgaggccgcgtatttctgcgaaatcgtccgcgccggtgtgcagtcgatctccaagggccagatgggcgccgcacaagcgctgggcatgaactacgcgcagaccatgcgcctgatcatcctgccccaggccttccgcaagatgaccccgctgctgctgcagcagagcatcatcctgttccaggacacctcgctggtatacaccgtgggcctggtcgacttcctcaactcggcacgctccaacggcgacatcatcgggcgctcccatgagttcctgatcttcgccggcgtcgtctacttcctcatcagcttctccgcttcgtggctggtcaagcgcctgcaaaaaaggatctccgtatga

SEQ ID NO: 3467 - protein, 223 aa, Pseudomonas putida KT2440
MEMDFSEIIPALPALWEGMVMTLKLMVMGVIGGIVLGTILALMRLSSSKLLSNLAGAYVNYFRSIPLLLVITWFYLAVPFVLRWITGEDTPVGAFTSCVVAFMMFEAAYFCEIVRAGVQSISKGQMGAAQALGMNYAQTMRLIILPQAFRKMTPLLLQQSIILFQDTSLVYTVGLVDFLNSARSNGDIIGRSHEFLIFAGVVYFLISFSASWLVKRLQKRISV

SEQ ID NO: 3468 - DNA, 747 bp, Pseudomonas putida KT2440
  CDS (1)..(747): transl_table=11
atgaattacaactgggactggggcgtgttcttcaagtccaccggcgtgggcagcgaaacctatctggactggtacatcaccggcctgggctggaccatcgccatcgccatcaccgcctggatcatcgcgctgctgctggggtcgctcctcggtgtcatgcgtaccgtaccgaaccgcctggtatcgggtatcgccaccgcctacgtggaactgttccgcaacgtgccactgctggtgcaactgttcatctggtacttcctggtaccggacctgctgccagaaggcttgcaggaatggttcaagcaggacctcaacccgaccacttcggcgctgatcagcgtggtcatctgcctgggcctgttcaccgccgcgcgcgtctgtgagcaagtgcgtaccggtatccaggcgctgcccaaaggccaggaagctgccgcccgcgccatgggcttcagcctcccgcagatctacaacaatgtgctgctgccgcaagcctaccggatcatcattccgccgctcacctccgagttcctcaacgtattcaagaactcctcggtggcgtcgctgatcggcctgatggagctgctcgcgcagaccaaacagaccgcagagttttccgccaacctgttcgaggcgttcaccttggccacgctgatctacttcaccctgaacatgggcctgatgctgctcatgcgcatggtcgagaagaaagtcgccgtgcctggcctgatttccgtggggggcaagtaa

SEQ ID NO: 3469 - protein, 248 aa, Pseudomonas putida KT2440
MNYNWDWGVFFKSTGVGSETYLDWYITGLGWTIAIAITAWIIALLLGSLLGVMRTVPNRLVSGIATAYVELFRNVPLLVQLFIWYFLVPDLLPEGLQEWFKQDLNPTTSALISVVICLGLFTAARVCEQVRTGIQALPKGQEAAARAMGFSLPQIYNNVLLPQAYRIIIPPLTSEFLNVFKNSSVASLIGLMELLAQTKQTAEFSANLFEAFTLATLIYFTLNMGLMLLMRMVEKKVAVPGLISVGGK

SEQ ID NO: 3470 - DNA, 657 bp, Pseudomonas putida KT2440
  CDS (1)..(657): transl_table=11
atggcagatttactaccacttatgctccagggcgcatgggttaccctgcagatcaccttcttcggatctctcctggccatcgttgcagcgaccctggcggcactcggcaaaatgtcgacatggagaccgctccgctggttttgcgtcgtctacattgagatctttcggggtacgtcgctgctcgttcaattgttctggctcttcttcgtccttccgcttcctccattcaatctcgagctgagcccctacaccgtcgcaatcgttggccttgggctacatattggcgcttatggtgcagagataatgcgcggcgcgattaattcggtagctaaaggtcaatatgaagcttgcacagcacttaactttcgcccattcacacgctttcgtcgcatcattttgccgcaagccctgctcgcagcgatggggcctggaactaatctgctgatcgagctgttgaaaaacacatcccttgtttcccttataacgcttgcagatttgagcttcagggcgcgccaactcgatcaggctacattcgagactctcaaggtcttcgccctagcgctgctcatgtacttcgtaatggcccaagcgattaacttggcaatgcggcgtttagagcgacatctggcccgtggtcgtgtccaagggagcctgtga

SEQ ID NO: 3471 - protein, 218 aa, Pseudomonas putida KT2440
MADLLPLMLQGAWVTLQITFFGSLLAIVAATLAALGKMSTWRPLRWFCVVYIEIFRGTSLLVQLFWLFFVLPLPPFNLELSPYTVAIVGLGLHIGAYGAEIMRGAINSVAKGQYEACTALNFRPFTRFRRIILPQALLAAMGPGTNLLIELLKNTSLVSLITLADLSFRARQLDQATFETLKVFALALLMYFVMAQAINLAMRRLERHLARGRVQGSL

SEQ ID NO: 3472 - DNA, 642 bp, Pseudomonas putida KT2440
  CDS (1)..(642): transl_table=11
atgaaagacatcctgatgatgctgttgaacggcataccctggaccattgccgttaccgtgctcgcattctgtgtcggcgtagtgctggggtttcccatctgtgccctgcgcatgtccagggtcaaggtgctgagcattctggctgccatgctggtgctgaccctgcgctcaatccccccgattgtctggctgtttttcatcttcttcggcatcggtggcggctatatcagcctgtcgccgtttaccgcagcggtggttggcctggggctgatcacggcggcgcatatgtccgaggtgtaccgcggtgcgttcgcggccattcccgccggccagttcgaagccgcctatgtgcttaacctgtcggcgccgcaacggtttttcgatgtggtgttgccgcaattggtgcgtatcgccattcccacctcagccacctacgccattggcctgctcaaggactcggccgtggcctcgacgattggcgttggtgaaatcagctttcaggcttaccaggtttcacagcaaacctttcagggcctgagcgtctacaccgcggcggcggtggtgtacctggtgctcagcgtgccagtggccttgttctctcgttggctgtcggccacgttgaaacagaggattgcccgatga

SEQ ID NO: 3473 - protein, 213 aa, Pseudomonas putida KT2440
MKDILMMLLNGIPWTIAVTVLAFCVGVVLGFPICALRMSRVKVLSILAAMLVLTLRSIPPIVWLFFIFFGIGGGYISLSPFTAAVVGLGLITAAHMSEVYRGAFAAIPAGQFEAAYVLNLSAPQRFFDVVLPQLVRIAIPTSATYAIGLLKDSAVASTIGVGEISFQAYQVSQQTFQGLSVYTAAAVVYLVLSVPVALFSRWLSATLKQRIAR

SEQ ID NO: 3474 - DNA, 963 bp, Pseudomonas putida KT2440
  CDS (1)..(963): transl_table=11
gtgatcaaacacaagaaagcccagtggccttggcatgggttgactgccctggtcctggtaggcctggcgctcagcctttacatggccacctcgatgatttcctacgagtggcgctggaaccgcgtaccgcagtacttcgcctacaaggccgaggaaacacaacgcgctgccggctacggcactgtgcaggaaatcgtcatttccggtgacaacgcccgcgtcacgctgaaggacgaaagtggtgccgagcaagtgctcgatgtggacaaggacagcctgcaactgagccgcggcgacgatgttgccgaaggcgaccagatcggggtaacccgccattgggccgcgggcccgctggcatggggcctgtggaccaccttgtggatctcggtggtgtccggggcgctgggcctggtgatcggcctgttcgccggattgtgccggttgtcgaacaacccgaccctgcgcgacctgtcgaccgtgtatgtcgagctggtgcgcggcacgccgctgctggtgcaaatcttcatcttctacttcttcatcggcaccgtgctcaacctgtcccgcgagtttgccggggtagcggcgctggcattgttcaccggtgcttacgtggccgagatcgtccgtgcaggcgtgcagtcgatcgccaaaggtcagaacgaggctgcccggtcgctgggcctgaacgctggccagtcgatgcgccatgtgatcttgccgcaggccttcaagcgcgtgcttccgcccctggccggccagttcatcagcctggtcaaggacacctcgctggtgtcggtgatcgccatcaccgaactgaccaagagtggccgtgaggctatcaccacctcgttctctactttcgagatctggttctgcgtggcaggcctgtacctgctgatcaacctgccgctgtcgcacatcgccagccggctcgagcggaggcttgcgcaaagtgattga

SEQ ID NO: 3475 - protein, 320 aa, Pseudomonas putida KT2440
MIKHKKAQWPWHGLTALVLVGLALSLYMATSMISYEWRWNRVPQYFAYKAEETQRAAGYGTVQEIVISGDNARVTLKDESGAEQVLDVDKDSLQLSRGDDVAEGDQIGVTRHWAAGPLAWGLWTTLWISVVSGALGLVIGLFAGLCRLSNNPTLRDLSTVYVELVRGTPLLVQIFIFYFFIGTVLNLSREFAGVAALALFTGAYVAEIVRAGVQSIAKGQNEAARSLGLNAGQSMRHVILPQAFKRVLPPLAGQFISLVKDTSLVSVIAITELTKSGREAITTSFSTFEIWFCVAGLYLLINLPLSHIASRLERRLAQSD

SEQ ID NO: 3476 - DNA, 795 bp, Bradyrhizobium japonicum USDA 110
  CDS (1)..(795): transl_table=11
atgttcgcggtgctctttgaacagacggcggatggccagcgctacatcgactggcttctgtcgggcctcggctggaccctggccctggcgttcttcggctggtggattgcctttgcgatcgggatcgtcgtcgggatcggccgcaccgtgcagaaccgggccatcgctgcgcttgcgcgcctgtatgtggagattttccgcaacatccccgtcctggcgcagatgtttctctggtacttcgtcctgccggagattcttcccgtcacgctcggaaatgccatcaagcagattccgccgccctggggatcattcgtccccgcacttctgtgcctcggcctctacaccgcggcccggatcgccgagcaggttcgggccgggatcgaggccctgccgagagggcagaccgaggcggcaagcgcactcggactcaccgcctatctgacctaccgccatatcatcgtgccgcaggcgctgcgtttgatcgtgccaagcctcaccagcgaggtgatgggcatctacaagaacacctcggtcgcactgacgatcgggctgatggagctcacggctcaggcgcgccagatcagcgaggcgacgttccagaccttcacggctttcggcgccgcgaccctgatctatctcgcgctggcgctgatcgcctatcaggggatggcgctgatcgacagggccgtgcgcattccgggcacagggcgtgcggaggatgcgatcgagccgagcctggccgacgacgtcgggcaggccggctcgttgccctcagggatggaggtcgtgaaatga

SEQ ID NO: 3477 - protein, 264 aa, Bradyrhizobium japonicum USDA 110
MFAVLFEQTADGQRYIDWLLSGLGWTLALAFFGWWIAFAIGIVVGIGRTVQNRAIAALARLYVEIFRNIPVLAQMFLWYFVLPEILPVTLGNAIKQIPPPWGSFVPALLCLGLYTAARIAEQVRAGIEALPRGQTEAASALGLTAYLTYRHIIVPQALRLIVPSLTSEVMGIYKNTSVALTIGLMELTAQARQISEATFQTFTAFGAATLIYLALALIAYQGMALIDRAVRIPGTGRAEDAIEPSLADDVGQAGSLPSGMEVVK

SEQ ID NO: 3478 - DNA, 732 bp, Bradyrhizobium japonicum USDA 110
  CDS (1)..(732): transl_table=11
gtgaactaccactggaactggggaattttcttcgagccgaacccgatggggaccggcacctatctcgacatgctgttgtcgggcctggtgctgaccctgaagacggcggtgctcgcctggatcatcgcgctggtgttcggctcgctcgtcggcgtcatgcgcacgctgccgtccaaggcggcctaccggttcggcttctgctgggtcgagttcttccgcaacatgccgctgctggtgcagctcttcctgtggttcttcgtgctgccggaactgctgccgaaatccgccggcctgtggctgaagcaactgccgaatgcgccgttctggacggccgcgatcggcatcggcttcttcatgtcggcgcgcgtcgcggtgcaattgcaggcgggcatcggttcgttgccgcgcgggcagaagatggcggcgaccgcgctcgggctcaccaccgtgcagggctatcgctacgtgctgctgccgatggcgttccgcatcatcctgccgccgctgacttccgagttcctcaacaccatcaagaacacggcggtggccatcaccatcggcctgatcgagctgaccggacaggcgcgctcgatgcaggaattctcgttccaggtgttcgaggccttcaccgccgcgaccatcctttatctcctcgtcaacgccgtcgtcgtgaccgcgatgcgcttcctcgagcgctatgtcgcgatccccggctacatcacggggaaatag

SEQ ID NO: 3479 - protein, 243 aa, Bradyrhizobium japonicum USDA 110
MNYHWNWGIFFEPNPMGTGTYLDMLLSGLVLTLKTAVLAWIIALVFGSLVGVMRTLPSKAAYRFGFCWVEFFRNMPLLVQLFLWFFVLPELLPKSAGLWLKQLPNAPFWTAAIGIGFFMSARVAVQLQAGIGSLPRGQKMAATALGLTTVQGYRYVLLPMAFRIILPPLTSEFLNTIKNTAVAITIGLIELTGQARSMQEFSFQVFEAFTAATILYLLVNAVVVTAMRFLERYVAIPGYITGK

SEQ ID NO: 3480 - DNA, 747 bp, Pseudomonas syringae pv. tomato str. DC3000
  CDS (1)..(747): transl_table=11
atgaattacaactgggactggggcgtgttcttcaagtccaccggcgtcggcagcgagacctatctggactggttcatatccggtctcggctggaccattgccattgctgtcgttgcctggatcatagcgctgatactgggctcggtactgggcgtcatgcgcaccgtgccaagccgtctggtatcaggtattgccacggcctacgtagaaatcttccgtaacgtgccactgctggtgcagctgttcatctggtactttctggtgcctgatctgctgcctgcagacctgcaggagtggtacaagcaggacctcaacccgaccacctcggcgtttctgagcgttgtcgtgtgtctgggtctgttcactgctgcacgggtctgcgaacaagtccgcaccggcatcgaggcgttgccaaagggccaggaatcagccgcacgcgccatgggcttcaagctgccacagatctactggaacgtgctgttgccgcaagcctaccggatcatcattccgccgctcacctccgaattcctgaacgtgttcaagaactcctcggtagcgtcgctgatcggcctgatggagctgctcgcacagaccaaacagaccgccgagttttccgccaacctgtttgaagctttcaccctggcgaccctcatctacttcacgctgaacatgagcctgatgctgctgatgcgcatgatcgagaagaaagttgccgtgcccggcctgatctctctgggaggcaaataa

SEQ ID NO: 3481 - protein, 248 aa, Pseudomonas syringae pv. tomato str. DC3000
MNYNWDWGVFFKSTGVGSETYLDWFISGLGWTIAIAVVAWIIALILGSVLGVMRTVPSRLVSGIATAYVEIFRNVPLLVQLFIWYFLVPDLLPADLQEWYKQDLNPTTSAFLSVVVCLGLFTAARVCEQVRTGIEALPKGQESAARAMGFKLPQIYWNVLLPQAYRIIIPPLTSEFLNVFKNSSVASLIGLMELLAQTKQTAEFSANLFEAFTLATLIYFTLNMSLMLLMRMIEKKVAVPGLISLGGK

SEQ ID NO: 3482 - DNA, 759 bp, Bordetella parapertussis 12822
  CDS (1)..(759): transl_table=11
atgggatatcaatggaactggggcgtgctgttcgccctttccccggatggcgggcagacctatctgcagacgctgctcgatggcctggcggtcacggtgcagaccgccgcgctggcctgggcgctggcgctgggcctgggcatcgccgtcggcgtggcgcgcaccctgccgtactcgctcgtcaagcggctggcggccgtctacgtggaggtgtttcgcaacatcccgctgattgtccagatgttcctctggtatttcgtgctgcccgagctgttgcccaaggcgttgggcgactggatcaagcagctgcctgaggggtcgttctatacggcggcgctgtccatcggggtgtatatgtcggcgcgcatcggcgagcagttgcgcgccggcatcgaggcgttgccgccgggccagcgccaggccggcctggcgctgggcctgaccctgccgcagctgtaccgccatgtgctgctgcccaatgccttgcgcatggtgctgccgaccatgacgtccgattgcctgaacaccatcaagaatacctcggtggcgctgaccatcggcctggccgacctgaccgcgcaggcgcatgccatgcaggagtactcgttccaggttttcgaggccttcctgaccgcgaccgtggcctacctggcgctgaacctgatcgtgatcgtggcgatgcgcgcgctggagcgctgggtgagcatccccgggcagtcgccgcgccgcgcgcaggcggccaaggggggaagggcatga

SEQ ID NO: 3483 - protein, 252 aa, Bordetella parapertussis 12822
MGYQWNWGVLFALSPDGGQTYLQTLLDGLAVTVQTAALAWALALGLGIAVGVARTLPYSLVKRLAAVYVEVFRNIPLIVQMFLWYFVLPELLPKALGDWIKQLPEGSFYTAALSIGVYMSARIGEQLRAGIEALPPGQRQAGLALGLTLPQLYRHVLLPNALRMVLPTMTSDCLNTIKNTSVALTIGLADLTAQAHAMQEYSFQVFEAFLTATVAYLALNLIVIVAMRALERWVSIPGQSPRRAQAAKGGRA

SEQ ID NO: 3484 - DNA, 762 bp, Bordetella parapertussis 12822
  CDS (1)..(762): transl_table=11
atgaactacaactggaattggcatatttttcttgagatgtcgccgaccggcggcatctatctgggcacgctgctgaccggcatggcgtggacgctcggcaccgcggcgctggcctggatcctggcgctgggcatcggcatcgtggtgggcgtggcccgcaccacgcagtcgaaatgggcgcgcatcatgggcgccacgtacgtcgagttcttccgcaacattccgctgctggtgcagatgttcctctggtacttcgtcgtgcccgaaatcctgccggtgcagcttggcgacgcgatcaagagcatcccgccgccatggggcatcttcatcccggcggtcctgtgcctgggcttctacacctcgtcgcgggtggccgaacaggtgcgcgccggcatcgagtcgcgtccggccgggcagcgcatggcggccaccgcgctgggcatgcggcccagccaggtgtaccggtacgtgctgctgccgacctcgtttcgcatcatcctcccgccgctgacctcggaactgctcaacctcatcaagaacacctcggtggcattcaccatcgacctgctcgaactggtcggcgcggcccgctcgatgcaggaattcagcttccaggtcttcgaagccttcgccggcgcgacgctttgctacttcctgctcaacctgatcgtgctgcgcgcaatgcgatacattgaaacgcggctggcggtgccgggcttcatcggccccgtctccgccaccaccaaactggctccgacatga

SEQ ID NO: 3485 - protein, 253 aa, Bordetella parapertussis 12822
MNYNWNWHIFLEMSPTGGIYLGTLLTGMAWTLGTAALAWILALGIGIVVGVARTTQSKWARIMGATYVEFFRNIPLLVQMFLWYFVVPEILPVQLGDAIKSIPPPWGIFIPAVLCLGFYTSSRVAEQVRAGIESRPAGQRMAATALGMRPSQVYRYVLLPTSFRIILPPLTSELLNLIKNTSVAFTIDLLELVGAARSMQEFSFQVFEAFAGATLCYFLLNLIVLRAMRYIETRLAVPGFIGPVSATTKLAPT

SEQ ID NO: 3486 - DNA, 762 bp, Bordetella bronchiseptica RB50
  CDS (1)..(762): transl_table=11
atgaactacaactggaattggcatatttttcttgagatgtcgccgaccggcggcatctacctgggcacgctgctgaccggcatggcgtggacgctcggcaccgcggcgctggcctggatcctggcgctgggcatcggcatcgtggtgggcgtggcccgcaccacgcagtcgaaatgggcgcgcatcatgggcgccacgtacgtcgagttcttccgcaacattccgctgctggtgcagatgttcctctggtacttcgtcgtgcccgaaatcctgccggtgcagcttggcgacgcgatcaagagcatcccgccgccatggggcatcttcatcccggcggtcctgtgcctgggcttctacacctcgtcgcgggtggccgaacaggtgcgcgccggcatcgagtcgcgtccggccgggcagcgcatggcggccaccgcgctgggcatgcggcccagccaggtgtaccggtacgtgctgctgccgacctcgtttcgcatcatcctcccgccgctgacctcggaactgctcaacctcatcaagaacacctcggtggcattcaccatcggcctgctcgaactggtcggcgcggcccgctcgatgcaggaattcagcttccaggtcttcgaagccttcgccggcgcgacgctttgctacttcctgctcaacctgatcgtgctgcgcgcaatgcgatacattgaaacgcggctggcggtgccgggcttcatcggccccgtctccgccaccaccaaactggctccgacatga

SEQ ID NO: 3487 - protein, 253 aa, Bordetella bronchiseptica RB50
MNYNWNWHIFLEMSPTGGIYLGTLLTGMAWTLGTAALAWILALGIGIVVGVARTTQSKWARIMGATYVEFFRNIPLLVQMFLWYFVVPEILPVQLGDAIKSIPPPWGIFIPAVLCLGFYTSSRVAEQVRAGIESRPAGQRMAATALGMRPSQVYRYVLLPTSFRIILPPLTSELLNLIKNTSVAFTIGLLELVGAARSMQEFSFQVFEAFAGATLCYFLLNLIVLRAMRYIETRLAVPGFIGPVSATTKLAPT

SEQ ID NO: 3488 - DNA, 741 bp, Chromobacterium violaceum ATCC 12472
  CDS (1)..(741): transl_table=11
atgaattatcactgggactggggagtctttttcaaacccaccggtgtcggcagcgagatctacctgagctggttcgccagcggtctcggctggacgctggcggtggcgctgtccggatggatcatcgccctgctgctgggcaccgtggtcggcgtggcgcgcacgctgcccaatcgcgggatcgccggcctggcgaccgtctacgtcgaactgttccgcaacgtgccgctcttggtgcagctgttcgtctggtacttcctggtgccggacctgctgccggagggcgcgcaaatctggttcaagcaggacctgtcgccgaccacctcgcagttcctgtcggtggtggtgtgcctgggcctgttcaccgccgcccgggtggcggagcaggtgcgcaccggcatcgaggcgctgccgcgcggccagcgcaacgcggcgatggcggtgggcttctcgctgggccagacttaccgacatgtgctgctgccgcaggcgatgcgcatcatcatcccgccgctgaccagcgaattcctcaacatcatcaagaactcttctgtggcgtcgctgatcggcctggccgagctgctggcgcagaccaagcagaccgccgagttctccgccaacctgttcgaggccttcaccctggccaccgtcatctatttcacgctcaatatgagcctgatgctggggatgagcgcgctggagaagaagctcagggtgcccggcatgatgggaggcaaatga

SEQ ID NO: 3489 - protein, 246 aa, Chromobacterium violaceum ATCC 12472
MNYHWDWGVFFKPTGVGSEIYLSWFASGLGWTLAVALSGWIIALLLGTVVGVARTLPNRGIAGLATVYVELFRNVPLLVQLFVWYFLVPDLLPEGAQIWFKQDLSPTTSQFLSVVVCLGLFTAARVAEQVRTGIEALPRGQRNAAMAVGFSLGQTYRHVLLPQAMRIIIPPLTSEFLNIIKNSSVASLIGLAELLAQTKQTAEFSANLFEAFTLATVIYFTLNMSLMLGMSALEKKLRVPGMMGGK

SEQ ID NO: 3490 - DNA, 792 bp, Yersinia pestis biovar Microtus str. 91001
  CDS (1)..(792): transl_table=11
ttgaatcatcagtcatcagggtggcttatccatcctttaagggagtttgttatggcaatagactggaactggggcatttttttacagccagcccctttcggcaataccacctatctcggttggatttggtccggctttcaggtcacggtcgcattatcattatgtgcttgggtgatcgccttcttcgtcggttcactatttggtattttaagaacggtgcccaaccgaatcctttcaggaataggggcttgttacgttgaattgtttcgtaacgtaccactgatcgtgcaattttttacctggtatctggtggttcccgaactattgccagtgaaccttggcacatggtttaaaagtgaactggcacccaatatacagttcttcctctcatctatgatttgccttggattattcactgcggcgcgggtttgtgaacaggttcgcgcaggaattcaatcactgcctcgtggtcaaaaagcagcgggcctggcaatggggctcaccctcacacagacttaccgctatgttttactgcccaatgcatatcgggtgattattcccccgatgacctcagaaatgctcaatctggtaaaaaactccgcaattgcctcaaccatcgggctagtcgaaatggcggcacaagcgggtaaattgctggattattcagcgcatgcctatgaatccttcaccgccatcaccctaggttatgtactgatcaatgccgtgatcatgctgttaatgcgcttagttgaaaagaaagtgcaattacccggcaatctggggagtaaataa

SEQ ID NO: 3491 - protein, 263 aa, Yersinia pestis biovar Microtus str. 91001
MNHQSSGWLIHPLREFVMAIDWNWGIFLQPAPFGNTTYLGWIWSGFQVTVALSLCAWVIAFFVGSLFGILRTVPNRILSGIGACYVELFRNVPLIVQFFTWYLVVPELLPVNLGTWFKSELAPNIQFFLSSMICLGLFTAARVCEQVRAGIQSLPRGQKAAGLAMGLTLTQTYRYVLLPNAYRVIIPPMTSEMLNLVKNSAIASTIGLVEMAAQAGKLLDYSAHAYESFTAITLGYVLINAVIMLLMRLVEKKVQLPGNLGSK

SEQ ID NO: 3492 - DNA, 732 bp, Herminiimonas arsenicoxydans
  CDS (1)..(732): transl_table=11
atgaatcttggcattttcctggagcaggttcctgacggtgacggcacctggggctatatgctgttgtcaggattgggctggacgctggcggtcgctttctttgcgtggatatttgcgtttgtgctgggctcgctgatcggtattgcgcgaacgacggaaaagcgctggctggtgggtctgggcggcgcctacgtcgaattgttccgcaacattccgctgctggtgcaatttttcgtctggtactttgtgattccgggtttggtccccgccgtcaagacctgggtcatcacgctggatccgacgatacatcaattcgtcacggccatcatctgcctcggattttttacctcgtcgcgcatcgccgaacaagtgcgctccggcatacaatcgctgccgcgcggccagcgcaatgcagggtatgcgctgggattgacgggcatgcaaacctatcgtttcgtcttgttgccgatggcgtaccggatcatcatcccgccgctgacatccgagctgatgaacctgatcaagaatactgctgtagcgtattcgatcggcctggttgaactgtttttccgcacgcgggaaatgggcgagatgaccttccgttacttcgaagcatttggtgctgcgaccctgatgtacgtggtcattgccatgctggccaatcgcgtgatggcattggtggagcgacgcactgccgtgcccggattgattgccggaggcaagcatgggtga

SEQ ID NO: 3493 - protein, 243 aa, Herminiimonas arsenicoxydans
MNLGIFLEQVPDGDGTWGYMLLSGLGWTLAVAFFAWIFAFVLGSLIGIARTTEKRWLVGLGGAYVELFRNIPLLVQFFVWYFVIPGLVPAVKTWVITLDPTIHQFVTAIICLGFFTSSRIAEQVRSGIQSLPRGQRNAGYALGLTGMQTYRFVLLPMAYRIIIPPLTSELMNLIKNTAVAYSIGLVELFFRTREMGEMTFRYFEAFGAATLMYVVIAMLANRVMALVERRTAVPGLIAGGKHG

SEQ ID NO: 3494 - DNA, 741 bp, Burkholderia vietnamiensis G4
  CDS (1)..(741): transl_table=11
atgtcttaccactggaactggggcgtcttcctgagccccgtctcgaccggcgagccgacgacttacttcggatggctgatgtccggcttctgggtgacgatcgaagtgtcgctggtcgcctgggtcatcgcgctgatcgtcggttcgctgttcggcgtgctgcgcaccgtgccgaacaaatggctcgccgcgctcggcaccgtctacgtgtcgatcttccgcaacatcccgctgatcgtgcagttcttcgtctggtacctggtcgtgccggagctgctgcccgcgtcgatcggcacctggatcaagcagctgccgcccggcacgcagttcttcaccgcgtcgatcgtctgtctcgggctgttcaccggcgcacgcgtgtgcgagcaggtgcgctcgggcatcaacgcgctgccgaagggccagcgtgcggccggcctcgcgatgggcttcacgcaatggcagacgtaccgctacgtgttgctgccggtcgcgtaccggatcatcgtgccgccgctcacgtcggagttcctgaacatcttcaagaactcggcggtcgcatcgacgatcggcctgctcgacctgtccgcgcaggcgcgccagctggtcgactacaccgcgcagacctacgagtcgttcatcgcggtgacgctcgcgtacgtggtcatcaacctcgtcgtgatggcgttcatgcgctggatcgaaggccgcacgcggctgcccggctacatcggaggcaagtga

SEQ ID NO: 3495 - protein, 246 aa, Burkholderia vietnamiensis G4
MSYHWNWGVFLSPVSTGEPTTYFGWLMSGFWVTIEVSLVAWVIALIVGSLFGVLRTVPNKWLAALGTVYVSIFRNIPLIVQFFVWYLVVPELLPASIGTWIKQLPPGTQFFTASIVCLGLFTGARVCEQVRSGINALPKGQRAAGLAMGFTQWQTYRYVLLPVAYRIIVPPLTSEFLNIFKNSAVASTIGLLDLSAQARQLVDYTAQTYESFIAVTLAYVVINLVVMAFMRWIEGRTRLPGYIGGK

SEQ ID NO: 3496 - DNA, 732 bp, Bradyrhizobium sp. ORS278
  CDS (1)..(732): transl_table=11
gtgaactacacctggaactggcacatcttcctggagccgaacccgaccggggccggcacctatttcgacatgctgctggcggggctgaaggtcacgatcgtgacctcgctgtcggcctggttgatcgcgctgatcttcggcacgatcgtcggcatcctgcgctcgctgccgtcgaagctcgcgggctggatcggcttcctctacgtcgaattcttccgcaacatgccgctgctggtgcagctgttcctgtggttcttcgtgctgccggagctgttgccgcgcgccgccggcctgtggctgaagcagatgccgaatgcgccgttctttacagccgcggtcggcatcggcctgttcatgtcggcgcgcgtcgcggtgcagctggcggccggtatcggatcgctgccgcgcggacagaagatggccgcgaccgcgctggggctgaccaccttgcaggtctatcgctatgtgctgctgccaatggccttccgcatcatcctgccgccgctgacgtcggagttcctcaacaccgtcaagaacagcgcggtggccatcaccatcggcttgatcgagctgaccggcgcggcgcgcgcgatgcaggaattctccttccaggtgttcgaggcgttcagcgcggcgaccctgatgtatctcgtcatcaacatcatcgtcgtgatcggcatgcgcctgctggagcgcgcggtggcgatccctggctacatcacgggcaaatga

SEQ ID NO: 3497 - protein, 243 aa, Bradyrhizobium sp. ORS278
MNYTWNWHIFLEPNPTGAGTYFDMLLAGLKVTIVTSLSAWLIALIFGTIVGILRSLPSKLAGWIGFLYVEFFRNMPLLVQLFLWFFVLPELLPRAAGLWLKQMPNAPFFTAAVGIGLFMSARVAVQLAAGIGSLPRGQKMAATALGLTTLQVYRYVLLPMAFRIILPPLTSEFLNTVKNSAVAITIGLIELTGAARAMQEFSFQVFEAFSAATLMYLVINIIVVIGMRLLERAVAIPGYITGK

SEQ ID NO: 3498 - DNA, 702 bp, Desulfovibrio vulgaris subsp. vulgaris str. Hildenborough
  CDS (1)..(702): transl_table=11
ttgcagtacacgttcgactggaatctcgttctctcgggtgagcgtctcgactggatagtgcagggggtcatcaccacctgccagctttcaggcctttcactcgtgctcgccatgctgctgggtacgcttatcgccgtcatgcgcctttccggcgtacggcctttcgtgtggttcagcgttgcctttacggagttcttccgtaacacgccgcttctggtgcagatattcttctggtacttcggttccgacgccgtattgcccgacgccgtgaaccagtggttgtacaagcagaacttcgaattcgcggcgggggtcatctcgctcaccgtctataccgccgcgttcatcgccgaagagatacgttccggtatcttctccattccccgcacgcagcttgaagcctcacgcgcatgcggcctgtcgttcatgcaggccatgtcctacgtcgtgctgccgcaggcctttcgcatcatcgtgccgccgctcatctcgcaggcgctcaacctgttcaagaactcttcgctgtgcatgaccatcggtgtcatggaactcacctacatggcccgccagatagagtcgtacacgttccacggcttcgaggcgttcaccgtgagcacgctcatctacctgtgcatatcgctcatggtctcgcttctcatcaacctgtacaacacgcacttcctgcggacgatcaaatactag

SEQ ID NO: 3499 - protein, 233 aa, Desulfovibrio vulgaris subsp. vulgaris str. Hildenborough
MQYTFDWNLVLSGERLDWIVQGVITTCQLSGLSLVLAMLLGTLIAVMRLSGVRPFVWFSVAFTEFFRNTPLLVQIFFWYFGSDAVLPDAVNQWLYKQNFEFAAGVISLTVYTAAFIAEEIRSGIFSIPRTQLEASRACGLSFMQAMSYVVLPQAFRIIVPPLISQALNLFKNSSLCMTIGVMELTYMARQIESYTFHGFEAFTVSTLIYLCISLMVSLLINLYNTHFLRTIKY

SEQ ID NO: 3500 - DNA, 741 bp, Erwinia carotovora subsp. atroseptica SCRI1043
  CDS (1)..(741): transl_table=11
atgtcaatagattggaactggggcatatttctacaagatgcccccttcggcaacacaacctacctcgggtggattctgtccggtctgcaagtcaccgtcacattatctatctgtgcctggattatcgccttcctcattggttctttatttggaatcttacgtaccgtcccgaaccgttttctttcgagcattggtacttgctacgtcgagctatttcgcaacgtcccactgattgtccagttctttacctggtatctggtcgttcctgagcttcttcccgtcaacatcggtatgtggtttaaagccgagttagaccccaatattcagttcttcctgtcatcgatgatttgtctggggctcttcaccgcggcacgcgtttgtgagcaggtgagagcaggcatccagtcgctaccacgtgggcaaaaagctgccgggctggcgatgggtctgacgctgccacaaacttatcgttatgtgttactgcccaatgcgtatcgcgtgatcgttccgccgctgacgtcagaaatgctgaatctggtaaaaaactcggctatcgcttccacgattggtctggttgatatggcggcacaagcggggaaactgctggactattccgcccatgcgtatgaatcctttaccgctatcacgctggcgtacgttggcatcaacgccgtcattatgctgatcatgcaggtcgttgagcgaaaaactcgtttgccgggcaatatggggagcaaataa

SEQ ID NO: 3501 - protein, 246 aa, Erwinia carotovora subsp. atroseptica SCRI1043
MSIDWNWGIFLQDAPFGNTTYLGWILSGLQVTVTLSICAWIIAFLIGSLFGILRTVPNRFLSSIGTCYVELFRNVPLIVQFFTWYLVVPELLPVNIGMWFKAELDPNIQFFLSSMICLGLFTAARVCEQVRAGIQSLPRGQKAAGLAMGLTLPQTYRYVLLPNAYRVIVPPLTSEMLNLVKNSAIASTIGLVDMAAQAGKLLDYSAHAYESFTAITLAYVGINAVIMLIMQVVERKTRLPGNMGSK

SEQ ID NO: 3502 - DNA, 744 bp, Azoarcus sp. EbN1
  CDS (1)..(744): transl_table=11
atggactatcactgggactggctgtttttctttcgcgagaccgacgacggtctcaagtactacgactgggtactgtccggactgggctggacgacgctcgtttcgctggcttcgctcgcggtcgcgctggcactcggctcggccctcggggtcatgcgcacgacaccgaagcgctggctcgtcgcgatcggcgacgcgtacgtcgatgtgttccgcaacattccgctgatcgtccagcttttcatgtggttcttcgtcgtccccgaactcgtgccggacaggctcgggatgtggatgaagcaggatctgccgtatgtcgtgatcgccgtcgtcggcctcggtttgtataccgcggcgcgcatcgccgagcaggtcaaggcgggcatcaactcgctgtcgcgcgggcagcgcgacgccgggctcgcgctcggcctgaccgaatggcagacctaccgccacgtgcgcctgccgatggcctaccgcatcgtgttgccggcgatgacttcggaggcgatgaacatcttcaagaattccgccgtgacctacgccgtcggcatcctggagctgtacttccagtacaagcagatcatcgagaagacctcgcaggtgttcgagatcacgatcgtcgtgacgttggcgtatttcgcgctcgcgttcctgatgaaccgcctcctcgcattcatcgagcggcgcacccgcgtgcccggcctgatcgtcggcggcaaggggggggacgtgccatga

SEQ ID NO: 3503 - protein, 247 aa, Azoarcus sp. EbN1
MDYHWDWLFFFRETDDGLKYYDWVLSGLGWTTLVSLASLAVALALGSALGVMRTTPKRWLVAIGDAYVDVFRNIPLIVQLFMWFFVVPELVPDRLGMWMKQDLPYVVIAVVGLGLYTAARIAEQVKAGINSLSRGQRDAGLALGLTEWQTYRHVRLPMAYRIVLPAMTSEAMNIFKNSAVTYAVGILELYFQYKQIIEKTSQVFEITIVVTLAYFALAFLMNRLLAFIERRTRVPGLIVGGKGGDVP

SEQ ID NO: 3504 - DNA, 717 bp, Silicibacter pomeroyi DSS-3
  CDS (1)..(717): transl_table=11
atgaactataactggaactggggggtcctcttcgaggaggaatatctcggctggctgatctcaggcgtcgggtggaccttttcggtcgccctggtggcctgggttctagcgctggccgtcggtatccttgtcggggtcgggcgcaccctgccttcgcggcctgtcgccctgctctgcaccacctatgtcgagatattccgcaatgtgccgctgctggtgcagctcttcctgtggtatttcgtcctgcccgagatcgttcccagcgacatgggccgatggatgaagcgcgacatgcccaaccccgaatatgtgacggcggtggtcggtctggggctctataccgccagccgggtggccgaacaggtccgcgccggtatcaacgcggtgggcggtggcttgaccagcgcggcctatgccaacgggctgtcgaccgcgcagacctatcgctatgtcctgctgccgatctcgttccgtctgatcgtgccgccgatgacctcggaattcctgaccatcttcaagaattcctcgctggcgctgaccatcggtctgttggaactgaccgcgcagagccagcagatcgccgagtacacgttccagggcttcgaggcctttaccgccgccaccgtgatctatgtggtcatcgcgctctgcgcgacggtgatcgcgcagatcctcgaacggcacaccaagatccccggctttgtaggaaaggcatga

SEQ ID NO: 3505 - protein, 238 aa, Silicibacter pomeroyi DSS-3
MNYNWNWGVLFEEEYLGWLISGVGWTFSVALVAWVLALAVGILVGVGRTLPSRPVALLCTTYVEIFRNVPLLVQLFLWYFVLPEIVPSDMGRWMKRDMPNPEYVTAVVGLGLYTASRVAEQVRAGINAVGGGLTSAAYANGLSTAQTYRYVLLPISFRLIVPPMTSEFLTIFKNSSLALTIGLLELTAQSQQIAEYTFQGFEAFTAATVIYVVIALCATVIAQILERHTKIPGFVGKA

SEQ ID NO: 3506 - DNA, 747 bp, Pseudomonas fluorescens Pf-5
  CDS (1)..(747): transl_table=11
atgaattacaactgggactggggcgtgttcttcaagtccaccggcgtgggcagcgagacctatctcgactggttcatctccggcctgggctggaccatcgccatcgccgtggtggcctggatcatcgcgctgctgctgggctcgatcctgggcgtcatgcgcaccgtgccgaaccgcctggtgtcgggcatcgccaccgtgtacgtggagatcttccgcaacgtgccgctgctggtgcagctgttcatctggtacttcctggtgccggacctgctgccggagaacctccaggagtggtacaagcaggacctcaacccgaccacctcggcctacctgagcgttgtcgtgtgcctgggcctgttcaccgccgcacgggtttgcgaacaggtacgtaccggtatccaggccctgccccgtggccaggaatccgccgcacgcgccatgggcttctcgctgccgcagatctactggaacgtgctgctgccccaggcctaccggatcatcattccgccgctcacctcggaattcctcaacgtattcaagaactcctccgtggcgtcgctgatcggcttgatggaattgcttgcccagaccaagcagaccgccgagttctcggccaacctgttcgaagccttcaccctggctaccctgatctacttcaccctgaacatgagcctgatgctgctgatgcgcctggtggagaagaaagtttcggtccccggcctgatctccgtgggaggtaaataa

SEQ ID NO: 3507 - protein, 248 aa, Pseudomonas fluorescens Pf-5
MNYNWDWGVFFKSTGVGSETYLDWFISGLGWTIAIAVVAWIIALLLGSILGVMRTVPNRLVSGIATVYVEIFRNVPLLVQLFIWYFLVPDLLPENLQEWYKQDLNPTTSAYLSVVVCLGLFTAARVCEQVRTGIQALPRGQESAARAMGFSLPQIYWNVLLPQAYRIIIPPLTSEFLNVFKNSSVASLIGLMELLAQTKQTAEFSANLFEAFTLATLIYFTLNMSLMLLMRLVEKKVSVPGLISVGGK

SEQ ID NO: 3508 - DNA, 747 bp, Psychrobacter arcticus 273-4
  CDS (1)..(747): transl_table=11
atgaattatagctggaactggggtgtgctttttgagcaaactggtatcggtagcgagctgtatatccattggatgattactggtcttggctggttgttattaattggcagtattgcttgggcaatcgccatggtgattggtactatttttggaatcatgcgtactttgcctaataagactgcccgtgctatcggcaccacttatgtgacgttttttcgtaatatccctttattggtacaactattcttctggttttatatcgccccaggttggctaacgccatccatacaagagtggtggtacaaagacttgtctcctaatacctctgccatgctgtcagccagtatcggtcttggtttatttaccgctgcccgtattgtggaacaggtgcgtaccggtatcgagtcgctacctaaaggacaaatcaatgccgcctacgcgctcggctttagtatcccgcaagcctataaagaagtgctgctgccgcaagcgtttcggattatcttaccgccacttagctcggagttgaccaactgctttaaaaacgcttcggttgcgtctttagtaggggtgatggagctgattagtcagaccaaaaccattagtgaatacacccaaaacagtcttgagatttatacctatgcgaccattatttatctggtattcaatttgtctttaattgccattatggggctgattgaacgtaaattgcgtgtgcctgggctgattgcagggagtcaaaaatga

SEQ ID NO: 3509 - protein, 248 aa, Psychrobacter arcticus 273-4
MNYSWNWGVLFEQTGIGSELYIHWMITGLGWLLLIGSIAWAIAMVIGTIFGIMRTLPNKTARAIGTTYVTFFRNIPLLVQLFFWFYIAPGWLTPSIQEWWYKDLSPNTSAMLSASIGLGLFTAARIVEQVRTGIESLPKGQINAAYALGFSIPQAYKEVLLPQAFRIILPPLSSELTNCFKNASVASLVGVMELISQTKTISEYTQNSLEIYTYATIIYLVFNLSLIAIMGLIERKLRVPGLIAGSQK

SEQ ID NO: 3510 - DNA, 747 bp, Pseudomonas syringae pv. phaseolicola 1448A
  CDS (1)..(747): transl_table=11
atgaattacaactgggactggggcgtgttcttcaagtccaccggcgtcggcagcgagacctatctggactggttcatatccggcctgggctggaccatcgccattgctgtcgttgcatggatcattgccctgatactgggttcggtactgggcgtcatgcgcaccgtaccaagccgtctggtatcgggtattgccacggtatacgtggaaattttccgtaatgtgccactgctggtgcagctgttcatctggtactttctggtgcccgacctgctgccggaaaacctgcaggagtggtacaagcaggacctcaacccgactacctccgcgttcctgagcgtggtggtctgtctgggtctgtttaccgctgcacgggtctgcgaacaggtgcgtaccggcattgaagcactgccaaagggccaggaatcggccgcgcgtgcaatgggcttcaagctgccgcagatctactggaacgtgctgttgccacaggcttaccggatcatcattccaccgctcacttccgaattcctgaacgtgttcaagaactcgtcggtagcatcgctgatcggcctgatggagctgctcgcgcagaccaaacagaccgccgagttttccgccaacctgtttgaagcctttacgctcgcaaccctcatctacttcacgctgaacatgagcctgatgctgctgatgcgcatgatcgagaagaaagtcgctgtacccggactcatctcgctggggggcaaataa

SEQ ID NO: 3511 - protein, 248 aa, Pseudomonas syringae pv. phaseolicola 1448A
MNYNWDWGVFFKSTGVGSETYLDWFISGLGWTIAIAVVAWIIALILGSVLGVMRTVPSRLVSGIATVYVEIFRNVPLLVQLFIWYFLVPDLLPENLQEWYKQDLNPTTSAFLSVVVCLGLFTAARVCEQVRTGIEALPKGQESAARAMGFKLPQIYWNVLLPQAYRIIIPPLTSEFLNVFKNSSVASLIGLMELLAQTKQTAEFSANLFEAFTLATLIYFTLNMSLMLLMRMIEKKVAVPGLISLGGK

SEQ ID NO: 3512 - DNA, 729 bp, Ralstonia eutropha JMP134
  CDS (1)..(729): transl_table=11
atgaactacaactggcattggggagtattcctcgagcaggccgcccagaacgagacctacctcgactggatgatttccggcctgaaggtcacgatcgcgctcgggctttcgtcctgggtcatcgcgcttgccatcggctcggtgcttggcgtgctgcgcacggtgccgaacaagtggctgtcgggtttcgccgcggcctatgtcgagcttttccgcaacatcccgctgctggtgcagctgttcatctggtatttcgtcggccccgagctgttgccgggcggcgagacgatcaagcagatgaacccgttcacccagcagttcctggcggccatgctgtgcctgggcaccttcactgcggcgcgcgtctgcgaacaggtgcggtcgggcatcaattcgctgccgcgcggccagaagaacgccggcctggccatgggtttcacgctgccgcagacctatcgcttcgtgctgctgccgatggcgtttcgcgtcatcgtgccgccgctgacctcggaattcctgaacatcttcaagaattccgcggtggcgtcgacgatcggcctgctggaactggccgcccaagggcgccagcttgtggattacaccgcgcgcccgtatgagtcgttcatcgccgtgacggtgatgtacgcgctcatcaatatcgtcgtcatgctggtcatgcgctgggtcgaagcccgcagccgcgtacccggctttatcggcagcaagtaa

SEQ ID NO: 3513 - protein, 242 aa, Ralstonia eutropha JMP134
MNYNWHWGVFLEQAAQNETYLDWMISGLKVTIALGLSSWVIALAIGSVLGVLRTVPNKWLSGFAAAYVELFRNIPLLVQLFIWYFVGPELLPGGETIKQMNPFTQQFLAAMLCLGTFTAARVCEQVRSGINSLPRGQKNAGLAMGFTLPQTYRFVLLPMAFRVIVPPLTSEFLNIFKNSAVASTIGLLELAAQGRQLVDYTARPYESFIAVTVMYALINIVVMLVMRWVEARSRVPGFIGSK

SEQ ID NO: 3514 - DNA, 747 bp, Pseudomonas fluorescens PfO-1
  CDS (1)..(747): transl_table=11
atgaattacaactgggactggggcgtgttcttcaagtccaccggcgtgggcagcgagacctatctcgactggttcatttccggtctgggctggaccatcgccatcgccatcgtggcctggatcatcgccctgttgctcggctcgctgctgggcatcatgcgcaccgtgccgaaccgcatcgtgtcgggcatcgcgacctgctacgtcgaactgttccgcaacgtgccgctgctggttcagctgttcatctggtacttcctggtgcccgatctgctgccgccggatctgcaggaatggtacaagcaggacctgaacccgaccacttcggcctacctgagtgttgtcgtgtgcctgggcctgttcaccgccgcccgggtctgcgaacaggttcgcaccggtatccaggcactgccacgcggccaggaatccgccgcccgcgccatgggtttcaagctgccgcagatctactggaacgtgctgctgccccaagcctaccggatcatcattccgccgctcacctcggaattcctgaacgtgttcaagaactcctccgtggcgtccctgatcggtctgatggagctgctggcgcaaaccaaacagaccgccgaattctcggccaacctgtttgaagccttcaccctggcgaccctgatctatttcaccctcaacatgagcctgatgctgctgatgcgcatggtcgagaagaaagtcgccgtgcccggcctgatctccgtggggggtaaataa

SEQ ID NO: 3515 - protein, 248 aa, Pseudomonas fluorescens PfO-1
MNYNWDWGVFFKSTGVGSETYLDWFISGLGWTIAIAIVAWIIALLLGSLLGIMRTVPNRIVSGIATCYVELFRNVPLLVQLFIWYFLVPDLLPPDLQEWYKQDLNPTTSAYLSVVVCLGLFTAARVCEQVRTGIQALPRGQESAARAMGFKLPQIYWNVLLPQAYRIIIPPLTSEFLNVFKNSSVASLIGLMELLAQTKQTAEFSANLFEAFTLATLIYFTLNMSLMLLMRMVEKKVAVPGLISVGGK

SEQ ID NO: 3516 - DNA, 741 bp, Burkholderia sp. 383
  CDS (1)..(741): transl_table=11
atgtcttaccactggaactggggcatcttcctgagccccgtatcgaccggcgagccgacgacttatttcggatggctgatgtccggcttctgggtgaccatcgaagtgtcgctcgttgcctgggtcatcgcgctgatcgtcggttcgctgttcggcgtgctgcgcaccgtgccgaacaaatggctgtccgcgatcggtaccctgtacgtgtcgattttccggaacattccgctgatcgtgcagttcttcgtctggtatctcgtgataccggagctgctgccggcgtcgatcggcacctggatcaagcaactgccgcccaccacgcagttctttaccgcgtcgatcatctgtctcggcctgttcacgggcgcgcgcgtgtgcgaacaggtgcgctcggggatcaacgcgctgccgaagggccagcgtgccgccggcctcgcgatgggtttcacgcaatggcagacgtaccgctacgtgctgctgcccgttgcgtaccggatcatcgtgccgccgctcacgtcggaattcctgaacatcttcaagaactccgccgtcgcgtcgacgatcggcctgctcgacctgtccgcgcaagcgcgccagctcgtcgactacaccgcgcagacgtatgagtcgttcattgcggtgacgctcgcctacgtgatcatcaacctcgtcgtgatgtcgttcatgcgctggatcgaaggccgtacgcggctgcccggctatatcggaggcaagtga

SEQ ID NO: 3517 - protein, 246 aa, Burkholderia sp. 383
MSYHWNWGIFLSPVSTGEPTTYFGWLMSGFWVTIEVSLVAWVIALIVGSLFGVLRTVPNKWLSAIGTLYVSIFRNIPLIVQFFVWYLVIPELLPASIGTWIKQLPPTTQFFTASIICLGLFTGARVCEQVRSGINALPKGQRAAGLAMGFTQWQTYRYVLLPVAYRIIVPPLTSEFLNIFKNSAVASTIGLLDLSAQARQLVDYTAQTYESFIAVTLAYVIINLVVMSFMRWIEGRTRLPGYIGGK

SEQ ID NO: 3518 - DNA, 732 bp, Rhodospirillum rubrum ATCC 11170
  CDS (1)..(732): transl_table=11
gtgaattatacctggaactggtcgatcttctggcaactctcgcccgaaggcaacggcacctatctcgataccctgatgtcgggcctttactggacgatggcgaccgcgctggccgcctgggccctggccctggtgcttggcggcatgatcggcatcatgcggacgctgccttcaaagggcctgcagcgccttggcgcggcctatgtcgaagtgtttcgcaatatcccgctgctggtgcagcttttcctttggtacttcgtgctgccggaactcttgccgccgtcctggggattgtggctcaagcagattcccgacgcccccttctatacctcggtcgtcggcatcggctgcttcacctcggcccgcgtcgccgagcaaatccgcgccgggatcaccaccctgccgcgcggacaagccatggcctcgacggcccttggcctgaccctgccccaaacctaccgctatattctgctgccgatggccctgcgcatcgtcctgccaccgctgacctcggaattcctcaacaccgtcaagaacacctcggtcgccctgaccatcagcctgatggaactgacggcgcgaacgcgggcgatgcaggaattctcgttccaggtcttcgaagccttcgccgccgccaccctgatctacgttctgatcaacgtggtggtggtcgccgtcatgcgtgtgatcgagcatcgtgtcgcggtgcccggtttcaacgtcggcaagtaa

SEQ ID NO: 3519 - protein, 243 aa, Rhodospirillum rubrum ATCC 11170
MNYTWNWSIFWQLSPEGNGTYLDTLMSGLYWTMATALAAWALALVLGGMIGIMRTLPSKGLQRLGAAYVEVFRNIPLLVQLFLWYFVLPELLPPSWGLWLKQIPDAPFYTSVVGIGCFTSARVAEQIRAGITTLPRGQAMASTALGLTLPQTYRYILLPMALRIVLPPLTSEFLNTVKNTSVALTISLMELTARTRAMQEFSFQVFEAFAAATLIYVLINVVVVAVMRVIEHRVAVPGFNVGK

SEQ ID NO: 3520 - DNA, 741 bp, Burkholderia thailandensis E264
  CDS (1)..(741): transl_table=11
atgtcttaccactggaactggggcatcttcctgagccccgtttcgacgggcgaacccaccacctatctcggctggctgatgtcgggattctgggtgacggtcaaggtgtcgctcgccgcgtgggtgatcgcgctcgtcgtcggctcgctgttcggggtgctgcgcaccgtgccgaacaaatggctttcggcgatcgggacggtctacgtatcgatcttccgcaacattccgctcatcgtgcagttcttcgtctggtacctcgtcgtgcccgaactgctgcccgtgtcgatcggcacctggatcaagcagttgccgcccggcacgcaattcttcaccgcgtcgatcgtctgtctcggcctcttcacgggcgcgcgcgtctgcgagcaggtgcgctccggcatcaacgcgttgccgaagggccagcgcgcggccggcctcgcgatgggcttcacgcaatggcagacgtaccgctacgtgctcctgcccgtcgcgtaccggatcatcgtgccgccgctcacgtccgaattcctgaacatcttcaagaactcggccgtcgcgtcgacgatcggtctgctcgacctgtccgcgcaggcgcggcagctcgtcgactacaccgcgcagacctacgagtcgttcatcgcggtcacgctcgcgtacgtggtcatcaacctgatcgtgatggcgttcatgcgctgggtcgagagcaagtcccggctgcccggctacatcggaggcaagtga

SEQ ID NO: 3521 - protein, 246 aa, Burkholderia thailandensis E264
MSYHWNWGIFLSPVSTGEPTTYLGWLMSGFWVTVKVSLAAWVIALVVGSLFGVLRTVPNKWLSAIGTVYVSIFRNIPLIVQFFVWYLVVPELLPVSIGTWIKQLPPGTQFFTASIVCLGLFTGARVCEQVRSGINALPKGQRAAGLAMGFTQWQTYRYVLLPVAYRIIVPPLTSEFLNIFKNSAVASTIGLLDLSAQARQLVDYTAQTYESFIAVTLAYVVINLIVMAFMRWVESKSRLPGYIGGK

SEQ ID NO: 3522 - DNA, 729 bp, Ralstonia metallidurans CH34
  CDS (1)..(729): transl_table=11
atggattacgcttttcattggggagtcttcctcgagcaggcggcggcgaacgagacctacctggactggatgatttccggtctcaaggtgacgatcgcgcttggcctgtcctcgtggatcatcgctctcgccatcggatcggtgctgggcgtgctgcgcaccgtgccgaacaagtggctgtcggggatcgccgccacctacgtcgagatcttccggaacattccgctgctggtgcagcttttcatctggtacttcgtcggccccgaactgctgcccggcggcgaggcgatcaagcagatgaatccgttcacccagcagttcctggccgccatgctctgtctgggcaccttcacggccgcccgggtttgcgaacaggtgcgctcgggtatcaattcgctgccgcgcggccagaagaacgccggcctggcgatgggtttcacgctgccgcagacgtatcgctacgtgctgctgccgatggcattccgcgttatcgtgccgccgctgacttccgagtttctgaatatcttcaagaactcggccgtggcgtcgacgatcggtctgctggaactggccgcgcaggggcgccagctggtggactacaccgcgcgcccgtatgagtcgttcatcgccgtcacggtgctgtacgcgctcatcaacttcaccgtgatgctgatcatgcgctgggtggaacgtcgcacccgcgtgcccggcttcatcggtggcaagtaa

SEQ ID NO: 3523 - protein, 242 aa, Ralstonia metallidurans CH34
MDYAFHWGVFLEQAAANETYLDWMISGLKVTIALGLSSWIIALAIGSVLGVLRTVPNKWLSGIAATYVEIFRNIPLLVQLFIWYFVGPELLPGGEAIKQMNPFTQQFLAAMLCLGTFTAARVCEQVRSGINSLPRGQKNAGLAMGFTLPQTYRYVLLPMAFRVIVPPLTSEFLNIFKNSAVASTIGLLELAAQGRQLVDYTARPYESFIAVTVLYALINFTVMLIMRWVERRTRVPGFIGGK

SEQ ID NO: 3524 - DNA, 732 bp, Mesorhizobium sp. BNC1
  CDS (1)..(732): transl_table=11
atgaactataactggaactggggaattctcttccagcaatcgctggatgggtcgggtagttacttggaaatgctgttgcggggtctgcaagtaacgctagtcaccgcagtaggtgcatggcttcttgcgctggcactgggtcttgtcgtcggggtgatgcggacgatgccgtccgggcctgcccaaaggattgcgagcgcatatgtggaattgtttcgcaacattcctttccttgtacagcttttcctttggtatttcgtgttgcctgaactgctaccgcaaagcatgggcaactggttgaaagcgttgccaaattcggcgttctggacgacggtcttggggctcggcttttatatgtcggcacgagtcgcggaacagctccgtgcgggcatcagctcactgccccgtggtcagaagctggcgggtgccgcaatcgggcttacgacaccgcaaacctatcgatatgttctgctgccaatggcatttcggatcatcctgcctccactgacgtctgagttcctgaacacgatcaagaatacgtcggtggcactcacgatcggactggtagaactcactgcccgcgcccgagccatgcaggaattcacctttcagatattcgaggcgttcaccgtcgcgactgtcctttatctcactgtcaacatcctggtaacgatcgggatgcgctaccttgaacaccgggttgctgtacctggctatactgcggggcgttaa

SEQ ID NO: 3525 - protein, 243 aa, Mesorhizobium sp. BNC1
MNYNWNWGILFQQSLDGSGSYLEMLLRGLQVTLVTAVGAWLLALALGLVVGVMRTMPSGPAQRIASAYVELFRNIPFLVQLFLWYFVLPELLPQSMGNWLKALPNSAFWTTVLGLGFYMSARVAEQLRAGISSLPRGQKLAGAAIGLTTPQTYRYVLLPMAFRIILPPLTSEFLNTIKNTSVALTIGLVELTARARAMQEFTFQIFEAFTVATVLYLTVNILVTIGMRYLEHRVAVPGYTAGR

SEQ ID NO: 3526 - DNA, 717 bp, Pseudomonas aeruginosa UCBPP-PA14
  CDS (1)..(717): transl_table=11
atgttcggcgaacttctcgccccgcagtacctgcgctggttgctcgacggcttcctgctgaccctcggccttgccctgctcagttgcctgctcgccaccctgatcggcgcccccctggccatcgcccggctgtcgcgccgacgcctgctgtcctggccggcgcgcgcctacctggcgctgttccgcaataccccgctgctggtgcagctgttcttctggtacttcggcgttcccgcgctgctgccggaagcgctggtgagctggctgaacacgccgcacgagacgcccttgctcgactggccgtccttcgagttcctcgccggtgcctgggggctgaccctctatacctcggctttcgtcgccgaggagttccgcgccggcatcgcctcggtacgccccgagcagcgcgccgccggcctcgccctggggctgacccagcgccaggtatggcgcgtggtggtgctgccgcaggccctgcgcacggccctgccgccgctgctcgggcagtacatgaatgcgctgaagaactcctcgctggcgatggccatcggcctggccgagctgtcctacgcttcgcgccaggtggaaaccgagaccttcaagaccttccaggccttcggcatcgccaccctcctctacatcggcgccatcgccctgatcgaagccttcggccaggcgttgcagcagacccgccgctaccgccagggaggtgcctga

SEQ ID NO: 3527 - protein, 238 aa, Pseudomonas aeruginosa UCBPP-PA14
MFGELLAPQYLRWLLDGFLLTLGLALLSCLLATLIGAPLAIARLSRRRLLSWPARAYLALFRNTPLLVQLFFWYFGVPALLPEALVSWLNTPHETPLLDWPSFEFLAGAWGLTLYTSAFVAEEFRAGIASVRPEQRAAGLALGLTQRQVWRVVVLPQALRTALPPLLGQYMNALKNSSLAMAIGLAELSYASRQVETETFKTFQAFGIATLLYIGAIALIEAFGQALQQTRRYRQGGA

SEQ ID NO: 3528 - DNA, 747 bp, Pseudomonas aeruginosa UCBPP-PA14
  CDS (1)..(747): transl_table=11
atgaattacaactgggactggggcgtgttcttcaagtccaccgggatcggcagcgaaacctacctcgactggtacatcgccggtctgggctggaccatcgccatcgccctggtcggctggatcatcgccctggcgctgggctcgctgctcggcgtcatgcgcaccgtgccgaaccgcctggtatcggggatcgccaccgcctacgtggaaatcttccgcaacgtgccgctgctggtgcagctgttcatctggtacttcctggtacccgacctgctgcccgagggcctgcagacctggttcaagcaggacctcaacccgaccacctcggcctacctcagcgtggtcgtctgcctcggcctgttcaccgccgcgcgggtctgcgagcaggtgcgcaccggcatccaggcgctgccctacgggcagacctcggcggcccgtgcgatgggcttccgcctgccgcagatctaccgccacgtgctgctgccgcaggccttccggatcatcatcccgccgctgacctcggagttcctcaacatcttcaagaactcctcggtggcgtcgctgatcggcctgatggagctgctggcgcagaccaagcagaccgccgagttctccgccaacctgttcgaggccttcaccctggccacgctgatctacttcacgctgaacatgagcctgatgctgatcatgcgcctggtggagagaaaggtcgccgtaccgggcctgatctccgtaggaggtaaatga

SEQ ID NO: 3529 - protein, 248 aa, Pseudomonas aeruginosa UCBPP-PA14
MNYNWDWGVFFKSTGIGSETYLDWYIAGLGWTIAIALVGWIIALALGSLLGVMRTVPNRLVSGIATAYVEIFRNVPLLVQLFIWYFLVPDLLPEGLQTWFKQDLNPTTSAYLSVVVCLGLFTAARVCEQVRTGIQALPYGQTSAARAMGFRLPQIYRHVLLPQAFRIIIPPLTSEFLNIFKNSSVASLIGLMELLAQTKQTAEFSANLFEAFTLATLIYFTLNMSLMLIMRLVERKVAVPGLISVGGK

SEQ ID NO: 3530 - DNA, 738 bp, Azoarcus sp. BH72
  CDS (1)..(738): transl_table=11
atgaactaccactgggattgggcctttttctttcaggagaccgatgacggtctcaaatacatcgactgggtgatctccggcatgggctggaccaccgcggtctcactgtccgcgctggcgatcgcgctgctggtgggctcggtgctgggcgtgatgcgcaccacacccagcaagctgctggtggcgatcggcgacacctatgtcgacatcttccgcaacgtgccgctgatcgtgcagctcttcatgtggttcttcgtggtgcccgagctggtgccggaatccatcgggctgtggatgaagcaggacctgccctacttcgtcaccgcggtgatcgggctgggcctctacaccgcggcgcggatcgccgagcaggtgaagtccggcatcaacgcgctggcacgcggccagcgcttcgccgggctggcgctgggctttaccgagtggcagacctaccgctacgtgcgcctgccgatggcctaccgcatcgtgctgccggcgctgacctcggaggcgatgaacatcttcaagaactcggcggtgacctacgcggtgggcatcctcgagctttacttccagtacaagcagatcatcgagaagacctcgcaagtgctggaaatcaccatcgtggtcacgctcacctacttcgtgctggcgttcgcgatgaaccgcctgctgggcttcatcgagaagcgcacgcgggtgcctggcctcatcaccggcggcagcggaggacactga

SEQ ID NO: 3531 - protein, 245 aa, Azoarcus sp. BH72
MNYHWDWAFFFQETDDGLKYIDWVISGMGWTTAVSLSALAIALLVGSVLGVMRTTPSKLLVAIGDTYVDIFRNVPLIVQLFMWFFVVPELVPESIGLWMKQDLPYFVTAVIGLGLYTAARIAEQVKSGINALARGQRFAGLALGFTEWQTYRYVRLPMAYRIVLPALTSEAMNIFKNSAVTYAVGILELYFQYKQIIEKTSQVLEITIVVTLTYFVLAFAMNRLLGFIEKRTRVPGLITGGSGGH

SEQ ID NO: 3532 - DNA, 753 bp, Acidovorax sp. JS42
  CDS (1)..(753): transl_table=11
atgaattgggattggcaggtgttctgccaggacaccattacccaagaggtcggtcaaagctgcttcggcaagaacggcgacatcacctacctcgactggatgctgtcagcctggggctggacggtatccgtttccttgctgtcgctggccgttgcgctggtggtcggttcgctggtcggcacgctgcgcacgctggaaggccgtccatggacggtgcgcctgggcaacgcctgggtcgagctgtttcgcaacattccgctgctggtgcacatctttgtgtggtaccacgtggtgccgtcgatcttcccggccatgaaatcgctgccgggcttcgtgctggtggtgtttgcgctgggcttcttcacctcggcgcgtatcgccgagcaggtgcgctcgggcatccaggcgttgccgcgcggccagcgctatgcgggcatggcgctgggcttcaccacgttccagtactaccgctacgtgctgctgccgatggcgtttcgcatcatcatcccgccgctcaccagcgagaccatgaacgtgttcaagaactcgtcggtggcgtttgccgtttcggtggccgagctgaccatgttcgccatgcaggcgcaggaagagacttcacgcggcatcgaggtgtacctggccgtcacggcgctgtacatcatctcggcctttgccatcaaccgcatcatggcgttcatcgaaaagcgcacgcgggtgccgggcctgattgccgcaggcgggggaggacactga

SEQ ID NO: 3533 - protein, 250 aa, Acidovorax sp. JS42
MNWDWQVFCQDTITQEVGQSCFGKNGDITYLDWMLSAWGWTVSVSLLSLAVALVVGSLVGTLRTLEGRPWTVRLGNAWVELFRNIPLLVHIFVWYHVVPSIFPAMKSLPGFVLVVFALGFFTSARIAEQVRSGIQALPRGQRYAGMALGFTTFQYYRYVLLPMAFRIIIPPLTSETMNVFKNSSVAFAVSVAELTMFAMQAQEETSRGIEVYLAVTALYIISAFAINRIMAFIEKRTRVPGLIAAGGGGH

SEQ ID NO: 3534 - DNA, 723 bp, Magnetospirillum magnetotacticum MS-1
  CDS (1)..(723): transl_table=11
atgacctatcactggaactggggcgtcctgttcgagccctcgcccgagggcaccggcacctatgccgacatgctgctctcggggctcgcctggaccgtgctcaccgccctcggttcctgggccatcgccttcgggctcggctcggtgatcggggtgatgcggaccctgccctcgcgggccgccaacgcggtgggcgcggcctatgtcgagctgttccgcaacgtgccgctgctagtgcagatgttcctctggtacttcgtgctgccggaactcctgcccgcgcggatcggcgccgccgtcaagcagatgccggacgcgccgttctacacggcggttttgtgcctcggcttcttcaccgccgcgcgggtggccgagcaggtgcgggccggcatccgctccctgccgcggggccaggcgctggcgggcacggcgctcggcctcacggtggcgcagacctaccgcttcgtgctgttgcctcatgcctaccggatcatcctgcccccgctgacctcggaattcctgaacaacctcaagaacacctccgtcgccctcaccatcggtctgctggaactgacggcgcgggcgcgcgcgatgcaggaattctcgttccaggtgttcgaggccttcaccgcagccaccctgctctacctcgccgtcaacctcgtggtggtggcgggcgcgaccctgctggagcggcgcctggccgtgccgggaggccgctga

SEQ ID NO: 3535 - protein, 240 aa, Magnetospirillum magnetotacticum MS-1
MTYHWNWGVLFEPSPEGTGTYADMLLSGLAWTVLTALGSWAIAFGLGSVIGVMRTLPSRAANAVGAAYVELFRNVPLLVQMFLWYFVLPELLPARIGAAVKQMPDAPFYTAVLCLGFFTAARVAEQVRAGIRSLPRGQALAGTALGLTVAQTYRFVLLPHAYRIILPPLTSEFLNNLKNTSVALTIGLLELTARARAMQEFSFQVFEAFTAATLLYLAVNLVVVAGATLLERRLAVPGGR

SEQ ID NO: 3536 - DNA, 717 bp, Roseovarius nubinhibens ISM
  CDS (1)..(717): transl_table=11
atggattataattggaactggggtgtgctctttgaagagcaatacctcagctggctcatctccggtgtcggctggaccttttcggtcgcgctgagcgcctgggttctggcgctgctggtcggggttctcatcggtgtgggccggaccctgccgaaccgccccatcgcctttctctgcaccacctatgtcgagatcttccgcaacgtgccgctgctcgtgcagctgttcctgtggtatttcgtcgtgcccgaaatcgtgccgcaagacatgggccgctggatgaagcgcgacatgccgaaccccgagttcgtgaccgccgtcatcgggcttggcctctataccgcgagccgggtggccgaacaggtgcgcgccgggatcaacgcggtgggcaagggtctcgtcgccgcctcctatgccaacgggttttccaccgcgcagacctatcgctatgtgctgctgccaatttccttccggctcatcgtgccgccgatgacctcggagtttctcacgatcttcaagaactcgtcgctggcgctgaccatcgggctgctcgaactcacggcgcagagccaacagatcgccgaatacaccttccaaggctttgaggcctataccgccgcgacgatcatctatgtggtcatcgccctgatggcgacggtgattgcgcagatgctcgaaaaatacacccagattccgggcttcgtgggaaaggcatga

SEQ ID NO: 3537 - protein, 238 aa, Roseovarius nubinhibens ISM
MDYNWNWGVLFEEQYLSWLISGVGWTFSVALSAWVLALLVGVLIGVGRTLPNRPIAFLCTTYVEIFRNVPLLVQLFLWYFVVPEIVPQDMGRWMKRDMPNPEFVTAVIGLGLYTASRVAEQVRAGINAVGKGLVAASYANGFSTAQTYRYVLLPISFRLIVPPMTSEFLTIFKNSSLALTIGLLELTAQSQQIAEYTFQGFEAYTAATIIYVVIALMATVIAQMLEKYTQIPGFVGKA

SEQ ID NO: 3538 - DNA, 966 bp, Pseudomonas putida GB-1
  CDS (1)..(966): transl_table=11
atgtacagagaccatatcgtcaaaccgcgcgcgaccgacaacccggcattcatgggtatggccgccgccgtgatcttcgccctcgccctgctctacggcgtgggcgacggtagcctggcccggctgatgggcccgatcgtgctcgacctgcaggcaccgctgatgcgcaacatcgccgtggccggcaccctggccgtgaccctggtattgaacgtgttcatccttggccgctttccgttgcgggcccaggtgattacggtctggtgcgaactgttgctgttgttcctgctgtttttcgacaccttcgacctgtcctacagcttcatcgccaccaaggtcggtttcatgatcacgcaaggggtgttcaccaccgtctacgtgtccaccctctcgatcgccatcgccttcgtcctggcgctgctgggcgcaaccgcacggctgtcgtccaacggcttcgccatcgccattgccagcttctacacctcgttctttcgcggcgtgccgctgctgatccagatctacctgatctaccttggtatcccccagctcggctatgtagtcggtgccgtgccggcggggatcctggcgttgtcgctgtgctacggcgcctacatgacggaaatcttccgcgccggtatcagcagcatcccgcgcgggcaatgggaagcttcgcgggcgatcggcctgacccccttccaggccatgacccgggtaatcctgccgcagtcgatgcggttgatcatcccgcccaccggcaaccagttcatctccatgctcaaggacagctcgctggtgtcggtgatcggtgtgtgggagctgatgttcctcgcccgcacccagggccgtgcggagtttcgccacctggaaatgttgatcaccgccgccgtcttgtactgggtgctgtcgatcctgctcgaagccgtgcagtcgcgcctggaaaaacgtttcgaccgcgcccatcgctga

SEQ ID NO: 3539 - protein, 321 aa, Pseudomonas putida GB-1
MYRDHIVKPRATDNPAFMGMAAAVIFALALLYGVGDGSLARLMGPIVLDLQAPLMRNIAVAGTLAVTLVLNVFILGRFPLRAQVITVWCELLLLFLLFFDTFDLSYSFIATKVGFMITQGVFTTVYVSTLSIAIAFVLALLGATARLSSNGFAIAIASFYTSFFRGVPLLIQIYLIYLGIPQLGYVVGAVPAGILALSLCYGAYMTEIFRAGISSIPRGQWEASRAIGLTPFQAMTRVILPQSMRLIIPPTGNQFISMLKDSSLVSVIGVWELMFLARTQGRAEFRHLEMLITAAVLYWVLSILLEAVQSRLEKRFDRAHR

SEQ ID NO: 3540 - DNA, 660 bp, Pseudomonas putida GB-1
  CDS (1)..(660): transl_table=11
atggccagttcggcgtttgacctgttgctgcaggcgctgccgcagctggccggcggcgccgcgcagaccctggccatctcggcactgggcatcctcttcgcaacgctgggtggcgtgctgtacggcgtgctggcaaccctgggcaaccgtgccctgaacatcgccttgcaggtgtaccttgagttgtttcgcgccatcccggtgctggtctggttgtacctggtgttcttcggcctgccgatcttctttgccctgagcatccccagcttctggtgcgcggtgctggtactggccctgtggggcgcgagcgaggtgggcgaggtggtacgcggtgcgctgcgttcgctgccgcgcggccagcgcgaagccgggctgtcgatcggcctggcggggtggcagctgtatggctacgtgctgctgccgcaggcgctcaagcgcatgaccccgcccaccatcaacatctacacgcggatcatcaagaccagctcgctggcggtgctgatcggcgtggtcgaggtgatcaaggccggtcagcagatcatcgaacgcacctacgaatcggtgctgatctatggcgccttgttcctgttcttcttcatcgtttgttatccgctgtccgccgcttcgcgcgtgctggaacgccgctgggcacactcatga

SEQ ID NO: 3541 - protein, 219 aa, Pseudomonas putida GB-1
MASSAFDLLLQALPQLAGGAAQTLAISALGILFATLGGVLYGVLATLGNRALNIALQVYLELFRAIPVLVWLYLVFFGLPIFFALSIPSFWCAVLVLALWGASEVGEVVRGALRSLPRGQREAGLSIGLAGWQLYGYVLLPQALKRMTPPTINIYTRIIKTSSLAVLIGVVEVIKAGQQIIERTYESVLIYGALFLFFFIVCYPLSAASRVLERRWAHS

SEQ ID NO: 3542 - DNA, 963 bp, Pseudomonas putida GB-1
  CDS (1)..(963): transl_table=11
gtgatcaaacacaagaaagcccagtggccctggcacgggctgaccgccctggtcctggtgggcctggcgctcagcctgtacatggccacttcgatgatttcctacgagtggcgctggaaccgcgtaccgcagtactttgcctacaaggccgaggaaacacagcgcgctgccaattacggcaccgtgcaggaaatcgtcatctccggcgataacgctcgcgtcacgctgaaggacgagagcggtgccgagcaagtgctcgatgtggccaaggacagcctgcagctgagccgtggcgacgatgtcgccgaaggcgacccgattggtgtaacccggcattgggcagcgggcccgctggcctggggcctttggaccaccttgtggatctcggtggtgtccggggcactgggcctggtgatcggcctgttcgctggcttgtgccggttgtccaacaaccccaccctgcgcgacctgtcgaccgtttatgtcgaactggtgcgcggcacgccgctgctggtgcagatcttcatcttctacttcttcatcggcactgtgctcaacctgtcccgggaatttgccggggtggcggcgctggcgctgttcactggcgcctacgtggccgaaattgtccgtgccggcgtgcagtcgatcgccaagggccagaatgaagcagctcgttccctgggcctgaacgctggccagtcgatgcgccacgtcatcttgccgcaggcgttcaaacgtgtgctgccaccgctggccggccagttcatcagcctggtcaaggacacttcgctggtgtcggtaatcgccatcaccgagctgaccaagagtggccgtgaggctatcaccacctcgttctctaccttcgaaatctggttctgcgtggcaggcctgtacctgctgatcaacctgccgctgtcgcacattgccagtcggctcgagcggaggcttgcgcaaagtgattga

SEQ ID NO: 3543 - protein, 320 aa, Pseudomonas putida GB-1
MIKHKKAQWPWHGLTALVLVGLALSLYMATSMISYEWRWNRVPQYFAYKAEETQRAANYGTVQEIVISGDNARVTLKDESGAEQVLDVAKDSLQLSRGDDVAEGDPIGVTRHWAAGPLAWGLWTTLWISVVSGALGLVIGLFAGLCRLSNNPTLRDLSTVYVELVRGTPLLVQIFIFYFFIGTVLNLSREFAGVAALALFTGAYVAEIVRAGVQSIAKGQNEAARSLGLNAGQSMRHVILPQAFKRVLPPLAGQFISLVKDTSLVSVIAITELTKSGREAITTSFSTFEIWFCVAGLYLLINLPLSHIASRLERRLAQSD

SEQ ID NO: 3544 - DNA, 690 bp, Pseudomonas putida GB-1
  CDS (1)..(690): transl_table=11
atgaattgggaagtcatcttcaaatggctgccacgcctggccgaaggcgcaacccttaccctggagctggtggccattgccgtggttgccgggttgatcctggccatcccgctgggcatcgcccgctcctcacgccattggtacgtgcgtgcggtgccgttcagctacatcttcttcttccgtggtacgccactgttggtgcagctgttcctggtctactacggcctggcgcagttcgatgccgtgcgctccagctcgctgtggccgtacctgcgcgatccgttctggtgcacggtgctgaccatgaccctgcacaccgccgcgtacatcgccgagatcctgcgtggcgcgctgcagtcgatccccaagggcgagatcgaagcggcacgcgcgctgggcatgtcacggggcaaggcactgttctacatcatgctgccacgtgctgcgcgcatcggcctgccggcgtacagcaacgaagtgatcctgatgctcaaggccagcgccctggccagtaccgtgaccctgctggaactgaccggcatggcccgtaccatcattgcgcggacctacctgccggtggaaatcttcttcgcggccggggtgttctacctggtgatctcgttcttgctggtgcagggcttcaagctgctggagcgctggttgcgcgtggatgcctgccaaggccgctga

SEQ ID NO: 3545 - protein, 229 aa, Pseudomonas putida GB-1
MNWEVIFKWLPRLAEGATLTLELVAIAVVAGLILAIPLGIARSSRHWYVRAVPFSYIFFFRGTPLLVQLFLVYYGLAQFDAVRSSSLWPYLRDPFWCTVLTMTLHTAAYIAEILRGALQSIPKGEIEAARALGMSRGKALFYIMLPRAARIGLPAYSNEVILMLKASALASTVTLLELTGMARTIIARTYLPVEIFFAAGVFYLVISFLLVQGFKLLERWLRVDACQGR

SEQ ID NO: 3546 - DNA, 669 bp, Pseudomonas putida GB-1
  CDS (1)..(669): transl_table=11
atgatcgctgaaagcctgcaactcgttgtcgactccacgcccttcctgctgaagggcgcgggttatacagtgctgctcagtgtcggcggcatgttcttcggcctgctgctgggctttgccctggcgctgatgcggctgtcgaagattttgccgctgaactggctggcgcgggtctacgtgtcgttcttccgcggcacgccgctgctggtgcagctgttcgtgatctatttcggcatgccacagattggcatcgagctcgacccgatacctgcctcgctgatcggcctgtcgctgaacatggcggcctacatctgcgaaatcctgcgtgcggcgatttcctcgatcgaccggggccagtgggaagctgccgccagcatcggcatgacccgcgtccaggccatgcgccgggcgatcctgccacaggccttgcgcaccgccctgccaccgttgggtaacagcttcatttcgctggtcaaggacaccgccctggcggcgaccatccaggtgcccgagctgttccgccaggcgcagctgattaccgcacgtaccttcgaagtgttcaccatgtacgtggcagtcgccgttatctactgggtgctgtgcagcatccttgcgcacttccagaaccgcatggaagcgcgggtcaaccagcatgaccaggagcaatga

SEQ ID NO: 3547 - protein, 222 aa, Pseudomonas putida GB-1
MIAESLQLVVDSTPFLLKGAGYTVLLSVGGMFFGLLLGFALALMRLSKILPLNWLARVYVSFFRGTPLLVQLFVIYFGMPQIGIELDPIPASLIGLSLNMAAYICEILRAAISSIDRGQWEAAASIGMTRVQAMRRAILPQALRTALPPLGNSFISLVKDTALAATIQVPELFRQAQLITARTFEVFTMYVAVAVIYWVLCSILAHFQNRMEARVNQHDQEQ

SEQ ID NO: 3548 - DNA, 672 bp, Pseudomonas putida GB-1
  CDS (1)..(672): transl_table=11
atggatatggatttcagcgaaatcatccctgccctgcctgccctgtgggacggcatggtcatgaccctgcagctgatggtcatgggtgttgtcggcggtatcgcactgggcaccatcctggcactgatgcgcctgtcctcgagcaaactgctgtcacgtctggcaggtgcgtacgtcaactacttccgctcgatcccgctgctgctggtgatcacctggttctacctggccgtgccgttcgtgctgcgctggattaccggcgaagacacgccggtcggcgcgttcacctcctgcgtggtcgctttcatgatgttcgaggccgcgtacttctgcgaaatcgtccgtgccggcgtgcagtcgatctccaagggccagatgggcgccgcgcaagcgctgggcatgaactacgcgcagaccatgcgcctgatcatcctgccccaggcgttccgcaagatgaccccactgctgctgcagcagagcatcatcctgttccaggacacctcgctggtctacaccgtgggcctggtggacttcctcaactcggcacgttccaacggcgacatcatcgggcgctcacatgagttcctgatcttcgccggcgtcgtctacttcatcatcagcttctccgcttcgtggctggtcaagcgcctgcaaaaaaggatcaccgtatga

SEQ ID NO: 3549 - protein, 223 aa, Pseudomonas putida GB-1
MDMDFSEIIPALPALWDGMVMTLQLMVMGVVGGIALGTILALMRLSSSKLLSRLAGAYVNYFRSIPLLLVITWFYLAVPFVLRWITGEDTPVGAFTSCVVAFMMFEAAYFCEIVRAGVQSISKGQMGAAQALGMNYAQTMRLIILPQAFRKMTPLLLQQSIILFQDTSLVYTVGLVDFLNSARSNGDIIGRSHEFLIFAGVVYFIISFSASWLVKRLQKRITV

SEQ ID NO: 3550 - DNA, 648 bp, Pseudomonas chlororaphis
  CDS (1)..(648): transl_table=11
atggatttcagcttttgggacatcgtgcgcaacctgctgaccggcctgcaatggaccctgctgctgtcgctggtggcctttatcggcggcggtttgtacggcttgctgatcatgaccctgcgcatttccaagaaggctttccccagccatttcgcccgcctgtacatcgagctgttccagggcacgccgctgttgatgcagctgttcctggtgttcttcggcatcgccctgctgggtgtggatatctcgccctggctggcggcggccatcgccctgacgctgttcaccagcgcctacctggcggagatctggcgcggctgcgtcgactcgatccccaacggccagtgggaagcctcctccagcctggcgctcaacccttatgaacagctgcgccatgtgatcctgccacaagctctgcggatcgccgtggcgcccaccgtgggcttttcggtgcaggtggtcaaaggcaccgcggtgacctcgatcatcggcctcaccgagctgaccaagaccggcggcatgctcgccaacgccaccttcgagcccttcatggtctacggcctggtggcgctcggttacttcttgctgtgctaccccctgtccctcagtgcgcgctacctggaaaggagactgcatgcctctgcttag

SEQ ID NO: 3551 - protein, 215 aa, Pseudomonas chlororaphis
MDFSFWDIVRNLLTGLQWTLLLSLVAFIGGGLYGLLIMTLRISKKAFPSHFARLYIELFQGTPLLMQLFLVFFGIALLGVDISPWLAAAIALTLFTSAYLAEIWRGCVDSIPNGQWEASSSLALNPYEQLRHVILPQALRIAVAPTVGFSVQVVKGTAVTSIIGLTELTKTGGMLANATFEPFMVYGLVALGYFLLCYPLSLSARYLERRLHASA

SEQ ID NO: 3552 - DNA, 669 bp, Pseudomonas chlororaphis
  CDS (1)..(669): transl_table=11
atggcttatcagttcgactttctaccggtgctggaaaacaccggcctgctgctgcgcggcgccctgttcacccttgagctgaccgccatcggcgcgctgctcggggtcggcctgggcatcgtcggcgcggtggtgcgggcctggaagatccagcccttctcggccctcttcggcgtctacgtcgagctgatccgcaacaccccgttcctggtgcagctgttcttcatcttctttggcctgccgtccctggggctgcagatctccgagtggcaggcggcagtgctggcaatggtgatcaacctgggcgcctactccacggaaatcatccgcgccggcatccaggccatcccccgcggccagctggaagccgcggcggccctggccatgacccgcctggaagccttccgccacgtggtgttgctgccggcgctgggcaaggtgtggccggccctgagcagccagatcatcatcgtcatgctcggttcggcggtgtgttcgcagatcgccaccgaggagctgagcttcgccgccaacttcattcagtcgcgcaacttccgcgcctttgaaacctacgccctgaccacgctgatctacctgtgcatggccctgctgatccggcagctgctgaactgggtcgggcgccgctatatcgcgaggagcagccaatga

SEQ ID NO: 3553 - protein, 222 aa, Pseudomonas chlororaphis
MAYQFDFLPVLENTGLLLRGALFTLELTAIGALLGVGLGIVGAVVRAWKIQPFSALFGVYVELIRNTPFLVQLFFIFFGLPSLGLQISEWQAAVLAMVINLGAYSTEIIRAGIQAIPRGQLEAAAALAMTRLEAFRHVVLLPALGKVWPALSSQIIIVMLGSAVCSQIATEELSFAANFIQSRNFRAFETYALTTLIYLCMALLIRQLLNWVGRRYIARSSQ

SEQ ID NO: 3554 - DNA, 669 bp, Escherichia coli O157
  CDS (1)..(669): transl_table=11
atgtttgagtatttacccgaactgatgaaagggctgcacaccagcctgacgctaaccgttgcctcgctgattgtggcactgattctggcgttgatttttaccatcatcctgacgctgaaaacgccggtgctggtgtggctggtgcggggttatatcacgctgtttaccggtacaccgctgctggtgcagatcttcctgatttattacgggccgggtcagttcccgacgttgcaggagtatccggcactgtggcatttgttgtcagaaccgtggttatgtgcgctgattgcgttgtcgctgaacagtgcggcgtataccacgcagctgttttacggtgcaattcgtgcgatcccggaaggtcagtggcagtcctgtagcgccctgggaatgagcaaaaaagatacgctggcgatcctgctgccgtatgcctttaaacgctcgctctcttcttattccaacgaagtggtgctggtgttcaaaagtacctctctggcttacaccattacgctgatggaagtgatgggatacagccagttgttgtacggacgcacctacgatgtcatggtgttcggcgcggcagggattatttatctggtcgttaacggcctgctgacgctgatgatgcgtctgatcgagcgcaaagcgctggcgtttgagcgaaggaattaa

SEQ ID NO: 3555 - protein, 222 aa, Escherichia coli O157
MFEYLPELMKGLHTSLTLTVASLIVALILALIFTIILTLKTPVLVWLVRGYITLFTGTPLLVQIFLIYYGPGQFPTLQEYPALWHLLSEPWLCALIALSLNSAAYTTQLFYGAIRAIPEGQWQSCSALGMSKKDTLAILLPYAFKRSLSSYSNEVVLVFKSTSLAYTITLMEVMGYSQLLYGRTYDVMVFGAAGIIYLVVNGLLTLMMRLIERKALAFERRN

SEQ ID NO: 3556 - DNA, 675 bp, Escherichia coli O157
  CDS (1)..(675): transl_table=11
  misc_feature (180)..(180): w is a or t
atgtacgagtttgactggagttccattgtcccttccctgccatatctgctcgacgggctggtgatcacgctgaaaatcaccgtcacggcagtcgtgattggtattttgtggggcaccatgctggcggtgatgcgcttgtccagctttgcgcccgtagcgtggtttgccaaagcctacgtwaacgtattccgctcgattcctttagttatggttttgctgtggttttacctgatcgtgccgggttttctgcaaaacgtgctgggattatcaccaaaaaatgatatccgtttaatttcggcgatggtggcgttttcgatgtttgaagcggcctactattcagagattatccgtgccggtattcaaagtatttctcgtggtcagtcgagcgccgcgctggcgttgggaatgactcactggcagtcgatgaaactgattattctgccgcaggcgttccgcgcgatggtgccgctgctgctcactcagggcatcgtactgttccaggatacctcgctggtgtatgtgttatctctggccgatttcttccgtaccgcctcaaccattggtgagcgtgatggcacgcaggttgagatgatcctgtttgccggatttgtttatttcgttattagccttagcgcgtcgttgttggtcagctacttgaaaagaaggacagcataa

SEQ ID NO: 3557 - protein, 224 aa, Escherichia coli O157
MYEFDWSSIVPSLPYLLDGLVITLKITVTAVVIGILWGTMLAVMRLSSFAPVAWFAKAYVNVFRSIPLVMVLLWFYLIVPGFLQNVLGLSPKNDIRLISAMVAFSMFEAAYYSEIIRAGIQSISRGQSSAALALGMTHWQSMKLIILPQAFRAMVPLLLTQGIVLFQDTSLVYVLSLADFFRTASTIGERDGTQVEMILFAGFVYFVISLSASLLVSYLKRRTA

SEQ ID NO: 3558 - DNA, 660 bp, Bacillus subtilis
  CDS (1)..(660): transl_table=11
atgaatttggatttttcagcaacgatcccccaaattccttttatattagaaggcttggcaattacattaaaaattgttgttgtatctgctattatcggacttatactcggtattgtgctaagcttatgcaagatcagcacattccgcccgtttatctggatcgctgatttttatacatcagtgttccgaggcacgcctttagtgctgcagcttatgattgtctattttggccttcctcagctgctcggatttcaaattgaccagttttgggctgcggttgtcgcattgtctttgaattccgccgcttatgtatcggaaattatcagagccggaatcaatgccattgataaagggcaaaaagaagctgctgttgcactcggtgtcccgtatggaaaaatgatgaaggatctgctgctgccgcaggccttcaaaaatatatcacctgcaattgtgaatgaattaattacgttaacaaaagaatcggcgatcgtcaccgtcatcgggcttggtgatgtcatgagacgcgcatatcaagctggcgccgccacttacaattaccttgagccgctcattatcgcgggattgatttattatgtgcttgtcctgattttaacgtttatcggcaaggctgtagaaaggaagctgaaatccaatgattaa

SEQ ID NO: 3559 - protein, 219 aa, Bacillus subtilis
MNLDFSATIPQIPFILEGLAITLKIVVVSAIIGLILGIVLSLCKISTFRPFIWIADFYTSVFRGTPLVLQLMIVYFGLPQLLGFQIDQFWAAVVALSLNSAAYVSEIIRAGINAIDKGQKEAAVALGVPYGKMMKDLLLPQAFKNISPAIVNELITLTKESAIVTVIGLGDVMRRAYQAGAATYNYLEPLIIAGLIYYVLVLILTFIGKAVERKLKSND

SEQ ID NO: 3560 - DNA, 20 bp, Artificial sequence
  primer
atggattacaactgggactg

SEQ ID NO: 3561 - DNA, 21 bp, Artificial sequence
  primer
tcacttgcctcccccgatcag

SEQ ID NO: 3562 - protein, 215 aa, Artificial sequence
  consensus sequence
  Variant (2)..(4): Xaa in position 2 to 4 is any amino acid
  Variant (6)..(19): Xaa in position 6 to 19 is any amino acid
  Variant (21)..(26): Xaa in position 21 to 26 is any amino acid
  Variant (28)..(40): Xaa in position 28 to 40 is any amino acid
  Variant (41)..(41): Xaa in position 41 is any or no amino acid
  Variant (43)..(45): Xaa in position 43 to 45 is any amino acid
  Variant (48)..(49): Xaa in position 48 to 49 is any amino acid
  Variant (52)..(53): Xaa in position 52 to 53 is any amino acid
  Variant (55)..(77): Xaa in position 55 to 77 is any amino acid
  Variant (78)..(96): Xaa in position 78 to 96 is any or no amino acid
  Variant (98)..(102): Xaa in position 98 to 102 is any amino acid
  Variant (104)..(106): Xaa in position 104 to 106 is any amino acid
  Variant (108)..(109): Xaa in position 108 to 109 is any amino acid
  Variant (111)..(112): Xaa in position 111 to 112 is any amino acid
  Variant (114)..(118): Xaa in position 114 to 118 is any amino acid
  Variant (121)..(122): Xaa in position 121 to 122 is any amino acid
  Variant (124)..(125): Xaa in position 124 to 125 is any amino acid
  Variant (127)..(127): Xaa in position 127 is any amino acid
  Variant (129)..(138): Xaa in position 129 to 138 is any amino acid
  Variant (139)..(139): Xaa in position 139 is any or no amino acid
  Variant (142)..(142): Xaa in position 142 is any amino acid
  Variant (144)..(144): Xaa in position 144 is any amino acid
  Variant (146)..(148): Xaa in position 146 to 148 is any amino acid
  Variant (150)..(159): Xaa in position 150 to 159 is any amino acid
  Variant (161)..(196): Xaa in position 161 to 196 is any amino acid
  Variant (197)..(199): Xaa in position 197 to 199 is any or no amino acid
  Variant (201)..(213): Xaa in position 201 to 213 is any amino acid
  Variant (214)..(214): Xaa in position 214 is any or no amino acid
GXXXTXXXXXXXXXXXXXXGXXXXXXRXXXXXXXXXXXXXXYXXXFRXXPLXXQXXXXXXXXXXXXXXXXXXXXXXXXXXXXXXXXXXXXXXXXXXLXXXXXAXXXEXXRXXIXXXXXGQXXAXXAXGXXXXXXXXXXXLPXAXRXXXPXXXXXXXXXXKXXXXXXXXXXXXXXXXXXXXXXXXXXXXXXXXXXXXXXXYXXXXXXXXXXXXXXE

SEQ ID NO: 3563 - protein, 22 aa, Artificial sequence
  protein pattern
  Variant (2)..(3): Xaa in position 2 to 3 is any amino acid
  Variant (4)..(4): Xaa in position 4 is Lys or Arg
  Variant (5)..(5): Xaa in position 5 is Ala, Gly, Ser or Thr
  Variant (6)..(6): Xaa in position 6 is Ala, Cys or Gly
  Variant (7)..(7): Xaa in position 7 is Phe, Ile, Leu, Met or Val
  Variant (8)..(8): Xaa in position 8 is any amino acid
  Variant (9)..(9): Xaa in position 9 is Ala, Gly, Ser or Thr
  Variant (10)..(12): Xaa in position 10 to 12 is any amino acid
  Variant (15)..(16): Xaa in position 15 to 16 is any amino acid
  Variant (18)..(18): Xaa in position 18 is Ala, Cys, Gly or Ser
  Variant (19)..(19): Xaa in position 19 is any amino acid
  Variant (20)..(20): Xaa in position 20 is Ala, Ser or Val
  Variant (21)..(21): Xaa in position 21 is Ile, Leu, Met or Val
  Variant (22)..(22): Xaa in position 22 is Ala, Gly or Asn
EXXXXXXXXXXXGQXXAXXXXX

SEQ ID NO: 3564 - DNA, 399 bp, Azotobacter vinelandii
  CDS (1)..(399): transl_table=11
atgactgaactcgaacaggacgacccggttccccaaggcgatctggccctgcagatcaccgcgctgccccgcgacgccaacggattcggcgatatctacggcggctggctggtcgcccagatggacctggccggcaccgccacggccagccggctggccggcgggcgggtggccacggtggcgatcgaccgcatggccttcatggtgccggtggcggtcggcgcccagctctccttctataccaagcccctgcagcagggccgcagctcgatccagatgctggtcgaggtatggagcgacgacccgctgtccagcgaatggcgcaaggtgaccgaggcggtgttcgtcttcgtcgccatcgacggcagcggccgcacccgcgcggtgccgcgccgctag

SEQ ID NO: 3565 - protein, 132 aa, Azotobacter vinelandii
MTELEQDDPVPQGDLALQITALPRDANGFGDIYGGWLVAQMDLAGTATASRLAGGRVATVAIDRMAFMVPVAVGAQLSFYTKPLQQGRSSIQMLVEVWSDDPLSSEWRKVTEAVFVFVAIDGSGRTRAVPRR

SEQ ID NO: 3566 - DNA, 405 bp, Pseudomonas aeruginosa
  CDS (1)..(405): transl_table=11
atgatcgagcttgaacaagaagaccccattccccagggagacctggccttgcagattaccgcgctgccgcgcgaaaccaacggtttcggcgatatctacggcggttggctggtatcccagatggacctggcgggaaccgccatggccagcaagatcgccggcggccgtatcgccaccgtcgccatcgaccgcatggccttcatggtgccggtcgcggtaggtgcccagctttccttctatacccagaccctggaagtcggccgcagctcgatccgcatgctggtcgaggtgtggagcgacgacccgctgtccagcgaatggcgcaaagtcaccgaggcggtgttcgtgttcgtcgccatcgatggcagcgggcgcacccgcccggtcccgccacgccggggctag

SEQ ID NO: 3567 - protein, 134 aa, Pseudomonas aeruginosa
MIELEQEDPIPQGDLALQITALPRETNGFGDIYGGWLVSQMDLAGTAMASKIAGGRIATVAIDRMAFMVPVAVGAQLSFYTQTLEVGRSSIRMLVEVWSDDPLSSEWRKVTEAVFVFVAIDGSGRTRPVPPRRG

SEQ ID NO: 3568 - DNA, 366 bp, Klebsiella pneumoniae subsp. pneumoniae MGH 78578
  CDS (1)..(366): transl_table=11
atggttttacgcaccctggcaatgccggcggataccaatgccaacggggatatttttggcggctggctgatgtcgcagatggatattggcggcgccattatggccaaagagatcgcccagggtcgcgtggtgaccgtgcgggtggatgggatgacctttttacgcccggtcgccgttggcgacgtggtgtgctgctacgcccgctgcgtgaagcgcggcaacacctcggtgacaatcaatatcgaagtgtgggtgaaaaaagtttcttcagaaccgattggccagcgctacaaggcgacggaagcgctgtttatctacgttgccgttgataatcagggaaaaccacgtcctctgccagcggaataa

SEQ ID NO: 3569 - protein, 121 aa, Klebsiella pneumoniae subsp. pneumoniae MGH 78578
MVLRTLAMPADTNANGDIFGGWLMSQMDIGGAIMAKEIAQGRVVTVRVDGMTFLRPVAVGDVVCCYARCVKRGNTSVTINIEVWVKKVSSEPIGQRYKATEALFIYVAVDNQGKPRPLPAE

SEQ ID NO: 3570 - DNA, 399 bp, Xanthobacter autotrophicus Py2
  CDS (1)..(399): transl_table=11
atgctcgataaagaggcccatatgccggacgaggtcccggtgatccggaccatcgccatgccggcggacaccaatcccaacggcgatattttcggcggctggctgatgtcgcagatggaccttgccgctggcaacgtggcggcgcggcgctcgcgcgggcgcgcggcgacggtggcggtggaggccatgagcttcctgtcgccggtggcagtgggcgacgaggtgagcctgttcgcccgcgtcgccaagctgggccgcacctccatgcgcatcgaggtggaggcctggcggcgcgcccgcgccagcgagcagaccaccaaggtgacggaagccgtcttcaccttcgtcgccatcgacgaggagggccgcccccgccccatcccgcaggacgagggctga

SEQ ID NO: 3571 - protein, 132 aa, Xanthobacter autotrophicus Py2
MLDKEAHMPDEVPVIRTIAMPADTNPNGDIFGGWLMSQMDLAAGNVAARRSRGRAATVAVEAMSFLSPVAVGDEVSLFARVAKLGRTSMRIEVEAWRRARASEQTTKVTEAVFTFVAIDEEGRPRPIPQDEG

SEQ ID NO: 3572 - DNA, 396 bp, Mesorhizobium loti MAFF303099
  CDS (1)..(396): transl_table=11
atggtgcactacgcggacggacggccgatcggagacctgacgctgcgcacgctcgccatgccttcggacgccaacgccgccggcgacattttcggcggctgggtgatggcgcagatggaccttgcctgcggcatccgcgccgccgagcgcgccaggggccgcgtggtgacggcggcggtcaaggagatgtccttcgccaagccgatgaagatcggcgacacgctgtgcatctacacccatgtcgaacgcgtcggccgcacctcgatgacgctcaaggtcgaagcctgggcgcagcgctatctctccgatttgatggaaaaggtcacccacgccgatttcgtcatggtggcgctggacggcgagggcaagccgaaggccgttccggccgagggttga

SEQ ID NO: 3573 - protein, 131 aa, Mesorhizobium loti MAFF303099
MVHYADGRPIGDLTLRTLAMPSDANAAGDIFGGWVMAQMDLACGIRAAERARGRVVTAAVKEMSFAKPMKIGDTLCIYTHVERVGRTSMTLKVEAWAQRYLSDLMEKVTHADFVMVALDGEGKPKAVPAEG

SEQ ID NO: 3574 - DNA, 441 bp, Vibrio cholerae O1 biovar eltor str. N16961
  CDS (1)..(441): transl_table=11
ttgtttgctgtggatccccaaatgaatcaaaccgtaaattcacctaaaggccagcttctgctgcgcacactcgcaatgcctgccgatacgaatgcaaatggcgatatttttggcggctggatcatgtctcaactcgacttagcgggcggtattctcgctaaagagatctcctgtggacgcatcgtgactgtttctgtttccagtatcacttttaaaaaacctgtcaaagtcggtgacgtggtatgttgctacggcgaatgcaccaagattggccgcacatcgatgtcgatcaatctcgaagtgtgggttaagccggtcaaagaagagggggtcggcgaacgttttcaagtgtgtgaagccacctttaactatgtggcgattgatgcaaatggccgccccagagcaataagcctcagcaatggatcacagaaatcatcttga

SEQ ID NO: 3575 - protein, 146 aa, Vibrio cholerae O1 biovar eltor str. N16961
MFAVDPQMNQTVNSPKGQLLLRTLAMPADTNANGDIFGGWIMSQLDLAGGILAKEISCGRIVTVSVSSITFKKPVKVGDVVCCYGECTKIGRTSMSINLEVWVKPVKEEGVGERFQVCEATFNYVAIDANGRPRAISLSNGSQKSS

SEQ ID NO: 3576 - DNA, 474 bp, Bacillus halodurans C-125
  CDS (1)..(474): transl_table=11
atgatccaatcttatccggttgaacgatcaagaacgatacaaacgaggctcgtattaccaccagatacgaatcatctagggacgatttttggtgggaaagttctcgcatatatcgatgaaatagctgctttaacagcgatgaagcatgctaattctgcggtggttactgcttcaatcgattctgttgactttaagtcgtcggctactgtgggtgatgcccttgaacttgaagggtttgtcacacatacaggaagaacgtcgatggaagtatatgtgagggttcattcgaacaacttattgacaggagaacggacgttaacaaccgagtcgtttctaacgatggtcgccgttgacgaatcaggtaaaccaaaaccagtgccccaggtcgagcctcagaccgaagaggaaaaacggctatacgaaaccgcgcctgcacgaaaagaaaaccggaaaaaacgagcagccttaagataa

SEQ ID NO: 3577 - protein, 157 aa, Bacillus halodurans C-125
MIQSYPVERSRTIQTRLVLPPDTNHLGTIFGGKVLAYIDEIAALTAMKHANSAVVTASIDSVDFKSSATVGDALELEGFVTHTGRTSMEVYVRVHSNNLLTGERTLTTESFLTMVAVDESGKPKPVPQVEPQTEEEKRLYETAPARKENRKKRAALR

SEQ ID NO: 3578 - DNA, 444 bp, Pasteurella multocida subsp. multocida str. Pm70
  CDS (1)..(444): transl_table=11
atgacaactcacgttgatacttcaaaaagctgtgatactcgaggcacattattactacgtactctcgcaatgccttctgatacgaatgccaatggtgatatttttggtggctggattatgtcacaaatggatatgggcggtgcgattttagcgaaagaaatcgcacatggtcgcgtcgtcactattgcagtcgacagcatgacctttatccgtcctattgcggtaggcgatgtggtttgctgttacggtaaatgtttaagtgtgggacgttcatctattaaaattaaagtagaagtgtgggtgaaaaaagtcgccagtgaaccgattggggaacgctattgtgtgactgaggcagtctttacgtttgttgctgtcgataaagaaggacgacctcgcgcggtaccacgagaaaataacccagaattaactcaagcactctcttaa

SEQ ID NO: 3579 - protein, 147 aa, Pasteurella multocida subsp. multocida str. Pm70
MTTHVDTSKSCDTRGTLLLRTLAMPSDTNANGDIFGGWIMSQMDMGGAILAKEIAHGRVVTIAVDSMTFIRPIAVGDVVCCYGKCLSVGRSSIKIKVEVWVKKVASEPIGERYCVTEAVFTFVAVDKEGRPRAVPRENNPELTQALS

SEQ ID NO: 3580 - DNA, 447 bp, Neisseria meningitidis MC58
  CDS (1)..(447): transl_table=11
atgcagcacgaagaaggcaaccgccaacgccctcaaggcgaactgctcctgcgtaccgtcgctatgccgcgcgataccaatcccaaccaagacattttcggcggctggattatgtcgcagatggatttgggcggcggcatattggcggcggaaatcgcgcggggacgcatcgttaccgtcgccgttcaggaaatgaacttcatccgcccggtcaaggtcggcaacgtcgtctgctgctacgggcattgcgtccgcgtgggcaacacttccctccagcttaaagtcgacgtctgggtgaaaactttgatgaacgattgcgttaccgaagaccgctacctcgtaaccgaagccgtgttcacttatgttgccatcgatgcggaaggcaatccgcgcccgattccgaaagaaggcaaccccaaattggcgggcttattgcctactccgtaa

SEQ ID NO: 3581 - protein, 148 aa, Neisseria meningitidis MC58
MQHEEGNRQRPQGELLLRTVAMPRDTNPNQDIFGGWIMSQMDLGGGILAAEIARGRIVTVAVQEMNFIRPVKVGNVVCCYGHCVRVGNTSLQLKVDVWVKTLMNDCVTEDRYLVTEAVFTYVAIDAEGNPRPIPKEGNPKLAGLLPTP

SEQ ID NO: 3582 - DNA, 447 bp, Neisseria meningitidis Z2491
  CDS (1)..(447): transl_table=11
atgcagcacgaagaaggcaaccgccaacgccctcaaggcgaactgctcctgcgtaccgtcgctatgccgcgcgataccaatcccaaccaagacattttcggcggctggattatgtcgcagatggatttgggcggcggcatattggcggcggaaatcgcgcggggacgcatcgttaccgtcgccgttcaggaaatgaacttcatccgcccggtcaaggtcggcaacgtcgtctgctgctacgggcattgcgtccgcgtgggcaacacttccctccagcttaaagtcgaagtctgggtgaaaactttgatgaacgattgcgttaccgaagaccgccacctcgtaaccgaagccgtgttcacttatgtcgccatcgatgcggaaggcaatccgcgcccgattccgaaagaaggcaaccccatattggcgggcttattgcctactccgtaa

SEQ ID NO: 3583 - protein, 148 aa, Neisseria meningitidis Z2491
MQHEEGNRQRPQGELLLRTVAMPRDTNPNQDIFGGWIMSQMDLGGGILAAEIARGRIVTVAVQEMNFIRPVKVGNVVCCYGHCVRVGNTSLQLKVEVWVKTLMNDCVTEDRHLVTEAVFTYVAIDAEGNPRPIPKEGNPILAGLLPTP

SEQ ID NO: 3584 - DNA, 399 bp, Escherichia coli O157:H7 EDL933
  CDS (1)..(399): transl_table=11
atgtctacaacacataacgtccctcagggcgatcttgttttacgtactttagccatgcccgccgataccaatgccaatggtgacatctttggtggttggttaatgtcacaaatggatattggcggcgctattctggcaaaagaaattgcccacggtcgcgtagtgactgtgcgggttgaaggaatgactttcttacggccggttgcggtcggcgatgtggtgtgctgctatgcacgctgtgtccagaaagggacgacatcggtcagcattaatattgaagtgtgggtgaaaaaagtagcgtctgaaccaatcgggcaacgctataaagcgacagacgcattatttaagtatgtcgcggttgatcctgaaggaaaacctcgcgccttacctgttgagtaa

SEQ ID NO: 3585 - protein, 132 aa, Escherichia coli O157:H7 EDL933
MSTTHNVPQGDLVLRTLAMPADTNANGDIFGGWLMSQMDIGGAILAKEIAHGRVVTVRVEGMTFLRPVAVGDVVCCYARCVQKGTTSVSINIEVWVKKVASEPIGQRYKATDALFKYVAVDPEGKPRALPVE

SEQ ID NO: 3586 - DNA, 669 bp, Deinococcus radiodurans R1
  CDS (1)..(669): transl_table=11
gtggctgtgcgggtatgctgccatgcgccgccgggggtgtcaaatcatttgtttactttttgcgccggcaacttgacaacaggctttagtggtgggtcggtcacttcgcaaaagggcggcgcggcaggtctacctacgtgttcgcggaggtgcccgcgcgggtgtctgcccggcagtgaccccctgccccggcacccgcgccggtatgctccgccggtgactcctcccgtgaccccgcccaccacgcccgcgccgcgcagccgcgcccgtatgctcgaactggtgtttcccaaagacaccaactaccacggcaccgcgttcgggggctgggtgctggcgctgatggacaaggccgccagtgtcgccgccgtccggcacgccgggggcaacgtggtcaccgcccgcatggacggcgtggactttcacgtgcccatccgggtgggcgacgccgtggcgctcgacgcccgcgtcatccgggtggggcgctcgtccatgaccatccgggtggacgtgtaccgcgaaaacatggcgtcgggcgagcagcaactcgccaccggggggctctttaccttcgtggcgctcggcgaggacggcaagccccgcccggtgcctccccttccagaaggcagcaccgacagcgagcagcccgactacgaggcgcggccctga

SEQ ID NO: 3587 - protein, 222 aa, Deinococcus radiodurans R1
MAVRVCCHAPPGVSNHLFTFCAGNLTTGFSGGSVTSQKGGAAGLPTCSRRCPRGCLPGSDPLPRHPRRYAPPVTPPVTPPTTPAPRSRARMLELVFPKDTNYHGTAFGGWVLALMDKAASVAAVRHAGGNVVTARMDGVDFHVPIRVGDAVALDARVIRVGRSSMTIRVDVYRENMASGEQQLATGGLFTFVALGEDGKPRPVPPLPEGSTDSEQPDYEARP

SEQ ID NO: 3588 - DNA, 453 bp, Agrobacterium tumefaciens str. C58
  CDS (1)..(453): transl_table=11
ttggctgaaaggacggggttgtttaagtccggcagcgggaggtttgtgaaaggaattcgagacatggaccagcaaccgcccgccgatatggaactcacgctcagaacgcttgccatgcccgccgatgccaatccggccggcgatattttcggcggttgggtcatgtcgcagatggaccttgccgctttcgtccgcgccaatgatgtggccggcggccgcaccgtgaccgtggcagtccatgaaatagtcttcaagaagccggtcaagatcggcgatacgctgtgtgtctacacgcggatcgaaaagatcgggcgcacgtccgtcacgctgaagatcgaggcatggacccgcaggcactatcaggattcacgcgacaaggtcaccgaagccgtcttcatcatggttgccgtggatgagaatggcgagccacgcccggtgcgcaaggaggcgtga

SEQ ID NO: 3589 - protein, 150 aa, Agrobacterium tumefaciens str. C58
MAERTGLFKSGSGRFVKGIRDMDQQPPADMELTLRTLAMPADANPAGDIFGGWVMSQMDLAAFVRANDVAGGRTVTVAVHEIVFKKPVKIGDTLCVYTRIEKIGRTSVTLKIEAWTRRHYQDSRDKVTEAVFIMVAVDENGEPRPVRKEA

SEQ ID NO: 3590 - DNA, 390 bp, Sinorhizobium meliloti 1021
  CDS (1)..(390): transl_table=11
atgaacgcagcaagcaagccgaatggcgaactgaccttgcgcacgctcgcaatgcccggcgacgccaatgccgccggcgacatcttcggcggctgggtcatggcgcagatggacctttcctgcggtatccgggccgccgagcgcgccaggggccgcgtcgtgactgcggcggtaaaggaaatggccttcgccatgccggtgaagatcggcgacacactctgcatctataccgacatcgtcacggtcgggcggacgtcgatgacgctcaaggtcgaggcatgggcgcagcgttacctctcgcatgtcatggaaaaggtcaccgacgcgatcttcgtgatggtggcgctcgactcgaccggcaagccgacgccggttccgtccgagcaatag

SEQ ID NO: 3591 - protein, 129 aa, Sinorhizobium meliloti 1021
MNAASKPNGELTLRTLAMPGDANAAGDIFGGWVMAQMDLSCGIRAAERARGRVVTAAVKEMAFAMPVKIGDTLCIYTDIVTVGRTSMTLKVEAWAQRYLSHVMEKVTDAIFVMVALDSTGKPTPVPSEQ

SEQ ID NO: 3592 - DNA, 459 bp, Caulobacter crescentus CB15
  CDS (1)..(459): transl_table=11
atgtcgacgccgccgggcactagcttggacggcgacgccatcgcggcgaacgcgcgggccgagacgctcgccgaggcgtgggaaaaggccgagtggccgcaggaggcgccggtgctgcgcgccatcgccatgccgtccgacaccaatcccgagggcgacatcttcggcggttggcttttgtcgcagatggacctggccgccgcctcgatcgccttccatcgcgcggccggccgctgcgccaccatcgcgatcgacggcatgacctttctcagcccggtgttcgtcggcgacgaggtcagtctgttcgccaaggtggtccataccggccgcacctcgctgaaggtcgccgtcgaggcctggcgccgccggcgggacggcgaacaagctaacaaggtgaccgagggcgtcttcaccttcgtggccatcgacgagaaccgaaagtctcgccccctgccatag

SEQ ID NO: 3593 - protein, 152 aa, Caulobacter crescentus CB15
MSTPPGTSLDGDAIAANARAETLAEAWEKAEWPQEAPVLRAIAMPSDTNPEGDIFGGWLLSQMDLAAASIAFHRAAGRCATIAIDGMTFLSPVFVGDEVSLFAKVVHTGRTSLKVAVEAWRRRRDGEQANKVTEGVFTFVAIDENRKSRPLP

SEQ ID NO: 3594 - DNA, 393 bp, Agrobacterium tumefaciens str. C58
  CDS (1)..(393): transl_table=11
atgaccgacctgcccatcaaaccgaccggcgagctgacgctcaggacactcgccatgccggccgacgccaatccggccggtgatattttcggtggctgggtcatgtcccagatggacttggcaagcggcatccgcgctgcggaacgctcacgctgtcgcgtcgtcacggcggcggtcaaggaaatggccttcgaactgccggtgaagatcggcgacacgctgtcgatctatacagatatcgcccgtctcggccgcacctcgatcacgctgacggtcgaagcctgggcgcagcggtcgcgttacgacaagctggaaaaggtcaccgccggtaccttcatcatggtggcgatggacgaaaacgggcagcctacgcccattcctgcggcggagtga

SEQ ID NO: 3595 - protein, 130 aa, Agrobacterium tumefaciens str. C58
MTDLPIKPTGELTLRTLAMPADANPAGDIFGGWVMSQMDLASGIRAAERSRCRVVTAAVKEMAFELPVKIGDTLSIYTDIARLGRTSITLTVEAWAQRSRYDKLEKVTAGTFIMVAMDENGQPTPIPAAE

SEQ ID NO: 3596 - DNA, 477 bp, Agrobacterium tumefaciens str. C58
  CDS (1)..(477): transl_table=11
atggtggccataccggaaggtgaggacgccgcgagctatgtcctgcccgaactcctcactgaagagacacctgatccaagcgatgccgtcaccatggtcgagatcgtctttccggatcaggcaaacagcgccggccggatgttcgggggcgaagctattgcctatatgaccaaagccgcttttgttgcagcgtcgcgctactgcggcaagctggtggtgctggcctcatccgagcgcatcgattttgcaagggcaatcgagatcggcgaaattgtcgaggcgcaggcacacgtcgaacgcgtgggccgcagctccatgtcgatccagacaaaactctggtccgaaaatcttctgacaggcgagagacacatcacggccaccggacacttcaccatggtggcggtcgacaaggaccaccggccggctaccattcgcgacccggccgaagccttttccctggaaaagggaggagcataa

SEQ ID NO: 3597 - protein, 158 aa, Agrobacterium tumefaciens str. C58
MVAIPEGEDAASYVLPELLTEETPDPSDAVTMVEIVFPDQANSAGRMFGGEAIAYMTKAAFVAASRYCGKLVVLASSERIDFARAIEIGEIVEAQAHVERVGRSSMSIQTKLWSENLLTGERHITATGHFTMVAVDKDHRPATIRDPAEAFSLEKGGA

SEQ ID NO: 3598 - DNA, 390 bp, Agrobacterium tumefaciens str. C58
  CDS (1)..(390): transl_table=11
atggaccagcaaccgcccgccgatatggaactcacgctcagaacgcttgccatgcccgccgatgccaatccggccggcgatattttcggcggttgggtcatgtcgcagatggaccttgccgctttcgtccgcgccaatgatgtggccggcggccgcaccgtgaccgtggcagtccatgaaatagtcttcaagaagccggtcaagatcggcgatacgctgtgtgtctacacgcggatcgaaaagatcgggcgcacgtccgtcacgctgaagatcgaggcatggacccgcaggcactatcaggattcacgcgacaaggtcaccgaagccgtcttcatcatggttgccgtggatgagaatggcgagccacgcccggtgcgcaaggaggcgtga

SEQ ID NO: 3599 - protein, 129 aa, Agrobacterium tumefaciens str. C58
MDQQPPADMELTLRTLAMPADANPAGDIFGGWVMSQMDLAAFVRANDVAGGRTVTVAVHEIVFKKPVKIGDTLCVYTRIEKIGRTSVTLKIEAWTRRHYQDSRDKVTEAVFIMVAVDENGEPRPVRKEA

SEQ ID NO: 3600 - DNA, 399 bp, Brucella melitensis 16M
  CDS (1)..(399): transl_table=11
atgactttgatgaatactgaaaacgagccgacagggatgctgaccatccgcgtttccgccatgccgaaggatgccaattcagcctatgatattttcggcggctgggtgatggcacagatggatatggctgctggaatccgttctgccgagcgcgccagggggcgcacggtgacagcagcggtgcgcgaaatggcattcgcccgaccagtgaagattggtgacacgctctgtgtttatacggatataacgcgggtgggccgtacgtccatcacgctccgggttgaagcgtgggcaaagcgctatctcagcgataagcgtgacctcgtcacgcatgctgaattcatcatggttgcgctggatgcggacggcaagcctaccccggcaccgcaggaagattag

SEQ ID NO: 3601 - protein, 132 aa, Brucella melitensis 16M
MTLMNTENEPTGMLTIRVSAMPKDANSAYDIFGGWVMAQMDMAAGIRSAERARGRTVTAAVREMAFARPVKIGDTLCVYTDITRVGRTSITLRVEAWAKRYLSDKRDLVTHAEFIMVALDADGKPTPAPQED

SEQ ID NO: 3602 - DNA, 594 bp, Streptomyces coelicolor A3(2)
  CDS (1)..(594): transl_table=11
gtgtggccccggcataaggtggaggccatgacagaccaggcagaacaggcctcggccgcgcagtcgacggccccggagatcccgggcaagccgacctcggcgtcccgcaccaccctcagtcacatcatgacgcacagcgacaccaaccttctgggcacggtgcacggcggtgtgatcatgaagctcgtcgacgacgcggcgggcgccgtggccggacggcactccggcggacccgccgtcaccgcgtccatggacgagatggcgttcctcgaaccggtccgcgtcggcgacctcgtccatgtgaaggcccaggtcaactggaccggccgcagttccatggaggtgggcgtccgggtcctggccgagcgctggaacgagtccaccccggccacccaggtcggctcggcctacctggtcttcgcggccgtggacgccgacggcaagccgcgcacggtgccgccggtgctgcccgagaccgagaaggacaagcggcgctaccaggaggcccagatccgccgcacccaccgcctggcccgccgccgggcgatcatggaactgcgggagcggcgggtggcggaggggtacgaggactga

SEQ ID NO: 3603 - protein, 197 aa, Streptomyces coelicolor A3(2)
MWPRHKVEAMTDQAEQASAAQSTAPEIPGKPTSASRTTLSHIMTHSDTNLLGTVHGGVIMKLVDDAAGAVAGRHSGGPAVTASMDEMAFLEPVRVGDLVHVKAQVNWTGRSSMEVGVRVLAERWNESTPATQVGSAYLVFAAVDADGKPRTVPPVLPETEKDKRRYQEAQIRRTHRLARRRAIMELRERRVAEGYED

SEQ ID NO: 3604 - DNA, 492 bp, Xanthomonas campestris pv. campestris str. ATCC 33913
  CDS (1)..(492): transl_table=11
gtgattggccaacaacgtgatctgacatttcgtttcctggccgagcccagcgacgtcaacttcggcggcaaggtgcacggcggcgtggtcatgaagtggatcgaccaggtgggttttgcagccgccagtggctggagcgggcattactgcgtcaccgtggcggtgggcggcatccgcttcgtggcgccggtgcgcattggcgatctggtcgcggtgtcggccaagctggtctacaccggccgcagcagcatgcatttcgccatcgacgtacgcgcgcgcagcccgatgggcggcgactcgcgtttgtgcacccactgcatcatcgtgttcgtggcgatggatccagacggcgtcagcccggtggaagtgccgtcatggcggccgtccacaccggaagaccaacgcctggccgaatacgcgctcaaggtgatggagctgagcaagggcatcgaagacacgatggcgcattaccaggctgatagcggacgctga

SEQ ID NO: 3605 - protein, 163 aa, Xanthomonas campestris pv. campestris str. ATCC 33913
MIGQQRDLTFRFLAEPSDVNFGGKVHGGVVMKWIDQVGFAAASGWSGHYCVTVAVGGIRFVAPVRIGDLVAVSAKLVYTGRSSMHFAIDVRARSPMGGDSRLCTHCIIVFVAMDPDGVSPVEVPSWRPSTPEDQRLAEYALKVMELSKGIEDTMAHYQADSGR

SEQ ID NO: 3606 - DNA, 402 bp, Xanthomonas axonopodis pv. citri str. 306
  CDS (1)..(402): transl_table=11
atgaccagttccacgcctgttgcacccaccgaagcccgcatggccgagatcgtgtttcccaatcacaccaatcacctgggcacgctgttcggtgggcaggcgctggcgtggatggacaaggccgcgtttctcgccgcctcgcgctatgcgcgccgcaccgtggtgacggcgcgttcggatcaggtggatttcaagctgccgatccgccagggccagatggtggaaaccattgcccgcgtggtgttggtggggcgtagctcgatcacggtggaagtggaattgatcgccgaagacttgctcagcggcgcgcgcgagctgtgcacgcgcgggcagttcgtgatgattgcgctcgatgccgatggcaagccgacggcggtgccgccgttgccagcggcgcactaa

SEQ ID NO: 3607 - protein, 133 aa, Xanthomonas axonopodis pv. citri str. 306
MTSSTPVAPTEARMAEIVFPNHTNHLGTLFGGQALAWMDKAAFLAASRYARRTVVTARSDQVDFKLPIRQGQMVETIARVVLVGRSSITVEVELIAEDLLSGARELCTRGQFVMIALDADGKPTAVPPLPAAH

SEQ ID NO: 3608 - DNA, 399 bp, Pseudomonas putida KT2440
  CDS (1)..(399): transl_table=11
atgattgagctcgaacaagaagatccaatcccgcaaggcgacctggccttgcaaatcaccgcattgccgcgagaaaccaacgggtttggcgatattttcggcggttggctggttgcgcagatggacctggcaggcacggccatggccagccgtgtcgccggcggccgcgtagccaccgtcgccatcgaccgcatggccttcctggtacccgtcgcggtcggcgcacagctgtctttctatacccagaccctggaaatcggccgcagctcgatccagatgatggtcgaggtgtggagcgacgacccgctgtccagcgaatggcgcaaggtcaccgaagcggtattcgtcttcgtcgccatcgacggcagtggtcgtacccgctcggtgcctcgtcgctga

SEQ ID NO: 3609 - protein, 132 aa, Pseudomonas putida KT2440
MIELEQEDPIPQGDLALQITALPRETNGFGDIFGGWLVAQMDLAGTAMASRVAGGRVATVAIDRMAFLVPVAVGAQLSFYTQTLEIGRSSIQMMVEVWSDDPLSSEWRKVTEAVFVFVAIDGSGRTRSVPRR

SEQ ID NO: 3610 - DNA, 486 bp, Pseudomonas putida KT2440
  CDS (1)..(486): transl_table=11
atggaacctggaaacgcccagctgagcatgaccgtcctgatgaccccggacatggccaacttttctggcaacgtacatggcggcaccctgctcaagtacctcgacgaagtggcttatgcatgcgccagccgttatgccggcagttatgtggtaaccctgtcggtcgaccaggtgatcttccgtgaacccgtgcacgtgggtgaactggtgaccttcctggcgtcggtcaactacaccggcaacacttcgatggaagttggcatcaaagtcgtgaccgagaacattcgcgagcgctcggtgcgccattccaacagttgcttcttcaccatggtcgcggtcgacgacaaccgccgcccggtgccggtgccaccacgccagccgcacagcagcgaagaaaagcgccgcttcctgcaaggccagcagcgccgtcagatccgccaggaactggaaaagcgctatcaggacttgaaaaccgacgccatttaa

SEQ ID NO: 3611 - protein, 161 aa, Pseudomonas putida KT2440
MEPGNAQLSMTVLMTPDMANFSGNVHGGTLLKYLDEVAYACASRYAGSYVVTLSVDQVIFREPVHVGELVTFLASVNYTGNTSMEVGIKVVTENIRERSVRHSNSCFFTMVAVDDNRRPVPVPPRQPHSSEEKRRFLQGQQRRQIRQELEKRYQDLKTDAI

SEQ ID NO: 3612 - DNA, 432 bp, Bradyrhizobium japonicum USDA 110
  CDS (1)..(432): transl_table=11
atgaccgacacgcacgtcaaaacccctttcagctccgataccgagccgagcggcgatctctgcattcgcacgctggcgatgcccgccgacaccaacgccaatggcgacattttcggcggctggctgctcagccagatggacgtcggcggcggcgtgttcgcctcgaaggtcgcgaagtcgcgcaccgtaaccgttgcgatcgaggcgatgaattttcgcaaagcggtgtatgtcggcgatctcgtctcggtctacgccaatctcgtgcgggtcggacgcacctcgctcaccgtgcatctcgaagcctgggcgcttcgccgcagggaggcggacccgttcctcgtcaccgacggcaacttcacctatgtctcgatcgacgatcacggccgtccgcagtcgataacccccaccgatacgccgatcgcgacgtag

SEQ ID NO: 3613 - protein, 143 aa, Bradyrhizobium japonicum USDA 110
MTDTHVKTPFSSDTEPSGDLCIRTLAMPADTNANGDIFGGWLLSQMDVGGGVFASKVAKSRTVTVAIEAMNFRKAVYVGDLVSVYANLVRVGRTSLTVHLEAWALRRREADPFLVTDGNFTYVSIDDHGRPQSITPTDTPIAT

SEQ ID NO: 3614 - DNA, 402 bp, Pseudomonas syringae pv. tomato str. DC3000
  CDS (1)..(402): transl_table=11
atgatcgagctcgaacaagaagatccaactccgcaaggcgaccttgcgctgcaaattactgctcttccccgtgaaaccaacggcttcggcgatatcttcggcggctggctggtgtctcagatggacctggccgggactgcaatggccagcaaagtggccggcggtcgcgtggcgaccgtggctatcgatcgcatggcgtttctggtgccggtcgcagtcggcgagcagctttccttttatacgcgcaccctggaagtggggcgcacctcgatcaagatgatggtcgaagtgtggagcgatgacccggttaccagcgagtggcgtaaggtaacagaggctgcgttcgtgttcgtggccatagattccagcggccggacacgctcggttcctgcacgacggtaa

SEQ ID NO: 3615 - protein, 133 aa, Pseudomonas syringae pv. tomato str. DC3000
MIELEQEDPTPQGDLALQITALPRETNGFGDIFGGWLVSQMDLAGTAMASKVAGGRVATVAIDRMAFLVPVAVGEQLSFYTRTLEVGRTSIKMMVEVWSDDPVTSEWRKVTEAAFVFVAIDSSGRTRSVPARR

SEQ ID NO: 3616 - DNA, 396 bp, Vibrio parahaemolyticus RIMD 2210633
  CDS (1)..(396): transl_table=11
atgagccaagaatttaactctccgaaaggccagcttctgcttcgtacccttgcaatgcccgctgatacaaatgcaaacggcgatatctttggtggttggataatgtctcaacttgacttggcgggtgcgattctggcgaaagagatctgttctggtcgcgtcgttaccgtttctgtttcaagcattacatttaaaaaaccagtcagcgtaggtgacgtggtttgttgttacggcgtgtgtaagaaaatcggccgtacatcgatgagcgttgacctagaagtttgggtgaaaccagtgaaagtagacggcattgaagatcgtttcatggtttgtgaagcaacctttaactatgtagccatcgacagtgaaggcaaaccacgtccagtacaaagctaa

SEQ ID NO: 3617 - protein, 131 aa, Vibrio parahaemolyticus RIMD 2210633
MSQEFNSPKGQLLLRTLAMPADTNANGDIFGGWIMSQLDLAGAILAKEICSGRVVTVSVSSITFKKPVSVGDVVCCYGVCKKIGRTSMSVDLEVWVKPVKVDGIEDRFMVCEATFNYVAIDSEGKPRPVQS

SEQ ID NO: 3618 - DNA, 471 bp, Haemophilus ducreyi 35000HP
  CDS (1)..(471): transl_table=11
atgaacaaaaataagcctaatgagcaaccttcgggtaaattattactcagaacgcttgctatgccgtcagatgccaatgcaaatggagatatttttggtggttggattatgtcacaaatggatctggggggggcaattttagctaaagaagtagctaaaggacgtgtagttacggtgaccgtggataaaatgatttttcatcgtccaatttcagtgggtgatgtagtctgttgttatggctcggtggtaaaagttggccgttcttcgatgcaagttaaagtggaaatatttattaaacaggtttacgatggctcacgtgagcgttttcgggtcactgaagcattatttacttatgttgccattgataatataggtaaatcacgcgccattccacgtgataataatccggagttagatgaagctttagtaagaattgaacgatgtttagctgaacaagcgatcaagtcttaa

SEQ ID NO: 3619 - protein, 156 aa, Haemophilus ducreyi 35000HP
MNKNKPNEQPSGKLLLRTLAMPSDANANGDIFGGWIMSQMDLGGAILAKEVAKGRVVTVTVDKMIFHRPISVGDVVCCYGSVVKVGRSSMQVKVEIFIKQVYDGSRERFRVTEALFTYVAIDNIGKSRAIPRDNNPELDEALVRIERCLAEQAIKS

SEQ ID NO: 3620 - DNA, 411 bp, Bordetella pertussis Tohama I
  CDS (1)..(411): transl_table=11
atgaccaacccacccaaatcccccttcaccagcctgcccagcgggcgcgagccggtcctgcgcgtcatgcccatgcccgccgatgccaatatccatggcgacgtgttcggcggctggatcatggcgcaggtggatatcgccggctcgatccctgccgcccggcgcgccgccggacgcgtggccaccgtggccgtcaacgcattccagttcaagcaaccggtattcgtcggcgacctgctcagtttctatacctccatcacgcgcaccggcacgacctcggtcacggtgtcggtcgaagtgtatgctgaacgccagcgcctggacgccgaagtcgtgaaggtcaccgaagcggtgctcacctacgtcgccaccgacgaagcccggcgcagccgcccgctgcccaccctttga

SEQ ID NO: 3621 - protein, 136 aa, Bordetella pertussis Tohama I
MTNPPKSPFTSLPSGREPVLRVMPMPADANIHGDVFGGWIMAQVDIAGSIPAARRAAGRVATVAVNAFQFKQPVFVGDLLSFYTSITRTGTTSVTVSVEVYAERQRLDAEVVKVTEAVLTYVATDEARRSRPLPTL

SEQ ID NO: 3622 - DNA, 378 bp, Chromobacterium violaceum ATCC 12472
  CDS (1)..(378): transl_table=11
atggaacagcaggaacaccggacgccggtattgcgggtgcgcgccttgcccaccagcaccaacgcttacggccgggtgcaggcgggctggctgatgagccagatcgacatggccggcagcctggatgccgagcgtttgtcccgcgggccggtgacgaccgtggcggtcaacgcttttcagttcgccgcgcccatcctgctgggcgacgtggtggacatgtacgtggagcgcctgcgcatcggccagaaatcgatcacgctgaagatttccgtcgaggccgagcgcatggacggctcgcacgtgcgcatcacggaagtgatcgcgactttcgtcgcggtcgacgccgaaggcaagtccagattgctgggcgacgcctag

SEQ ID NO: 3623 - protein, 125 aa, Chromobacterium violaceum ATCC 12472
MEQQEHRTPVLRVRALPTSTNAYGRVQAGWLMSQIDMAGSLDAERLSRGPVTTVAVNAFQFAAPILLGDVVDMYVERLRIGQKSITLKISVEAERMDGSHVRITEVIATFVAVDAEGKSRLLGDA

SEQ ID NO: 3624 - DNA, 432 bp, Photorhabdus luminescens subsp. laumondii TTO1
  CDS (1)..(432): transl_table=11
atgacacaacaacaattacctaacggagagttagtcctccgcacactggctatgcccgctgataccaacgccaatggagatatttttggtggatggttaatgtcacaaatggatattggtggtgcaattctggcaaaagaaattgcggaaggccgtgttgtcactgtcagagtagatggtattactttcttgaaacctgttgccgttggtgatgtcgtctgctgctatgcacattgcctcaaaaccggtaacagttcgattaccatcaacattgaagtctgggtgaagaaagtcgcctctgaacctgtcggccaacgctatcgtgcaaccgaagcggtattcacttatgttgcggtaaatgaagataatacttcacgtcggttaccagaaggtaaaacccactttcaactcgctagcagtactagcgaataa

SEQ ID NO: 3625 - protein, 143 aa, Photorhabdus luminescens subsp. laumondii TTO1
MTQQQLPNGELVLRTLAMPADTNANGDIFGGWLMSQMDIGGAILAKEIAEGRVVTVRVDGITFLKPVAVGDVVCCYAHCLKTGNSSITINIEVWVKKVASEPVGQRYRATEAVFTYVAVNEDNTSRRLPEGKTHFQLASSTSE

SEQ ID NO: 3626 - DNA, 417 bp, Herminiimonas arsenicoxydans
  CDS (1)..(417): transl_table=11
atggcaagcgaacaccacacagacctgcctgcagggaaaatcccgcaaatgcgcgtcgtaccgatgccgcatgattccaatatgcatggcgacgtattcggcggctggatcatggcgcaggtcgatctggcgggtgccgtatgcgccacccgccgcgccaacggtcgtgttgtcacgattgcagtgaattcatttttattcaagcatccggtattcgtcggcgacctgttgtcgatctacgctgaaattgtcaaggtcggcaatacctcgatcaccgtgaacgtggaatgctacgcagaacgcaatcgcctggaagtagaaattgtgaaagtgacagaagccaccctgacctacgtcgccaccgatgacaaccgcaagccgcgccacctgccgccgccgatcctgccacacaaataa

SEQ ID NO: 3627 - protein, 138 aa, Herminiimonas arsenicoxydans
MASEHHTDLPAGKIPQMRVVPMPHDSNMHGDVFGGWIMAQVDLAGAVCATRRANGRVVTIAVNSFLFKHPVFVGDLLSIYAEIVKVGNTSITVNVECYAERNRLEVEIVKVTEATLTYVATDDNRKPRHLPPPILPHK

SEQ ID NO: 3628 - DNA, 411 bp, Burkholderia vietnamiensis G4
  CDS (1)..(411): transl_table=11
atgaaagcccccgccatgaccgatccgatcctcgagctcccgcagaaacagcccgccctgcgcgtcgtcccgcaaccgcacgacgccaacgtccacggcgacgtgttcggcggctggatcatgtcgcaggtcgacatcgccggctcgattccggcgagccagcgtgccaacggccgcgtcgcgacggtcgcggtcaattcgttcgtgttcaagcagccggtgttcgtcggcgacgtgctgagcttctacgcgacgatcatgcgcaccggcaacacgtcggtgacggtcgacgtcgaggtgtacgcgcagcgcatgcggctgatgggcgaaatcgtgaaggtcaccgaagccacgctcacctacgtcgcaaccggcgccgaccgcaagccgcgcccgctgccgccgctgtga

SEQ ID NO: 3629 - protein, 136 aa, Burkholderia vietnamiensis G4
MKAPAMTDPILELPQKQPALRVVPQPHDANVHGDVFGGWIMSQVDIAGSIPASQRANGRVATVAVNSFVFKQPVFVGDVLSFYATIMRTGNTSVTVDVEVYAQRMRLMGEIVKVTEATLTYVATGADRKPRPLPPL

SEQ ID NO: 3630 - DNA, 444 bp, Dichelobacter nodosus VCS1703A
  CDS (1)..(444): transl_table=11
atgaattccgaaaaaaaacttgaacgcagcgaacctcaaggtgaattggtattgcgcagtttagcgatgcccgccgataccaatcctaatcaagatatttttggcggctggattatgtcgcaaatggatatgggtgctggcattcttgctgcagaaatcacacgcggtcgcgcggtcaccattgccgtgcaagaaatgacttttatgcaccccgtgcgcgttggtaacgtagtttgttgttatggtcgttgcgtgcatattgggcgaacgtctttgcaaattaaaattgaagtttgggtgaaaatatttgggcaaagcggttttgaagagagccgaaaattggttactgaagcgatttttacctacgttgccatcgatgaaaacggcaatccgcgtccgattcccaaagaaaataatccgaaactcgctgatgtgaatttataa

SEQ ID NO: 3631 - protein, 147 aa, Dichelobacter nodosus VCS1703A
MNSEKKLERSEPQGELVLRSLAMPADTNPNQDIFGGWIMSQMDMGAGILAAEITRGRAVTIAVQEMTFMHPVRVGNVVCCYGRCVHIGRTSLQIKIEVWVKIFGQSGFEESRKLVTEAIFTYVAIDENGNPRPIPKENNPKLADVNL

SEQ ID NO: 3632 - DNA, 420 bp, Acinetobacter sp. ADP1
  CDS (1)..(420): transl_table=11
gtgttagacgctcatatcagcccagaagggactttatcacttcaaacgattgccatgcctgcagataccaactggagtggtgatgtatttggtggctggattgtgtcacaaatggatttggctggtgcaattcatgcagaacgttttagtaaaggacgttgtgccacgatttcgatcaatcagatgaccttcctggttcctgtgaaggtcggagatgtgattagctgttataccaaaattctcaaagttggcaacacatctatccagatgcaaatagaagtttgggatagtcatgatagctcacgaccacctaaacgagtgacagagggggtatttacctttgttgctgtggatgtaaaaggcaacaagcgtacaatcgcggaagacctcaaacagcagtttttacaacacgccagttaa

SEQ ID NO: 3633 - protein, 139 aa, Acinetobacter sp. ADP1
MLDAHISPEGTLSLQTIAMPADTNWSGDVFGGWIVSQMDLAGAIHAERFSKGRCATISINQMTFLVPVKVGDVISCYTKILKVGNTSIQMQIEVWDSHDSSRPPKRVTEGVFTFVAVDVKGNKRTIAEDLKQQFLQHAS

SEQ ID NO: 3634 - DNA, 423 bp, Erwinia carotovora subsp. atroseptica SCRI1043
  CDS (1)..(423): transl_table=11
atgagcaaacaaaacgtgttaccacagggtgaactggttctccgtacgctggccatgccagccgatactaatgcgaatggcgatatttttggcggctggctgatgtcgcaaatggacatgggcggtgcgattttggcgaaagaaatcgccgaggggcgtgtcgttaccgtacgggttgatggaatgtcgttcttaaaaccagtcgccgtgggcgatgtcgtttgctgctatgcgcgttgcttacgcactggccgcagctccatcaacgtcaatgttgaggtttgggtaaagaaagtgtcgtctgagccgattggtcagcgctatcgggccaccgaagcgttattcacctacgtcgcagtcgatgaagaaggccagccgcgtgagctgccagcaggtaaaagcaacttcacaccaagcgagtaa

SEQ ID NO: 3635 - protein, 140 aa, Erwinia carotovora subsp. atroseptica SCRI1043
MSKQNVLPQGELVLRTLAMPADTNANGDIFGGWLMSQMDMGGAILAKEIAEGRVVTVRVDGMSFLKPVAVGDVVCCYARCLRTGRSSINVNVEVWVKKVSSEPIGQRYRATEALFTYVAVDEEGQPRELPAGKSNFTPSE

SEQ ID NO: 3636 - DNA, 447 bp, Desulfotalea psychrophila LSv54
  CDS (1)..(447): transl_table=11
atggaagaacagccctatgcccccgctggtgaattactgctacgcactctggccatgccctctgacacaaaccccaatggtgacatcttcggtggttggattatgtcacagatggatattgccggtggtattttagccaaggagatcagctgtgcccgtacagtcacagttgccgtagacagtatcgttttcattaaaccggtaagcgtcggcgacgtagtctgctgccatggcaaggtaattcatatcggcaccacatcgatgaaaataaatttggaggtctggacaaaaaagacctccgcatccggtacagcccacgcccatgaacgttttttagttaccaaggcagcctttacctatgtggccatcgatgccatgggaaaaaagcaggtcattgacaaggagagtccctgctttcaggagtttatgcaaaatctccccctataa

SEQ ID NO: 3637 - protein, 148 aa, Desulfotalea psychrophila LSv54
MEEQPYAPAGELLLRTLAMPSDTNPNGDIFGGWIMSQMDIAGGILAKEISCARTVTVAVDSIVFIKPVSVGDVVCCHGKVIHIGTTSMKINLEVWTKKTSASGTAHAHERFLVTKAAFTYVAIDAMGKKQVIDKESPCFQEFMQNLPL

SEQ ID NO: 3638 - DNA, 498 bp, Symbiobacterium thermophilum IAM 14863
  CDS (1)..(498): transl_table=11
atgcacacgcccgaacagcacctggagcccaagcccgcccgcctgagcgcctgcgagatgacggagatcgtcatgcccaacgacgccaacccgctgggcatcatgctcggcgggcggctgctgcacatcatggacatcgccgcgaccatcgccgcgatgcgccacgccggccatccctgcgtcaccacctccttcgactcggtcgacttccacacgcccatccacatcggcgaggtctgcatcgtgagggcgcgggtgacctggaccggccgcacctcgctggaagtgggcatcgacgtcttcgcggaatcgcccatcaagggcgagcggcgtcacacgacgtcggcgtttgcgaccttcgtcgccctggaccaggagaccggccggccgacgcgggtgccgccgctgctcctcgaaaccgacgaggaccggcgttgcttcgccgaaggcgaacagcggcggcagctgaggctggcgcgccggcacgccaggggttga

SEQ ID NO: 3639 - protein, 165 aa, Symbiobacterium thermophilum IAM 14863
MHTPEQHLEPKPARLSACEMTEIVMPNDANPLGIMLGGRLLHIMDIAATIAAMRHAGHPCVTTSFDSVDFHTPIHIGEVCIVRARVTWTGRTSLEVGIDVFAESPIKGERRHTTSAFATFVALDQETGRPTRVPPLLLETDEDRRCFAEGEQRRQLRLARRHARG

SEQ ID NO: 3640 - DNA, 465 bp, Mannheimia succiniciproducens MBEL55E
  CDS (1)..(465): transl_table=11
atgactgacaaaactaacataataagagaacccgaaggttcattgattctgcgcacattagctatgccttccgacaccaatgccaacggcgatatattcggcggctggattatgtcacaaatggatatgggcggtgctattttagccaaagaaataggtaaaggcagagtggtcacggtttgcgtagataaaatgacgttcctacgccctatttccgtgggggatgtagtttgttgctatggtaaattagtgaaaatcgggcgctcttccatgcaagtcaaggtggaagtttggatcaaaaaagtttacgatggcgttcgtgatcgtcattgcgtaaccgaagcgctttttacttatgtcgctattgataaagagggtaaaccgagagccgtaccgcgagaagacaatcccgaattggaacaggctttagcattactcaacaaccacactacagaggaaaactaa

SEQ ID NO: 3641 - protein, 154 aa, Mannheimia succiniciproducens MBEL55E
MTDKTNIIREPEGSLILRTLAMPSDTNANGDIFGGWIMSQMDMGGAILAKEIGKGRVVTVCVDKMTFLRPISVGDVVCCYGKLVKIGRSSMQVKVEVWIKKVYDGVRDRHCVTEALFTYVAIDKEGKPRAVPREDNPELEQALALLNNHTTEEN

SEQ ID NO: 3642 - DNA, 381 bp, Legionella pneumophila subsp. pneumophila str. Philadelphia 1
  CDS (1)..(381): transl_table=11
atgcaaacacctaaaggagagttgactatccaaactttggccatgcctttaaatactaatgccaatggcgatatatttggcggatggatagtctcccaaatggatttggcagcaggtgttttggcaaagagaatttcccatgggcgtgtcgctaccgttgcaattaattcaatgacttttttaaaacctgtgcatgtaggcgatgtagtgagctgccacgttgaattagtgaaagtaggtaatacctctatgactattcgggttgaggtatgggcttactcatcgatcaaaatggaaaaataccaggttactgaagggatatttgtttttgttgcgattgatgaaaatggaaagccgaggcaggtacccaaaacacaatga

SEQ ID NO: 3643 - protein, 126 aa, Legionella pneumophila subsp. pneumophila str. Philadelphia 1
MQTPKGELTIQTLAMPLNTNANGDIFGGWIVSQMDLAAGVLAKRISHGRVATVAINSMTFLKPVHVGDVVSCHVELVKVGNTSMTIRVEVWAYSSIKMEKYQVTEGIFVFVAIDENGKPRQVPKTQ

SEQ ID NO: 3644 - DNA, 414 bp, Burkholderia pseudomallei K96243
  CDS (1)..(414): transl_table=11
atggaagcttcaatcatgaccgattcgccgatgcaactcccgcaaaaaccgcccgcgctgcgcgtcgtcccgcaaccgtccgacgcgaacgttcacggcgacgtgttcggcggctggatcatggcgcaggtcgacgtcgcgggctcgattccggcgagccgccgcgcgaacggccgggtcgcgacggtcgcggtcaattcgttcctgttcaagcagccggtgttcgtcggcgatctgctcagcttctacgcgagcatcgtgaagacgggcaacacgtcggtgacggtcgacgtcgaagtctacgcgcagcggatgagcctgatgagcgagatcgtcaaggtgacggaggcgacgctcacctacgtcgcgaccgactccgatcgccgcccgcgcgcgctgccgccgctcgaataa

SEQ ID NO: 3645 - protein, 137 aa, Burkholderia pseudomallei K96243
MEASIMTDSPMQLPQKPPALRVVPQPSDANVHGDVFGGWIMAQVDVAGSIPASRRANGRVATVAVNSFLFKQPVFVGDLLSFYASIVKTGNTSVTVDVEVYAQRMSLMSEIVKVTEATLTYVATDSDRRPRALPPLE

SEQ ID NO: 3646 - DNA, 411 bp, Azoarcus sp. EbN1
  CDS (1)..(411): transl_table=11
atgtccgatgtttcaacgaccccggtgaaattgccgaagaaccgccagccggcgctgcgggtgatgccgatgccgggggacctcaaccccgccggcgacgtattcggtggctggatcatgtcgatggtcgatatcgcgggcggcatcgccgcgcactaccgcgcgcgcggccgctgtgcgacggtcgcggtcaacgccttcacgttcaagcagccggtttcggtcggcgacctggtcagcttttatgccgacgtggtgtcggtcgggcgcacgtcgatcaccgtcgatgtccaggtgttcgccgagcgcaatcccgagagcctgttcgtcgtgaaagtcaccgaggcgaagctgacctacgtggcgctcgacgaccacggcaacaagcgaccggttccgccggccgaatga

SEQ ID NO: 3647 - protein, 136 aa, Azoarcus sp. EbN1
MSDVSTTPVKLPKNRQPALRVMPMPGDLNPAGDVFGGWIMSMVDIAGGIAAHYRARGRCATVAVNAFTFKQPVSVGDLVSFYADVVSVGRTSITVDVQVFAERNPESLFVVKVTEAKLTYVALDDHGNKRPVPPAE

SEQ ID NO: 3648 - DNA, 417 bp, Silicibacter pomeroyi DSS-3
  CDS (1)..(417): transl_table=11
atgcagaaacaaggacaccctgcgatgaccgatccacagccgagcggggaactgacccttcgcacacttgcgatgccgcgcgatgtaaacgtcaacggcgacatctttggcggttgggtgctgagccagatggatatcgccgcgggtcttacagccggcgcgcgggccggtggacgggtgaccacggtggcggtggatgcgatgaagttcatccggcccgtcggcgttggcgacgtgttgtgcatctattgccaggtggtgcgggtcgggcgcagctcgatggcgatcgagatcgaggcctgggcgctgcgtgaccgacaggggctgcgtgaaaaggtgaccgaggctgtgttcacctttgttgccatcgacgaagaaggtcggccccgcccggtcgatgccgccgctgcaggctga

SEQ ID NO: 3649 - protein, 138 aa, Silicibacter pomeroyi DSS-3
MQKQGHPAMTDPQPSGELTLRTLAMPRDVNVNGDIFGGWVLSQMDIAAGLTAGARAGGRVTTVAVDAMKFIRPVGVGDVLCIYCQVVRVGRSSMAIEIEAWALRDRQGLREKVTEAVFTFVAIDEEGRPRPVDAAAAG

SEQ ID NO: 3650 - DNA, 402 bp, Pseudomonas syringae pv. syringae B728a
  CDS (1)..(402): transl_table=11
atgatcgagctcgaacaagaagacccaaccccgcaaggcgaccttgcactgcaaatcaccgcccttccccgcgaaaccaatggctttggcgacatttttggcggctggctggtgtcccagatggacctggcaggcacagcgatggccagcaaagtcgcgggtggccgtgtggcgaccgtcgccatcgatcgcatggcgtttcttgtcccggtcgcagtcggcgaacagctttccttctacacccgcaccctcgaagtcggacgcacctcgatcaagatgatggtcgaagtgtggagcgacgacccgctcaccagcgaatggcgcaaggtcaccgaggctgcgttcgtgttcgtggccatagatgccagcggccggacgcgctcggttcctgcgcgacggtaa

SEQ ID NO: 3651 - protein, 133 aa, Pseudomonas syringae pv. syringae B728a
MIELEQEDPTPQGDLALQITALPRETNGFGDIFGGWLVSQMDLAGTAMASKVAGGRVATVAIDRMAFLVPVAVGEQLSFYTRTLEVGRTSIKMMVEVWSDDPLTSEWRKVTEAAFVFVAIDASGRTRSVPARR

SEQ ID NO: 3652 - DNA, 465 bp, Haemophilus influenzae 86-028NP
  CDS (1)..(465): transl_table=11
atgtctgccaattttactgataaaaatggtcgccaatcaaaaggagttcttttactacgaactttggcgatgccttctgacaccaatgctaacggagatatttttggtggctggattatgtctcaaatggatatgggcggcgcgattttagcgaaagaaatcgcacacggacgcgtggttactgttgccgttgaaagtatgaattttatcaaaccaatctctgtgggcgatgttgtttgttgctacggtgaatgtctcaaagttgggcgttcttccattaaaattaaagtagaagtatgggtaaaaaaagtggcgagtgagccaattggcgaacgttattgtgtcaccgatgcggtatttacttttgttgcagttgataataatggtcgctctcgcacgattccccgtgaaaataaccaagagttagaaaaagcattagccttaatttcagaacaacccttgtaa

SEQ ID NO: 3653 - protein, 154 aa, Haemophilus influenzae 86-028NP
MSANFTDKNGRQSKGVLLLRTLAMPSDTNANGDIFGGWIMSQMDMGGAILAKEIAHGRVVTVAVESMNFIKPISVGDVVCCYGECLKVGRSSIKIKVEVWVKKVASEPIGERYCVTDAVFTFVAVDNNGRSRTIPRENNQELEKALALISEQPL

SEQ ID NO: 3654 - DNA, 477 bp, Colwellia psychrerythraea 34H
  CDS (1)..(477): transl_table=11
atgaatgcaccacaacgtgacataactttaagatttttagccgagccacaagatgtaaattttggtggtaaagtgcatggtggcgctgtgatgaaatggatagatttagctgcttatgcttgtgctgctggttggagtggtcgttattgtgttaccgcctatgctggtggtattcgttttgttgcccctattcatgttggtagtttagttgaagtagaagctaaagttatttacaccggtaactcatcaatacatatagcgctagaagtaaacgcttgcgatcctaaatccttaaaccgtcgtttaactactcactgcattgttatcatggtcgcagttgatcaaaatggtcaatctgaacgtgtgccgcaatggcaacctcaaacggaagcagataaaaaacaacatgagtccgcggtgaaactgatggaaatgcgcaaacaaattggtgaagaaatgcaaatttttgtcgattaa

SEQ ID NO: 3655 - protein, 158 aa, Colwellia psychrerythraea 34H
MNAPQRDITLRFLAEPQDVNFGGKVHGGAVMKWIDLAAYACAAGWSGRYCVTAYAGGIRFVAPIHVGSLVEVEAKVIYTGNSSIHIALEVNACDPKSLNRRLTTHCIVIMVAVDQNGQSERVPQWQPQTEADKKQHESAVKLMEMRKQIGEEMQIFVD

SEQ ID NO: 3656 - DNA, 456 bp, Dechloromonas aromatica RCB
  CDS (1)..(456): transl_table=11
atgaaaactgccgcctttccgggaaaatccggaaacaattcgcaatccggactgaccatgaccattgatcccctcgttcttccaaacaagcactgcacgctgcgtgtcgtcccgatgccggccgacctcaaccagaatggcgatgtcttcggcggctgggtcatggcccaggtcgacgtggctggcgccatcccggcaatgcgtcgggcttgcggcagagtagccaccgtttcggttaattccttcctgttcaagcagccggtttcggtcggcgacattgtcagcctgtacgccgatatcgtgcgggtcggcacgacctcgattaccgttcgagtcgaggtctatgccgaacggaattacgccgcaccaattatcgtcaaggtgactgaggctgagctgacctatgtggcgattgatggcgccgggatgaagcgcaatgttccgaccgaaaaatga

SEQ ID NO: 3657 - protein, 151 aa, Dechloromonas aromatica RCB
MKTAAFPGKSGNNSQSGLTMTIDPLVLPNKHCTLRVVPMPADLNQNGDVFGGWVMAQVDVAGAIPAMRRACGRVATVSVNSFLFKQPVSVGDIVSLYADIVRVGTTSITVRVEVYAERNYAAPIIVKVTEAELTYVAIDGAGMKRNVPTEK

SEQ ID NO: 3658 - DNA, 489 bp, Pseudomonas fluorescens PfO-1
  CDS (1)..(489): transl_table=11
atgttcggtgctgaatcgtttttcccgaagacggctaccaccagcaatacccaacgaagagtcacgggtcagaggccccccggcatgatagagctcgaacaagaagatccgatcccgcaaggcgacctggccttgcaaatcaccgcgcttccccgcgaaaccaacggcttcggcgatattttcggcggctggctggtggcgcagatggacctggccggcacggccatggccagccgtgttgccggtggccgtgtcgcgaccgtggccatcgaccgcatggcgtttctggtgccggtggctgtcggcgcgcaattgtccttttatacccagaccctggaaatcggtcgcagctcgatccagatgatggtcgaggtgtggagcgacgacccgctgtccagcgagtggcgtaaagtgaccgaagcggtgttcgtgttcgtcgccatcgatggcagcggccgcacccgttcggttccgccacgcgcacgttaa

SEQ ID NO: 3659 - protein, 162 aa, Pseudomonas fluorescens PfO-1
MFGAESFFPKTATTSNTQRRVTGQRPPGMIELEQEDPIPQGDLALQITALPRETNGFGDIFGGWLVAQMDLAGTAMASRVAGGRVATVAIDRMAFLVPVAVGAQLSFYTQTLEIGRSSIQMMVEVWSDDPLSSEWRKVTEAVFVFVAIDGSGRTRSVPPRAR

SEQ ID NO: 3660 - DNA, 444 bp, Geobacter metallireducens GS-15
  CDS (1)..(444): transl_table=11
atgaaccgcgactggaccctcatcgagaccctcctcccccaggacaccaattctgcgggaaacatcttcggcggggtgctcatgagcctcatggacaaggcggcggccatcaccgcctggcgctacgcccggtgcgacatggtcaccgccggggccgaggagatcgccttcatccggccggtgcatgtgggggaggtggtcaaggtggaggcccgggtggtctgtaccggccgaacgtccatcgacatggcggtaatggttgaggcggaggatgtcttcacggggcagagttacgaggcggcccggggatacttcaccatggtggccctggacaagggagggaagccgacggaggtcccgccgtgggaaccccgcaccgaggaggagcggcgccgctgcgaagcgtccggggagcgccgggccaggcgccgggagaggaagtga

SEQ ID NO: 3661 - protein, 147 aa, Geobacter metallireducens GS-15
MNRDWTLIETLLPQDTNSAGNIFGGVLMSLMDKAAAITAWRYARCDMVTAGAEEIAFIRPVHVGEVVKVEARVVCTGRTSIDMAVMVEAEDVFTGQSYEAARGYFTMVALDKGGKPTEVPPWEPRTEEERRRCEASGERRARRRERK

SEQ ID NO: 3662 - DNA, 531 bp, Desulfovibrio desulfuricans G20
  CDS (1)..(531): transl_table=11
atgaatgatcgtaaggtgagcgacagcgataccattatgacgcacagaggcttgccgcaggatgccaaccccgccggcaacatccacggcggcaccattctgaagcatatcgatcttgccggtgccgtggcggccatgcgtcacgccagaggccgcacggtggtcaccgcgtccattgacaggatggaattcaaggctgccgtacatgtgggagagcttatggtgctgaaggccagcgtgaacatggtcagtaatacgtccatggaagtgggggtacgtgtggaggctgaaaacctgctcacgggcgaggtgcggcatgctgcttcggcatacctgacatttgtggccatggatgaaaaccgcagaccgactgcagtgccgggcctgatactggaaacgcccgagcagcaccgccgtaaccgcgaagccctgatgcggcgcgaggtgcggcgcgaagagcggcggcgcgaaaaactgtcgcaggaagggcagactctggcccgtgatgaaggcgtgaaagaactgtactga

SEQ ID NO: 3663 - protein, 176 aa, Desulfovibrio desulfuricans G20
MNDRKVSDSDTIMTHRGLPQDANPAGNIHGGTILKHIDLAGAVAAMRHARGRTVVTASIDRMEFKAAVHVGELMVLKASVNMVSNTSMEVGVRVEAENLLTGEVRHAASAYLTFVAMDENRRPTAVPGLILETPEQHRRNREALMRREVRREERRREKLSQEGQTLARDEGVKELY

SEQ ID NO: 3664 - DNA, 453 bp, Rhodospirillum rubrum ATCC 11170
  CDS (1)..(453): transl_table=11
atgagttgtaccgatgacgccaccactggcgcttgccaagtcgaccccggggtggaggctggcgacgaaccgcgcggcacggtgtcgatccgcaccatcgccatgcccgccgataccaacccttcgggcgatattttcggcggctggctgatggcgcagatggatctggccgggggaacccacgcccgcaaggcggccggcggccgggtggtgacggtggcggtgaacggcttctcgttccatctgccggtgaaagtcggcgacgaggtgacctgctataccgagatcatcaagcgcggccgcaccagtttgaccctggatgtgcaggcctgggtctgccggcaggacggcggcgccaagatcaaggtgaccgaaggcgtcttcgttttcgtcgccctggatgccgaggggcgggcccgccccctgccgcccgtcgtttcctctccccgctaa

SEQ ID NO: 3665 - protein, 150 aa, Rhodospirillum rubrum ATCC 11170
MSCTDDATTGACQVDPGVEAGDEPRGTVSIRTIAMPADTNPSGDIFGGWLMAQMDLAGGTHARKAAGGRVVTVAVNGFSFHLPVKVGDEVTCYTEIIKRGRTSLTLDVQAWVCRQDGGAKIKVTEGVFVFVALDAEGRARPLPPVVSSPR

SEQ ID NO: 3666 - DNA, 405 bp, Saccharophagus degradans 2-40
  CDS (1)..(405): transl_table=11
atgtccagttcagatttagacgaagaacccaccccaacaggtgaactcgttttacaaaccctcgccctacccaaagacaccaactccaatggcgatgtatttggcggctggcttatgtcgcaaatggatttagctggcgccatcgctgcacgcgaactggccaaaggccgcgtaaccactgtcgccgtaggtgccatgcactttttgcgccccgtacctgtcggcgcaacggtaagttgttattgcgaaattttagaggtgggtcgctcatccataaaagcgttaatcgaagtgtgggtaaaacattacagcttcgaagagcaacaaaaagtcaccgacggtgagtttgtttatgtgtctattgataatgcagggcgtactcggccggtttatatggataggtaa

SEQ ID NO: 3667 - protein, 134 aa, Saccharophagus degradans 2-40
MSSSDLDEEPTPTGELVLQTLALPKDTNSNGDVFGGWLMSQMDLAGAIAARELAKGRVTTVAVGAMHFLRPVPVGATVSCYCEILEVGRSSIKALIEVWVKHYSFEEQQKVTDGEFVYVSIDNAGRTRPVYMDR

SEQ ID NO: 3668 - DNA, 396 bp, Burkholderia xenovorans LB400
  CDS (1)..(396): transl_table=11
atgaccaatcttcttcaactcccgcaaaagcactgcgcgctgcgcgtggtgccgcagccctcggatgcgaacgtccacggcgacgtgttcggcggctggatcatggcgcaagtggacattgccggctcgatcccggcaagccgccgtgccaacgggcgggtggccaccatcgcggtcaattcgttcgtgttcaagcagccggtgttcgtcggcgatctgctgagcttttacgcggatatcgtcaagacgggcaatacgtcggtcaccgtcgaggtcgaggtctacgcgcagcgcatgagcctcaccgaagacctcgtgaaagtcaccgaagccacgctgacctatgtcgcgaccgatagcgacaggcgtccgcgcgcgctgccgacgctggattga

SEQ ID NO: 3669 - protein, 131 aa, Burkholderia xenovorans LB400
MTNLLQLPQKHCALRVVPQPSDANVHGDVFGGWIMAQVDIAGSIPASRRANGRVATIAVNSFVFKQPVFVGDLLSFYADIVKTGNTSVTVEVEVYAQRMSLTEDLVKVTEATLTYVATDSDRRPRALPTLD

SEQ ID NO: 3670 - DNA, 510 bp, Acidobacteria bacterium Ellin345
  CDS (1)..(510): transl_table=11
atgaccaccgaaaaccttcatcccaagccagtgcgcgattccgcctccgaaatggtggagatcgtcctccccaacgatgccaacccactcggccatcttctcggcggccgcctcatgcactggattgatatctccggcgcgctcgctgcgcaccgccactgccgcaactacgtcgtcaccgcctccatcgaccacctcgatttcctagtccccgtacaggtcggcgatctggttgtcttccaatcgtccgtaaatcgtgcgttcaacacgtctatggagatcggcgtcaaagttctggtcgagaactacatcgcctccacccgccagcacgtcagctcggcctacctcacgttcgtcgccgtggatcgccacggacgaaagctcccggttccgcaagtcatccctgagaccgaagacgagaagcgccgctacgaaggtgccctgcgccgccgcgaagcccgcaaaagcgaactagagcaccgcaaagccgcccgcgccaaaaaggcctag

SEQ ID NO: 3671 - protein, 169 aa, Acidobacteria bacterium Ellin345
MTTENLHPKPVRDSASEMVEIVLPNDANPLGHLLGGRLMHWIDISGALAAHRHCRNYVVTASIDHLDFLVPVQVGDLVVFQSSVNRAFNTSMEIGVKVLVENYIASTRQHVSSAYLTFVAVDRHGRKLPVPQVIPETEDEKRRYEGALRRREARKSELEHRKAARAKKA

SEQ ID NO: 3672 - DNA, 411 bp, Silicibacter sp. TM1040
  CDS (1)..(411): transl_table=11
atgtccacatctcaaccagatactgccccgcaaaatccgcccgagacccaaccgacaatccgcgtcatcgcgatgcccacggacaccaacccggcgggtgatatctttggtggctggctcatgagccagatggatcttgcggcaggcaccatcgcggcaagggtatccaaggggcgggcttcaaccgtctcggtcgaggagattcagtttcatcgccccgttctggtgggcgacgaggtctcgctatatgcggagatgctgaaaatcgggcgcacctcgatgcgcatccgtgtgcgcgcctggcgtcgcgcccgccatcaggaagaaacccagcaggtgacagaagcgatcttcaccttcgtggcgctggacgaccatgcgcggccgaggccggtgctgcgcgaggcgtaa

SEQ ID NO: 3673 - protein, 136 aa, Silicibacter sp. TM1040
MSTSQPDTAPQNPPETQPTIRVIAMPTDTNPAGDIFGGWLMSQMDLAAGTIAARVSKGRASTVSVEEIQFHRPVLVGDEVSLYAEMLKIGRTSMRIRVRAWRRARHQEETQQVTEAIFTFVALDDHARPRPVLREA

SEQ ID NO: 3674 - DNA, 519 bp, Myxococcus xanthus DK 1622
  CDS (1)..(519): transl_table=11
atgaccgacctgagcgcgaagaatccgaaggacacggaggtggtgatgacccagctcatcctgcctccggacgccaacaacctggatgctgccttcggcggcaaggtgatgcagtggattgacatctgcggggccgtggccgcgcagcgccactgccggcaggtcgtggtcacggcctccatggatgatttgcacttccacgcccccatcaaggtcggctgggtcgcgctgctgcacggccgggtgctggccgccttccgcacctccatggaggtgggcgtcacggtgcacgcggagaacccgctcaccggcgagcgtcacctcaccaccagcgcgctgctgaccttcgtggccatcgacaaggacggccagcgcgtgccggtgccgccccttctgatggagacggacgcggaccgcatggccttccaggaggcacagacacgtcggacgctgcgtctggcccggcagaaggagaaccagtcctggttgaaggtgatgacgcccatcgcgggtgcctga

SEQ ID NO: 3675 - protein, 172 aa, Myxococcus xanthus DK 1622
MTDLSAKNPKDTEVVMTQLILPPDANNLDAAFGGKVMQWIDICGAVAAQRHCRQVVVTASMDDLHFHAPIKVGWVALLHGRVLAAFRTSMEVGVTVHAENPLTGERHLTTSALLTFVAIDKDGQRVPVPPLLMETDADRMAFQEAQTRRTLRLARQKENQSWLKVMTPIAGA

SEQ ID NO: 3676 - DNA, 393 bp, Mesorhizobium sp. BNC1
  CDS (1)..(393): transl_table=11
atggctgaaacctctgccgccccgcggggcgagcttacgattcgcacccaggcgatgcccggagatgccaatgccgccggagacattttcggcggctgggtgatgtcgcagatggatctggcaagcggcattagggcagcggaacgggcgcgcgggcgcgtcgtgacggctgccgtcagggaaatgcactttcgcaagccggttcaggtcggtgatacgctttgtgtctatacccaggtgacgaatgttggccgcacctctatcacgctaaaggtggaggcatgggcacagcgttacctgtccgacgtcatggacctggtcaccatggcggacttcgtcatggtcgcgcttgacgggaccggccggccgacaccggtgccgcccgagttctga

SEQ ID NO: 3677 - protein, 130 aa, Mesorhizobium sp. BNC1
MAETSAAPRGELTIRTQAMPGDANAAGDIFGGWVMSQMDLASGIRAAERARGRVVTAAVREMHFRKPVQVGDTLCVYTQVTNVGRTSITLKVEAWAQRYLSDVMDLVTMADFVMVALDGTGRPTPVPPEF

SEQ ID NO: 3678 - DNA, 465 bp, Haemophilus somnus 129PT
  CDS (1)..(465): transl_table=11
atgtcagtatttattgaaactaatacaggtcgtcaatcgaagggagttctcttattacgtaccttagctatgccttcaaatacgaatgcgaatggcgatattttcggcggttggattatgtcaaaaatggatataggcggtgccattttagctaaagaaattgctcatggacgtgttgtaacagtagctgtaaacagtatgacatttatcaaacctattgctgtcggcgatgtggtttgctgttatggggaatgtgtaaaaattggccgctcttccgttcaaatcaaaattgaagtatgggtcaaaaaggttgccagcgaacctattggtgaacgctattgtgtaacggaagctgttttcacttttgttgccgtagatgcacaaggtaaacctcgagccataccaagagacaataatccggaagtagaaaaagcattggcacaaatttcggcaaataactcataa

SEQ ID NO: 3679 - protein, 154 aa, Haemophilus somnus 129PT
MSVFIETNTGRQSKGVLLLRTLAMPSNTNANGDIFGGWIMSKMDIGGAILAKEIAHGRVVTVAVNSMTFIKPIAVGDVVCCYGECVKIGRSSVQIKIEVWVKKVASEPIGERYCVTEAVFTFVAVDAQGKPRAIPRDNNPEVEKALAQISANNS

SEQ ID NO: 3680 - DNA, 387 bp, Rhizobium leguminosarum bv. viciae 3841
  CDS (1)..(387): transl_table=11
atgaccgatgccgccaagccgagaggcgaattaacgctgaggacgcttgccatgccgggcgatgccaatccggctggcgatatcttcggcggctgggtcatggcgcagatggaccttgcctccggcatccgtgcagccgagcgcgccaagggccgcgtcgtcaccgccgccgtcaaggagatggccttcgagctgccggtcaagatcggcgacacgttgtctgtctataccgatatcgaccgcgtcggccgcacctcgatcacgctctgcgtcgaagcctgggcgcaccgcgcacgttacgccaagatggaaaaggtcacagctggcaccttcatcatggtggcgctcgacgaagagggcaaaccgaagcaagtccccgaggagtga

SEQ ID NO: 3681 - protein, 128 aa, Rhizobium leguminosarum bv. viciae 3841
MTDAAKPRGELTLRTLAMPGDANPAGDIFGGWVMAQMDLASGIRAAERAKGRVVTAAVKEMAFELPVKIGDTLSVYTDIDRVGRTSITLCVEAWAHRARYAKMEKVTAGTFIMVALDEEGKPKQVPEE

SEQ ID NO: 3682 - DNA, 390 bp, Magnetococcus sp. MC-1
  CDS (1)..(390): transl_table=11
atgcaaggtgaactgccgagtgaattgaccatacgtaccctggcgatgcccgccgataccaatccgtcgggggatatttttgggggctgggtgatgtcccaaatggacttggccgccggtatctgtgccgggcaacgggcaaggcggcgggtggtgacggtggccgtggatgccatgagctttattcaacccgtgcgggtgggcgacgacctatgcgtctatacccaagtggtcaccgtagggcgtacctcgatgaccatccaagtggaagcatgggcacgtcgtgaccgcatcggggaacgggttaaagtgacccaggcccactttaaatttgttgctctggatgacgaaggccgaccgacccccattcccgcactaagcgaaatctaa

SEQ ID NO: 3683 - protein, 129 aa, Magnetococcus sp. MC-1
MQGELPSELTIRTLAMPADTNPSGDIFGGWVMSQMDLAAGICAGQRARRRVVTVAVDAMSFIQPVRVGDDLCVYTQVVTVGRTSMTIQVEAWARRDRIGERVKVTQAHFKFVALDDEGRPTPIPALSEI

SEQ ID NO: 3684 - DNA, 432 bp, Acidovorax sp. JS42
  CDS (1)..(432): transl_table=11
atgtcccaggatcgccccgcctcccacacccagctgcccgccgacaaggaactggtactcaaggtgatacccatgcccgccgacaccaacggcaatggcgacatcttcggcggctgggtcatggcgcaggtggatctggccggctccgtgctgcccgcgcggtacatccgcggccgcatggccacggtggcggtgaacgaattcatcttcaagcagcccgtgcgcgtgggcgacctgctgtcgttctttgccgaagtcacgcgcatcggcaacacctccatgaccgtgcaggtggaggtctatgccgagcacatccgcacccagggcagctacgtgaaggtgaccgaggcgtcgctgacctatgtggccatcgacgaaaacggccgcccgcgccccattcggaagccgggcgacgaaagcgtcgcgccgtaa

SEQ ID NO: 3685 - protein, 143 aa, Acidovorax sp. JS42
MSQDRPASHTQLPADKELVLKVIPMPADTNGNGDIFGGWVMAQVDLAGSVLPARYIRGRMATVAVNEFIFKQPVRVGDLLSFFAEVTRIGNTSMTVQVEVYAEHIRTQGSYVKVTEASLTYVAIDENGRPRPIRKPGDESVAP

SEQ ID NO: 3686 - DNA, 501 bp, Acidovorax sp. JS42
  CDS (1)..(501): transl_table=11
atgcaccttcccgcgcaccaactcagcatgaccgtgctcatgtcgcccgacatggccaacttctccggcaacgtccacggcggcgccatcctcaagctgctggaccaggtggcctatgcctgcgccagccgctattcgggcagctacgtggtcacgctgagcgtagaccaggtgatgttcctgcagcccatccacgtgggcgaactggtgaccttcctggccagcgtcaaccacacgggcacatcgtccatggagatcggcatcaaggtggtggccgagaacatccgcacccaggtggtgcggcatgtgaacagctgtttcttctcgatggtggcggtggacgatgcgggcaaacccacccccgtgccgccgctggctcccaccagctacgacgagcgccgccgctgggaggccgcgctgctgcgcaaggccctgcgcaaggaacaggccgagcgcttcgcgcagatccgccaggcggcgcaggccagcgccgccggctga

SEQ ID NO: 3687 - protein, 166 aa, Acidovorax sp. JS42
MHLPAHQLSMTVLMSPDMANFSGNVHGGAILKLLDQVAYACASRYSGSYVVTLSVDQVMFLQPIHVGELVTFLASVNHTGTSSMEIGIKVVAENIRTQVVRHVNSCFFSMVAVDDAGKPTPVPPLAPTSYDERRRWEAALLRKALRKEQAERFAQIRQAAQASAAG

SEQ ID NO: 3688 - DNA, 420 bp, Magnetospirillum magnetotacticum MS-1
  CDS (1)..(420): transl_table=11
atgagcgagagccccaggccggaaagcattgagatcagcggggcgccgcgcggccgcctgtccacccgggccattgccatgcccgccgacaccaatccgttcggccatgtgttcggcggctggctgatgagccagatggatctggcgggcggcacccattcctatcgccgggcgcgcggccacacgcccaccgtggcggtggagggcatggaattccatcagccggtttatgtgggcgacgaggtcagctgctacaccgaggtcatccgggtgggacggacctccatctccatccgggtggaggcctgggtgcgccgccatggcggcagcgacgccctggtccgggtgaccagcgccgtcttcacctatgtggcggtggacgatcagggaaagaagcggccggtcccgcccgaggagtga

SEQ ID NO: 3689 - protein, 139 aa, Magnetospirillum magnetotacticum MS-1
MSESPRPESIEISGAPRGRLSTRAIAMPADTNPFGHVFGGWLMSQMDLAGGTHSYRRARGHTPTVAVEGMEFHQPVYVGDEVSCYTEVIRVGRTSISIRVEAWVRRHGGSDALVRVTSAVFTYVAVDDQGKKRPVPPEE

SEQ ID NO: 3690 - DNA, 375 bp, Erythrobacter sp. NAP1
  CDS (1)..(375): transl_table=11
atggctgaccgcgaactcatgatccgcgccaccgcaatgccgaccgatctcaatccgtacggcggggtgttcggcggctggctgatggcgcagatggccttgggcgcgggcgcgctggcgagccgcgtggggaagggcaaggcggtggtggtccacgcaaccgacttcacctttccgggcgcaatggtggtgggcgatgaactcagcgtctattgcgagattacagcgagcgggaccacgtcactgaccatcaaggctgaaggggtcgggcgcgaacgcgatggggaggcgaccaccaaagtgagcgccgggacattcaaatttgtgctgctcgacgagaacgaccgcccgcgcaaagtggatcgcaccaaatga

SEQ ID NO: 3691 - protein, 124 aa, Erythrobacter sp. NAP1
MADRELMIRATAMPTDLNPYGGVFGGWLMAQMALGAGALASRVGKGKAVVVHATDFTFPGAMVVGDELSVYCEITASGTTSLTIKAEGVGRERDGEATTKVSAGTFKFVLLDENDRPRKVDRTK

SEQ ID NO: 3692 - DNA, 402 bp, Oceanospirillum sp. MED92
  CDS (1)..(402): transl_table=11
atgaaccacgaaattgacaacaatcttcagcctgaaggcgaattaagccttcttcttccagccggcagtgacgcgactaatatgtttggtgatgtttttggtggttgggtatcagccaagatggtccaggcatcggagatatatgcagctaaactttccaagggacgtgtttcgactgtctctataggacagatggcatttatgtctcctgttcgagaaggtaccgtgatgtccttctataccaaactgattgaaagtggacgtagctcgttaagagtgagtgttgaagcctggggctgctgcccggatggctctgaactgcgaaaggtcaccgagacagagtgtgttcaagtggctattgatggtcacggccatatccgtgatatcgccgcttttgattaa

SEQ ID NO: 3693 - protein, 133 aa, Oceanospirillum sp. MED92
MNHEIDNNLQPEGELSLLLPAGSDATNMFGDVFGGWVSAKMVQASEIYAAKLSKGRVSTVSIGQMAFMSPVREGTVMSFYTKLIESGRSSLRVSVEAWGCCPDGSELRKVTETECVQVAIDGHGHIRDIAAFD

SEQ ID NO: 3694 - DNA, 399 bp, Oceanobacter sp. RED65
  CDS (1)..(399): transl_table=11
atgactgattttacagaagatacacccttgccaaacgggcgcttaaccttgcgactagtgcccacgcctgccgataccaatgccagtggcgacgtaagcggtggctgggttctaaataaaatggatatggccgcggaagataccgcacgtatgatcgcgaaaggtcgtgtcaccatggtagcgacagaaagtacaacttttttatcaccagttaaagcaggccatgccatttgctgttacaccaaagtcactgaaattggtcgcagctccattcgaattcaagtagaagtgtggagtcaaaatacgttttatgacgagctgacaaaagtcagtgaatccacgtttgtttatgtcgccatggacgagaatgggcgcattcgccctgtaccggatgcctaa

SEQ ID NO: 3695 - protein, 132 aa, Oceanobacter sp. RED65
MTDFTEDTPLPNGRLTLRLVPTPADTNASGDVSGGWVLNKMDMAAEDTARMIAKGRVTMVATESTTFLSPVKAGHAICCYTKVTEIGRSSIRIQVEVWSQNTFYDELTKVSESTFVYVAMDENGRIRPVPDA

SEQ ID NO: 3696 - DNA, 405 bp, marine gamma proteobacterium HTCC2143
  CDS (1)..(405): transl_table=11
atgagtgacgacgatttaaacgacgacataccaaccccagcaggcgaacttgccctaagaactattgcgatgcccgccgacaccaatgccagtaatgatatatttggcggctggttggtttcacaaatggatttggccgccgccgccaccgctacgaaaattgcacgaggaagagtcgtcactgtcgcgatcgatagtatggtttttctaacacccgttcacgttggcgctgtagtgacttgttatgccaacgtcctcgaagttggccgtagttccattaaaattaatgtggaagtatggactaaacaccaaacaacttatgagccaacaaaagtcactgaaggtgattttgtgttcgttgcagttgatgatgccggtaaaacgcgggcggttccagctagctag

SEQ ID NO: 3697 - protein, 134 aa, marine gamma proteobacterium HTCC2143
MSDDDLNDDIPTPAGELALRTIAMPADTNASNDIFGGWLVSQMDLAAAATATKIARGRVVTVAIDSMVFLTPVHVGAVVTCYANVLEVGRSSIKINVEVWTKHQTTYEPTKVTEGDFVFVAVDDAGKTRAVPAS

SEQ ID NO: 3698 - DNA, 405 bp, marine gamma proteobacterium HTCC2080
  CDS (1)..(405): transl_table=11
atgactgaccttgatatgaaccccaccccccagggcgagctaagccttcaggccgtagccatgcctgcggacactaaccctcatggggatatatttggcggctggctaatgtcacaaatggacttggcgggctacgtcacagcttgtgacgtagcgggcggcagagtcgccactgttgctgtagaaggtatggtgtttctgacgcccgttcatgtcggtgcggtagtgagctgctactcagacattttagaaattgggcgtagctcggtgcgggtaatcgtagaggtctggattaactcccgccaagacggagaacccattaaagtcaccgaggggacttttatttatgtcgccattggtggcgataagcgaactcgagccattcaacgcccaggttcagcctga

SEQ ID NO: 3699 - protein, 134 aa, marine gamma proteobacterium HTCC2080
MTDLDMNPTPQGELSLQAVAMPADTNPHGDIFGGWLMSQMDLAGYVTACDVAGGRVATVAVEGMVFLTPVHVGAVVSCYSDILEIGRSSVRVIVEVWINSRQDGEPIKVTEGTFIYVAIGGDKRTRAIQRPGSA

SEQ ID NO: 3700 - DNA, 486 bp, Pseudomonas putida GB-1
  CDS (1)..(486): transl_table=11
atggaacctggaaacgcccagctgagcatgaccgtcctgatgaccccggacatggccaacttttctggcaacgtacatggcggcaccctgctcaagtacctcgacgaagtggcctacgcctgcgccagccgctatgccggtagctatgtggtgaccctgtcggtcgaccaggtgatcttccgcgaacccgtacacgtaggtgaactggtgaccttcctcgcgtcggtcaactacaccggcaacacctcgatggaggtcggcatcaaagtggtgaccgagaacatccgcgagcgctcggtgcgccactccaacagttgcttcttcaccatggttgcagtcgacgacaatcgccgcccggtgccggtgccaccgcgccagccgcatagcagcgaggaaaagcgccgcttcctgcaaggccatcagcggcgccagatccgccaggagctggagaagcgctaccaggacctgaaaaccgacgcgatctaa

SEQ ID NO: 3701 - protein, 161 aa, Pseudomonas putida GB-1
MEPGNAQLSMTVLMTPDMANFSGNVHGGTLLKYLDEVAYACASRYAGSYVVTLSVDQVIFREPVHVGELVTFLASVNYTGNTSMEVGIKVVTENIRERSVRHSNSCFFTMVAVDDNRRPVPVPPRQPHSSEEKRRFLQGHQRRQIRQELEKRYQDLKTDAI

SEQ ID NO: 3702 - DNA, 564 bp, Pseudomonas putida GB-1
  CDS (1)..(564): transl_table=11
gtgggatgttgtgcgaaaactccggtctttatgtcaggcggtttcgcagagtttccctacggccgcccagtgaaacgaaatcggcgtagtatgtttcaagctgaatcgtttacccggcctttgcgccacaccaacgaaagcgtcacgggtcagaggccccatcgcatgattgagctcgaacaagaagatccgatcccgcaaggcgacctggccttgcagatcaccgcactgccgcgcgagaccaacgggtttggcgacatcttcggcggctggctggttgcccaaatggatttggccggcaccgccatggccagccgtgttgctggcggccgcgtggccaccgtggccatcgaccgcatggccttcctggtaccggtggcagtaggcgcgcagctgtcgttctacacccagaccctggaaatcggccgcagctcgatccagatgatggtcgaagtgtggagcgacgacccgctgtccagcgaatggcgcaaggtcaccgaagcggcattcgtcttcgtcgccatcgacggcagtggccgcacccgctccgtgcctcgtcgctga

SEQ ID NO: 3703 - protein, 187 aa, Pseudomonas putida GB-1
MGCCAKTPVFMSGGFAEFPYGRPVKRNRRSMFQAESFTRPLRHTNESVTGQRPHRMIELEQEDPIPQGDLALQITALPRETNGFGDIFGGWLVAQMDLAGTAMASRVAGGRVATVAIDRMAFLVPVAVGAQLSFYTQTLEIGRSSIQMMVEVWSDDPLSSEWRKVTEAAFVFVAIDGSGRTRSVPRR

SEQ ID NO: 3704 - DNA, 402 bp, Marinobacter sp. ELB17
  CDS (1)..(402): transl_table=11
atgagcacttttgacgacgacaacccaatgcccctcggcgagttaatcctgcgaatcattccattccccggcgataccaacgccaacggcgatgtgttcgcgggctggctggtgaagcaaatggatattgctgcggccactttggcagccaggatatcccaaggccgcagcgccactgtggctatggaccggatggagtttttgtcgccggtgcgggttggctcgcaggttggctgctattgcgagctgatcgaaattggccgtagctcaatgaatattaaagtagaagtgtggactatggaccgctactccgaagatcgccgcaaggtgaccgaaggccgcttcgtttacgtggcgattgatgaagtgggccgtatccgcgaagtgccagaccagtcctga

SEQ ID NO: 3705 - protein, 133 aa, Marinobacter sp. ELB17
MSTFDDDNPMPLGELILRIIPFPGDTNANGDVFAGWLVKQMDIAAATLAARISQGRSATVAMDRMEFLSPVRVGSQVGCYCELIEIGRSSMNIKVEVWTMDRYSEDRRKVTEGRFVYVAIDEVGRIREVPDQS

SEQ ID NO: 3706 - DNA, 411 bp, Moritella sp. PE36
  CDS (1)..(411): transl_table=11
atgattatgactataccaaaaggccaactattaacacgtacgttatcaatgccgagtgattgcaatgcaaatggcgatatcttcggtggttggataatgtcacaaatggatatcgcaggtggtattttagcaaaagaggtagcacaaggacgagtagctactatttccgttgatggtatgacatttcataaaccggttgctgttggtgatgtggtttgttgttatggttcgtgtactcgcattggtaattcttcaatgacgattaaattagagatctgggttaagccgttaatcaacgcgcctaaagtgaactaccgttatatcgttactgaagcaacatttacttatgttgctatcgatgataatggtcagtcgcgtaaaattgaacgtatgtgcgaactgccatcgtaa

SEQ ID NO: 3707 - protein, 136 aa, Moritella sp. PE36
MIMTIPKGQLLTRTLSMPSDCNANGDIFGGWIMSQMDIAGGILAKEVAQGRVATISVDGMTFHKPVAVGDVVCCYGSCTRIGNSSMTIKLEIWVKPLINAPKVNYRYIVTEATFTYVAIDDNGQSRKIERMCELPS

SEQ ID NO: 3708 - DNA, 414 bp, Magnetospirillum gryphiswaldense
  CDS (1)..(414): transl_table=11
atgttgggacaagatatgagcgaaagcatcgaaaccacgaccgcgccaaggggccggttgtccatccgcaccgtcgccatgcccgccgacaccaacccgcacggggccattttcggcggctggctgctggcccagatggatctggccggcggcacccacgcgctgcaccgggccaaaggcatggtggtgacggtggcggtggacagcatgaccttccatgaaccggtgttcgtcggcgacgaggtcagctgctataccgacgtggtccgggtcggcaattcgtccatttccgtccgcgtcgaggcctgggtccggcgcgacaacaaagacgaacagatcaaggtgaccagtgccctgttccacttcgtcgccgtcaaccccgaccggtcgaagcggcgggtaccgccggaatga

SEQ ID NO: 3709 - protein, 137 aa, Magnetospirillum gryphiswaldense
MLGQDMSESIETTTAPRGRLSIRTVAMPADTNPHGAIFGGWLLAQMDLAGGTHALHRAKGMVVTVAVDSMTFHEPVFVGDEVSCYTDVVRVGNSSISVRVEAWVRRDNKDEQIKVTSALFHFVAVNPDRSKRRVPPE

SEQ ID NO: 3710 - DNA, 408 bp, Collimonas fungivorans
  CDS (1)..(408): transl_table=11
atgactgatcaaaacaacaatcaattgccacccgacaccatgccgcagctgcgggtgatgccgatgccgtccgacgccaacgtgcacggcgacgtcttcggcggctggatcatggcacaagtcgacattgccggctcgctgccggccacccgtcgcgccaacggccgtgtcgccacgatcgcggtgaactcctttttgttcaagcagccggtgtttgtcggcgacctgctgtcgttttatgccgagatcgtcaaggtcggcaatacttcgatcaccgtcaacgtcgaggtgtatgccgaacgcaaccggctgcagacggaagtcgtgaaagtgaccgaagcgacgctgacttatgtcgccaccgacgcccagcgcaagccgcgtcagctgccgccgctggcgtcctga

SEQ ID NO: 3711 - protein, 135 aa, Collimonas fungivorans
MTDQNNNQLPPDTMPQLRVMPMPSDANVHGDVFGGWIMAQVDIAGSLPATRRANGRVATIAVNSFLFKQPVFVGDLLSFYAEIVKVGNTSITVNVEVYAERNRLQTEVVKVTEATLTYVATDAQRKPRQLPPLAS

SEQ ID NO: 3712 - DNA, 411 bp, Defluvibacter lusatiensis
  CDS (1)..(411): transl_table=11
atgtctgaccgcggcctgccgccttcgaagaacccggcgatccgaacggtcgccatgccggcggatacaaatcccgccggcgatatctttggcggatggctgatgtctcagatggatctcgccgcgggctgtcttgccgcaagcaccgcacgagggcgaagcgccacaatcgcggtcgaggcaatgcggtttctccgccccgtaagggtgggcgacgaggtttcactcttcgccgatctggtctccgtcggccgcagttcgatgcggatccatgtcgaagcctggcgccggagccgcgacagcattgagagcgagaaagtcacccaggcgaatttcacattcgtggcgctcgatccgcaaggacggccgcgatccgtggacgtcgcggcctcacgaagctcagaaaactga

SEQ ID NO: 3713 - protein, 136 aa, Defluvibacter lusatiensis
MSDRGLPPSKNPAIRTVAMPADTNPAGDIFGGWLMSQMDLAAGCLAASTARGRSATIAVEAMRFLRPVRVGDEVSLFADLVSVGRSSMRIHVEAWRRSRDSIESEKVTQANFTFVALDPQGRPRSVDVAASRSSEN

SEQ ID NO: 3714 - DNA, 408 bp, Buchnera aphidicola subsp
  CDS (1)..(408): transl_table=11
atgaacataaaaaatcaaaaaccaaagggtaaaatggtattaagaactttagcaatgccagcagatacaaacgcaaacggagatatattcgggggttggataatgtctcaaatggatattggaggagctatattagctaaagaaatagccagggggcgagtagtgacagtgagtgtgaatggtatgacatttttaaagtcagtatcagtaggtgatgtagttagctgttatgcgcactgcattcgaacaggaaacacatctattactataaaaatagaagtatggattaaaaaagtatcatcagaaccgttaggaaaattttattgtactacagaagcaatatttgtttatgtagccgtagatgaatttggacaacccaaaacattgctaccattcagtattatttaa

SEQ ID NO: 3715 - protein, 135 aa, Buchnera aphidicola subsp
MNIKNQKPKGKMVLRTLAMPADTNANGDIFGGWIMSQMDIGGAILAKEIARGRVVTVSVNGMTFLKSVSVGDVVSCYAHCIRTGNTSITIKIEVWIKKVSSEPLGKFYCTTEAIFVYVAVDEFGQPKTLLPFSII

SEQ ID NO: 3716 - DNA, 450 bp, Zymomonas mobilis
  CDS (1)..(450): transl_table=11
atgagtaatcaggtcacaaaatcggataattcagaacccttagcacctgccggagaacccgccattcgcgttattgctatgccagcaaatacgaatgccgatggtcggatgtttggtggttggctcatgggtatgttggatcaagccgccggtttggttgctgctcgccatgctttggctcgggttgtaaccgtcgctgccgattctatcacttttcatgcgccggttcaggtcggcgatgaattgtcgctttatgctcgattggtgaaagttggccggacttcaatgaaaattgaagtcgaaggttggcggcgtgtccggcatgagctggaaaccataaaagctatttctggcttgtttacttttgttgccattgatgaagatcgtcgcccttgtcaggtgccgccgatgaatgaaacgcggttgttatccgataaagctgataaatag

SEQ ID NO: 3717 - protein, 149 aa, Zymomonas mobilis
MSNQVTKSDNSEPLAPAGEPAIRVIAMPANTNADGRMFGGWLMGMLDQAAGLVAARHALARVVTVAADSITFHAPVQVGDELSLYARLVKVGRTSMKIEVEGWRRVRHELETIKAISGLFTFVAIDEDRRPCQVPPMNETRLLSDKADK

SEQ ID NO: 3718 - DNA, 465 bp, Haemophilus influenzae
  CDS (1)..(465): transl_table=11
atgtctgccaattttactgataaaaatggtcgccaatcaaaaggagttcttttactacgaactttggcgatgccttctgacaccaatgctaacggagatatttttggtggctggattatgtctcaaatggatatgggcggcgcgattttagcgaaagaaatcgcacacggacgcgtggttactgtcgccgttgaaagtatgaattttatcaaaccaatctctgtgggcgatgtggtttgttgctacggtcaatgtctcaaagttgggcgttcttccattaaaattaaagtagaagtatgggtaaaaaaagtggcgagtgagccaattggcgaacgttattgtgtcaccgatgcggtatttacttttgttgcagttgataataatggtcgctctcgcacgattccccgtgaaaataaccaagagttagaaaaagcattagccttaatttcagaacaacccttgtaa

SEQ ID NO: 3719 - protein, 154 aa, Haemophilus influenzae
MSANFTDKNGRQSKGVLLLRTLAMPSDTNANGDIFGGWIMSQMDMGGAILAKEIAHGRVVTVAVESMNFIKPISVGDVVCCYGQCLKVGRSSIKIKVEVWVKKVASEPIGERYCVTDAVFTFVAVDNNGRSRTIPRENNQELEKALALISEQPL

SEQ ID NO: 3720 - DNA, 399 bp, Escherichia coli O6
  CDS (1)..(399): transl_table=11
atgtctacaacacataacgtccctcagggcgatcttgttttacgtactttagccatgcccgccgataccaatgccaatggtgacatctttggtggttggttaatgtcacaaatggatattggcggcgctattctggcgaaagaaattgcccatggtcgtgtagtgaccgtgcgggttgaaggaatgactttcttacggccggttgcggtcggcgatgtggtgtgctgctatgcacgctgtgtccagaaagggacgacatcagtcagcattaatattgaagtgtgggtgaaaaaagtggcgtctgaaccaatcgggcaacgctataaagcaacagaagcattatttaagtatgtcgcggttgatcccgaaggaaaacctcgcgccttacccgttgagtaa

SEQ ID NO: 3721 - protein, 132 aa, Escherichia coli O6
MSTTHNVPQGDLVLRTLAMPADTNANGDIFGGWLMSQMDIGGAILAKEIAHGRVVTVRVEGMTFLRPVAVGDVVCCYARCVQKGTTSVSINIEVWVKKVASEPIGQRYKATEALFKYVAVDPEGKPRALPVE

SEQ ID NO: 3722 - DNA, 402 bp, Salmonella typhi
  CDS (1)..(402): transl_table=11
atgacaacaatggataatactcctcagggcgagctggttttacgtacattggccatgcctgccgataccaatgcgaacggcgatatttttggcggctggctgatgtcgcaaatggatattggcggcgcgatactggccaaagagatcgcgcacggtcgggttgtaaccgtacgcgtggaaggaatgacatttctgcgccccgtcgcggttggcgatgtcgtatgctgctacgcgcgctgcgttaaacgcggtacgacgtctattagcatcaatattgaagtctgggtgaaaaaagtcgcgtcagaaccgattggacagcgctacaaggccaccgaggcgctgtttatttatgttgccgtcgatccggacggtaaacctcgcccgctcccggttcagggttaa

SEQ ID NO: 3723 - protein, 133 aa, Salmonella typhi
MTTMDNTPQGELVLRTLAMPADTNANGDIFGGWLMSQMDIGGAILAKEIAHGRVVTVRVEGMTFLRPVAVGDVVCCYARCVKRGTTSISINIEVWVKKVASEPIGQRYKATEALFIYVAVDPDGKPRPLPVQG

SEQ ID NO: 3724 - DNA, 21 bp, Artificial sequence
  primer
atgactgaactcgaacaggac

SEQ ID NO: 3725 - DNA, 20 bp, Artificial sequence
  primer
ctagcggcgcggcaccgcgc

SEQ ID NO: 3726 - protein, 106 aa, Artificial sequence
  consensus sequence
  Variant (2)..(2): Xaa in position 2 is any amino acid
  Variant (4)..(4): Xaa in position 4 is any amino acid
  Variant (6)..(7): Xaa in position 6 to 7 is any amino acid
  Variant (9)..(10): Xaa in position 9 to 10 is any amino acid
  Variant (15)..(19): Xaa in position 15 to 19 is any amino acid
  Variant (21)..(26): Xaa in position 21 to 26 is any amino acid
  Variant (28)..(36): Xaa in position 28 to 36 is any amino acid
  Variant (37)..(37): Xaa in position 37 is any or no amino acid
  Variant (39)..(45): Xaa in position 39 to 45 is any amino acid
  Variant (47)..(48): Xaa in position 47 to 48 is any amino acid
  Variant (50)..(51): Xaa in position 50 to 51 is any amino acid
  Variant (54)..(65): Xaa in position 54 to 65 is any amino acid
  Variant (67)..(68): Xaa in position 67 to 68 is any amino acid
  Variant (70)..(88): Xaa in position 70 to 88 is any amino acid
  Variant (89)..(95): Xaa in position 89 to 95 is any or no amino acid
  Variant (97)..(102): Xaa in position 97 to 102 is any amino acid
  Variant (105)..(105): Xaa in position 105 is any amino acid
PXDXNXXGXXFGGWXXXXXDXXXXXXAXXXXXXXXXXTXXXXXXXFXXPXXVGXXXXXXXXXXXXGXXSXXXXXXXXXXXXXXXXXXXXXXXXXXTXXXXXXVAXD

SEQ ID NO: 3727 - protein, 33 aa, Artificial sequence
  protein pattern
  Variant (2)..(4): Xaa in position 2 to 4 is any amino acid
  Variant (5)..(6): Xaa in position 5 to 6 is any or no amino acid
  Variant (8)..(9): Xaa in position 8 to 9 is any or no amino acid
  Variant (11)..(11): Xaa in position 11 is any amino acid
  Variant (12)..(12): Xaa in position 12 is Ile, Leu, Met or Val
  Variant (13)..(13): Xaa in position 13 is any amino acid
  Variant (16)..(16): Xaa in position 16 is any amino acid
  Variant (17)..(17): Xaa in position 17 is Ile, Leu or Val
  Variant (18)..(18): Xaa in position 18 is Leu, Met or Val
  Variant (19)..(20): Xaa in position 19 to 20 is any amino acid
  Variant (21)..(21): Xaa in position 21 is Ile, Leu, Met or Val
  Variant (23)..(24): Xaa in position 23 to 24 is any amino acid
  Variant (25)..(25): Xaa in position 25 is Ala, Cys, Gly or Ser
  Variant (26)..(28): Xaa in position 26 to 28 is any amino acid
  Variant (30)..(32): Xaa in position 30 to 32 is any amino acid
  Variant (33)..(33): Xaa in position 33 is Ala, Cys, Gly or Ser
PXXXXXNXXGXXXGGXXXXXXDXXXXXXAXXXX

SEQ ID NO: 3728 - DNA, 666 bp, Azotobacter vinelandii
  CDS (1)..(666): transl_table=11
atgagttaccagcaccaatacctcgacggtacgcgcatccactacccgctgggcaaggtggtctgcgtcggccgcaactacgccgagcacgcccgggagctgaacaacccggtgccgaccgagcccctgctgttcatcaagccgggcagttgcacggtgccgctggaaggcggcttcagcattccgcaggaccgtggctcggtgcactacgaggcggaaatcgccgtgctgatcggcaagccgctgtcgcaccagccgggcgccgaggaggtgcgcgacgccatctccggcttcgctccggccctcgacctgaccctgcgcgacgtgcaggccagactcaaggaaaaggggctgccctgggaactggccaagtccttcgacggcgcctatgtgctggcgcccttcgtgtccggcgatgccgtcgaggatctcaccgacatcggcatccgtctgaccatcaacggcgagctgcgccaggacggcaacagccgcgacatgctcaatcccatcatcgcgctgatccagcacatcgccgggcatttcagcctgcagccgggcgacgtggtatccaccggcacgccggccggcgtcggcccgttcgccagcggcgatcgtctggtgctggagctgaccgggctgtcccgcttcgaaagccgggtgctctga

SEQ ID NO: 3729 - protein, 221 aa, Azotobacter vinelandii
MSYQHQYLDGTRIHYPLGKVVCVGRNYAEHARELNNPVPTEPLLFIKPGSCTVPLEGGFSIPQDRGSVHYEAEIAVLIGKPLSHQPGAEEVRDAISGFAPALDLTLRDVQARLKEKGLPWELAKSFDGAYVLAPFVSGDAVEDLTDIGIRLTINGELRQDGNSRDMLNPIIALIQHIAGHFSLQPGDVVSTGTPAGVGPFASGDRLVLELTGLSRFESRVL

SEQ ID NO: 3730 - DNA, 766 bp, Triticum aestivum
  CDS (46)..(723)
  misc_feature (97)..(97): n is a, g, c or t
attacgatttagagggagggaggaagaagaatcagatcggagaaaatgacaatgacgacgtcgatgatacagaggctgttcacgcaaggcaccaagntcgtctgcgtcgggcgtaactacgccgctcacgccaaagaactaggcaacgccgttcccaaggaaccagttatattcttaaagccgacgtcatcatacttagagaacggaggaacgattgagattccacatcctctagaatcactccatcatgaggtggagctcgctgtagtgatgggagagaaggctagagatgtacccgaggcaaccgccatggattacattggaggatatgcggttgctcttgatatgactgctagggaactccaagctactgccaaggcatctggtctcccttggactcttgctaaaggacaggatactttcactccaataagctctgttctgccaaaggcgatggtgcatgatcctgataacctagaactttggctgaaggttgatggtgaaacaagacagaagggtttgacaaaagatatgatcttcaaggttccgtacctcatcagctacataagctctataatgactctctacgaaggagatgtcatcttgacaggtacgccagaaggtgttggacctgtaaagataggacagaagataaccgcagggatcactggtctatctgaagttcagttcgatgttgataggcgtctaaagcctttgagttaattgttttgtttgtgtttcatataatactattaataaaaatgtt

SEQ ID NO: 3731 - protein, 225 aa, Triticum aestivum
  misc_feature (18)..(18): The Xaa at location 18 stands for Ile, Leu, Phe, or Val.
MTMTTSMIQRLFTQGTKXVCVGRNYAAHAKELGNAVPKEPVIFLKPTSSYLENGGTIEIPHPLESLHHEVELAVVMGEKARDVPEATAMDYIGGYAVALDMTARELQATAKASGLPWTLAKGQDTFTPISSVLPKAMVHDPDNLELWLKVDGETRQKGLTKDMIFKVPYLISYISSIMTLYEGDVILTGTPEGVGPVKIGQKITAGITGLSEVQFDVDRRLKPLS

SEQ ID NO: 3732 - DNA, 1152 bp, Zea mays
  CDS (168)..(863)
ccggcccggccatctcaagggccccgccggattttcttaaaaaaaaatctcaatcgcaacaacacaaaaaaggcccgcaatatcgattagcgagagtcgttcctccaccaaccaattcgcttctccgtcaacatcacttcatcgtcgacgcctccggcccaccaaccatgccggcggccatggcggctgcggcggcgcagaggctcctcgcggcgagcacgaaaatcattggcgttgggcgcaactacatagcccacgccaaggagctcggcaatccggtccccaaggagcccgtcctgttcctgaagccgacctcgtcgtttctccacgctggtgtggccaccgccgccgtcgagatcccggagccgctcgagtcgctacaccacgaggtcgagctcgccgtcgtcatctcccggcgcgggcgcgacgttcccgaggcgtccgccatggactttgttggaggttatgcacttgctttggacatgacagcaagggaccttcagtctgttgctaagtctgcaggccttccatggactttggctaaaggacaagacaccttcaccccaattagtgcagtagttccaaaatcagctgtcactaatcccgatgatctcgagctctggctgaaggtagatgatgaactaaggcagaaaggaccgacaagcgacatgctattcaagattccttttctgataagctatatcagttccatcatgacattaatggagggtgatgtgatactaacaggtactcctgagggtgtgggtcctgtccgagtaggtcagaagattacagctggtataactgacctaattgatgttgagttcgatgttcagaggcgcaatcggtcattttccacatgatgcaataagcaagaaagtaatggtgaatacaaagtgcagtactcgtcctcgaccttgaatcgcattactggacctggagccattgcagatagctcttgagccttaccttgatttaatttacctgggttttgagagactatctatgaatatgctaactcgttcgtaaagtatctttttgtcccaattttgattgatggagctttaagcttgcttttctgtatgcaataaaaaaacttatcacatttttctttcaaaaaaaaaaaaaaaaaactcgggggggggcccggta

SEQ ID NO: 3733 - protein, 231 aa, Zea mays
MPAAMAAAAAQRLLAASTKIIGVGRNYIAHAKELGNPVPKEPVLFLKPTSSFLHAGVATAAVEIPEPLESLHHEVELAVVISRRGRDVPEASAMDFVGGYALALDMTARDLQSVAKSAGLPWTLAKGQDTFTPISAVVPKSAVTNPDDLELWLKVDDELRQKGPTSDMLFKIPFLISYISSIMTLMEGDVILTGTPEGVGPVRVGQKITAGITDLIDVEFDVQRRNRSFST

SEQ ID NO: 3734 - DNA, 660 bp, Klebsiella pneumoniae subsp. pneumoniae MGH 78578
  CDS (1)..(660): transl_table=11
atgtaccaacatcataactggcagggtgcgcttctggattatccagtaagcaaagtagtgtgcgtcggcagtaattatgcgaaacacatcaaggaaatgggcagtgcgacgccggaagagccggtgctgtttattaaacctgagactgcgctgtgcgatcttcgtcagccgttggtgcttcctgaggggctgggctcggtgcatcacgaagtcgagctggcggtgcttatcggcagcacgctgcgtcaggcgacggaagagcatgtgctgaaagggattgccggctatggcgtcgcgctggatctcacgctgcgcgacctgcaggcgaaaatgaaaaaagcgggacaaccctgggagaaggccaaaggcttcgataacgcctgtccgatctccggctttatcccggccgctgagttccacggcgacccgcagaatacgtcgttaagtctgaagattaatggcgaagtgcgccagcagggcaccactgccgacatgatccataggattgtgccgctgatcgcctatatgtcgcgcttctttaccctcaaagccggggatgtgatcctcaccggcaccccggaaggcgtggggccgctgcacagcggtgacgagctggaggtcggcttcaacggcctggcgctcactacccgcgtgctgtaa

SEQ ID NO: 3735 - protein, 219 aa, Klebsiella pneumoniae subsp. pneumoniae MGH 78578
MYQHHNWQGALLDYPVSKVVCVGSNYAKHIKEMGSATPEEPVLFIKPETALCDLRQPLVLPEGLGSVHHEVELAVLIGSTLRQATEEHVLKGIAGYGVALDLTLRDLQAKMKKAGQPWEKAKGFDNACPISGFIPAAEFHGDPQNTSLSLKINGEVRQQGTTADMIHRIVPLIAYMSRFFTLKAGDVILTGTPEGVGPLHSGDELEVGFNGLALTTRVL

SEQ ID NO: 3736 - DNA, 690 bp, Xanthobacter autotrophicus Py2
  CDS (1)..(690): transl_table=11
atggtctcttatgtcttcgcgccgcccgccgtccccacccttcccatcgtgggcagcgatgatcacttcccggtccaccgcatctattgcgtcggccgcaacttcgccgaccatgcggtggagatgggccatgatcccaacaaggagccgcccttcttcttccagaagaatccagacaccctggtgcccaacggcgcgaccatcgcctatccgaagatgtcgcaggacgtgcaccatgagatcgagctggtggtggcgctgaaggccggcggcgaggacattccgctggagcgggcgcttgactgtgtgttcggctatgcggtgggcctcgacctcacccgccgcgacctgcagggcgaggccaagaaactcggccgcccgtgggaagtgggcaaggcgtttgaggaagccgcgccctgctcggccctggtgccggcaaccaccatcggccatccggacgcggggcggatcttcctgaagatcaacggtgcagtgaagcaggagggcaacctcaaccagatgatctggaaggtgccggagatgatcgccaccctctccaccctgttccggctcgcccccggcgacctcatcttcgccggcaccccggccggcgtcggccccatctccaagggcgacgtgctggaaggcggcgtcgagggcgtgggcgaactccggctgacggtggtctga

SEQ ID NO: 3737 - protein, 229 aa, Xanthobacter autotrophicus Py2
MVSYVFAPPAVPTLPIVGSDDHFPVHRIYCVGRNFADHAVEMGHDPNKEPPFFFQKNPDTLVPNGATIAYPKMSQDVHHEIELVVALKAGGEDIPLERALDCVFGYAVGLDLTRRDLQGEAKKLGRPWEVGKAFEEAAPCSALVPATTIGHPDAGRIFLKINGAVKQEGNLNQMIWKVPEMIATLSTLFRLAPGDLIFAGTPAGVGPISKGDVLEGGVEGVGELRLTVV

SEQ ID NO: 3738 - DNA, 675 bp, Arabidopsis thaliana
  CDS (1)..(675)
atggcgacttcgatgattcagagattgttcaaacaaggcacaaagatcgtcggcgttggactcaattacgcttctcacgccaaagaacttggcaatgccctcccaaaggacccgattgtgttcttaaagccaacttcgtcgtacctggaaaacggtggaacaatagagatcccacatccactggattcacttcaccatgaggtggaacttgctgtagtaattggacagaaagcaagagatgtcccagaacggttagccatgaattacattggaggatatgcgcttgctcttgatatgactgctagggaactccaagtttctgccatggcatctggtctcccatgtacgcttgctaaaggacaggataccttcacccccatcagctccgttctaccaaaggcaatggtgctggatcccaataacctggaactctggctaaaggtagatgatgagacaagacagaaaggttggacaaaggatatgatcttcaaggtcccatatctcatcagctacataagttctgtaatgacccttttcaaaggagatgtcatattgacaggtacaccagaaggtataggacctgtaaagataggtcagaagataaccgccggaatcaccggtctttctgaagttcagttcgacgtcggtaggcggctaaagccattgttgagatag

SEQ ID NO: 3739 - protein, 224 aa, Arabidopsis thaliana
MATSMIQRLFKQGTKIVGVGLNYASHAKELGNALPKDPIVFLKPTSSYLENGGTIEIPHPLDSLHHEVELAVVIGQKARDVPERLAMNYIGGYALALDMTARELQVSAMASGLPCTLAKGQDTFTPISSVLPKAMVLDPNNLELWLKVDDETRQKGWTKDMIFKVPYLISYISSVMTLFKGDVILTGTPEGIGPVKIGQKITAGITGLSEVQFDVGRRLKPLLR

SEQ ID NO: 3740 - DNA, 669 bp, Arabidopsis thaliana
  CDS (1)..(669)
atggcgacgtcgatgatacagaggatgttcaagcaagggacgaagatcgtctgcgtcggccgtaactacgccgctcacgccaaagaactaggcaacgccgtccccaaggaaccagttatattcttgaagccaacatcatcatacttagaaaatggaggaacaattgagatcccacatcctttggattcacttcaccatgaagtagaactcgctttagtgattggacagaaagctagagatgtacctgaatcaatagccatggattacattggaggatatgcggttgctcttgatatgactgctagggaactccaagcttctgctaaggcatctggtctcccatggacggttgcgaaaggacaagataccttcactcctatcagctctgttctgccaaaggcgatggtgcgtgatcccgataatctagaactttggctcaaggttgatggtgaaacaagacagaagggtttgaccaaagatatgatattcaaggtcccctacctcattagctacataagttctataatgaccctttacggagatgtcatcttgacaggcacaccagaaggtgttggacctgtaaagataggtcagaagataacggccggaatcaccggtctatctgaagttcaattcgatgtggagaggcgtgtaaagcccttgagctaa

SEQ ID NO: 3741 - protein, 222 aa, Arabidopsis thaliana
MATSMIQRMFKQGTKIVCVGRNYAAHAKELGNAVPKEPVIFLKPTSSYLENGGTIEIPHPLDSLHHEVELALVIGQKARDVPESIAMDYIGGYAVALDMTARELQASAKASGLPWTVAKGQDTFTPISSVLPKAMVRDPDNLELWLKVDGETRQKGLTKDMIFKVPYLISYISSIMTLYGDVILTGTPEGVGPVKIGQKITAGITGLSEVQFDVERRVKPLS

SEQ ID NO: 3742 - DNA, 621 bp, Bacillus halodurans C-125
  CDS (1)..(621): transl_table=11
atggacattcgtaacatttattgcattggccgaaactatgcagaccatgcgagggagcttggcaatgcaataccggacaaaccaatcttattttcaaaaccgacccattcccttacgattgccaatggacagatgctagaatttccgagtaaccgtggagagatccatcatgaactagaaatagttttgcatattggtaagccctacgaaaaaggaatttcgctcgaggaactcgttgatgtcatggcgctaggaatcgattttacgcttcgggatgaacaaaatgaattaaagaaaaaaggccacccatggctgcgagcgaaaggatttaagcatgcggcagtggtgaccgacttttggtcatttcctggagaagaaacgtgcaaggctaccgacttttctttattgattcatgatcaggtcgttcagaaaggaaacatacagcagatgctcttttcttttgaacaaatggttgaagaagtgggtgaagcctttggattaggagagggagacctcttgtttacaggaacgccagaaggggttggaccgatccaatcaggagaccagctttcgcttttttgggggacggaacgaaaagggcatttttctgttcgtatgtag

SEQ ID NO: 3743 - protein, 206 aa, Bacillus halodurans C-125
MDIRNIYCIGRNYADHARELGNAIPDKPILFSKPTHSLTIANGQMLEFPSNRGEIHHELEIVLHIGKPYEKGISLEELVDVMALGIDFTLRDEQNELKKKGHPWLRAKGFKHAAVVTDFWSFPGEETCKATDFSLLIHDQVVQKGNIQQMLFSFEQMVEEVGEAFGLGEGDLLFTGTPEGVGPIQSGDQLSLFWGTERKGHFSVRM

SEQ ID NO: 3744 - DNA, 699 bp, Pseudomonas aeruginosa PAO1
  CDS (1)..(699): transl_table=11
atgaaccatctcttcgcgcccgaagcacccgtcagcctcaccatccatggcagcgaccagaccttcccggtgcggcgggtctactgcgtcggccgcaactacgccgcccacgcccgggaaatgggcttcgatcccgagcgcgagccgccgttcttcttctgcaagccggccgacgcggtggtcccggtcgccgccggcagcaccctggagctggcctacccgagccagaccggcaactaccactacgagatcgaactggtggcggcgatcggcaagggcggctgcgacatccccctggagcaggccgaggaacacgtctggggctacgcggtgggcctggacatgacccgccgcgacctgcagatgcgcatgcgcgagatgggccggccctgggagatcggcaaggccttcgaccgctcggcgccgatcggcccgctctaccctgccagccaggtcggccatccgcgccacgccgccatcagcctccaggtcgacggcgaggatcgccagcgcagcgacatcgaccagttgatctggtcggtggcggaaaccgtcagctacctgtcgcgcttcttcgagctgcgccccggcgacctggtcttcaccggcaccccggaaggcgtcggcgcggtcgagcgcggcgagcggatgctcggcgccatcgacggcctcggcgaactcagcgtccgcgtggtctga

SEQ ID NO: 3745 - protein, 232 aa, Pseudomonas aeruginosa PAO1
MNHLFAPEAPVSLTIHGSDQTFPVRRVYCVGRNYAAHAREMGFDPEREPPFFFCKPADAVVPVAAGSTLELAYPSQTGNYHYEIELVAAIGKGGCDIPLEQAEEHVWGYAVGLDMTRRDLQMRMREMGRPWEIGKAFDRSAPIGPLYPASQVGHPRHAAISLQVDGEDRQRSDIDQLIWSVAETVSYLSRFFELRPGDLVFTGTPEGVGAVERGERMLGAIDGLGELSVRVV

SEQ ID NO: 3746 - DNA, 657 bp, Neisseria meningitidis MC58
  CDS (1)..(657): transl_table=11
gtggcttcagtatttttagaaggagaggcagtcgaggtcggcaatattttctgtatcggcaggaactatgccgcacatatcgaagagttaaaaaacgaaataccttccgaacctgtggtgtttatgaagccgtcaggcagcattttgaacagcggcggtacaatcttgctgcccgagtttagtagggatgtgcagtttgagtgcgaactcgtgctgctggtcggtaaggattcagacggcacgggcgagggtaaagatattttgggatgtgtcgcaggatatggtgtagggctggaccttacggcacgggatatccaatgccgtctgaaggaaaaagggctgccctggctgaaggcaaaagggttcaggcattccgcgtgcgtgtcggattttgcggcggcaggcagaatcggcaatcccgagaaggtgttgttttcattaaaacaaaacggcgtattgaaacagcgcggggataccggtttgatgatttacccgattcgggaaattttacacaaactggcggcagattacggtttggggaaaggggatttggtgtttaccggaacgccctccggcgtgggcgcaatcggtgcgggggacaatttggcattggagctggacggcttggtgcgcgcctctttcacggtagggtgttaa

SEQ ID NO: 3747 - protein, 218 aa, Neisseria meningitidis MC58
MASVFLEGEAVEVGNIFCIGRNYAAHIEELKNEIPSEPVVFMKPSGSILNSGGTILLPEFSRDVQFECELVLLVGKDSDGTGEGKDILGCVAGYGVGLDLTARDIQCRLKEKGLPWLKAKGFRHSACVSDFAAAGRIGNPEKVLFSLKQNGVLKQRGDTGLMIYPIREILHKLAADYGLGKGDLVFTGTPSGVGAIGAGDNLALELDGLVRASFTVGC

SEQ ID NO: 3748 - DNA, 735 bp, Halobacterium sp. NRC-1
  CDS (1)..(735): transl_table=11
atgcgctttcgcacgccggccggcgctgtgcgggtcggcgagtacgaccccgatgcggaggtcgtcgccgccgccgggcgtgcgttcgaccgagcgagtgtggacgtgttgccgccgtgtgacccgtcgaaggtcgtctgcgtgggccgcaactacgcggcgcacgccgacgagcgggacgccgacgttccggaccgcccgctgctgtttttgaagccacccactgcggtcgcgggtcacggcgacgccacgccgctcccgccgaacacacgcgtcgaacacgaggcggagctcgcggtcgtcatcggcacccaggcccgcaacctcgacgccggggctgcgatggcggccgtcgaggggtacactgtcgccaacgacgtgtccaaccgcaccgaccaggaccgcgagcagaactgggtccgcggcaaggcgttcgacggatcgtgtccgctcgggccggtggtcgcaactcccgatgaggtgcccgacgatgcgaccgtggcgttggacgtcaacggcgagcgccgccagtccgggtcgatctcgcagttcgtcttcgacgtgcccacgctgctggccgagatcacggcgttcgtgacgctgcagccgggcgacgtggtattgactgggacgccgccgggcgtgggcgagctcaccgacggcgaccgcgttgcggcgtccgtcgagggcgtcggcacgctcgaacacacggttgtgcgcgagccgcccgcgtag

SEQ ID NO: 3749 - protein, 244 aa, Halobacterium sp. NRC-1
MRFRTPAGAVRVGEYDPDAEVVAAAGRAFDRASVDVLPPCDPSKVVCVGRNYAAHADERDADVPDRPLLFLKPPTAVAGHGDATPLPPNTRVEHEAELAVVIGTQARNLDAGAAMAAVEGYTVANDVSNRTDQDREQNWVRGKAFDGSCPLGPVVATPDEVPDDATVALDVNGERRQSGSISQFVFDVPTLLAEITAFVTLQPGDVVLTGTPPGVGELTDGDRVAASVEGVGTLEHTVVREPPA

SEQ ID NO: 3750 - DNA, 789 bp, Deinococcus radiodurans R1
  CDS (1)..(789): transl_table=11
atgaaaaccgccaactttatcgccgggggccgcaccctgaaaggcgaactgcgccaggacggcctgctctacgacgccgccggtgacagccatcaccccgacgacgtgcaattcctgctgccgctgacgcccggcaaggtcatcgcgctggcgctgaattacgccgaccacgtggccgaactcggattcaaggcccccgaggagccggtgatgttcctcaagcccaacaccagcctgctgccgcaccagggcaccgtgatctacccgcgcggtgctaagttcatgcactacgaggtcgaactcggcatcgtcatcggacgcgatgcccggcgcgtgaaggcgaaggacgcggacgattacgtgggcggctacaccatcgccaacgacctggtggtgcgcgattacgtctccaactactaccgcccgcccatgcgcgccaagggctgggacaccttcgggccgctggggccgtatctggtgagcgccgacgaggtgcccgacccctacaacctgggcctgcgcgcctacgtcaacggcgaactgcggcaggaaggcagcacgcgcgacatgattctcaaggcccccgaactgatcgagttcatgagccgcttcatgaccctggaagcgggcgacgtgattctgaccggcacgcccaagggcgtctcgcacgtgcatcccggcgacgtgatgcgtctggaaatcgacggtctgggcgcactggaaaacccagtggcgctggaagacgagagcgctgagcctttgattgcggacgaaggagaaaggaagtag

SEQ ID NO: 3751 - protein, 262 aa, Deinococcus radiodurans R1
MKTANFIAGGRTLKGELRQDGLLYDAAGDSHHPDDVQFLLPLTPGKVIALALNYADHVAELGFKAPEEPVMFLKPNTSLLPHQGTVIYPRGAKFMHYEVELGIVIGRDARRVKAKDADDYVGGYTIANDLVVRDYVSNYYRPPMRAKGWDTFGPLGPYLVSADEVPDPYNLGLRAYVNGELRQEGSTRDMILKAPELIEFMSRFMTLEAGDVILTGTPKGVSHVHPGDVMRLEIDGLGALENPVALEDESAEPLIADEGERK

SEQ ID NO: 3752 - DNA, 702 bp, Escherichia coli O157:H7 EDL933
  CDS (1)..(702): transl_table=11
atgactcaatacgtattcgaaccgcaagcgcccgttaccgtaccggttgttggcagtgatgaacaattccccgtgcgccgcgtttactgcgtcggacgtaactatgccgctcacgcccgcgaaatgggctttgatccggatcgtgaaccgccattcttcttctgcaaaccggcggatgccgttgttccggttgccgctggtgaaacgctggcgctgccgtatccggcacagaccgataactaccattacgaaattgaactggtggtggcgattggtaaaaaaggcagcgatatcccgctggaacacgcccatgaatatgtctggggttatgccacgggtcttgatatgactcggcgtgaccgtcaaatggaaatgcgccagatgggccgcccgtgggaaatcggtaaagcgtttgatctctcagcgcccatcgcgccgctgcacaaagcccgcgatatcggcggtattgataatgcgccaatctggttacaggttaacggcgaagatcatcagcgcagcgatattcgccatctcatctggtcggtgaatgaaaccatctgctatctgtcaggcttctttgagctgcaaccgggcgatctgatcttcaccggtacgccggaaggggttggcccggtagtgaaaggtgatgtgatcacaggcaacgtcgagggcttaacgcctatcgcggtgaagattgtctga

SEQ ID NO: 3753 - protein, 233 aa, Escherichia coli O157:H7 EDL933
MTQYVFEPQAPVTVPVVGSDEQFPVRRVYCVGRNYAAHAREMGFDPDREPPFFFCKPADAVVPVAAGETLALPYPAQTDNYHYEIELVVAIGKKGSDIPLEHAHEYVWGYATGLDMTRRDRQMEMRQMGRPWEIGKAFDLSAPIAPLHKARDIGGIDNAPIWLQVNGEDHQRSDIRHLIWSVNETICYLSGFFELQPGDLIFTGTPEGVGPVVKGDVITGNVEGLTPIAVKIV

SEQ ID NO: 3754 - DNA, 720 bp, Mycobacterium tuberculosis CDC1551
  CDS (1)..(720): transl_table=11
atgacggcccgcgagatcgccgagcacccgttcggtacgccgaccttcaccggacgctcctggccgctggccgacgttcgcctgctggctccgatactggcgagcaaggtggtctgtgtcgggaagaactatgccgatcacatcgccgaaatgggtggccggccgccggcagacccggtgatattcctcaagcccaacaccgcgatcatcggtccgaatacgccaattcgattgcccgccaacgcatcaccggtgcacttcgagggtgagctggcgatcgtgatcggccgggcgtgcaaggatgtcccggccgcccaggccgtcgacaatatcctcggctacaccatcggcaatgacgtgtcggcccgcgatcagcagcaatccgacggtcagtggacgcgagccaaggggcacgacaccttctgcccggtcgggccgtggatcgtcaccgacctcgctccctttgacccggccgatctcgagctgcgcaccgtcgtcaacggcgacgtcaaacagcacgcccgcacctcgctgatgatccatgacatcggcgccatcgtggaatggatctcggcgataatgaccttgctgccaggtgatctcatcctcaccggcacacccgcgggagtcggtcccatcgaggacggcgacaccgtctcgatcaccatcgagggaatcggcaccctcaccaatcccgtagtccgcaaaggaaagccgtga

SEQ ID NO: 3755 - protein, 239 aa, Mycobacterium tuberculosis CDC1551
MTAREIAEHPFGTPTFTGRSWPLADVRLLAPILASKVVCVGKNYADHIAEMGGRPPADPVIFLKPNTAIIGPNTPIRLPANASPVHFEGELAIVIGRACKDVPAAQAVDNILGYTIGNDVSARDQQQSDGQWTRAKGHDTFCPVGPWIVTDLAPFDPADLELRTVVNGDVKQHARTSLMIHDIGAIVEWISAIMTLLPGDLILTGTPAGVGPIEDGDTVSITIEGIGTLTNPVVRKGKP

SEQ ID NO: 3756 - DNA, 816 bp, Agrobacterium tumefaciens str. C58
  CDS (1)..(816): transl_table=11
ttgcgccggcttctacaacaaaggaccgtaaaaagccagttttgcaggcaaggtcattttgaactggaaatcgccccggaatcgcgggacaagacttgcagcttcaagagacgacaggaaatccccatggccgccaccgtcatccccgctccgaaacccgttctgctgcccgtcgaaggcacggacgacatgttccccgtgcggcgggtctactgcgtcggccgcaattatgccgatcacgccatcgagatgggccacgatccctcgcgtgaaccgcccttttatttccagaagaacccggacaatctgctgccagcaggtaatgatttcccctacccgccgctatcctccaacgtgcattacgaagtcgagtgcgtcgtcgtcctgaagagcggcggcgcggatattccggcgtcggaagcgctgaaccacgtctggggttacgccgtcggcatcgacatgacccgccgcgacctgcaggatgggttgaagaaaatggggcgctcatgggaaggcgccaaggcgtttgaacattccgcaccagtctctgccatcgttcccgccgataaaatcggccatcccgctaccggcgcgatctggctcgatgtcaacggcgaacgcaagcagacgggcgatctcgcccagatgatctggaaggtgccggaagtgattgccgagctttccaagctgttcacccttgccgccggggatgtgatcatgaccggcacgccggcgggcgtcggccccattgtgcgtggtgacaggatcgagtgtggcgtcgatggtgtcggcacgctctcggtcaaaatcgcctga

SEQ ID NO: 3757 - protein, 271 aa, Agrobacterium tumefaciens str. C58
MRRLLQQRTVKSQFCRQGHFELEIAPESRDKTCSFKRRQEIPMAATVIPAPKPVLLPVEGTDDMFPVRRVYCVGRNYADHAIEMGHDPSREPPFYFQKNPDNLLPAGNDFPYPPLSSNVHYEVECVVVLKSGGADIPASEALNHVWGYAVGIDMTRRDLQDGLKKMGRSWEGAKAFEHSAPVSAIVPADKIGHPATGAIWLDVNGERKQTGDLAQMIWKVPEVIAELSKLFTLAAGDVIMTGTPAGVGPIVRGDRIECGVDGVGTLSVKIA

SEQ ID NO: 3758 - DNA, 849 bp, Agrobacterium tumefaciens str. C58
  CDS (1)..(849): transl_table=11
atgaaacttcttcgttacggcccccttgggcaggaaaaaccggcggcgctcgacgccgaaggcaacatccgcgatctctcttcggtcatcagcgacatcgccggatacagcctctcacgcagttccctcgacaagctggcgaaaatcgatctttcgtcactgccgagcgtaccatcagatgtgcgcattggcccctgcgtcggtgccgtgggcaattttgtggcggtcggcctcaattacatcgaccatgcgctggaaaccaatacgcctgttcctgacgagccggtgctttttaacaaacatacctcgtgcatttccggaccgaatgatccgatttgcctgttgaaggattcggaaaagaccgactgggaagtggaaattgcgttcgttatcggtgaacctgcctaccatgtgcgagaagaagacgccctctccgtcgtcgcaggtttctgcgtctgccacgatgtctccgaacgcgccttccagatagaacgtggtgggcagtggacgaagggcaaaagcggcccgacatttgggcccctcggcccatggttggtgaccccggatgaaatcagcgatgtgcaaaatcttgacctttggctcgacgttaacgggaagcgcatgcagaccggctcgacatccaggatgatttttccgatagcgacgcttgtgtcttacatcagtcgtttcatgcgtcttatgccaggtgacgtgatcaccacagggacgccgcccggtgtcggccttggcatgaaccctcccgtcttcctaaaagccggcgacgtggtcgaactcggcattgatggccttggcagacagcggcaaatcgtgacagcatttggcgcatga

SEQ ID NO: 3759 - protein, 282 aa, Agrobacterium tumefaciens str. C58
MKLLRYGPLGQEKPAALDAEGNIRDLSSVISDIAGYSLSRSSLDKLAKIDLSSLPSVPSDVRIGPCVGAVGNFVAVGLNYIDHALETNTPVPDEPVLFNKHTSCISGPNDPICLLKDSEKTDWEVEIAFVIGEPAYHVREEDALSVVAGFCVCHDVSERAFQIERGGQWTKGKSGPTFGPLGPWLVTPDEISDVQNLDLWLDVNGKRMQTGSTSRMIFPIATLVSYISRFMRLMPGDVITTGTPPGVGLGMNPPVFLKAGDVVELGIDGLGRQRQIVTAFGA

SEQ ID NO: 3760 - DNA, 687 bp, Sinorhizobium meliloti 1021
  CDS (1)..(687): transl_table=11
atgcagacagccctgacacccccgccgctcatcctgctgccgatctccggcagttccgtcgggtttccggtgcgccgggtctattgtgtcggccgcaactatgcggcccacgcccgcgagatgggtcacgacccggaccgggaggcacccttcttctttcagaagaacgccgacaatcttctgccgccgggcgagaatttcccctatccgacgcgctcttccgacgttcaccacgaggttgaactggtcgtcgcgatgcgcaccggcggagcggacattcccgtctcggaagcggcagatcacatcttcggttatggcgtcggcatcgacttcacccgccgggacctgcaggcggaagcgaagaaggccggcaagccgtggacggccgccaaggcgttcgagcattccgctccggtctccgcgatcgtccccgtcaccgcgatcggtcatcccgcaagcggcaacatatggctcaaggtcaatggcgaactgcgccagcagggcgatcttgatcaaatgatctggaaggtgcccgaaatcatcgccgaactgtcccgcctcttcactctcgcaccgggcgatatcatcatgaccgggacgccatcaggtgtgggtcccgtcacgcaaggcgatgtcgtcgcctgcggcatcgacgggatcggcgcgatctccgtcaatatcgtttga

SEQ ID NO: 3761 - protein, 228 aa, Sinorhizobium meliloti 1021
MQTALTPPPLILLPISGSSVGFPVRRVYCVGRNYAAHAREMGHDPDREAPFFFQKNADNLLPPGENFPYPTRSSDVHHEVELVVAMRTGGADIPVSEAADHIFGYGVGIDFTRRDLQAEAKKAGKPWTAAKAFEHSAPVSAIVPVTAIGHPASGNIWLKVNGELRQQGDLDQMIWKVPEIIAELSRLFTLAPGDIIMTGTPSGVGPVTQGDVVACGIDGIGAISVNIV

SEQ ID NO: 3762 - DNA, 681 bp, Caulobacter crescentus CB15
  CDS (1)..(681): transl_table=11
atgacgacctacgcttttcccccgcacgccatcccgacggtcccggtggagggatcgggcgccctgttcccggtgcgtcgcatcctgtgtgtcggccgcaactacgccgcccaccgccgcgagatggggggcgatgatcgcgacccgccgtttttcttcgccaagcccgccgacgcgatcgcgcagctggccgacgcgatcgcctatccgccggcgaccagcgacctgcatcacgagatcgagctggtcgtggccctaaaggcgggcggcgcggatctgtcgatcgaacaggccctggcctgcgtgttcggctatgcggtcggcgtcgacctgacgcgccgcgacctgcaagctgcggccaaggccaagggccagccctgggaagccggcaaggccttcgatcagagcgccccgatcagcgccatccgggtgatggacgctccggcggccgaagcggcggtcaccctgtcggtcaacggccaggagcgccagcgcggacaggtcggcgacatgatctggaacatcggcgaggtgatcgccaaggccagccagctgtggaccctggccgccggcgacctgatcttcaccggcacgcctgagggcgtcgccgccatcgtccgcggcgacaaggtcgtcggcgagatcgagggcgtcggccgcctggacttcaccctcgtctag

SEQ ID NO: 3763 - protein, 226 aa, Caulobacter crescentus CB15
MTTYAFPPHAIPTVPVEGSGALFPVRRILCVGRNYAAHRREMGGDDRDPPFFFAKPADAIAQLADAIAYPPATSDLHHEIELVVALKAGGADLSIEQALACVFGYAVGVDLTRRDLQAAAKAKGQPWEAGKAFDQSAPISAIRVMDAPAAEAAVTLSVNGQERQRGQVGDMIWNIGEVIAKASQLWTLAAGDLIFTGTPEGVAAIVRGDKVVGEIEGVGRLDFTLV

SEQ ID NO: 3764 - DNA, 831 bp, Synechocystis sp. PCC 6803
  CDS (1)..(831): transl_table=11
atggtccaacgttacgttcgtatccaggctgactctggcaccgtccattatggtttgttccaattggatcacagtgtgattttgctaagtgcggcgccttggttggggggccaagccctagatgttgccgttagtgaaggggattatcggttactagctccctgtgaaccttctaaaatcgtggcggtgggacgcaattaccgggcccatgcggcggaattgggtaacgatgtgccggcggaacccctcttattttttaaacctccttcggcgatcgccgctgaccaggaagaaattgtttatccgtcccagtcccaacgggtggactacgaaggggaattggcagtcattattggcaaacaagtaaaagatattactgaagaagaagcggccagcgccatttggggctacaccattgccaacgatattacggctagggatttgcagcggcaggattcccaatggacgcgggccaagggctttgacggtttttgtcccctggggccctgggtagtacgtcacatcgacccagaggcccatttggaaaccaccgttaatgatgaggaaactccccggcaagccacggccatcagcgatatggtttttactcccccggtattagtgagctacatttcccgagtgatgaccctctaccctggcgatgtaattttgactggtactccggaaggcattagtgccctccaagtgggagacaaagtggaggtggaaattgaaggcattggtaatttaactaatacaatcatcgcgcctcccctaacggccccggagttagcggaaacggtggagttggaagtcgaagcagataattga

SEQ ID NO: 3765 - protein, 276 aa, Synechocystis sp. PCC 6803
MVQRYVRIQADSGTVHYGLFQLDHSVILLSAAPWLGGQALDVAVSEGDYRLLAPCEPSKIVAVGRNYRAHAAELGNDVPAEPLLFFKPPSAIAADQEEIVYPSQSQRVDYEGELAVIIGKQVKDITEEEAASAIWGYTIANDITARDLQRQDSQWTRAKGFDGFCPLGPWVVRHIDPEAHLETTVNDEETPRQATAISDMVFTPPVLVSYISRVMTLYPGDVILTGTPEGISALQVGDKVEVEIEGIGNLTNTIIAPPLTAPELAETVELEVEADN

SEQ ID NO: 3766 - DNA, 879 bp, Salmonella typhimurium LT2
  CDS (1)..(879): transl_table=11
atgaaactggttcaatatcttgtgaacggtggcaaacgctacggcattatgcaggaaaccggaataattgatctctcgcagcggcttggcgacaaatatcccactttgaaatctctcctgtgcgctaatgcgctgacggatgcggcgttatggtgtgatgagccggcggattattactaccaggaagtcacttttctgccggtgattgacgatccgcagaagatcatctgtgtcggaatgaattatgccgataagcgtattgagtttaatgaaaccaacccggccccaaccctttttgtccgctttgcggattctcagaccgggcataatggcctgctgctgaagcctgaaaataccaatgagttcgactacgaaggtgaattagccgtagtgattgggcggcgatgctcccgggtcagcgctgaggatgctttagattatgtcgccggatacagctgctatatggatggttcagtgagggactggcagcatagctggtttacggctggaaaaaactggccttcgacaggatcattcggtccgtgtctggtgaccacagacgacattcccgatccccagatgctacgtttactgacacgactaaacgggcgggaggtgcagaacgaatctacggcaaatatgatccatcctatcgcttcactcattgcttatataagcacatttactctgctttcccctggcgacacgatcctcacagggtcgcctggtggagtgggcaaaaaacgcgttccaccgctgtttttacacgatggtgatgttattgaagttgagattgaacatattggaaccctgcgcaatgtcgtccgggatagccgttatttaacatcctctgttagctggcatgacgggagaaagtga

SEQ ID NO: 3767 - protein, 292 aa, Salmonella typhimurium LT2
MKLVQYLVNGGKRYGIMQETGIIDLSQRLGDKYPTLKSLLCANALTDAALWCDEPADYYYQEVTFLPVIDDPQKIICVGMNYADKRIEFNETNPAPTLFVRFADSQTGHNGLLLKPENTNEFDYEGELAVVIGRRCSRVSAEDALDYVAGYSCYMDGSVRDWQHSWFTAGKNWPSTGSFGPCLVTTDDIPDPQMLRLLTRLNGREVQNESTANMIHPIASLIAYISTFTLLSPGDTILTGSPGGVGKKRVPPLFLHDGDVIEVEIEHIGTLRNVVRDSRYLTSSVSWHDGRK

SEQ ID NO: 3768 - DNA, 660 bp, Salmonella typhimurium LT2
  CDS (1)..(660): transl_table=11
atgtatcaacatcgtaactggcaaggcgccttgcttgattacccggtaagtaaagtggtctgcgtgggcagtaattacgcaaatcacatcaaggagatgggcagcgcgacgccggaagaacccgtgctttttatcaagccggaaaccgcattgtgtgatattcgccagccgctggcgattccggcggatatgggggctgttcatcatgaagttgagcttgctgtgctgattggcgcaacgctccgccaggcgaccgaagatcatgtacgtaaagcgatagccggttatggcgtggcgcttgatttaaccctgcgcgatattcaagggaaaatgaaaaaggccggacagccctgggaaaaagccaaaggttttgataacgcatgtccgatttcaggcttcatccctgtcgcggccttctgcggcgatccgcaaaatacggttatcggacttaacgttaatggcgaggttcgccagcaagggtcgaccgcggatatgattcatcctattgtgccccttatcgcctatatgagccgctattttacgctcaaagccggggacgtggtgctaaccggcacgccggcaggcgtggggccattattaagcggcgatgagctggacattcgttttaatggcgaaacgttgtctacccgcgttctgtaa

SEQ ID NO: 3769 - protein, 219 aa, Salmonella typhimurium LT2
MYQHRNWQGALLDYPVSKVVCVGSNYANHIKEMGSATPEEPVLFIKPETALCDIRQPLAIPADMGAVHHEVELAVLIGATLRQATEDHVRKAIAGYGVALDLTLRDIQGKMKKAGQPWEKAKGFDNACPISGFIPVAAFCGDPQNTVIGLNVNGEVRQQGSTADMIHPIVPLIAYMSRYFTLKAGDVVLTGTPAGVGPLLSGDELDIRFNGETLSTRVL

SEQ ID NO: 3770 - DNA, 702 bp, Salmonella typhimurium LT2
  CDS (1)..(702): transl_table=11
atgaccaaatatgtattccagccgcaggccccggtaacagtacccgtggcgggcagtgatgagcagtttccggtacgtcgcgtttactgcgtgggtcgcaactatgccgcccatgcccgtgaaatgggctttgatcccgatcgcgaaccgccgttcttcttttgtaaaccagcggacgctgtggtcccggtagcggcgggggataccctggaactgccgtatccggcgcagaccgataactaccattatgaaattgagctggtggtggcgattggtaaaaaggggagcgatattccgctggaaaaagcccatgaatatgtctggggatacgccaccggtctggacatgacgcgtcgcgatcgtcagatggaaatgcgtcagatgggacgcccgtgggaaatcggcaaagcgttcgatctctccgcgcccattgcgccattacacaaagccgctgaaacgcataatgtggataacgcccctatttggctacaggttaacggcgaagaccatcaacgcagcgatattcgtcacctgatttggtcggtgaatgaaaccatcagctatttgtccggcttctttgaattgcagccaggcgatttaattttcaccggtacgccagagggggtgggcgcagtggtgaaaggggatgtcatcaccgggaacgtagaaggtctgacgccgattgctgtgaaaattgtctga

SEQ ID NO: 3771 - protein, 233 aa, Salmonella typhimurium LT2
MTKYVFQPQAPVTVPVAGSDEQFPVRRVYCVGRNYAAHAREMGFDPDREPPFFFCKPADAVVPVAAGDTLELPYPAQTDNYHYEIELVVAIGKKGSDIPLEKAHEYVWGYATGLDMTRRDRQMEMRQMGRPWEIGKAFDLSAPIAPLHKAAETHNVDNAPIWLQVNGEDHQRSDIRHLIWSVNETISYLSGFFELQPGDLIFTGTPEGVGAVVKGDVITGNVEGLTPIAVKIV

SEQ ID NO: 3772 - DNA, 774 bp, Nostoc sp. PCC 7120
  CDS (1)..(774): transl_table=11
atggcgcagcgctacgtgcgagttcaaaatcgggaaggtaagatttactatgggttactacaactgtctttcaatgtgcaggttctagatgctccaccgtggctgcatggacaacccacagacttaattttagaaccagattattatcaaattttggctccctgcgctccttctaaaattgtcgcagtcggcaaaaattatgcagaccatgcagccgaaatgggaacgccagttcctagtgaaccactgatttttctgaagccaccaacaacgattattgcctcggaaacagagattaaatatcctctccagtcacaacgagtggattatgaaggagaattagcgttgattattggcgatcgcacttgtaactgtacaccagaggaagcccaaactaaaatttggggatataccattgctaatgatgtcacagcgcgggatttacagcgaaaagatgggcagtggacaagagcgaaaggttttgatactttctgcccattggggccttggattgtccgagaattgagtccaggggcaagattacagacctttctcaatgatgatgctaatcccgtacaatcggcgggaattgatcaaatggtatttgcccctgattttttggtgtcatatatcagtcaggtgatgacattgcttccgggtgatgtgattttaacgggtacgccagagggtgtaggagctttgcaacaaggcgatcgcatccgtgtggaaattgaaggcattggtcgcctagaaaacaccgtagcagcccgttag

SEQ ID NO: 3773 - protein, 257 aa, Nostoc sp. PCC 7120
MAQRYVRVQNREGKIYYGLLQLSFNVQVLDAPPWLHGQPTDLILEPDYYQILAPCAPSKIVAVGKNYADHAAEMGTPVPSEPLIFLKPPTTIIASETEIKYPLQSQRVDYEGELALIIGDRTCNCTPEEAQTKIWGYTIANDVTARDLQRKDGQWTRAKGFDTFCPLGPWIVRELSPGARLQTFLNDDANPVQSAGIDQMVFAPDFLVSYISQVMTLLPGDVILTGTPEGVGALQQGDRIRVEIEGIGRLENTVAAR

SEQ ID NO: 3774 - DNA, 702 bp, Ralstonia solanacearum GMI1000
  CDS (1)..(702): transl_table=11
atgaccgatttcgtcgtcaccccgccggccgtcaccggcattcccgtccgcggcgcagccggcgagtttccggtgcgccgcgtctactgcgtgggccgcaactacgccgcccatgcgcgggaaatgggctccgacccggatcgcgaaccgccgttcttcttctgcaagccggccgatgccgtgcgctacgtcgccgacggcaccaccggccagttcgtctatccgaccgagacccgcgattgccactacgagatcgagctggtcgtcgccatcggcaccggcgggcgcgacatcgcggtggagtcggccgcccagcacatctacggctacgccatcggcctggacatgacccgccgcgacctgcagaacgccgccaagaagggcggccgcccgtgggagaccggcaaggccttcgacggctccgccccgatcggcccgatcgtgccggcccagacggtggccagccccgaccgcggcgccatcacgctgtcggtcaacgacaaggcgcatcagcacggcgacctgtccgatctgatctggtcggtgccggagaccatcgcctacctgtcccgcctgttcgagctgcgccccggcgacctgatcttcaccggcacgcccgagggcgtcggcccggtctcgatcggcgacctgatggtcggccggatcgacggcgtgggcgagctgcacgtgaaggtggtgtga

SEQ ID NO: 3775 - protein, 233 aa, Ralstonia solanacearum GMI1000
MTDFVVTPPAVTGIPVRGAAGEFPVRRVYCVGRNYAAHAREMGSDPDREPPFFFCKPADAVRYVADGTTGQFVYPTETRDCHYEIELVVAIGTGGRDIAVESAAQHIYGYAIGLDMTRRDLQNAAKKGGRPWETGKAFDGSAPIGPIVPAQTVASPDRGAITLSVNDKAHQHGDLSDLIWSVPETIAYLSRLFELRPGDLIFTGTPEGVGPVSIGDLMVGRIDGVGELHVKVV

SEQ ID NO: 3776 - DNA, 843 bp, Agrobacterium tumefaciens str. C58
  CDS (1)..(843): transl_table=11
atgaaattgatgcgtgttggccagcccggccaggaaaaaccagccattctcgatgcggaaggaaaagtccgcgatctgtccgcccatgtgaaagatatcggcggcgacgcgatttctcccgagggtctcaagaagatcgccgcgatcgacctcgccaccctgccggtgttgagcgaagagcgcattggcgcctgcgttgcgggtaccggaaaattcatctgcatcggcctcaacttctccgaccatgcggctgaaacgggtgctaccgtaccgccggaaccggtcattttcatgaaggcgacctcggccatcgtcggtccgaacgataacgtcaccattccgcgcggctcggaaaagaccgactgggaagtcgagcttggcgtcgtcatcggcaagaccgcgaaatacgtctcggaagcggacgccctcgattatgtcgccggttattgcgtatcgcacgacgtttccgagcgcgccttccagacagaacgtgccggtcagtggacaaagggcaagtcctgcgacactttcggccccatcggcccctggctggtgacgaaggacgaaatcaccgatccgcagaacctcggcatgtggctgaaggtcaatggccagaccatgcaggacggttccagcaagacaatggtttacggcgtcgcccacgttgtctcctatctcagccagttcatgtcgctgcatcccggcgatgtcatttccaccggcacccctcccggcgtcggcatgggccaaaagccgccgcgttacctgaagactggtgacgtcgtggaactcggcatcgagggcctcggttcccagaagcagactttcgtcgctgacatctga

SEQ ID NO: 3777 - protein, 280 aa, Agrobacterium tumefaciens str. C58
MKLMRVGQPGQEKPAILDAEGKVRDLSAHVKDIGGDAISPEGLKKIAAIDLATLPVLSEERIGACVAGTGKFICIGLNFSDHAAETGATVPPEPVIFMKATSAIVGPNDNVTIPRGSEKTDWEVELGVVIGKTAKYVSEADALDYVAGYCVSHDVSERAFQTERAGQWTKGKSCDTFGPIGPWLVTKDEITDPQNLGMWLKVNGQTMQDGSSKTMVYGVAHVVSYLSQFMSLHPGDVISTGTPPGVGMGQKPPRYLKTGDVVELGIEGLGSQKQTFVADI

SEQ ID NO: 3778 - DNA, 690 bp, Agrobacterium tumefaciens str. C58
  CDS (1)..(690): transl_table=11
atggccgccaccgtcatccccgctccgaaacccgttctgctgcccgtcgaaggcacggacgacatgttccccgtgcggcgggtctactgcgtcggccgcaattatgccgatcacgccatcgagatgggccacgatccctcgcgtgaaccgcccttttatttccagaagaacccggacaatctgctgccagcaggtaatgatttcccctacccgccgctatcctccaacgtgcattacgaagtcgagtgcgtcgtcgtcctgaagagcggcggcgcggatattccggcgtcggaagcgctgaaccacgtctggggttacgccgtcggcatcgacatgacccgccgcgacctgcaggatgggttgaagaaaatggggcgctcatgggaaggcgccaaggcgtttgaacattccgcaccagtctctgccatcgttcccgccgataaaatcggccatcccgctaccggcgcgatctggctcgatgtcaacggcgaacgcaagcagacgggcgatctcgcccagatgatctggaaggtgccggaagtgattgccgagctttccaagctgttcacccttgccgccggggatgtgatcatgaccggcacgccggcgggcgtcggccccattgtgcgtggtgacaggatcgagtgtggcgtcgatggtgtcggcacgctctcggtcaaaatcgcctga

SEQ ID NO: 3779 - protein, 229 aa, Agrobacterium tumefaciens str. C58
MAATVIPAPKPVLLPVEGTDDMFPVRRVYCVGRNYADHAIEMGHDPSREPPFYFQKNPDNLLPAGNDFPYPPLSSNVHYEVECVVVLKSGGADIPASEALNHVWGYAVGIDMTRRDLQDGLKKMGRSWEGAKAFEHSAPVSAIVPADKIGHPATGAIWLDVNGERKQTGDLAQMIWKVPEVIAELSKLFTLAAGDVIMTGTPAGVGPIVRGDRIECGVDGVGTLSVKIA

SEQ ID NO: 3780 - DNA, 684 bp, Pyrococcus furiosus DSM 3638
  CDS (1)..(684): transl_table=11
atgagttttgttaggcttccttttagagatagctattatgagctaaggccaaccaagataatagctctagcaaagaactatgcagagcatgcaaaagagatgggtgacaatccacccaccgagcccataatatttcttaagcctccttcagcactaattggcccaggagagcccattatacttccaaagattagcaagagagtagaccacgaagtagaattgggagtaattatagggaagaaagccaagaaagttcctgcagaaaaggcttttgactatgtgttgggttatacaattattctcgacataaccgctagggatcttcaggagaaagctagaaaaatgggacacccatggactgtatctaaggggtttgacacatttgctcccgttggtccgaggatagttgacaagagagagctagatccctcagacttggagataggactaaaagttaacggggaagttagacagcttggaaggactagccagatgatattcaagattcctcagctcatcgaatacatatctaatataatgaccctcgagccgggagatataattgctactggaactcctcctggggtagggtcattgaggcatggtgaccacattgaggcgtggatagaaggaataggaaaggtcgagttcgacgttttagctgaggattctatcttatgctga

SEQ ID NO: 3781 - protein, 227 aa, Pyrococcus furiosus DSM 3638
MSFVRLPFRDSYYELRPTKIIALAKNYAEHAKEMGDNPPTEPIIFLKPPSALIGPGEPIILPKISKRVDHEVELGVIIGKKAKKVPAEKAFDYVLGYTIILDITARDLQEKARKMGHPWTVSKGFDTFAPVGPRIVDKRELDPSDLEIGLKVNGEVRQLGRTSQMIFKIPQLIEYISNIMTLEPGDIIATGTPPGVGSLRHGDHIEAWIEGIGKVEFDVLAEDSILC

SEQ ID NO: 3782 - DNA, 840 bp, Corynebacterium glutamicum ATCC 13032
  CDS (1)..(840): transl_table=11
atgcgtcttgcaacaatccgcaccaacggcaccaccattgctgctcgtgttgaatctgaaaacaccgctaccaccatcgagggctttgccaacgtcggtgaattactccaggaatccaactggcgcgagctggcagaaaacgctgctggtgaggctgtgacctttgaaaacaaggagctagatgcagtagttccagcacctaagaagattgtgtgcgtcggccttaactacgccaaccacattaaagaaatgggccgcgacctccctgataccccaaccctttttgttaagttccctgacgcgctcatcggacctttcgatgatgttgtcgttccagagtgggctaacaaggctctcgactgggaaggcgagatggcagttatcattggcaagcgcgcacgccgtgtcaagcaggccgatgctgctgagtacatcgctggctacgcagtgatgaacgattacaccacccgcgatttccagtacgcagcacctgcaaagactccacagtggcaccagggcaagtctttggaaaagtccgctggcttcgggccttggatgactaccccagattcttttgagttcggcggcgagctggcaacctacctcgagggcgagaaggtacagtccacccctaccaatgacctggtctttagcccagaaaagctcatcgaatacatcacccacatctacccattggatgctggcgacgtcattgtcaccggtaccccaggcggcgttggccacgcacgtaacccacagcgctacatcggtgacggcgaaaccgtaaaggttgagattgcgggcctcggcttcattgaaaacaagacggtgtttgaataa

SEQ ID NO: 3783 - protein, 279 aa, Corynebacterium glutamicum ATCC 13032
MRLATIRTNGTTIAARVESENTATTIEGFANVGELLQESNWRELAENAAGEAVTFENKELDAVVPAPKKIVCVGLNYANHIKEMGRDLPDTPTLFVKFPDALIGPFDDVVVPEWANKALDWEGEMAVIIGKRARRVKQADAAEYIAGYAVMNDYTTRDFQYAAPAKTPQWHQGKSLEKSAGFGPWMTTPDSFEFGGELATYLEGEKVQSTPTNDLVFSPEKLIEYITHIYPLDAGDVIVTGTPGGVGHARNPQRYIGDGETVKVEIAGLGFIENKTVFE

SEQ ID NO: 3784 - DNA, 879 bp, Streptomyces coelicolor A3(2)
  CDS (1)..(879): transl_table=11
atgaaactcgtacggctcggagaccccgggcgggaacgccccgccgtcatcgacgaccggggcgtcacccgggacctctcctccctgacctccgacatcgacggcgccttcctcgcggcggacggcatcgcccgcacccgtcgggccctggccgacgacgtcctgcccccgctgcggaccgaggggctgcgcttcggaccacccgtcgcgcggcccggcgcggtggtctgcatcggccagaactacgcggcccacgcggcggagtccggcagcgagccgcccacccgcccggtgatcttcttcaagccgccgaacacggtggtcggcccgaacgacgaggtggagatcccgcgcggctccgccaggacggactgggaggtcgaactcgccgtcgtcatcggccggacggcgcggtacctggactcccccgggcaagccctggagcacgtggccggctacgccgtctccaacgacgtgtccgagcgggacttccagctggagcactccgggggccagtggtccaagggcaagtcctgcgccacgttcaacccgctcggccccttcctggtaccggccgacgaggtgcccgacgtccaggctctgcggctgcggtccttcgtcaacggcgaaccgcggcaggactcgcgcaccgccgacatgatcttctccgtcgcgcagctcgtgtacgacctgagccagtacctggtcctggacccgggcgacgtcatcaacaccggcaccccggagggcgtcgccctgtccgggcgcttcccctacctgcggcccggtgacgtgatggagatcgagatcgagggactggggcgccagcgccaggcgcttgtccccgcacggacctcttctcagtcatcacttgtatga

SEQ ID NO: 3785 - protein, 292 aa, Streptomyces coelicolor A3(2)
MKLVRLGDPGRERPAVIDDRGVTRDLSSLTSDIDGAFLAADGIARTRRALADDVLPPLRTEGLRFGPPVARPGAVVCIGQNYAAHAAESGSEPPTRPVIFFKPPNTVVGPNDEVEIPRGSARTDWEVELAVVIGRTARYLDSPGQALEHVAGYAVSNDVSERDFQLEHSGGQWSKGKSCATFNPLGPFLVPADEVPDVQALRLRSFVNGEPRQDSRTADMIFSVAQLVYDLSQYLVLDPGDVINTGTPEGVALSGRFPYLRPGDVMEIEIEGLGRQRQALVPARTSSQSSLV

SEQ ID NO: 3786 - DNA, 858 bp, Streptomyces coelicolor A3(2)
  CDS (1)..(858): transl_table=11
atgaagctgttgcgagtcggtacggcggggtcggagcggcccgcgctgctcgacgccgacgggaccctgcgagacctgtcgggcgtcgtgacggacatcgacggcgaactgctcgccgacgaggacgcgctcggccggatacggtccgccgccgaggccggtgagctgcccgtcctggacggcaccgggctgcgcgtcgggccgccggtgggacgcatcggcaagatcgtgtgcatcgggctgaactaccacgaccacgcccgcgagaccggcgccgagccgcccgccgaaccggtcgtcttcttcaaggcgccggacacggtggtcgggccgcacgacacggtgctcgtgccgcgcgggtccaccaagaccgactgggaggtggagctggcggtcgtcatcgggcgtacggcccgctacctggagtcggcggaggaggggctcgcgtgtgtcgcggggtacgcggtcgcgcacgacgtgtccgagcgggagttccagatcgagcgcggcggcacctgggacaagggcaagaactgcgagacgttcaacccgctgggcccgtggctggtgaccgccgacgaggtgcccgacccgcagcggctgccgctgcggctgtgggtgaacggcgaactgaagcaggacgggacgaccgcggagcagatcttccccgtgggggaggtcgtccggtacctgagccggttcatggtgctgcgtcccggtgacatcatcaacaccgggacgccggcgggggtggcgatggggcagcccgagccgaagccctacctgcgggcgggggacgtggtggagctggagatcgagggactggggcggcagcggcaggaactcaaggaggcctga

SEQ ID NO: 3787 - protein, 285 aa, Streptomyces coelicolor A3(2)
MKLLRVGTAGSERPALLDADGTLRDLSGVVTDIDGELLADEDALGRIRSAAEAGELPVLDGTGLRVGPPVGRIGKIVCIGLNYHDHARETGAEPPAEPVVFFKAPDTVVGPHDTVLVPRGSTKTDWEVELAVVIGRTARYLESAEEGLACVAGYAVAHDVSEREFQIERGGTWDKGKNCETFNPLGPWLVTADEVPDPQRLPLRLWVNGELKQDGTTAEQIFPVGEVVRYLSRFMVLRPGDIINTGTPAGVAMGQPEPKPYLRAGDVVELEIEGLGRQRQELKEA

SEQ ID NO: 3788 - DNA, 786 bp, Streptomyces coelicolor A3(2)
  CDS (1)..(786): transl_table=11
gtgcgcatcgccaggttctccatcgacgggaacgtcgccttcggcgcggtcgagggcgaccagccggaccagctcgtcctcgacatcatcaagggcatcccgttcgcggactacgagctctccggcaccaaggtgcccctgagtaaggtgcggctcctgccgccggtactccccagcaaggtcgtcgccttcggccgcaactacgccgagcacgcccgcgaactcggcaacgaggtgcccgacgcgccgttcgccttcttcaagccgtccacctccgtgatcggccccggcgacgccgtccagtacccctccttcaccgaggaactgcaccacgaggccgaactggccgtcgtcatcggccgcatgtgccgcgaggtcccgcgcgagcgcgtccaggacgtgatcttcggctacacctgcgccaacgacatcaccgcccgcgacgtgcagcgccgcgagaagcagtgggccagggccaagggcttcgactcctcctgcccgctcggcccctgggtggagacggacctcgacctcgcggccgcgggcgacctcaccgtgcagctcacggtcaacggcgcccagcgccagctcggccgcaccagcgagatgatccactccatcgaggacctgatcgtcaacatctccgaggcgatgacgctgctccccggtgacgtgatcctcacgggcactccggccggcgtcggccccctcaacgtcggcgacgaggtcgccgtcaccatcgaaggcatcggcactctcaccaacaaggttgtcaagcgtggctag

SEQ ID NO: 3789 - protein, 261 aa, Streptomyces coelicolor A3(2)
MRIARFSIDGNVAFGAVEGDQPDQLVLDIIKGIPFADYELSGTKVPLSKVRLLPPVLPSKVVAFGRNYAEHARELGNEVPDAPFAFFKPSTSVIGPGDAVQYPSFTEELHHEAELAVVIGRMCREVPRERVQDVIFGYTCANDITARDVQRREKQWARAKGFDSSCPLGPWVETDLDLAAAGDLTVQLTVNGAQRQLGRTSEMIHSIEDLIVNISEAMTLLPGDVILTGTPAGVGPLNVGDEVAVTIEGIGTLTNKVVKRG

SEQ ID NO: 3790 - DNA, 1002 bp, Streptomyces coelicolor A3(2)
  CDS (1)..(1002): transl_table=11
atgtccgtgaaacctgaagccgcgtccgccctcttcgccggacccttcgccctggccaccctttccgctcccgagggtgctgccttccccgctctcgtcactcccgacgcccgggtgaccgacctgcggtccgccttcgaggacaccggcctcagcatgcgcgggctcctcgacgactgggacgcggtggcgccgcggctggccgcactggccgtcgacgacgccgccgcgcgcaggccactggcggagttccgcgtgcacgcgccggtggagccgcgccaggtgttccagtcgggagccaactaccggcagcacgtcatcgacctgcacgtcgcgcaccgggccccggacgacgaccggccggaggaggagcggcgcgcggaggccgccgagatcatggaccggcgggccgccgaggacctgccgtacgtgttcatcggcctgccgagcgcggtgaccggcccctacgacgacgtcgtactcccggcctgggccgagaagcccgactgggagctggagctggcggcggtgatcggccgcccggcccaccgggtgtccgtcgaggaagccctggaccacgtcgcgggctacacgatcgccaacgacctgaccgaccgtgccacggtcttccgtcgggacatgccgcagatcggcaccgactggctgcgcagcaagaacgcccccgggttcaccccgctcggcccctggatcgtgcccgccgcctcgatcgcgaacccgggcgacctgcgcctcacgctgaggctcaacggcgagaccatgcaggacgagtccaccaaggacatgatcttcaatgtcgcccggatggtctcccacgtctcgcagaccgcccggctgctccccggcgacctggtgctcaccggctcccccgccggcaacggcatgcactggggccggctgctgcgcgacggcgacgtcatggacgcctcgatcaccgggctcggtgcccagcgcacccgctgtgtggcggaggcggcccgatga

SEQ ID NO: 3791 - protein, 333 aa, Streptomyces coelicolor A3(2)
MSVKPEAASALFAGPFALATLSAPEGAAFPALVTPDARVTDLRSAFEDTGLSMRGLLDDWDAVAPRLAALAVDDAAARRPLAEFRVHAPVEPRQVFQSGANYRQHVIDLHVAHRAPDDDRPEEERRAEAAEIMDRRAAEDLPYVFIGLPSAVTGPYDDVVLPAWAEKPDWELELAAVIGRPAHRVSVEEALDHVAGYTIANDLTDRATVFRRDMPQIGTDWLRSKNAPGFTPLGPWIVPAASIANPGDLRLTLRLNGETMQDESTKDMIFNVARMVSHVSQTARLLPGDLVLTGSPAGNGMHWGRLLRDGDVMDASITGLGAQRTRCVAEAAR

SEQ ID NO: 3792 - DNA, 1017 bp, Drosophila melanogaster
  CDS (1)..(1017)
atgcctgcctttatgcacctccttcgcaacttcattcccaagtggtgtctcccacgtccagagaagcatctccagaaccacatattccgtcagctccagacgaatcacccatccgccgcactggtggccatcaaaacaagtgaacaggtgctgcccaagtgcagattcatgcagtaccggcgcgccaatgagcaggtgaagcgattgggcatggtctccgaggatggcagcaagatggcggagctatcgagcatgacctgcgccgcccccaatatgatggacttcatccagcagagatactgcatggttagcctgctggacagtgtgcaattcatgaagatcgaggatgtggaggccgtggatctccgcctgctgccacccatcgattcccccagtaagatcattggcgtggactgcaactatgtggataactgtgatgagcagcacatctcgattccgagggagccgagttttcacgtcaagttcgcctcctcgataaccggagctctggacaacatacgggcgcatagttcggccaaacacattgactatggctgccagttggccgtggttatgggcaaaagatgccgtgaagtttcgcccaaagaggctctgaatcacgtatttggattcatggtggtccaggacatcgtggcaagggactggaatgttccgctgggcggtcactcaatggatactttcctcccactgggacctacaattgtgcacaggtgccatgtgccagacttaaacaatctgtggattaagacaatcatcaatggcgaggagcgccagacgggcaatacccgtaatatgatattcaagatcgacttccttattcaccgcctatcccaatatttaactctctgtccgggcgacattatactaacgggaacacccgccggatcgggtgcatttcgtcatccgtcgtgctttttgaagcccggtgatcttatagagagcgaaattcaaaatttgggcaaaatgtgcaataaagtcgttaattcctattcttga

SEQ ID NO: 3793 - protein, 338 aa, Drosophila melanogaster
MPAFMHLLRNFIPKWCLPRPEKHLQNHIFRQLQTNHPSAALVAIKTSEQVLPKCRFMQYRRANEQVKRLGMVSEDGSKMAELSSMTCAAPNMMDFIQQRYCMVSLLDSVQFMKIEDVEAVDLRLLPPIDSPSKIIGVDCNYVDNCDEQHISIPREPSFHVKFASSITGALDNIRAHSSAKHIDYGCQLAVVMGKRCREVSPKEALNHVFGFMVVQDIVARDWNVPLGGHSMDTFLPLGPTIVHRCHVPDLNNLWIKTIINGEERQTGNTRNMIFKIDFLIHRLSQYLTLCPGDIILTGTPAGSGAFRHPSCFLKPGDLIESEIQNLGKMCNKVVNSYS

SEQ ID NO: 3794 - DNA, 687 bp, Unknown
  Unidentified
  CDS (1)..(687)
atgcaactaactcaaatcctcaggatggcgtgccaaaaccaaaatgccgccaacttcttgagcaatggcaagaaaattgtgggggtggctctcaattacatggacgttgtgctggccaggaacgttcccgtgcccaaggagccgctcgtcttcctcaagcccacatcttcgtacctccaggagggtcagcccattgtgttaccaaaagtctttaccaaggtggcatatgaagtggaactaggcgtggtgattggaaagccctgcaagaacgtatccaaggcagatgccatgagctatgtggcaggatactgcctggctttggatctaactgcccagtgcaatttgggaccagctcgggcggccggtcatccgtggaccttgggcaagggatttgatacttctacgcccgtgtcccagtttatacccatcgaaaaagtgacggacccgcacaacttgccgctttggctcaccgtcaatggagaccttaagcaaaacgggtgcactgcagacttaatattcaaggtgcccgacatcatttcctacgtgtccaagtacatgaccctggaggccaacgatctgatccttaccggaacgcccaatggtgccgatgcgttcaaggcaggcgatgtaattcagtgtggaatggccgatctcgctaaattgaccttccaagtggaggctgaataa

SEQ ID NO: 3795 - protein, 228 aa, Unknown
  Unidentified
MQLTQILRMACQNQNAANFLSNGKKIVGVALNYMDVVLARNVPVPKEPLVFLKPTSSYLQEGQPIVLPKVFTKVAYEVELGVVIGKPCKNVSKADAMSYVAGYCLALDLTAQCNLGPARAAGHPWTLGKGFDTSTPVSQFIPIEKVTDPHNLPLWLTVNGDLKQNGCTADLIFKVPDIISYVSKYMTLEANDLILTGTPNGADAFKAGDVIQCGMADLAKLTFQVEAE

SEQ ID NO: 3796 - DNA, 882 bp, Drosophila melanogaster
  CDS (1)..(882)
atgcaagctgccagaatgaggttcgttcaatacctgcgaaaaggtgacttggccaagcgacttggtctactgtccgaggatcaaaagtcgctggtggaatttgccggcttggagggtgtgcccagcgatctaaagatcctgattgcccaggatcccaatctggaggaactggcgaagaaggccgaaaagcagccgcgactcgaggtgaatgatgatgtcactttgctgccgcctcttaccgatcccggcaagatcatctgcattggtctgaactaccaggaccactgcgatgagcagaacaagccgacccccaaggaaccattgttctttagcaagtttaacaatgccctggtgggtcctcaagataatgtcatcgctcatgcggccagcagcaaaatcgattgggaggttgagctggtctgtgtcattggcaaggtcgcccgccaggtgcccaaatcgcaggccatggactatgtcttcgggtattcggtggcccaggatatctccgcccgcgactggcagaaggaacgcaacggtggtcagttccttatgggcaagtcgatggacacttttctgccgctgggaccggctgtggtgcacaagagtctggtgccggatgtttacaacttgaatctgaaaacctgggtcaacggcgtggagaagcagaacggcaataccggcaacttgatcttcaagctggacgatgtgatcaatcgtctgtcgcagaccattaccctgctgcccggcgacatcatagtcaccggaacgcccaagggcgtgggcatgcatcgcactccgccggaattccttcagcccggtgatgtcgtgcagtcggagattgttggattgggcaagctgtgcaacaagattgtggctccctaa

SEQ ID NO: 3797 - protein, 293 aa, Drosophila melanogaster
MQAARMRFVQYLRKGDLAKRLGLLSEDQKSLVEFAGLEGVPSDLKILIAQDPNLEELAKKAEKQPRLEVNDDVTLLPPLTDPGKIICIGLNYQDHCDEQNKPTPKEPLFFSKFNNALVGPQDNVIAHAASSKIDWEVELVCVIGKVARQVPKSQAMDYVFGYSVAQDISARDWQKERNGGQFLMGKSMDTFLPLGPAVVHKSLVPDVYNLNLKTWVNGVEKQNGNTGNLIFKLDDVINRLSQTITLLPGDIIVTGTPKGVGMHRTPPEFLQPGDVVQSEIVGLGKLCNKIVAP

SEQ ID NO: 3798 - DNA, 714 bp, Chlorobium tepidum TLS
  CDS (1)..(714): transl_table=11
atgaaaacattttcatctctgtcaaaaccagccactcatcgctcgatttactgtgtcggcaaaaactaccctgatcacgctcgtgaaatggcttcatgggagactgacaagcccgagccgctgcatgaaaaggagcctgttatctttatgaaacccggcacggcgctttctactgacggctgcacctcgataccgcggttcgaagggcagctggtgagcagaaaccttcattacgaaggcgagctggtgctgctgattggcgcggacgccgatgaagtatcgcttgccgatgcttcggcgatcatcgccggttacgccgccgggctcgatatgacgctgcgcgatgtacagctcgaagccaaaaatgccggaaatccctggctgaaaagcaaggggtttcgccagagcgcactcgtctcggagttcatcgctccggaatcggctggcccgtgggctgaactcgccatttcgctgcggctgaacggagagcagaagcagtactcgaaggtctcgaaaatgactttttcaccggcctatctggtgcattatttatcgtatatttacgggctgcgagccggagaccttgtctttaccggcactcctgcgggcgtcggaagcgtgctgccgggcgatcgtctcgacgtttcgcttgaaactgccgacgaccattcgcaggcaaaaatactggtatcgctccaggcgactgtttcctga

SEQ ID NO: 3799 - protein, 237 aa, Chlorobium tepidum TLS
MKTFSSLSKPATHRSIYCVGKNYPDHAREMASWETDKPEPLHEKEPVIFMKPGTALSTDGCTSIPRFEGQLVSRNLHYEGELVLLIGADADEVSLADASAIIAGYAAGLDMTLRDVQLEAKNAGNPWLKSKGFRQSALVSEFIAPESAGPWAELAISLRLNGEQKQYSKVSKMTFSPAYLVHYLSYIYGLRAGDLVFTGTPAGVGSVLPGDRLDVSLETADDHSQAKILVSLQATVS

SEQ ID NO: 3800 - DNA, 693 bp, Yersinia pestis KIM
  CDS (1)..(693): transl_table=11
gtgtgtctattagggtataaattcaagagaggcagtatgtatcaacatagagactggcaaggggctttgctggatttccccgtaaataaagtggtttgcgtcggcagtaactatgccgaacatatcaaagagatggggagtactgcctctgtggagcctgtactgtttatcaaacctgaaaccgcattatgcgatatccgccaaccggtatcgataccgaaagattttggctcagtgcatcatgaaattgaattagccgtgttgatcggaacgccgttaaagcaagccagcgaagatagagtcgcacgggcgattgccggttacggtgtggcattggacttaacgctacgtgagctgcaggcaggttttaaaaaagcggggcaaccatgggaaaaagccaaggcgtttgatggttcttgcccgatatccggttttattcccgttgctgagtttggtgatgcacagcaggcagatttatcgctaacgattaatggggaaatccgtcaacagggaaatacccgtgacatgattacaccaattattccgttaatcagttacatgagccgtttctttaccttacgtgctggcgatatcgtgctgaccggtacgccgcaaggcgtagggccgatgcagtcaggtgatatgcttaaaattatgctcaatggcaaaacagtgaatacccgcataatataa

SEQ ID NO: 3801 - protein, 230 aa, Yersinia pestis KIM
MCLLGYKFKRGSMYQHRDWQGALLDFPVNKVVCVGSNYAEHIKEMGSTASVEPVLFIKPETALCDIRQPVSIPKDFGSVHHEIELAVLIGTPLKQASEDRVARAIAGYGVALDLTLRELQAGFKKAGQPWEKAKAFDGSCPISGFIPVAEFGDAQQADLSLTINGEIRQQGNTRDMITPIIPLISYMSRFFTLRAGDIVLTGTPQGVGPMQSGDMLKIMLNGKTVNTRII

SEQ ID NO: 3802 - DNA, 810 bp, Thermosynechococcus elongatus BP-1
  CDS (1)..(810): transl_table=11
atggtggaacggtttgtgcgggtgcagaccacggggggacaaattcattacggcacactgcaactcaatcgggaagtgattatttgggatgcagcaccctggctccacggccaacccactcaccaagtcctcagtcccgatagctaccaactgctggctccctgctccccctcgaaaattgttgctgtggggcgcaactatgtcaaacacgctgcggaaatgggcgatagtgtcccccctgagccattgatttttctgaaaccaccgacaacggttcaagcccccggcggtcccatttggtatccgccccaagtgcagcgcgtcgactatgagggggaattggcggtgatcatgggtcgccgtacccgtgcttgccctgaaaatgaagcccttgagcatatttggggctacacgatcgccaacgatgtcactgctcgggatctccaacagcgggagcagcaatggacacgggctaaggggtttgacacattttgccccctaggtccttggattgtgcgagaggttcccagtgatgcgcggttgcaaacttttatcaatgaggcggcgtcaccggtccaatcagcaacgattgatcaaatggttttctcacccgcaaagttggtgagtttcattagttatgtgatgacgctgctgccgggggatgtggtattgacgggaacacccgcaggaattggtcccttacaagtgggcgatcgcgtgcgcgtcgagatagaaggcattggcagcctgctttcagtcgtcacaacacctgaaaccccctggacaccctccttgggtcgtgcctactag

SEQ ID NO: 3803 - protein, 269 aa, Thermosynechococcus elongatus BP-1
MVERFVRVQTTGGQIHYGTLQLNREVIIWDAAPWLHGQPTHQVLSPDSYQLLAPCSPSKIVAVGRNYVKHAAEMGDSVPPEPLIFLKPPTTVQAPGGPIWYPPQVQRVDYEGELAVIMGRRTRACPENEALEHIWGYTIANDVTARDLQQREQQWTRAKGFDTFCPLGPWIVREVPSDARLQTFINEAASPVQSATIDQMVFSPAKLVSFISYVMTLLPGDVVLTGTPAGIGPLQVGDRVRVEIEGIGSLLSVVTTPETPWTPSLGRAY

SEQ ID NO: 3804 - DNA, 690 bp, Brucella suis 1330
  CDS (1)..(690): transl_table=11
atgacgacttatgtttttgcgccacgcccgcagacgtttctgcccgtgaagggaacggatgcacgctttcccgtgcaccgcatttattgcgtcggccagaactatgccgatcacgctatagaaatgggcggcgatccgacgcgcaacccgcccttcttcttccagaaaaacccggattgccttgtgatcgagggcggcgattttccttatccgccaaagaccgaggatgtgcatcacgagatcgagctggtggtggcgttgaagagcggcggcagcgatatccctgtagaaaaggcgctggaccatgtttacggctatgcggtcggcatcgacatgacgcgccgtgacttgcaggccgtggccaaaaaggcgggccgcccgtgggaagtggccaaggcgtttgaacattcggccccctgttcggctgtcgtgcctgccgctgaaacaggccacccggagcaggcggcgatttcgcttgccatcaacggtgagatgcgccagtccggcaatctcaaccagatgatctggaaagtgccggaaaccatttcctacctgtcgtcgctctttgatctgcaacccggcgatcttatctttacaggtacgcctgcgggcgtcgggccggtgaagcgcggcgaccgtctggagggcaaggtggatggagtgggaatactatccgtaaccgtggtttga

SEQ ID NO: 3805 - protein, 229 aa, Brucella suis 1330
MTTYVFAPRPQTFLPVKGTDARFPVHRIYCVGQNYADHAIEMGGDPTRNPPFFFQKNPDCLVIEGGDFPYPPKTEDVHHEIELVVALKSGGSDIPVEKALDHVYGYAVGIDMTRRDLQAVAKKAGRPWEVAKAFEHSAPCSAVVPAAETGHPEQAAISLAINGEMRQSGNLNQMIWKVPETISYLSSLFDLQPGDLIFTGTPAGVGPVKRGDRLEGKVDGVGILSVTVV

SEQ ID NO: 3806 - DNA, 660 bp, Shigella flexneri 2a str. 301
  CDS (1)..(660): transl_table=11
atgtatcaacatcacaactggcaaggtgcgctgctggattatccggtgagtaaagtagtctgtgttggcagtaactatgccaaacatattaaagagatgggcagcgcagtgcccgaagagccagtgctgtttattaaaccagaaacggcactgtgcgatctgcggcagccattggcgatcccatccgatttcggttcagttcatcatgaagtcgaactggcggtgttgattggcgcgacgctgcgtcaggcaacggaagagcatgtccgcaaagccattgccggttacggcgtggcgcttgatctgacattgcgtgatgttcagggaaaaatgaagaaagccgggcagccgtgggaaaaggctaaagcgtttgataactcttgtccgctttccgggtttatccccgcggcggaatttaccggcgatccacaaaatacaacgctgggcctgagcgtaaacggcgaaaaacgccagcaaggtacgactgcggacatgatccataaaatcgttccgttgatcgcttatatgagcaagttttttaccctcaaggccggtgacgttgtgttgacaggcacgcctgatggcgtcggcccgttgcaaagcggtgatgagctgacagtcactttcgatgggcattctttgacaactcgcgttttgtaa

SEQ ID NO: 3807 - protein, 219 aa, Shigella flexneri 2a str. 301
MYQHHNWQGALLDYPVSKVVCVGSNYAKHIKEMGSAVPEEPVLFIKPETALCDLRQPLAIPSDFGSVHHEVELAVLIGATLRQATEEHVRKAIAGYGVALDLTLRDVQGKMKKAGQPWEKAKAFDNSCPLSGFIPAAEFTGDPQNTTLGLSVNGEKRQQGTTADMIHKIVPLIAYMSKFFTLKAGDVVLTGTPDGVGPLQSGDELTVTFDGHSLTTRVL

SEQ ID NO: 3808 - DNA, 711 bp, Pseudomonas putida KT2440
  CDS (1)..(711): transl_table=11
atgacttacctgttcaacccgccggccatcgtcagcctgccgatccgcggcagcgatgcgcgcttcccggtcggccgggtgttctgcctcggccgcaactacccgtggccggaatcctacggcgcggcgccgcaggagcctgtgtttttcatgaaaccggcaagcaacgtggtcgaggcactgggcgaactgcccttcccgccgcagaccgacgagttctgccatgaaatcgagctggtcgcggccatcgccaaaggcggcgccaacatcgcccgcgagcatgccctggagcacgtgttcggctttgccgccggtctggacatgacccgtcgcgatcatcagcgcaaggccaaggccgagggcctgccgtgggaagccgccaaggtattcgaggcttcggcaccgatgaccgccatcgtccctgccagtgaatgcgactggccgctggatacgtcgctatggctgcaggtcaatggccaggagcgccaacgtgcacacctcagccagcagacctgggcattggctgaagtgatcagcaggctgtctcgccaactgccgctgcgcccgggcgacctgatcatgaccggcagcccgcccggcgtggcaccgctgaacccgggcgacacccttcacgccggcatcgatggtatcggcgaactgcacctgcacgtcggtcctcgccctgtcgggcataccgccaacgccgcctga

SEQ ID NO: 3809 - protein, 236 aa, Pseudomonas putida KT2440
MTYLFNPPAIVSLPIRGSDARFPVGRVFCLGRNYPWPESYGAAPQEPVFFMKPASNVVEALGELPFPPQTDEFCHEIELVAAIAKGGANIAREHALEHVFGFAAGLDMTRRDHQRKAKAEGLPWEAAKVFEASAPMTAIVPASECDWPLDTSLWLQVNGQERQRAHLSQQTWALAEVISRLSRQLPLRPGDLIMTGSPPGVAPLNPGDTLHAGIDGIGELHLHVGPRPVGHTANAA

SEQ ID NO: 3810 - DNA, 666 bp, Pseudomonas putida KT2440
  CDS (1)..(666): transl_table=11
atgagttaccagcaccagtacgtagacggcacgcgcattcacttccccttgggcaaggtggtgtgcatcggccgtaactatgccgagcatgccaaggaactggacaacccgatccccaccgagccgctgctgttcatcaagccaggcagctgcgtggtgccggccgaaggtggcttcaagatcccggccgagcgcgggtcggtgcactatgaggttgaaatcgccgtgctgctgggcaagccgctgtcgacccacccgagcgaggaagaggtgctggacgccatttccggttacgcaccggcgctggacctgaccctgcgcgacgtgcaggccaaactgaaggaaaaggggctgccctgggagctggccaagtgctttgacggcgcttgcgtgctgccaccgttcgtctcggccgccagcttcgaggacgtgacagacatcccggtgcgcctgaccgtgaacggcgaagtacgccaggatggtaatagcgcgatgatgctgaacccgatcgtgccgatgattcagtacatggcagcgcatttctcgctacaagcgggggatgtgatcctcaccggtaccccggccggcgtcgggccgttcaatgtcggtgacgagctggtgctggagctgccgggtgtgagccgcttcgaaagccgggtgctttga

SEQ ID NO: 3811 - protein, 221 aa, Pseudomonas putida KT2440
MSYQHQYVDGTRIHFPLGKVVCIGRNYAEHAKELDNPIPTEPLLFIKPGSCVVPAEGGFKIPAERGSVHYEVEIAVLLGKPLSTHPSEEEVLDAISGYAPALDLTLRDVQAKLKEKGLPWELAKCFDGACVLPPFVSAASFEDVTDIPVRLTVNGEVRQDGNSAMMLNPIVPMIQYMAAHFSLQAGDVILTGTPAGVGPFNVGDELVLELPGVSRFESRVL

SEQ ID NO: 3812 - DNA, 666 bp, Pseudomonas syringae pv. tomato str. DC3000
  CDS (1)..(666): transl_table=11
atgagctaccagcacaaatatgtcgatggaacgagcattcacttcccgctgggcaaagtggtctgcatcggccgcaactatgccgagcacgccaaggaattgggcaacccggtgcccaccgagccgctgctgttcatgaagcctggcagtgcggtagttgcactggaaggcggtttcaccatcccggccgatcgtggctcggtgcattacgaagccgagattgtggtgttgatcggcaagcccctgagcaagaatccgtcccgcgaagaagtgctcgacgcgatcagcggctttgcacccggcctggacctgaccctgcgtgacgtgcagtcccgtctgcgcgagaaaggcctgccgtgggaactggccaagtgcttcgacggcgctgcggtgatccctccattcgtcccggctggcaccttcacggacctgacagacatcggcattcgtctgaccatcaacggcaaagtggtgcaggacggcaacagcagcctgatgctcaaccccatcgtgccgatgattcagcacatggcggccaacttctcgttgcaggccggtgacctgatcatgaccggtacgcctgctggcgtggggccgtttgaagccggtgacgaaatcgttctggaactgaccggtcaaacgccattcaccagcgtcgttcgctga

SEQ ID NO: 3813 - protein, 221 aa, Pseudomonas syringae pv. tomato str. DC3000
MSYQHKYVDGTSIHFPLGKVVCIGRNYAEHAKELGNPVPTEPLLFMKPGSAVVALEGGFTIPADRGSVHYEAEIVVLIGKPLSKNPSREEVLDAISGFAPGLDLTLRDVQSRLREKGLPWELAKCFDGAAVIPPFVPAGTFTDLTDIGIRLTINGKVVQDGNSSLMLNPIVPMIQHMAANFSLQAGDLIMTGTPAGVGPFEAGDEIVLELTGQTPFTSVVR

SEQ ID NO: 3814 - DNA, 777 bp, Streptomyces avermitilis MA-4680
  CDS (1)..(777): transl_table=11
gtgcgcatcgccagattctccatcgacggcaacgtcgctttcggcgcggtcgagggcgacaagccggacgagctcgtcctcgacatcatcaagggcatcccgttcgcggacttcgagctctccggtacgaaggttcccctcaacaaggtgcgcctgctgccgcccgtgctccccaacaaggtcgtggccttcggccgcaactacgcggagcacgccaaggagctgggcaacgaggtgcccgacgccccgttcgccttcttcaagccgtcgacctcggtgatcggccccggcgacccgatccagtacccgtccttctcgaacgagctgcaccacgaggccgagctggcggtggtcatcggccgcatgtgccgcgaggtaccgcgtgagcgcgtcaaggacgtcatcctcggctacacctgcgccaacgacatcaccgcgcgtgacgtccagaagcgcgagaagcagtgggcccgggccaagggcttcgacagctcctgcccgctcggcccctgggtggagacggacctcgacccgagcgacgtcaccatccagctcacggtcaacgggcaacagcggcagctcggccgcaccagcgagatgatccactcgatcgaggatctgatcgtcaacatcaccgaggccatgacgctgctccccggcgacgtgatcctcacgggcaccccggctggggtcggccccctcaacgtcggcgacgaggtcgccgtcaccatcgaaggcatcggcactctcaccaacaaggtgatcaagcgtggctaa

SEQ ID NO: 3815 - protein, 258 aa, Streptomyces avermitilis MA-4680
MRIARFSIDGNVAFGAVEGDKPDELVLDIIKGIPFADFELSGTKVPLNKVRLLPPVLPNKVVAFGRNYAEHAKELGNEVPDAPFAFFKPSTSVIGPGDPIQYPSFSNELHHEAELAVVIGRMCREVPRERVKDVILGYTCANDITARDVQKREKQWARAKGFDSSCPLGPWVETDLDPSDVTIQLTVNGQQRQLGRTSEMIHSIEDLIVNITEAMTLLPGDVILTGTPAGVGPLNVGDEVAVTIEGIGTLTNKVIKRG

SEQ ID NO: 3816 - DNA, 696 bp, Bordetella pertussis Tohama I
  CDS (1)..(696): transl_table=11
atggattacgtatttcccccttcgccgccggcggccgtgccggtggcaggcggcaacgcccgcttcccggtgcgccgcgtctattgcgtgggccgcaactacgccgagcatgccaaggaaatgggcttcaccggccgcgaagatccgttcttcttctgcaagcctgccgacgccatcctgtcggtgggcgatggcgccacgggcgaaatgccgtacccgcccaaaacggccaacctgcactacgaaatggagctggtcgtcgtgctgggcaagggcgggcgcgacctgaccgtcgagcaggccgacgaatgcgtatggggctacgccctgggcctggacatgacacgccgcgacctgcagggcgaggccaagaagcagggccgtccctgggaagtgggcaaggctttcgatctctcggcgccgctcggccccatccatccgcgcagcgccgtcggcacgctggacaaaggcgccatctggctggacgtcaatggcgagcgcaagcaatccagcgacatttcgcagatgatctggaacatccccgaaagcatcgcctatctgtcgggcctgttcgagctgcaaccgggcgacatcattttcaccggcacgccggaaggcgtgggcgcggtggtcaagggagacgtcatcgtcggtggcgtcgagggcctgggcgagctgcgcgtacgcatcgcctga

SEQ ID NO: 3817 - protein, 231 aa, Bordetella pertussis Tohama I
MDYVFPPSPPAAVPVAGGNARFPVRRVYCVGRNYAEHAKEMGFTGREDPFFFCKPADAILSVGDGATGEMPYPPKTANLHYEMELVVVLGKGGRDLTVEQADECVWGYALGLDMTRRDLQGEAKKQGRPWEVGKAFDLSAPLGPIHPRSAVGTLDKGAIWLDVNGERKQSSDISQMIWNIPESIAYLSGLFELQPGDIIFTGTPEGVGAVVKGDVIVGGVEGLGELRVRIA

SEQ ID NO: 3818 - DNA, 696 bp, Bordetella bronchiseptica RB50
  CDS (1)..(696): transl_table=11
atggattacgtatttcccccttcgccgccggcggccgtgccggtggcaggcggcaacgcccgcttcccggtgcgccgcgtctattgcgtgggccgcaactacgccgagcatgccaaggaaatgggcttcaccggccgcgaagatccgttcttcttctgcaagcctgccgacgccatcctgtcggtggccgatggcgccacgggcgaaatgccgtacccgcccaaaacggccaacctgcactacgaaatggagctggtcgtcgtgctgggcaagggcgggcgcgacctgaccgtcgagcaggccgacgaatgcgtatggggctacgccctgggcctggacatgacgcgccgcgacctgcagggcgaggccaagaagcagggccgtccctgggaagtgggcaaggctttcgatctctcggcgccgctcggccccatccatccgcgcagtgccgtcggcacgctggacaaaggcgccatctggctggacgtcaatggcgagcgcaagcaatccagcgacatttcgcagatgatctggaacatcccggaaagcatcgcctatctgtcgggcctgttcgagctgcaaccgggcgacatcattttcaccggcacgccggaaggcgtgggcgcggtggtcaagggagacgtcatcgtcggtggcgtcgagggcctgggcgagctgcgcgtacgcatcgcctga

SEQ ID NO: 3819 - protein, 231 aa, Bordetella bronchiseptica RB50
MDYVFPPSPPAAVPVAGGNARFPVRRVYCVGRNYAEHAKEMGFTGREDPFFFCKPADAILSVADGATGEMPYPPKTANLHYEMELVVVLGKGGRDLTVEQADECVWGYALGLDMTRRDLQGEAKKQGRPWEVGKAFDLSAPLGPIHPRSAVGTLDKGAIWLDVNGERKQSSDISQMIWNIPESIAYLSGLFELQPGDIIFTGTPEGVGAVVKGDVIVGGVEGLGELRVRIA

SEQ ID NO: 3820 - DNA, 882 bp, Bordetella bronchiseptica RB50
  CDS (1)..(882): transl_table=11
atgaagtttgcaagcctcgactatcaaggcaaggcacaggtggcgatcttggacacggaggccggcgtgttctggcctttgtccgggcttttgcgcgacgaaggcgacctggtcgagctgatcagcgcctgggacagtgtgcaccagcggatcgcgccgtcgggcgccggcattgctctcgatcgggcgaccatcctcgccccgatctcatcgccccggcgcaacatcttctgtgtcgggaaaaactaccacgagcacgcagccgagttccagcgctcggggttcgacagcagcgcaaaggatggagagcatgcccccgaagcgccggtggtattcaccaaaccggcctcggcgatcgtggcccccggggccgtcattccccggcatgcccaggtgacgcagcagctggattacgaggccgagctggcggtcgtgatcggcaaggccggacaaggcatcaagaaggctgacgccatgtcgcacgtcttcggctacaccatcatcaacgatgtcacggcccgagaccttcagaaattgcatcgtcagtggttcatcggcaaatcgttggatggcttctgcccgatgggcccgtatatcgtgacggccgatgaagtggatggacaggccctggatgtgcgatgctggatcaatgacgagctgcgacagaacgcgaacacgcggcaactgatcttcgacatcccgaccctgatcgagaccttgtcggccggcatgacgctgcagccgggcgacatcatcgcgaccggcaccccggccggcgtggggataggttttacgcccccacgcttcctgcaatcgggagaccgtgtccgcatcgagatcgcgggattgggcgtactcgaaaacacggtcggtaacgagtaa

SEQ ID NO: 3821 - protein, 293 aa, Bordetella bronchiseptica RB50
MKFASLDYQGKAQVAILDTEAGVFWPLSGLLRDEGDLVELISAWDSVHQRIAPSGAGIALDRATILAPISSPRRNIFCVGKNYHEHAAEFQRSGFDSSAKDGEHAPEAPVVFTKPASAIVAPGAVIPRHAQVTQQLDYEAELAVVIGKAGQGIKKADAMSHVFGYTIINDVTARDLQKLHRQWFIGKSLDGFCPMGPYIVTADEVDGQALDVRCWINDELRQNANTRQLIFDIPTLIETLSAGMTLQPGDIIATGTPAGVGIGFTPPRFLQSGDRVRIEIAGLGVLENTVGNE

SEQ ID NO: 3822 - DNA, 651 bp, Chromobacterium violaceum ATCC 12472
  CDS (1)..(651): transl_table=11
atgtcgagtgtaaaacttggcttacatgccatccgcgtcggcaatattttctgcataggccgcaattacgcggcgcatgccgccgagctgggcaacaaggtggaggacgagccgctggtattcctgaagcccacctcggcgttgctggacgagtcctcgccgatacggcttccggaatattccggcgacgtgcaccacgagtgcgagctggtggcgctgataggcaagggcggcgacgacattccgccggagaaggcgctggatcatgtggccggttatggaatagggctggatctgaccgcgcgcgacgcgcaggcggaggccaagcgcaaaggccagccgtggaccaaggccaagggcttccgcggcgcggcctgcgtgtcgacgctggtgccggcggccagggtggaggatccgcagcggctgaagttcgagctgcgcgtcaacggccagctgcgccagcgcggcgacgccggcctgatgctgttcacgctggccgagcagatcagctacctgtccaggctgtacggcctgtccgacggcgatctgatcttcaccggcacgcccgaaggcgtggcgcgcatcgaatccggcgaccagctggacctcagcctgcacgggcaagtgtcggcgcattggaaggtggcatga

SEQ ID NO: 3823 - protein, 216 aa, Chromobacterium violaceum ATCC 12472
MSSVKLGLHAIRVGNIFCIGRNYAAHAAELGNKVEDEPLVFLKPTSALLDESSPIRLPEYSGDVHHECELVALIGKGGDDIPPEKALDHVAGYGIGLDLTARDAQAEAKRKGQPWTKAKGFRGAACVSTLVPAARVEDPQRLKFELRVNGQLRQRGDAGLMLFTLAEQISYLSRLYGLSDGDLIFTGTPEGVARIESGDQLDLSLHGQVSAHWKVA

SEQ ID NO: 3824 - DNA, 660 bp, Porphyromonas gingivalis W83
  CDS (1)..(660): transl_table=11
atgaagataattgctgtcggcatgaactatggtgcgcatgtcagcgaaatgcgacgtgcggacatccttcccgttgctccctgtccggatggagggggagccgatttttgtgtggaggaacctgtgcttttcctcaaggccgactccttgttgcgcgaagggcatccccttttctatccggatttttctcaggagatccactatgagacggagctggtggttcgtatagatcgtatcggcaagtgcatagccgaacgttttgctcaccgctattacagtgaggttactgtcggtatagacttcacggctcgtgacctccagcgtcgtgccaaagccaaggggttgccctgggcaacggccaaagctttcgacaactccgctgccgtagggcggtgggtgaaaaaagactcgctccggcacggtgtgcaggaattgggcctgcgattggatatagacggacgcacggtgcagcagggcaatacacgggatatgctcttttccgtagatcgtttgatcgcttatgccagtcgtttcttcacacttcgtatgggggatcttatctttacagggactccggcaggggtaggccccattgctatcgggcagcacctcgaagcctatctcgaagagcaaaaactgctcgacatatccatcaaataa

SEQ ID NO: 3825 - protein, 219 aa, Porphyromonas gingivalis W83
MKIIAVGMNYGAHVSEMRRADILPVAPCPDGGGADFCVEEPVLFLKADSLLREGHPLFYPDFSQEIHYETELVVRIDRIGKCIAERFAHRYYSEVTVGIDFTARDLQRRAKAKGLPWATAKAFDNSAAVGRWVKKDSLRHGVQELGLRLDIDGRTVQQGNTRDMLFSVDRLIAYASRFFTLRMGDLIFTGTPAGVGPIAIGQHLEAYLEEQKLLDISIK

SEQ ID NO: 3826 - DNA, 789 bp, Gloeobacter violaceus PCC 7421
  CDS (1)..(789): transl_table=11
atgcacaccgtgcgtttttgccacccgcagcttcccgaccacgctcctcactacggcctgttacaccctgccgggactatcgagcggctcgacggtgccccctggctggggggacaacccaccggcatctggttcgatgtcgagcaaggacaactgctcgccccctgcctgccgggcaaaattgtctgcgtcggcaaaaactaccgcgatcacgccgccgagatggcccagttgcgcggcgacgccggggtgcctcctgaaccgctgctctttctcaaacccccctcggccctcgcggctcccggcgaatccatcgtctatccgccccagtcggagcgcgtcgattacgagggcgaactggctctggtcatcggccgcacctgccgccgggtgccggtggagcgggctctggattatctattcggctacaccgccgccaacgacgtcaccgcccgcgacctgcagggcaaggacaagcagtggacccgcgccaagggtttcgacagcttctgtcctttggggcctctcatcgccacagaacttgctcccgacgcccacctgagcaccaccctcaacggcaagaccgtccagtcgagcagcatcgaccggatggtcttcccgcctgcggttttgatctcctacatcagcgcggtgatgaccctgcagccgggggatgtgatcctcaccggcaccccggcggggatcggtcccatgcagcccggcgacgaggtgggcgtcaccatagacggcgtcggcaccctcaccaacccggtcgtccgtgggctgtga

SEQ ID NO: 3827 - protein, 262 aa, Gloeobacter violaceus PCC 7421
MHTVRFCHPQLPDHAPHYGLLHPAGTIERLDGAPWLGGQPTGIWFDVEQGQLLAPCLPGKIVCVGKNYRDHAAEMAQLRGDAGVPPEPLLFLKPPSALAAPGESIVYPPQSERVDYEGELALVIGRTCRRVPVERALDYLFGYTAANDVTARDLQGKDKQWTRAKGFDSFCPLGPLIATELAPDAHLSTTLNGKTVQSSSIDRMVFPPAVLISYISAVMTLQPGDVILTGTPAGIGPMQPGDEVGVTIDGVGTLTNPVVRGL

SEQ ID NO: 3828 - DNA, 657 bp, Photorhabdus luminescens subsp. laumondii TTO1
  CDS (1)..(657): transl_table=11
atgtatcaacacagagactggcagggggcattactggatcttcctgtcaataaagtggtttgcgttggtagtaattacgctaaacatattaaagagatggggtctaagccagcggaagagccagtcgtttttattaagccggaaactgcactgtgtgatatacatcagccaattgccattccaaaggattttggtgttgttcatcatgaagttgaactggctgtactgattggtacgccgttgaaacaagcaaatgaagagcgagttggtgccgctatcgcgggtttggctgttgcattggatctcaccttgcgtgatttgcaatctaaattcaagcaagcgggtcaaccgtgggaaaaaagtaaggcgtttgatggctcttgcccgatatctgggtttattcgaataagccactttggtgatccacagaatgtccagttttcactgacggtcaataatgagctacggcagaacggtaatagtaacgatatgttgacacccatcgttcccctgatcagccatatgtcgcacttttttactttgcggccgggagatgtgattctcactggtacaccggaaggtgttggcgcactgaaacctggtgatgtgttaaaggttactctgaatgataattcactcactaccagagtgatttga

SEQ ID NO: 3829 - protein, 218 aa, Photorhabdus luminescens subsp. laumondii TTO1
MYQHRDWQGALLDLPVNKVVCVGSNYAKHIKEMGSKPAEEPVVFIKPETALCDIHQPIAIPKDFGVVHHEVELAVLIGTPLKQANEERVGAAIAGLAVALDLTLRDLQSKFKQAGQPWEKSKAFDGSCPISGFIRISHFGDPQNVQFSLTVNNELRQNGNSNDMLTPIVPLISHMSHFFTLRPGDVILTGTPEGVGALKPGDVLKVTLNDNSLTTRVI

SEQ ID NO: 3830 - DNA, 636 bp, Vibrio vulnificus YJ016
  CDS (1)..(636): transl_table=11
gtgtttgttcagggaagagaaatgagccatatccacttcagaaacaaaaccttgcaaccgggcaaagtgctctgcgttgggcgtaattatgttgagcatattgaagagctgcaaaacacaattcccgatcaaatggtgctgtttcacaagccggcgtcggcagtcaccagcacattgcattctttccatcaagagccgcttcattatgaagccgagatctgctttgtgattgaaaatggccagtatacgggggttggcatcggcttagatctcaccaaacgacagacacaaagttatctcaaagcaaaaggcctcccatgggagcgagcgaaagcctttaacggtgctgcggtacttagccgctttatcgaattgaaaggcatcgctagcgatgatctcaacctcgaactgtttattaattgtgtccgcgtacaaaaagggcatgtcaatcaaatgctgtactcaccgcaaacggtactggaagagctcaaaggttacgtgacattggatgatggcgatgtcgtgatgacaggcacacctcagggggtgggcgaagtgcataaaggcgacgtgtttttaggtcgccttaaatgtggtgacaccaccttattggaagttgagtgggtggcctgttaa

SEQ ID NO: 3831 - protein, 211 aa, Vibrio vulnificus YJ016
MFVQGREMSHIHFRNKTLQPGKVLCVGRNYVEHIEELQNTIPDQMVLFHKPASAVTSTLHSFHQEPLHYEAEICFVIENGQYTGVGIGLDLTKRQTQSYLKAKGLPWERAKAFNGAAVLSRFIELKGIASDDLNLELFINCVRVQKGHVNQMLYSPQTVLEELKGYVTLDDGDVVMTGTPQGVGEVHKGDVFLGRLKCGDTTLLEVEWVAC

SEQ ID NO: 3832 - DNA, 657 bp, Geobacter sulfurreducens PCA
  CDS (1)..(657): transl_table=11
atgaaaaccgccaggctttccccgtcggggaatgagtttcccatcggcaagatactctgcatcggccgcaattacgccgagcacatcaaggagttgggcaacgaaactcccgacgcgccggttgttttcatgaagcccgccacggccgtcatcggcgacggggaaaccatcatcatcccctcctattcgcgcgaatgtcaccatgaggccgagctggcgctcctcatcggaaaaggggggaaagacatcccgcccgaacgggcactggagcatgtggccggttacggggttgccatcgatttgacgctgcgggacgtgcaggccgaattgaagaagaaggggttgccctgggagatcgccaagggattcgacacctcctgccccctttcctcttttgtcccggcagaccgggtggccgatccccacgacctgcacattaccctccgggtgaacggagagatgcgccaggacggctcctcttccctcatgatccaccggattccccagatcctcagttacatgtcgggagttttcaccctggaaccgggagacgtgatcctgaccgggacccccgccggcgtcggccccctcgcggcgggagacgccgtggaagccgaggtcgtcggcgtggcggcgatccgggttaccgttaaataa

SEQ ID NO: 3833 - protein, 218 aa, Geobacter sulfurreducens PCA
MKTARLSPSGNEFPIGKILCIGRNYAEHIKELGNETPDAPVVFMKPATAVIGDGETIIIPSYSRECHHEAELALLIGKGGKDIPPERALEHVAGYGVAIDLTLRDVQAELKKKGLPWEIAKGFDTSCPLSSFVPADRVADPHDLHITLRVNGEMRQDGSSSLMIHRIPQILSYMSGVFTLEPGDVILTGTPAGVGPLAAGDAVEAEVVGVAAIRVTVK

SEQ ID NO: 3834 - DNA, 867 bp, Strongylocentrotus purpuratus
  CDS (1)..(867)
atgcggtttgtccagttcgaggagtcgggcaagtccagggtgggagtggaggtagaagccggtggtgattttgtagatctctgcggctctgatcagacgatcccagacaccacattgaagctgattgaaggcggggcggatctcttacaaaaggcacaaaatgtcgttgagtcttcagatcggcgcgttgtgaagagggcagacgttaaactcttgtcccccatcacgaaccctcagaaagtgctttgtatcggcatgaactatcgagaccactgcacagaacagaactaccccatccctaccgagccagtcatcttcagcaagtttgccagcgctatcataggtcctaacgatgatgtcgcctatcctgagctcacagaggctctcgactgggaggtcgagttgacggtggttatcgggaagggcggcaagaacataaaggaggcagatgccatgaaccatgtatttggatacaccgttgcacacgacgtcagcgctagggattggcagatgcaaaagaacggaaagcaatggcttctgggtaaaacgatggatgacttctgtcctcttggtcctgccattgtcacacctgacgctctttcagaccctcacaagctaggactgagatgcagagtcaatggagaaaccatgcaggagagtaacacagagcaattgatcttcaagactgcttccctcatacaatttatttcacaatttataacattgactcctggtgacatcatcttaacgggaacgcccccaggtgtgggtgtcttcaggaagccagaccctgtctatctaaagcgtggtgatgtcgttgaatgtgaaattgatgagatcggaactatcaggaatcgcatcgtttga

SEQ ID NO: 3835 - protein, 288 aa, Strongylocentrotus purpuratus
MRFVQFEESGKSRVGVEVEAGGDFVDLCGSDQTIPDTTLKLIEGGADLLQKAQNVVESSDRRVVKRADVKLLSPITNPQKVLCIGMNYRDHCTEQNYPIPTEPVIFSKFASAIIGPNDDVAYPELTEALDWEVELTVVIGKGGKNIKEADAMNHVFGYTVAHDVSARDWQMQKNGKQWLLGKTMDDFCPLGPAIVTPDALSDPHKLGLRCRVNGETMQESNTEQLIFKTASLIQFISQFITLTPGDIILTGTPPGVGVFRKPDPVYLKRGDVVECEIDEIGTIRNRIV

SEQ ID NO: 3836 - DNA, 870 bp, Nasonia vitripennis
  CDS (1)..(870)
atgaggttcgtacagttcgtgaacaaaaacggaggtccccagcacctgggggtccagctgaagcaaggcggagacataatagccatatcggtacttaattcgcgtatccccaacacactgaagaagttcctcgagggcggcgaggaattccttaaaaaggcaaagaggatagtcgccgagggccgaagcgtcatcccagagaaagatgttacattcctgccaccaatcacgcaaatggacaaactggcctgcgtcggcttaaattacagcggacactgcaaggaacagaatctcgagcctccgtcgactcctgtaatcttcagcaaattccccagcaacatcatcggccctcacgatgatattcacctgcctactatttcagacaaggtcgactgggaggcagagctggcgatcgtcatcggcaagaagtgcaagggtctgaacaacgacgaggccgaggactgcatattcggctacaccgttgctcaggacctgtcggcgcgcgactggcaaaagggcaagcgcaacggcggccaattcctcctgggcaaggcgatggacaacttctgcccactcggaccggccgtcgtcaccaaagagtcgatcgccgatgtgaagaacctcgctgtcaagacttgggtcaacgggcaactcaagcaggacggcaatacctccgagctcatcttcaagaccaacgacatcgtcgcctacctctcgcaattcttcacgctactgcccggtgatgtgatccttactggaactccagctggagttggcttcgcgcgtaatccaccggaattcttgaagaaaggagacgttctggaaaccgagatcgagagccttggacgtttgaagaataacgttctctga

SEQ ID NO: 3837 - protein, 289 aa, Nasonia vitripennis
MRFVQFVNKNGGPQHLGVQLKQGGDIIAISVLNSRIPNTLKKFLEGGEEFLKKAKRIVAEGRSVIPEKDVTFLPPITQMDKLACVGLNYSGHCKEQNLEPPSTPVIFSKFPSNIIGPHDDIHLPTISDKVDWEAELAIVIGKKCKGLNNDEAEDCIFGYTVAQDLSARDWQKGKRNGGQFLLGKAMDNFCPLGPAVVTKESIADVKNLAVKTWVNGQLKQDGNTSELIFKTNDIVAYLSQFFTLLPGDVILTGTPAGVGFARNPPEFLKKGDVLETEIESLGRLKNNVL

SEQ ID NO: 3838 - DNA, 693 bp, Magnaporthe grisea 70-15
  CDS (1)..(693)
atggcgacactacgaaacgcacgcaaggtggtctgcattggtcgcaactacgcagatcacattgccgagttgaacagcgccaagcccaagcagccgtttttcttcctcaagccgccgtcatcaattgttgcgcccggtgctggccccgtgatccgacccaaaggtgtcgatcttcactatgaggtggagctggctctcatcattggcaaggaggtcaagaacttgaaggcagacgacgaccagggtgctttggatgccattgaaagctatgccctcagcatcgacatgacggcccgcaacgtccaaaacgaggccaagaagaagggactcccctgggacattgccaagggcttcgacacgttcctgccgttcagcaacatcatccccaagtcggccatcccggaccctcacaacgtcgagctgtacctcagcgtcaacggtgaggtccgccagcaggactccaccaatctgctcctgttcaggatcccccgcgtcctggccgacatctcgagcgtcatgactctcgagaagggagacattgtgctcactggcacccccaagggcgtcggtcccgtcgtgcccggggacgtcatgcgtgccggaatccgcgtcaatggcaaggagatcgaggaggcccggattgagattcctgtggaggagtctaccagcgactatttttacaaggagacttag

SEQ ID NO: 3839 - protein, 230 aa, Magnaporthe grisea 70-15
MATLRNARKVVCIGRNYADHIAELNSAKPKQPFFFLKPPSSIVAPGAGPVIRPKGVDLHYEVELALIIGKEVKNLKADDDQGALDAIESYALSIDMTARNVQNEAKKKGLPWDIAKGFDTFLPFSNIIPKSAIPDPHNVELYLSVNGEVRQQDSTNLLLFRIPRVLADISSVMTLEKGDIVLTGTPKGVGPVVPGDVMRAGIRVNGKEIEEARIEIPVEESTSDYFYKET

SEQ ID NO: 3840 - DNA, 879 bp, Gibberella zeae PH-1
  CDS (1)..(879)
atggatactacaacatttaagcgtcttgtgcggtttgtccccaagtctgactcaactcgcatcctgatcggtgaaccatcacaagaagatctagatatcggtgttgccacgcgtgatgggaaagatgtcactgtcaatgtattcacggggtcttccgttctttctcctggcactcgaacagacagaaccgaatctattgagaggatcttgtcgcctttggcacaagaggaagtcggaaccattcgctgcattggactaaactatgtccaacacgcgaatgaagtgaagatggacattccaaagatcccaactcttttccttaagcctagcactgctttgggagacccttggcctgctcccacctttcttcccaagataacccaaaatgacggaagtggtgattatgaatcggagctggcagtagttattggcaaaaccgccaagaatgtctctgaggagaacgctatggactacgtcttgggctacacggctgccaacgatgtctcgagtcgtgtttcgcagcttaaccagtctcagtggtgcttctccaagggattcgatggagcatgcccaattgggcctgttcttgtctcaacttcggctgttcctgatccttcgaagctgcacattcgtggcctgaagaacggaaaggtacttcaagactgttcgctggacgatctcatctttagcatccccaagctagtcagtttcttatcacaaggcactacacttccagctggcacagtaattatcacgggcacgcctgctggagtaggaatggggaagagccccaaagagaacttggaacatggtgacgaattcagagttgagattttgcctcacatcggaacgctggttagcaagtttgagaacgagtag

SEQ ID NO: 3841 - protein, 292 aa, Gibberella zeae PH-1
MDTTTFKRLVRFVPKSDSTRILIGEPSQEDLDIGVATRDGKDVTVNVFTGSSVLSPGTRTDRTESIERILSPLAQEEVGTIRCIGLNYVQHANEVKMDIPKIPTLFLKPSTALGDPWPAPTFLPKITQNDGSGDYESELAVVIGKTAKNVSEENAMDYVLGYTAANDVSSRVSQLNQSQWCFSKGFDGACPIGPVLVSTSAVPDPSKLHIRGLKNGKVLQDCSLDDLIFSIPKLVSFLSQGTTLPAGTVIITGTPAGVGMGKSPKENLEHGDEFRVEILPHIGTLVSKFENE

SEQ ID NO: 3842 - DNA, 717 bp, Gibberella zeae PH-1
  CDS (1)..(717)
atggccaacctggcgcctcaagcttcatcaagcctcaagcaagcaggcaaggtcatatgtattggccgcaactttgcggaacatattgccgagctcaacagcgccaagccaaagcagcccttcttcttcctcaagcccacctcatccatcgtgctccctggtgagggtgctgtcctgagacccaagggcattgagatgcactatgaagttgagctggctcttgttatcggcaagctgaccaaagatctccaagcctctgatgttcagggcgctatggatgctgtaaaggcttacgctgttgccattgactttactgcccgcaacgctcagaatgaggccaagaagaagggtcttccgtggtcgattgccaagggcttcgacactttcctgcccatgagcaacatcattcccaagaccgccatccaggaccctcacaacgtggagctcttcctccagctcaacggcgagaccaagcagcagggctcgaccaacctgatgatctaccagatccctcgcattctaagcgacatctcaaaggtcatgactctccacccgggtgacattgtcctcactggtacacctgctggtgttggtcctgctgcgcctggtgacgttgttcgtgctggtctgaggattgacggaaaggaggtggaggagggtgctattgagattcccgtcgaggagtcgcctagttcctacactttctccgagacttaa

SEQ ID NO: 3843 - protein, 238 aa, Gibberella zeae PH-1
MANLAPQASSSLKQAGKVICIGRNFAEHIAELNSAKPKQPFFFLKPTSSIVLPGEGAVLRPKGIEMHYEVELALVIGKLTKDLQASDVQGAMDAVKAYAVAIDFTARNAQNEAKKKGLPWSIAKGFDTFLPMSNIIPKTAIQDPHNVELFLQLNGETKQQGSTNLMIYQIPRILSDISKVMTLHPGDIVLTGTPAGVGPAAPGDVVRAGLRIDGKEVEEGAIEIPVEESPSSYTFSET

SEQ ID NO: 3844 - DNA, 900 bp, Gibberella zeae PH-1
  CDS (1)..(900)
atggcatcatctactcttcagcgcaagttatttatttcactatctagtccttccaagatccttattggccagccagctgacaagaacattgacgttggcgctgccttgcgcaagggtcaagaggttgctgtcaatgtatggtcaggctcatcagttttggccccaggatcatcgactggcactaccgagactatcgaccgcgtcttgtctcctcttgcacagaatgaggttggcactatcagatgtgtcggcttgaactacagaaagcacgctgccgagtgcggacttgagcctccgccaatcccggtcattttcatgaagcccagcacatctctcgtggacccttggcctgctaagggaactgttcccaagctgagccaggtagactcgtctggcgattacgaggcggagctggcagtcgtcattggcaagacagccaagaacgttagtgaagccgaggctttggactatgttctcggatacactgctgccaacgatgtttctagtcgtactcagcaactgaaccagtcccagtggtcattctccaagagcttcgacggggctctccctctcggccctacacttgtcctgaagtcgttgattccagacccttccaaacttcacatgcgaggtcttaagaatggcgaggtgtaccaggagagcggaactgatgatctcatcttctccgtcccaaagattattagctggctgtcgcagggcaccactcttcctcctggaaccgtcatcgttactggtaccccggcgggtgttggaatgggcagaacaccaaaggatgctctgaggcaccgcgacgaatttgcagttgagatcctgccacacattggaacacttaccaacattttcgagaatgagaagagcgagttcatgacgaagctgtaa

SEQ ID NO: 3845 - protein, 299 aa, Gibberella zeae PH-1
MASSTLQRKLFISLSSPSKILIGQPADKNIDVGAALRKGQEVAVNVWSGSSVLAPGSSTGTTETIDRVLSPLAQNEVGTIRCVGLNYRKHAAECGLEPPPIPVIFMKPSTSLVDPWPAKGTVPKLSQVDSSGDYEAELAVVIGKTAKNVSEAEALDYVLGYTAANDVSSRTQQLNQSQWSFSKSFDGALPLGPTLVLKSLIPDPSKLHMRGLKNGEVYQESGTDDLIFSVPKIISWLSQGTTLPPGTVIVTGTPAGVGMGRTPKDALRHRDEFAVEILPHIGTLTNIFENEKSEFMTKL

SEQ ID NO: 3846 - DNA, 846 bp, Gibberella zeae PH-1
  CDS (1)..(846)
atgtcgatccaacgcctcgtccggtttgtgtccagtgatgatggcaagacttattatggtgctgcgaacgaatctctcaagaacgcaagaattcttgaatccggaagccctttttctacttcagctcaaatttccggcaaggagcatacaatccagaagctactatgccccattgatctcaatgatgcccgatctgttgtttgcatcggccttaattacacggatcatgccgaagaggcccagatgcctatccccaaagtccctgttgtctttttcaagcccgtgacggctcttgctggccctcatgatgatcttgtccttcctcatacctcttgggagaagggaagactggactatgaatcagaattggttattgtgattggcaaaaaggcctcgagagtctctaaagatgacgcgctagactacgtctttagttatacattccacgctggaaatgatatctcgaacagggcatggcagctggacccccaactgggtgggggacagtggtgttactcaaagtgtttcgattgctcagcacccatcggtccagccatcgtctcgaaagacattctaggctctgcagtcggacttggaattcgtggcacactcaacgacacacaatcacaagatggcaacaccaacaacatgatttttggagtcgctgagatcgtttcgttcttgagtcaaggcatgacacttctacctggaacattcattttcactggaactccagctggtgttggatttggcaagaagcctcagatcagcgtgaaggaaggcgatgttacacaagtggagattgatggtatcggagccattgtcaataaggtcgtatacgagtaa

SEQ ID NO: 3847 - protein, 281 aa, Gibberella zeae PH-1
MSIQRLVRFVSSDDGKTYYGAANESLKNARILESGSPFSTSAQISGKEHTIQKLLCPIDLNDARSVVCIGLNYTDHAEEAQMPIPKVPVVFFKPVTALAGPHDDLVLPHTSWEKGRLDYESELVIVIGKKASRVSKDDALDYVFSYTFHAGNDISNRAWQLDPQLGGGQWCYSKCFDCSAPIGPAIVSKDILGSAVGLGIRGTLNDTQSQDGNTNNMIFGVAEIVSFLSQGMTLLPGTFIFTGTPAGVGFGKKPQISVKEGDVTQVEIDGIGAIVNKVVYE

SEQ ID NO: 3848 - DNA, 1005 bp, Apis mellifera
  CDS (1)..(1005)
atgccttaccgtggtaaattacgattacttagtagagcttgcttcaccttcagaaactcgtgtgccgagaaaagcaacacgcattttgctactagtatacccggcaggaatttctctaccaatagagcggtcaacatgaggtttgtacaattcactggtaaaaatggtggtcctcaacatttaggagtgcaacttgtccaaggtggtgatataatcgcagtttcggcggtagattcgagaattccaaacacattgaaaaaatttctcgagggtggtgacgatttgttgaaaaaggccaaaagaatagtggcagaaggacgtagcgtaataccggaagtggaggtgaattttctggcgccagttacacgtatggataagttggcttgtgttggtttgaactatattggtcattgtaaagaacaaggtgtatcacctccggaaagccctgtaatttttagtaaattcgcaagtaatatcatcggaccgcgtgataatattatgcttccaccaatttcagataaagttgattgggaagcagaactcgcgatagtaatcgggaaaaagtgtaaagcattgaataacaatgaaggagaggattatatttttggttatacaatagcgcaagacattacggctcgagattggcaaaaatcgaagagaaatggcggtcaatttctattgggtaaagccatggatacattctgtccattgggaccagctgttgttactaaggaagctatttccgatatcaacaatcttaccgtaaaaacatgggtaaatggtaatattaaacaagatggtaataccagcgaactaatatttaagcctcatgaaatcgtcgcttatatttcacaatttatgacactattaccgggagacgtaattctaacgggcacgccatctggtgtgggattcactcgtaaaccgcctgaatatttacagcgtggagatgtattagaaacggaaatacaaggtttaggtcgcttgagaaacaaagttctctga

SEQ ID NO: 3849 - protein, 334 aa, Apis mellifera
MPYRGKLRLLSRACFTFRNSCAEKSNTHFATSIPGRNFSTNRAVNMRFVQFTGKNGGPQHLGVQLVQGGDIIAVSAVDSRIPNTLKKFLEGGDDLLKKAKRIVAEGRSVIPEVEVNFLAPVTRMDKLACVGLNYIGHCKEQGVSPPESPVIFSKFASNIIGPRDNIMLPPISDKVDWEAELAIVIGKKCKALNNNEGEDYIFGYTIAQDITARDWQKSKRNGGQFLLGKAMDTFCPLGPAVVTKEAISDINNLTVKTWVNGNIKQDGNTSELIFKPHEIVAYISQFMTLLPGDVILTGTPSGVGFTRKPPEYLQRGDVLETEIQGLGRLRNKVL

SEQ ID NO: 3850 - DNA, 786 bp, Candida glabrata CBS 138
  CDS (1)..(786)
atgagctacacttacctgaaggacgcaaagaagataatttgtattggtagaaactatgctgcacacatcaaagagttgaacaatgcaactccaaaacagccattcttcttcttgaagccaatgtccagtgttgtaacaccagtcgatgagaaacacgccataaaagagttgcctaagcaagcaagctaccatggtttgaacgatgacggtaccaacccaggcactatccagataccaaaaggtacggtagtccatcatgagattgaagttgcattggtgatggacaagtacatctcgaatgccaacgagtctgaattcactgcagctgatgtttacgattccatcagaggtgtagccctggcgctggacttaactgctcgtaatgttcaggacgaagccaagaagaaaggtctaccgtggtccatcggcaaaggtttcgatacgttcttgcccatgtcacatatgatcccaaagaccaaattcgaagccaataaagaaaatctacaggaagcattcagagttacttgcgatgtcaacggcactcgcagacaagacggtaacacaaacctgatgctatatccactccacaaaatcatccagcatatctcaacaatgatgactttggagccaggcgacatcatcctcacaggtacacctgctggtgtgggcccaattgctgccggtgacaacatcagcggtcagttgtactacacagacgacttgctcattgacttcaatttcgactgcgtagttcgccctggtccttacgaatacaaagaaacttag

SEQ ID NO: 3851 - protein, 261 aa, Candida glabrata CBS 138
MSYTYLKDAKKIICIGRNYAAHIKELNNATPKQPFFFLKPMSSVVTPVDEKHAIKELPKQASYHGLNDDGTNPGTIQIPKGTVVHHEIEVALVMDKYISNANESEFTAADVYDSIRGVALALDLTARNVQDEAKKKGLPWSIGKGFDTFLPMSHMIPKTKFEANKENLQEAFRVTCDVNGTRRQDGNTNLMLYPLHKIIQHISTMMTLEPGDIILTGTPAGVGPIAAGDNISGQLYYTDDLLIDFNFDCVVRPGPYEYKET

SEQ ID NO: 3852 - DNA, 786 bp, Kluyveromyces lactis NRRL Y-1140
  CDS (1)..(786)
atgtcctacgagtacttaaacagggccaaaaaaatcatttgcattggccgcaattatgctgctcatattaaagaattgaacaatgccactcctaagcaaccattcttctttttgaagccaacctcatctttggtgactccagtgggtcctatgtcaaaatccagattgaatccagaagaatccgctaccttcaatggtttaaatgaggatggtagcaaccctggtccaatttatgttcctaagggtactatcattcaccatgaggttgaattagcgttagtggttgataaacatttgagtaatctgaacaaggaaagcttcggccccgaacaagtatgggactcaattagcggtgtttcattggcgctggatctcacggctagaaacgtacaagatgaagctaagaagaaaggtttaccatggactattggtaaagggtttgataccttctgccccatttcacacttcattccgaaggaagaattatttaacaagaccaatctacaggactctttcaggctaagttgctctgttaatggtcaattgagacaaaatgattccacgtcattgatgttgaacccgttgcatactatcttgcagcatatttccactatgatctctttagagcccaacgacattgttttgactggtactccagcgggggttggagagcttcaccctggtgataccattgaatgtgaactataccaagacgacaagctgttggttagttttgaatttgattgtgagcaaagaccaggtccgtacgagtacaaagaagtgtga

SEQ ID NO: 3853 - protein, 261 aa, Kluyveromyces lactis NRRL Y-1140
MSYEYLNRAKKIICIGRNYAAHIKELNNATPKQPFFFLKPTSSLVTPVGPMSKSRLNPEESATFNGLNEDGSNPGPIYVPKGTIIHHEVELALVVDKHLSNLNKESFGPEQVWDSISGVSLALDLTARNVQDEAKKKGLPWTIGKGFDTFCPISHFIPKEELFNKTNLQDSFRLSCSVNGQLRQNDSTSLMLNPLHTILQHISTMISLEPNDIVLTGTPAGVGELHPGDTIECELYQDDKLLVSFEFDCEQRPGPYEYKEV

SEQ ID NO: 3854 - DNA, 870 bp, Debaryomyces hansenii CBS767
  CDS (1)..(870)
atgtcgagttggaacagattaattagatttgaggctaacgacggcaaaatttatagaggagacgctatcgtctcggattctgattatgacattggtaaacaatttgctgaagggaaaaccatcaaagccagggtcgtgattggtagtaatatctttactgacgccaaggtgactgacgaggtattggaagttaagaaattattgggacctcttactggcgaggatgtccctgttgttaaatgtattggaatgaattacaaggaacatctaatgggtataatcgagccaccaccatatccacaactcttttataagccacgcacgagtgtcgctgaccagaatgaggatattccaatcccactgttcgcacaaaatacttgtgattatgaaggtgaattatgtgtcgtcataggaaagacaggtaaaaatataaatgaggaagacgccttgagttatgttgcaggatatgtttcaggaaatgatctatcagctcgggattggcaatacttcccagaatatgcaggaaaagtaccacaattgggattttctaagagttttgatagatacgcacctttgggaccagcaatagtttcttctaaaatcatcaaagatccccatgcacttcaactccaaactagaattaatggcgaccttcgccaaaactgtggtaccgatgatcttttgtttggtatttcaagaatcattgcctttattagtcaagagactactttggaacagggaacagtgattatgacaggtactcctaatggttgcggtggtattgatggaaaatacttaaaagatggggaccttgtagaggttactattgatcaaatcggaacactctctcataagacgaaattcctttaa

SEQ ID NO: 3855 - protein, 289 aa, Debaryomyces hansenii CBS767
MSSWNRLIRFEANDGKIYRGDAIVSDSDYDIGKQFAEGKTIKARVVIGSNIFTDAKVTDEVLEVKKLLGPLTGEDVPVVKCIGMNYKEHLMGIIEPPPYPQLFYKPRTSVADQNEDIPIPLFAQNTCDYEGELCVVIGKTGKNINEEDALSYVAGYVSGNDLSARDWQYFPEYAGKVPQLGFSKSFDRYAPLGPAIVSSKIIKDPHALQLQTRINGDLRQNCGTDDLLFGISRIIAFISQETTLEQGTVIMTGTPNGCGGIDGKYLKDGDLVEVTIDQIGTLSHKTKFL

SEQ ID NO: 3856 - DNA, 705 bp, Debaryomyces hansenii CBS767
  CDS (1)..(705)
atgtcaggattaagatacattgataacgcaaggaaaatattgtgtattgggcgtaattatgccgctcatattaaggaattgaatagtgctaaacctcaacagccattcttcttcttgaagccatcctcgtcgattttgaaaccgaacaatggaccctttttagttccaaaaggtaccgttgtgcatcacgaagttgaattgggtattattttgaataaaacgttggtggacttaccggaaagcttttctcacgagcaagcgttggattgtattgatggttatgcattgtcaatcgatatgacagctagaaatgttcaagatgaagctaagaagaagggtttgccatggtcaattggtaaggggtttgacactttcttgccattgtcgcagtttatccctaagtcacaaatccctgatccatatgatgttgaattgagtttaagcatcaatggacaagtcaagcagaaagatagaaccgatcttatgattttcccaatccacaaaatattgtctcatatgtcggcaatcatgactttggaaaaaggtgatcttatcttgactggtactccaaaaggggttggtccagttgttcctggtgataaaatcaaggctactattacagcgggcggtacggttttaaacgatgcaaccattgagatagataccgaacaaaaacctggtccttatgaatttaaagaaacctag

SEQ ID NO: 3857 - protein, 234 aa, Debaryomyces hansenii CBS767
MSGLRYIDNARKILCIGRNYAAHIKELNSAKPQQPFFFLKPSSSILKPNNGPFLVPKGTVVHHEVELGIILNKTLVDLPESFSHEQALDCIDGYALSIDMTARNVQDEAKKKGLPWSIGKGFDTFLPLSQFIPKSQIPDPYDVELSLSINGQVKQKDRTDLMIFPIHKILSHMSAIMTLEKGDLILTGTPKGVGPVVPGDKIKATITAGGTVLNDATIEIDTEQKPGPYEFKET

SEQ ID NO: 3858 - DNA, 702 bp, Yarrowia lipolytica CLIB122
  CDS (1)..(702)
atggctacccgatttgcccagcaggcccgaaaaatcctgtgcattggccgaaactacgtcgagcacatcaaggagctcaataacacggctccctccaagcccttcttcttcctcaagccctcgtcttccatcctgctccccaacgagggtcccatgctcgtgccctcgggaactgttgtgcactacgaggtagagctggctgcaattctcggcaaggagctcaagaacctcaaccccaagactttcactgagcaggacgccattgacgccattgatggctacgctctggctgttgacatgactgctcgaaacgtgcaggacgaggcgaagaagaagggtctgccctggtcaattggcaaggggttcgataccttcctgcccatctccaacttcattcccaagagccagatccccgatcctcacaacgtgcatcttcaccttgaaatcaacggacaaactaaacagtccgataacaccaacctgatgatcttcaagctgccccagattctgtccaccatgagcagcatcatgactcttcagcccggtgatattattctcactggaacccccaagggagtgggtcctgttaaccctggagatcgaatgaccgccggtatctctgttgatggaaaggagctcgaggccaaggtcgatgttcaggttgagcagaagcctggtccttacgtttattctcagatctaa

SEQ ID NO: 3859 - protein, 233 aa, Yarrowia lipolytica CLIB122
MATRFAQQARKILCIGRNYVEHIKELNNTAPSKPFFFLKPSSSILLPNEGPMLVPSGTVVHYEVELAAILGKELKNLNPKTFTEQDAIDAIDGYALAVDMTARNVQDEAKKKGLPWSIGKGFDTFLPISNFIPKSQIPDPHNVHLHLEINGQTKQSDNTNLMIFKLPQILSTMSSIMTLQPGDIILTGTPKGVGPVNPGDRMTAGISVDGKELEAKVDVQVEQKPGPYVYSQI

SEQ ID NO: 3860 - DNA, 690 bp, Aspergillus nidulans FGSC A4
  CDS (1)..(690)
atggcagcttcgataaaatcaaattgccgcaagctgactctagatcgcagcgaccacatcgcagagctcaacaacacaaaacccaagcagcctttcttcttcctgaagccctcctcttcaatactctgccctggcgaaggtccagtcttgcgccccaaaggcacaagcctccactatgaggtggaattggctttggtaatgggcaagaaagttcgcgacctcgatccaaacgatgacaagggagcgttggatgcgatccagagctacctcctcgccattgacatgaccgcgcgcaatgtccaagatgaagccaagaagaaaggtcttccttggactatcgcaaagggtttcgacaccttcctccccatatcgcaggagattttgaagtctcaaattcccgatccacacaacgcattccttcgtctgagcgtcaactcgcagcagcgtcaggctgattcctcagggctgatgctgtaccgtattcccaggttgctggcggagatctcgcgcgtgatgacgttggagaagggagatctggttttaacggggacgcctaagggcgttggggaggtgaagagtggtgatgtgatgaaggcgtcgattgaggttgatgggaaggagatcgagcagggacggattgaggttgaggtgcaggatcgggagggcaggtacgagtactgcgagacttag

SEQ ID NO: 3861 - protein, 229 aa, Aspergillus nidulans FGSC A4
MAASIKSNCRKLTLDRSDHIAELNNTKPKQPFFFLKPSSSILCPGEGPVLRPKGTSLHYEVELALVMGKKVRDLDPNDDKGALDAIQSYLLAIDMTARNVQDEAKKKGLPWTIAKGFDTFLPISQEILKSQIPDPHNAFLRLSVNSQQRQADSSGLMLYRIPRLLAEISRVMTLEKGDLVLTGTPKGVGEVKSGDVMKASIEVDGKEIEQGRIEVEVQDREGRYEYCET

SEQ ID NO: 3862 - DNA, 696 bp, Candida albicans SC5314
  CDS (1)..(696): transl_table=12
atgtcattgaaatacttagacaccgccagaaagatcctttgtattggtcgtaattatgctgcccacatcaaggaattaaacaatgccaccccgcaacagccatttttctttttaaaaccatcttcatcagtattaaagcccgactctggcccattcttggttcccaagggagttattgttcatcatgaagtggaattggcatttacgttaaacaaagacttgaaaaacttgccatctactttttctcctgaagaagctattgacagcattgaagggtatgccttgactattgatatgacagcaagaaacgttcaggatgaagccaaaaagaaaggattgccttggtcaattggtaaagggttcgacacctttttgccagtgtctaaattcatcgccaaggaaaaaatcccagacccatacaaagttgagttggtgttgaaaattaacggtgaagtcaaacaacaagataaaaccgacttgatgttgttccccattcataaaattttgagccacatgtcagcaattatgacattggaaaagggagacttaattttgactgggaccccaaaaggtgttggtcaagttaagccgggcgataaggttgaagctcaattgttggttaacggtaaagtcattgaagagattaaattcgacgccgaagaaaaaccaggtccttacgaatataaacagatatag

SEQ ID NO: 3863 - protein, 231 aa, Candida albicans SC5314
MSLKYLDTARKILCIGRNYAAHIKELNNATPQQPFFFLKPSSSVLKPDSGPFLVPKGVIVHHEVELAFTLNKDLKNLPSTFSPEEAIDSIEGYALTIDMTARNVQDEAKKKGLPWSIGKGFDTFLPVSKFIAKEKIPDPYKVELVLKINGEVKQQDKTDLMLFPIHKILSHMSAIMTLEKGDLILTGTPKGVGQVKPGDKVEAQLLVNGKVIEEIKFDAEEKPGPYEYKQI

SEQ ID NO: 3864 - DNA, 759 bp, Ustilago maydis 521
  CDS (1)..(759)
atggcctcctcatttctgacacggggaaagaaaatcgttgcgatcactcatgctgacaacgacgtacgattctctcttggtcatggtctcttgaactgcattgcattgcatcacagtatcggacgtaactatgcagctcatgccaaggagctcaacaatgccgtgcctaccgaaccttttttcttcctgaaacccactacttcctaccttgccaacaatggtaccgttgagattcccaaaaacatccttgcacacttcgaggttgagcttggcgtggtcatcggcagccctcgagttcgcgatgtcttggctgctgatgcaatgaagcacgttgcaggctacaccctctccatcgatatgaccgcacgcaacctgcaagacaaggttaaatccaaaggccttccttggtcctctgcgaaagggtttgatactttcaccccaacctcaggattcatcgacaagtctcgtgttcgtgacccatccaagctgagattgtggctcaaggtcaacgatcaggtcaagcagaatggcacaacgggtgatatgatctttggtatcccagagttgatcgagcacgtttcgtcaattatgacgctggaggagggggatctgctgctgacaggtacaccgcagggtgtaggcgaggtcaaggatggcgatgtaatcaagtgcggtctggaagatcagtcaggtaacctgcttgaacagctcaagatcaacgtagccaatcgtgttggtggatacgagttcaaactctaa

SEQ ID NO: 3865 - protein, 252 aa, Ustilago maydis 521
MASSFLTRGKKIVAITHADNDVRFSLGHGLLNCIALHHSIGRNYAAHAKELNNAVPTEPFFFLKPTTSYLANNGTVEIPKNILAHFEVELGVVIGSPRVRDVLAADAMKHVAGYTLSIDMTARNLQDKVKSKGLPWSSAKGFDTFTPTSGFIDKSRVRDPSKLRLWLKVNDQVKQNGTTGDMIFGIPELIEHVSSIMTLEEGDLLLTGTPQGVGEVKDGDVIKCGLEDQSGNLLEQLKINVANRVGGYEFKL

SEQ ID NO: 3866 - DNA, 687 bp, Cryptococcus neoformans var. neoformans B-3501A
  CDS (1)..(687)
atgtccaactttatcaaagcaggaaggaagattgtcgctattggtcgcaactacgctgatcacgccaaggagcttggtaacgccattcctaaggagcctttcttctttttgaaacccacttcttcttaccttgtccctgacaatggacctgttgagatccctcggggggttatcgtgcatcatgaagttgagcttggtgttgtcatcggtaagaacggtcgagacatctccccttctgctgccttcgaccatgttgctggatactctcttgctgtcgacatgactgcccgtaatgttcaggataaggccaaggctaaaggtttgccttggtctgctgccaagggcttcgatactttctgccctattggtcctttcattcccaagcacttcattgccgatcctactaaagtcggcctccatttttcggtcaacggtactgttaagcagtctggcctcacctccgacatgatcttcgacattccccagctcattgcatttgtctctggtatcatgaagcttgaagaaggtgacttggtacttactggaacccctagtggggtgggaaagattaagaggggggaaattttcgaggcgaagttgacttaccctggattagatggtgaggtcttgagcaagtatgaaatcgaatgcgtggagaggcaaggaggttacgagtttatgccttaa

SEQ ID NO: 3867 - protein, 228 aa, Cryptococcus neoformans var. neoformans B-3501A
MSNFIKAGRKIVAIGRNYADHAKELGNAIPKEPFFFLKPTSSYLVPDNGPVEIPRGVIVHHEVELGVVIGKNGRDISPSAAFDHVAGYSLAVDMTARNVQDKAKAKGLPWSAAKGFDTFCPIGPFIPKHFIADPTKVGLHFSVNGTVKQSGLTSDMIFDIPQLIAFVSGIMKLEEGDLVLTGTPSGVGKIKRGEIFEAKLTYPGLDGEVLSKYEIECVERQGGYEFMP

SEQ ID NO: 3868 - DNA, 936 bp, Cryptococcus neoformans var. neoformans B-3501A
  CDS (1)..(936)
atgctcccctgtataactactctgattcgacctgctttttctcctatacacaacatcagagccatgtcctccttctctcgacttgttcgattcgtccccaaatcctcctccacaccgcttattggtgaaccggtcaacgccgacctcgacatcggtctcgccgcgtacgagtcaaaacctgtcgaaattgaggtgttctctggtacttctgtcctcaaccccggagagaagactggcaaaaaggaaattgtcgagaggcttttgagcccattagcccagtctgaagtcggcacgatacgatgtatcggtctgaattacgttaaccacgctaaggaggtcaatcttcccatgcccgatatccccaccctttttatgaagccttctacatctctcgccgatccctttccttcccctaccattatccccaaggcttttgtcgcttccaactctgctgatttcgagtcggaagtcgcattcgtgattggcaaggatgccaagaacgtttccgaagaggaggctcttgactacgtccttggttttaccgccgccaacgacgtttcctcccgagaagctcagttcgcccagtctcaatggtgttattccaagtctttcgacggcgcttgccctattggtccggccctcgtcaacaagaaccaagccaacaagttctccgatgtcaagattgagggctctcttaacggaaagacagtccaatctagccgcctcgatgacttgatcttttctgttcccaagattgtttctttcctttcccaaggtaccactcttcctgctggtacgatcatcatcactggtacccctgccggtgtcggatggtcatctactccacgaatcactctcaaggatggcgacgagttccgagtatttgtttcccatggtgttggtaccttgattaacaagattgttgaggagaaatag

SEQ ID NO: 3869 - protein, 311 aa, Cryptococcus neoformans var. neoformans B-3501A
MLPCITTLIRPAFSPIHNIRAMSSFSRLVRFVPKSSSTPLIGEPVNADLDIGLAAYESKPVEIEVFSGTSVLNPGEKTGKKEIVERLLSPLAQSEVGTIRCIGLNYVNHAKEVNLPMPDIPTLFMKPSTSLADPFPSPTIIPKAFVASNSADFESEVAFVIGKDAKNVSEEEALDYVLGFTAANDVSSREAQFAQSQWCYSKSFDGACPIGPALVNKNQANKFSDVKIEGSLNGKTVQSSRLDDLIFSVPKIVSFLSQGTTLPAGTIIITGTPAGVGWSSTPRITLKDGDEFRVFVSHGVGTLINKIVEEK

SEQ ID NO: 3870 - DNA, 663 bp, Strongylocentrotus purpuratus
  CDS (1)..(663)
atgtcttccaacacagaaccgcttaacaactttgcaaattttggaaagaagatagtttgtatcggcaggaattatgctgagcatgcagcggagttggggaataaggttcctaccaagcctatgattttcttaaaaccaacatcagcttatctccaagaaggacaaggcaacataaagctacctccaaactgcacagagatacaccatgaagtagagctaggtattgtcattggaaaatcaggcagcaatatcctagaatcctctgccatggagcatgttggtgggtacaccctcgccctggatatgaccgaaaggaaactacaaagtgacctcaagtccaaaggccatccttggagcctggcgaagggttttgacacatcttgtccggtaggcggtttcctggacgcatcaaggatcgacaacgttgatgatgtaaggctatggttaaaggtcaatggagaaacaaagcaggatgggaatactaaagacatgatattccgtgtgccaaccttgctgagtttcatcagtcagtacatgacgctggaggtcggtgacctcgtactgactgggactccctctggagttggaccagttagaagcaaggatgttattgttgcaggactcaatgatgatttgttacagattgaattcagtgtagagtga

SEQ ID NO: 3871 - protein, 220 aa, Strongylocentrotus purpuratus
MSSNTEPLNNFANFGKKIVCIGRNYAEHAAELGNKVPTKPMIFLKPTSAYLQEGQGNIKLPPNCTEIHHEVELGIVIGKSGSNILESSAMEHVGGYTLALDMTERKLQSDLKSKGHPWSLAKGFDTSCPVGGFLDASRIDNVDDVRLWLKVNGETKQDGNTKDMIFRVPTLLSFISQYMTLEVGDLVLTGTPSGVGPVRSKDVIVAGLNDDLLQIEFSVE

SEQ ID NO: 3872 - DNA, 864 bp, Tribolium castaneum
  CDS (1)..(864)
atgagatttgtgcaataccggctcaaaacgggcggtttaccccacctgggggggcagattacccaggatggggacattttcgacatcagcaacgtggaccactccatacccaacaccctgaccaagttcctagccaccggcgatgacgtctacgagagggccaaaaggataatcgcttccggcaaatccgtcatccctctcaaaaacgtggacctcctccccccaataatcaaaccggacaaagtggcttgcgtgggcctcaactactccggtcattgtgacgaacaaaacatcccccacccccgtgaacccatgttttttagtaaattctcctcaaccatcgtggggccctacgacaccatccaactgcccaaaataagcaacagtgtcgactgggaatgtgaactcgctgtgatcataggccgcaaagccaaggccataaggcaagaccaagcccatgattacatcttcggatacacagtggcccaagatattagtgcccgagactggcagaaaaaacgaaataatggacagtttctgctaggcaaaagtatggacacgttctgccctttgggccctgcggtagttacgaaaaataaactagaccccaacaacttaaatatcaaaacttgggtcaacggcaagttgaaacagaacggaaatacgaaagagatgatcttcaaagtcgattttctcgtctcgtatttgtcacagattgtaacactgtaccccggcgatgtgatcctcacggggaccccttccggggtcggcatgcaccgcagcccccctgagttcctccacaaagacgatatcctcgagagcgaaattgaaggaatcggcaaaatgagaaacattgttcaataa

SEQ ID NO: 3873 - protein, 287 aa, Tribolium castaneum
MRFVQYRLKTGGLPHLGGQITQDGDIFDISNVDHSIPNTLTKFLATGDDVYERAKRIIASGKSVIPLKNVDLLPPIIKPDKVACVGLNYSGHCDEQNIPHPREPMFFSKFSSTIVGPYDTIQLPKISNSVDWECELAVIIGRKAKAIRQDQAHDYIFGYTVAQDISARDWQKKRNNGQFLLGKSMDTFCPLGPAVVTKNKLDPNNLNIKTWVNGKLKQNGNTKEMIFKVDFLVSYLSQIVTLYPGDVILTGTPSGVGMHRSPPEFLHKDDILESEIEGIGKMRNIVQ

SEQ ID NO: 3874 - DNA, 837 bp, Tribolium castaneum
  CDS (1)..(837)
atgggcggtttaccccatctgggggggcagattacccaagacggggacattttcgacattagcaacgtggaccactccatacccaacaccctgaccaagttcctagccaccggcgatgacgtctacgagcgggccaaaagaataatcgcttccggcaaatccgtcatccccctcaaaaacgtggaactcctccctccagtaatcaaaccggacaaggtggcttgtgtaggccttaactactcgcgccactgcgatgaattaaacatcccctacccccatgaaccaataattttcagtaaattctcctcaaccatcgtggggccttatgataaaatcgagctccccaaaataagcaatagcgtcgactgggaagcggaactcgctgtggtcataggacgcaaagccaaagccataaggcaagaccaagcccttgaccacattttcggctacactgtggcccaagacatcaccgcccgagactgggtaacagccagaaacaacggacagtacctcctaggcaagagtatggacactttctgccctttgggcccggcagtagtgacgaaaaataaactagaccccaacaacttgaccatcaaaagctgggtcaacggaaagttgaaacagaacggaaacacgaacgaaatgatcttcaaagtcgatttcctcgtctcgtatttatcacaggttgttactctgtaccccggcgatgtgatcctcacagggaccccttccggggtcggtgtgaaccgcagcccccccgaattcctccgcaaaaacgacatactcgaaaccgaaattgaaggaatcggcaaaatgagaaacacagttcaataa

SEQ ID NO: 3875 - protein, 278 aa, Tribolium castaneum
MGGLPHLGGQITQDGDIFDISNVDHSIPNTLTKFLATGDDVYERAKRIIASGKSVIPLKNVELLPPVIKPDKVACVGLNYSRHCDELNIPYPHEPIIFSKFSSTIVGPYDKIELPKISNSVDWEAELAVVIGRKAKAIRQDQALDHIFGYTVAQDITARDWVTARNNGQYLLGKSMDTFCPLGPAVVTKNKLDPNNLTIKSWVNGKLKQNGNTNEMIFKVDFLVSYLSQVVTLYPGDVILTGTPSGVGVNRSPPEFLRKNDILETEIEGIGKMRNTVQ

SEQ ID NO: 3876 - DNA, 642 bp, Tribolium castaneum
  CDS (1)..(642)
atgacactcgagaattttgttcaaaacgggaaaaaaatcgtcggcgtggccgccaattataaggcgctggtaaaaatactccaaaggcccattccggaaacccccgatattttcctaaaacccacaacttcgtacattaccgaagcacagaaaattataatacctcaaggtttttccgtcaatgaggaaattgagttgggggtgatcattggtaaaagtgggaaatttattacagaaagtcaagcaatggatcatgttggtggctactgtgttgctcttgacatgacggccacctgtcgaatgaaagaggcaaggagtaagggtggctcatggactctcgggaaagggtttgataccgcatgccctgtcagtaaatttataccaaagagtgcgattaaggatcctcacgatttgaacctttggtgtaaagttaatggggaacttagacaagaaggaaacacaaacgatttaattttctccataccaaaattaatttctttcatatcacagtatatcacattagaaaataatgatttgataatcacggggtcgccaccagggatgggtcctgttcatccaggtgacgtcattgagagtggaatagaaaatattattaactttaagtacagcgtgtcaaattaa

SEQ ID NO: 3877 - protein, 213 aa, Tribolium castaneum
MTLENFVQNGKKIVGVAANYKALVKILQRPIPETPDIFLKPTTSYITEAQKIIIPQGFSVNEEIELGVIIGKSGKFITESQAMDHVGGYCVALDMTATCRMKEARSKGGSWTLGKGFDTACPVSKFIPKSAIKDPHDLNLWCKVNGELRQEGNTNDLIFSIPKLISFISQYITLENNDLIITGSPPGMGPVHPGDVIESGIENIINFKYSVSN

SEQ ID NO: 3878 - DNA, 690 bp, Herminiimonas arsenicoxydans
  CDS (1)..(690): transl_table=11
atgaatcaggcttacgttatacaaccacaaagcattcctatcttgcctgtacggggaacggacaagctgttccctgtgcatcgtatttattgcataggtcgtaactacgctgcgcacacgatcgagatgggtcacgatcctgataaagagccgccatttttctttcagaagaatccggataacattattgtcgataaagattttccctatccgccggaaacatcggatgtgcattttgaatttgagctggtcgtggcgctagccaaaggtggcaagaacatcacggttgaaaaggcgctggatcacatcttcggttacggtgtcgggctcgatatgaccagacgcgatctgcagggcgtggcaaaaaaaatggggcgtccgtgggaggtgggcaaggcgtttgaacattcggcaccttgttcggcattgattccggttgctgacgtaggccatccgcacaaaggcggtatctggttcaaggtcaacggcgaggtaaggcaaaagggcgatctggatcaaatgatctggaaggttgcggagcagatttccatactttcgactttttttgaactcaaaccgggcgatctcatcatgacgggcacgccagcgggcgtcggtgcgatcaacaagggcgatcagctcgaaggcatgattgaaggcgtctgcggtatgaagctggccgttatttga

SEQ ID NO: 3879 - protein, 229 aa, Herminiimonas arsenicoxydans
MNQAYVIQPQSIPILPVRGTDKLFPVHRIYCIGRNYAAHTIEMGHDPDKEPPFFFQKNPDNIIVDKDFPYPPETSDVHFEFELVVALAKGGKNITVEKALDHIFGYGVGLDMTRRDLQGVAKKMGRPWEVGKAFEHSAPCSALIPVADVGHPHKGGIWFKVNGEVRQKGDLDQMIWKVAEQISILSTFFELKPGDLIMTGTPAGVGAINKGDQLEGMIEGVCGMKLAVI

SEQ ID NO: 3880 - DNA, 699 bp, Burkholderia vietnamiensis G4
  CDS (1)..(699): transl_table=11
atgtccgcatacgtcatcgacgctcccgagcgtccttccgtcgaagtcgatcaatcgtccgcgcgctttccggtacgccgcgtgttctgcgtgggccgcaactacgccgaccacgcgcgggaaatgggcgccgatcccgaccgcgaaccgccgttcttcttcacgaagccggccgatgcggtcgtgccggccgccggcaccgtcccgtatccgccgctgacgaacgacctccatcacgagatcgagctggtcgtcgcgatcggcaaggacggccgctcgatcgagccggccgacgcgctgtcgcacgtgtggggttacggcgtcggcgtcgacctcacgcgtcgcgacctgcaggccgaagccaagaagctgggccgcccgtgggactgggcgaagggcttcgacgcgtcggggccgatgagcccgctgcgcgccgcgagcgcgaccggccacccggcgagcggacggatctggctcgcggtgaacggcgacacgcgtcagcaaggcgatctcgccgacatgatctgggccgtgcccgacgtgatcgcctacgtgtcgcgctcggtcgcgttgaaggccggcgacctgatcttcaccggcacgccggccggcgtgggcgcgctgcagccgggcgatcgcgtgacgggcggggtggacggcgtcgcgacgttcgagttcgtggtcggcgcgaagccgtaa

SEQ ID NO: 3881 - protein, 232 aa, Burkholderia vietnamiensis G4
MSAYVIDAPERPSVEVDQSSARFPVRRVFCVGRNYADHAREMGADPDREPPFFFTKPADAVVPAAGTVPYPPLTNDLHHEIELVVAIGKDGRSIEPADALSHVWGYGVGVDLTRRDLQAEAKKLGRPWDWAKGFDASGPMSPLRAASATGHPASGRIWLAVNGDTRQQGDLADMIWAVPDVIAYVSRSVALKAGDLIFTGTPAGVGALQPGDRVTGGVDGVATFEFVVGAKP

SEQ ID NO: 3882 - DNA, 762 bp, Dehalococcoides sp. BAV1
  CDS (1)..(762): transl_table=11
atgagaatagtacgttttagcctttctggcaagcgggcaggatatgcagtgcttgaagatacaaagctgaaagaactgaagggcaatcctttcggcaaaattgttttttcaggcaatgtttttgatatttcagaggccaggcttcttccgccgtcagttccgtccaaaataatagccattggtttaaactacaaagctcatgccggagagatggcagaagatttgcccaaattgccccttatattttttaaaaatgccagtgggattatcggtccggaagataacataataaaacctggtcagtctgaacgggtggattatgaaggggaattggcggttataataagaaagaaaacgcgcaatataaagcctgaagatgcttttgactatatactggggtacagttgctttaatgatgtaacggccagagacctgcagaaaatagacgggcagtggtcacgcgccaaaggttttgatacctttgccgtctgcggcccgtggatagaaacagagcttgacccgcaggtgcaattgctggaaacctatctgaacggcaagcttaaacaacgcacttccacagcggatatgatattcagtatcccccgtatagtcagctttatatcagaggtgatgactttgcttccgggggatattattgcaaccggtacgccttcaggtatcgggccaatgaaactgggagacagggtggaagtacgtatttcaggtatcggcagtctggtaaaccacttggctctaaaataa

SEQ ID NO: 3883 - protein, 253 aa, Dehalococcoides sp. BAV1
MRIVRFSLSGKRAGYAVLEDTKLKELKGNPFGKIVFSGNVFDISEARLLPPSVPSKIIAIGLNYKAHAGEMAEDLPKLPLIFFKNASGIIGPEDNIIKPGQSERVDYEGELAVIIRKKTRNIKPEDAFDYILGYSCFNDVTARDLQKIDGQWSRAKGFDTFAVCGPWIETELDPQVQLLETYLNGKLKQRTSTADMIFSIPRIVSFISEVMTLLPGDIIATGTPSGIGPMKLGDRVEVRISGIGSLVNHLALK

SEQ ID NO: 3884 - DNA, 795 bp, Thermus thermophilus HB27
  CDS (1)..(795): transl_table=11
atgaagatcctgcgcttcaacgaggggaggtggggggtcctcgagggcgagctcgtcctggagacggacggccccggggggaaccccacgggaaggcggtacgacctggcctccgtcaccctgctgcccccggccacgcccaccaagatcgtctgcgtggggcggaactaccgggagcacatccgggagatggggcacgacttcggggaggacctgcccaaggagcccggcctcttcctcaaggggcccaacgccctggcccggcccgggaaccccagggacccttggggcaccgccgagcccgtcccctacccctttttcaccgaggagctccactacgagggggagcttgccgtggtcgtcggggacaggatgcgccatgtccccccggagaaggccctggaccacgtcctgggctacaccgtggccgtggacatcaccgcccgggacgtgcagaagaaggacctgcagtgggtccgggccaagagcgccgacaagttcctgcccttgggcccctggctggagacggacctcaacccccaggacacctgggtgcgcacctacgtgaacgggacgctgcggcaggaaggccacacctcccagatgatcttcagcgtggccgagatcctctcctacatctccaccttcatgaccctggagcctttggacgtggtcctcaccgggacccccgagggcgtgggggccctgaggcccggggaccggctggaggtggccgtggagggcgtgggaaccctcttcaccctcatcgggcccaaggaggagaggccgtggtga

SEQ ID NO: 3885 - protein, 264 aa, Thermus thermophilus HB27
MKILRFNEGRWGVLEGELVLETDGPGGNPTGRRYDLASVTLLPPATPTKIVCVGRNYREHIREMGHDFGEDLPKEPGLFLKGPNALARPGNPRDPWGTAEPVPYPFFTEELHYEGELAVVVGDRMRHVPPEKALDHVLGYTVAVDITARDVQKKDLQWVRAKSADKFLPLGPWLETDLNPQDTWVRTYVNGTLRQEGHTSQMIFSVAEILSYISTFMTLEPLDVVLTGTPEGVGALRPGDRLEVAVEGVGTLFTLIGPKEERPW

SEQ ID NO: 3886 - DNA, 645 bp, Acinetobacter sp. ADP1
  CDS (1)..(645): transl_table=11
ctgatgaatacacgtccatcaaaaattatttgtatcggaagaagctatgctgcacatgcaaaagaattaggcaatgcgatttcagatcgtccagtcctgtttattaagccaccgagtagtttaattggtttggaacagggcattgaatggaataccaaacatggcagttgccattttgagtgtgagttgactctacgaattgaccagcctcttaaaaatgaaacagacccccaaaaagctttagctgcaattggcgccgtaacgatgggattggatttgactttgcgggatttacaagatgacttgaaaagtaaagggcatccgtgggagcgttgtaaagcatttgatggtgcatgtgtattggcagattgggttgatgtgagtgaaattgaagactggaagcatgtgacctatacctttcatatcaatgatcagttacgtcaggaaggcgatacagcatatctactcttaagcattggtgaatacctgtgtgatattagtcaggcatttagcatcgaagcgggcgatgtggtcatgacaggcacaccagcaggtgtagggccgttgcatcacggcgatcagcttaaaatgacgcttcatggtaaaacccagcaatttgtgtggaacacctttgtacatgaataa

SEQ ID NO: 3887 - protein, 214 aa, Acinetobacter sp. ADP1
MMNTRPSKIICIGRSYAAHAKELGNAISDRPVLFIKPPSSLIGLEQGIEWNTKHGSCHFECELTLRIDQPLKNETDPQKALAAIGAVTMGLDLTLRDLQDDLKSKGHPWERCKAFDGACVLADWVDVSEIEDWKHVTYTFHINDQLRQEGDTAYLLLSIGEYLCDISQAFSIEAGDVVMTGTPAGVGPLHHGDQLKMTLHGKTQQFVWNTFVHE

SEQ ID NO: 3888 - DNA, 657 bp, Erwinia carotovora subsp. atroseptica SCRI1043
  CDS (1)..(657): transl_table=11
atgtatcaacacagagactggcagggcgcgctgcttgatttcccagtaaataaagtcgtttgcgtcgggagcaactactcagaacacatcaaagaaatgggaagtgcgaccccgagcgagccagttttattcatcaagcctgaaaccgcactgtgtgatttacgtcaacccgtcgctattcctaaaaatctgggctcggttcaccacgaagttgagctggcggtgctgatcggtacgccgttaaagcaggcgaatgaagaacgcgttgcacgagccatcgcgggttatggcgtggcgttggatttgacgctgcgtgatttgcagtccgaattcaaaaaagcaggccagccgtgggaaaaagccaaagcctttgacggttcctgcccgatctccggttttattccggttgctgagtttggcgatccgcagcaaaccgaactgggtgtaaaagtgaatgatgaagtgcgccagcagggcaacacgcgtgatatgattacgtcgattctgccgctgattgcctacatgagccgtttctttacgctgcgcgcgggcgatattattttaacgggtacgccaaaaggagtcggtccgatcctgtcaggcgatatgctgacgattacggtaaatgaccggacgctgagcacccgtattatctaa

SEQ ID NO: 3889 - protein, 218 aa, Erwinia carotovora subsp. atroseptica SCRI1043
MYQHRDWQGALLDFPVNKVVCVGSNYSEHIKEMGSATPSEPVLFIKPETALCDLRQPVAIPKNLGSVHHEVELAVLIGTPLKQANEERVARAIAGYGVALDLTLRDLQSEFKKAGQPWEKAKAFDGSCPISGFIPVAEFGDPQQTELGVKVNDEVRQQGNTRDMITSILPLIAYMSRFFTLRAGDIILTGTPKGVGPILSGDMLTITVNDRTLSTRII

SEQ ID NO: 3890 - DNA, 801 bp, Propionibacterium acnes KPA171202
  CDS (1)..(801): transl_table=11
atgcgtattgcccggtttgtcaccgctggttccgaccctgccttcgggatcgtagagcttgctgccgatcatggagatcatcccgagaccatcgccgttatcactggagacccagtggcggcaccggttcaatacactggtgcccgtcacgaccttgccgatgtgcggttgctgtctccggtgattccgcgatcgaagatcattggggttggtcgtaactacgccgatcacgccagcgaactgggcaatgaggttccccaccaaccgcttctatttgttaagccgaatacctcggttatcggccctgacgaacccattgtgcgaccgactgcgtcctccaacctgcactacgagggggagctggccatcgttatcggacggatctgtaaggacgtgccagaggacagagctcaggaagtcatctttgggttcaccgttgccaatgacgtcactgcccgcgatctgcaagattctgacggtcactgggttcgcgccaagggggctgacaccttctgcccgctggggccatggatggttacccacttctccattgcagaagcgtctcaccgccagattgtgactcgactagacggtagggaggttcagcacggtaataccgaccagatggtccacaccatccccaagctcatctcctatatctcttcgttcatgaccttgttgccgggcgatgtcatcctcacgggtacccccgctggggtcgggccgatggagctcggacagcgcgtcgaggttgaaattgaggggatcgggacgctaacgaacactgtcgtggaggtctga

SEQ ID NO: 3891 - protein, 266 aa, Propionibacterium acnes KPA171202
MRIARFVTAGSDPAFGIVELAADHGDHPETIAVITGDPVAAPVQYTGARHDLADVRLLSPVIPRSKIIGVGRNYADHASELGNEVPHQPLLFVKPNTSVIGPDEPIVRPTASSNLHYEGELAIVIGRICKDVPEDRAQEVIFGFTVANDVTARDLQDSDGHWVRAKGADTFCPLGPWMVTHFSIAEASHRQIVTRLDGREVQHGNTDQMVHTIPKLISYISSFMTLLPGDVILTGTPAGVGPMELGQRVEVEIEGIGTLTNTVVEV

SEQ ID NO: 3892 - DNA, 885 bp, Symbiobacterium thermophilum IAM 14863
  CDS (1)..(885): transl_table=11
atgctcctggtcacctaccgcacgcccggcggcctcgccctgggggtcaggacggagaggggcatcctcgacgtctccgctgccgccgggcgcttcgggcgcagggacgtcccgcttcacgtcgaccaggcgctggggatggggctcgacgccctcgacccgctggcggacctggtcgcccgggccgaggaagaggctgacctgttcctgccggaggacggcctcaggctggggccgccggtgccccggccgggcaagatcctctgcgtcggcctcaactaccgcgcccacgccgcggaagctcacatggcggtgcccgcctaccccgtcctgttcgccaagttccaaaacgccgtcgccggcccgggcgaccccgtggtcctgccgagcatcgccgagcagtacgactacgaggccgagctggtggtggtgatcggccgccgggcccggcgcgtgcctgcggaggccgcactggattacgtgctgggctactgtaacggcaacgacctgagcgcccgggaactgcagatgcgcaccagccagtggctgctgggcaagtcgctggacggcttcctgcccatcgggccgtacctggtgacccgggacgaggtgccggacccgcaggacctgcgcatccggctctggcgcaacggggagatccggcaggacggccacacccggaacatgctcttccctgtggcggagctcatcgcgtacatcagccggtacatgaccctggagcccggggacatcatcgcgaccggcaccccggaaggggtgatcatgggccttgcggagaaagactggctgaagccgggcgacgtggtggccgtcgagatcgacggtctggggcggttggagaaccggctggtggccggcgagtga

SEQ ID NO: 3893 - protein, 294 aa, Symbiobacterium thermophilum IAM 14863
MLLVTYRTPGGLALGVRTERGILDVSAAAGRFGRRDVPLHVDQALGMGLDALDPLADLVARAEEEADLFLPEDGLRLGPPVPRPGKILCVGLNYRAHAAEAHMAVPAYPVLFAKFQNAVAGPGDPVVLPSIAEQYDYEAELVVVIGRRARRVPAEAALDYVLGYCNGNDLSARELQMRTSQWLLGKSLDGFLPIGPYLVTRDEVPDPQDLRIRLWRNGEIRQDGHTRNMLFPVAELIAYISRYMTLEPGDIIATGTPEGVIMGLAEKDWLKPGDVVAVEIDGLGRLENRLVAGE

SEQ ID NO: 3894 - DNA, 849 bp, Burkholderia mallei ATCC 23344
  CDS (1)..(849): transl_table=11
atgaaactgcttcgttacggccccgtgggccaggaaaagcccggcttgctcgacgccgacggccgcattcgcgatctgtcatcgttgatcgacgacgtcgcgggcggcgcgctgtcggacgcgagccttgcacggcttgccgcggccgatcccgcgtcgctgccgctcgtcgccggcgagccgcggatcggcgcgtgtgtcggccggatcggcaagttcgtctgcatcggcctgaactacgcggaccacgcggcggaggcgggcctcgcggtgcccgccgagcccgtcgtgttcggcaagtggacgagcgcggtgagcggcccgcacgacggcatcgagattccgcgcggctcggtgaagacggactgggaggtcgaactgggcgtcgtgatcggccgcgcgtgcaagaacgtcgacgaggccgacgcgctgtcgcacgtcgccggctattgcgtcgtcaacgacgtgtccgagcgcgaatggcagatcgagcgcggcggccagtgggacaagggcaagggcttcgacacgttcgggccgatcggcccgtggctcgtcacgcgcgacgaaatcgccgatccgcaggcgctcgacctgtggctcgacgtggacggccggcgctatcagagcggcaacacgcgcacgatggtgttcaccgtcgcgcggttgatcgcgtatctgtcgcgctgcatgagcctgcagcccggcgacgtgatctcgacgggcacgccgcccggcgtcgggatgggcgtgaagccgtcccccgtctatctgaagccggggcagacggtgcgctgcggggtggcgggcctgggcgagcagcaacagcgaacgcgcgcggcggcgtga

SEQ ID NO: 3895 - protein, 282 aa, Burkholderia mallei ATCC 23344
MKLLRYGPVGQEKPGLLDADGRIRDLSSLIDDVAGGALSDASLARLAAADPASLPLVAGEPRIGACVGRIGKFVCIGLNYADHAAEAGLAVPAEPVVFGKWTSAVSGPHDGIEIPRGSVKTDWEVELGVVIGRACKNVDEADALSHVAGYCVVNDVSEREWQIERGGQWDKGKGFDTFGPIGPWLVTRDEIADPQALDLWLDVDGRRYQSGNTRTMVFTVARLIAYLSRCMSLQPGDVISTGTPPGVGMGVKPSPVYLKPGQTVRCGVAGLGEQQQRTRAAA

SEQ ID NO: 3896 - DNA, 885 bp, Azoarcus sp. EbN1
  CDS (1)..(885): transl_table=11
atgaagatccttcgattcaatggcggtcatgtcgggatcagcgacgggcgcaaggtcgtcgacgtcagcgatctgtgcacctcctcgccggccgattggccgccggtcggcatcaaccgcctgatccgcgatttcgaggcactcaggccgcgtctgcaggcgctgctcgataccgaaccgggcgagccgatcgagacggtgcggctcgaaacccccgtgccgtggccgaacaagctgatggcctatccggtgaattatcacgaccatgcgaaggaaatggcctcgcgcgggctcgccagcatccagggctatttcctcaaatccaattcctcgctcgtcggcgccgccgacgtcatcgaactgcccgcactgcccggccgggagatccaccacgaatgcgagatcgcgctggtgatcggcaaggagggacgccagatcccgcctgagcgcgcgctggagcacgtgctcggctacgcctgcctgctcgacatgacggtgcgcggcaaggaagaacgcgtgttccgcaagtcctatgacaccttcacgccggtggggccctggatcgtcaccgccgacgaggtacccgaccccgccgacatcgacatgaagctgtgggtcaatgacgaattgcgccagcaggcaaatacgcgcgacctgatcgtcgacatcccgcagatggtgtcgatcgcctcgtcggcctcgacgctgtaccccggggacctgatcgccaccggcactcccgccggggtcgggcgcgtggtcgccggcgacgtggtgacgatcgaggtcgcccgcgtcgggcgcatgtcgatcccggtcgtacaaggcacgcgcggggccaatgtcgtgttcgcgcagccttacgaattcgttcgcgcacaatga

SEQ ID NO: 3897 - protein, 294 aa, Azoarcus sp. EbN1
MKILRFNGGHVGISDGRKVVDVSDLCTSSPADWPPVGINRLIRDFEALRPRLQALLDTEPGEPIETVRLETPVPWPNKLMAYPVNYHDHAKEMASRGLASIQGYFLKSNSSLVGAADVIELPALPGREIHHECEIALVIGKEGRQIPPERALEHVLGYACLLDMTVRGKEERVFRKSYDTFTPVGPWIVTADEVPDPADIDMKLWVNDELRQQANTRDLIVDIPQMVSIASSASTLYPGDLIATGTPAGVGRVVAGDVVTIEVARVGRMSIPVVQGTRGANVVFAQPYEFVRAQ

SEQ ID NO: 3898 - DNA, 699 bp, Silicibacter pomeroyi DSS-3
  CDS (1)..(699): transl_table=11
atgagcgacagcctgttcaccctttccccgatccccggcatcccggtccgcggggaaagcgccacctatccgatcgggcgcatcttctgcgttggccgcaactatgccgcccatgccgccgagatgggcaacgaggtcgaccgcgaggcgccgttctatttcaccaaatccgccgccaatgcgatcctgaccggggccaccgtgccctatccccctggcaccgagaatttccattacgagatggagctggcctttgccattggcaagccggtgttccgcgccagccgggccgaggcctgggacgcggtctatgcctatggctgcgcgctcgacatgacccggcgcgaccagcagatccgcgagcgcgacaagaaacgcccctgggacctgggcaaggatgtcgagaacgcggcggtctttgcgcccctgacccgggtggccgactggtcgcctgaggacgacaagcgcattcatcttgaagtgaatggcgcgataaaacaggacgccaccctggccgagttgatctggaagatcgacgagatcgtcagccatctgtcgggctattaccatctgcgcccgggcgatctggtgatgacgggcacacctgccggtgtcggcccggtcgtcgccggggatgtgatcaccggcgggatcgacgggctggacccgatcgcgctgacgctcggcccggcagagtaa

SEQ ID NO: 3899 - protein, 232 aa, Silicibacter pomeroyi DSS-3
MSDSLFTLSPIPGIPVRGESATYPIGRIFCVGRNYAAHAAEMGNEVDREAPFYFTKSAANAILTGATVPYPPGTENFHYEMELAFAIGKPVFRASRAEAWDAVYAYGCALDMTRRDQQIRERDKKRPWDLGKDVENAAVFAPLTRVADWSPEDDKRIHLEVNGAIKQDATLAELIWKIDEIVSHLSGYYHLRPGDLVMTGTPAGVGPVVAGDVITGGIDGLDPIALTLGPAE

SEQ ID NO: 3900 - DNA, 666 bp, Pseudomonas syringae pv. syringae B728a
  CDS (1)..(666): transl_table=11
atgagctaccagcacaaatatgtcgatggcaccaacattcacttcccgctgggtaaagtggtctgcatcgggcgtaactacgccgaacacgccaaggaactgggcaacgcggtgcctaccgagccgctgctgttcatgaagcccggcagcgcggtggttgcgctggagggtggcttcagcatcccggcagaccgcggttcggtgcattacgaagccgagatcgtggtgttgatcggcaagcccctgagcaagaacccttcgcgcgaagaagtactcgacgcgatcagcggctttgcgcctggtctggacctgacgttgcgtgatgtccagtcgcgtctgcgtgagaaaggcctgccgtgggagctggccaagtgttttgacggcgctgcggtgatcccgccgttcgtgcccgccgagaccttccctgatctggaggacatcggtatccgcctgaccctcaatggcaaggtggttcaggacggcaacagcaacatgatgctcaacccgatcgtgccgatgatccagcacatggcagccaacttctcgctgcaggccggcgacctgatcatgaccggcacacctgccggtgtcgggccgttcgaagctggcgaccagatcgccctggaactggtcgggcagacgccgttcgagagcgtcgtcaggtaa

SEQ ID NO: 3901 - protein, 221 aa, Pseudomonas syringae pv. syringae B728a
MSYQHKYVDGTNIHFPLGKVVCIGRNYAEHAKELGNAVPTEPLLFMKPGSAVVALEGGFSIPADRGSVHYEAEIVVLIGKPLSKNPSREEVLDAISGFAPGLDLTLRDVQSRLREKGLPWELAKCFDGAAVIPPFVPAETFPDLEDIGIRLTLNGKVVQDGNSNMMLNPIVPMIQHMAANFSLQAGDLIMTGTPAGVGPFEAGDQIALELVGQTPFESVVR

SEQ ID NO: 3902 - DNA, 666 bp, Pseudomonas fluorescens Pf-5
  CDS (1)..(666): transl_table=11
atgagctatcagcaccagtatgtcgacggtacccggatccattttccggtgggcaaggtggtgtgcatcggtcgcaactacgccgagcacgccaaggagctggacaacccggtacctaccgaacccctgttgtttatcaagccgggcagttgtgtggtgcccctggaaggtgggttcgcgattcccaccgagcgtggttcggtgcactacgaagcggaaatcgcggtgttgatcggcaagccgctctccaccaaacccagccgcgaagaagtgctggatgccatttccggctttgccccggcactggacctgaccctgcgggacaagcaggccgaactcaaagccaagggcctgccctgggaaatcgccaagtcgttcgacggcgcggcggtgatcgcgccctttgtggtgggcagtaccttcgccgacctgaccgacatcggcatccgcctgaccatcaacggtgaagtacgccaggacggcaacagcgccatcatgctcaaccccatagtgccgatgatccagtacatggccggttgtttctccctgcaggccggcgatgtgatcctcacgggcacgccggtcggggttgggccgctgaatgtcggcgatgagctggtgctggagcttcccggtgccagccgtttcaccagcagcgtccgttga

SEQ ID NO: 3903 - protein, 221 aa, Pseudomonas fluorescens Pf-5
MSYQHQYVDGTRIHFPVGKVVCIGRNYAEHAKELDNPVPTEPLLFIKPGSCVVPLEGGFAIPTERGSVHYEAEIAVLIGKPLSTKPSREEVLDAISGFAPALDLTLRDKQAELKAKGLPWEIAKSFDGAAVIAPFVVGSTFADLTDIGIRLTINGEVRQDGNSAIMLNPIVPMIQYMAGCFSLQAGDVILTGTPVGVGPLNVGDELVLELPGASRFTSSVR

SEQ ID NO: 3904 - DNA, 717 bp, Psychrobacter arcticus 273-4
  CDS (1)..(717): transl_table=11
atgagccaatcaccatctatatccttagtcgatacaattgctgccagtgccaatgatgacgcgagcaacgccactgttaatgatagcgtacgtgcatctattggcaaggtcgtttgcgtcggtcgtaactatgtggcgcacgctcaagagttgggtaatgaagtgccaacgtcgcccatcttatttatgaaaccagcatcgtcagtggtcagtgtgcatcatgatattgtgcgtccagattcagaacagtttggtgagacacattatgaagctgagctgtgtattcagctgtcagcggatttatctaaggcaaccatcgcacaagcacagcaagctattggcggcgtaactttagggcttgatttaaccttacgcgagctgcaaagcaagctaaaagacaaaggtcatccttgggagcgagccaagtgctttgatggtgcttgcgtgctggctgattggattgcgccgcaagcatttggtgactttaaaaatgtcgaatatcagttttacattaataatgagctcaagcaaaatggtgatagtgcgttgatgttgtttccagtttatgagttgttggttgatatcagtcatgcctttagtctacaagcaggcgatgtcattatgactggtacgccaagtggcgttgggatacttcaggcaggtgatgcgctaaaactcaagttagatgctcatgaatggcaggttcaggttcgataa

SEQ ID NO: 3905 - protein, 238 aa, Psychrobacter arcticus 273-4
MSQSPSISLVDTIAASANDDASNATVNDSVRASIGKVVCVGRNYVAHAQELGNEVPTSPILFMKPASSVVSVHHDIVRPDSEQFGETHYEAELCIQLSADLSKATIAQAQQAIGGVTLGLDLTLRELQSKLKDKGHPWERAKCFDGACVLADWIAPQAFGDFKNVEYQFYINNELKQNGDSALMLFPVYELLVDISHAFSLQAGDVIMTGTPSGVGILQAGDALKLKLDAHEWQVQVR

SEQ ID NO: 3906 - DNA, 666 bp, Pseudomonas syringae pv. phaseolicola 1448A
  CDS (1)..(666): transl_table=11
atgagctaccagcacaaatatgtcgatggcaccaacattcacttcccgctgggtaaagtggtctgcatcgggcgtaactacgccgaacacgccaaggaactgggcaacgcggtgcctaccgagccactgctgttcatgaaacccggcagcgcggtggttgcgctggagggtggcttcactatcccggcagaccgcggctcggtgcattacgaagcagagatcgtggtgttgatcggcaagcccctgagcaagaacccttcgcgcgaagaagtgctggacgcgatcagcggctttgcgcccggcctggacctgaccctgcgtgacgtgcagtcgcgtctgcgtgagaaaggccttccatgggagctggccaagtgtttcgacggcgctgcggtgattccgccgttcgtgcccgccgagaccttccctgatctggaggacatcggtatccgcctgaccctcaatggcaaggtggttcaagacggcaacagcaacatgatgctcaacccgatcgtgccgatgatccagcacatggcagccaacttctcgctgcaggccggtgacctgatcatgaccggcacgcctgccggtgtcgggccgttcgaaaccggcgaccagatcgcgctggaactggtcgggcagacgccgttcgagagcgtcgtcaggtaa

SEQ ID NO: 3907 - protein, 221 aa, Pseudomonas syringae pv. phaseolicola 1448A
MSYQHKYVDGTNIHFPLGKVVCIGRNYAEHAKELGNAVPTEPLLFMKPGSAVVALEGGFTIPADRGSVHYEAEIVVLIGKPLSKNPSREEVLDAISGFAPGLDLTLRDVQSRLREKGLPWELAKCFDGAAVIPPFVPAETFPDLEDIGIRLTLNGKVVQDGNSNMMLNPIVPMIQHMAANFSLQAGDLIMTGTPAGVGPFETGDQIALELVGQTPFESVVR

SEQ ID NO: 3908 - DNA, 702 bp, Dechloromonas aromatica RCB
  CDS (1)..(702): transl_table=11
atggacttcgtttttgctccccacgcagttcctgtgctgccggtactcggtaccgagcagcgttttccagtacgccgggttttttgcgtcggccgtaactatgccgatcatgctcgcgaaatgggtgcggtcgatcaggccgaaggccgtgagccgccatttttcttcaccaagccggccgatgcggtggttggcgggacaggagagctgagcgtcaagtatccgccgcagaccagcaacctgcaccatgaggtggaaatggtcgtggcgctgggggcggggggggagaatgttgcggtcgatgcggcaaagggcctgatcttcggttacgccgtcggccttgacttgacgcgacgcgacatgcaggccaacgccaagagcaagagccatccgtgggacatgagcaagggcttcgaccagtcagccgtcgctggtgtgatcaccccggtggcgctcagcggttatcccgaagtgggccgtatctggctgaaagtgaatggtcagatgcgccaggaaggcgacttgtcagccatgatgtggacggtggcggacatcattgccaatctgtcgacgctggtccggctggaagcgggtgatctgatctacaccggtaccccggccggggtcgggccgcttgttcggggcgatgtgctggaagcgggtgtcgaaggcttgtgtccgctacaagcgcagattcgttag

SEQ ID NO: 3909 - protein, 233 aa, Dechloromonas aromatica RCB
MDFVFAPHAVPVLPVLGTEQRFPVRRVFCVGRNYADHAREMGAVDQAEGREPPFFFTKPADAVVGGTGELSVKYPPQTSNLHHEVEMVVALGAGGENVAVDAAKGLIFGYAVGLDLTRRDMQANAKSKSHPWDMSKGFDQSAVAGVITPVALSGYPEVGRIWLKVNGQMRQEGDLSAMMWTVADIIANLSTLVRLEAGDLIYTGTPAGVGPLVRGDVLEAGVEGLCPLQAQIR

SEQ ID NO: 3910 - DNA, 804 bp, Thermobifida fusca YX
  CDS (1)..(804): transl_table=11
gtgcgtatcgcgagattctcggccggtgatgacgtaggtttcggcttggtcgataccgacgatgagggcaaccagttcgtcacccggatgaagagccacccgttggtggggccgatccagctcaccggagaacgcaccaaactcgaagacgtgcggctgctctccccgatcctgcccaccaagatcgtgtgcatcggcaaaaactacgccgaccacatcgcggagatgggaggcagcgctgaggacgaacgggaccccaaggagccggtcgtcttcctcaagccctccaccgccgtggtcgggcccaacgaccccgtcttccacccgaaactctcctcgcgggtggactacgagggagaactggctgtgatcatcggccggctctgccgggaggtgccggccgaacgcgccaaggacgtcatcttcggctacaccatcggcaacgacgtcaccgcccgcgacctgcagcaggccgaccaccagtggacccgcgccaaggggttcgactcgttctgcccgctcggaccgtggattgagaccgggctcagcgttgaggaagcctcgcagctgcgcatcaccaccaccgtggacggggaggtccgccaggacggcaacaccgggcagatgatccacagcattcccgagatcatctcctacgtgagctctttcatgacgctcctgccgggggatgtgatcctcaccggcacccccgcaggggtcggaccggtccgggtaggccagcggatgaccgtggcgatcgaccggatcggggaactgagcaacccggtggtggcccgcgactga

SEQ ID NO: 3911 - protein, 267 aa, Thermobifida fusca YX
MRIARFSAGDDVGFGLVDTDDEGNQFVTRMKSHPLVGPIQLTGERTKLEDVRLLSPILPTKIVCIGKNYADHIAEMGGSAEDERDPKEPVVFLKPSTAVVGPNDPVFHPKLSSRVDYEGELAVIIGRLCREVPAERAKDVIFGYTIGNDVTARDLQQADHQWTRAKGFDSFCPLGPWIETGLSVEEASQLRITTTVDGEVRQDGNTGQMIHSIPEIISYVSSFMTLLPGDVILTGTPAGVGPVRVGQRMTVAIDRIGELSNPVVARD

SEQ ID NO: 3912 - DNA, 762 bp, Ralstonia eutropha JMP134
  CDS (1)..(762): transl_table=11
atgcccgggtgcgcgcatagcgcggcacccaggcccccgcacacccttctgactgaaccgaccatgtcctacgtcttcacgccccccgctaccgtcgccattcccgttgttggcagcgatgaccagttcgccgtgcgccgcgtctactgcgtcggccgcaactacgccgcccatgcacgcgaaatggggttcgatcccgaccgcgagcccccgttcttcttctgcaagccggccgacgccatcgtgcctgtggctgacggccagacgctggaactgccctaccctgtacagacgcagaactaccactatgaagccgagctggtcgcggtgatcggcaaggccggttccgacattccggtcgagcaggcgctggagcacgtttggggctacgccgtaggcctggacatgacgcgccgcgacctgcagatgaagatgcgcgagatgggccgcccgtgggaaatcggcaaggccttcgacgcctcggcaccagtcgcgccgatccatcgcgctgccgatatcggccacccgcaagaggctgcgctctggctgaccgtcaacggcgaagacaagcagcgcagcaatatcacgcacctgatctggtcggtggccgaaacagtcgcttacctgtcgcagttcttccgcctggaaccgggcgatgtgatcttcaccggcaccccggagggtgtgggcgcggtcaaggccggcgacaccatggtgaccggcgtcgacggcctcggcgaactcaaggtccgcgtggtctga

SEQ ID NO: 3913 - protein, 253 aa, Ralstonia eutropha JMP134
MPGCAHSAAPRPPHTLLTEPTMSYVFTPPATVAIPVVGSDDQFAVRRVYCVGRNYAAHAREMGFDPDREPPFFFCKPADAIVPVADGQTLELPYPVQTQNYHYEAELVAVIGKAGSDIPVEQALEHVWGYAVGLDMTRRDLQMKMREMGRPWEIGKAFDASAPVAPIHRAADIGHPQEAALWLTVNGEDKQRSNITHLIWSVAETVAYLSQFFRLEPGDVIFTGTPEGVGAVKAGDTMVTGVDGLGELKVRVV

SEQ ID NO: 3914 - DNA, 735 bp, Methanosarcina barkeri str. Fusaro
  CDS (1)..(735): transl_table=11
atgataggaaggttcagatcaggagatgaaattttttatggagatatcgaaaatgggcgcgtgtatccaaaaggagggactcctgccgggatttttgacctttcagagcttcgcgtccttccgccggcgtctccctcgaaaattgtatgtgtcggccttaactatcgggatcatgctgaagagctgaacatgaaagtcccggaaaaccctgtactctttttaaagcctccttcagccattatagggcatggggacaagatcatttatccggcatcgagctccagagtagaacatgaagctgaactcgcagtcgttataggcaaacgctgtaagaacatctcaacttcaaaggccatagatgtaattgcaggttatacctgctttaatgatgtgaccgcccgggacctccagcaaaaagatggtcaatggacaagagcaaagagttttgatacctttgcagctttcgggccttatcttgcttctcccgatgaagttgatattacgaatgcaaagattgcctgcagggtaaatggagataccaggcaggcttccagcacttcaaaccttctttttgacattccttatcttattgaatttatcaccgagatcatgaccctggaagtaggagatgtcattgccacaggaacccctcctggcgttggagaacttcagcgtggagacattgtggaagttgagatccagggaatcggaacacttagaaacgaggttgtctga

SEQ ID NO: 3915 - protein, 244 aa, Methanosarcina barkeri str. Fusaro
MIGRFRSGDEIFYGDIENGRVYPKGGTPAGIFDLSELRVLPPASPSKIVCVGLNYRDHAEELNMKVPENPVLFLKPPSAIIGHGDKIIYPASSSRVEHEAELAVVIGKRCKNISTSKAIDVIAGYTCFNDVTARDLQQKDGQWTRAKSFDTFAAFGPYLASPDEVDITNAKIACRVNGDTRQASSTSNLLFDIPYLIEFITEIMTLEVGDVIATGTPPGVGELQRGDIVEVEIQGIGTLRNEVV

SEQ ID NO: 3916 - DNA, 774 bp, Anabaena variabilis ATCC 29413
  CDS (1)..(774): transl_table=11
atggcgcagcgctacgtgcgagttcaaaatcgggaaggtaagatttactatgggttgctacaactgtctttcaatgtgcaggttctagatgctccaccgtggctgcatggacaacccacagacctaattttagaaccagatcattatcaaattttggctccctgcgctccttctaaaattgtcgcagtgggcaaaaattatgcagatcatgcagccgaaatgggaacgtcagttccaagtgaaccactaattttcctgaagccaccaacaacgattattgcctcggagacagagattaaatatcctctccagtcgcaacgagtggattatgaaggagaattagccttgatcattggcgatcgcacttgtaactgtacaccagaggaagcccaaactaaaatttggggttataccattgccaatgatgtgacagcgcgggatttacagcgaaaagatgggcaatggacaagagctaaaggttttgatactttctgcccattgggaccttggattgtccgcgaattgagtccaggggcaagattacagacctttctcaatgatgatgctaatcccgtacaatcggcgggaattgatcaaatggtatttgcccctgattttttggtgtcatatatcagtcaggtgatgacattgcttcccggagatgtgattttaacgggtacgccagagggtgtaggagctttgcaacaaggcgatcgcatccgtgtagaaattgaaggtatcggtcgcctagaaaacaccgtagcagcccattaa

SEQ ID NO: 3917 - protein, 257 aa, Anabaena variabilis ATCC 29413
MAQRYVRVQNREGKIYYGLLQLSFNVQVLDAPPWLHGQPTDLILEPDHYQILAPCAPSKIVAVGKNYADHAAEMGTSVPSEPLIFLKPPTTIIASETEIKYPLQSQRVDYEGELALIIGDRTCNCTPEEAQTKIWGYTIANDVTARDLQRKDGQWTRAKGFDTFCPLGPWIVRELSPGARLQTFLNDDANPVQSAGIDQMVFAPDFLVSYISQVMTLLPGDVILTGTPEGVGALQQGDRIRVEIEGIGRLENTVAAH

SEQ ID NO: 3918 - DNA, 666 bp, Pseudomonas fluorescens PfO-1
  CDS (1)..(666): transl_table=11
atgagctatcagcaccagtatgtcgacggtacgcggattcattttccgctggggaaagtggtgtgcatcggccgtaactacgccgaacacgccaaggaactggacaacccggtgcctaccgagccgttgctgttcatcaagccgggcagttgcgtggtgccgctggaaggcagtttcagcattccgaccgagcgtggctcggtgcattacgaggcggaaatcgccgtgttgatcggcaaaccgctgtcgaccaaaccgagccgtgaagaagtgctggacgcgatctccggtttcgccccggcgctggacctgaccctgcgcgacaagcaggccgagctcaaatccaagggcctgccgtgggaaatcgccaagtcgttcgacggcgcggcggtgattgcaccgttcgtggtcggcagcactttcgccgacctgaccgacatcggcattcgcctgaccatcaatggcgaagtgcgccaggacggtaacagcagcgccatgctcaacccgatcgtgccgatgatccagcacatggccggctgcttctcgctgcaggccggtgacgtgatcctgaccggcacgccagtgggcgtcggcccgctgaacgttggcgatgagatcgtgctggaactgccgggcgccagtcgttttaccagcagcgttcgctga

SEQ ID NO: 3919 - protein, 221 aa, Pseudomonas fluorescens PfO-1
MSYQHQYVDGTRIHFPLGKVVCIGRNYAEHAKELDNPVPTEPLLFIKPGSCVVPLEGSFSIPTERGSVHYEAEIAVLIGKPLSTKPSREEVLDAISGFAPALDLTLRDKQAELKSKGLPWEIAKSFDGAAVIAPFVVGSTFADLTDIGIRLTINGEVRQDGNSSAMLNPIVPMIQHMAGCFSLQAGDVILTGTPVGVGPLNVGDEIVLELPGASRFTSSVR

SEQ ID NO: 3920 - DNA, 699 bp, Rhodobacter sphaeroides 2.4.1
  CDS (1)..(699): transl_table=11
atggcggcctacgtcctacccaccgcggcgcaagcccacctcgatgtcgtcggcagcgacgagaaattcccggtgcgccgcgtctattgcatcggcaagaactacgtcgcccacatccgcgagatgaatgcggacgagcgcgacccgccggtgatcttcatgaagcctgcggatgcggtggtgcgcaacggcggcgagatcccctatccggtcttcaccgagaacttccattacgaatgcgagctcgtggtggtgctgaagtcgggcggctacaacatctcggtcgccgatgccgccagccacatctacggctatgccgtgggcctcgacatgacgcggcgcgaccatcagaagggcgtgctggaaaaaggcctgccgtgggaggtcacgaaggccttcgacctctcggccccgatcggccccgtcacccgcgccgaggagtgcggggtgctgacctcgggccagctcacgctgaaggtgaacggggaggtcaagcaggatgccgacatcgggctgatgatctggaaggtcgacgagatcattgccaagctctccgagcagcaccgccttcagccgggcgacatcatcatgaccggcacgcccgcgggcgtgggcgcggtggtgaccggagacgtgctcgactgcacgatggaggggctcgagccgatgcaggtccgcatcgggccgaaggccgtctga

SEQ ID NO: 3921 - protein, 232 aa, Rhodobacter sphaeroides 2.4.1
MAAYVLPTAAQAHLDVVGSDEKFPVRRVYCIGKNYVAHIREMNADERDPPVIFMKPADAVVRNGGEIPYPVFTENFHYECELVVVLKSGGYNISVADAASHIYGYAVGLDMTRRDHQKGVLEKGLPWEVTKAFDLSAPIGPVTRAEECGVLTSGQLTLKVNGEVKQDADIGLMIWKVDEIIAKLSEQHRLQPGDIIMTGTPAGVGAVVTGDVLDCTMEGLEPMQVRIGPKAV

SEQ ID NO: 3922 - DNA, 756 bp, Carboxydothermus hydrogenoformans Z-2901
  CDS (1)..(756): transl_table=11
atgattttaggtagagccgtaatagcggggcaggataagtacgtgaaaattaatgatgataaggtagaaattttaaatggagatattttcggcgagattaattccagcggaaaattacttccgctttcagaggtcaaattactacccccggtattaccgtcgaaaattatctgtgtaggtttaaactaccgggaccatattgacgaatttaaacaccagttgccggaagaaccggtgatttttctaaaaccgcctaccgcggtaattggtcctttagacgtgataatattacctcaagaaagtcggcgggtggactacgaaggagaactggcggtggtgattaaaaaggaagggcgaaatctaaaggaagaagaagcaagggatttcatcttaggttatacctgtgccaatgatgttaccgcccgggacttacagcggaaggatggacagtggacgcggggaaaatcgttcgatactttttgccctcttggaccgtggattgttaccgatattgagcctgaccaccttgagatagaaacttatttgaatggggaactccggcaaaagagtaatacttctaaaatgctgtttcatccctattttttggtaagttttatttctaaagtcatgactttaaagcctggagatgtaattttaacgggaacccccagcggtgttggtaaacttgctgaaggagacacggttgaggtaaagatttcggccattggaagcctgagaaattttgtgaaagtatag

SEQ ID NO: 3923 - protein, 251 aa, Carboxydothermus hydrogenoformans Z-2901
MILGRAVIAGQDKYVKINDDKVEILNGDIFGEINSSGKLLPLSEVKLLPPVLPSKIICVGLNYRDHIDEFKHQLPEEPVIFLKPPTAVIGPLDVIILPQESRRVDYEGELAVVIKKEGRNLKEEEARDFILGYTCANDVTARDLQRKDGQWTRGKSFDTFCPLGPWIVTDIEPDHLEIETYLNGELRQKSNTSKMLFHPYFLVSFISKVMTLKPGDVILTGTPSGVGKLAEGDTVEVKISAIGSLRNFVKV

SEQ ID NO: 3924 - DNA, 759 bp, Burkholderia sp. 383
  CDS (1)..(759): transl_table=11
atgccggcccgtgcgccgcacgggcgcggcatccgtcttcccaccgaacgaggccatccgatgtccgcttatgtcatcgacgctgccgagcgtccttccgtcgaagtcgaacagtcgtccgcgcgctttccggtgcgccgcgtcttctgtgtcggccgcaactacgccgaccacgcgcgcgaaatgggcgccgatcccgaccgcgaaccgccgttcttcttcacgaagccggccgacgcgatcgtcccggccagcggcaccgtcgcctatccgccgctgacgaacgaccttcatcacgaaatcgagctggtcgtcgcgatcggcaaggacggccgggcgatcgacccggccgacgcgctgtcgcacgtgtggggctacggcgtcggcatcgacctcacgcgccgcgacctgcaggccgaagcgaagaagctgagccgtccgtgggactgggcgaagggtttcgacgcatcgggccccgtgaccgcgctgcgcgcggcgtccgctaccggccacccggcgacgggccgcatctggctcgcagtgaacggcgacacgcgccagcaaggcgacctggccgacatgatctgggccgtgcccgacgtcatcgcgtatgtgtcgcgctcggtcgagctgaaggccggcgacctgatcttcaccggcacgccggctggcgtcggtgcgctgcagcccggtgaccgcgtcacgggcggcgtcgacggcgtcgcgacgttcgagttcgtcgtgggcgcaaagccgtaa

SEQ ID NO: 3925 - protein, 252 aa, Burkholderia sp. 383
MPARAPHGRGIRLPTERGHPMSAYVIDAAERPSVEVEQSSARFPVRRVFCVGRNYADHAREMGADPDREPPFFFTKPADAIVPASGTVAYPPLTNDLHHEIELVVAIGKDGRAIDPADALSHVWGYGVGIDLTRRDLQAEAKKLSRPWDWAKGFDASGPVTALRAASATGHPATGRIWLAVNGDTRQQGDLADMIWAVPDVIAYVSRSVELKAGDLIFTGTPAGVGALQPGDRVTGGVDGVATFEFVVGAKP

SEQ ID NO: 3926 - DNA, 657 bp, Geobacter metallireducens GS-15
  CDS (1)..(657): transl_table=11
atgacgtttgccaccctggcaggaagcgccacggaataccccatcggcaagatcctctgcattggccgcaactatgcggaacacatcaaggaactggggaacgaaaccccggatgcgccggtcattttcaccaaacccgccacgtcggtcatcggtgatggcgacgccattgtgattcccccttactccagagactgccaccacgaagcggaactggcggtcctcatcgggacagcgggaaaagatatccccgttgaacgcgccctggaacacgtggccggctacggtgtcgccatcgacctgacgctacgggacgtgcaggccgagctcaagaagaaagggctcccctgggacatcgccaaggggttcgacaccgcctgccccctctctccttttgtgcctgccgaccgggtcgccgatccgcaagacctgcggattatcctgaccgtcaacggcgaaacgcgccaggacggctcaacctccctcatgatccacacggtccgcgagatcatcagccatatgtcggggatattcaccctggaaccgggggacgtgatcctcaccggaacccccgccggcgtcagccccattgtttcgggagatcgtctcgtggctgagataccgggtgttgcccggctccaggtctccgttaaataa

SEQ ID NO: 3927 - protein, 218 aa, Geobacter metallireducens GS-15
MTFATLAGSATEYPIGKILCIGRNYAEHIKELGNETPDAPVIFTKPATSVIGDGDAIVIPPYSRDCHHEAELAVLIGTAGKDIPVERALEHVAGYGVAIDLTLRDVQAELKKKGLPWDIAKGFDTACPLSPFVPADRVADPQDLRIILTVNGETRQDGSTSLMIHTVREIISHMSGIFTLEPGDVILTGTPAGVSPIVSGDRLVAEIPGVARLQVSVK

SEQ ID NO: 3928 - DNA, 702 bp, Rhodospirillum rubrum ATCC 11170
  CDS (1)..(702): transl_table=11
gtgcgcttcgttcttcctcccttgccccgcacggccattccggtaagcggaaccgacggtttcttcccggtgggccgggtgttctgcgtcggccgcaactacgccgaccacgcccgcgagatgggcggcgatccgcataaggagccgccgttcttcttttccaagccgggggacgcggtggtgccgctgggcggcgccgtgccctatccccaggcgacctcgaacctccatcacgaggtcgaactggtggtggccctgggcggcggcggccatgacatcgcccccgataaggccctcgatctggtctggggctatgcggtggggatcgatctgacgcggcgcgacctgcaagacagcgccaagagggccggccgcccctgggatatggccaagggcttcgaagccagcggcccggtcggggcgatcaccccggcggcgaccaccggcgcgctgacctcgggcgccatcagcctttcggtcaatggcgttccccgccagacgggcgatctgaaggatatgatctggccggtcagcgatgtcatttccttcctgtcccggctgatggtgctgcgcccgggcgacctgatcttcaccggcacgccggccggcgtcggcccggtggaggaaggcgacgagctgagggccgaaatcgctggcctcgacccgctcaccctcaccctcgtcgccggaccggtcctctga

SEQ ID NO: 3929 - protein, 233 aa, Rhodospirillum rubrum ATCC 11170
MRFVLPPLPRTAIPVSGTDGFFPVGRVFCVGRNYADHAREMGGDPHKEPPFFFSKPGDAVVPLGGAVPYPQATSNLHHEVELVVALGGGGHDIAPDKALDLVWGYAVGIDLTRRDLQDSAKRAGRPWDMAKGFEASGPVGAITPAATTGALTSGAISLSVNGVPRQTGDLKDMIWPVSDVISFLSRLMVLRPGDLIFTGTPAGVGPVEEGDELRAEIAGLDPLTLTLVAGPVL

SEQ ID NO: 3930 - DNA, 777 bp, Moorella thermoacetica ATCC 39073
  CDS (1)..(777): transl_table=11
atggaaagaagcgagaagatagtacgttttagcgctgggggtgaggttttttacggccgcctggaaggggcgaaaatcctggccctggagggcgaaatctttggcccctgccgggaaagcgggcgccaatttagcctggacgaagttcgcctcctggccccatgccggccgggcaaggccgtgtgtgttggtctgaattaccgcaaccatattaccgagatgagcgaaaagctaccggaggaaccggtgatctttataaaaccgtccaccagcgtcatcggccccggggagacgattatttactggcctatggtgggccgcctggattatgaagccgaactggcggtggtcatcggccgcgaggcccataacgtcgaggaaagagaggcggcagactatatttttggctacaccatagccaacgatgtcacggcccgggacctgcagcagaaggacggccagtggaccagggccaagggtttcgacacctttctgccctgcggtccctggattgtccggggtatcgacgccggcgaccttcgggtccaggccttcctgaacggagaattgaagcaggacgggcgtacttcccagttgattttcccggtacccaggctggtcagttttatctctcgggtgatgaccctccacccgggggacctgatccttaccggcacccctgcaggtgtgggccctatgcaggtgggcgataccattgaaatcagggtggagaacatcggcagcctggtcaatagggtcgccgcaccggtgatataa

SEQ ID NO: 3931 - protein, 258 aa, Moorella thermoacetica ATCC 39073
MERSEKIVRFSAGGEVFYGRLEGAKILALEGEIFGPCRESGRQFSLDEVRLLAPCRPGKAVCVGLNYRNHITEMSEKLPEEPVIFIKPSTSVIGPGETIIYWPMVGRLDYEAELAVVIGREAHNVEEREAADYIFGYTIANDVTARDLQQKDGQWTRAKGFDTFLPCGPWIVRGIDAGDLRVQAFLNGELKQDGRTSQLIFPVPRLVSFISRVMTLHPGDLILTGTPAGVGPMQVGDTIEIRVENIGSLVNRVAAPVI

SEQ ID NO: 3932 - DNA, 705 bp, Burkholderia thailandensis E264
  CDS (1)..(705): transl_table=11
atgaccgattacgttttcgcgccgcccgccgttccgtccgtcgaagtcgccggctgcgccgcgcgctttccggtgcgccgcgtgttctgcgtcggccgcaactatgcggaccacgcgcgcgagatgggcgccgatccgaaccgcgagccgccgttcttcttcacgaagccggccgatgcgatcgtgcccgcgagcggcacggtgccgtatccgacgctcacgtccgacctgcatcacgagatcgagctcgtgatcgcgatcggccgaggcgggcgcgcgatcgccgccgacgcggcgctcgatcacgtgtggggctacggcgtcggcgtcgacctgacgcggcgcgacctgcaagcccaggcgaagaaggccggccggccgtgggactgggcgaagggcttcgacgcgtcgggcccgctgacggcgctccatccggccgcatccgtcggtcatccgctgcgcggccggatctggctcgcggtcaacggcgacatgcgccagcaaggcgacctcgccgacatgatctggccgattcccgacgtgatcgcgtatgcgtcgcgcgcggtcgagctgcgcgcgggcgacctgatcttcaccggcacgccggcgggcgtcgccgcgctgcagccgggcgatcgcgtgacgggcggcgtcgacggcgtcgcgtcgttcgagttcgtcgtcggggaaaagccggccgcgtga

SEQ ID NO: 3933 - protein, 234 aa, Burkholderia thailandensis E264
MTDYVFAPPAVPSVEVAGCAARFPVRRVFCVGRNYADHAREMGADPNREPPFFFTKPADAIVPASGTVPYPTLTSDLHHEIELVIAIGRGGRAIAADAALDHVWGYGVGVDLTRRDLQAQAKKAGRPWDWAKGFDASGPLTALHPAASVGHPLRGRIWLAVNGDMRQQGDLADMIWPIPDVIAYASRAVELRAGDLIFTGTPAGVAALQPGDRVTGGVDGVASFEFVVGEKPAA

SEQ ID NO: 3934 - DNA, 645 bp, Desulfitobacterium hafniense Y51
  CDS (1)..(645): transl_table=11
atgcaaggttttggagggatacatcggatgataaaaaacatttattgtgtcggtcgcaattatctgcagcatgccaaggaactcaacaatgcggttccaacttccccgtttcttttcgttaagcccactcatgctctggtggaaggtcaggggcagaccattgccatgcccaaagaccaggggaatgtccattacgaggcggaattggttgttcatgtgggcaaaaactatgaacccggcatgaaggccgaagcggttattgataaaatagctgtagggattgactttactttaagagaggttcaggatgagctgaagaaaaaaggactgccctggctgctggctaaagggttccctaactcagcggtactatcccgatggctgcctttcgaagggctggaggggacggccggccatgattttacccttgagaagaatggacaggaagtgcaaagaggaaatatcaaggagatgatttttgatattcccaccatcatagaattctgtgcccaacacttcggattggctgaaggggatattattttcaccggaacgcctgccggtgtcggtgtagccgctgctggagaccattttgtactgaagtggaaggaagagcaagtgggagagctgttcattggtgagtaa

SEQ ID NO: 3935 - protein, 214 aa, Desulfitobacterium hafniense Y51
MQGFGGIHRMIKNIYCVGRNYLQHAKELNNAVPTSPFLFVKPTHALVEGQGQTIAMPKDQGNVHYEAELVVHVGKNYEPGMKAEAVIDKIAVGIDFTLREVQDELKKKGLPWLLAKGFPNSAVLSRWLPFEGLEGTAGHDFTLEKNGQEVQRGNIKEMIFDIPTIIEFCAQHFGLAEGDIIFTGTPAGVGVAAAGDHFVLKWKEEQVGELFIGE

SEQ ID NO: 3936 - DNA, 699 bp, Burkholderia xenovorans LB400
  CDS (1)..(699): transl_table=11
atgagttacgtatttgcacccgcaccggtggtcgcggtgccggttgtggggtccagcgagcagttcgcggtgcgtcgcatctactgtgtgggccgcaattacgaggcgcacgcgcgggagatgggacacgatcctgatcgcgaaccgccgttcttcttcaccaagccggctgacgcggtgctgtacgtcgcgcccggcgccaccggcgagtttccttatccgccgcagtcgaaaaatgtccatttcgaaatggaaatggtggcggcgatcggcaagggcggcaagaacattgccgcggaaagcgcgctcgatcacgtctacggttacgcgctcggtctcgatatgacgcgccgcgatctgcaggccgaagcgaaaaagctcggccgcccctgggatacggcgaagggtttcgatcactcggcgccgctcggcccgattcatcccgccgcgacggtcggccatgtcggcaagggcgcgatctggttgtcggtgaacggcgaggaaaagcaaagctcggatgtgtcgcaactgatctggtcggtggccgagacggttgcatatctgtctacgctgttcgaactgcaacccggcgatctgatcttcaccggcactccggagggcgtcggcgcggtggtgccgggcgatctgatgaagggcggcgtggacgggctcggcgaattcagcgtgcgcgtcgtctga

SEQ ID NO: 3937 - protein, 232 aa, Burkholderia xenovorans LB400
MSYVFAPAPVVAVPVVGSSEQFAVRRIYCVGRNYEAHAREMGHDPDREPPFFFTKPADAVLYVAPGATGEFPYPPQSKNVHFEMEMVAAIGKGGKNIAAESALDHVYGYALGLDMTRRDLQAEAKKLGRPWDTAKGFDHSAPLGPIHPAATVGHVGKGAIWLSVNGEEKQSSDVSQLIWSVAETVAYLSTLFELQPGDLIFTGTPEGVGAVVPGDLMKGGVDGLGEFSVRVV

SEQ ID NO: 3938 - DNA, 879 bp, Ralstonia metallidurans CH34
  CDS (1)..(879): transl_table=11
atgaaatttgcaacgctccaaaccgcgcaagggaagctcgtttccctggtaaacactgagtcgcagcagtattggccgctccaggatctggtttctgggttcaccggggacatggtccaattggttcatgttttcccggaaattaagggccgcttgacgcccaccggcgaaggcaagcccctctcgcaggcgacggtgctcgccccgatcgaccagccgcgccgcaatatcttctgcgtcggcaagaactaccatgagcacgcgaaagaattctcgaaatccggcttcgacagcagcgccaaggagggtgagcacgccccggaagcgccggttgtctttacaaagcccgcctcgacggtcatcggcccgggcaagaaagtaccgagccacccgaacgtgacgaagcaactagactacgaggcagaactggcagtcgtcatcggcaaggctggccgtgcgatccgcaaggaagaggcgtacaagcatgtcatcggctacaccatcgtgaatgacttcaccgcccgcgacctgcagaagacgcaccgacagtggttccttggcaagtcattggacggcttctgcccaatgggcccgtatctcgtcacggcagatgaactcgacgtcgaaaatcttgaagtgaagtgctggatcaacgacgaactgcgccaggactccaacaccagccagctcattttcgacattcccacgcttattgagactctctctgccggcatcgaactgcagcccggcgatgtcatcgcaacaggcacccccgcaggcgtcggcattggcttcaacccgccgaagtttgtaaaggccggcgatgtcatgcgcattgagatcacgggcctgggcaccctggtcaacgaggtggagtaa

SEQ ID NO: 3939 - protein, 292 aa, Ralstonia metallidurans CH34
MKFATLQTAQGKLVSLVNTESQQYWPLQDLVSGFTGDMVQLVHVFPEIKGRLTPTGEGKPLSQATVLAPIDQPRRNIFCVGKNYHEHAKEFSKSGFDSSAKEGEHAPEAPVVFTKPASTVIGPGKKVPSHPNVTKQLDYEAELAVVIGKAGRAIRKEEAYKHVIGYTIVNDFTARDLQKTHRQWFLGKSLDGFCPMGPYLVTADELDVENLEVKCWINDELRQDSNTSQLIFDIPTLIETLSAGIELQPGDVIATGTPAGVGIGFNPPKFVKAGDVMRIEITGLGTLVNEVE

SEQ ID NO: 3940 - DNA, 792 bp, Acidobacteria bacterium Ellin345
  CDS (1)..(792): transl_table=11
atgcgctactgccgttttgtccatcgtgggcagccgaagtacggcctcatcgaaaccgagaacacgcgcgactacatcatccgcgccatcgccaccatgccgcaggattacaacaccttcgctggtgccgagccattgcatgtgctcctggaagaagccgagttgctggctagcgttgtgcccaccaagatcgtttgcgtcgggaggaactacaaagcgcacgccgaagaactcggacacgagatccccaagtacccgctcattttctcaaaaccaacttctgcaatcattgcacccggcgcggacattaaacggccggcgaagctctcacagcgcgtggactacgagggcgaactcggcgtgatcatcggtcgcgaatgccgtcacattcccgaggaccacgacgtgcgctcctacatccacggctacaccgtagtgaacgatgtcaccgcgcgcgatttgcagaacaaagacggccagtggacccgcgccaagggtttcgacacgttctgccccgtcggtccaatcgtcaacgatgcgctggatccatggactggcgtggaagtcgagactcgcgtgaacggagcggtccgccaacatggcaacacgtcgagtttcatctttccactcgacgtcatcctccgcttcatctccgaagtgatgaccctgtttccgggcgatctcattgccaccggtacacccgaaggcgtcggaccgatcatagctggagacgtggttgaggtcagcgtggcaggtatcggaactctgcgcaatcctgtcgccgacgagtag

SEQ ID NO: 3941 - protein, 263 aa, Acidobacteria bacterium Ellin345
MRYCRFVHRGQPKYGLIETENTRDYIIRAIATMPQDYNTFAGAEPLHVLLEEAELLASVVPTKIVCVGRNYKAHAEELGHEIPKYPLIFSKPTSAIIAPGADIKRPAKLSQRVDYEGELGVIIGRECRHIPEDHDVRSYIHGYTVVNDVTARDLQNKDGQWTRAKGFDTFCPVGPIVNDALDPWTGVEVETRVNGAVRQHGNTSSFIFPLDVILRFISEVMTLFPGDLIATGTPEGVGPIIAGDVVEVSVAGIGTLRNPVADE

SEQ ID NO: 3942 - DNA, 771 bp, Myxococcus xanthus DK 1622
  CDS (1)..(771): transl_table=11
atgacgaccgcgcgctactgccgcttcctgcatgagggccgtgcgcaccacggccgggtggaaggctccgaggtggtggtcctcaccgccgcgccctgggctggcgcgaaggagacgggcatccaccgctcgctgtcctcgctgacgctgctggtgccgtcggacgcgtccaaggtcgtgtgtatcggccagaactaccgcaagcacgcggaggagatgggcaagccggtgccgcccgagccgctcatcttcaccaagccctccacggcgctcaatggcacgggctcgcccatccgcatccccaaggcgagccaggaagtccactacgaggcggagctggcgctcgtcatcggcgagaagctgaagaacgccgacgagtccaccgcggcgcgcgccatctggggcctcacctgcttcaacgacgtgacggcgcgcgacgtccagcgccgcgagattcagcacacccgcgccaagggctacgacaccttcgcgtgcgcggggccgtgggcggtgacgggcctgtctcccgccgacctccgcattgtgtgccgggtgaacgggcaggtgcgccaggacagccgcacatccgacatgattttcagtcccgcgcgcctggtgtcgttcatctcccacatcatgacgctgctgcctggggacatcgtcagcaccgggacgccgtcgggtgtggggaagctgtcggccggggacacggtggaggtggagctggagggaatcggaaccctggtgaaccctgttgagatggagccgtga

SEQ ID NO: 3943 - protein, 256 aa, Myxococcus xanthus DK 1622
MTTARYCRFLHEGRAHHGRVEGSEVVVLTAAPWAGAKETGIHRSLSSLTLLVPSDASKVVCIGQNYRKHAEEMGKPVPPEPLIFTKPSTALNGTGSPIRIPKASQEVHYEAELALVIGEKLKNADESTAARAIWGLTCFNDVTARDVQRREIQHTRAKGYDTFACAGPWAVTGLSPADLRIVCRVNGQVRQDSRTSDMIFSPARLVSFISHIMTLLPGDIVSTGTPSGVGKLSAGDTVEVELEGIGTLVNPVEMEP

SEQ ID NO: 3944 - DNA, 882 bp, Rubrobacter xylanophilus DSM 9941
  CDS (1)..(882): transl_table=11
atgaagctcgccacgtatctggacggcaggccgcgggtgggggcggtggtcgacggcggggtcgtcgacctgagcgggaggttcggctccatgctggagctcatcgaggggggaggggaggcgctggaggaggcccgcgcggtcgccgcgggctccgggcccgccgcccggctcgacgaggtgaggctgctggcccccatcccgcagcccaggaggaacgtcttctgcatgggctggaactacctgacccacttcgaggaggggaggggacggcgcgaggggcagggggaggagctgcccgagtaccccaccttcttcgacaagcccacgaccaccgtcatcggcccccacgacgacatcccgttcgacccgaacttctccgagaagatcgactacgaggccgagctcgccgtcgtcataggccggtccgggaggagcatacccgccggggaggccatggaccacgtcttcggatacaccgccgcgaacgacgtgaccgcccgggacgtgcagcggcgccacggcggccagtggctcaagggcaaggggatggacggaagctgccccttggggccctggatcgtgaccgccgacgagataccggacgtgcagaacctgcaggtccaatgccgcgtaaacggcgtgcagaagcagaactcgaacaccaggttcatggtcttccccgtcgcgaggctcatagaggagctctccctggcgatgaccctcctgcccggggacgtcctgctcaccggcacgccggagggcgtaggctacgcccggacgccgcccgagttcctcaggcccggcgacgaggtgaccgtctacgtcgagggcgtcggggagatctccaaccgcgtcgtcgagaaaaacctcacccgctga

SEQ ID NO: 3945 - protein, 293 aa, Rubrobacter xylanophilus DSM 9941
MKLATYLDGRPRVGAVVDGGVVDLSGRFGSMLELIEGGGEALEEARAVAAGSGPAARLDEVRLLAPIPQPRRNVFCMGWNYLTHFEEGRGRREGQGEELPEYPTFFDKPTTTVIGPHDDIPFDPNFSEKIDYEAELAVVIGRSGRSIPAGEAMDHVFGYTAANDVTARDVQRRHGGQWLKGKGMDGSCPLGPWIVTADEIPDVQNLQVQCRVNGVQKQNSNTRFMVFPVARLIEELSLAMTLLPGDVLLTGTPEGVGYARTPPEFLRPGDEVTVYVEGVGEISNRVVEKNLTR

SEQ ID NO: 3946 - DNA, 888 bp, Rubrobacter xylanophilus DSM 9941
  CDS (1)..(888): transl_table=11
ttgctgctaagatgcaggcctgctggtctctgtggcgcgcaaaccaagagagaaccggagggaggagcgcagaaggtgaagctggtcacttactcggtgggcggcggagagccgcgcgtggggaggcttcaggacggcgccgtacagcccctcggggctccggacatgatctcgtacatcagggggggcggggagccggagggggagcccgtgccgctcgaggaggcgcggctgcacgcccccgtcctcaacccacagaagataatcgccatcgggctcaactacgaggaccacgcgaacgagacgggcgcgcccatccccgagaagcccatcgtcttcgccaagtacgccaacaccctcgtcggggcgggggaggaggtcaggatcccgcccatcacctcccaggccgactacgaggccgagctcgccgtcgtcatcgggcgggaggccaagaacgtctccgaggaggaggccctggagtacgtcttcggctacaccaactgcaacgacgtctcctcgcgcgacctgcagttctccgagggcgggcagtggacccgcagcaagtcgctcgacaccttctgcccgctcgggccctacgtcgcgacccgcgacgagatccccgacccccagagcctccggatacgctcggtgctcaacggcgaggtcatgcaggacagcaacacctccaagatgatcttcccggtcgcccgcctcatctccttcctctccaccggtatgaccctcgtccccggggacatcatcgccaccggcaccccggcgggggtgggcttcgcccgcgacccgaaggtcttcctcaaggacggcgacgagatctccatcgagatagaggggctcgggcggctcaccaaccccgtcagggaagagtag

SEQ ID NO: 3947 - protein, 295 aa, Rubrobacter xylanophilus DSM 9941
MLLRCRPAGLCGAQTKREPEGGAQKVKLVTYSVGGGEPRVGRLQDGAVQPLGAPDMISYIRGGGEPEGEPVPLEEARLHAPVLNPQKIIAIGLNYEDHANETGAPIPEKPIVFAKYANTLVGAGEEVRIPPITSQADYEAELAVVIGREAKNVSEEEALEYVFGYTNCNDVSSRDLQFSEGGQWTRSKSLDTFCPLGPYVATRDEIPDPQSLRIRSVLNGEVMQDSNTSKMIFPVARLISFLSTGMTLVPGDIIATGTPAGVGFARDPKVFLKDGDEISIEIEGLGRLTNPVREE

SEQ ID NO: 3948 - DNA, 834 bp, Hyphomonas neptunium ATCC 15444
  CDS (1)..(834): transl_table=11
atgcgtctggtgcggtttgaagccgaagggcacgtccggtttggccatctggaaggcgatactgtcgtgcctgttgcaggagacagctttatcgacgcgctggagggccgcgagaagggcgcgcccctggcgctcagcgtcgtgcgcctgctcgccccggtgccccgtccccgaaaaatcctggggataggtgtgaattatgccgcccacgccgccgagagcgtgagcttcatcaacaccgccaaacccgaggtgcagaaatggttcaacaaacaggcaacggcggtgaacggaccctatgatccggtccaccttcccagggtttccagccagctcgattatgagggtgagctggtcgcggtgatcggcaagcatggccggcatgtgcccgctgaaagggccatggaaatcgttgcaggcttctgtatcggttgcgattattcggtgcgcgactggcagaaggccagccagacgatgatcatgggcaagggctttgacacgcacgcgccgtttggccccgcgctggtgacgccggatgagctgggcgatatttcagacctcgaaatccgcagcttcgtgaacggcgaattgcgccagtccggccgcccgcgggacatgatccacgatgttggcgcccagattgcacatcttacggcggcctttacgcttgagcctggggatgtgatcttcactggaaccccggccggagtcggcgcggggttcgatccgccgaaatggctgaaggcaggtgaccgtgtacgcatcgagatcgacaggctgggccacatcgagaacgccatcgttcccgagcctgacacaatgcgaatcggttga

SEQ ID NO: 3949 - protein, 277 aa, Hyphomonas neptunium ATCC 15444
MRLVRFEAEGHVRFGHLEGDTVVPVAGDSFIDALEGREKGAPLALSVVRLLAPVPRPRKILGIGVNYAAHAAESVSFINTAKPEVQKWFNKQATAVNGPYDPVHLPRVSSQLDYEGELVAVIGKHGRHVPAERAMEIVAGFCIGCDYSVRDWQKASQTMIMGKGFDTHAPFGPALVTPDELGDISDLEIRSFVNGELRQSGRPRDMIHDVGAQIAHLTAAFTLEPGDVIFTGTPAGVGAGFDPPKWLKAGDRVRIEIDRLGHIENAIVPEPDTMRIG

SEQ ID NO: 3950 - DNA, 843 bp, Hyphomonas neptunium ATCC 15444
  CDS (1)..(843): transl_table=11
atgaagatcctcagagttggccctccggggcgcgaaaagccggcagttcttgattccagcggcaatatgcgggacgtcagcgacctggtggatgactgggatggcctggcattgtccgatgccgtgtttgcgcagttgcgcaaggttgaccttgccaccctgcccatgctcccggccgccagccggatcggcccctgtgtcgcagatgtcggaaaattcatctgtatcgggctgaattatgccgatcacgccgccgaaaccggcgccgaagtgcctgctgaacccgtggtgttcttcaaggcgacgagcgccatctgcgggccgaatgacaatctcgaaatcccccgcaaatcggagaaaaccgactgggaagtcgagctcggcatcgtcatcggcaaacacacaaaatacgtctcggaagaagacgcgatggaccacatcgccggctattgcgtggttcacgacgtctccgagcgcgccttccagcttgagggcaccggccagtgggtaaagggaaaaagcgccgatacgttcggcccgatcggcccctggctcgtcacccgcgacgagattaccgacccgcaaaaccttaccatgtggctggatgttaacggcgaagccatgcagcgggggtcgacctcgaccatgattttcggggtggcgcatatcgtcagctacctctcgcaattcatgagccttcagccgggggacgtgatttccacaggcacgcctccgggcgtgggcctgtcgcgcacaccgccgctctatctgaaggcgggcgacacggtaacccttggaattcaaggccttggcgaccagcgccaggtctgcatcaacgcctga

SEQ ID NO: 3951 - protein, 280 aa, Hyphomonas neptunium ATCC 15444
MKILRVGPPGREKPAVLDSSGNMRDVSDLVDDWDGLALSDAVFAQLRKVDLATLPMLPAASRIGPCVADVGKFICIGLNYADHAAETGAEVPAEPVVFFKATSAICGPNDNLEIPRKSEKTDWEVELGIVIGKHTKYVSEEDAMDHIAGYCVVHDVSERAFQLEGTGQWVKGKSADTFGPIGPWLVTRDEITDPQNLTMWLDVNGEAMQRGSTSTMIFGVAHIVSYLSQFMSLQPGDVISTGTPPGVGLSRTPPLYLKAGDTVTLGIQGLGDQRQVCINA

SEQ ID NO: 3952 - DNA, 843 bp, Rhizobium leguminosarum bv. viciae 3841
  CDS (1)..(843): transl_table=11
atgaagctgatgcgtgttggcgaagccggcagtgaaaaaccagcacttctcgatgccgatggcaagatccgcgatctttccggtcatgttgccgatatcggcggtgaagcgatcggaccggcaggccttgcaaagatagcggccatcgatccgaagagccttccggaacttgtccccggacgcatcggcgcctgcgtcgcgggcactggcaagttcatctgcatcggcttgaattattcggatcatgctgccgaaaccggtgcgaccgtgccgcccgagccgatcatcttcatgaaagcaacatccgcaatcgtcggaccgaacgataatgttatcatcccgcgcggttcggaaaagaccgattgggaagtcgagctcggcgtcgtcatcggcaaaaccgccaaatatgtgacggaagccgaagcgctggattatgtcgccggttattgcgtttccaatgacgtttccgagcgcgctttccagaccgagcgttccggtcaatggaccaaggggaaatcctgcgatacgtttggtccgatcggcccatggctcgtgaccaaggatgaaattcccgaaccgcagaacctcggcatgtggctgacggtcaacggccagaagatgcagaacggctcatcgaaaacgatggtttacggggttgcgttcctcgtctcctacctcagccagttcatgtcgctgcatcccggtgacgtgatctcgaccggcacgcctccgggcgtcggcatgggcctcaagccgccgcgttatctcaaatcaggagacgtggtcgaactcggcatcgaaggtctcggcacgcagaagcagaccttcgtagcggatcgttaa

SEQ ID NO: 3953 - protein, 280 aa, Rhizobium leguminosarum bv. viciae 3841
MKLMRVGEAGSEKPALLDADGKIRDLSGHVADIGGEAIGPAGLAKIAAIDPKSLPELVPGRIGACVAGTGKFICIGLNYSDHAAETGATVPPEPIIFMKATSAIVGPNDNVIIPRGSEKTDWEVELGVVIGKTAKYVTEAEALDYVAGYCVSNDVSERAFQTERSGQWTKGKSCDTFGPIGPWLVTKDEIPEPQNLGMWLTVNGQKMQNGSSKTMVYGVAFLVSYLSQFMSLHPGDVISTGTPPGVGMGLKPPRYLKSGDVVELGIEGLGTQKQTFVADR

SEQ ID NO: 3954 - DNA, 666 bp, Pseudomonas aeruginosa UCBPP-PA14
  CDS (1)..(666): transl_table=11
atgagttaccagcatcaatatatcgacggcaccccgatccacttccccctgggcaagctggtctgcgtcgggcgcaactacgccgaacacgccaaggaactgaacaacccggttcccaccgagccgctgctgttcatcaagcccggctcctgcgtggtgccggtgagcggcgggctgagcctgccgcaggagcgcggctcggtacactacgaggcggaaatcgccgtgctgatcggcaagccgctgtcgcgcaagccgaaccgcgaggaggtcctcgacgcgatctccggctatgcgccggcgctggacctgaccttgcgcgaggtccaggcgaaactgaaggaaaagggcctgccctgggagctggcaaagagcttcgatggcgccggcgtgctgtcgccgttcgtgaacgccgaccagttccccgacccgaccgacatcggcatccgcctgaccatcaacggcgaggtgcgccaggacggcaacagccgcgacatgctcaatccgatcgtgccgctgatccagcacatcgccgggcatttctcgctacaggccggcgatgtggtgctgaccggcacgccgtccggggtcgggccgctgaacagcggcgacgagttgctgctcgaattgccgggcgccagccgtttcgagacccgcgtgctctga

SEQ ID NO: 3955 - protein, 221 aa, Pseudomonas aeruginosa UCBPP-PA14
MSYQHQYIDGTPIHFPLGKLVCVGRNYAEHAKELNNPVPTEPLLFIKPGSCVVPVSGGLSLPQERGSVHYEAEIAVLIGKPLSRKPNREEVLDAISGYAPALDLTLREVQAKLKEKGLPWELAKSFDGAGVLSPFVNADQFPDPTDIGIRLTINGEVRQDGNSRDMLNPIVPLIQHIAGHFSLQAGDVVLTGTPSGVGPLNSGDELLLELPGASRFETRVL

SEQ ID NO: 3956 - DNA, 810 bp, Solibacter usitatus Ellin6076
  CDS (1)..(810): transl_table=11
gtgatcgtggacgggttgttgattcgtctcaaagatgcgggcttccacgacgtgcacgacctgatcgcgggcggcgccgacgccatggatcgcgtggtgcgatgggtgaatcactcgccaggcggggaggtcttcgacgtggccggaatgaaactgcggtcgcccctccagcggccgggcaagatcatctgcatcggcctgaattaccgcgatcacgccgaggaagcgaagatgccgatcccggaaacaccgaccgtgttcgccaagtggggcaacaccgtcaccgggcatcagcatccgatcgtgctgccgaagaattccagaaagccggattatgaagcggaactcgcggtggtaatcggcaagggcggacgccacattgcggaggcgaactggcgcgagcacgtctttggatacacgatcctcaacgacgtgagcgcgcgcgattttcagatggcgaccagccagtggacgatcggcaagactttcgacaccttcgctccgattggcccgtggatcgtcaccaccgacgaaatcgaagatcccggcgcgctccgaatctcgctcacgctaaacagcgtgaccatgcaggattcgaacaccagtaatttgattttcggaattccgaaactgatcgcgtatttatcgagcgtgatgtcgctcgaaccgggcgacatcatttcgaccgggacgcccgccggggtaggcttcgcccagaaacccccgcgatggctggttcccggggacgtgtgcgcgattcaggtggggggaatcggcgagctggtgaacccggtgatcgccgaagcgtag

SEQ ID NO: 3957 - protein, 269 aa, Solibacter usitatus Ellin6076
MIVDGLLIRLKDAGFHDVHDLIAGGADAMDRVVRWVNHSPGGEVFDVAGMKLRSPLQRPGKIICIGLNYRDHAEEAKMPIPETPTVFAKWGNTVTGHQHPIVLPKNSRKPDYEAELAVVIGKGGRHIAEANWREHVFGYTILNDVSARDFQMATSQWTIGKTFDTFAPIGPWIVTTDEIEDPGALRISLTLNSVTMQDSNTSNLIFGIPKLIAYLSSVMSLEPGDIISTGTPAGVGFAQKPPRWLVPGDVCAIQVGGIGELVNPVIAEA

SEQ ID NO: 3958 - DNA, 810 bp, Nocardioides sp. JS614
  CDS (1)..(810): transl_table=11
gtgcgcatcgcaaggttcaccacgggcgaagacccgttgtacggcgtggtcacgggcgagctcgacgagttcgggcagccggaccccgacagcgtcgtcgtggccctggccggcgacccgctctacgtcggcgtcaagctgctcgaccaggagcaccggctcgaggacgtgcgactgctcgcgccggtgctgccgcgcagcaaggtcgtcgggatcggccgcaactacgcggcgcacgcggcggagctgggcaacgacctacccaccgagccgctgatgttcctcaagccgaacaccagcgtgatcggcccgggcgacccgatcttctacccgccgcagacgcagaacctgcactacgagggcgagctcgccgtcgtgatcggccggatctgccgcgacgtacctcccgagcaggccaccgacgtgatccacggctacacgatcggcaacgacgtgaccgcgcgggacctgcagcgcagcgacgtgcagttcacccgggccaagggcttcgactcgttctgcccgctggggccgtggatcgagaccgacctcgacccgcacgacttcgcggagggccgcagcgtccagacgcacctgaacggcgacctggtccaggacggctcgaccaaggacctgatcttcgacatcccgaccctgatcgcgtacgtgtccagcgtgatgacgctgctccccggtgacgtcatcctcaccggcacccccgagggcgtcggccccatggacgtcggcgacgaggtcgaggtctcgatcgccggactcggcactctcacgaaccccgtcaaggcaaggtga

SEQ ID NO: 3959 - protein, 269 aa, Nocardioides sp. JS614
MRIARFTTGEDPLYGVVTGELDEFGQPDPDSVVVALAGDPLYVGVKLLDQEHRLEDVRLLAPVLPRSKVVGIGRNYAAHAAELGNDLPTEPLMFLKPNTSVIGPGDPIFYPPQTQNLHYEGELAVVIGRICRDVPPEQATDVIHGYTIGNDVTARDLQRSDVQFTRAKGFDSFCPLGPWIETDLDPHDFAEGRSVQTHLNGDLVQDGSTKDLIFDIPTLIAYVSSVMTLLPGDVILTGTPEGVGPMDVGDEVEVSIAGLGTLTNPVKAR

SEQ ID NO: 3960 - DNA, 711 bp, Azoarcus sp. BH72
  CDS (1)..(711): transl_table=11
atgtcccagacccattacctgtggaacccctcgccggtctattcgctgccggtgaagggcgtcgatgcccgctttccggtcaagcgcatcttctgcgtcggccgcaactaccacgcccacgcggtggaaatgggccgcccggtcgacaaatcgaccatggcccccttctacttcctgaaggacgcctccacgctggtggagtccggcgccaccgtgccctaccccaccggcaccagcaactaccactacgagatggaactggtggtggcgatcggcaaggcgggcttccgcgtcgccgaggccgatgcggactcgctcatctacggctatgccgccgggttggacatgacccgccgcgacctgcagctggtggcccgcgaacagggccgcccgtgggacctcggcaagaacttcgagaactccgcggtctgcaccgagatcatccccgccgccggcggcgccgtgctcgacaagggcgcgatcaacctgcaggtcaacggcgagaccaggcagagcgccgacctctcgatgctgatctggaacatccgcgaaatcatcgccgacctgtcgaagttctatcacctggagccgggcgacctgatctacaccggcaccccggaaggcgtcggcgcggtcaagagcggcgaccgcatcaccggccatatcgacggtgtgggcgacgtcgcgctgacgatcggcgccgccgagtaa

SEQ ID NO: 3961 - protein, 236 aa, Azoarcus sp. BH72
MSQTHYLWNPSPVYSLPVKGVDARFPVKRIFCVGRNYHAHAVEMGRPVDKSTMAPFYFLKDASTLVESGATVPYPTGTSNYHYEMELVVAIGKAGFRVAEADADSLIYGYAAGLDMTRRDLQLVAREQGRPWDLGKNFENSAVCTEIIPAAGGAVLDKGAINLQVNGETRQSADLSMLIWNIREIIADLSKFYHLEPGDLIYTGTPEGVGAVKSGDRITGHIDGVGDVALTIGAAE

SEQ ID NO: 3962 - DNA, 696 bp, Acidovorax sp. JS42
  CDS (1)..(696): transl_table=11
atgagctatgtgatccctcccgcaccgcaggccagcgtgcccgtcgtgggcacaacccagcgctttcccgtgcaccgcatctactgcgtgggccgcaactatgccgagcatgccaaggaaatgggcttcaccggccgcgagccgccgttcttcttcatgaagcccgccgacgccgtgctgcccgtgaacccgggcgagaccggccagatgccctaccccacgctgaccaaggacctgcaccacgagatcgagctggtggtggccatcggtaagggcggcaagcacatcgccgcggccgacgcgctgtcgcacatctggggttacgccgtgggcctggacatgacgcgtcgcgacctgcagggcgagatgaagaagcagggccgcccctggtgcatcggcaagggcttcgaggccagcgcgcccatcggcccgatcacgcccgcggcgcaggcgggcgacgtgcagcaggcagccatctggctgcaggtcaacggcacggaccgccagcgcagcagcgtgggccagctgatctggaacatcgccgagaccatcgaacatctgtccgccgcgtgggagctgcagcccggcgacctgatcttcaccggcacccccgagggggtgggcgcggtggtgcgcggcgacgtgctggaaggcggcatcgacggcctgggcacgctgcgcgtggccgtggcctga

SEQ ID NO: 3963 - protein, 231 aa, Acidovorax sp. JS42
MSYVIPPAPQASVPVVGTTQRFPVHRIYCVGRNYAEHAKEMGFTGREPPFFFMKPADAVLPVNPGETGQMPYPTLTKDLHHEIELVVAIGKGGKHIAAADALSHIWGYAVGLDMTRRDLQGEMKKQGRPWCIGKGFEASAPIGPITPAAQAGDVQQAAIWLQVNGTDRQRSSVGQLIWNIAETIEHLSAAWELQPGDLIFTGTPEGVGAVVRGDVLEGGIDGLGTLRVAVA

SEQ ID NO: 3964 - DNA, 846 bp, Acidovorax sp. JS42
  CDS (1)..(846): transl_table=11
atgaaactcgtccgccacggacaacccggcgcggagcgcgccggcctgatcgacgcccagggcgtgctgcgcgacctgtccatgctgctgccggacatcggccccacgcagttggcgccacgcacgttggccgcgctggccgccatcgacgccgcgcgcctgcccgcggtggtacccggcacacgcctgggctgccccgtgggcggtgtcggcaagatcgtctgcgtgggcctgaactacgccgaccatgcggccgaggccggcttgcccgcgccggcagagcccgtgctgttcatgaaggcgaccagcgcgctcagcggccccacggacgccgtgcgcatcccgcccggcgcgctcaagaccgactgggaggtggagctgggcatcgtcatcggcacgcgcatgcagcaggtggccgaggccgatgcgctggcccatgtggccggctacgtgctggccaacgacgtgtccgagcgcagctaccagatggagcgtggcgggcagtgggacaagggcaaaggctgcgacaccttcgcgcccgtgggcccctggctggtgaccaccgacgagattcccgacccgcacgccatcgggctgtggctggaggtgaacggccagcgcatgcaggacggccacacgcgcaatttcatcttcggcgtgccccgggtgctggcctacatcagccagttcatgacgctggagccgggcgatctggtgctcaccggcacgcccgccggcgtgggcctgggacagaagcccacgccgcgtttcttgcgcgcgggcgacgtgatgcggctgggcgcgacggggctgggcgagcagcggctggtctgcacgggcgggtag

SEQ ID NO: 3965 - protein, 281 aa, Acidovorax sp. JS42
MKLVRHGQPGAERAGLIDAQGVLRDLSMLLPDIGPTQLAPRTLAALAAIDAARLPAVVPGTRLGCPVGGVGKIVCVGLNYADHAAEAGLPAPAEPVLFMKATSALSGPTDAVRIPPGALKTDWEVELGIVIGTRMQQVAEADALAHVAGYVLANDVSERSYQMERGGQWDKGKGCDTFAPVGPWLVTTDEIPDPHAIGLWLEVNGQRMQDGHTRNFIFGVPRVLAYISQFMTLEPGDLVLTGTPAGVGLGQKPTPRFLRAGDVMRLGATGLGEQRLVCTGG

SEQ ID NO: 3966 - DNA, 828 bp, Crocosphaera watsonii WH 8501
  CDS (1)..(828): transl_table=11
atgccgcaacgctacgttagagtaaaaacaactcaaggaaacatccattatggctcacttaatctcaatcgcagtgtggcggtgtttgatgctgccccttgggatggagggcaacccagtggtgtcgtcctcaaggcggatagttatcaatttgtagccccttgttttccttccaaaattattgcagtgggcagaaattataaagctcatgcagaggaactgggtaacaccgtcccaacagaacctttactctttcttaaacctccttcgaccctgattggggaagagcaacctatctattatccctcccagtctcaacaggtagactatgaaggagagttagctttggtgattggtgaagtgactaaaaattgttctgagaaagaagctcaaagcaaaatttggggctataccattgctaatgatgtgacagcccgtgattttcaacggaaggataatcaatgggtgcgggctaaggggtttgataccttttgtcctctaggcccctgggtgatccgcgaattaagtgcggctgctagtattcaaacttttgttaacaatgaagaagaaccacggcagtctgctttggttcaggatatgatattttctcctcaagtcatcgtttcttatatctctcaaattctgactttgtttccaggggatgttattttgacgggaacccccgaaggggttggccctgtgagtatcggcgatcgcattcgggtagaaattgagggcattggtagcatcgaaaaccctgttatgagtgagccaaccgctaacatgactaccagcgaacctgagaataagcagcctcagaaatcgtag

SEQ ID NO: 3967 - protein, 275 aa, Crocosphaera watsonii WH 8501
MPQRYVRVKTTQGNIHYGSLNLNRSVAVFDAAPWDGGQPSGVVLKADSYQFVAPCFPSKIIAVGRNYKAHAEELGNTVPTEPLLFLKPPSTLIGEEQPIYYPSQSQQVDYEGELALVIGEVTKNCSEKEAQSKIWGYTIANDVTARDFQRKDNQWVRAKGFDTFCPLGPWVIRELSAAASIQTFVNNEEEPRQSALVQDMIFSPQVIVSYISQILTLFPGDVILTGTPEGVGPVSIGDRIRVEIEGIGSIENPVMSEPTANMTTSEPENKQPQKS

SEQ ID NO: 3968 - DNA, 720 bp, Prosthecochloris aestuarii DSM 271
  CDS (1)..(720): transl_table=11
atgcctcttattccagccgccacactcgccccgtcatcgatctactgtgtaggaaaaaactatgaagatcatgccagagaaatgctgaaatgggacgggggcacaacgctcccgcccctgaatgagtctgaccccattatctttctcaaacccgtttcagctcttacgcctgactacagaacatcgatcccctgtatcgaacagcaaccggtatcgcaccttatgcattacgaagccgaactggtgctcctcattggaaaggatgcagagcaaatagggctcgacgaagcgccccgatatattcaaggctacggtgtcggtcttgacatgacactgcgcgacgtccagcagcaggcccgacaaaaaggagagccatggctgaaaagcaaaggtttccgtcaaagcgctatggtctcggatatcataaccgctgaagatgccggagatccggcctctcttggtttttctctcatcctgaacggcaaaaaagtccagcagggggcggcaaaccagatgatattcaatccctttcatcttatttcctatctttcatggatatatggtttgcgccggggagaccttctgtttaccggcacaccggcaggcgtcggaccggttgaaccgggtgatcgcctcgaagcgattctggaacaaacacataacggggccgcaacagccctgacgcatttcgaagcaacaatccatgaacccggcacataa

SEQ ID NO: 3969 - protein, 239 aa, Prosthecochloris aestuarii DSM 271
MPLIPAATLAPSSIYCVGKNYEDHAREMLKWDGGTTLPPLNESDPIIFLKPVSALTPDYRTSIPCIEQQPVSHLMHYEAELVLLIGKDAEQIGLDEAPRYIQGYGVGLDMTLRDVQQQARQKGEPWLKSKGFRQSAMVSDIITAEDAGDPASLGFSLILNGKKVQQGAANQMIFNPFHLISYLSWIYGLRRGDLLFTGTPAGVGPVEPGDRLEAILEQTHNGAATALTHFEATIHEPGT

SEQ ID NO: 3970 - DNA, 831 bp, Roseovarius nubinhibens ISM
  CDS (1)..(831): transl_table=11
atgcgatttgccagatacggagcagcaggagaagaacggcccgcgatgctcgacgccgaggggcggctgcgcgacctgtcgggggtggtgccggatctttcgggcgaggtgctggggcaattgcccaaggtgaaccccgaggcgctgccgctggtcgagggcacgccgcgcctgggcgtgccggtggcagacattggcaagctggtgtgcatcgggctcaacttttccgatcatgccgccgaggcggggatgcagccgccctcggaacccatcgtcttcatgaaggcgacctcggccatctgcgggcccaatgacacggtctcgctgccgcgcggctcggagaaatccgactgggaggtcgagcttggcgttgtgatcggacgccgcgccaaatatgtgagcgaggccgaggccctgtcctatgtggcgggctacaccatcgtcaatgatgtctcggaacgcgcctttcagaccgagcgcggcggccaatggaccaaaggcaagagctgcgacacattcggccccattggcccctggctggtgacgcctgacgccttgggcgatgtgcaggatctcgacatgtcgctcgatctcaacggcacgcggatgcagaccggcaacacgcgctcgatgatctttggcgtggccgaggtgatttcctatctgagccagatgatgacattgcatccgggcgatgtgatcgccaccggcacgccgccgggggtggggatggggttcaaaccgccgaaatacctcaaaccgggcgatgtgatggagctcgagattgccgggcttggccgtcagcgtcaggaggtggtggccgatagctga

SEQ ID NO: 3971 - protein, 276 aa, Roseovarius nubinhibens ISM
MRFARYGAAGEERPAMLDAEGRLRDLSGVVPDLSGEVLGQLPKVNPEALPLVEGTPRLGVPVADIGKLVCIGLNFSDHAAEAGMQPPSEPIVFMKATSAICGPNDTVSLPRGSEKSDWEVELGVVIGRRAKYVSEAEALSYVAGYTIVNDVSERAFQTERGGQWTKGKSCDTFGPIGPWLVTPDALGDVQDLDMSLDLNGTRMQTGNTRSMIFGVAEVISYLSQMMTLHPGDVIATGTPPGVGMGFKPPKYLKPGDVMELEIAGLGRQRQEVVADS

SEQ ID NO: 3972 - DNA, 759 bp, Oceanicola batsensis HTCC2597
  CDS (1)..(759): transl_table=11
atgaagatcgcgagatacacgcacaacgaccaaatcgcctgcgggatggtcgaaggcgacacgctgcgcccgataaggggcgacatcttcggcgatttctcgaccaccgaggacaggctgccgctgtccgacgtcgccctcctgccgccggttgagccgggcaagctggtgtgcgtcgggttgaactacaagcgtcacgccgaggaatccggtgccgcgatccccgaagagccgatgctcttcatgtgcgccccgtccgccgtcatccccgacggcggcaccatcctgctggacagccaggacgccaggatcgactacgaggcggaaatcgccatcgtgatcggcaagcaggcccgcaacctgcccgaggccgacgcccggtcctgcatcttcggctacacgatctgcaacgacgtctcgaaccgcgactatcagaagaaggacgggcagttcacccgggcgaagtccttcgacacctacaagcccctcggcccctggatcgaaaccgggctcgacccggacaacgcggcaatatcgctccgccagaacggcgaactccggcagcagtcgaacaccagcgacatgatcttttcgatcgaccggatcgtggccttcgtctcgggcatcatgaccctgaaccccggcgacgtgatcatcaccggcacgcccgaaggcgtgggtcccatgaggtccggcgaccgcatcgagatcgaaatcgagggcatcggcacgctcgccaattccgtcgccaacgcgtag

SEQ ID NO: 3973 - protein, 252 aa, Oceanicola batsensis HTCC2597
MKIARYTHNDQIACGMVEGDTLRPIRGDIFGDFSTTEDRLPLSDVALLPPVEPGKLVCVGLNYKRHAEESGAAIPEEPMLFMCAPSAVIPDGGTILLDSQDARIDYEAEIAIVIGKQARNLPEADARSCIFGYTICNDVSNRDYQKKDGQFTRAKSFDTYKPLGPWIETGLDPDNAAISLRQNGELRQQSNTSDMIFSIDRIVAFVSGIMTLNPGDVIITGTPEGVGPMRSGDRIEIEIEGIGTLANSVANA

SEQ ID NO: 3974 - DNA, 666 bp, Pseudoalteromonas tunicata D2
  CDS (1)..(666): transl_table=11
atggaaaagtttgaatggttaaatgcgggcgaaatagccttggtacctgctaaagcggtttgtattgggcgaaattaccgtgaacatgctgcggaattaaataatgcagtccccgatagcccgatgttattcatcaaaccaagcagtagttttgttgcattcaaagggcaaataccattagcgcagcgtttgggtgagcatcattatgaagctgagcttgcattgttaattggtcaaactattagtgcttcaactgaattagatttgcagcagcaagttataggaattggagttgcgatggatttaaccttaaggaatgtgcaggctgaacttaaaagcaaaggacatccgtgggaaaaagctaaagcttatgataatagttgtattgtaagtccttttattcaaatcactgagcagacagatttcaacaatctcgaatttaacctctctattaataatgaaatacgccagattggacacacttctgagatggttttttcgatagttcaattacttgatgagattcgccaatattttactcttcaacctggtgatatcgtacttaccgggacaccaaaaggagttggtaagcttaactctggtgatcaacttgtcgttacgttgcaaaaaaacacattggcctcaggccaaattttgttggtataa

SEQ ID NO: 3975 - protein, 221 aa, Pseudoalteromonas tunicata D2
MEKFEWLNAGEIALVPAKAVCIGRNYREHAAELNNAVPDSPMLFIKPSSSFVAFKGQIPLAQRLGEHHYEAELALLIGQTISASTELDLQQQVIGIGVAMDLTLRNVQAELKSKGHPWEKAKAYDNSCIVSPFIQITEQTDFNNLEFNLSINNEIRQIGHTSEMVFSIVQLLDEIRQYFTLQPGDIVLTGTPKGVGKLNSGDQLVVTLQKNTLASGQILLV

SEQ ID NO: 3976 - DNA, 663 bp, Oceanospirillum sp. MED92
  CDS (1)..(663): transl_table=11
atgggatatcaacatcgttatcaagatgggtcatcagctggattgccaacagggaaagttatctgtgtagggcgtaactatgcggatcatgcagctgaactgaataatccaatcccgaccgagccgatgttatttatcaagccttctacctgcgttgtggatatggctgagccttttaaggtgcctcaggatcatggtgaggtgcactttgaaacggagatggcgatcctgatcggtaaacagctgacccatgcaagcgaagctgaagcggcggcagccattgttggtgtaggtttggggttagatctaaccttgcgcgaactacaggggcgtcttaaggaaaaaggccatccatgggagaaatcaaaagcctttgatggttcttgtccgctctctgcatttgtaacagcggatcaaataacagacctacaggatgttgagattcggttgtttgtaaatgacgagttacgtcaacaaggtaatagcgctttgatgttgaacagggtgctaccgctcattagtcatactagtgagtttttcacgcttgagcctggtgatgtgattctgacaggaacgcctgcaggtgttggtccagtaaaggcgggtgatcagttgcaggttgaacttgctgatcttattgccatctcgactgaagcgatctaa

SEQ ID NO: 3977 - protein, 220 aa, Oceanospirillum sp. MED92
MGYQHRYQDGSSAGLPTGKVICVGRNYADHAAELNNPIPTEPMLFIKPSTCVVDMAEPFKVPQDHGEVHFETEMAILIGKQLTHASEAEAAAAIVGVGLGLDLTLRELQGRLKEKGHPWEKSKAFDGSCPLSAFVTADQITDLQDVEIRLFVNDELRQQGNSALMLNRVLPLISHTSEFFTLEPGDVILTGTPAGVGPVKAGDQLQVELADLIAISTEAI

SEQ ID NO: 3978 - DNA, 624 bp, Oceanobacter sp. RED65
  CDS (1)..(624): transl_table=11
gtgggcaaggttgtttgtgttgggcgcaattatgctgaacatgcgaaagaattggggaatgaaatacccgctgagccgattttattcatgaaaccggcgacaagtttagtagcgctagagccaagttttactatcccaacgcatcaaggcagtgtgcaccatgaattggaaattgcacttttgatcggtgaaaccgcgaagaatatcgaggcaaagagtgcgtggcgtatggtcagccatgtgggtttagcgttggatttaacattaagagatgtgcagaccaaactaaaagaaaaatcccacccatgggaaatcgcgaaggccttcgatggtgcctgtccgatatctaaatggttaccgttaagtgatattgttaatcgtaacgatatggaaatttctttgtacaagaatggacagctacagcaaaatggtcgttcgacgcaaatgctcaacgacatcccaagactgcttagttacatgagtgaatatttctctttgcagccaggcgatgtcattctcactggcacgcctgctggtgttggtcctttgcatgtggaagacgaattaactttgatgttggatgataagctgcgctgctctgcaaaagtgaaccaagcgcagtaa

SEQ ID NO: 3979 - protein, 207 aa, Oceanobacter sp. RED65
MGKVVCVGRNYAEHAKELGNEIPAEPILFMKPATSLVALEPSFTIPTHQGSVHHELEIALLIGETAKNIEAKSAWRMVSHVGLALDLTLRDVQTKLKEKSHPWEIAKAFDGACPISKWLPLSDIVNRNDMEISLYKNGQLQQNGRSTQMLNDIPRLLSYMSEYFSLQPGDVILTGTPAGVGPLHVEDELTLMLDDKLRCSAKVNQAQ

SEQ ID NO: 3980 - DNA, 618 bp, Desulfitobacterium hafniense DCB-2
  CDS (1)..(618): transl_table=11
atgataaaaaacatttattgtgtcggtcgcaattatctgcagcatgccaaggaactcaacaatgcggttccaacttccccgtttcttttcgttaagcccactcatgctctggtggaaggtcaggggcagaccattgccatgcccaaagaccaggggaatgtccattacgaggcggaattggttgttcatgtgggcaaaaactatgaacccggcatgaaggccgaagcggttattgataaaatagctgtagggattgactttactttaagagaggttcaggatgagctgaagaaaaaaggactgccctggctgctggctaaagggttccctaactcagcggtactatcccgatggctgcctttcgaagggctggaggggacggccggccatgattttacccttgagaagaatggacaggaagtgcaaagaggaaatatcaaggagatgatttttgatattcccaccatcatagaattctgtgcccaacacttcggattggctgaaggggatattattttcaccggaacgcctgccggtgtcggtgtagccgctgctggagaccattttgtactgaagtggaaggaagagcaagtgggagagctgttcattggtgagtaa

SEQ ID NO: 3981 - protein, 205 aa, Desulfitobacterium hafniense DCB-2
MIKNIYCVGRNYLQHAKELNNAVPTSPFLFVKPTHALVEGQGQTIAMPKDQGNVHYEAELVVHVGKNYEPGMKAEAVIDKIAVGIDFTLREVQDELKKKGLPWLLAKGFPNSAVLSRWLPFEGLEGTAGHDFTLEKNGQEVQRGNIKEMIFDIPTIIEFCAQHFGLAEGDIIFTGTPAGVGVAAAGDHFVLKWKEEQVGELFIGE

SEQ ID NO: 3982 - DNA, 672 bp, marine gamma proteobacterium HTCC2143
  CDS (1)..(672): transl_table=11
gtgctgtttatggcggactacaagcatcaatttttgaatgagatcgcgtgtggcaaaacgctgggtaagattgtatgtgtcggtcgaaactatgctgaccacgctaaagagttgaataatccgattcccgaccggccgctgttatttattaagccatcgacggcagcagtcgatatgctgctgccgataaacatccctacagatcgtggctgctgtcatcacgaactggaaatggccgttcttataggcaaacgcagtagcagtgtgtctagcgttgaagcaaaggacgctattgttggagtgggtctgggacttgacctgacattgcgcgatttgcaagatgagttgaaagccaaaggcgagccatgggagcgagcgaaggcctttgatgggtcatgccccttgtcgccatttagcagcgtcggtgatattgatcaacaaaatcttaatattacgctgctgcgcaacggcactgtgcagcaatcaggaaacacccgagacatgttgtttcctgttgctgacttaatagcagatatcagccgcagttttaccctgcttcccggcgatattattttaactggcacacctgcgggcgtagggccattgtaccccggagataccattacagcgcagctgggtgacctagttaccgtgaatactacgattgtgtaa

SEQ ID NO: 3983 - protein, 223 aa, marine gamma proteobacterium HTCC2143
MLFMADYKHQFLNEIACGKTLGKIVCVGRNYADHAKELNNPIPDRPLLFIKPSTAAVDMLLPINIPTDRGCCHHELEMAVLIGKRSSSVSSVEAKDAIVGVGLGLDLTLRDLQDELKAKGEPWERAKAFDGSCPLSPFSSVGDIDQQNLNITLLRNGTVQQSGNTRDMLFPVADLIADISRSFTLLPGDIILTGTPAGVGPLYPGDTITAQLGDLVTVNTTIV

SEQ ID NO: 3984 - DNA, 666 bp, Pseudomonas putida GB-1
  CDS (1)..(666): transl_table=11
atgagttaccagcaccagtacgtagacggcacgcgcattcacttcccgctgggcaaggtggtgtgcatcggccgtaactatgccgagcatgccaaggaactggacaacccgatccccaccgaaccgctgctgttcatcaagccaggcagctgtgtggtgccggccgaaggcggcttcaagatcccggccgagcggggttcggtgcactacgaggccgaaattgccgtgctgctgggcaagccgctgtcggcccacccgagcgaggaagaggtgctggatgccatttccggctacgccccggcgctggacctgaccctgcgcgacgtgcaggccaaactgaaagagaagggcctgccgtgggaactggccaagtgctttgacggggcctgcgtactgccgccgttcgtctcggccgccagtttcgaggatgtcaccgacatcccggtgcgcctgaccgtcaacggcgaagtgcgtcaggacggcaacagcgcgatgatgctgaacccgatcgtgccgatgatccagtacatggcggcgcatttttcgctgcaggcgggggatgtgatcctcaccggtaccccggcgggtgtggggccgttcaatgtcggtgacgagctggtgctggagctgccgggtgtcagccgcttcgaaagccgagtgttctga

SEQ ID NO: 3985 - protein, 221 aa, Pseudomonas putida GB-1
MSYQHQYVDGTRIHFPLGKVVCIGRNYAEHAKELDNPIPTEPLLFIKPGSCVVPAEGGFKIPAERGSVHYEAEIAVLLGKPLSAHPSEEEVLDAISGYAPALDLTLRDVQAKLKEKGLPWELAKCFDGACVLPPFVSAASFEDVTDIPVRLTVNGEVRQDGNSAMMLNPIVPMIQYMAAHFSLQAGDVILTGTPAGVGPFNVGDELVLELPGVSRFESRVF

SEQ ID NO: 3986 - DNA, 765 bp, Pseudomonas putida GB-1
  CDS (1)..(765): transl_table=11
gtgaaacacgcccgtatccagttcgacggccaggcccatgatgtcacggtcgaaggcgaccacctgcgccttgccgatggccgcctggtccatcaagaccaggtcacctggctgccgcccgccaccggcagcatgttcgccctgggcctgaactacgccgatcacgccaaggaactggccttcgcgccgcccaccgaacctctggccttcatcaagtcgcccggcacctacaccggccacggccaggtcacctggcgcccggacaacgtcgagtacatgcactacgagtgcgagttggtcgcggtcattggcaaagcagcgaaaaacgtcaagcgtgaggacgccctggcctacgttgccggctacaccgtgtgcaacgactacgccatccgcgactacctggaaaactactaccgccccaacctgcgggtgaaaaaccgcgacgccaccaccccggtcggcccgtggatcgtcgatgcggccgatgtgccagacgtcagcaacctgaagctgcgcacctggatcaacggtgagctgaagcaggaaggcaccacggcggacatgatcttcgacatcccgcaccttatcgaatacttctccagcttcatgaccctgcagccaggcgacatgatcgccaccggcacgccagaaggcctggccgacgtggtgccgggcgatgaagtggtagtggaagtggaaggcgtcggccgcctggtcaaccgcatcgtcagcgaagctgatttcttcaagaacaacaaggcatga

SEQ ID NO: 3987 - protein, 254 aa, Pseudomonas putida GB-1
MKHARIQFDGQAHDVTVEGDHLRLADGRLVHQDQVTWLPPATGSMFALGLNYADHAKELAFAPPTEPLAFIKSPGTYTGHGQVTWRPDNVEYMHYECELVAVIGKAAKNVKREDALAYVAGYTVCNDYAIRDYLENYYRPNLRVKNRDATTPVGPWIVDAADVPDVSNLKLRTWINGELKQEGTTADMIFDIPHLIEYFSSFMTLQPGDMIATGTPEGLADVVPGDEVVVEVEGVGRLVNRIVSEADFFKNNKA

SEQ ID NO: 3988 - DNA, 660 bp, Pseudomonas putida GB-1
  CDS (1)..(660): transl_table=11
atgagccatgccctgcatgacgttgccaacggcaccctgttcggcgtcgcgctgaactaccggggtttgctgcagcagcaccaagcggcgttcgtcgaagcaccgtacaagcaactgccagtcaagccagtgctgttcgtcaaaaccccgaacacgcgcaaccagcatgaaggccaagtgctgttcccggccaacgtacagcgcctgcaacctggcccggcgctgggtgtggtgattggcaaggacgccagccgcgtcagtgtggaggacgccctggagcatgtggcgggctacaccatcgtcaacgaaaccagcctgcccgaagacagctactaccgcccggccgtcaaggccaagtgccgtgatggcttctgcccgatcggcccagcgttggtgccggccagccaggtagccaaccccgatgccctaggcctgcgcctgtatgtgaatggcgaactgcgccagcacaacaacaccgccaactgcgtgcgcacggtggcccagctgattgccgaaatcagcgagttcatgaccctgcacgctggcgacatcctgatcaccggcacccccgagggccgcgtcgatgtacagccaggcgaccgcgtcgatatcgagatcgacggcctgggcaagctgaccaaccacatcgtcgccgagtga

SEQ ID NO: 3989 - protein, 219 aa, Pseudomonas putida GB-1
MSHALHDVANGTLFGVALNYRGLLQQHQAAFVEAPYKQLPVKPVLFVKTPNTRNQHEGQVLFPANVQRLQPGPALGVVIGKDASRVSVEDALEHVAGYTIVNETSLPEDSYYRPAVKAKCRDGFCPIGPALVPASQVANPDALGLRLYVNGELRQHNNTANCVRTVAQLIAEISEFMTLHAGDILITGTPEGRVDVQPGDRVDIEIDGLGKLTNHIVAE

SEQ ID NO: 3990 - DNA, 660 bp, Marinobacter sp. ELB17
  CDS (1)..(660): transl_table=11
gtgaattatcagcaccattggcacgatgcaacccctattcatttgcccctgggcaaaattgtctgcatcggccgtaactatgccgaacacgccaaagaactgaacaacccggtcccgaccgagcccctgctgttcataaaacccgccaccgccgcggtacacctgaccagacctctggacttcccgcgggatcaaggcgccgtgcactttgaaaccgaattagcagtgctgattggcaaacccctgacgaacgcctccgccagcgatgcagaagcggcgatactgggttatggcctggcgctggatttaaccctccgtgacctgcaaagccgtcttaaaaagcaggggcacccatgggagcgggctaaaggttttgatcgcgcctgcccactcacgccgtttgtcccagccagcgatctggacaagcgccgcctacacttcagtctggatatagacggcgagcgccagcaaagcggcgacaccgccgacatgctgtttccggtggtggccctgattgcccacatcagtacacagttctctctgttacccggggatgtaatactgactggcacgcccaaaggtgtcggaccactgcaatccggacaaatcctgcaactgacgctggaagatcgcctgtcggtatcgaccagagtggtttag

SEQ ID NO: 3991 - protein, 219 aa, Marinobacter sp. ELB17
MNYQHHWHDATPIHLPLGKIVCIGRNYAEHAKELNNPVPTEPLLFIKPATAAVHLTRPLDFPRDQGAVHFETELAVLIGKPLTNASASDAEAAILGYGLALDLTLRDLQSRLKKQGHPWERAKGFDRACPLTPFVPASDLDKRRLHFSLDIDGERQQSGDTADMLFPVVALIAHISTQFSLLPGDVILTGTPKGVGPLQSGQILQLTLEDRLSVSTRVV

SEQ ID NO: 3992 - DNA, 666 bp, Marinobacter sp. ELB17
  CDS (1)..(666): transl_table=11
atgacttttatccctcgctttctcgataactcacactttggacagtcgctcggcaaaattgtctgcgttggacgaaactatgctgagcatgccaaagagctaaacaatccggtgcccactgaaccaattctgttcatcaaaccggcgacagccgctgtgcgcctggaagatacgattatcgcaccggccattcgcggtgaagtgcactatgaaacggaacttgcactgttgattggtgagccgctcagtaatgctacaccagagcaggccgagggtgctgttgttgggcttggactggcgcttgatctgaccctgcgcgatgttcaggcaaagctaaaaggaaaagggcatccatgggaaattgccaaaggtttcgatggggcctgccctctctcttccttcgtaaaagtgagagacgtgccgaactgggactcattgagttttagcctgtcgatcaacgaagaactgcgccaaatcggcaaagcttcagacatgctattttcggtaccgcagctgctggtagaaatgagccgccacttcacgctggagccaggcgacgttattttgaccgggacgccggcaggcgttggtatcctgccccgtggggcgacgctgcattttagtctggacggcgctttcgaattcacaactcaggttgcatcgtag

SEQ ID NO: 3993 - protein, 221 aa, Marinobacter sp. ELB17
MTFIPRFLDNSHFGQSLGKIVCVGRNYAEHAKELNNPVPTEPILFIKPATAAVRLEDTIIAPAIRGEVHYETELALLIGEPLSNATPEQAEGAVVGLGLALDLTLRDVQAKLKGKGHPWEIAKGFDGACPLSSFVKVRDVPNWDSLSFSLSINEELRQIGKASDMLFSVPQLLVEMSRHFTLEPGDVILTGTPAGVGILPRGATLHFSLDGAFEFTTQVAS

SEQ ID NO: 3994 - DNA, 906 bp, Bacillus sp. SG-1
  CDS (1)..(906): transl_table=11
atgaaacttctatcttttaaagtaaatgaagaagaaaaatatggtgtggtaaaagaaagtggaaagaccatttggaatttgactgagcttgaaaaagagtatgacggaaaaagtcagcttccgggttctttgcttcaagtaatccaaggtgaacagggagccttccaaaggcttgaagatctgaagcaattcggcagttcgctcgaggactcttcggaatttttatatgactggaaggatgtcactctgctctctccgataacgaaacccgaaaagaatattatgtgtgtaggaaagaactatcgtgaacacgcgattgagatgggcagcgaggcagatattcccgagcatatcatgattttcacaaaggcccctacttcagtaacgggatcatcaggggtggtttactcccactctgccttaacttcacagcttgattacgaaggtgaacttgctgtcatcattggcagaaaaggaatcaatattcaagaggacgaagcccgggattatattttcgggtacaccattttgaatgacatcacggcaagggaccttcagaagaagcataaacagttcttccttggaaaaagtcttgatacgacttgtccgatgggtccatatattgtaaccgccgatgaaatcccagcccctgaatcactgtcaattaaaacagtggtcaacggagaagttcgtcaggatgcatctgtgagcgatatgatctttccaataggtaaaattattgctgagttatctgcaggaatgacgcttgagcctggggatataatagcgacaggaaccccagcaggtgtagggaaaggatttcaccccccaagatttttgaaatctggtgacagaattgaaatttccattgaaaaaatcggtacactgatcaatacaattcaatag

SEQ ID NO: 3995 - protein, 301 aa, Bacillus sp. SG-1
MKLLSFKVNEEEKYGVVKESGKTIWNLTELEKEYDGKSQLPGSLLQVIQGEQGAFQRLEDLKQFGSSLEDSSEFLYDWKDVTLLSPITKPEKNIMCVGKNYREHAIEMGSEADIPEHIMIFTKAPTSVTGSSGVVYSHSALTSQLDYEGELAVIIGRKGINIQEDEARDYIFGYTILNDITARDLQKKHKQFFLGKSLDTTCPMGPYIVTADEIPAPESLSIKTVVNGEVRQDASVSDMIFPIGKIIAELSAGMTLEPGDIIATGTPAGVGKGFHPPRFLKSGDRIEISIEKIGTLINTIQ

SEQ ID NO: 3996 - DNA, 696 bp, Moritella sp. PE36
  CDS (1)..(696): transl_table=11
atgctatcaaattcagggactgaaatgattgattctctttatgaacaccaaagcatagataataagcaactcgcactgccagttggtaaagttgtttgtatcggtcgtaactaccttgatcacatccgtgaacttggtaatgacgtacccgagcaagcattactttttattaaaccttcaacctcattagttgcgctcgataagccgttgccacttccggttgatttaggggagtgccacaatgagttagaagtagcgctattaattaagtcaccaataacgaaaggaacgtcaattgtgctttctgagttaatctggggagttggtttagggcttgatcttactttacgtgatttacaatcatcgcttaaaggccaaggacatccttgggaaagggcaaaagcgtttgataatgcttgtccggtgactccgtttatcccacttgcagagtttggagatgtgaataaccttgatttcacgttgtccgtcaatgatcagctaaggcagcagggatgtactgctaatatgatgcgttctattgagtcattgctgactgagattacggcatgttttaccttgttacccggtgatattgtattaacaggcacgcccgcaggggtaggggtacttaattcaggcgataagcttgcattaacacttacaaaccgttataaattcggctgcgagttcatttag

SEQ ID NO: 3997 - protein, 231 aa, Moritella sp. PE36
MLSNSGTEMIDSLYEHQSIDNKQLALPVGKVVCIGRNYLDHIRELGNDVPEQALLFIKPSTSLVALDKPLPLPVDLGECHNELEVALLIKSPITKGTSIVLSELIWGVGLGLDLTLRDLQSSLKGQGHPWERAKAFDNACPVTPFIPLAEFGDVNNLDFTLSVNDQLRQQGCTANMMRSIESLLTEITACFTLLPGDIVLTGTPAGVGVLNSGDKLALTLTNRYKFGCEFI

SEQ ID NO: 3998 - DNA, 594 bp, Francisella novicida
  CDS (1)..(594): transl_table=11
atgcaaattgatctaacaaagtcaaaagtgatttgtgtcggaagaaattatgttgagcatattcatgagcttaataatgaagttcctgacaatccagttatttttataaaacctaactcaagtataactaaaactttaaggttgtcttcaaaaagagaaactcattacgaatgtgaaatagtttttatttttgataataattcaaatataaaagccgtcggtttgggattagatctgactgatagaaatttacagtcaaaacttaaagcaaaaggcctaccatgggaattggcaaaagcttttgataatagtgcggtgattagtgagtttgttgcaatagatagtaaagacattgcatttttgaatttcaaagcatataagaatgatatactaattcagcaaggtagctatgattttatgatctataaacctcaacaaattatagattttttgcagcaaaatgaaatctcaatctatgaaaatgatttactaatgacaggaactcctaaaggagttggtgtagtaaatagtggtgataagtttaaaattgagttattttgtagagataaaaaaatattagcaacgactttttag

SEQ ID NO: 3999 - protein, 197 aa, Francisella novicida
MQIDLTKSKVICVGRNYVEHIHELNNEVPDNPVIFIKPNSSITKTLRLSSKRETHYECEIVFIFDNNSNIKAVGLGLDLTDRNLQSKLKAKGLPWELAKAFDNSAVISEFVAIDSKDIAFLNFKAYKNDILIQQGSYDFMIYKPQQIIDFLQQNEISIYENDLLMTGTPKGVGVVNSGDKFKIELFCRDKKILATTF

SEQ ID NO: 4000 - DNA, 690 bp, Magnetospirillum gryphiswaldense
  CDS (1)..(690): transl_table=11
atgaccaccgccttgttcaccctgccccaacccgctgtcccgattttgggtgaaaatgcccattatccggtgcgccgggtattctgtgttggtcgcaactatgccggccatgcgcgtgagatgggctcggaccccagccgtgaaccgccgttttatttcagcaaaagcgccgacagcctggtgccgggcggcggttccatcccctatgcgccgggcaccggcaatttgcatcatgagatcgagctggtggtcgccctgggggccgatgtcttccaggccagccaggatcagacggcgtcagccatcttcggctatgccgtcggcctcgacatgactcggcgggatttgcaaaacgccgccaaggacaaggggcgcccgtgggatttgggcaagtcgttcgagttttccgcccccatcaccgccatcgtccgcgacagccggcccatgacggcgggggccatctcgctcaccgtcaacggcacagagcgccagcacggcgatatcagcgagatgatctggtcggtgcccgaaatcatcgcccatctgtcgcagtattatcatctggggctgggcgacctgatctataccggcacccccgagggcgtatcggcggtcaagcccggcgacgaactggtcggccatgtcgacaatctgccggagttgcgggtgatcatcgaagcggcggaataa

SEQ ID NO: 4001 - protein, 229 aa, Magnetospirillum gryphiswaldense
MTTALFTLPQPAVPILGENAHYPVRRVFCVGRNYAGHAREMGSDPSREPPFYFSKSADSLVPGGGSIPYAPGTGNLHHEIELVVALGADVFQASQDQTASAIFGYAVGLDMTRRDLQNAAKDKGRPWDLGKSFEFSAPITAIVRDSRPMTAGAISLTVNGTERQHGDISEMIWSVPEIIAHLSQYYHLGLGDLIYTGTPEGVSAVKPGDELVGHVDNLPELRVIIEAAE

SEQ ID NO: 4002 - DNA, 888 bp, Rhodococcus erythropolis
  CDS (1)..(888): transl_table=11
atgcgcgtggcaaatcaatccggtcgactcaagcttgtcggcgacggggtcggggtcgacgtcgaggtcgccagtcagggcagattcacctcggatccgcaggcggtcttcgatcgctgggacgagttccggctgtgggcagagtcgatcgacttccacggtgcggaaccaatagtcgagtctgatctgcaggcaccggtacctcgtcctggtcagatcttcgcggtcggagtgaattaccgcgaccacgtcgaggagtccggactctcacttcccgaggcgcctttcgtcttcacgaaattcccgggatcgatcacgggcccctacaacaacatcgaactgccggacggctccgtcgacttcgaagtcgaactggtcgcggtcatcggccgagccgcacgacacgtggatgccagcaacggctgggactacgtagcgggagtaactctcggccaagacctttccgaacgccaactacaactctcgggccccgcgccgcagcagttcagtctaggaaaatcatatgcagggttcgcaccgatcgggccggttctggtcacgccggacgaattcgccgaccccgatgacatcggagtcagcacgagactgtccggcgacgaaatgcagaactcgcggacccggcacctcatcttcccgatccccgaactcgtcgcgtacctgtcctcgatcctgcccctttcgccgggggatctcatcttcaccggcacccctgagggcatcggctggacgcgcgaacccaaacggctcatcagcaccgacgatgaactcgtctccaccgccgatgttatcggcgaaatgcgtcatcgcttcatcccgagccgccatcacagcgccacttcctcggccaggagcagcaccaatgtctga

SEQ ID NO: 4003 - protein, 295 aa, Rhodococcus erythropolis
MRVANQSGRLKLVGDGVGVDVEVASQGRFTSDPQAVFDRWDEFRLWAESIDFHGAEPIVESDLQAPVPRPGQIFAVGVNYRDHVEESGLSLPEAPFVFTKFPGSITGPYNNIELPDGSVDFEVELVAVIGRAARHVDASNGWDYVAGVTLGQDLSERQLQLSGPAPQQFSLGKSYAGFAPIGPVLVTPDEFADPDDIGVSTRLSGDEMQNSRTRHLIFPIPELVAYLSSILPLSPGDLIFTGTPEGIGWTREPKRLISTDDELVSTADVIGEMRHRFIPSRHHSATSSARSSTNV

SEQ ID NO: 4004 - DNA, 696 bp, Sphingomonas sp
  CDS (1)..(696): transl_table=11
atgaccatggtttttgacccgtctgctccgacattggcgcaggtaagcgacggacgcattttccccgtgcgcaggatattctgtgtcgggcgcaactatgccgaacatgcgcgcgagatgggacgtgacccggatcgtgagccgcccttcttcttcaccaaatgggcggaaaccatcgtgccttcggatgtcgaggtcgcttacccgtccgcaaccgccaattttcattatgaagccgaactggtggtcgccatcgggctggagggcagggatattccggtcgagaccgctctcgaccatgtgttcggctatgccaccggcctcgatatgacccgccgcgatctgcagctcaaggcgcgggccgagggtcggccatgggatacaggcaagaatgtcgagcaatcgtctcccttgggattgcttcatcctgtcgccgaatgcggccatctgtccaccggcgcgatcagcctgacggtcaatggcgaagtcaagcagagcgccgatctggcagacctgatctggccggttgcggacatcatcgcctttctttcgggcctttaccggctcctgccgggcgacctcatctacaccggcacaccggccggcgtggggccggtcgtccccggcgatgaaatcgatgtgcgcatcgatggtctcacacccacccgcattcgcatagccgagccggcgcgctga

SEQ ID NO: 4005 - protein, 231 aa, Sphingomonas sp
MTMVFDPSAPTLAQVSDGRIFPVRRIFCVGRNYAEHAREMGRDPDREPPFFFTKWAETIVPSDVEVAYPSATANFHYEAELVVAIGLEGRDIPVETALDHVFGYATGLDMTRRDLQLKARAEGRPWDTGKNVEQSSPLGLLHPVAECGHLSTGAISLTVNGEVKQSADLADLIWPVADIIAFLSGLYRLLPGDLIYTGTPAGVGPVVPGDEIDVRIDGLTPTRIRIAEPAR

SEQ ID NO: 4006 - DNA, 864 bp, Pseudomonas alcaligenes
  CDS (1)..(864): transl_table=11
atgaaaatatgccgtttcaacgaaaaccgactgggagtggtggacggggatgaggtgctggatgtgacagaggcgctgtccgtacttccctcttatgaatacccgctgcctggttacgatccattgatcaagcaccttgatgcgctgctggcccggatcgaaaccctgatcaaggatgctccgcgcattctcctggccgatgttcgcctactgagccccgtggccaaccccggcaagatcatcgcggcaccgattaactacacgcgtcatctgcaggaagtgctggcagacagcgcaatcaataacggcgttgccagtttcacccagcacatcaagaagtcggggctgttcctcaaagccaacagttctctcgccggtgccggtgagggcgtcgccctaagccatcaggatcgccgcaatgaccatgaggtcgaattggcgatagtgattggcaagacggcgcgaaacgtaccgagagagaaatcactggagtatgtcgcgggctactgcatcgggatcgacatgactgtccgcggccccgaggagcgcagcttccgcaaatcgcccgacagctacaccatcctggggccgtggctggtgacccgcgatgagatcgacagccccggtgagttgcagatgtcgttgaaggtcaacggtgaagttcggcagaacgccaataccagcgaccttatcctgggtgtcgaggagttggtcgaattcgcttcgtccttttataccctccaccctggggacgtcatcatcagcggtacgcccgaaggagtggggccagtgaatcccggtgacgcgatgctggccgaaatagagcgaatcggcaccatgaccattgccatccgctcggtgtga

SEQ ID NO: 4007 - protein, 287 aa, Pseudomonas alcaligenes
MKICRFNENRLGVVDGDEVLDVTEALSVLPSYEYPLPGYDPLIKHLDALLARIETLIKDAPRILLADVRLLSPVANPGKIIAAPINYTRHLQEVLADSAINNGVASFTQHIKKSGLFLKANSSLAGAGEGVALSHQDRRNDHEVELAIVIGKTARNVPREKSLEYVAGYCIGIDMTVRGPEERSFRKSPDSYTILGPWLVTRDEIDSPGELQMSLKVNGEVRQNANTSDLILGVEELVEFASSFYTLHPGDVIISGTPEGVGPVNPGDAMLAEIERIGTMTIAIRSV

SEQ ID NO: 4008 - DNA, 855 bp, Aspergillus oryzae
  CDS (1)..(855)
atgtcctggactcacctcatccgcttcattgctgtcgaagatagccaagagcatcttggtcagttagtcgataccactcgcgatattggtaaagatagcgtcaatggcgttgaaatcgcagcctatcttatcgatgggacgatctttgacgggcgcgtatccacgaccgtgatgcacgttaagcagcttctctccccagtcaccaaagaacagtgtagttacatccgttgtctgggcctgaactacctcgaccacgccaaagaagccaacatggcgctccccactgtccccgttatgttcaccaagcctcgtaccgcactagccaacccgtaccccgctacgattaatatccccaagtgtgcgcaggatgaaacgagtgattacgaggcagagctctgcgtcgttattggaaagacaggccgcgatatccctgaagaggaagcactagattatgttctgggttatacagcgtccaacgacgtttcggcaagggctctgcaattcgcgacttcgcagtggtcgttttcgaaggggttagacgggagttgccctgtcggacccgttcttgtttcgtcttccgtcatcaaggacccgcagacgttgtccattaaggcgattcataatgggagcgtcctgcaggatggccataccaaggaaatgctgttttcgatcaagaagcagatctcctatctatctcagggcacgaccctggaagctggcacaatcttcctgacgggcactccggctggaattggcttcacccgggagcccagaattgtgctgaaggatggtgatgagatcaatgtcgaaattgagaacattggcacgttgatcaacaaggtgcggtatgaatag

SEQ ID NO: 4009 - protein, 284 aa, Aspergillus oryzae
MSWTHLIRFIAVEDSQEHLGQLVDTTRDIGKDSVNGVEIAAYLIDGTIFDGRVSTTVMHVKQLLSPVTKEQCSYIRCLGLNYLDHAKEANMALPTVPVMFTKPRTALANPYPATINIPKCAQDETSDYEAELCVVIGKTGRDIPEEEALDYVLGYTASNDVSARALQFATSQWSFSKGLDGSCPVGPVLVSSSVIKDPQTLSIKAIHNGSVLQDGHTKEMLFSIKKQISYLSQGTTLEAGTIFLTGTPAGIGFTREPRIVLKDGDEINVEIENIGTLINKVRYE

SEQ ID NO: 4010 - DNA, 2604 bp, Aspergillus oryzae
  CDS (1)..(2604)
atggctcctggaatcctggtcaatggtttccatgacagtactacaccatcctcgacgcttcccacgcgccgacgcccgtatccccacgaaggcctccggttcgatcccaaacttaaacccaaatcgtatcgcatgaccggcacctcaccggactcaaagatcctgttcctggatgtgaatattctcgactcgacaggcaatgatccgtatcgtggtgatgtattgattcacggggagcgcattgtctcggttgggctagtccccgatgttgaagcgcttcgccatgacccgaaggtccgtgtcgtccaaggtcgtggacgtactttcatgtctggtctcggggatgcccatacacattggacttggaacaatatcgctcttgagctactgggtgacattggcgtcgaggagcacactctgattacagcacgctcggcactttgttacctggactccggatacaccatgtgctatggcgccgcctctgccaaagatcgtctggactgcgtcgttcgagatgctatcaatcgcggaaccttgcccgggccgagacttctggcaaatggcagggagatcgccaagcgagagggtgagcttgcggcgggaattactgcatttgctgaggggccactggagatgcgagaggtgatcagacatcatgctaaaatcggtgtcgatcaaatcaaattgagtatgtcaggtgaggccatcaccgaaactgtttcggccgaggaatgtttctttaccgatgaggaaacagccgcttgtgtggatgaagctcatcgcaatgggatcagggtttgctctcatgcacgggcgagagactcggtcatccaatgtgctagacacggtgtggacgtcatttaccatgcgtcctataccgatgaagagggtatgcagatactcgaaaaggtcaaggaccgggttgttgttgcccctgcgctcaactggctctatgctaccgtttacgaggcggaaccctttgggtattccatggagaaggctgagcaagtcggataccggagagagctggagacagctatcaaggcattgaaggagatgcacaagcgggggattactgtccttccaggaggtgactatggctttgcctggtgtcctcatgggacgtacgctcgggatcttgagcactttgtgaaactattggactttacgccgatggaatccattgtcgctgcgacagctgggatagccaagctatttatgcaggaggacgagctgggaaaggtacttcctgggtattatgccgactgcatcctggtcgatggtgatcctctgaaagacatcgcggtgcttcaggaccactcgaagctggatgtgattatgattaacggccgtatccacaaagctcagccgacagagttccttaatacctctgcagttcctccatcattgcaagagaagaagagctacttcaatttcgtagcctttgaagatgagttgggacgatctcgcattggccacctcgaccttggtgactccacaatccagccgttgacaatggcttccggctctccccttgccagtctgagccaggtcattgaactgggcgacgagggggttgtccgcgccgcggaagctccattcccgctgagctcagtgaagctgttgccgccgctcgcagatcgagatgttctctgtattggcgagaactaccgcaagcatatcaaggaataccgggaaagtggctttgctgctgctgataacaaagtcactgatagtccccaagtcccaactgtcttcaccaagcgcagtactagcatcactgctagtggaacagacatctatccccaccctggatttactcaaacgatggactacgaaggtgaactgggagtcatcatcggaaaagcaggcttctctatcaaggagaaagatgccatggattatatctggggctatacgatcataaatgatctatccgcccgtgagagacagcgagaccaccgccaatactttatgggaaaatcgccggacaccttctgtcctatgggaccggttgctgttgaagctgcagcgttatcaggagaaattcgagtacaaactcatgtcaatggtgaaaagcgtcaagatggcaccacagccgacctgattttctccatccctaaattgattgagacggtatctagtggcatcaccattcagccgggcgatgtaatcgcaacaggcactccacacggcgttggagttggccaccatccgccgaagttccttaagccaggcgacttggtcgaggtgagcgtcactggccttggaaagctttccaatcgtatcgcggatcccggtagcaagaaccctactatcgatcgtgtcctccaaaagccttcgagtatcccaacttataaccttgatcggacttggggcggtgttgggttaaccaaagtcggacccgaccattatatcaacgtccgagaattgggatcccaaagccccgatgcagaaacgatcgttttcatccacggccttggtgccaacctggaatactacgcgccgcttgtccaagccgcaggactagaaaggacacggcgctacgcccgcccgagcgtcctcaactgctaccttgcagaccttcgccagagaccttga

SEQ ID NO: 4011 - protein, 867 aa, Aspergillus oryzae
MAPGILVNGFHDSTTPSSTLPTRRRPYPHEGLRFDPKLKPKSYRMTGTSPDSKILFLDVNILDSTGNDPYRGDVLIHGERIVSVGLVPDVEALRHDPKVRVVQGRGRTFMSGLGDAHTHWTWNNIALELLGDIGVEEHTLITARSALCYLDSGYTMCYGAASAKDRLDCVVRDAINRGTLPGPRLLANGREIAKREGELAAGITAFAEGPLEMREVIRHHAKIGVDQIKLSMSGEAITETVSAEECFFTDEETAACVDEAHRNGIRVCSHARARDSVIQCARHGVDVIYHASYTDEEGMQILEKVKDRVVVAPALNWLYATVYEAEPFGYSMEKAEQVGYRRELETAIKALKEMHKRGITVLPGGDYGFAWCPHGTYARDLEHFVKLLDFTPMESIVAATAGIAKLFMQEDELGKVLPGYYADCILVDGDPLKDIAVLQDHSKLDVIMINGRIHKAQPTEFLNTSAVPPSLQEKKSYFNFVAFEDELGRSRIGHLDLGDSTIQPLTMASGSPLASLSQVIELGDEGVVRAAEAPFPLSSVKLLPPLADRDVLCIGENYRKHIKEYRESGFAAADNKVTDSPQVPTVFTKRSTSITASGTDIYPHPGFTQTMDYEGELGVIIGKAGFSIKEKDAMDYIWGYTIINDLSARERQRDHRQYFMGKSPDTFCPMGPVAVEAAALSGEIRVQTHVNGEKRQDGTTADLIFSIPKLIETVSSGITIQPGDVIATGTPHGVGVGHHPPKFLKPGDLVEVSVTGLGKLSNRIADPGSKNPTIDRVLQKPSSIPTYNLDRTWGGVGLTKVGPDHYINVRELGSQSPDAETIVFIHGLGANLEYYAPLVQAAGLERTRRYARPSVLNCYLADLRQRP

SEQ ID NO: 4012 - DNA, 870 bp, Aspergillus oryzae
  CDS (1)..(870)
atgactaccttctctcgtctcattcgctttttagctacagatggtcacatctactatggtgatgccattatgcccgctggtaccagtgacattggaaaggtgactagggcacaagtgattcgaggggatatttttggccagtatcaagtcacagaccaagtcgctgaggttaaaatgctcctcgcaccattggcgagggaggacattgcaacggtgcgctgtttgggattgaactatgagcagcatgcgagagaatccaacctccccattccaaagtatccggtcctcttctacaagccaatcacagccattactggtccgtatgatgatatccctatatgctctatggcgcaagacgtggagggactagactatgaatgcgaattggttcttgtcattggcaagcaagccaagaatattcccgaggagcaagcattggattatgtgctcgggtatgctgtgggaaacgatatctcccatcgcgattggcaactcaaacgtggcggaggacaatgggggttgggcaaaggcttcgatggttgggcaccttttggaccaggcatcgtctctacaaagctgatccgcaatcccaatgccttaaatatctcaactaaagtcaacggtcaaacagtccagtcatcatcaaccaaagatatgatattcggggtcgcccagacagtatcatttctctcccaaggcaccactctgctgcctggtgacctaatcttcaccggaacgccacagggtgttgggatgggccggaaacctgcggcttggcttacaaatggcgatcaggtagaggtctctctggaagatgtgggttcatgcgttaaccgagtcgcctttgaaaagccaccatcgaagctatga

SEQ ID NO: 4013 - protein, 289 aa, Aspergillus oryzae
MTTFSRLIRFLATDGHIYYGDAIMPAGTSDIGKVTRAQVIRGDIFGQYQVTDQVAEVKMLLAPLAREDIATVRCLGLNYEQHARESNLPIPKYPVLFYKPITAITGPYDDIPICSMAQDVEGLDYECELVLVIGKQAKNIPEEQALDYVLGYAVGNDISHRDWQLKRGGGQWGLGKGFDGWAPFGPGIVSTKLIRNPNALNISTKVNGQTVQSSSTKDMIFGVAQTVSFLSQGTTLLPGDLIFTGTPQGVGMGRKPAAWLTNGDQVEVSLEDVGSCVNRVAFEKPPSKL

SEQ ID NO: 4014 - DNA, 699 bp, Aspergillus oryzae
  CDS (1)..(699)
atggcagcctcaatcagagccaattgccgcaaggtcatttgcattggccgcaactatgctgaccatattacggagctcaacaacaccacgcccaagcaaccgttcttcttcttgaagcccgcttcggccattctgtgtcctggcgagggccccgtcttgcgtcctaagggaacaaacctacactatgaggtggaattagcgctggtgatgggcaagacacttcgggatcatgacccgaacgatgagcagggagctttggatgctattcatagctaccttctcggcattgacatgactgcccgcaacgtacaagacgaagctaagaagaagggtctcccatggtccattgccaaggggtttgacaccttcctacctgtctcccaagaaatcgccaaatcgcgaatccccaaccctcacgatgccttccttcgtttgagcgtcggctccgaggtgcgccaggccgactcgaccggattgatgctctaccggatccctagactgctgggtgagatctcgcgagttatgactttggagaagggcgacgtggtcttgactggtacaccgaagggtgtcggagaggtgaagtccggagatgtgatgagagcttccatcgaagtcgatggaaaggagattaaggaaggccggattgaggttgaggtgaaggatcgcgagggccgctacctgtacgctgagacttaa

SEQ ID NO: 4015 - protein, 232 aa, Aspergillus oryzae
MAASIRANCRKVICIGRNYADHITELNNTTPKQPFFFLKPASAILCPGEGPVLRPKGTNLHYEVELALVMGKTLRDHDPNDEQGALDAIHSYLLGIDMTARNVQDEAKKKGLPWSIAKGFDTFLPVSQEIAKSRIPNPHDAFLRLSVGSEVRQADSTGLMLYRIPRLLGEISRVMTLEKGDVVLTGTPKGVGEVKSGDVMRASIEVDGKEIKEGRIEVEVKDREGRYLYAET

SEQ ID NO: 4016 - DNA, 888 bp, Aspergillus oryzae
  CDS (1)..(888)
atgtctaaaatcgcatcgaccttctcgcgccttgtgcgctttgtccctaagtcgaacccgtctaaggttctgatcggcgagccggtagatgcgcaacttgatgtcggattggctctttaccagggcaaggaagtctcagtgcgaccattcactggagcatccgtccttaacccaggccagaagacagagtccactgagatcatcagccggattctctcccctctgtcgcaaaatgaggtcggatcgatcagatgtattgggctgaactatacctctcacgccgccgagatgaaactctctatcccagatgttccaactttgttcattaagccaccgacagccctctcggacccatggcctgcgccaaccattcttcctaagatcacacaggttgataacacgggcgactatgagtccgaaatggttattgttattggtcgcgatgcgaaggatgttagcgaggctgatgcactggactatgtccttggctacacggcagcaaacgatgtttcaagccgcacgtcacagatgaaccagagtcaatggtgtttctccaagggattcgacacctcgtgcccgatcggtccgaccctcgtttctgcggcactgttcccggatgccagcaaattccagatccgcggcctgaagaacggaaaagtgctgcaggattgtcctctaacggacttgatattcagcgtgcccaagctcgtcagctttttgtctcagggaacaactctgccagcaggaactattatcttgactggaactccgcctggcgtgggagctgcaaagaaccctaaggagttcttgaagaatggagatgagttcgccgttgaattgcttcctcacgtcggaaccctggtgacaaagattgaaaaccataaatga

SEQ ID NO: 4017 - protein, 295 aa, Aspergillus oryzae
MSKIASTFSRLVRFVPKSNPSKVLIGEPVDAQLDVGLALYQGKEVSVRPFTGASVLNPGQKTESTEIISRILSPLSQNEVGSIRCIGLNYTSHAAEMKLSIPDVPTLFIKPPTALSDPWPAPTILPKITQVDNTGDYESEMVIVIGRDAKDVSEADALDYVLGYTAANDVSSRTSQMNQSQWCFSKGFDTSCPIGPTLVSAALFPDASKFQIRGLKNGKVLQDCPLTDLIFSVPKLVSFLSQGTTLPAGTIILTGTPPGVGAAKNPKEFLKNGDEFAVELLPHVGTLVTKIENHK

SEQ ID NO: 4018 - DNA, 672 bp, Unknown
  Unidentified
  CDS (1)..(672)
atggcagcagcctgtgagaagcttctgcaactgagcaccacgatcgtcgccgctggcagaaactacgctgcccatgctaaagaattaggcaacgccgttcccaaggagccggtgttgtttctgaagccaacttcctcctacttgccaaatggcggaacaattcaaatcccacacaatgagggatctctgcatcatgaggtcgagctggctgtcgtcatcgccaaaaaagctcgtgatgtcccccaatcatctgccatgcattatgttgctggttatgcacttgcactggatatgactgccagggatctgcaagctactgcaaagtctgcaggtcttccatggactttggcaaaaggccaggacactttcacaccaattagttcaattttgccaaagaatctggtgccaaacccggatgatctagaattgtggttaaaggtagatgaggagattcggcaaaagggctcaaccaaggacatgatctttaagatcccatttataattagtcacataagttctgtcatgacattgtttgaaggagatgtgatactaactggcactcctccaggtgttggccctgtgaaagaaggtcaaacaataaccgccggcattacaggccttgtcgacgtgcaattcaatgttgaaaaaagaaaaaagccttcaagctcttga

SEQ ID NO: 4019 - protein, 223 aa, Unknown
  Unidentified
MAAACEKLLQLSTTIVAAGRNYAAHAKELGNAVPKEPVLFLKPTSSYLPNGGTIQIPHNEGSLHHEVELAVVIAKKARDVPQSSAMHYVAGYALALDMTARDLQATAKSAGLPWTLAKGQDTFTPISSILPKNLVPNPDDLELWLKVDEEIRQKGSTKDMIFKIPFIISHISSVMTLFEGDVILTGTPPGVGPVKEGQTITAGITGLVDVQFNVEKRKKPSSS

SEQ ID NO: 4020 - DNA, 702 bp, Escherichia coli
  CDS (1)..(702): transl_table=11
atgactcaatatgtattcgaaccacaagcgcccgttaccgtaccggttgttggcagtgataaacaattccccgtgcgtcgcgtttactgcgtcgggcgtaactatgccgcccacgcccgcgaaatgggctttgatccggatcgtgaaccacccttcttcttctgcaaaccagcagatgccgttattccggtcgccgctggcgaaacgctggcgctgccatatccggcgcagaccgataactatcattacgaaattgaactggtagtggcgattggtaaaaaaggcagcgatatcccgctggaacacgcccatgaatatgtctggggttatgccacgggtcttgatatgactcggcgtgaccgtcaaatggaaatgcgccagatgggccgcccgtgggaaatcggtaaagcgtttgatctctcagcgcccatcgcgccgctgcacaaagcccgcgatatcggcggtattgataatgcgccaatctggttacaggttaacggcgaagatcatcagcgcagcgatattcgccatctcatctggtcggtgaatgaaaccatcagctatctgtcaggcttctttgagctgcaaccgggcgatctgatcttcaccggtacgccggaaggggttggcccggtagtgaaaggtgatgtgatcacaggcaacgtcgagggcttaacgcctatcgcggtgaagattgtctga

SEQ ID NO: 4021 - protein, 233 aa, Escherichia coli
MTQYVFEPQAPVTVPVVGSDKQFPVRRVYCVGRNYAAHAREMGFDPDREPPFFFCKPADAVIPVAAGETLALPYPAQTDNYHYEIELVVAIGKKGSDIPLEHAHEYVWGYATGLDMTRRDRQMEMRQMGRPWEIGKAFDLSAPIAPLHKARDIGGIDNAPIWLQVNGEDHQRSDIRHLIWSVNETISYLSGFFELQPGDLIFTGTPEGVGPVVKGDVITGNVEGLTPIAVKIV

SEQ ID NO: 4022 - DNA, 747 bp, Streptomyces parvulus
  CDS (1)..(747): transl_table=11
gtgctgatcgcgcgcgccgccgtcggagaagaccgaacgtacgcccgcgtcgacacggacacagggctgatccacctcctggccggcactccctacgacgagatccggccgaccggcgaaaccagaccgcttgccgaggcccgcctgctcgcaccggtcgaacccagcaaagtgctggtcgcaggacgcaattacggcgatgtcgtcacaccggacctggtggtcttcatgaagccgtccacctctgtcgtcggccccaggagcaccgtcctgctgccggcggaggccaagcaggtccggtacgagggagaactcgccgtggtgatcgggcgccgctgcaaagacgtccccgaagacaccgcggaccaggccgtgttcggctacacctgcgccaacgacgtcaccgcctgggacgtcggggaaccgaagggccactggaccaaggcgaagagcttcgacacattctgcccgctgggaccatggatccgcaccgatctcgaccccgctgacctcgtcctgcgcacaaccgtgaacggcacgctgcgccaggacggctccaccaaggaaatgaacaggaatgtccgcgccctcgtgtcccgttgcagctcactgatgacgctgctgcccggagacgtgatcctcaccggcacaccggcgggcgccggcgtgctgcgtccgggtgacgaggtcgtcgtcgagattgacgggatcggttcgctcgcgaatccgatcggcgtggccaagtag

SEQ ID NO: 4023 - protein, 248 aa, Streptomyces parvulus
MLIARAAVGEDRTYARVDTDTGLIHLLAGTPYDEIRPTGETRPLAEARLLAPVEPSKVLVAGRNYGDVVTPDLVVFMKPSTSVVGPRSTVLLPAEAKQVRYEGELAVVIGRRCKDVPEDTADQAVFGYTCANDVTAWDVGEPKGHWTKAKSFDTFCPLGPWIRTDLDPADLVLRTTVNGTLRQDGSTKEMNRNVRALVSRCSSLMTLLPGDVILTGTPAGAGVLRPGDEVVVEIDGIGSLANPIGVAK

SEQ ID NO: 4024 - DNA, 687 bp, Drosophila melanogaster
  CDS (1)..(687)
atgcaactaactcaaatcctcaggatggcgtgccaaaaccaaaatgccgccaacttcttgagcaatggcaagaaaattgtgggggtggctctcaattacatggacgttgtgctggccaggaacgttcccgtgcccaaggagccgctcgtcttcctcaagcccacatcttcgtacctccaggagggtcagcccattgtgttaccaaaagtctttaccaaggtggcatatgaagtggaactaggcgtggtgattggaaagccctgcaagaacgtatccaaggcagatgccatgagctatgtggcaggatactgcctggctttggatctaactgcacagtgcaatttgggaccagctcgggcggccggtcatccgtggaccttgggcaagggatttgatacttctacgcccgtgtcccagtttatacccatcgaaaaagtgacggacccgcacaatctgccgctttggctcaccgtcaatggagaccttaagcaaaacgggtgcactgcagacttaatattcaaggtgcccgacatcatttcctacgtgtccaagtacatgaccctggaggccaacgatctgatccttaccggaacgcccaatggtgccgatgcgttcaaggcaggcgatgtaattcagtgcggaatggccgatctcgctaaattgaccttccaagtggatgctgaataa

SEQ ID NO: 4025 - protein, 228 aa, Drosophila melanogaster
MQLTQILRMACQNQNAANFLSNGKKIVGVALNYMDVVLARNVPVPKEPLVFLKPTSSYLQEGQPIVLPKVFTKVAYEVELGVVIGKPCKNVSKADAMSYVAGYCLALDLTAQCNLGPARAAGHPWTLGKGFDTSTPVSQFIPIEKVTDPHNLPLWLTVNGDLKQNGCTADLIFKVPDIISYVSKYMTLEANDLILTGTPNGADAFKAGDVIQCGMADLAKLTFQVDAE

SEQ ID NO: 4026 - DNA, 846 bp, Burkholderia cepacia
  CDS (1)..(846): transl_table=11
atgaaattggccagctttttgttggatgggaagcgtcgcagtggggccttgactgacaagggcctcgcagtgttcgatgtcgacggcgacatcggtgacttgctgcgcaaagggaccgacctcgcgggcttcgacgcattgctcgccaagagctcgcgcatcgtcgacgcggccagtgtgacctttgtgcaaccgtcggccgagccgcccaaaatcttctgtgtgggattgaactacgctgatcacacggccgagagtccgtacgaacagcccgactatccgaccatctttttgcgcgtggctaccgctacgacggggcacggcgcgagtattgccttgcctgatctgagcgagcaactcgactatgaaggcgagatgattgctgtgctgggcaagggtggcaagcgtatcccgaaggagcgtgcgcatgagcacgtgtttggctacgctgtcggcaacgaggtgtcggttcgcgactaccagttcaagtcgccgcagtggaccatcggcaagaacttcgacggcaccggagcatggggaccgtacatcgtcaccgccgacgaactcccgctggggggacatggtctgaagatcgaggttcgcctgaacggcaagacggttcagtcatcgaataccgggcacatgatctttgacgtcgccaccatcatctcgaccatcagccaggccatcactttgcagcccggtgacatcatcttcacgggaacgcctgctggtgtgggccttggccacaagcctccgctgtggatgaaggatggcgacaaggtcgaggtcgagatcgagggcatcggtctgctcaagaactcgatcgccaaagaggtcacttga

SEQ ID NO: 4027 - protein, 281 aa, Burkholderia cepacia
MKLASFLLDGKRRSGALTDKGLAVFDVDGDIGDLLRKGTDLAGFDALLAKSSRIVDAASVTFVQPSAEPPKIFCVGLNYADHTAESPYEQPDYPTIFLRVATATTGHGASIALPDLSEQLDYEGEMIAVLGKGGKRIPKERAHEHVFGYAVGNEVSVRDYQFKSPQWTIGKNFDGTGAWGPYIVTADELPLGGHGLKIEVRLNGKTVQSSNTGHMIFDVATIISTISQAITLQPGDIIFTGTPAGVGLGHKPPLWMKDGDKVEVEIEGIGLLKNSIAKEVT

SEQ ID NO: 4028 - DNA, 672 bp, Arabidopsis thaliana
  CDS (1)..(672)
atggcgacgtcgatgatacagaggatgttcaagcaagggacgaagatcgtctgcgtcggccgtaactacgccgctcacgccaaagaactaggcaacgccgtccccaaggaaccagttatattcttgaagccaacatcatcatacttagaaaatggaggaacaattgagatcccacatcctttggattcacttcaccatgaagtagaactcgctttagtgattggacagaaagctagagatgtacctgaatcaatagccatggattacattggaggatatgcggttgctcttgatatgactgctagggaactccaagcttctgctaaggcatctggtctcccatggacggttgcgaaaggacaagataccttcactcctatcagctctgttctgccaaaggcgatggtgcgtgatcccgataatctagaactttggctcaaggttgatggtgaaacaagacagaagggtttgaccaaagatatgatattcaaggtcccctacctcattagctacataagttctataatgaccctttacgaaggagatgtcatcttgacaggcacaccagaaggtgttggacctgtaaagataggtcagaagataacggccggaatcaccggtctatctgaagttcaattcgatgtggagaggcgtgtaaagcccttgagctaa

SEQ ID NO: 4029 - protein, 223 aa, Arabidopsis thaliana
MATSMIQRMFKQGTKIVCVGRNYAAHAKELGNAVPKEPVIFLKPTSSYLENGGTIEIPHPLDSLHHEVELALVIGQKARDVPESIAMDYIGGYAVALDMTARELQASAKASGLPWTVAKGQDTFTPISSVLPKAMVRDPDNLELWLKVDGETRQKGLTKDMIFKVPYLISYISSIMTLYEGDVILTGTPEGVGPVKIGQKITAGITGLSEVQFDVERRVKPLS

SEQ ID NO: 4030 - DNA, 864 bp, Pseudomonas alcaligenes
  CDS (1)..(864): transl_table=11
atgaagatatgtcgattcaatgaagatcgggttggtgtggtgattgaaagcacggtgacagatgttactgattttgttaaatccgaattgggctcctattgttggccgtttcccaagggagatgtttttatagccaacctcagtgcgatgatacctggcttaaccgagtatgttgagaccggaaatgccactagttacgagttggatgctgtaacgttaattagcccagtgggtaatccgggtaagattatcgcggctccggtaaattatgctgaccatcttgacgaatcaaatcaagataaaggtataaatttcggaacggaaatttcactgattgataaatacgctctatttctcaaggctggaagctcttctgttggtccagatgagggaataagtcttccagcagttgaaggtcgaagattcgatcatgaagtcgagttggcacttgtgataggaaaagaaacccgaagagtgactgttgacgaagcgctgtcttcagttgcaggttattttatagggcttgatatcacaatgaggggaactgaagatcggagttatagaaagtcatttgatagctttactgtaatgggcccgtggctcgtcacctcagatgcgtttgggtccccggaaggagtggcgttttctctctctgtaaatggagagcaaagacaaaatgccaacaccaatgatttggtgtggtccgtggctaaaattatttcagttgcttcccatgcttacactctttatcccggagacgttattttgaccggaacacctgctggagtggggccaatcaaagccggtgacaaaatttctgcgagtatcgatcgtattggtagcatggaagttcctgtgaaataa

SEQ ID NO: 4031 - protein, 287 aa, Pseudomonas alcaligenes
MKICRFNEDRVGVVIESTVTDVTDFVKSELGSYCWPFPKGDVFIANLSAMIPGLTEYVETGNATSYELDAVTLISPVGNPGKIIAAPVNYADHLDESNQDKGINFGTEISLIDKYALFLKAGSSSVGPDEGISLPAVEGRRFDHEVELALVIGKETRRVTVDEALSSVAGYFIGLDITMRGTEDRSYRKSFDSFTVMGPWLVTSDAFGSPEGVAFSLSVNGEQRQNANTNDLVWSVAKIISVASHAYTLYPGDVILTGTPAGVGPIKAGDKISASIDRIGSMEVPVK

SEQ ID NO: 4032 - DNA, 678 bp, Pyrococcus abyssi
  CDS (1)..(678): transl_table=11
gtgataaggctaccgtttagagatgggtattacgaggttaggcctaccaagataatagccctcgcaaagaattacgccgagcacgctagggagatggggagcgaaccccctgaagagcccgtgatattcttaaagccaccttcggctttaataggcccaaactcagtaatagtccttccgaggaggagtaagagggttgatcacgaggttgaattggccgttataataggtaagagggccaagaacgttccggctgaaaaggccttcgactacatcctgggatacacgatccttttggacataacggctagagacctacaggcagaggcaaggaagaaaggctatccctggactgtttcgaaaggtttcgacactttcgcccccataggccccaggatagttgataagagggaacttgatccctcggatctcgagataggtctaaaggtgaacggtaaggttaggcaacttggaaggacgagtgagatgatattcaagattcccgagttgatagagtacataagctcgatcatgacacttgagccgggagacataatagcgacgggaacgcctcctggggtaggtcctttgaggcatggggataagatagaggcctgggttgagggaataggcgttctagaggaagaggtcatcgccgaggattcgatactctgctaa

SEQ ID NO: 4033 - protein, 225 aa, Pyrococcus abyssi
MIRLPFRDGYYEVRPTKIIALAKNYAEHAREMGSEPPEEPVIFLKPPSALIGPNSVIVLPRRSKRVDHEVELAVIIGKRAKNVPAEKAFDYILGYTILLDITARDLQAEARKKGYPWTVSKGFDTFAPIGPRIVDKRELDPSDLEIGLKVNGKVRQLGRTSEMIFKIPELIEYISSIMTLEPGDIIATGTPPGVGPLRHGDKIEAWVEGIGVLEEEVIAEDSILC

SEQ ID NO: 4034 - DNA, 660 bp, Escherichia coli
  CDS (1)..(660): transl_table=11
atgtatcaacatcacaactggcaaggtgcgctgctggattatccggtgagtaaagtagtctgtgttggcagtaactatgccaaacatattaaagagatgggcagcgcagtgcccgaagagccagtgctgtttattaaaccagaaacggcactgtgcgatctgcggcagccattggcgatcccatccgatttcggttcagttcatcatgaagtcgaactggcggtgttgattggcgcgacactgcgtcaggctacggaagagcatgtccgcaaagccattgccggttatggcgtggcgctcgatctgacattgcgtgatgttcagggaaaaatgaagaaagccgggcagccgtgggaaaaggctaaagcgtttgataactcttgtccgctttccgggtttattcccgcggcggaatttaccggcgacccgcaaaatacaacgctgagcctgagcgtaaacggcgaacaacgccagcaaggtacgactgcggacatgatccataaaatcgttccgctgatcgcttatatgagcaagttttttaccctcaaggccggtgacgttgtgttgacaggcacgcctgatggcgtcggcccgttgcaaagcggtgatgagctgacagtcactttcgatgggcattctttgacaactcgcgttttgtaa

SEQ ID NO: 4035 - protein, 219 aa, Escherichia coli
MYQHHNWQGALLDYPVSKVVCVGSNYAKHIKEMGSAVPEEPVLFIKPETALCDLRQPLAIPSDFGSVHHEVELAVLIGATLRQATEEHVRKAIAGYGVALDLTLRDVQGKMKKAGQPWEKAKAFDNSCPLSGFIPAAEFTGDPQNTTLSLSVNGEQRQQGTTADMIHKIVPLIAYMSKFFTLKAGDVVLTGTPDGVGPLQSGDELTVTFDGHSLTTRVL

SEQ ID NO: 4036 - DNA, 780 bp, Saccharomyces cerevisiae
  CDS (1)..(780)
atgagctacaattatttgaaggcagctagaaaaattatatgcattgggcgtaattacgcagcgcatatcaaagagctgaacaattcaactccaaaacaaccgttttttttcctaaaaccaacctcgagtattgtgacaccattgtcttcatcattggtcaagaccactagacctgcaaactcgactttcaatggtttaaatgaagacggaactaaccccgggcccatttttatcccacgcggtgtgaaggttcatcacgaaattgagttggcattgattgtgagcaaacatttgtccaatgtcactaagatgaaacccgaagaagtctatgactctattagtggtgtagctctagcattggatcttacagcaagaaatgtccaagatgaagccaaaaagaaggggctaccttggactataagcaagggttttgacaccttcatgccaatctctgctatagtctcccgcgagaagttctcatcctacaaatcaaacttacaggatattttcagagtcaagtgctctgttaacggacagttgagacaagatggtggtactaacctcatgttgcacccactccataaaatactgcaacacatatctaccatgatatctctggaaccgggtgatatcattttgactggtacacctgcaggtgtaggcgagttaaagcctggtgaccgtgttcactgtgagctattgcagaataatgacaatattgtcgacatgaacttcgaatgtgaaaatcggccgggaccatatgaatttagagaaacataa

SEQ ID NO: 4037 - protein, 259 aa, Saccharomyces cerevisiae
MSYNYLKAARKIICIGRNYAAHIKELNNSTPKQPFFFLKPTSSIVTPLSSSLVKTTRPANSTFNGLNEDGTNPGPIFIPRGVKVHHEIELALIVSKHLSNVTKMKPEEVYDSISGVALALDLTARNVQDEAKKKGLPWTISKGFDTFMPISAIVSREKFSSYKSNLQDIFRVKCSVNGQLRQDGGTNLMLHPLHKILQHISTMISLEPGDIILTGTPAGVGELKPGDRVHCELLQNNDNIVDMNFECENRPGPYEFRET

SEQ ID NO: 4038 - DNA, 666 bp, Schizosaccharomyces pombe
  CDS (1)..(666)
atgttgtcacgggccggcaaggttgtttgtattggaagaaactatgctgctcacattcgtgagttgaacaaccccttccccaccaaacctttctttttccttaaacctactagtgccattgttgaacctggccatggaaacttaataattcctcccgatgtatctgctcattatgaagttgaactaggattgataatgaaggatcgcctgcctgccagacgtccagtatcttccaatagctggctcgattcaattggagcctactttgtaggaatcgatatgaccgctagaaacatacaaaatgaagcgaagaaaaaaggtctcccttggtccttcgcgaaaggttatgacacctttttacccgttggccccatcattcctaagcatcttatacctgatccccacaatgtcattctggaattgtcacttaacggcaaggtggtccagaaggacagtacatctctgatgttaaacaagattcctaaaatattctcgtcaatcactgaggccatgtccttgaatcctggtgatttggtgctaacaggtactccaaagggcgttggtcctgtggtaccgggagatattttgtctgctcggttgcttactgcgcaggagcaggaaataattcctagtaaatttgaaatcaaagcagagaaatgtgattaa

SEQ ID NO: 4039 - protein, 221 aa, Schizosaccharomyces pombe
MLSRAGKVVCIGRNYAAHIRELNNPFPTKPFFFLKPTSAIVEPGHGNLIIPPDVSAHYEVELGLIMKDRLPARRPVSSNSWLDSIGAYFVGIDMTARNIQNEAKKKGLPWSFAKGYDTFLPVGPIIPKHLIPDPHNVILELSLNGKVVQKDSTSLMLNKIPKIFSSITEAMSLNPGDLVLTGTPKGVGPVVPGDILSARLLTAQEQEIIPSKFEIKAEKCD

SEQ ID NO: 4040 - DNA, 681 bp, Oryza sativa
  CDS (1)..(681)
atggcggcggcggcgcagaggctcctggcggccagcacgaagatcgtaggggtgggccgcaacttcgtcgcccacgccaaggagctcgggaaccccgtccccaaggagccggtgctgttcctgaagcccacctcgtcgttcctccacgcgggcgtggccggcgccgccatcgaggtgccggagccggtcgagtcgctgcaccacgaggtcgagcttgccgttgtcatctcccagcgcgcgcgcgacgtccccgaagcatccgccatggacttcgtaggaggttatgcacttgctttggacatgacagcaagagaacttcagtctgcggctaagtctgcaggtcttccttggactttgggtaaagcacaggacaccttcactccaattagtgcagtgattccaaaatcagatgtagctaatcctgatgatctagagctctggctaaaggttgatgatgaacttaggcagaagggatctacaagtgatatgatattcaagataccatctctaataagttatatcagttccatcatgacattaatggagggtgatgttatactgaccggtactcctgagggtgtaggcccagtacgaccaggacagaagatcaaagctggtataaccggcctcattgatgttgagtttgatgttcagaagcgcaagcggtcattttctacttga

SEQ ID NO: 4041 - protein, 226 aa, Oryza sativa
MAAAAQRLLAASTKIVGVGRNFVAHAKELGNPVPKEPVLFLKPTSSFLHAGVAGAAIEVPEPVESLHHEVELAVVISQRARDVPEASAMDFVGGYALALDMTARELQSAAKSAGLPWTLGKAQDTFTPISAVIPKSDVANPDDLELWLKVDDELRQKGSTSDMIFKIPSLISYISSIMTLMEGDVILTGTPEGVGPVRPGQKIKAGITGLIDVEFDVQKRKRSFST

SEQ ID NO: 4042 - DNA, 660 bp, Brassica napus
  CDS (1)..(660)
atggcgacgtcgaagatagagaggcagttcaagcaaggcaccaagatcgtcggcgtcagtcgcaactacgccgctcatgtcaacgcccttcccaaggaaccagttatattcttaaagccaacttcatcatacttggagaacggaggaacgattgagatcccacatcctctggattcactttatcatgaggtggagcttgctgtagtgatcgcaaagaaggctagagatgtacccgagtcaaccgccatggaatacgttggaggatatgcggttgctcttgatatgtccgctagggaaatccaagcttccgccaaggcatctggtctcccttggactcttggcaaaggacaggatactttcacaccaataggctctgttctgccaaaggcgatggtgcacgatcccgataatctggaactttggctgaaggttgatggtgaaacaagacaaaagggtttaacaaaagatatgatcttcaaggtcccgtaccttatcagctacataagttctttcatgactctctacgaaggagatgtcatcttgacaggtacaccagaaggtgttggacctgtaaagataggtcagaagataaccgcagggatcactggtctatctgaagttcagttcgatgttgataggcgtgtaaaacctctgagctaa

SEQ ID NO: 4043 - protein, 219 aa, Brassica napus
MATSKIERQFKQGTKIVGVSRNYAAHVNALPKEPVIFLKPTSSYLENGGTIEIPHPLDSLYHEVELAVVIAKKARDVPESTAMEYVGGYAVALDMSAREIQASAKASGLPWTLGKGQDTFTPIGSVLPKAMVHDPDNLELWLKVDGETRQKGLTKDMIFKVPYLISYISSFMTLYEGDVILTGTPEGVGPVKIGQKITAGITGLSEVQFDVDRRVKPLS

SEQ ID NO: 4044 - DNA, 687 bp, Triticum aestivum
  CDS (1)..(687)
atggcagcagcggcggcgcagaggcttcttgcgtcgagcacgaagatcgtcggggccgggcgcaactacatctcccatgccaaggatctcggcaaccctgtcctcaaggaacccgtcctgttcctgaagcccacgtcgtcattcctccacgccggcccgaccgccggccccatcgaggtgcccgagccgctcgagtcgctgcaccacgaggtcgaactcgccgtcgtcatctcccggcgcgcgcgcgatgtccccgaggcctccgccatggatttcgtcggaggttatgcacttgctttggacatgtcatcaaacgatctgcaatcagcttctaagtctgcaggtcttccttggactttgggtaaagtacaggacacctttactccaattagtgcggtggttccgaaatctgcaatcgctaatccctatgacctagaactgtggctaaaggtagatggtgaacttaggcagaagggacttacaagtgatatgatattcaagattccttttctaatcagttatatcagttccatcatgacattaatggagggcgatgtgatattaactggtactcctcccgatggcgttggtcctgtccgagtgggacagaagattaatgctggtataactgacctcattgatgtagagtttgatgttgagagacgcaaacgttcattttcttactga

SEQ ID NO: 4045 - protein, 228 aa, Triticum aestivum
MAAAAAQRLLASSTKIVGAGRNYISHAKDLGNPVLKEPVLFLKPTSSFLHAGPTAGPIEVPEPLESLHHEVELAVVISRRARDVPEASAMDFVGGYALALDMSSNDLQSASKSAGLPWTLGKVQDTFTPISAVVPKSAIANPYDLELWLKVDGELRQKGLTSDMIFKIPFLISYISSIMTLMEGDVILTGTPPDGVGPVRVGQKINAGITDLIDVEFDVERRKRSFSY

SEQ ID NO: 4046 - DNA, 687 bp, Hordeum vulgare
  CDS (1)..(687)
atggcagcagcggcggcgcagaggctccttgcggcgagcacgaagatcgtcggggccgggcgcaactacatctcccatgccaaagatctcggcaaccctgtcctcaaggaacccgtcctgttcctgaagcccacgtcgtcgtttctccacgctggcccgaccgccggccccatcgaggtgcccgagccgctcgagtcgctgcaccacgaggtcgagctcgccgtcgtcatctcccggcgcgcgcgcgatgtccccgaggcctccgccatggatttcgtcggaggttatgcacttgctttggacatgtcatcaaacgatctgcaatcagcttctaagtctgcaggtcttccttggacattgggtaaagtacaggacacctttactccaattagtgcggtggttccgaaatcagcgatcactaatccctatgatctagaactgtggctaaaggtagatggtgaacttaggcagaagggacttacaagtgatatgatattcaagattccttttctaatcagctatatcagttccatcatgacattaatggagggtgatgtgatattaactggtactccccccgatggtgtaggtcctgtccgagtaggacagaagattagtgctggtataactgacctcattgatgtagagttcgatgttcagagacgcaaacgttcattttctaactga

SEQ ID NO: 4047 - protein, 228 aa, Hordeum vulgare
MAAAAAQRLLAASTKIVGAGRNYISHAKDLGNPVLKEPVLFLKPTSSFLHAGPTAGPIEVPEPLESLHHEVELAVVISRRARDVPEASAMDFVGGYALALDMSSNDLQSASKSAGLPWTLGKVQDTFTPISAVVPKSAITNPYDLELWLKVDGELRQKGLTSDMIFKIPFLISYISSIMTLMEGDVILTGTPPDGVGPVRVGQKISAGITDLIDVEFDVQRRKRSFSN

SEQ ID NO: 4048 - DNA, 678 bp, Brassica napus
  CDS (1)..(678)
atggcgacttcgatgattcagaggatgttcaagcaaggcacgaagatcgtcggcgttggtctcaattacgcttcacacgccaaagagcttggcaacgcactcccaaaggacccgattgtgttcttaaagccaacctcttcctacttggaaaacggtggaacgattgagatcccacatcctctggactcacttcaccatgaggttgaactcgctgtagtgatcggacacaaggctagagatgtccctgaacgtttagccatggattacatcggaggatatgcgattgctcttgatatgactgctaaggaacaccacgtttctgccatggcatctggtctgccgtgtacacttgctaaagcacaggataccttcactcccatcagctctgttctaccaaaggcaatggtggttgatcccaataacctggaactctggcttaaggttgatgatgagataagacaaaagggttggacaaaggatatgatctacaaggtcccatacctcatcagctacataagttctgtaatgacccttttcaaaggagatgtcatcttgacaggtacaccagaagggataggacctgtaaagattggtcagaagataaccgctggaatcactggtctttctgaagttcagttcaatgtcggtaggcgtgtaaaaccattgttgaactcctag

SEQ ID NO: 4049 - protein, 225 aa, Brassica napus
MATSMIQRMFKQGTKIVGVGLNYASHAKELGNALPKDPIVFLKPTSSYLENGGTIEIPHPLDSLHHEVELAVVIGHKARDVPERLAMDYIGGYAIALDMTAKEHHVSAMASGLPCTLAKAQDTFTPISSVLPKAMVVDPNNLELWLKVDDEIRQKGWTKDMIYKVPYLISYISSVMTLFKGDVILTGTPEGIGPVKIGQKITAGITGLSEVQFNVGRRVKPLLNS

SEQ ID NO: 4050 - DNA, 678 bp, Brassica napus
  CDS (1)..(678)
atggcgacttcgatgattcagaggatgttcaagcaaggcacgaagatcgtcggcgttggtctcaattacgcttcacacgccaaagagcttggcaacgcactcccaaaggacccgattgtgttcttaaagccaacctcttcctacttggaaaacggtggaacgattgagatcccacatcctctggactcacttcaccatgaggttgaactcgctgtagtgatcggacacaaggctagagatgtccctgaacgtttagccatggattacatcggaggatatgcgattgctcttgatatgactgctaaggaacaccacgtttctgccatggcatctggtctgccgtgtacacttgctaaagcacaggataccttcactcccatcagctctgttctaccaaaggcaatggtggttgatcccaataacctggaactctggcttaaggttgatgatgagataagacaaaagggttggacaaaggatatgatctacaaggtcccgtacctcatcagctacataagttctgtaatgacccttttcaaaggagatgtcatcttgacaggtacaccagaaggtataggacctgttaagattggtcagaagataaccgctggaatcactggtctttctgaagttcagtttagtgtcggtaggcgtgtaagaccattgttgagctcctag

SEQ ID NO: 4051 - protein, 225 aa, Brassica napus
MATSMIQRMFKQGTKIVGVGLNYASHAKELGNALPKDPIVFLKPTSSYLENGGTIEIPHPLDSLHHEVELAVVIGHKARDVPERLAMDYIGGYAIALDMTAKEHHVSAMASGLPCTLAKAQDTFTPISSVLPKAMVVDPNNLELWLKVDDEIRQKGWTKDMIYKVPYLISYISSVMTLFKGDVILTGTPEGIGPVKIGQKITAGITGLSEVQFSVGRRVRPLLSS

SEQ ID NO: 4052 - DNA, 675 bp, Glycine max
  CDS (1)..(675)
atggcagtggcaggttgtcagaagcttctggaactgagcaccaagatcgtcgctgttggcagaaactacgctgctcacgccaaggaattaggcaacgccgttcccaaggagccggtgttgtttctgaaaccgacgtcgtcttacttgaaaaacggcggaaccatccaaatcccacacaacgagggctctctgcatcacgaggttgagctcgctgtggtcatcgccaagaaagcacgtgacgtctccgaatcctctgcgatggattatgtcgccggttatgcactggctctggatatgactgctagggaccttcaagctgctgctaagtctgcaggtcttccatggagtttggcaaaaggccaggacactttcaccccaattagttctattttgccaaagactgcagtgccaaatcctgatgatctagaattatggttaaaggtagatgaggaaatacggcaaaagggctcaaccaaggacatgatctttaagatcccatttctaattagctacattagctctgtcatgacattgtttgaaggggatgtcatactaactggtactcccccgggtgttggccctgtcaaagagggtcaaacaattactgctggcgttacaggccttgtggacgtacagtttaatgttgaaaaaagagctaggcctgttctttcttga

SEQ ID NO: 4053 - protein, 224 aa, Glycine max
MAVAGCQKLLELSTKIVAVGRNYAAHAKELGNAVPKEPVLFLKPTSSYLKNGGTIQIPHNEGSLHHEVELAVVIAKKARDVSESSAMDYVAGYALALDMTARDLQAAAKSAGLPWSLAKGQDTFTPISSILPKTAVPNPDDLELWLKVDEEIRQKGSTKDMIFKIPFLISYISSVMTLFEGDVILTGTPPGVGPVKEGQTITAGVTGLVDVQFNVEKRARPVLS

SEQ ID NO: 4054 - DNA, 675 bp, Glycine max
  CDS (1)..(675)
atggcagcggcaggttgtcagaagcttctggaattgagcacgaagatcgtcgctgttggcagaaactacgctgctcatgccaaagaactaggcaacgccgttcccaaggagccggtgttgtttctgaaaccgacgtcgtcttacttgagtaacggcggaaccattcaaatcccacacaacgagggctctctgcatcacgaggttgagctcgctgtggtcatctccaagaaagcccgtgacgtctccgaatcctctgccatggattacgtcgccggttatgcactggctctggatatgactgctagggaccttcaagctgctgctaagtctgcaggtcttccatggagtttggcaaaaggccaggacactttcacccctattagctctattttgccaaagactacagtgccgaatcccgatgatctagaattatggttaaaggttgacgaggaaattcggcaaaagggctcaaccaaggacatgatatttaagatcccatttctgattagctacgtaagctctgtcatgacattgtttgaaggagatgtcatactaactggtactcccccgggtgttggccctgtgaaagagggtcaaacaattactgctggtattacaggccttgtggacgtacagtttaatgttgaaaaaagagctaggcctgttctttcttga

SEQ ID NO: 4055 - protein, 224 aa, Glycine max
MAAAGCQKLLELSTKIVAVGRNYAAHAKELGNAVPKEPVLFLKPTSSYLSNGGTIQIPHNEGSLHHEVELAVVISKKARDVSESSAMDYVAGYALALDMTARDLQAAAKSAGLPWSLAKGQDTFTPISSILPKTTVPNPDDLELWLKVDEEIRQKGSTKDMIFKIPFLISYVSSVMTLFEGDVILTGTPPGVGPVKEGQTITAGITGLVDVQFNVEKRARPVLS

SEQ ID NO: 4056 - DNA, 675 bp, Glycine max
  CDS (1)..(675)
atggcagcggcaggttgtcagaagcttctggaattgagcacgaagatcgtcgctgttggcagaaactacgctgctcatgccaaagaactaggcaacgccgttcccaaggagccggtgttgtttctgaaaccgacgtcgtcttacttgagtaacggcggaaccattcaaatcccacacaacgagggctctctgcatcacgaggttgagctcgctgtggtcatctccaagaaagcccgtgacgtctccgaatcctctgccatggattacgtcgccggttatgcactggctctggatatgactgctagggaccttcaagctgctgctaagtctgcaggtcttccatggagtttggcaaaaggccaggacactttcacccctattagctctattttgccaaagactacagtgccgaatcccgatgatctagaattatggttaaaggttgacgaggaaattcggcaaaagggctcaaccaaggacatgatatttaagatcccatttctaattagctacattagctctgtcatgacattgtttgaaggggatgtcatactaactggtactcccccgggtgttggccctgtcaaagagggtcaaacaattactgctggcgttacaggccttgtggacgtacagtttaatgttgaaaaaagagctaggcctgttctttcttga

SEQ ID NO: 4057 - protein, 224 aa, Glycine max
MAAAGCQKLLELSTKIVAVGRNYAAHAKELGNAVPKEPVLFLKPTSSYLSNGGTIQIPHNEGSLHHEVELAVVISKKARDVSESSAMDYVAGYALALDMTARDLQAAAKSAGLPWSLAKGQDTFTPISSILPKTTVPNPDDLELWLKVDEEIRQKGSTKDMIFKIPFLISYISSVMTLFEGDVILTGTPPGVGPVKEGQTITAGVTGLVDVQFNVEKRARPVLS

SEQ ID NO: 4058 - DNA, 684 bp, Zea mays
  CDS (1)..(684)
atggcggctgcggcggcgcagaagctcctcgaggcgagcacgaagatcatcggcgtcgggcgcaactacatcgcccacgccgaggagctcggcaacccgatccccaaggagcccgtactattcctgaagccgacctcgtcgttcctccacgctggcgtggccaccgccgccgtcgagatcccggagccgctcgaatcgctacaccacgaagtcgagctcgccgtcgtcatctcccggcgtgggcgtgacattcctgaagcgtccgccatggacttcgtcggaggctatgcacttgctttggacatgacagcaaggggccttcaatctgttgctaagtctgcaggccttccatggactttggctaaagggcaagacaccttcactccaattagtgcagtagttccaaaatcatctgtcactaatcccgacgatctcgagctatggctaaaggtagatgatgaactaaggcagaaaggatcgacaagtgacatgatattcaagattccttttctgatcagctatatcagctccatcatgacattaatggagggtgatgtgatactaacaggtactcctgagggtgtgggtcctgtgcgagtaggtcagaagatcaaagctggtataactgacctaattgatgtcgagttcgatgttcagaggcgcaaccggtcattttccacatga

SEQ ID NO: 4059 - protein, 227 aa, Zea mays
MAAAAAQKLLEASTKIIGVGRNYIAHAEELGNPIPKEPVLFLKPTSSFLHAGVATAAVEIPEPLESLHHEVELAVVISRRGRDIPEASAMDFVGGYALALDMTARGLQSVAKSAGLPWTLAKGQDTFTPISAVVPKSSVTNPDDLELWLKVDDELRQKGSTSDMIFKIPFLISYISSIMTLMEGDVILTGTPEGVGPVRVGQKIKAGITDLIDVEFDVQRRNRSFST

SEQ ID NO: 4060 - DNA, 684 bp, Zea mays
  CDS (1)..(684)
atggcggctgcggcggcgcagaggctcctcgcggcgagcacgaaaatcatcggcgttgggcgcaactacatagcccacgccaaggagctcggcaatccggtccccaaggagcccgtcctgttcctgaagccgacctcgtcgtttctccacgctggtgtggccaccgccgccgtcgagatcccggagccgctcgagtcgctacaccacgaggtcgagctcgccgtcgtcatctcccggcgtgggcgcgacgttcccgaggcgtccgccatggactttgttggaggttatgcacttgctttggacatgacagcaagggaccttcagtctgttgctaagtctgcaggccttccatggactttggctaaaggacaagacaccttcaccccaattagtgcagtagttccaaaatcagctgtcactaatcccgatgatctcgagctctggctgaaggtagatgatgaactaaggcagaaaggaccgacaagcgacatgctattcaagattccttttctgataagctatatcagttccatcatgacattaatggagggtgatgtgatactaacaggtactcctgagggtgtgggtcctgtccgagtaggtcagaagattacagctggtataactgacctaattgatgttgagttcgatgttcagaggcgcaatcggtcattttccacatga

SEQ ID NO: 4061 - protein, 227 aa, Zea mays
MAAAAAQRLLAASTKIIGVGRNYIAHAKELGNPVPKEPVLFLKPTSSFLHAGVATAAVEIPEPLESLHHEVELAVVISRRGRDVPEASAMDFVGGYALALDMTARDLQSVAKSAGLPWTLAKGQDTFTPISAVVPKSAVTNPDDLELWLKVDDELRQKGPTSDMLFKIPFLISYISSIMTLMEGDVILTGTPEGVGPVRVGQKITAGITDLIDVEFDVQRRNRSFST

SEQ ID NO: 4062 - DNA, 696 bp, Zea mays
  CDS (1)..(696)
atgccggcggccatggcggctgcggcggcgcagaggctcctcgcggcgagcacgaaaatcatcggcgttgggcgcaactacatagcccacgccaaggagctcggcaatccggtccccaaggagcccgtcctgttcctgaagccgacctcgtcgtttctccacgctggtgtggccaccgccgccgtcgagatcccggagccgctcgagtcgctacaccacgaggtcgagctcgccgtcgtcatctcccggcgcgggcgcgacgttcccgaggcgtccgccatggactttgttggaggttatgcacttgctttggacatgacagcaagggaccttcagtctgttgctaagtctgcaggccttccatggactttggctaaaggacaagacaccttcaccccaattagtgcagtagttccaaaatcagctgtcactaatcccgatgatctcgagctctggctgaaggtagatgatgaactaaggcagaaaggaccgacaagcgacatgctattcaagattccttttctgataagctatatcagttccatcatgacattaatggagggtgatgtgatactaacaggtactcctgagggtgtgggtcctgtccgagtaggtcagaagattacagctggtataactgacctaattgatgttgagttcgatgttcagaggcgcaatcggtcatttttcacatga

SEQ ID NO: 4063 - protein, 231 aa, Zea mays
MPAAMAAAAAQRLLAASTKIIGVGRNYIAHAKELGNPVPKEPVLFLKPTSSFLHAGVATAAVEIPEPLESLHHEVELAVVISRRGRDVPEASAMDFVGGYALALDMTARDLQSVAKSAGLPWTLAKGQDTFTPISAVVPKSAVTNPDDLELWLKVDDELRQKGPTSDMLFKIPFLISYISSIMTLMEGDVILTGTPEGVGPVRVGQKITAGITDLIDVEFDVQRRNRSFFT

SEQ ID NO: 4064 - DNA, 21 bp, Artificial sequence
  primer
atgagttaccagcaccaatac

SEQ ID NO: 4065 - DNA, 22 bp, Artificial sequence
  primer
tcagagcacccggctttcgaag

SEQ ID NO: 4066 - protein, 279 aa, Artificial sequence
  consensus sequence
  Variant (2)..(2): Xaa in position 2 is any amino acid
  Variant (3)..(27): Xaa in position 3 to 27 is any or no amino acid
  Variant (30)..(30): Xaa in position 30 is any amino acid
  Variant (31)..(31): Xaa in position 31 is any or no amino acid
  Variant (33)..(33): Xaa in position 33 is any amino acid
  Variant (34)..(34): Xaa in position 34 is any or no amino acid
  Variant (36)..(40): Xaa in position 36 to 40 is any amino acid
  Variant (41)..(68): Xaa in position 41 to 68 is any or no amino acid
  Variant (70)..(71): Xaa in position 70 to 71 is any amino acid
  Variant (73)..(73): Xaa in position 73 is any amino acid
  Variant (75)..(93): Xaa in position 75 to 93 is any amino acid
  Variant (94)..(122): Xaa in position 94 to 122 is any or no amino acid
  Variant (124)..(124): Xaa in position 124 is any amino acid
  Variant (127)..(136): Xaa in position 127 to 136 is any amino acid
  Variant (137)..(152): Xaa in position 137 to 152 is any or no amino acid
  Variant (155)..(158): Xaa in position 155 to 158 is any amino acid
  Variant (159)..(160): Xaa in position 159 to 160 is any or no amino acid
  Variant (162)..(164): Xaa in position 162 to 164 is any amino acid
  Variant (166)..(166): Xaa in position 166 is any amino acid
  Variant (167)..(167): Xaa in position 167 is any or no amino acid
  Variant (169)..(170): Xaa in position 169 to 170 is any amino acid
  Variant (171)..(179): Xaa in position 171 to 179 is any or no amino acid
  Variant (181)..(183): Xaa in position 181 to 183 is any amino acid
  Variant (185)..(186): Xaa in position 185 to 186 is any amino acid
  Variant (188)..(190): Xaa in position 188 to 190 is any amino acid
  Variant (192)..(215): Xaa in position 192 to 215 is any amino acid
  Variant (216)..(223): Xaa in position 216 to 223 is any or no amino acid
  Variant (225)..(242): Xaa in position 225 to 242 is any amino acid
  Variant (244)..(247): Xaa in position 244 to 247 is any amino acid
  Variant (248)..(248): Xaa in position 248 is any or no amino acid
  Variant (250)..(251): Xaa in position 250 to 251 is any amino acid
  Variant (254)..(256): Xaa in position 254 to 256 is any amino acid
  Variant (261)..(261): Xaa in position 261 is any amino acid
  Variant (262)..(262): Xaa in position 262 is any or no amino acid
  Variant (266)..(269): Xaa in position 266 to 269 is any amino acid
  Variant (270)..(277): Xaa in position 270 to 277 is any or no amino acid
GXXXXXXXXXXXXXXXXXXXXXXXXXXNYXXHXXEXXXXXXXXXXXXXXXXXXXXXXXXXXXXXXXXXPXXFXKXXXXXXXXXXXXXXXXXXXXXXXXXXXXXXXXXXXXXXXXXXXXXXXXEXELXXXXXXXXXXXXXXXXXXXXXXXXXXGYXXXXXXDXXXRXXQXXXXXXXXXXXWXXXKXXDXXXPXXXXXXXXXXXXXXXXXXXXXXXXXXXXXXXXQXXXXXXXXXXXXXXXXXXSXXXXXLXXGDXXXTGTPXXGVGXXXXXXXXXXXXGD

SEQ ID NO: 4067 - protein, 15 aa, Artificial sequence
  protein pattern
  Variant (2)..(3): Xaa in position 2 to 3 is any amino acid
  Variant (6)..(6): Xaa in position 6 is Ile, Leu or Val
  Variant (7)..(7): Xaa in position 7 is Ile or Val
  Variant (8)..(8): Xaa in position 8 is any amino acid
  Variant (13)..(13): Xaa in position 13 is any amino acid
  Variant (15)..(15): Xaa in position 15 is Ile or Val
LXXGDXXXTGTPXGX

SEQ ID NO: 4068 - DNA, 2391 bp, Escherichia coli
  CDS (1)..(2391): transl_table=11
atggcaattaacaatacaggctcgcgacgattactcgtcacgctaacagccctttttgcagcgctttgcgggctgtatctactcattggcggaggctggctggtcgcgattggcggctcctggtactaccctatcgctggccttgtgatgctcggcgtcgcctggatgctgtggcgcagtaaacgcgccgcgctttggctatacgcagccctgctgctcggcaccatgatttggggcgtctgggaagttggtttcgacttctgggcgctgactccgcgcagcgacattctggtcttcttcggcatctggctgatcctgccgtttgtctggcgtcgcctggtcattcctgccagcggcgcagttgccgcactggtggtcgcactgctgattagcggtggtatcctgacctgggccggatttaacgatccgcaggagatcaacggcaccttaagcgccgatgccacacctgctgaagctatctcccccgtagccgatcaggactggcctgcctatggtcgtaatcaggaaggtcaacgcttttcgccgctgaaacaaattaacgccgataacgtccataatctgaaagaagcctgggtgttccgtactggcgatgtgaagcagccgaacgatccgggtgaaatcaccaatgaagtgacgccgattaaagtgggcgacaccctttacctgtgtaccgctcaccagcgcctgtttgcgcttgatgccgccagcggcaaagagaaatggcattacgatcctgagctgaaaaccaacgagtctttccagcacgtaacctgccgtggtgtctcttatcatgaagccaaagcagaaaccgcttcgccggaagtgatggcggattgcccgcgtcgtatcattcttccggtcaatgatggtcgactgattgcgattaacgctgaaaacggcaaactgtgcgaaaccttcgccaataaaggcgtgctcaatctgcaaagcaatatgccagacaccaaaccgggtctgtatgaaccgacttcgccaccgattatcaccgataaaaccatcgtgatggccggttcagttaccgataacttctcaacccgcgaaacgtctggcgtgatccgtggttttgatgtcaacaccggggagctgctgtgggcttttgatcccggcgcgaaagatccgaacgcaatcccgtctgacgaacacacctttacctttaactcgccaaactcctgggcaccagcggcctatgacgcgaagctggatctggtctatctgccgatgggcgtgaccacgccggatatctggggcggtaaccgcacaccggaacaggaacgttatgccagctcgattctggcgctgaatgccactaccgggaaactggcgtggagctaccagaccgttcaccacgacctgtgggacatggatcttccggcacagccgacgctggcggacatcaccgttaatggtcagaaagtgccagttatttacgctccggcgaaaaccggcaacatttttgtgctcgatcgtcgtaatggcgaactggtggttccggcaccggaaaaaccggttccccaaggtgcagcgaaaggcgattacgtaaccccaactcaaccgttttctgaactgagcttccgtccgacgaaagatttgagcggtgcggatatgtggggagccaccatgtttgaccaactggtgtgccgcgtgatgttccaccagatgcgctatgaaggcattttcaccccgccatctgaacagggtacgctggtcttcccgggtaacctggggatgttcgaatggggcgggatttccgttgatccaaatcgtgaagtggcgattgccaacccaatggcactgccgtttgtttcgaaactgatcccgcgtggtcctggcaacccgatggagcagccgaaagatgccaaaggcacgggtacggaatccggcattcagccacagtacggtgtaccgtatggtgtcacgctcaacccgttcctctcaccatttggtctgccatgtaaacagccagcatggggttatatctcggcgctggatctgaaaactaatgaagtggtgtggaagaaacgtattggtacgccgcaggacagtatgccgttcccgatgccggttccggtgccgttcaatatgggtatgccgatgctgggcgggccaatctccacggcgggtaacgtgctgtttatcgccgctacggcagataactacctgcgcgcttacaacatgagcaacggtgaaaaactgtggcagggtcgtttaccagcgggtggtcaggctacgccaatgacctatgaagtgaatggtaagcagtatgtggtgatctccgcaggcggtcacggttcatttggtacgaagatgggcgactatattgtggcttatgcgctgccggatgatgtgaagtaa

SEQ ID NO: 4069 - protein, 796 aa, Escherichia coli
MAINNTGSRRLLVTLTALFAALCGLYLLIGGGWLVAIGGSWYYPIAGLVMLGVAWMLWRSKRAALWLYAALLLGTMIWGVWEVGFDFWALTPRSDILVFFGIWLILPFVWRRLVIPASGAVAALVVALLISGGILTWAGFNDPQEINGTLSADATPAEAISPVADQDWPAYGRNQEGQRFSPLKQINADNVHNLKEAWVFRTGDVKQPNDPGEITNEVTPIKVGDTLYLCTAHQRLFALDAASGKEKWHYDPELKTNESFQHVTCRGVSYHEAKAETASPEVMADCPRRIILPVNDGRLIAINAENGKLCETFANKGVLNLQSNMPDTKPGLYEPTSPPIITDKTIVMAGSVTDNFSTRETSGVIRGFDVNTGELLWAFDPGAKDPNAIPSDEHTFTFNSPNSWAPAAYDAKLDLVYLPMGVTTPDIWGGNRTPEQERYASSILALNATTGKLAWSYQTVHHDLWDMDLPAQPTLADITVNGQKVPVIYAPAKTGNIFVLDRRNGELVVPAPEKPVPQGAAKGDYVTPTQPFSELSFRPTKDLSGADMWGATMFDQLVCRVMFHQMRYEGIFTPPSEQGTLVFPGNLGMFEWGGISVDPNREVAIANPMALPFVSKLIPRGPGNPMEQPKDAKGTGTESGIQPQYGVPYGVTLNPFLSPFGLPCKQPAWGYISALDLKTNEVVWKKRIGTPQDSMPFPMPVPVPFNMGMPMLGGPISTAGNVLFIAATADNYLRAYNMSNGEKLWQGRLPAGGQATPMTYEVNGKQYVVISAGGHGSFGTKMGDYIVAYALPDDVK

SEQ ID NO: 4070 - DNA, 2400 bp, Bradyrhizobium sp. ORS278
  CDS (1)..(2400): transl_table=11
atggccgcagcccgccatctgcagcgcgcgccgctgctgaccttcacggccgtcatcgtcggactgatgggcgtcgcactgctcgccggcggcttctggctcgccgcgatcggcggctcgctgtactacgtgattgccggtgcggcactgctcggcacggcgtggctgctgtggcagcggcgcgcttccgcgctatggctctacgcggcactgctgctgggcacgatgatctgggcggtctgggaggtcgggctggacttctggtcgctggcgccacgcggcgacgtgctggcaccgctcggcgtctggctgctgctgccgttcatcaccgcgcatctggccggtgacatgcgctcggcgcgctggggccttctcgccgtgctcgccgtcgcggtggtcgtgctcggcgcctccctgcgcggcgaccgcttcggcgtcaacggcgcgctgccgcaggccgcggctgccaccgccggcaccgatcccgggcccgcggaagcgcaggccgactggaccgcgtatggcgccagcaatttcggcacgcgcttctcgagcctgaagcagatcaccgccaataatgtgaagaacctgcaactcgcctgggaattccagaccggcgaccgcaaggggcccgacgatcccgacgagttcaccaatgaggtgacgccgctgaagatcggcgatctgctctacacctgctcgccgcaccagatcgtgttcgcgctcgatgcggccacgggcaagcagcgctggacgttcgatccgaagatcgagcaccacaagaatttccagcacatgacctgccgcggcgtcgcgtatcacgagaccaagcccggcgcagtcgacgtgtcgggcgccgcggctccgggcgaatgcgccaggcgcatcttcctgccgaccgacgacggacggctgttcgcgctcgacgccgacagcggcaagccgtgcgacggctttggcgatcacggccagatcgatctgaaggccggcaacgagatcaccacggtcggcttctacgaggggacctcgccgcccgttgtcaccgacaaggtgctgatcatggccggcgccgtgatcgacaactactccaacaaggtgccgtcgggcgcgatccgcggcttcgacgtctactcgggcaagctgttatgggcgttcgatcccggcaatcccgatccgaacgagatgccgtcggcgacgcatcatttcacgccgggctcgccgaacggctggagcgtcggcgcggccgacgaggcgctcggcctggtctacatcccgcttggctcgagctcgccggacatctgggccggcaaccgctcggccgacaacgagcgctatgattccgcgctggtcgcgctcgacatcgccaccggcaaattgcgctggtcgttccagaacgtgcatcacgatctctgggacatggacatgccgtcgcagccgagtctggtcgacatgccaggccaagacggcgtggtgccggcgatctatgtgccggccaagaccggcaacatcttcgtgctcgaccgccgcgacgggcacctgctggtccccgcgcccgaaaagcctgtgccgcaaggtgcggcgcccggcgatcatctgtcaccgactcagccattctccgagctgagcttccgtccgcgcaaccagctgacaggcgcgcagatgtggggcgcgacgatgttcgatcagctcgcctgccgtatcaagttcaagcggctgcgctacgagggcccgttcacgccgccctccgagcagggcacgctggtctatcccggcgatttcggcatgttcgaatggggcggcatcgcgatcgatcccgtcaggaagatcgcgatcgccaatccgcaatcgatcccgttcgtgtcgcggctggtgccgcgcggcaaggacaatccggcggcgccgaactccgcgcatccgccgggcaccgagctcggcgtgcagccgatgtacggcacgccctatggcgtcgatctcggcatcttcctgtcaccgctcggaatcccctgcatggccccgccctggggcagcctcgccgccatcgatctcaagaccaaccagatcgtctggcagcaccgcgtcggcaccattcgcgaccaggcccccgtgccactgccgttcaagctgggcgtgccgatgctcggcggcccgatggtgaccgcgggcggcgtcgccttcctcaccggcacgatggacgactacatccgcgccttcgacgtcaaggatggccggctgctctggcaggaccgcctgccggccggcggccagtcgacgccgatgacgtacgaagccggcggcaggcagtatgtcgtcaccgtcgatggcggccacggttcgttcggcaccaagctcggtgactatgtccgcgcctacgcattgcccggcaacgtcgcgagcagatag

SEQ ID NO: 4071 - protein, 799 aa, Bradyrhizobium sp. ORS278
MAAARHLQRAPLLTFTAVIVGLMGVALLAGGFWLAAIGGSLYYVIAGAALLGTAWLLWQRRASALWLYAALLLGTMIWAVWEVGLDFWSLAPRGDVLAPLGVWLLLPFITAHLAGDMRSARWGLLAVLAVAVVVLGASLRGDRFGVNGALPQAAAATAGTDPGPAEAQADWTAYGASNFGTRFSSLKQITANNVKNLQLAWEFQTGDRKGPDDPDEFTNEVTPLKIGDLLYTCSPHQIVFALDAATGKQRWTFDPKIEHHKNFQHMTCRGVAYHETKPGAVDVSGAAAPGECARRIFLPTDDGRLFALDADSGKPCDGFGDHGQIDLKAGNEITTVGFYEGTSPPVVTDKVLIMAGAVIDNYSNKVPSGAIRGFDVYSGKLLWAFDPGNPDPNEMPSATHHFTPGSPNGWSVGAADEALGLVYIPLGSSSPDIWAGNRSADNERYDSALVALDIATGKLRWSFQNVHHDLWDMDMPSQPSLVDMPGQDGVVPAIYVPAKTGNIFVLDRRDGHLLVPAPEKPVPQGAAPGDHLSPTQPFSELSFRPRNQLTGAQMWGATMFDQLACRIKFKRLRYEGPFTPPSEQGTLVYPGDFGMFEWGGIAIDPVRKIAIANPQSIPFVSRLVPRGKDNPAAPNSAHPPGTELGVQPMYGTPYGVDLGIFLSPLGIPCMAPPWGSLAAIDLKTNQIVWQHRVGTIRDQAPVPLPFKLGVPMLGGPMVTAGGVAFLTGTMDDYIRAFDVKDGRLLWQDRLPAGGQSTPMTYEAGGRQYVVTVDGGHGSFGTKLGDYVRAYALPGNVASR

SEQ ID NO: 4072 - DNA, 2358 bp, Mesorhizobium loti MAFF303099
  CDS (1)..(2358): transl_table=11
atggccgcgcgagcgcgcaacagtcgaaggagtatcatcttggctgtcaccatcacctccttcgttctctttctcctcggtctggcgcttggtggcggtggcatctggctggcttcgctggggggcagttggtactacatcgtcgtcggcctcgccttcctgatcgccgcctggctgctctaccggcgccgttccacggcgctctggctctatgcggcgattgtgctcggcacgctggcctgggcggtctgggaaatcggcttcgactggtgggagctcggcccgcgcggcggcatcatcgtgctggtcgggctgtggctgctgacgccgtgggcaaggcggggccttgccgggcctgacgggcgcgcgccgctgatcctggccgtgctggcatcgctggcggtggccggctattcgatgaccgccgacccgaaaggcattgacggcgcgctcgacaccgacaaggtgattcccaaagccaatctgggtaatgatgtgccggctggcgagtggcactattacggacgcacgcagtttggccaacgctattcgccgctcgaccagatcacgccggacaatgtcgccaatctgcagccggcatggacctatcgcaccggcgatgtgaaggggcccgacgacatcggcgagaccacctatcaggtgacgccgctgaagatcggcgacacgctctacatctgcacgccgcataatttcgccatcgcggtggacgccgcgaccggaaaggaaaaatggcgctacgatcccaagatcaagctcgacaaggaccgccagcaccagacctgccgcggcgtgtcctactatgccgataccgccatcgccgccggccagccctgcgcgacccgcatctacctgccgacctcggatgcgcggctgatcgcgctcgacgccgccagcggtcaggtctgtccggccttcgccgagggcggcacgctgaaccttctgaccaacatgccctatccgaaatcgggctactactattcgacctcggcgccgctgatatcaggcagcaagatcatcgtcggcggcgcggtcaacgacaactattcgacgcaggagccgtcgggggtcatccgcgcctatgatgtcggcaccggcgccctggtgtggaagtgggattccggcaacccggaccagacgacgccgctggcggcgggccagacctataccgccaactcgcccaacatgtggtcgacgccgagcgccgacgagaagcttgggctgctctatgtgccactcggcaaccagacgccggaccagctcggcgccgggcgtagcgccaatgtcgagaaattctcctcctcgatcgccgcgctcgacctcaacaccgggcagttgcgctgggtgcggcagaccgtgcaccatgacctctgggacatggacgtgccggcgcagccgagcctgattgacatcaccaaggccgacggcacagtggtgccggcgctggtcgggccgaccaagcagggcgacctctatgtgcttgaccggcgcaccggcgaaccgcttgttgcagtcaaggaagtgccggcgcccggcggcgccgtcgagggcgatcacacgtcgccgacgcaaccggtgtcggatctctccttcagcccgaagccgctgacggatgccgacatgtggggcatcaccatgttcgaccagatggcctgcaggattgccttccacaagctgcgctacgaaggccgttacacgccgccgtcggtgcagggatcgctgatctaccccggcaatttcggagtcttcaactggggcggggtggcagtcgatccggtgcggcaggtgatgttcggcatgccgacctatctggcgtttacgtcgagactcgtgccccgcgcggacgtaccgccgccgggcgatgacaccaagggcagcgagcaggggctgaaccgcaacgagggcgcgccctacgcagtggtgatggggccgttcctgtcgcctctcggcattccctgccaggcgccaccctggggttatgtcgcgggcgcggatctgcggaccggcaccatcgcctacaagcatcgcaacggtaccgtctacgatatgacgccgctgccgctgccgctgaaggtcggcgtgccgggcattggcgggccgatcatcactgccggcggcgtcgccttcctgggtgccgcggtcgacaactatctgcgcgcctatgacctgacgtcgggccggcaactctggcaggccaggctgcccgccggcggccagtcgacgccgatgacctatacggtcgccgacgggcgccagttcgtggtcatcgtcgccggcggccacggctcggtcggcaccaagccgggggattatgtgatggcttacgcgctgccgaaatag

SEQ ID NO: 4073 - protein, 785 aa, Mesorhizobium loti MAFF303099
MAARARNSRRSIILAVTITSFVLFLLGLALGGGGIWLASLGGSWYYIVVGLAFLIAAWLLYRRRSTALWLYAAIVLGTLAWAVWEIGFDWWELGPRGGIIVLVGLWLLTPWARRGLAGPDGRAPLILAVLASLAVAGYSMTADPKGIDGALDTDKVIPKANLGNDVPAGEWHYYGRTQFGQRYSPLDQITPDNVANLQPAWTYRTGDVKGPDDIGETTYQVTPLKIGDTLYICTPHNFAIAVDAATGKEKWRYDPKIKLDKDRQHQTCRGVSYYADTAIAAGQPCATRIYLPTSDARLIALDAASGQVCPAFAEGGTLNLLTNMPYPKSGYYYSTSAPLISGSKIIVGGAVNDNYSTQEPSGVIRAYDVGTGALVWKWDSGNPDQTTPLAAGQTYTANSPNMWSTPSADEKLGLLYVPLGNQTPDQLGAGRSANVEKFSSSIAALDLNTGQLRWVRQTVHHDLWDMDVPAQPSLIDITKADGTVVPALVGPTKQGDLYVLDRRTGEPLVAVKEVPAPGGAVEGDHTSPTQPVSDLSFSPKPLTDADMWGITMFDQMACRIAFHKLRYEGRYTPPSVQGSLIYPGNFGVFNWGGVAVDPVRQVMFGMPTYLAFTSRLVPRADVPPPGDDTKGSEQGLNRNEGAPYAVVMGPFLSPLGIPCQAPPWGYVAGADLRTGTIAYKHRNGTVYDMTPLPLPLKVGVPGIGGPIITAGGVAFLGAAVDNYLRAYDLTSGRQLWQARLPAGGQSTPMTYTVADGRQFVVIVAGGHGSVGTKPGDYVMAYALPK

SEQ ID NO: 4074 - DNA, 2412 bp, Pseudomonas aeruginosa PAO1
  CDS (1)..(2412): transl_table=11
atgagcgaaggtaaccgcagtcgatcgcgcctgctgccgagcctgctcggcctgttgatcctgctgtccggcctggcgctgctggccggcggcatcaagctggcgagcctgggcggctcgctgtactacctgctggccggcatcggcctggccctgagcggactgttgctgctgctgggcaagcgtgcggcgctaggcctgtacgctctggtgctgttcgccagcaccgtctgggcgctgtgggaagtcggcctggactggtggcaactggtgccgcgcctggctctgtggttcgtcttcggcctgctgctctggctaccctggttccgccgcccgctgctggccgacggtccggcgccgctgggcaccgcggcgctgggcgtggcggtggtcctggccggcgccgccgcggtgggcagccagttcaccaatccggggcagatcgtcggtcgcatcgaccgcgacagcggcatgaccagcaccgccccggcgatgccggacggcgactggcaggcctacgggcgcaccgagttcggcgaccgctactcgccgttgaagcagatcaccccggccaacgtcggccagctcgaggaagcctggcgcatccgtaccggcgacctgccgaccgccgacgatccgctcgaactgaccaacgagaacaccccgctgaaggtcaacggcatgctctacgcctgcaccgcgcacagcaaggtgctggccctcgacccggacaccggcgcggaaatctggcgcttcgatccgcagatccagagcccggtaggcttcaagggcttcgcccacatgacttgccgtggcgtctcctactacgacgaagagcagtacgccaggagcgacgtcggcgcgccgccggccgcgctctccgaggccggcaaggcggtcgccgccagttgtccgcggcgcctgttcctgcccaccgccgacgcccgcctgatcgcgatcaacgccgacaacggcaaggtctgcgaggacttcggggtcaagggcgcggtcgacctgacggccggcatcggtccgttcaccccgggcggctactactccacctcgccggcggcggtcacccgcaatctggtgatcatcggcggccacgtcaccgacaacgagtcgaccaacgagccgtccggggtgatccgcgccttcgacgtgcacgacggcaagctggtgtggaactgggacagcggcaacccggacgagaccgagcccctggcgcccggcaagttctatacccgcaactcgccgaacatgtggtcgctggccagcgtcgacgagaagctcggccaggtctacctgccgctgggcaaccagatgcccgaccagtggggcggcaaccgcacccctggcgccgagaagttcagcgccggcctggtggccctcgacctgaacaccggcaagctgcgctggaactaccagttcacccaccacgacctgtgggacatggacgtcggcagccagccgaccctgctcgacctgaagaccgccgatggcgtcaagccggcgctgatcgcgccgaccaagcagggcagcctgtacgtgctggaccgccgcgacggcacgccgatcgtgccgatccgcgaagtgccggcgccgcagggcgcggtggagggcgaccataccgcgccgacccaggcgcgttccgacctcaacctgctgcgcccgccgctgaccgagcgcgacatgtggggcagcagcccgttcgaccagatgctctgccgcatccagttccgctcgctgcgctacgagggccagtacaccccgccgtcggagcagggcagcctgatctatccgggcaacgtcggagtgttcaactggggcggggtgtcggtcgacccggtgcgccagatcctcttcaccagccccaactacatggccttcgtctcgcagatggtgccgcgcgacaaggtgcccagcggaagcaagcgcgagggcgagaccagcggcgtgcagccgaacaccggcgcgccctacgcggtgatcatgcatccgttcatgtcgcccatcggcctgccgtgccaggcgccgtcctggggtgacgtggcgggtatcgacctgaccaccgccaaggtcgtctggcagcacaagaacggcaccagccgcgacaacaccccggtgccgatcggcctcaccgtcggcgtaccgagcatgggcggctcgatcaccaccgccggcggcgtggccttcctcagcggcacgctcgaccagtacctgcgcgcctacgacgtgaaggacggcaagcagctctggcaggcgcgcctgccggccggcggccaggccacgccgatgagctacaccggcaaggacggtcgccagtacgtgctgatcgtcgctggcggacacggctccttcggtacccgcatgggcgactacatcatcgcctacgccctgcccaggcaatga

SEQ ID NO: 4075 - protein, 803 aa, Pseudomonas aeruginosa PAO1
MSEGNRSRSRLLPSLLGLLILLSGLALLAGGIKLASLGGSLYYLLAGIGLALSGLLLLLGKRAALGLYALVLFASTVWALWEVGLDWWQLVPRLALWFVFGLLLWLPWFRRPLLADGPAPLGTAALGVAVVLAGAAAVGSQFTNPGQIVGRIDRDSGMTSTAPAMPDGDWQAYGRTEFGDRYSPLKQITPANVGQLEEAWRIRTGDLPTADDPLELTNENTPLKVNGMLYACTAHSKVLALDPDTGAEIWRFDPQIQSPVGFKGFAHMTCRGVSYYDEEQYARSDVGAPPAALSEAGKAVAASCPRRLFLPTADARLIAINADNGKVCEDFGVKGAVDLTAGIGPFTPGGYYSTSPAAVTRNLVIIGGHVTDNESTNEPSGVIRAFDVHDGKLVWNWDSGNPDETEPLAPGKFYTRNSPNMWSLASVDEKLGQVYLPLGNQMPDQWGGNRTPGAEKFSAGLVALDLNTGKLRWNYQFTHHDLWDMDVGSQPTLLDLKTADGVKPALIAPTKQGSLYVLDRRDGTPIVPIREVPAPQGAVEGDHTAPTQARSDLNLLRPPLTERDMWGSSPFDQMLCRIQFRSLRYEGQYTPPSEQGSLIYPGNVGVFNWGGVSVDPVRQILFTSPNYMAFVSQMVPRDKVPSGSKREGETSGVQPNTGAPYAVIMHPFMSPIGLPCQAPSWGDVAGIDLTTAKVVWQHKNGTSRDNTPVPIGLTVGVPSMGGSITTAGGVAFLSGTLDQYLRAYDVKDGKQLWQARLPAGGQATPMSYTGKDGRQYVLIVAGGHGSFGTRMGDYIIAYALPRQ

SEQ ID NO: 4076 - DNA, 2391 bp, Escherichia coli O157:H7 EDL933
  CDS (1)..(2391): transl_table=11
atggcaattaacaatacaggctcgcgacgattactcgtcacgctaacagccctttttgcagcgctttgcgggctgtatctactcattggcggaggctggctggtcgcgattggcggctcctggtactaccctatcgctggccttgtgatgctcggcgtcgcctggatgctgtggcgcagtaaacgtgccgcgctttggctatacgccgccctgctgctcggcaccatgatttggggcgtctgggaagttggtttcgacttctgggcgctgactccgcgcagcgatattctggtcttcttcggcatctggctgatcctgccgtttgtctggcgtcgcctggtcattcctgccagcggcgcagttgccgcactggtggtggcactgctgattagcggtagtatcctgacctgggccggatttaacgatccgcaggaaatcaacggcaccttaagcgccgatgccacacctgcggaagctatctcacccgttgccgatcaggactggcctgcctatggtcgcaatcaggaaggtcaacgcttttcacctctgaaacaaattaacgccgataacgtccataatctgaaagaagcctgggtgttccgtactggcgatgtgaagcagccgaacgatccgggcgaaatcaccaatgaagtgacgccgattaaagtgggcgacaccctttacctgtgtaccgctcaccagcgcctgtttgcgctcgatgccgccagcggcaaagagaaatggcattacgatcctgagctgaaaactaacgagtctttccagcacgtaacctgccgtggcgtctcttatcatgaagccaaagcagaaacggcttcgccggaagtgatggcggattgcccgcgtcgtatcattcttccggtcaatgatggtcgcctgattgcgattaacgctgaaaacggcaagctgtgcgaaaccttcgccaataaaggcgtgctcaatctgcaaagcaatatgccagacaccaaaccgggtctgtatgaaccgacttcgccaccgattatcaccgataaaaccatcgtgatggcaggttcagttaccgataacttctcaacccgcgaaacgtctggcgtgatccgtggttttgatgtcaacaccggggagctgctgtgggcttttgatccgggcgcgaaagatccgaacgcaatcccgtctgacgaacacacctttacctttaactcgccaaactcgtgggcaccagcggcctatgacgcgaagctggatctggtgtatctgccgatgggcgtgaccacgccggatatctggggcggtaaccgcacaccggaacaggaacgttatgccagctcgattctggcgctgaatgccacaaccgggaaattggcgtggagctaccagaccgttcaccacgacctgtgggatatggatcttccggcacagccgacgctggcggacatcaccgttaatggtcagaaagtgccagttatttacgctccggcgaaaaccggcaacatttttgtgctcgatcgtcgtaatggcgaactggtggttccggcaccggaaaaaccggttccccaaggtgctgccaaaggcgattacgttacccctactcaaccattctcggaactgagcttccgtccgacgaaagatttgagcggtgcggatatgtggggagccaccatgtttgaccaactggtgtgccgcgtgatgttccaccagatgcgctatgaaggcattttcacgccgccatctgaacagggcacgctggtcttcccgggtaacctgggaatgtttgaatggggcgggatttccgttgatccaaatcgtgaagtggcaattgccaacccaatggcactgccgtttgtttcgaaactgatcccacgcggtccgggtaacccgatggagcagccgaaagatgccaaaggcacgggtacggaatccggcattcagccacagtacggtgtaccgtatggtgtcacgctcaacccgttcctctcaccatttggtctgccatgtaaacagccagcatggggttatatctcggcgctggatctgaaaactaatgaagtggtgtggaagaaacgtattggtacgccgcaggacagtatgccgttcccgatgcctgtaccggtgccgttcaatatgggtatgccgatgctgggcgggccaatctccacggcgggtaacgtgctgtttatcgccgctacggcagataactacctgcgcgcttacaacatgagcaacggtgaaaaactgtggcagggtcgtttaccagcgggtggtcaggcgacgccaatgacctatgaagtgaatggtaagcagtatgtggtgatctccgcaggcggtcacggttcatttggtacgaagatgggtgactatattgtggcttatgcgctgccggatgatgtgaagtaa

SEQ ID NO: 4077 - protein, 796 aa, Escherichia coli O157:H7 EDL933
MAINNTGSRRLLVTLTALFAALCGLYLLIGGGWLVAIGGSWYYPIAGLVMLGVAWMLWRSKRAALWLYAALLLGTMIWGVWEVGFDFWALTPRSDILVFFGIWLILPFVWRRLVIPASGAVAALVVALLISGSILTWAGFNDPQEINGTLSADATPAEAISPVADQDWPAYGRNQEGQRFSPLKQINADNVHNLKEAWVFRTGDVKQPNDPGEITNEVTPIKVGDTLYLCTAHQRLFALDAASGKEKWHYDPELKTNESFQHVTCRGVSYHEAKAETASPEVMADCPRRIILPVNDGRLIAINAENGKLCETFANKGVLNLQSNMPDTKPGLYEPTSPPIITDKTIVMAGSVTDNFSTRETSGVIRGFDVNTGELLWAFDPGAKDPNAIPSDEHTFTFNSPNSWAPAAYDAKLDLVYLPMGVTTPDIWGGNRTPEQERYASSILALNATTGKLAWSYQTVHHDLWDMDLPAQPTLADITVNGQKVPVIYAPAKTGNIFVLDRRNGELVVPAPEKPVPQGAAKGDYVTPTQPFSELSFRPTKDLSGADMWGATMFDQLVCRVMFHQMRYEGIFTPPSEQGTLVFPGNLGMFEWGGISVDPNREVAIANPMALPFVSKLIPRGPGNPMEQPKDAKGTGTESGIQPQYGVPYGVTLNPFLSPFGLPCKQPAWGYISALDLKTNEVVWKKRIGTPQDSMPFPMPVPVPFNMGMPMLGGPISTAGNVLFIAATADNYLRAYNMSNGEKLWQGRLPAGGQATPMTYEVNGKQYVVISAGGHGSFGTKMGDYIVAYALPDDVK

SEQ ID NO: 4078 - DNA, 2337 bp, Agrobacterium tumefaciens str. C58
  CDS (1)..(2337): transl_table=11
atggcagtcaccgtcactgcggtcattcttacgctgatcggccttgcgctgttcggcttcggctctcagctcgtcatgttgggcgggagcttttattatcttctttccggactggcctttctgttgacggccgttctgctgttcaagcgcaatcgcgccgcccttcacgtttatgccgttttcattgtcgcgacgcttgcctgggcagtctgggaagtcggatttgactggtggcagcttggaccgcggggcggcgtcattattctcattggtctttggctgctggtgccgtgggtcaggaaaccgcttggcttttcaagcccgaccggtctgagttacagccctaacgcttggccgctggtgctttccgttctcgcctcctttgcagttgccggctactccatggcgcaggacccgcatgatcaggcgggttcgttaccgcaggagatcgcatctgcggcacctgtctatggcggcgaagtgcctgacggtgactggcatcaatatggccgcacaccctatggccagcgttattcgccgctgacgcaggtgaatgtggacaatgtctcgcagttgaaggaagcctggcgttatcagacgggggacgtgaagctgcctgatgatgtgggtgagaccacctatcaggtcacgccactcaagatcggcaatacgctttatatctgcacgccgcataattgggcgatcgccatcgatgccgccaccggcaaggaaaaatggaaatacgaccccaatgtcggtctcaatcctgatcgccagcaccagacgtgccgtggcgtttcctattatgccgaaccgaacgccgctgccggcacggcctgcgcccagcgcgtctacctgccgacctcggacgcgcggctgatcgcgctcgatgcggccaccggccaggtctgcacctcctttgccgatcagggtgtgctgcatcttgaacagggcatgaagtacaatcccgccggttattattattcgacctcgccgccggtcatcgcggctggcaaaatcatcatcggcggcgcggtgaacgacaattattcgacgcaggagcagtccggcgtcatccgcgctttcgatgtgaatagcggtgctctcatctggaactgggattccggcaacccgcagaagaccgagccgatcgcggcgggtgagacctatacgaccaactcacccaacagctggtcggtgctgagttatgacgaaggcctcggcctcgtctacgtgccgcttggcaaccaggtgccggaccagcttggcatgggccgcagcgagaatgtcgagaaatattcctcctcgattgtcgcgctcgatatcaatacgggcaaggaccgctgggtgcgccagacggtacatcacgatctctgggacatggatgtgccggcccagccggtgctgctcgacatcaccaaggatggccagacggttccggccctcgtgggtcccaccaagcagggcgacatctacgtgctcgacaggcgcaccggtgagccgcttctgccgattaccgaggaaccggcgccgaccggagccatccctgaagacttcacatccccgacgcagccaacctcggcgctgtcgttcaagccggaaccgctgcaggaaaagaacatgtggggcgtctccatgttcgaccagctcgcctgccgcatccgcttccatcagctgaattacaagggccgctatacaccgccttcgctcaacggctcgatcatctatcccggcaatttcggcacgttcaactggggcagcgtggcggtcgatcccgagcgtcaggtgatgttcgggatgccaacctatctcgccttcacctcgcagctcgtgccgcgcgccgacattccgccgaagggacaggatgaaaagggcagcgaacagggcctcaaccgcaatgacggtgcgccctatggcgtctttatggggccattcctcggtccgctaaaaatcccctgccaggccccgccatggggttatgtcgcgggtgccgatctgcggaccggcgatgtcgcctacaagcataagaacggcacggtctatgacatgacgccgctgccgctacccttcaaggtgggggtgccgggcattggcggaccgatgatcaccaagggcggcgtcgccttcctcggtgcggccgtcgacaactatctgcgcgcctatgatctcaccacgggcaaagagctctgggaagcgcgtctgccagccggcggtcaggcaacgcccatgacctactcgctcgaaaacggaaaacaatatgtagtgatggtcgcgggcggccacggttcggttggtaccaagcccggtgattacgtcatcgcgtatacgctgccctga

SEQ ID NO: 4079 - protein, 778 aa, Agrobacterium tumefaciens str. C58
MAVTVTAVILTLIGLALFGFGSQLVMLGGSFYYLLSGLAFLLTAVLLFKRNRAALHVYAVFIVATLAWAVWEVGFDWWQLGPRGGVIILIGLWLLVPWVRKPLGFSSPTGLSYSPNAWPLVLSVLASFAVAGYSMAQDPHDQAGSLPQEIASAAPVYGGEVPDGDWHQYGRTPYGQRYSPLTQVNVDNVSQLKEAWRYQTGDVKLPDDVGETTYQVTPLKIGNTLYICTPHNWAIAIDAATGKEKWKYDPNVGLNPDRQHQTCRGVSYYAEPNAAAGTACAQRVYLPTSDARLIALDAATGQVCTSFADQGVLHLEQGMKYNPAGYYYSTSPPVIAAGKIIIGGAVNDNYSTQEQSGVIRAFDVNSGALIWNWDSGNPQKTEPIAAGETYTTNSPNSWSVLSYDEGLGLVYVPLGNQVPDQLGMGRSENVEKYSSSIVALDINTGKDRWVRQTVHHDLWDMDVPAQPVLLDITKDGQTVPALVGPTKQGDIYVLDRRTGEPLLPITEEPAPTGAIPEDFTSPTQPTSALSFKPEPLQEKNMWGVSMFDQLACRIRFHQLNYKGRYTPPSLNGSIIYPGNFGTFNWGSVAVDPERQVMFGMPTYLAFTSQLVPRADIPPKGQDEKGSEQGLNRNDGAPYGVFMGPFLGPLKIPCQAPPWGYVAGADLRTGDVAYKHKNGTVYDMTPLPLPFKVGVPGIGGPMITKGGVAFLGAAVDNYLRAYDLTTGKELWEARLPAGGQATPMTYSLENGKQYVVMVAGGHGSVGTKPGDYVIAYTLP

SEQ ID NO: 4080 - DNA, 2430 bp, Agrobacterium tumefaciens str. C58
  CDS (1)..(2430): transl_table=11
atgggtaatccagcaacttcattgtcgctcccggccagattatggctgttggcgctcggcgcggtcatcatcgctgcgggcctgttctttgccattggcggctggcagctcgtcgccctcggtggcagcccctatttcatcatcgcaggtctttcgctcatcgtttcgggcctgctgatcctgctgcgcaagccggcaggcgcgcttcttttcggtcttgttttcatcctcaccggcgtctgggctgtatgggaagcgggccttcatttctggccgctgatttcccgtctgctggccatcggggttggcgcaaccgtcgttgccctgtcatacccgctgctgcgccgtgcagccggcaaaacgccggcatatggctcttctttcgcggtagccgctgttctcgccatcgcttccggggccggttttgccggcatgttcgtggcgcatccgaccgttgccttcaatggcgagccggcggcgctgacgccggtcaagccggaaacggagcagaagaactgggaacattacggcaatacgtccggcggcagccgtttcgtggcgcttgatgaaattacccgagacaacatcaagaacctcgaagtcgcctggacctaccacaccggcgataccccgatcagccccggcgccaacggtgcggaagaccagcagacgccgctgcaggtaggtgacaccgtgttcctgtgcacgccgcacaacaatgtcatcgctctcgatgccgataccggaaccgagaagtggaaggcggaaatcaattcgaaatcctccgtctggatgcgttgccgcggccttgcctatttcgatgccaaggcgccgctgaagcaaccgactgcgccgggctccacgcccgtcacggccgcggttgtggccgaaggcgcactttgccagcgccgtattctgatgaacaccatcaatgcggaactcatcgcgcttgatgcggacacgggcgcgttttgccctgacttcggcacaaatggccgcgtcgatctgaagatcggtatgggagatgcaccggacccgcaatatgtcctgacctcggcacccacgctggccggcacgaccgtcgttgtcggcggccgtatcgccgataacgtgcaggtggacatgcccggcggtgtgatgcgcggtttcgacgtggtcacgggcgagcttcgctgggcttttgaccccggcaatcccgatatcaccaagctgccgcctccgggccagacttacacacgttccacgccgaacgtctgggcatccatgtcctacgatccggacctgaacacggtcttcatgcccgtcggcagcccttcggtcgatctttatggcgcgacacgcacgccgctcgaccataaatatggtgcctccatgctggcgctcgatgccacgaccggccgcgaaaagtgggtataccagacggttcataacgacctctgggacttcgacgtgccgatgcagccgagcttcgtcgatttcccgaaggctgacggaaccagcgttccggcgctggtcttcggcaccaaggcggggcagctctacgtgctcgaccgcgcgacgggacagccgctgaccaaggtggaagaggtttccgtcaaggctgccaatattcccaatgagccctacgcccccacgcagccgcgttccgtcggcatgccgcagatcggtgcgcagacgctgacggaagccgatatgtggggtgcgaccccgttcgaccagcttttgtgccgcatcgccttcaagggcatgcgttatgaggggctgtatacggcgcccggcacggacctctcgctcgccttcccgggttcgctcggcggcatgaactggggcggtctgtcgaccgatccgaccaccaacactatcttcgtcaacgatatgcgcctcggtctctggatcgagatgaaggaagccgcccccaccaaggccgttgccagcggtggcgaaagcgtcaataccggcatgggcgtcgttccgatgaagggcacgccctatgcggtgaacaagaaccgcttcctgtcggctctcggcatcccatgccaggctccgccctatggcaccatgaccgcgatcgacatgaagacgcagcagatcaagtggcaggtgccggtcggcaccgtcgaggatacgggtccgctcggtatcaagatgggtctgccgatcccgatcggcatgccgacgctcggcggcacgctcgccacccagggcggcctcgtcttcatcgccggtacgcaggattattatctgcgcgccttcgatacggcgaccggcaaggaagtctggaaggcccgccttccggtcggcagccagggcggaccgatgagctacaagtctccgaagacgggcaagcaatatgtcgtcatctcggccggcggtgcccgccagtctcccgatcgcggcgactacgtcatcgcttatgcattgcccaactga

SEQ ID NO: 4081 - protein, 809 aa, Agrobacterium tumefaciens str. C58
MGNPATSLSLPARLWLLALGAVIIAAGLFFAIGGWQLVALGGSPYFIIAGLSLIVSGLLILLRKPAGALLFGLVFILTGVWAVWEAGLHFWPLISRLLAIGVGATVVALSYPLLRRAAGKTPAYGSSFAVAAVLAIASGAGFAGMFVAHPTVAFNGEPAALTPVKPETEQKNWEHYGNTSGGSRFVALDEITRDNIKNLEVAWTYHTGDTPISPGANGAEDQQTPLQVGDTVFLCTPHNNVIALDADTGTEKWKAEINSKSSVWMRCRGLAYFDAKAPLKQPTAPGSTPVTAAVVAEGALCQRRILMNTINAELIALDADTGAFCPDFGTNGRVDLKIGMGDAPDPQYVLTSAPTLAGTTVVVGGRIADNVQVDMPGGVMRGFDVVTGELRWAFDPGNPDITKLPPPGQTYTRSTPNVWASMSYDPDLNTVFMPVGSPSVDLYGATRTPLDHKYGASMLALDATTGREKWVYQTVHNDLWDFDVPMQPSFVDFPKADGTSVPALVFGTKAGQLYVLDRATGQPLTKVEEVSVKAANIPNEPYAPTQPRSVGMPQIGAQTLTEADMWGATPFDQLLCRIAFKGMRYEGLYTAPGTDLSLAFPGSLGGMNWGGLSTDPTTNTIFVNDMRLGLWIEMKEAAPTKAVASGGESVNTGMGVVPMKGTPYAVNKNRFLSALGIPCQAPPYGTMTAIDMKTQQIKWQVPVGTVEDTGPLGIKMGLPIPIGMPTLGGTLATQGGLVFIAGTQDYYLRAFDTATGKEVWKARLPVGSQGGPMSYKSPKTGKQYVVISAGGARQSPDRGDYVIAYALPN

SEQ ID NO: 4082 - DNA, 2334 bp, Sinorhizobium meliloti 1021
  CDS (1)..(2334): transl_table=11
atggtcatcgtcctgaccgccgtcgtcttcgccgtgatcggcctcgccctctgtgggggcggcacgcggctcctgctgctcggcggcagcccgtattatctcatcgccggcttgggctttctgctcaccgcgtttttgctctttcgccgccgcgccgccgcgctttgggtctatgcgctggtcgttctcgggtcgctcgcatgggcgatctgggaggtgggcttcgattggtggcaactcgggcctcggggcggcgtgatcatcctgctcgggctgtggctgctaaccccatggatccggcgacccctcggcttcgtcagccccaccggcgagcaatatggggcaagcgcctggccgcttgcactggtgagcctcctctcggtcggtgtcgccctctattcgatgacgcaggacccccatgacattcgcggcgatctgcccggcgaagtcgcggcgaacgcgaacctcgggggcaacgtaccgccgggcgaatggcaccaatatggtcgcacgcccttcggtcaacgttactccccgctcgaccagatccgtccggaaaacgtcgccaacctgcaggtggcgtggcaataccagaccggagacgtgaagctgcccgaagacgtcagcgaaaccacttatcaggtgacgccgctgaaggtgaaggacacgctctatgtctgcacgccgcacaactgggcgatcgcgctcgacgcagccaccggtcaggagaagtggaaatacgattccaattccggcatgaacccggatcgccagcatcagacctgccgcggcgtcacctattgggccgatccggccgcagcgcccggcagcccctgcgccgagcgcgtctatctgccgacatcggacgcccgcctgatcgcgctcgacgcgacgaatggcgaggtctgcaccagcttcgccgacaacggcgtcctgcatctcgaacagggcatgaagcacaaccccgccggctactactattcgacctcgccgcccgtcgccgtcggcgacaggctcatcatcggcggggcggtcaacgacaactattccaccacggaacagtccggcgtgatccgcgctttcaacatcaacaccggcgcactcatctggaattgggacagcgggaatccggacgtaacggcgcccctccctccgggtcaaacctacaccaccaattcgccaaacagctggtccgtcttcagctatgacgaagggctcggcctcgtctacatccccatgggcaaccaggtgcccgaccagctcggcatgggccgcagcgagcatgtggagaaatactcctcctccatcgtcgccctggacatcaatacgggcgcggtacgctgggtacggcagacggtgcatcacgatctctgggatatggacgtacccgcccaacctgcccttctcgacatcacgagagaggacggaaccgtcgtgccggcactcgtcgggcctaccaagcagggcgacatctatgtgctcgaccggcgaagcggggagccgatcatcccgatcgaggaagtacccgctcccggcggtgcgatccccgaggatttcacggcccccacccagcccgtctcaggtctcaccttcatgcccccgccgctcatggagcgcgacatgtgggggatcagcatgttcgaccagcttgcatgccgcatcgaattcagaacgctgaaatacgagggacgctacacgccgccttccctcgaggggacgatcgtctatcccggcaatttcgggactttcaactggggctccgtcgccgtggatccggagcgccaggtgatgttcgggatgccgacctatctcgccttcacctcgcggctcgttccgcgcgaccagatcgccccgaagggcgaaggcgaaaagggtagcgaacagggcctcaaccgcaatgaaggcgcaccttacggggtctttatgggtccgttcctcggcccgctcgggattccctgccaggcaccgccatggggttatgtcgcaggcgccgatctcagaacgggcaagatcgcctacaagcacaagaacggcacggtctacgacatgacgccgctgccgctgcccttcaagctgggcgttccgggcatcggcggacccatgataaccaagggcgggctcgctttcctgggtgccgcggtcgacgattacttccgggcttacgacctgaccacgggcgaacagctctgggaagcgcggcttccggccggcggccagtcgacgccgatgacctatacggtcggcgagaagcagtatgtcctgatcgtcgcgggcggacacggttcggtcggcaccaagccgggcgactatgtcatcgcctatacgctgccctga

SEQ ID NO: 4083 - protein, 777 aa, Sinorhizobium meliloti 1021
MVIVLTAVVFAVIGLALCGGGTRLLLLGGSPYYLIAGLGFLLTAFLLFRRRAAALWVYALVVLGSLAWAIWEVGFDWWQLGPRGGVIILLGLWLLTPWIRRPLGFVSPTGEQYGASAWPLALVSLLSVGVALYSMTQDPHDIRGDLPGEVAANANLGGNVPPGEWHQYGRTPFGQRYSPLDQIRPENVANLQVAWQYQTGDVKLPEDVSETTYQVTPLKVKDTLYVCTPHNWAIALDAATGQEKWKYDSNSGMNPDRQHQTCRGVTYWADPAAAPGSPCAERVYLPTSDARLIALDATNGEVCTSFADNGVLHLEQGMKHNPAGYYYSTSPPVAVGDRLIIGGAVNDNYSTTEQSGVIRAFNINTGALIWNWDSGNPDVTAPLPPGQTYTTNSPNSWSVFSYDEGLGLVYIPMGNQVPDQLGMGRSEHVEKYSSSIVALDINTGAVRWVRQTVHHDLWDMDVPAQPALLDITREDGTVVPALVGPTKQGDIYVLDRRSGEPIIPIEEVPAPGGAIPEDFTAPTQPVSGLTFMPPPLMERDMWGISMFDQLACRIEFRTLKYEGRYTPPSLEGTIVYPGNFGTFNWGSVAVDPERQVMFGMPTYLAFTSRLVPRDQIAPKGEGEKGSEQGLNRNEGAPYGVFMGPFLGPLGIPCQAPPWGYVAGADLRTGKIAYKHKNGTVYDMTPLPLPFKLGVPGIGGPMITKGGLAFLGAAVDDYFRAYDLTTGEQLWEARLPAGGQSTPMTYTVGEKQYVLIVAGGHGSVGTKPGDYVIAYTLP

SEQ ID NO: 4084 - DNA, 2391 bp, Salmonella typhimurium LT2
  CDS (1)..(2391): transl_table=11
atggcagaaaataacgcacgatcgccacgattactcgtgacgctgacggccctctttgcagcactttgtgggctgtatcttcttatcggaggtgtctggctggttgctattggcggttcctggtactaccccatcgcgggcctcgtgatgctggttgtggccggattgctatggcgcagtaaacgtgccgcactgtggctgtatgccgccctgctgctggcgacaatgatttggggcgtgtgggaagtcgggttcgacttctgggcgctcacgccgcgtagcgatatcctggtgtttttcggcatctggctaatattaccgtttgtctggcatcggctggtggttccttccagtggcgcagtggcggcgctggtcgtggcgttgctgattagcggcggcattctgacctgggccggcttcaacgacccgcaggagatcaacggtacgcttcgcgccgacgccacgcccgccgcaacaagttcgtcgatcgccgacgaagactggccggcctatgggcgcaatcaggaaggccaacgctattcgccgctgaaacagatcactgcggataacgttcaccaactgaaagaagcgtgggtcttccgcaccggcgatctgaaacagcccaacgatccgggtgaaatcaccaacgaagtgaccccgataaaagtcggcgatacgctttatctgtgtacagctcaccagcgtctgttcgcgctggacgccgccagcggtaaagagaagtggcattttgatcctcagttgaagaccgattcgtctttccagcatgtgacctgccgcggcgtctcttatcatgaggccaaagcggataccgcctcgccggaggtcatcgccgactgtccgcgccgtattatcctcccggtcaacgacggtcgccttttcgcggtgaatgccgaaaccggcaagctgtgtgaaaccttcgccaacaaaggcgtcctgaatctgcaaaccaatatgccggataccacaccgggactgtatgaaccgacgtcgccgccgattatcaccgataaaacaattgtcattgccggttcggtcacggataacttctctacccgcgaaacgtccggcgttatccgaggttttgatgttaatagcggtaaactcatgtgggccttcgatccgggggcgaaagatccgaacgcgattccagccgatgagcacgcttttacctttaactcgccgaactcctgggcgcctgccgcctatgatgcgaaactggatctggtctatctgccgatgggcgtgaccacgccggatatctggggcggtaaccgcacgccggagcaggagcgttatgccagctccatcctggcgctgaatgccaccaccgggaaactggcctggagttatcagaccgtccatcacgatctgtgggatatggacctgccggcacagccgacgctggcggatattaccgttgacggtactaccgttccggttatctatgcgccagcgaaaaccggtaatatctttgtgctggacagacgtaatggcgagctggtcgtgcccgccccggaaaaaccggtcccgcagggcgcggcaaaaggcgattacgtcgccaaaactcagccgttctctgatttaaccttccgcccgaaaaaagatctctccggcgcggatatgtggggcgcgaccatgttcgaccaactggtgtgccgcgtcatgttccaccagttgcgctatgaaggtatcttcaccccgccgtccgagcaggggacattggtattccctggcaacctggggatgtttgaatggggcggtatttccgtcgatccagaccgtcaggtcgctatcgctaacccgatggcgctgccgtttgtctcgaagctgatcccacgcggcccgggtaatccaatggagccgccgaaagacgcgaaaggtaccggtacagaagcgggtattcagccacagtacggcgtaccattcggcgtcacgctgaatccgttcctttcgccgtttggcctgccgtgtaaacaaccggcctggggctatatttccgcgttggatctgaagaccaatgaaatcgtgtggaagaaacgtatagggacgccgcgcgacagtatgccgttcccgatgccggttccggtgccgttcaacatggggatgcccatgctgggcgggccaatctcaaccgccggtaatgtgctgttcattgccgcgaccgccgacaactacctgcgcgcttataacatgagcaacggggaaaaactgtggcagggacgtttacccgccggaggccaggcaacgcctatgacctatgaggtaaacggtaagcagtacgtggtcgtttctgccggaggccacggttcgtttggtacgaagatgggcgactatatcgtggcctatgctttgcctgacgacgcgaaataa

SEQ ID NO: 4085 - protein, 796 aa, Salmonella typhimurium LT2
MAENNARSPRLLVTLTALFAALCGLYLLIGGVWLVAIGGSWYYPIAGLVMLVVAGLLWRSKRAALWLYAALLLATMIWGVWEVGFDFWALTPRSDILVFFGIWLILPFVWHRLVVPSSGAVAALVVALLISGGILTWAGFNDPQEINGTLRADATPAATSSSIADEDWPAYGRNQEGQRYSPLKQITADNVHQLKEAWVFRTGDLKQPNDPGEITNEVTPIKVGDTLYLCTAHQRLFALDAASGKEKWHFDPQLKTDSSFQHVTCRGVSYHEAKADTASPEVIADCPRRIILPVNDGRLFAVNAETGKLCETFANKGVLNLQTNMPDTTPGLYEPTSPPIITDKTIVIAGSVTDNFSTRETSGVIRGFDVNSGKLMWAFDPGAKDPNAIPADEHAFTFNSPNSWAPAAYDAKLDLVYLPMGVTTPDIWGGNRTPEQERYASSILALNATTGKLAWSYQTVHHDLWDMDLPAQPTLADITVDGTTVPVIYAPAKTGNIFVLDRRNGELVVPAPEKPVPQGAAKGDYVAKTQPFSDLTFRPKKDLSGADMWGATMFDQLVCRVMFHQLRYEGIFTPPSEQGTLVFPGNLGMFEWGGISVDPDRQVAIANPMALPFVSKLIPRGPGNPMEPPKDAKGTGTEAGIQPQYGVPFGVTLNPFLSPFGLPCKQPAWGYISALDLKTNEIVWKKRIGTPRDSMPFPMPVPVPFNMGMPMLGGPISTAGNVLFIAATADNYLRAYNMSNGEKLWQGRLPAGGQATPMTYEVNGKQYVVVSAGGHGSFGTKMGDYIVAYALPDDAK

SEQ ID NO: 4086 - DNA, 2472 bp, Xanthomonas campestris pv. campestris str. ATCC 33913
  CDS (1)..(2472): transl_table=11
atgtcgacattgcttcgtccctcccgtcgcggccattgggccctggcgattctgggaggcgtgattgtgctgctggggctggtgctgctggcaggtggtgcgtggctcgccacgctgggcggatcctggtattacgcaccggcaggcctggcgatgctgatcgctggcgtgttgctgttccgcggccgcaatgccggcgcgtggtggtttgccgccgtcgtggccgccacgctgctgtggacgtggtgggaatcgggcagtgattactggcgctgggtgccgcggctcgggttgatcgtgggcctggcgtttgtgctggcgctgctgttgcccaagctcgagcgcccggtgtcgcgcgccgtctcgcgcagcgtggctggcggactggcagtggtgtttgtggtggcctttgcgttggccttcgtgccgttcggaatcaccgaggccgagggtgcattgacgcaggtggcaggcatcgccgcaggtgtggtcaatcgccccgccgatggcgcacagccggcacagcccgccaatgcgccggtcgatgacgactgggccgcatatggacgcagccaggctgggcagcgctattcgccactcacccaaatcaatcgcgacaatgtcagccagctgcagcaggcgtgggtgttccataccggcgatgtgccgaccaagcgctggggcgccgaaaccacaccgttgaaggtcggcgacagcctgtatctgtgtagcgcgcgcaatcaggtgatcgcgctggacgcctccaccggcaagcagcgctggcgctacgaccccaaggtcaaggacgaggccattccatacaccgcggcctgccgcggggtgtcgtattacgaagtgccgacggcggcgccggccgcaaatgacgcagccgcttcgcaggcggcgacggcgcctgcgctgtgccgtacgcgcgtgatcgaaggcacgctggatgggcgcctgattgcattggatgcgcgcaccgggacaccatgcgcggacttcggcactcacggtcaggtcgacatcaccgtcggcatgggcgagacgccaccgggctacatctcgatcaactcgccgccggccatcgtgcgcggcgtggtggtcatcgggcatcaggtccttgacgggcaaaagcgttatgagccctcgggcgtgatccagggctttgacgcggtcaccggccagttgcgctgggcctgggacatgacccatcccgaatggaatggtgcaccgccgcctggccagacctggacgcgcggcacccccaacatgtggaccaccgcagcggccgacgagcagctgggttacgtgtatctgccgatgggcaattccaccgcggactactggagcagctcgcgcacgccgccggaaaaccgctatgccacctcgctggtggcgttggatgtgaccaccggcaagccggtgtggaatttccagaccacgcatatcgacgcatgggattacgacctcggctcgcagcccagcctgatcgatttccccaaggatggcgtcaacgtgccggccgtgttgctgccgagcaagcagggcgagttgtacgtgctggaccgtcgcaccggcgagccgctggttggcgtggaagagcgcgccgtgcccggcggtggtgtggagccgcagatgcgctccaagacccagccgttctcgctgtatcacacgctgcgcaagccggatctgaccgagcgcgacatgtggggcatgaccccgatcgatcagctggtgtgccgtatccagttccgcaaggcgagctacaagggcatctacacgccgcccgaagccgaccggcattccatcgaataccccggctataacggcggctcggactggggcagcgtggcggtggatccgcaccgtggcgtgatcgtggccaactacaacgacatgcccaactacaacatcctggtgccgcgcgccaaggcggacaaactgggctgggctccgcgcgatcaggtgcgtggcgatgccggtggtgccgaaggcgccggcgacccgcaggccggcacgccctacgcggtaaacgtcaacgccggctggcgtttgccgttcaccaagctgctgtgcaagcagccaccctatggcggcattcgcgccatcgatctgaagagcggcaagaccctgtgggaccgtccctttggcagtgcgcgcggcaacgggccgttcgggattcgctccggcctgccgatcgaaatcggcacgccgaacaacggtggctcggtggtcactgcgggtggtctgatcttcattgccgccgcaaccgatgacctgatccgtgcgatcgacctggccaccggcaaggagctgtggcacgccaagctgccggccggtggccaggccaatccgatggtctacgcgtacggcggccgcgagtatctggtgatcatggcggccggtcaccacttcatggaaacaccggcaggcgatgccctggtggcctacgcgttgccgcagcggtaa

SEQ ID NO: 4087 - protein, 823 aa, Xanthomonas campestris pv. campestris str. ATCC 33913
MSTLLRPSRRGHWALAILGGVIVLLGLVLLAGGAWLATLGGSWYYAPAGLAMLIAGVLLFRGRNAGAWWFAAVVAATLLWTWWESGSDYWRWVPRLGLIVGLAFVLALLLPKLERPVSRAVSRSVAGGLAVVFVVAFALAFVPFGITEAEGALTQVAGIAAGVVNRPADGAQPAQPANAPVDDDWAAYGRSQAGQRYSPLTQINRDNVSQLQQAWVFHTGDVPTKRWGAETTPLKVGDSLYLCSARNQVIALDASTGKQRWRYDPKVKDEAIPYTAACRGVSYYEVPTAAPAANDAAASQAATAPALCRTRVIEGTLDGRLIALDARTGTPCADFGTHGQVDITVGMGETPPGYISINSPPAIVRGVVVIGHQVLDGQKRYEPSGVIQGFDAVTGQLRWAWDMTHPEWNGAPPPGQTWTRGTPNMWTTAAADEQLGYVYLPMGNSTADYWSSSRTPPENRYATSLVALDVTTGKPVWNFQTTHIDAWDYDLGSQPSLIDFPKDGVNVPAVLLPSKQGELYVLDRRTGEPLVGVEERAVPGGGVEPQMRSKTQPFSLYHTLRKPDLTERDMWGMTPIDQLVCRIQFRKASYKGIYTPPEADRHSIEYPGYNGGSDWGSVAVDPHRGVIVANYNDMPNYNILVPRAKADKLGWAPRDQVRGDAGGAEGAGDPQAGTPYAVNVNAGWRLPFTKLLCKQPPYGGIRAIDLKSGKTLWDRPFGSARGNGPFGIRSGLPIEIGTPNNGGSVVTAGGLIFIAAATDDLIRAIDLATGKELWHAKLPAGGQANPMVYAYGGREYLVIMAAGHHFMETPAGDALVAYALPQR

SEQ ID NO: 4088 - DNA, 2475 bp, Xanthomonas campestris pv. campestris str. ATCC 33913
  CDS (1)..(2475): transl_table=11
atgactgatcaatcctctaaacgcgggctcggcacttggctgttggtagcctatgccgtggtgctcgccgtgcttggtgcggcgctcgcctatgaaggcgggcgcctggtggccgttggcggctcctggtattacgtgctggccggtatcgccgtgctggtggccggtgtgctgctggcactgggcaaacgcgctggcctgtggctgtttggcgctacgttggcggccaccatcgtgtgggcgctgtgggaagtgggcctggatggctggggcctgatcccacgtctggcctggatctcggtgctcggcctggtgctgttgccgttctggggcgtggcgcggcggcgcatgcagccgttgtccgggctcggctatgtcgtggtcaccggcgtgctgccggtgctgggtgcggcgctgatcctgtggccgctgctggtgccgcgcaatgtggaactggccgatgcatccaagcagccggccgatgcggcaacgccgttcagccgtggcagcgtgcccagcccggacgggaacgtggcggccaaccacgatgccagtaactggaccgcctacgccggttccaacctgtccaaccattacacccccggcgcgcagatcacgccggagaacgtcaagggcctcaaggtggcctgggaattccataccggcgatctcaagccgaaggattccaagctgggctatgcgttccagaacaccccgctcaaggtcggcgacctgctctacatctgcaccccgacccagaaggtgattgcggtggaggcggccaacggcaaggagcgctggcgcttcgacccgcagaccaatccgaaggcgatggccggcgtggccgccaccacatgccgcggcgtgtcgtactaccaggcgccggaaggcactgccgagtgcccgacgcggatcttctggccgatggtcgatggccgcctgggtgcgctggatgcgcagaccggcaagctctgcgccagcttcggtaacaacggctatgtggacctcaatgccggcaccggcaacaccaagccgggcttcgtcggcccgacctcgccgccggtggtcatgcgcggtgtggtgatccagcccaccgggcaggtgcgcgacggtcaggaacgcgatgcgccgtccggcgtggtgcgcggcttcgacgcgctcaccggccagctgcgctgggcctgggatctgggcaacccggccatcaccgccgaaccgccggccggccagacctatacccgctccaccccgaacgtgtggtcgctgatggccgccgatgacgagctggggctggtgtatctgcccaccggcaacgctgccggcgacttcttcggcaagggccgcaccccgcaggaagaggaatacaccgcctcgctggtggccgtggatgcggcaaccggcaaggagcgctggcacttccgtaccgtcaatcacgatctgtgggactacgacatcggcccgcagccgaacctggttgattggccggttgccggcggtggcacccgccccgccgtgatccaggccaccaagtccggccaggtgttcgtgctcgaccgcgccaccggccagccgatcatgcctgtcaagcagatcgccgtgccgcagggcaccgaccatggcgactggaccgcatccacccagccggtgtcgccgggcatgcccaacaccgtgggtgcgcccagccgtgactacgagaccatcgttgaatctgacgcgtggggcatgaccccgttcgaccagctcgcttgccgcatcgagttcaagaagctgcggtacgaaggcatgttcaccccgccaagcctgcagggctcgctgtcgttcaccggcaaccatggcggcatcaactggggcggcgtgtcggtcgatctgcagcgcggcatcatggtgatgaacagcaatcgcctgccctataccgagcacgtctacccgcgcacggtgatgaacgagctgggcgtggtgtcggtgttcaacggcagcagcaagaccaagggctacatggcgcaggaaggcctggcctatggcgcgcgcaaggagccgtggatgtcgccgctcaacacgccgtgcgtggcaccgccgtggggctatatctccggcgtggatctgcgcacgcagcaggtgatctggcgccgtccgctgggcaccggttacgaccagggcccaatgggcatcccgtccaagaccaagttcgagatcggcaccccgaacaacagcggctcgctggccactgccggcggcgtcaccttcatcggtgccagcctggacaacttcatccgcggctttgacacccgcaccggcaagcaggtctgggagacccgcgtgcctgcgggcccgcaggccgcgccgctgagctacaccatcgatggcaagcagtacatcgttgccgcggtgggtggccatgaccgcatggaaaccaagtccggcgacagcgtcattgcctgggcactgcccgacgacgcggccgccagcgccaaataa

SEQ ID NO: 4089 - protein, 824 aa, Xanthomonas campestris pv. campestris str. ATCC 33913
MTDQSSKRGLGTWLLVAYAVVLAVLGAALAYEGGRLVAVGGSWYYVLAGIAVLVAGVLLALGKRAGLWLFGATLAATIVWALWEVGLDGWGLIPRLAWISVLGLVLLPFWGVARRRMQPLSGLGYVVVTGVLPVLGAALILWPLLVPRNVELADASKQPADAATPFSRGSVPSPDGNVAANHDASNWTAYAGSNLSNHYTPGAQITPENVKGLKVAWEFHTGDLKPKDSKLGYAFQNTPLKVGDLLYICTPTQKVIAVEAANGKERWRFDPQTNPKAMAGVAATTCRGVSYYQAPEGTAECPTRIFWPMVDGRLGALDAQTGKLCASFGNNGYVDLNAGTGNTKPGFVGPTSPPVVMRGVVIQPTGQVRDGQERDAPSGVVRGFDALTGQLRWAWDLGNPAITAEPPAGQTYTRSTPNVWSLMAADDELGLVYLPTGNAAGDFFGKGRTPQEEEYTASLVAVDAATGKERWHFRTVNHDLWDYDIGPQPNLVDWPVAGGGTRPAVIQATKSGQVFVLDRATGQPIMPVKQIAVPQGTDHGDWTASTQPVSPGMPNTVGAPSRDYETIVESDAWGMTPFDQLACRIEFKKLRYEGMFTPPSLQGSLSFTGNHGGINWGGVSVDLQRGIMVMNSNRLPYTEHVYPRTVMNELGVVSVFNGSSKTKGYMAQEGLAYGARKEPWMSPLNTPCVAPPWGYISGVDLRTQQVIWRRPLGTGYDQGPMGIPSKTKFEIGTPNNSGSLATAGGVTFIGASLDNFIRGFDTRTGKQVWETRVPAGPQAAPLSYTIDGKQYIVAAVGGHDRMETKSGDSVIAWALPDDAAASAK

SEQ ID NO: 4090 - DNA, 2478 bp, Xanthomonas axonopodis pv. citri str. 306
  CDS (1)..(2478): transl_table=11
atgactgatcaatcctcaaaacgtgggctaggcacctggttgctggtggcctatgccgtggtgatcgccgtgcttggcgcggtgctcgcctaccagggcggccgcctggtggccgtgggcggctcctggtattacctgatcgcgggtattgccctgttcctggcgggcgtcctgctcgcgctgggcaagcgcgccgggctgtggctgtttggcgccacgctggccggtaccatcgcctgggcgctgtgggaagtgggcctggatggctggggcttggtgccgcgcctggccatgatgtcggtgctggggctggtgctgctgccgttctggggggtggcgcgtcgtcgcatgcagccgttgtccggcctgagctatgcgctggtgaccggcgtgctgccaatcctgggcgccgcgctgatcctgtggccgctgctgatgccgcgcaatgtcgagctggccgatgcctccaagttgccggccgacagcgccacggccttcagccgcggcaccgtgcccagccccgacggcaacgtcgcggccaatcatgacgccagcaactggacctcctatgcgggttccaacctgtccaaccactacacgcccggcgcgcagatcacgccggacaacgtgaagaatctcaaggtggcctgggaattccacaccggcgacctcaagcccaaggactccaagctgggctacgccttccagaacaccccgctcaaggtcggcgacctgctctacatctgtacccccacccagaaagtgatcgcggtggaagcggccaacggcaaggagcgctggcgcttcgatccgcagaccaacccaaaggcgatggcgggcgtggctgccaccacctgccgtggcgtgtcgtactaccaggcgcccgaaggcaccgccgagtgcccgacccggatcttctggccgatggtcgatggccgcctcggcgcgctggatgcgcagaccggcaagctgtgcaccagcttcggcaacaacggctatgtcgatctgaatgcgggcaccggcaacaccaagccgggcttcgtcggccccacctcgccgccggtggtgatgcgtggtgtggtgatccagccgaccggccaggtccgcgatggtcaggaaggcgatgcgccgtccggcgtggtgcgtggcttcgatgcgctcaccggccagctgcgctgggcctgggacctgggcaacccggcgatcaccgccgagccgccggccggccagacctacacgcgctcaaccccgaacgtatggtcgctgatggccgccgacgacgagctgggcctggtctatctgcccaccggcaatgcatccggcgacttcttcggcaagggccgcaccccgcaggacgaggaatacaccgcctcgctggttgcggtggatgccgccaccggcaaggaacgctggcacttccgtaccgtcaaccacgacctgtgggactacgacatcggcccgcagccgaacctggtcgattggccggtcgctggcggcggcacgcgtactgcggtgatccaggccaccaagtccggccaggtgttcgtgctggaccgcgccaccggcgagccgatcatgccggtcaagcagattccggtaccgcagggaaccgaccacggcgactggaccgccgccacgcaaccgatctcgccgggcatgcccaacaccgtgggcgcgccgagccgtgagttcgaaaaaatcatcgaatccgatgcctggggcatgactccgttcgaccagttggtctgccgtatccagttcaagcagctgcgctacgaaggcatgttcaccccgcccaccctgcaggggtcgctggccttcaccggcaaccacggcggcatcaactggggcggcgtttcggtggacctgcagcgcggcatcatggtgatgaacagcaatcgcctgccctacaccttgcaggtgtatacccgccagaagatggacgagctgggcgtggtgtcggtgttcgacggcaagagcaagacccccggctacatggcgcagaagggcctggcctacggcgcccgcaaggagccgtggatgtcgccgctcaacaccccgtgcgtggcaccgccgtggggctacatcgccggtgtggacctgcgcacgcagcaggtgatctggcgtcgtccgctgggcaccggttacgaccagggtccgatggccatcccgtccaagaccaagttcgagatcggcacgcccaacaacagcggctcgctggccaccgctggcggggtgaccttcatcggcgcgaccctggacgacttcatgcgcggcttcgacacccttaccggcaagcaggtctgggaaacccgcgtccccgccgggccgcaggcagcgccgatgagctacaccatcaacggcaagcaatacatcgtggccgccgtcggtggacacgaccgcatggaaaccaagtcgggcgacagcgtcattgcctgggccctgcccgacgatgcgcaggccgcgcctgccaagtaa

SEQ ID NO: 4091 - protein, 825 aa, Xanthomonas axonopodis pv. citri str. 306
MTDQSSKRGLGTWLLVAYAVVIAVLGAVLAYQGGRLVAVGGSWYYLIAGIALFLAGVLLALGKRAGLWLFGATLAGTIAWALWEVGLDGWGLVPRLAMMSVLGLVLLPFWGVARRRMQPLSGLSYALVTGVLPILGAALILWPLLMPRNVELADASKLPADSATAFSRGTVPSPDGNVAANHDASNWTSYAGSNLSNHYTPGAQITPDNVKNLKVAWEFHTGDLKPKDSKLGYAFQNTPLKVGDLLYICTPTQKVIAVEAANGKERWRFDPQTNPKAMAGVAATTCRGVSYYQAPEGTAECPTRIFWPMVDGRLGALDAQTGKLCTSFGNNGYVDLNAGTGNTKPGFVGPTSPPVVMRGVVIQPTGQVRDGQEGDAPSGVVRGFDALTGQLRWAWDLGNPAITAEPPAGQTYTRSTPNVWSLMAADDELGLVYLPTGNASGDFFGKGRTPQDEEYTASLVAVDAATGKERWHFRTVNHDLWDYDIGPQPNLVDWPVAGGGTRTAVIQATKSGQVFVLDRATGEPIMPVKQIPVPQGTDHGDWTAATQPISPGMPNTVGAPSREFEKIIESDAWGMTPFDQLVCRIQFKQLRYEGMFTPPTLQGSLAFTGNHGGINWGGVSVDLQRGIMVMNSNRLPYTLQVYTRQKMDELGVVSVFDGKSKTPGYMAQKGLAYGARKEPWMSPLNTPCVAPPWGYIAGVDLRTQQVIWRRPLGTGYDQGPMAIPSKTKFEIGTPNNSGSLATAGGVTFIGATLDDFMRGFDTLTGKQVWETRVPAGPQAAPMSYTINGKQYIVAAVGGHDRMETKSGDSVIAWALPDDAQAAPAK

SEQ ID NO: 4092 - DNA, 2331 bp, Shigella flexneri 2a str. 301
  CDS (1)..(2331): transl_table=11
ttgcagcgctggctgtatctactcattggcggaggctggctggtcgcgattggcggctcctggtactaccctatcgctggccttgtgatgctcggcgtcgcctggatgctgtggcgcagtaaacgcgccgcgctttggctatacgcagccctgctgctcggcaccatgatttggggcgtctgggaagttggtttcgacttctgggcgctgactccgcgcagcgatattctggtcttcttcggcatctggctgatcctgccgtttgtctggcgtcgcctggtcattcctgccagcggcgcagttgccgcactggtggtcgcactgctgattagcggtggtatcctgacctgggccggatttaacgatccgcaggagatcaacggcaccttaagcgccgatgccacacctgccgaagctatctcccccgttgccgatcaggactggcctgcgtatggccgcaatcaggaaggtcaacgcttttcaccactgaagcaaattcacgccgataacgtccacaagctgaaagaagcctgggtgttccgtactggcgatgtgaagcagccgaacgatccgggtgaaatcaccaatgaagtgacgccgattaaagtgggcgataccctttacctgtgtaccgctcaccagcgcctgtttgcgcttgatgccgccagcggcaaagagaaatggcattacgatcctgagctgaaaaccaacgagtctttccagcacgtaacctgccgtggcgtctcttatcatgaagccaaagcagaaacggcttcgccggaagtgatggcggattgcccgcgtcgtatcattcttccagtgaatgatggtcgcctgattgcgattaacgctgaaaacggcaaactgtgcgaaaccttcgccaataaaggcgtgctcaatctgcaaagcaatatgccagacaccaaaccgggtctgtatgagccgacttctccgccaattatcaccgataaaaccatcgtgatggccggttcagtcaccgataacttctcaacccgcgaaacgtctggcgtgatccgtggttttgatgtcaacaccggggagctgctgtgggcttttgatccgggcgcgaaagatccgaacgcaatcccgtcagacgaacacacctttacctttaactcaccaaactcgtgggcaccagcggcctatgacgcgaagctggatctggtctatctgccgatgggcgtgaccacgccggatatctggggcggtaaccgcacaccggaacaggaacgttatgccagctcgattctggcgctgaatgccactaccgggaaactggcgtggagctaccagaccgttcaccacgacctgtgggacatggatcttccggcacagccgacgctggcggacatcaccgttaatggtcagaaagtgccgattatttacgctccggcgaaaaccggtaacatttttgtgctcgatcgtcgtaatggcgaactggtggttccggccccggaaaaaccggttccccaaggtgctgccaaaggcgattacgttacccctactcaaccattctcggaactgagcttccgtccgacgaaagatttgagcggtgcggatatgtggggagccaccatgtttgaccaactggtgtgccgcgtaatgttccaccagatgcgctatgaaggcattttcacgccgccatctgaacagggtacgctggtcttcccgggtaacctggggatgttcgaatggggcgggatttccgttgatccaaatcgtgaagtggcaattgccaacccaatggcactgccgtttgtttcgaaactgctcccgcgtggtcctggcaacccgatggagcagccgaaagatgccaaaggcacgggtacggaatccggcattcagccacagtacggtgtaccgtatggtgtcacgctcaacccgttcctctcaccatttggtctgccatgtaaacagccagcatggggttatatctcggcgctggatctgaaaactaatgaagtggtgtggaagaaacgtattggtacgccgcaggacagtatgccgttcccgatgccggttccggtgccgttcaatatgggtatgccgatgctgggcgggccaatctccacggcgggtaacgtgctgtttatcgccgctacggcagataactacctgcgcgcttacaacatgagcaacggtgaaaaactgtggcagggtcgtttaccggcgggtggtcaggcaacaccgatgacctatgaagtgaatggcaagcagtacgtggtgatctccgcaggcggtcacggttcatttggtacgaagatgggcgactatattgtggcttatgccctgccggatgatgtgaaataa

SEQ ID NO: 4093 - protein, 776 aa, Shigella flexneri 2a str. 301
MQRWLYLLIGGGWLVAIGGSWYYPIAGLVMLGVAWMLWRSKRAALWLYAALLLGTMIWGVWEVGFDFWALTPRSDILVFFGIWLILPFVWRRLVIPASGAVAALVVALLISGGILTWAGFNDPQEINGTLSADATPAEAISPVADQDWPAYGRNQEGQRFSPLKQIHADNVHKLKEAWVFRTGDVKQPNDPGEITNEVTPIKVGDTLYLCTAHQRLFALDAASGKEKWHYDPELKTNESFQHVTCRGVSYHEAKAETASPEVMADCPRRIILPVNDGRLIAINAENGKLCETFANKGVLNLQSNMPDTKPGLYEPTSPPIITDKTIVMAGSVTDNFSTRETSGVIRGFDVNTGELLWAFDPGAKDPNAIPSDEHTFTFNSPNSWAPAAYDAKLDLVYLPMGVTTPDIWGGNRTPEQERYASSILALNATTGKLAWSYQTVHHDLWDMDLPAQPTLADITVNGQKVPIIYAPAKTGNIFVLDRRNGELVVPAPEKPVPQGAAKGDYVTPTQPFSELSFRPTKDLSGADMWGATMFDQLVCRVMFHQMRYEGIFTPPSEQGTLVFPGNLGMFEWGGISVDPNREVAIANPMALPFVSKLLPRGPGNPMEQPKDAKGTGTESGIQPQYGVPYGVTLNPFLSPFGLPCKQPAWGYISALDLKTNEVVWKKRIGTPQDSMPFPMPVPVPFNMGMPMLGGPISTAGNVLFIAATADNYLRAYNMSNGEKLWQGRLPAGGQATPMTYEVNGKQYVVISAGGHGSFGTKMGDYIVAYALPDDVK

SEQ ID NO: 4094 - DNA, 2412 bp, Pseudomonas putida KT2440
  CDS (1)..(2412): transl_table=11
atgagcactgaaggtgcgaaccaaggaagccgctggctaccgcgcctgattggcgcgctgctgttgctgatgggcctggccctgctggccggcggtatcaagctgagccagctgggcggatcgctgtactacctgatcgccggtattggctttgccctttcgggcgtcctgctgctggcccaacgccagatcgccctgggcctgtatggcctggtgctgctgggcagcaccgtgtgggccctgttcgaagtaggcctggactggtggcaactggtgccacggctggctatctggttcgccatcggcgtggtgttgctgctgccgtgggcacgtcgcccgctgatcggcccagccagcaaagccaacactgcactgctcggcgtggcagtggtcgcttcgggcgcttgcgcgctggccagccagttcacccatcccggtgaagtgttcggcgaactgggccgcgacagcagcgaaatggccagcgccgccccggccatgcccgacggcgaatggcaggcctacggccgtaccgagcatggcgaccgctactcgccgctgcgccagatcaccccgcagaacgcctaccgtctggaagaagcctggcgcattcgcaccggtgatctgccaaccgaaaacgacccggtggagctgaccaaccagaacaccccgctgaaggtcaacggcatgctttacgcctgcaccgcgcacagtcgcctgctggcgctggacccggacactggcgcagaaatctggcgctacgacccgcaggtcaagagcccgaccggcaccttcaagggctttgcccacatgacctgccgtggcgtctcgtactatgacgaaaaccgctacgtcagccgcgacggcagcccggcgccgaaaattaccgatgcaggccaggccgtggcccaagcctgcccgcgtcgcctctatctgcctaccgcggatgcccgcctgatcgccatcaacgccgacaacggcaaggtctgcgaaggcttcgccaaccagggcgtgatcgacctcaccaccggcattggcccattcaccgccggcggctattactccacctcgcctgctgcgattacccgtgacctggtgatcatcggtggccacgtcaccgacaacgagtcgaccaatgagccgtccggggtgatccgcgcctacgacgtgcacgacggccacctggtgtggaactgggacagtaacaacccggacgacaccaagccattggctgccggcaaaatgtacagccgcaactcggccaacatgtggtcgatcgccagcgtcgacgaagaccttggcatgatctacctgccgctgggcaaccagaccccggaccagtggggcgccgaccgcaccccgggcgccgagaagtacagcgccggcgtggtcgcccttgacctggccaccggcaaggcacgctggaactatcagttcacccaccacgacctgtgggacatggacgtcggcagccagccgaccctggtacacctgaaaaccgacgatggtgtgaaaccggcgatcatcgtaccgaccaagcaaggcagcctgtacgtgctcgaccgccgcgacggtacgccaatcgtgccgatccgcgagatccccaccccacaaggcgcagtggaaggcgaccacacctcgcccacccaggcccgctccgacctcaacctgctcggcccagagctgaccgaacaggccatgtggggcgccacgcctttcgaccagatgctgtgccgcatccagttccgcgaactgcgctacgaaggccagtacaccccgccatccgaacaaggttcgttggtctaccccggcaacgtcggtgtattcaactggggcagcgtgtcggtcgacccggtgcgccagctgctgttcacttcgcccaactacatggcgttcgtgtcgaagatggtcccgcgtgagcaggttgccgaaggcagcaagcgcgaaagcgagaccagcggcgtgcagccgaacaccggcgcaccgtatgcagtgatcatgcacccgttcatgtcgccgctcggtgtaccgtgccaggcacccgcctggggctacgtcgccgccatcgacctgttcaccaacaaggtggtgtggaaacacaagaacggcaccacccgcgacagcaccccgctaccgatcggcctgccggttggcgtgccgagcatgggtggctcgatcgtcaccgccggtggcgtcggcttcctcagcggcacgctcgaccagtacctgcgcgcctatgacgtgaacaacggcaaggagttgtggaaagcacgcctgccagcgggtggccaggctacgccgatgagctacaccggcaaggacggcaagcagtacgtgctggtgactgccggcggccatggctcgctgggcaccaagatgggcgattacatcattgcttacaaattagccgagtaa

SEQ ID NO: 4095 - protein, 803 aa, Pseudomonas putida KT2440
MSTEGANQGSRWLPRLIGALLLLMGLALLAGGIKLSQLGGSLYYLIAGIGFALSGVLLLAQRQIALGLYGLVLLGSTVWALFEVGLDWWQLVPRLAIWFAIGVVLLLPWARRPLIGPASKANTALLGVAVVASGACALASQFTHPGEVFGELGRDSSEMASAAPAMPDGEWQAYGRTEHGDRYSPLRQITPQNAYRLEEAWRIRTGDLPTENDPVELTNQNTPLKVNGMLYACTAHSRLLALDPDTGAEIWRYDPQVKSPTGTFKGFAHMTCRGVSYYDENRYVSRDGSPAPKITDAGQAVAQACPRRLYLPTADARLIAINADNGKVCEGFANQGVIDLTTGIGPFTAGGYYSTSPAAITRDLVIIGGHVTDNESTNEPSGVIRAYDVHDGHLVWNWDSNNPDDTKPLAAGKMYSRNSANMWSIASVDEDLGMIYLPLGNQTPDQWGADRTPGAEKYSAGVVALDLATGKARWNYQFTHHDLWDMDVGSQPTLVHLKTDDGVKPAIIVPTKQGSLYVLDRRDGTPIVPIREIPTPQGAVEGDHTSPTQARSDLNLLGPELTEQAMWGATPFDQMLCRIQFRELRYEGQYTPPSEQGSLVYPGNVGVFNWGSVSVDPVRQLLFTSPNYMAFVSKMVPREQVAEGSKRESETSGVQPNTGAPYAVIMHPFMSPLGVPCQAPAWGYVAAIDLFTNKVVWKHKNGTTRDSTPLPIGLPVGVPSMGGSIVTAGGVGFLSGTLDQYLRAYDVNNGKELWKARLPAGGQATPMSYTGKDGKQYVLVTAGGHGSLGTKMGDYIIAYKLAE

SEQ ID NO: 4096 - DNA, 2418 bp, Pseudomonas putida KT2440
  CDS (1)..(2418): transl_table=11
atgaaagaaacaccgcgcgcctctggcgccacaaacttcatcctggtcggcctgggcgtgatcatcgccctgctcggcctcctcctcgctgccggcggcgtcaagctcgccggtctgggcggttcctggtacttcctgatcggcggcttggccatggccatcgccggtgtcctcattgctcgccgcaagaaggcgggcgcctggctgtatgccgtgttcctggtcggtactgccatctgggcactgatcgatgcgggcctggtgttctggccgctgttctcgcgcctgttcatgttcggcgcaatcggcatggtcgtggcgctggtctacccgctgctggcgcgtgccaacggcgccagcgccggccgcggtgcctacggcgtcgccggggtaatggccgtggtactggtggtcgcggtcggcaacatgttcgttgctcacccaagcgtcgcgcccaccggcaaaggcccgggcatgaccccggtcgaaaccggcaaggaacagaaagactgggcccactacggcaacaccgaaggtggcagccgcttcgccgcgcttgaccagatcaaccgggacaacgtcaacaagctgaaagtggcctggacctaccaaaccggcgacgttgcaatcagtgacggcaacggtgccgaagaccagctcaccccgctgcagatcggcagcaaggtgttcatctgcaccccgcacaacaacctgatcgcactcgatgccgacaccggcaaagagttgtggaagaacgaaatcaacgcccagtccaaggtctggcagcgttgccgtggcatggcctacttcgacgccactgccgccatcgcccagccaacccagccgaacagctcgccgatcaccggcgttagcgtagcggccggtgccaactgccagcgtcgcctgctgaccaacaccatcgacggccgcctgattgccgtcgacgccgacaccggcgagttctgccagggcttcggcaacaacggccaggtcgacctcaaggcaggcctgggtgatgtcccggactcctactaccagctgtcctcggcaccgctgatggccggcactaccgtagtggtcggcggccgtgttgccgacaacgtccagaccgacatgccaggcggcgtgatccgtggttttgacgtgatcaccggtgaaatgcgctgggccttcgacccgggcaacccggaagaccgccaggctccgcagggcgacaagacctacgtgcgcagcaccccgaacagctgggcaccgatgtcctacgacccggcaatgaacaccgtgttcctgccgatgggctcgtcctccaccgacatctacggcgttgagcgcagcaaactggaccacacttacggcgcttcggtgctggctttggacgccaccaccggcaaccagaaatgggtgttccagaccgtgcacaacgacctctgggacttcgacctgcccatgcagccaagcctgatcgacttcaccaaggacgacggccagtcggtgcctgcggtggtgatcggcaccaaggccgggcagatctacgtgctcgaccgcgccactggcaagccgctgacccaggtcgacgaagtaccggtcaagccaagcaacatcccgaacgagccgtactccccaacccagcccaagtcggtgggcatgccacagatcggcgcgcagaccctgaccgaatcggacatgtggggcgccaccccgtatgaccagctgctatgccgcatcgacttcaagaagatgcgctacgacggcctgtacaccgcgccgggtaccgacctgtcgctgagcttcccgggttcgctgggtggcatgaactggggcagcatttctaccgacccggtacatggcttcatcttcgtcaacgacatgcgtctgggcctgtggatccagatgatcccgtcgcagaacaaaggtggcgcggcttccggtggcgaagcactgaacactggcatgggcgcggtaccgctcaagggcaccccgtatgccgtgaacaagaaccgcttcctgtcggtcgccggcattccatgccaggcaccgccgtttggcaccctgaccgccatcgacatgaagacccgccaggtggcctggcaggtgccggtaggcaccgttgaagacaccggcccgctcggcatccgcatgcacctgccgatcaagatcggcctgccaacccttggcggcaccctgtcgacccaaggcggcctggtgttcatcgcaggtacccaggacttctacctgcgcgcctacgacagcagcaacggtaacgaaatctggaaggctcgcctgcccgtgggcagccagggcggcccgatgacctacgtctcgccgaagaccggcaagcagtacgtggtgatcactgctggcggcgcccgccagtcgactgaccgtggcgactatgtgatttcttacgctctgccgtaa

SEQ ID NO: 4097 - protein, 805 aa, Pseudomonas putida KT2440
MKETPRASGATNFILVGLGVIIALLGLLLAAGGVKLAGLGGSWYFLIGGLAMAIAGVLIARRKKAGAWLYAVFLVGTAIWALIDAGLVFWPLFSRLFMFGAIGMVVALVYPLLARANGASAGRGAYGVAGVMAVVLVVAVGNMFVAHPSVAPTGKGPGMTPVETGKEQKDWAHYGNTEGGSRFAALDQINRDNVNKLKVAWTYQTGDVAISDGNGAEDQLTPLQIGSKVFICTPHNNLIALDADTGKELWKNEINAQSKVWQRCRGMAYFDATAAIAQPTQPNSSPITGVSVAAGANCQRRLLTNTIDGRLIAVDADTGEFCQGFGNNGQVDLKAGLGDVPDSYYQLSSAPLMAGTTVVVGGRVADNVQTDMPGGVIRGFDVITGEMRWAFDPGNPEDRQAPQGDKTYVRSTPNSWAPMSYDPAMNTVFLPMGSSSTDIYGVERSKLDHTYGASVLALDATTGNQKWVFQTVHNDLWDFDLPMQPSLIDFTKDDGQSVPAVVIGTKAGQIYVLDRATGKPLTQVDEVPVKPSNIPNEPYSPTQPKSVGMPQIGAQTLTESDMWGATPYDQLLCRIDFKKMRYDGLYTAPGTDLSLSFPGSLGGMNWGSISTDPVHGFIFVNDMRLGLWIQMIPSQNKGGAASGGEALNTGMGAVPLKGTPYAVNKNRFLSVAGIPCQAPPFGTLTAIDMKTRQVAWQVPVGTVEDTGPLGIRMHLPIKIGLPTLGGTLSTQGGLVFIAGTQDFYLRAYDSSNGNEIWKARLPVGSQGGPMTYVSPKTGKQYVVITAGGARQSTDRGDYVISYALP

SEQ ID NO: 4098 - DNA, 2409 bp, Escherichia coli CFT073
  CDS (1)..(2409): transl_table=11
ttgaaatggtgtctctttatggcaattaacaataccggctcgcggcgattactcgtcacgctaacagccctttttgcagcgctttgcgggctgtatctactcattggcggaggctggctggtcgcgattggcggctcctggtactaccctatcgctggccttgtgatgctcggcgtcgcctggatgctgtggcgcagtaaacgcgccgcgctttggctgtacgcagccctgctgctcggcactatgatttggggcgtctgggaagttggtttcgacttctgggcgctgactccgcgcagcgacattctggtcttcttcggcatctggctgatcctgccgtttgtctggcgtcgcctggtcattcctgccagcggcgcagttgccgcactggtggtcgcactgctgattagcggtggtatcctgacctgggccggatttaacgatccgcaggaaatcagcggcaccttaagcgccgataccacgccagcagaagccatctcccccgttgccgatcaggactggcctgcctatggtcgcaatcaggaaggtcaacgcttttcaccactgaagcaaattaacgctgataacgtccacaagctgaaagaagcctgggtgttccgtactggcgatgtgaagcagccgaacgatccgggcgaaatcaccaatgaagtgacgccaattaaagtgggcgacaccctttacctgtgtaccgcgcatcaacgtctgtttgcgctggatgccgccagcggtaaagagaaatggcattacgatcctgagctgaaaaccaacgagtccttccagcatgtaacctgccgtggcgtctcttatcatgaagccaaagcagaaactgcttcgccggaagtgatggcggattgcccgcgtcgtatcattcttccggtcaatgatggtcgtctgattgcaattaacgctgaaaacggcaagctgtgcgaaaccttcgccaataaaggcgtgctcaatctgcaaagcaatatgccggacaccaaaccgggtctgtatgaaccgacttcgccgccgattatcaccgataaaaccatcgtgatggccggttcagtcaccgacaacttctcaacccgcgaaacgtctggcgtgatccgtggttttgatgtcaacaccggggagctgctgtgggcttttgatccgggcgcgaaagatccgaatgcgatcccgtctgacgaacacacctttacctttaactcaccaaactcgtgggcaccagcggcctatgacgcgaagctggatctggtctatctgccgatgggcgtcaccacgccagatatctggggtggtaaccgcacaccggaacaggaacgttatgccagctcgattctggcgctgaatgccactaccgggaaactggcgtggagctatcagaccgttcaccacgacctgtgggatatggatcttccggcacagccgacgctggcggacatcaccgttaatggtcagaaagtgccggttatttacgctccggcgaaaaccggcaacatttttgtgctcgatcgtcgtaatggtgaactggtggttcctgccccggaaaaaccggttccccaaggtgctgctaaaggcgattacgtgacccctactcaacccttctcggaactgagcttccgtccgacgaaagatttgagcggtgcggatatgtggggagccaccatgtttgaccagttggtgtgccgcgtgatgttccaccagatgcgctatgaaggcattttcacgccgccatctgaacagggtacgctggtcttcccgggtaacctggggatgttcgaatggggcgggatttccgttgatccgaatcgtgaagtggcgattgccaacccaatggcactgccgtttgtttcgaaactgatcccacgcggtcctggtaacccgatggaacagccgaaagatgccaaaggcacgggtacggaatccggcatccagccgcagtacggtgtaccgtatggcgtcacgctcaacccgttcctctcaccgtttggtctgccatgtaaacagccagcatggggctatatctcggcattggatctgaaaaccaatgaagtggtgtggaagaaacgtattggtacgccgcaggacagtatgccattcccgatgcctgtaccggtgccgttcaatatgggtatgccgatgcttggcgggccaatctccacggcgggtaacgtgctgtttatcgccgctacggcagataactacctgcgcgcttacaacatgagcaacggtgaaaaactgtggcagggtcgtttaccagcgggtggtcaggctacgccaatgacctatgaagtgaatggcaagcagtatgtggtgatctccgcaggcggtcacggttcatttggtacgaagatgggcgactatattgtggcttatgcgctgccggatgatgtgaagtaa

SEQ ID NO: 4099 - protein, 802 aa, Escherichia coli CFT073
MKWCLFMAINNTGSRRLLVTLTALFAALCGLYLLIGGGWLVAIGGSWYYPIAGLVMLGVAWMLWRSKRAALWLYAALLLGTMIWGVWEVGFDFWALTPRSDILVFFGIWLILPFVWRRLVIPASGAVAALVVALLISGGILTWAGFNDPQEISGTLSADTTPAEAISPVADQDWPAYGRNQEGQRFSPLKQINADNVHKLKEAWVFRTGDVKQPNDPGEITNEVTPIKVGDTLYLCTAHQRLFALDAASGKEKWHYDPELKTNESFQHVTCRGVSYHEAKAETASPEVMADCPRRIILPVNDGRLIAINAENGKLCETFANKGVLNLQSNMPDTKPGLYEPTSPPIITDKTIVMAGSVTDNFSTRETSGVIRGFDVNTGELLWAFDPGAKDPNAIPSDEHTFTFNSPNSWAPAAYDAKLDLVYLPMGVTTPDIWGGNRTPEQERYASSILALNATTGKLAWSYQTVHHDLWDMDLPAQPTLADITVNGQKVPVIYAPAKTGNIFVLDRRNGELVVPAPEKPVPQGAAKGDYVTPTQPFSELSFRPTKDLSGADMWGATMFDQLVCRVMFHQMRYEGIFTPPSEQGTLVFPGNLGMFEWGGISVDPNREVAIANPMALPFVSKLIPRGPGNPMEQPKDAKGTGTESGIQPQYGVPYGVTLNPFLSPFGLPCKQPAWGYISALDLKTNEVVWKKRIGTPQDSMPFPMPVPVPFNMGMPMLGGPISTAGNVLFIAATADNYLRAYNMSNGEKLWQGRLPAGGQATPMTYEVNGKQYVVISAGGHGSFGTKMGDYIVAYALPDDVK

SEQ ID NO: 4100 - DNA, 2367 bp, Pseudomonas syringae pv. tomato str. DC3000
  CDS (1)..(2367): transl_table=11
atgacaaacaagcaagacacaggagctggcagcaggttgctgttgctcgggttgggcgtgctgatcgctctgatcgggctcggtctggcaggtggcggcggctacctggtgacattgggcgggagttggttcttcctgctgatggggctggcgatgctggtcagcggtgcgctgatcgcagcccgcaaacccaagggcgcagtgctgtatggcatcgccttgatattgactgcgctctgggcggtctgggatgcaggcctgcattactggccgctggtgtcccgcgtattgacctttgccgtgatcggcctggtggttgcgctgatttacccgacgctgattcgcgcttcgggtgcgcaggcaggtcgtggcgcttatggcctggccggcgtgctggccatcggtgttgtcgcgaccatgggttacatgttcgtcccaagccatgtggttagcgccagcagcgtgccggccgtcgttccggtggcacccggcgccgagcagaaggactgggcacactggggcaacaccccggcaggcaaccggttcgcggcgctggatcagatcaacaagggcaacgtcgaaaagttgcaggtcgcctggaccttccacaccggcgacatcccgcagagcaccggcgcaggtgcggaagaccagaacacgccactgcagatcggtgacaccgtctacacctgcaccgcctacggcaaagtcttcgcactggatgccgacaccggcacccagcgctggaagttcgacccgcagggcagcggacccaactggcaacgctgccgaggcctgggctacttcgccacgccaggtgccgacgtatctgctcagccggcggctgctgtttgcgccacacgtgtgtttctaccgacaggcgatgctcgcctgatcgcactggatgccaaaaccggcgagacctgcaaggactttggcaatcaaggcgtcgtcgatctgaaaaccgacatgggcgaagtcaaggaaggctactaccagcaaacctcgacgccgctggtggcgggcaatgtcgttgtagtgggcggtagagtcgccgacaacttctctaccggcgagccaccgggcgtcgttcgcgcctttgacgtgcacagtggtgagctggtctgggcctgggatccgggcaacccgaacaccagcaagcgtccgccagccggggagacctacacgcgcggcacgccgaacgtctggtcggcaatgtcctacgacgaaaaacttggcctgatctacctgccgaccggcaacgccacgcctgacttcttcggcgggacgcgtaccgagctggatgacaaatggtcctcgtcagtggtcgccgtagacgtcaagaccggccaggtacgctggaacttccagatgacccaccacgacctgtgggacttcgacattccggcgcagccgttgctgtatgacattccggacggcaagggcggtacgcagcctgcgctggcacaagtcaccaagcagggcgaaattttcctcctcaaccgtgaaaccggtgtgccgatctcgcgtgtcgaagagcgtgccgtgccacaaggtaatgtgccgggcgagcgctattcgccgactcagccgttctcggtggacatgccgtcgattggcaaccagaccctgaaagagtccgacatgtggggcgccaccgcattcgatcaactgatgtgccgcatcgcctttaaaggcctgcgccacgagggcgtttatacgccaccaggcctggaccctgcgttgcagttccctggctcgctgggcggcatgaactggggcagtgtctcggtcgacccgaccaacagctacatgttcgtcaacgacatgcgcctgggcctggccaactacatgatcccgcgcgataagatcgccgctggtgccagcggcatcgaaatgggcgtcgtaccgcagaccggcacgccattcggcgcaatgcgtcagcgtttcctgtcagctgtcggaatcccgtgccaggcaccgccgttcggcaccatgtcggcgattgacctgaagaccaaaaagctcatgtggcaggtcccggtcggcaccgtaaaagacaccggcccgatgggtatccgcatgggcctgccgattccgatcggcatgccgacgctgggcgcatcgttgtccacacagtcgggcttgctgttcttcgcaggcacccaggacttctacctgcgcgccttcgacagcggcaacggcaacgaaatctggaaggcccgcctgcccgtaggcagccagtccggcccgatgacctacgtgtcgcccaagaccggcaagcagtacatcctgctcaccgccggcggcgcccgccaatcgcctgaccgtggtgactacgtgattgcgtacgcgttacccaagtaa

SEQ ID NO: 4101 - protein, 788 aa, Pseudomonas syringae pv. tomato str. DC3000
MTNKQDTGAGSRLLLLGLGVLIALIGLGLAGGGGYLVTLGGSWFFLLMGLAMLVSGALIAARKPKGAVLYGIALILTALWAVWDAGLHYWPLVSRVLTFAVIGLVVALIYPTLIRASGAQAGRGAYGLAGVLAIGVVATMGYMFVPSHVVSASSVPAVVPVAPGAEQKDWAHWGNTPAGNRFAALDQINKGNVEKLQVAWTFHTGDIPQSTGAGAEDQNTPLQIGDTVYTCTAYGKVFALDADTGTQRWKFDPQGSGPNWQRCRGLGYFATPGADVSAQPAAAVCATRVFLPTGDARLIALDAKTGETCKDFGNQGVVDLKTDMGEVKEGYYQQTSTPLVAGNVVVVGGRVADNFSTGEPPGVVRAFDVHSGELVWAWDPGNPNTSKRPPAGETYTRGTPNVWSAMSYDEKLGLIYLPTGNATPDFFGGTRTELDDKWSSSVVAVDVKTGQVRWNFQMTHHDLWDFDIPAQPLLYDIPDGKGGTQPALAQVTKQGEIFLLNRETGVPISRVEERAVPQGNVPGERYSPTQPFSVDMPSIGNQTLKESDMWGATAFDQLMCRIAFKGLRHEGVYTPPGLDPALQFPGSLGGMNWGSVSVDPTNSYMFVNDMRLGLANYMIPRDKIAAGASGIEMGVVPQTGTPFGAMRQRFLSAVGIPCQAPPFGTMSAIDLKTKKLMWQVPVGTVKDTGPMGIRMGLPIPIGMPTLGASLSTQSGLLFFAGTQDFYLRAFDSGNGNEIWKARLPVGSQSGPMTYVSPKTGKQYILLTAGGARQSPDRGDYVIAYALPK

SEQ ID NO: 4102 - DNA, 2244 bp, Pseudomonas syringae pv. tomato str. DC3000
  CDS (1)..(2244): transl_table=11
atgaccgggcgtgcggctgccctgggtctgtacgcgctgctgctgttcgcaagcacggtatggtcgttgtgggaagtcggcctggactggtggcaactggtgccgcgtctggcgctatggtttgcactgggcatcgtattgctgctgccgtggttccgtcggccgctgctgctcaacggcccggcgcgcatgggcactggcgcactgagcatcgctgtggtgctggccggtctggccgcgctggccagccagttcaccaaccctggccgtatcgaaggtcaactggaccgcgaaacggctggcaccaccaacaccgcgccggctatgcctgacggcgactggcagtcctatggacgtaccgctttcggcgatcgctattcgccactggcgcaaatcacgccgcaaaacgtcaacacgctgcagccggcctggacctatcgcacgggcgatattccagggccgaacgatccgggcgaaaccactgccgagaacaccccgctcaaggtcaacggcatgctttacgtgtgcacaccgcacagccaggtgatcgcgcttgatccggattcaggcaaggaaatctggcgctttgaccctaagctcagcactcagaatgcggccaacttcaagggttgggcgcatatgacctgccgtggcgtgacttaccacgacgacgccgcctatgccgccagcgctccggcgcaaagcccggcagcaccggccgcagtcagcgccacgtcaagtgtctgcccacgcagaatctttctgccgactgccgatacccgtctgatcgccctgaacgccgacaccggcaagatgtgcgaagactttggcaacaagggctcggttgacctgacggccaacatgggcacgttcgcaccgggcggctactactccacttcgccacccgcagtgaccaaggacctggtgatcatcggcggccacgtgaccgataacgtttcgatggacgaaccgtccggcgtgatccgtgcgtacgacgtgcacaccggtcgtctggtctggaactgggacagcggcaacccggaagaaacggctccgatagccgacggcaagatctacacgcgcaattcgccgaacatgtggtccatgttcagcgtcgatgaaaagctgggcatgatctacctgccgatgggcaatcagacgccggaccaatggggcggcaaccgtaccaaggagtccgagaagtacagcgcgggtctggttgcactggacatcgcgaccggccgtgtacgctgggacttccagttcactcaccatgacctgtgggacatggacgtgggcggtcaaccgacgctgctggacatgaaaaccgctgatggcgtgaagcctgcggtattggcctcgaccaagcagggcagcatctacgtgctggatcgcagcaccggcaagcctatcgtgccggtcaacgaagtgccggttccgcagggcgctgtcgcaggtgactggacttcgccgactcagcccaagtccgacctgaacttcatgccgccgccgcttaaagagcgcgacatgtggggcgtgacaccgtttgaccagatgatgtgccggatcgacttcaagtcgctgcgttacgacggcccgtttacgccgccatcgttgcagggttcgattgtgtatccgggtaacttcggtgtgttcgactggggcggcatctctgtcgatccggttcgccagatcgccttcgtcaatccgaactacatggcgttccgctccaggctggtgccttctgccgaagttgaaggcggcccgggccgcaagagcgaaaccgaaggcgtgcagccgaacaagggcgcaccgtatggcgtgattctggaaccactgctgtcaccgatgggcctgccgtgtcaggcaccggcatggggttatgtggcggcggtcgatctgaccaaccagaagaccatctggatgcacaaaaacggcaccgtgcgtgacagctcgccgatccccattccgctgaccatgggtgttccaagcctggggggtacattcaccaccgccagcggcctggcgttcatgagcgccacgcttgaccagtacctgcgtgcttatgacgtgcgtaacggcaagcaactgtgggaagcccgcctgccagcaggcgcgcaaaccacaccgatgacctacacgggcaaggacggtcagcaatacgtgctggtcgtggccggcggtcacggctcactgggcaccaaacagggtgactacgtgatggcgttcaaactgcccaagtaa

SEQ ID NO: 4103 - protein, 747 aa, Pseudomonas syringae pv. tomato str. DC3000
MTGRAAALGLYALLLFASTVWSLWEVGLDWWQLVPRLALWFALGIVLLLPWFRRPLLLNGPARMGTGALSIAVVLAGLAALASQFTNPGRIEGQLDRETAGTTNTAPAMPDGDWQSYGRTAFGDRYSPLAQITPQNVNTLQPAWTYRTGDIPGPNDPGETTAENTPLKVNGMLYVCTPHSQVIALDPDSGKEIWRFDPKLSTQNAANFKGWAHMTCRGVTYHDDAAYAASAPAQSPAAPAAVSATSSVCPRRIFLPTADTRLIALNADTGKMCEDFGNKGSVDLTANMGTFAPGGYYSTSPPAVTKDLVIIGGHVTDNVSMDEPSGVIRAYDVHTGRLVWNWDSGNPEETAPIADGKIYTRNSPNMWSMFSVDEKLGMIYLPMGNQTPDQWGGNRTKESEKYSAGLVALDIATGRVRWDFQFTHHDLWDMDVGGQPTLLDMKTADGVKPAVLASTKQGSIYVLDRSTGKPIVPVNEVPVPQGAVAGDWTSPTQPKSDLNFMPPPLKERDMWGVTPFDQMMCRIDFKSLRYDGPFTPPSLQGSIVYPGNFGVFDWGGISVDPVRQIAFVNPNYMAFRSRLVPSAEVEGGPGRKSETEGVQPNKGAPYGVILEPLLSPMGLPCQAPAWGYVAAVDLTNQKTIWMHKNGTVRDSSPIPIPLTMGVPSLGGTFTTASGLAFMSATLDQYLRAYDVRNGKQLWEARLPAGAQTTPMTYTGKDGQQYVLVVAGGHGSLGTKQGDYVMAFKLPK

SEQ ID NO: 4104 - DNA, 2391 bp, Salmonella enterica subsp. enterica serovar Typhi Ty2
  CDS (1)..(2391): transl_table=11
atggcagaaaataacgcacgatcgccacgattactcgtgacgctgacggccctctttgcagcactttgcgggctgtatcttcttatcggaggtgtctggctggttgctattggcggttcctggtactaccccatcgcgggcctcgtgatgctggttgtggccggattgctatggcgcagtaaacgtgccgcactgtggctgtatgccgccctgctgctggcgacaatgatttggggcgtgtgggaagtcgggttcgacttctgggcactcacgccgcgtagcgatatcctggtgtttttcggcatctggctaatattgccgtttgtctggcatcggctggtggttccttccagcggcgcagtggcggcgctggtcgtggcgctgctgattagcggcggcattctgacctgggctggcttcaacgacccgcaggagatcaacggtacgcttcgcgccgacgccacgcccgccgcaacaagttcgtcgatcgccgacgaagactggccggcctatggacgtaatcaggaaggccaacgctattcgccgctgaaacagatcactgcggataacgttcaccaactgaaagaagcgtgggtcttccgcaccggcgatctgaaacaacccaacgatccgggtgaaatcaccaacgaagtgaccccgataaaagtcggtgatacgctttatctgtgtacagctcaccagcgtctgttcgcgctggacgccgccagcggtaaagagaagtggcattttgatcctcagttgaagaccgattcgtctttccagcatgtgacctgccgcggcgtctcttatcatgaggccaaagcggataccgcctcgccggaggtcatcgccgactgtccgagccgcattatcctcccggtcaacgacggtcgccttttcgcggtgaatgccgaaaccggcaagctgtgtgaaaccttcgccaacaaaggcgtcctgaatctgcaaaccaatatgccggataccacgccgggactgtatgaaccgacgtcgccgccgattatcaccgataaaacaattgtcattgccggttcggtcacggataacttctctactcgcgaaacgtccggcgttatccgtggttttgatgttaatagcggtaaactactgtgggccttcgatcctggggcgaaagatccgaacacgattccagccgatgagcacgcttttacctttaactcgccgaactcctgggcccctgccgcctatgatgcgaaactggatctggtctatctgccgatgggcgtgaccacgccggatatctggggcggtaaccgcacgccggagcaggaacgttatgccagctccatcctggcgctgaatgccaccaccgggaaactggcctggagttatcagaccgtccatcacgatctgtgggatatggacctgccggcacagccgacgctggcggatattaccgttgacggtactaccgttccggttatctatgcaccagcgaaaaccggtaatatctttgtgctggacagacgtaatggcgagctggtcgtgcccgctccggaaaaaccggtcccgcagggcgcggcaaaaggcgattatgtcgccaaaactcagccgttctctgatttaaccttccgcccgaaaaaagatctctccggcgcggatatgtggggcgcgaccatgttcgaccaactggtgtgccgcgttatgttccaccagttgcgctatgaaggtatcttcaccccgccatccgagcaggggacattggtattccctggcaacctggggatgtttgaatggggcggtatttccgtcgatccagaccgtcaggtcgctatcgctaacccgatggcgctgccgtttgtctcgaagctgatcccacgcggcccgggtaatccaatggaaccgccgaaagacgcgaaaggtaccggtacagaagcgggtattcagccgcagtacggcgtaccgttcggcgtcacgctgaatccgttcctttcgccgtttggtttgccgtgtaaacaaccggcctggggctacatttccgcgttggatctgaagaccaatgaaatcgtgtggaagaaacgtatagggacgccgcgcgacagtatgccgttcccgatgccggttccggtgccgttcaacatggggatgcccatgctgggcgggccaatctcaaccgccggtaacgtgctgttcattgccgcgaccgccgacaactacctgcgcgcttataacatgagcaacggggaaaaactgtggcagggacgtttacccgccggaggccaggcaacgccgatgacctatgaggtaaacggtaagcagtacgtggtcatttctgccggaggccacggttcgtttggtacgaagatgggcgactatatcgtggcctatgctttgcctgacgacgcgaaataa

SEQ ID NO: 4105 - protein, 796 aa, Salmonella enterica subsp. enterica serovar Typhi Ty2
MAENNARSPRLLVTLTALFAALCGLYLLIGGVWLVAIGGSWYYPIAGLVMLVVAGLLWRSKRAALWLYAALLLATMIWGVWEVGFDFWALTPRSDILVFFGIWLILPFVWHRLVVPSSGAVAALVVALLISGGILTWAGFNDPQEINGTLRADATPAATSSSIADEDWPAYGRNQEGQRYSPLKQITADNVHQLKEAWVFRTGDLKQPNDPGEITNEVTPIKVGDTLYLCTAHQRLFALDAASGKEKWHFDPQLKTDSSFQHVTCRGVSYHEAKADTASPEVIADCPSRIILPVNDGRLFAVNAETGKLCETFANKGVLNLQTNMPDTTPGLYEPTSPPIITDKTIVIAGSVTDNFSTRETSGVIRGFDVNSGKLLWAFDPGAKDPNTIPADEHAFTFNSPNSWAPAAYDAKLDLVYLPMGVTTPDIWGGNRTPEQERYASSILALNATTGKLAWSYQTVHHDLWDMDLPAQPTLADITVDGTTVPVIYAPAKTGNIFVLDRRNGELVVPAPEKPVPQGAAKGDYVAKTQPFSDLTFRPKKDLSGADMWGATMFDQLVCRVMFHQLRYEGIFTPPSEQGTLVFPGNLGMFEWGGISVDPDRQVAIANPMALPFVSKLIPRGPGNPMEPPKDAKGTGTEAGIQPQYGVPFGVTLNPFLSPFGLPCKQPAWGYISALDLKTNEIVWKKRIGTPRDSMPFPMPVPVPFNMGMPMLGGPISTAGNVLFIAATADNYLRAYNMSNGEKLWQGRLPAGGQATPMTYEVNGKQYVVISAGGHGSFGTKMGDYIVAYALPDDAK

SEQ ID NO: 4106 - DNA, 2391 bp, Shigella flexneri 2a str. 2457T
  CDS (1)..(2391): transl_table=11
atggcaattaacaatacagcctcgcgacgattactcgtcacgctaacagccctttttgcagcgctttgcgggctgtatctactcattggcggaggctggctggtcgcgattggcggctcctggtactaccctatcgctggccttgtgatgctcggcgtcgcctggatgctgtggcgcagtaaacgcgccgcgctttggctatacgcagccctgctgctcggcaccatgatttggggcgtctgggaagttggtttcgacttctgggcgctgactccgcgcagcgatattctggtcttcttcggcatctggctgatcctgccgtttgtctggcgtcgcctggtcattcctgccagcggcgcagttgccgcactggtggtcgcactgctgattagcggtggtatcctgacctgggccggatttaacgatccgcaggagatcaacggcaccttaagcgccgatgccacacctgccgaagctatctcccccgttgccgatcaggactggcctgcgtatggccgcaatcaggaaggtcaacgcttttcaccactgaagcaaattcacgccgataacgtccacaagctgaaagaagcctgggtgttccgtactggcgatgtgaagcagccgaacgatccgggtgaaatcaccaatgaagtgacgccgattaaagtgggcgataccctttacctgtgtaccgctcaccagcgcctgtttgcgcttgatgccgccagcggcaaagagaaatggcattacgatcctgagctgaaaaccaacgagtctttccagcacgtaacctgccgtggcgtctcttatcatgaagccaaagcagaaacggcttcgccggaagtgatggcggattgcccgcgtcgtatcattcttccagtgaatgatggtcgcctgattgcgattaacgctgaaaacggcaaactgtgcgaaaccttcgccaataaaggcgtgctcaatctgcaaagcaatatgccagacaccaaaccgggtctgtatgagccgacttctccgccaattatcaccgataaaaccatcgtgatggccggttcagtcaccgataacttctcaacccgcgaaacgtctggcgtgatccgtggttttgatgtcaacaccggggagctgctgtgggcttttgatccgggcgcgaaagatccgaacgcaatcccgtcagacgaacacacctttacctttaactcaccaaactcgtgggcaccagcggcctatgacgcgaagctggatctggtctatctgccgatgggcgtgaccacgccggatatctggggcggtaaccgcacaccggaacaggaacgttatgccagctcgattctggcgctgaatgccactaccgggaaactggcgtggagctaccagaccgttcaccacgacctgtgggacatggatcttccggcacagccgacgctggcggacatcaccgttaatggtcagaaagtgccgattatttacgctccggcgaaaaccggtaacatttttgtgctcgatcgtcgtaatggcgaactggtggttccggccccggaaaaaccggttccccaaggtgctgccaaaggcgattacgttacccctactcaaccattctcggaactgagcttccgtccgacgaaagatttgagcggtgcggatatgtggggagccaccatgtttgaccaactggtgtgccgcgtgatgttccaccagatgcgctatgaaggcattttcacgccgccatctgaacagggtacgctggtcttcccgggtaacctggggatgttcgaatggggcgggatttccgttgatccaaatcgtgaagtggcaattgccaacccaatggcactgccgtttgtttcgaaactgctcccgcgtggtcctggcaacccgatggagcagccgaaagatgccaaaggcacgggtacggaatccggcattcagccacagtacggtgtaccgtatggtgtcacgctcaacccgttcctctcaccatttggtctgccatgtaaacagccagcatggggttatatctcggcgctggatctgaaaactaatgaagtggtgtggaagaaacgtattggtacgccgcaggacagtatgccgttcccgatgccggttccggtgccgttcaatatgggtatgccgatgctgggcgggccaatctccacggcgggtaacgtgctgtttatcgccgctacggcagataactacctgcgcgcttacaacatgagcaacggtgaaaaactgtggcagggtcgtttaccggcgggtggtcaggcaacaccgatgacctatgaagtgaatggcaagcagtacgtggtgatctccgcaggcggtcacggttcatttggtacgaagatgggcgactatattgtggcttatgccctgccggatgatgtgaaataa

SEQ ID NO: 4107 - protein, 796 aa, Shigella flexneri 2a str. 2457T
MAINNTASRRLLVTLTALFAALCGLYLLIGGGWLVAIGGSWYYPIAGLVMLGVAWMLWRSKRAALWLYAALLLGTMIWGVWEVGFDFWALTPRSDILVFFGIWLILPFVWRRLVIPASGAVAALVVALLISGGILTWAGFNDPQEINGTLSADATPAEAISPVADQDWPAYGRNQEGQRFSPLKQIHADNVHKLKEAWVFRTGDVKQPNDPGEITNEVTPIKVGDTLYLCTAHQRLFALDAASGKEKWHYDPELKTNESFQHVTCRGVSYHEAKAETASPEVMADCPRRIILPVNDGRLIAINAENGKLCETFANKGVLNLQSNMPDTKPGLYEPTSPPIITDKTIVMAGSVTDNFSTRETSGVIRGFDVNTGELLWAFDPGAKDPNAIPSDEHTFTFNSPNSWAPAAYDAKLDLVYLPMGVTTPDIWGGNRTPEQERYASSILALNATTGKLAWSYQTVHHDLWDMDLPAQPTLADITVNGQKVPIIYAPAKTGNIFVLDRRNGELVVPAPEKPVPQGAAKGDYVTPTQPFSELSFRPTKDLSGADMWGATMFDQLVCRVMFHQMRYEGIFTPPSEQGTLVFPGNLGMFEWGGISVDPNREVAIANPMALPFVSKLLPRGPGNPMEQPKDAKGTGTESGIQPQYGVPYGVTLNPFLSPFGLPCKQPAWGYISALDLKTNEVVWKKRIGTPQDSMPFPMPVPVPFNMGMPMLGGPISTAGNVLFIAATADNYLRAYNMSNGEKLWQGRLPAGGQATPMTYEVNGKQYVVISAGGHGSFGTKMGDYIVAYALPDDVK

SEQ ID NO: 4108 - DNA, 2397 bp, Acinetobacter sp. ADP1
  CDS (1)..(2397): transl_table=11
ttgaaagtatggtgttttatacttgggctggcgttacttattactggtgcattttatgttatcggtggtggaaaactgattagcttgggtggttcatggtacttcctgattgctggtttaatgattactacctcagctttttttatgttcaagaaaaaagcaaccggggtctggttatatgctttggccttcattggtactgttatttgggcgttaattgatgctggtttcgaattttggccattgcattcacgtttgatgttcccagcaggtttatttgctgcggtcatgttaaccttgccatctattcgtaaataccaatatcaaaccccaatgagcgctccagcatatgtcattggtggtttgaccgttttaggaatgctcggtggtctgtatggaatgtttattccacatgaaactgtgaaagcatctggcgaagaactaccacttgttccagttgaccctgccaaaaaacaggtaaattgggatcattatggtaatgatgctggcggcagtcgttttgtagcgcttgatcagattaaccgtaacaacgtatctaaattaaaagaagcttggcgtttccgtacaggtgattttacgactggtacaggtaacggtgcagaagatcaaatgacaccattgcaagttggcaataaagtattcttgtgtacaccacataataatatatttgcaattgatgcagactctggaaagcagctttggaaagcagaagttaactctactgcggatgcatgggaacgttgtcgtggcgtcgcttattttgattcgacacaaccattggtacaacctacattggctggtgcaacacctgtagctgctttagcagcaaatactgagtgtccgcgacgtgtatataccaatactgtagatggccgtttgattgcagtaaatgcagatacaggcgctcgttgtaaagactttggtgttaatggtacagtgaatttacatgaaggacttggtgaaaatactaaggcacctcgctttgaagtcacttcggcacctaccattgcaggtacaacgattgtcgtgggaagccgtattgcagataacgtggcagccgatatgcctggtggagtcattcgtgcctatgatgtgattacaggtaaattacgttgggcatttgatccacgtaatccagatccaaactacgttttaaaaccaggtgagatttacaaacgcagttctacgaactcatgggcagccatgtcttatgacccgcaaatgaataccgtgttcttgccaatgggaagttcatctgtagacgtttggggtggtaatcgtactgcagccgaccataaatataatacctctgtacttgcacttgatgcgacgacaggtaaagaaaaatgggtttataatactgttcataatgacctttgggattttgacttaccaatgcaaccaagtttggtagacttcccaatgaaagatggtacaactaaacctgcggttgttattggcactaaatcaggtcagttttatgtacttgatcgtgtgacaggtaaaccactgactaaagtgatcgagcagccaattaaagtggctgatattcctggcgaacaatacagtaaaactcagccgcgttcagttgaaatgccgcaaattggtaatcagacacttaaagagtctgatatgtggggcgcgacgccatttgatcagttgatgtgtcgtatcaactttaaatcaatgcgttatgacgggctttacaccgcaccaggtactgatgtatcactgagcttcccgggttctctgggtggtatgaactggggttctatcgcatttgatccaacgcaccgttatatgtttgtgaatgacatgcgtttagggctttggattcaattgatcaagcagactcctgaagatatcaaaattcaggcaaatggtggcgagaaagttaatacaggtatgggtgcagttccaatgaaaggtacgccatataaagtgaataaaaaccgctttatgtcagcgttgggcattccatgtcaaaaaccaccttttggtaccatgactgcaattgatatgaaaacacgtcaagtggcttggcaagtaccattgggtacgattcaagacacgggtccaatgggtattaaaatgggcttgaaagcaccaattggtatgccaaccattggtggtcctatggcgactcaaggcgggttagtattctttgctgcaacgcaagactactacttacgtgcgtttaactcatctaatggtaaagagttgtggaaagcacgtcttcctgtgggtagtcaaggtacgcctatgagttatatgtcaccaaaaactggaaaacaatacgttgttgtttcagcaggtggtgcacgtcagtctccagatcatggtgactacgtgattgcatatgcccttgaaaaataa

SEQ ID NO: 4109 - protein, 798 aa, Acinetobacter sp. ADP1
MKVWCFILGLALLITGAFYVIGGGKLISLGGSWYFLIAGLMITTSAFFMFKKKATGVWLYALAFIGTVIWALIDAGFEFWPLHSRLMFPAGLFAAVMLTLPSIRKYQYQTPMSAPAYVIGGLTVLGMLGGLYGMFIPHETVKASGEELPLVPVDPAKKQVNWDHYGNDAGGSRFVALDQINRNNVSKLKEAWRFRTGDFTTGTGNGAEDQMTPLQVGNKVFLCTPHNNIFAIDADSGKQLWKAEVNSTADAWERCRGVAYFDSTQPLVQPTLAGATPVAALAANTECPRRVYTNTVDGRLIAVNADTGARCKDFGVNGTVNLHEGLGENTKAPRFEVTSAPTIAGTTIVVGSRIADNVAADMPGGVIRAYDVITGKLRWAFDPRNPDPNYVLKPGEIYKRSSTNSWAAMSYDPQMNTVFLPMGSSSVDVWGGNRTAADHKYNTSVLALDATTGKEKWVYNTVHNDLWDFDLPMQPSLVDFPMKDGTTKPAVVIGTKSGQFYVLDRVTGKPLTKVIEQPIKVADIPGEQYSKTQPRSVEMPQIGNQTLKESDMWGATPFDQLMCRINFKSMRYDGLYTAPGTDVSLSFPGSLGGMNWGSIAFDPTHRYMFVNDMRLGLWIQLIKQTPEDIKIQANGGEKVNTGMGAVPMKGTPYKVNKNRFMSALGIPCQKPPFGTMTAIDMKTRQVAWQVPLGTIQDTGPMGIKMGLKAPIGMPTIGGPMATQGGLVFFAATQDYYLRAFNSSNGKELWKARLPVGSQGTPMSYMSPKTGKQYVVVSAGGARQSPDHGDYVIAYALEK

SEQ ID NO: 4110 - DNA, 2406 bp, Acinetobacter sp. ADP1
  CDS (1)..(2406): transl_table=11
atgtctcaaccatcttcaaattcaggacttagaacattgaccgtagttatcgctgcggtgattggtctattcctgctcgttggaggtatatggcttactgtactcggtgggtcattctattatgtgattgcaggattggcattactgatctttgcatggctcttgctcaaacgatcaagcacttctatctggttgtatgctgcattaatgctcggtacaacgctatggggtatttgggaagttggtacagacttctgggccttggcaccgcgtctggacattttaggcgtacttggtctatggattttaattccagccgtgagccgtggaatggacaatgcaaaatcaagcaaaattgcgttgtcttctacacttgtgattgcaattgtggtcatggtttattctatttttaatgatccgcaagaaattaatggtgtcattaaaaatgagcaacccaaaactgcacaagcagttgaaggtgttgatgctgctgattggcctgcctatggtcgtacccagggtggtgtacgttattcgcctttaacgcagattaatgatcagaacgttaaagatttgaaagtggcatggaccttccgtacaggtgacttaaaaactgcaaatgactcgggtgaaaccaccaatcaggttacgccaatcaaagttggcaataacatgtacatgtgtaccacccaccaatggttaattgcacttgaccctgcaacaggtaaagaaaaatggcgttttgatccgaaattaaaagcagataaaacctatcaacatttaacctgtcgtggtgtgatgtattacgatgccaataataccagtgagttcgcaaccagcttgcaagccaaaaaatcagcatcgacagaatgcccacgtaaagtctttttacctgtgaatgatggtcgtctggttgctatcaatgcagatactggtaaggcatgctctgactttggtacgaagggtgaagtcgatttacaaaagttgatgccatatgcttatccaggcggttataacccaacatcgccaggtattgtttctggtacaacagtggtgattgcaggttctgtcacagataactactccaataaagagccatcaggtgtcattcgtggttacgatgtaaacacgggtaaactgctttgggcatttgatacgggtgcacaagatccaaatgcacttcctggcgaaaattcgacgtttgtacacaattctccaaatgcatgggcgccattggcatacgatccgaagctggatatcgtctatgtaccaacaggtgtcggtacgccagatatctggggtggagatcgtaccgagttgaaagagcgttatgcaaattcaatgctggcaatcaacgccacaaccggtaaacttgtttggcatttccagaccacacatcatgatttgtgggatatggatgtaccatcacagccttcactggcagatgttaaagacaagtctggtcagactgttccagcgatttatgtgttaaccaaaacaggcaatgtttttgttctagatcgtcgtaatggtaaggcgattgtgccaattacagaaaaagcggtaccacagaccgtgaaacgtggcccacaaaccaagggtgaacgttattctgcgacacaaccattttctgcacttgatttagcaccaaaagacaaacttacagacaaacaaatgtggggtgccacaatgtttgatcagttgatgtgtcgcgtgtcattcaagcgtctgaactatgacggtatttatacaccaccatctgaaaacgggactttagtgttcccaggaaatctgggtgtatttgaatggggtgggatgtcggtcaatcaggatcgtcagattgcagtcatgaatccgttggcgctaccgtttgtgagccgtctgattccgatggatccgaaccgtaaggaaactgcacgtggtgcaggaacagagcatggtattcaaccgatgtatggtgtgccttatggtgtggaaatcaatgcattcttgtcgcctcttggtttgccttgtaagcagcctggctggggctatattgctggtgtcgatttaaattcacatgaagtggtctggaaaaaacgtatcggtactatccgtgatagtttgccaaatctattccagttgccagcacttaaaattggtgtacctggcttgggtggaaccatttcaactgcaggtaacgtaatgtttgttggtgcaacccaggataactatatccgtgcgtttaatgttagtaatggtgaaaaactgtgggaagcacgtttaccagcaggtggtcaagccacaccgatgacctatgaaatcaatggtaaacaatatgtggtaattatggcgggtggtcatggttcatttggcaccaagatgggtgactatcttgtggcttatgcattgccggataccaaataa

SEQ ID NO: 4111 - protein, 801 aa, Acinetobacter sp. ADP1
MSQPSSNSGLRTLTVVIAAVIGLFLLVGGIWLTVLGGSFYYVIAGLALLIFAWLLLKRSSTSIWLYAALMLGTTLWGIWEVGTDFWALAPRLDILGVLGLWILIPAVSRGMDNAKSSKIALSSTLVIAIVVMVYSIFNDPQEINGVIKNEQPKTAQAVEGVDAADWPAYGRTQGGVRYSPLTQINDQNVKDLKVAWTFRTGDLKTANDSGETTNQVTPIKVGNNMYMCTTHQWLIALDPATGKEKWRFDPKLKADKTYQHLTCRGVMYYDANNTSEFATSLQAKKSASTECPRKVFLPVNDGRLVAINADTGKACSDFGTKGEVDLQKLMPYAYPGGYNPTSPGIVSGTTVVIAGSVTDNYSNKEPSGVIRGYDVNTGKLLWAFDTGAQDPNALPGENSTFVHNSPNAWAPLAYDPKLDIVYVPTGVGTPDIWGGDRTELKERYANSMLAINATTGKLVWHFQTTHHDLWDMDVPSQPSLADVKDKSGQTVPAIYVLTKTGNVFVLDRRNGKAIVPITEKAVPQTVKRGPQTKGERYSATQPFSALDLAPKDKLTDKQMWGATMFDQLMCRVSFKRLNYDGIYTPPSENGTLVFPGNLGVFEWGGMSVNQDRQIAVMNPLALPFVSRLIPMDPNRKETARGAGTEHGIQPMYGVPYGVEINAFLSPLGLPCKQPGWGYIAGVDLNSHEVVWKKRIGTIRDSLPNLFQLPALKIGVPGLGGTISTAGNVMFVGATQDNYIRAFNVSNGEKLWEARLPAGGQATPMTYEINGKQYVVIMAGGHGSFGTKMGDYLVAYALPDTK

SEQ ID NO: 4112 - DNA, 2376 bp, Pseudomonas syringae pv. syringae B728a
  CDS (1)..(2376): transl_table=11
atgattctcaaagtgaccggtatcgtcatcgcgatactcagcctcattctgctattcatgggggcgcaactggtggctgccggcggttcaccggcctactcgatgatcgccctgggtttgctggccacagcaaccctggtattcctgaaaagaaagtcggcacttaccctgtatgcggtgatgatgtgggggattctgctctggatcatctatgaagcgggcctggacaaatggcagtggatccctcgcggcgatctgtttgcactgatcggcctgtggctggccatgccctgggtcgtgcggccgctttatcaagcgcggtcgagcaccgataagcgtcgttttcatccgttgctgggcggtacgcttggcgtaatgctgctgatcgtgattgcgctgatgtttcacgatccgtacccgcagcaagggcggatcgacagcgtggcgaccgcccgcagcgccgagtcggcaggcagtgactgggctgcatatggcggtagcaacgcgggccagcgcttttccagcctcgatcagatcaccccggacaacgtcggcaagctgtcggtggcctgggaataccacaccggtgacttgcgcgatgaagacgaggatgccggcgagtacacctttgaagcgacgcccctcaagatcaacgaccgggtgtatgtgtgcacgcctcataacgaagtgcatgcgctgaacccgcagaccgggcaactggcctggaaatacacccccgagaaaaaacgctcgtatttgcagcagcaccagacctgccgtggcgtcagctactattcggcagcctccagcccgacaggccagccacaacagcccgctcaatgcgccaaacgcatcatcaccgcgactgcagatgccaggctggtagcgcttgatgccgacagcggcaacctgtgcagcgacttcggcagcggcggggtgatcgacttgagcttcaacatgggcacgatccgcccgcacgcgctgatgcagacatccgcgccactgattgcaggcgatctgatagtgatcggcagctcgatcatggataacggttataacgacggcaacccgtcgggtgtgattcgcgcctacgacgtcatcaccggcaggctggtatggaatttcgatccgcaaaacccggacaacacccagcctatagcggctgaccagagctatccgcaggacacgccggtcgcctgggcaaccctgagcgctgatgtcaaaaacggtctggtgtacgtcccgttcggcaacgcttcgcccgacgaaaccggcacccggcgtaaccccgacagcaacaccgagaagtttcgcgatgcactggtggctctcgacctgaagagcggcgcgctgcgctggaaattccagacctcgaacaatgacctttgggatcgcgacaacccatcgcagccctcactgctggatctgggaaaagacggtagccgccagcctgccctggtgttgccgaccaaagtaggcaacatctttgtgcttgaccgactgacgggcgagccgatcgtgcctgtcgatcaggtcagtgtgcgcaccgcgggcggtgttgaaggcgagcgctttgcacccacccagccggtctcgcgacttaacttcatcccgccggtgttgaccgagaagtccatgtggggcgttacgccttttgaccagatggcttgccggatcgcgtacaacacccttcgttatgacggtaacccttggacaccggccaccgagtcgggatcgctgatctatcccggcaacataggcgtgttcaactggggttcggtggccgtggaccctgaccgccagttgctgatcaccgcaccggtgcgcctggcgtatgtctacaacctgatcaagcgccccgcgcaggcccgggaaaaacgcctgttcactcaggagggcaagccctactggaacgagaacttcgacggtgactatgccatccgtatttccagattcgcctcgagccttggcattccgtgcacagcgccaccgtgggggaccatggccggggtcgatctgacgaccggcaagacccaatggatgcgccgggttggtaccaccaaaaacctcaagaccagcttcatgcagggacgttttccggtcggttttcccatgggcatggtcgcccatggcggtccgatggtgacggcaggcggattggcctttcacggcgcgacggcggataactttttccgcgcctacgacgtcaatagcggcgaagtgctctgggaacacgagttacccgcgggtggccaatcgattccttcgacgtataccggcaacgacggcaaacagtacgtggtcattgctgccggcggtcacggatcgctcggtacgacgttgggcgacagcgtgattgccttccgggttgattga

SEQ ID NO: 4113 - protein, 791 aa, Pseudomonas syringae pv. syringae B728a
MILKVTGIVIAILSLILLFMGAQLVAAGGSPAYSMIALGLLATATLVFLKRKSALTLYAVMMWGILLWIIYEAGLDKWQWIPRGDLFALIGLWLAMPWVVRPLYQARSSTDKRRFHPLLGGTLGVMLLIVIALMFHDPYPQQGRIDSVATARSAESAGSDWAAYGGSNAGQRFSSLDQITPDNVGKLSVAWEYHTGDLRDEDEDAGEYTFEATPLKINDRVYVCTPHNEVHALNPQTGQLAWKYTPEKKRSYLQQHQTCRGVSYYSAASSPTGQPQQPAQCAKRIITATADARLVALDADSGNLCSDFGSGGVIDLSFNMGTIRPHALMQTSAPLIAGDLIVIGSSIMDNGYNDGNPSGVIRAYDVITGRLVWNFDPQNPDNTQPIAADQSYPQDTPVAWATLSADVKNGLVYVPFGNASPDETGTRRNPDSNTEKFRDALVALDLKSGALRWKFQTSNNDLWDRDNPSQPSLLDLGKDGSRQPALVLPTKVGNIFVLDRLTGEPIVPVDQVSVRTAGGVEGERFAPTQPVSRLNFIPPVLTEKSMWGVTPFDQMACRIAYNTLRYDGNPWTPATESGSLIYPGNIGVFNWGSVAVDPDRQLLITAPVRLAYVYNLIKRPAQAREKRLFTQEGKPYWNENFDGDYAIRISRFASSLGIPCTAPPWGTMAGVDLTTGKTQWMRRVGTTKNLKTSFMQGRFPVGFPMGMVAHGGPMVTAGGLAFHGATADNFFRAYDVNSGEVLWEHELPAGGQSIPSTYTGNDGKQYVVIAAGGHGSLGTTLGDSVIAFRVD

SEQ ID NO: 4114 - DNA, 2424 bp, Pseudomonas syringae pv. syringae B728a
  CDS (1)..(2424): transl_table=11
atgagcactgacagtgcttcaaatagaaatcgcctgttaccgaccctgctcgggctggtgatcctgttgatggggctggcgttgctggtcggtggtgcccgactgctgcaactggatggctcgttgtattacctgctggccggtatcggtttcgccgtgactggcgtgttgttgatcaccggtcgtgcggctgcgctgggcctttatgcactgctgctgttcgcgagcacggtctggtcgttgtgggaagtcggcctcgactggtggcaattggtgccacgcctggcgctgtggttcgccctgggtatcgtgttgctgctgccatggttccgcgagccgctactgcgcaacggtccggcacgcatgggcaccggtgcactgagcatcgctgtggtgctggccggcctgaccgcactggcaagccagttcactaacccgggtcgtatcgaaggccagctggaccgcgagacggctggcacgaccaacaccgccccggcgatgcctgacggcgactggcagtcctacggccgcaccgcgttcggtgaccgctactcgccactggcgcagatcacgccggaaaacgtcaacaagctggagccggcctggacctatcgcacgggtgacattccggggccgaatgacccgggtgaaaccactgccgagaacaccccgctcaaggtcaacggcatgctctacgtgtgcacgccgcacagtcaggtgatcgcccttgacccggattcgggcaaggaaatctggcgcttcgatccgaagctcagcactcagaacgctgccaacttcaagggttgggcgcacatgacctgccgtggcgtcacctatcatgacgacgctgcctatgccgccagtgccccggcgcaaagcccgacggtcccggctgctgacggtactgccaccgccagtgctgcctgcccgcgcagaatcttcctgccgactgccgacacccgtctgatcgcgctgaacgccgacaccggcaagatgtgcgaagacttcggcaacaagggttcggttgacctgaccgccaacatgggcaccttcgctccgggcggctactactccacgtcgccaccggcggtcaccaaggacctggtgattatcggtggccacgtcactgacaacgtttccatggacgagccgtccggcgtgatccgcgcctatgacgtacacactggccgtctggtgtggaactgggacagcggcaatccggaagaaactgcgccgattgccgaaggcaagatctacacgcgcaactcgccgaacatgtggtccatgttcagcgtcgatgaaaagctcggcatgatttacctgccgatgggtaaccagacgcctgaccagtggggcggcgaccgtacgccagagtccgagaagtacagcgcgggcctggttgcactggacatcgcaaccggccgcgtgcgctgggactaccagttcactcaccacgacctgtgggacatggacgtcggtggtcagccgaccctgctggacatgaaaaccgctgacggcatcaaacccgccgtactggcgtcgaccaagcagggcagcatctacgtcctggaccgtagcaccggcaaaccgatcgtgccgatcaatgaagtgccggtcccgcaaggcgctgtcgcgggtgatcacacctcgccaacccagcccaagtccgacctgaacttcatgccgccgccgcttaaagagcgcgacatgtggggcgtgacaccgtttgaccagatgatgtgccggatcgacttcaagtcgctgcgctacgatggtccgttcaccccgccttcgctgcagggttcgatcgtttatccgggcaacttcggtgtgttcgactggggtggtatttccgtcgacccggtgcgtcagatcgccttcgtcaatcctaactacatggctttccgttcgaagctggtgccttctgccgaagttgaaggcggcccgggccgcaagagcgaaaccgaaggcgtacagccgaacaagggcgcgccttatggtgtgatcctggaagcactgctgtcgccgatgggcctgccttgccaggcacctgcatggggttacgtggcggctgtcgacctgaccacccaaaaaaccatctggatgcacaagaacggcaccgtgcgcgacagctcgccgatcccgcttccgctgaccatgggcgttccaagcctgggtggtacgttcacaaccgccagcggcctggcgttcatgagcgctacgcttgaccagtacctgcgtgcttatgacgtgcgtaacggcaagcaattgtgggaagcccgcctgccagcaggcgcgcaaaccaccccgatgacctacaccggtaaggacggtcagcaatacgtgctggtcgttgcgggcggtcacggctcactgggcaccaaacagggtgactacgtgatggcgttcaaactgcctaagtaa

SEQ ID NO: 4115 - protein, 807 aa, Pseudomonas syringae pv. syringae B728a
MSTDSASNRNRLLPTLLGLVILLMGLALLVGGARLLQLDGSLYYLLAGIGFAVTGVLLITGRAAALGLYALLLFASTVWSLWEVGLDWWQLVPRLALWFALGIVLLLPWFREPLLRNGPARMGTGALSIAVVLAGLTALASQFTNPGRIEGQLDRETAGTTNTAPAMPDGDWQSYGRTAFGDRYSPLAQITPENVNKLEPAWTYRTGDIPGPNDPGETTAENTPLKVNGMLYVCTPHSQVIALDPDSGKEIWRFDPKLSTQNAANFKGWAHMTCRGVTYHDDAAYAASAPAQSPTVPAADGTATASAACPRRIFLPTADTRLIALNADTGKMCEDFGNKGSVDLTANMGTFAPGGYYSTSPPAVTKDLVIIGGHVTDNVSMDEPSGVIRAYDVHTGRLVWNWDSGNPEETAPIAEGKIYTRNSPNMWSMFSVDEKLGMIYLPMGNQTPDQWGGDRTPESEKYSAGLVALDIATGRVRWDYQFTHHDLWDMDVGGQPTLLDMKTADGIKPAVLASTKQGSIYVLDRSTGKPIVPINEVPVPQGAVAGDHTSPTQPKSDLNFMPPPLKERDMWGVTPFDQMMCRIDFKSLRYDGPFTPPSLQGSIVYPGNFGVFDWGGISVDPVRQIAFVNPNYMAFRSKLVPSAEVEGGPGRKSETEGVQPNKGAPYGVILEALLSPMGLPCQAPAWGYVAAVDLTTQKTIWMHKNGTVRDSSPIPLPLTMGVPSLGGTFTTASGLAFMSATLDQYLRAYDVRNGKQLWEARLPAGAQTTPMTYTGKDGQQYVLVVAGGHGSLGTKQGDYVMAFKLPK

SEQ ID NO: 4116 - DNA, 2421 bp, Pseudomonas fluorescens Pf-5
  CDS (1)..(2421): transl_table=11
atgagcactgagggtgcttcaagtccgagccgcttgctgccaagcctgctcgggatcttgctgctgctaatgggcctggccttgctggccggggggatcaagctgagcatgctcggcggctcgctgtactacgttttggccggtatcggcctgacgttgaccggcctcttgctgctggccggtaaacgcgcggcgctgggcctgtacgccctggtactgttcgccagtaccgtctggtcgctatgggaaatcggcctggactggtggcaactggtgccacgcctgtcgctgtggttcgccctcggcgtggtcctgctgctgccctggttccgtcgcccgctgctgcacgatggcccggccccgctgggcaccgctgccctgagcgtggccgtggtcctggccggtggcgccgccattggcagccagttcactaaccctggggaaatctccggtgacctgggccgcgacaccgcggacatgaccagcaccgcgccggccatccccgacggtgaatggcaggcctacggccgcaccgagttcggcgatcgctactcgccgctgaagcagatcaccccggccaacatcggcaagctgcaggaagcctggcgcatccgcaccggcgacatgccgaccgacaaggacccggtggaaatcaccaaccagaacaccccgctgaaggtcaacggcaagctctatgcctgcaccgcccacagcaaggtgctggccctggacccggataccggcaaggaaatctggcgcttcgacccgcagatccagggccccaacggcgacgacttccgtggctgggcacacatgacctgccgtggcgtgtcgtactacgacgaagccaacttcaagaacgccgacgccatcagccagccggccaccctgtcccccgcgggccaggccatcgccaccagctgcccgcgtcgcctgttcctgcctaccgccgatgcgcgcctgatcgccatcaacgccgacaccggcaaggtctgcgaagacttcggcaccaagggcgccgtggacctgaaggccggtatcggcccattcaccccgggcggctactactccacctccccggcggccatcacccgtaacctggtgatcattggcggccacgtgaccgacaacgagtcgaccaacgagccgtccggcgtgatccgcgccttcgacgtgcacgacggccacctggtgtggaactgggattcgggcaacccggacgagaccactccgctgccggaaggcaagacctatacccgcaactcaccgaacatgtggtccctggccagcgtcgacgagaaactgggcatggtctacctgccactgggcaaccagatgcctgaccaatggggcggcaaccgcaccgcaggcgccgagaaattcagcgccggcaccgtggccctggacatcgacaccggcaagctgcgctggaactaccagttcacccaccacgacctgtgggacatggacgtgggcagccagccgactctgctggacatgaagactgcggacggcgtcaagccggcgctgatccagccgaccaagcaaggcagcctgtacgtgctggaccgtcgcgatggcaccccgatcgtgccgatccgtgaagtaccggccccgaccggcgcagtcgaaggcgaccacaccgcgccaacccaggcccgttcggacctgaacctgctgccgccgccactggacgagaaagccatgtggggcgcgacgccgttcgaccagatgctgtgccgcatccagttcaaggagctgcgctatgaaggccagtacaccccgccgtcggtgcagggcagcctgatctacccgggtaacgtgggcgtgttcaactggggcagcgtgtccctggacccggttcgccaactgctgttcaccagcccgaactacatggccttcgtttccaagctggtgccgcgtgccgaagtggctgccgggagcaagcgcgaaagcgagacctcgggcgtgcaacccaacaccggcgcgccttacgcggtgatcatgcatccgttcatgtcgccgctcggcgtaccttgccaggctccggcctggggctacgtggccggtatcgacctgaccaccaacaaggtggtgtggaagcacaagaacggcaccagccgtgacagctcgccaatcccgatcggcctgccgatgggcgtgccgagcatgggcggctccatggttaccggtggtggcgtgggcttcctcagcggcaccctggaccagtacatccgcgcctatgacgtgaagaacggcaaggagctgtggaagtcccgcctgccagcgggtggccaggccacgccgatgagctacaccggcaaggatggcaagcagtacgtgctggtggtcgtgggcggccacggctccctgggcaccaagatgggcgactacatcattgcctacaaactgtcggaataa

SEQ ID NO: 4117 - protein, 806 aa, Pseudomonas fluorescens Pf-5
MSTEGASSPSRLLPSLLGILLLLMGLALLAGGIKLSMLGGSLYYVLAGIGLTLTGLLLLAGKRAALGLYALVLFASTVWSLWEIGLDWWQLVPRLSLWFALGVVLLLPWFRRPLLHDGPAPLGTAALSVAVVLAGGAAIGSQFTNPGEISGDLGRDTADMTSTAPAIPDGEWQAYGRTEFGDRYSPLKQITPANIGKLQEAWRIRTGDMPTDKDPVEITNQNTPLKVNGKLYACTAHSKVLALDPDTGKEIWRFDPQIQGPNGDDFRGWAHMTCRGVSYYDEANFKNADAISQPATLSPAGQAIATSCPRRLFLPTADARLIAINADTGKVCEDFGTKGAVDLKAGIGPFTPGGYYSTSPAAITRNLVIIGGHVTDNESTNEPSGVIRAFDVHDGHLVWNWDSGNPDETTPLPEGKTYTRNSPNMWSLASVDEKLGMVYLPLGNQMPDQWGGNRTAGAEKFSAGTVALDIDTGKLRWNYQFTHHDLWDMDVGSQPTLLDMKTADGVKPALIQPTKQGSLYVLDRRDGTPIVPIREVPAPTGAVEGDHTAPTQARSDLNLLPPPLDEKAMWGATPFDQMLCRIQFKELRYEGQYTPPSVQGSLIYPGNVGVFNWGSVSLDPVRQLLFTSPNYMAFVSKLVPRAEVAAGSKRESETSGVQPNTGAPYAVIMHPFMSPLGVPCQAPAWGYVAGIDLTTNKVVWKHKNGTSRDSSPIPIGLPMGVPSMGGSMVTGGGVGFLSGTLDQYIRAYDVKNGKELWKSRLPAGGQATPMSYTGKDGKQYVLVVVGGHGSLGTKMGDYIIAYKLSE

SEQ ID NO: 4118 - DNA, 2376 bp, Pseudomonas fluorescens Pf-5
  CDS (1)..(2376): transl_table=11
atgaaaaacacgggggctgccgccggcagcaaatggttgctcggggggctgggtatcctgattgccctgatcgggctgggcctggccgcaggcgggggttacctcctgagcctgggcggcagtgcctatttcctgttgatgggcctggcgatgctggtgtccgggctgttgatcgcgcggcgcaacccgcgtggtgcctggctgtatggggtggccctggtgctgacggcgatctgggcggtctgggatgcgggcctggaatactggccgctggtctcgcgggtactgaccttcgccgtgatcggcctcgtggtggcgctgatctacccgaccctggtgcgtgcctccggagcccatgccgggcgcggtgcctatggcctggctgggctgttggggatcggtgtggtcgcgaccctggcctacatgttcgtgccgacccatgtggtcaaggcggacaaggtgccagcggtccagccggtggctcccgggacggaacagaaagactgggcccactggggcaataccactgcgggcaatcgcttcgccgcactggaccagatcaacaagggcaacatcgaccagttgcaggtggcctggaccttccgcaccggtgacctgcccgaaagcaacggcgctggtgccgaagaccagaacacacccctgcagatcggcgataccgtctacacctgcaccgcctacggcaaggtgttcgccctggacgccgacaccggcgccgagcgctggaagttcgaccctcagggctacgcgccaaactggcagcgctgccgcggcctggggtatttcgacgcctctgccaccccggtagccgatgcttcggtgcctgctgctccggcggcctgcaccaagcgcctgttcctgccgaccggtgatgcgcgcctgatcgcgatcaacgctgaaaccggcaagccctgtgaagactttggcaaccagggcacggtcgatctgaaaaccgacatgggcgagatcaagccgggctactaccagcagacttcgacaccgttggtggcgggcaccgtggtgatcgtcggcggccgggtggcggacaacttctccaccggcgaaccgccgggcgtggttcgggctttcgatgtgcgcagcggcgagctgatgtgggcctgggacccgggcaacccggccaccaccaagcgcccgccggcgggtgaaacctacacccgtggcacgcccaacgtctggtcggcaatgtcctatgacgccaagctgggcctggtgtacctgcccactggcaacgccaccccggatttcttcggcggccagcgcaccgagttcgacgacaagtggaactcctccatcgtcgccatcgacgtgaagaccggccaggttcgctggcacttccagaccacccatcacgacctctgggacttcgacctgccggcacagccgctgctgtacgacattccggacgacaagggcggtgtgcaaccggcgctggcccaggtcaccaagcagggcgagatattcctgctcaaccgtgagaccggcaagccgattgcccgggtggaagagcgccccgtgccccagggcaatgtgccgggcgagcggtattcgccgacccagccgttctcggtggaaatgccgtcgatcggcaaccagaccctgaccgagtccgacatgtggggcgcgactcccttcgaccagctgatgtgccgtatccagttcaagggcatgcgccatgagggtgtttacaccccgccgggcctggatcatgcgttgcagtttccgggctccctgggcggcatgaactggggcagcgtgtcggtggaccccaccagcaactacatgttcgtcaacgacatgcgcctgggcctggccaactacatgattccccgggaccagatcgccgccggtgccagtggcatcgagatgggcgtggtgccccaggaaggcacgccgttcggcgccatgcgccagcgcttcctctcggcggcgggcattccctgccagaagccgccgttcggcaccatgtcggccatcgacctgaagacccgcaagctggtgtggcaagtgccggtgggtaccgtgcaggacaccggcccgctggggatccgcatgcacctgccgatcccgattggcatgccgaccctgggcgcgtccctggctacccaatccggtctgctgttcttcgccggtacccaggatttctacctgcgggccttcgataccggcaatggcaatgagatctggaaggcgcgcctgcccgtaggcagccagtcgggccccatgacctacgtgtcgcccaagaccggtcgccagtacatcctgctcaccgctggcggtgcgcggcagtcgacggatcgtggcgactacgtgattgcttacgcgttgcccaagaaataa

SEQ ID NO: 4119 - protein, 791 aa, Pseudomonas fluorescens Pf-5
MKNTGAAAGSKWLLGGLGILIALIGLGLAAGGGYLLSLGGSAYFLLMGLAMLVSGLLIARRNPRGAWLYGVALVLTAIWAVWDAGLEYWPLVSRVLTFAVIGLVVALIYPTLVRASGAHAGRGAYGLAGLLGIGVVATLAYMFVPTHVVKADKVPAVQPVAPGTEQKDWAHWGNTTAGNRFAALDQINKGNIDQLQVAWTFRTGDLPESNGAGAEDQNTPLQIGDTVYTCTAYGKVFALDADTGAERWKFDPQGYAPNWQRCRGLGYFDASATPVADASVPAAPAACTKRLFLPTGDARLIAINAETGKPCEDFGNQGTVDLKTDMGEIKPGYYQQTSTPLVAGTVVIVGGRVADNFSTGEPPGVVRAFDVRSGELMWAWDPGNPATTKRPPAGETYTRGTPNVWSAMSYDAKLGLVYLPTGNATPDFFGGQRTEFDDKWNSSIVAIDVKTGQVRWHFQTTHHDLWDFDLPAQPLLYDIPDDKGGVQPALAQVTKQGEIFLLNRETGKPIARVEERPVPQGNVPGERYSPTQPFSVEMPSIGNQTLTESDMWGATPFDQLMCRIQFKGMRHEGVYTPPGLDHALQFPGSLGGMNWGSVSVDPTSNYMFVNDMRLGLANYMIPRDQIAAGASGIEMGVVPQEGTPFGAMRQRFLSAAGIPCQKPPFGTMSAIDLKTRKLVWQVPVGTVQDTGPLGIRMHLPIPIGMPTLGASLATQSGLLFFAGTQDFYLRAFDTGNGNEIWKARLPVGSQSGPMTYVSPKTGRQYILLTAGGARQSTDRGDYVIAYALPKK

SEQ ID NO: 4120 - DNA, 2535 bp, Psychrobacter arcticus 273-4
  CDS (1)..(2535): transl_table=11
atggaaaaattcgtagcgatcattatggcagtttttgccgcccccttgcttatcggtggcgcttatctgctctctttaggcggtagtccatactatctctttgctggcattgtcatgctagcgacagcatttttattgttcaaaaaacattggagtgcttacgggctctacgctatttttatagtagcgactattgcttgggctctttgggagtccggcttttattggtgggcactggcacctcgtgttggcttcccattgatctttggtctattaatgttattgccgtgggtatctaataagatgcgcgggcagcgcgctcaagtagcgacaagcactgctaatagtgcaataactccaaacacggttaaaaagaatcctctttattattgggggttgctcgctagtgtggttgtaggtgcactcctttcttttgggagcttagcaaacaacgccacggacaagttaggtgaacttgatttaagtgcctctgataaagacacctctacaaatcttggcgattcattatcaactggcgaacaaacaccagatggcgaatggagcgcatatggccgtactgactatggccaacgctactctcctttgactcaaatcaccactgataatgtcaaagatttagagctggcttggcaaattcaaacgggtgatgttaaaggccctaacgatgttggcgagaccacttatcaggcaacgccgttaaaaatcggcaatgcgctgtacttatgtacgcctcataactgggtaatggcactagatgctgactctggtgagacactatggaagtttgatccaaaagtagaaaaaaacctacaacgccaacaccaaacctgtcgaggtgtgtcttactatgctggtcagtctggcacggatagcactcctccagtggctaataatgagacaagcagtaccattagcaatgcagctgtcagcaatcaacccgctgcaaccagcgatatgatagtgcaaaaaattgctggtaatacctttgaaaatgcatctaagcaatgcgatgctaagatatttatcccaacttctgatgccaaactatatgcactcgatccaaatactgggcaacgctgtcaagattttggtgaagatggcgcattagatttgatgcacaatatgccatttacacaggcgggctactactattcgacgtcgcctccgatagtggtaggcaatacgattgttgtggcaggggccgtcaatgacaactatgatgtaaattcaccttctggtgttatccgtgcttatgatgtcaatactggtgagctattgtggaactgggattcaggcgaccctgacaacaccgcgccttttgatgtcaatgatcctactcagacgtacaaaaccagctcgccaaattcatgggcgatcgctagtgctgatgaagagcttggtttggtttacttccctatgggtaaccgcacgccagatcagctgggcagctaccgaaacgctgctgaagaaaaatatgcaacctctgttgtcgcgttagatattaatacaggcgaagcgcgctgggtacagcagtttgtccatcatgatctttgggatatggatacacctgctcagccaacgttgcttgacttagatacagctgatggcgtccaacctgctttggttgtaccgaccaaacaaggtgatgtctatgtcttgaaccgcgcaacaggcgagcctattgtaccaatcaaagaacgtgatgcaccgcaaggctatctcattgcaggtgaacacgccgcacccactcagccttattctggtttgagttttgagccaccaatgttgaaagaaaaagacatgtggggtgccagcctgattgatcagatgatgtgccggattgaatttaaccagcttaattatgatggtcgttatacaccaccatcaacgaatggcagcatagtctatcctggtaactttggtacctttaactggggcggaatcgccgtcgatcctgaaaatggcgtgatgtttggtatgccaacttaccttgcctttacctcaaaactcattcccaaagaaacacttggtgatgttgaaaccaataaaggtgagcaaggtgtgaatgccaatgaaggcgcagattatgcggtagaaatgggaccgtttttatcaccgcttggcgtaccttgtcagcagccaccatggggcacgatagcaggtgctgatttggccacaggcgagattgcttatcaacgcaaaaatggtaccgtacaagacttatctcctattccattaaaattggagttaggtgtccctggtatcggtggacctatcatcactaaaggtggcgtcgcactcttatcagcggcgaccgaaaacaacttccgcgcttatgatttgaaaaatggtgatgtactatggaatgtgcgtattccagcaggtggtcaagccacgcctatgacttacttgaactctaaaggtgagcaaatggtagtattggttgctggtggacatggttcagtgggtacaaccattggtgattatgtcatggcctataagcttgctaagtga

SEQ ID NO: 4121 - protein, 844 aa, Psychrobacter arcticus 273-4
MEKFVAIIMAVFAAPLLIGGAYLLSLGGSPYYLFAGIVMLATAFLLFKKHWSAYGLYAIFIVATIAWALWESGFYWWALAPRVGFPLIFGLLMLLPWVSNKMRGQRAQVATSTANSAITPNTVKKNPLYYWGLLASVVVGALLSFGSLANNATDKLGELDLSASDKDTSTNLGDSLSTGEQTPDGEWSAYGRTDYGQRYSPLTQITTDNVKDLELAWQIQTGDVKGPNDVGETTYQATPLKIGNALYLCTPHNWVMALDADSGETLWKFDPKVEKNLQRQHQTCRGVSYYAGQSGTDSTPPVANNETSSTISNAAVSNQPAATSDMIVQKIAGNTFENASKQCDAKIFIPTSDAKLYALDPNTGQRCQDFGEDGALDLMHNMPFTQAGYYYSTSPPIVVGNTIVVAGAVNDNYDVNSPSGVIRAYDVNTGELLWNWDSGDPDNTAPFDVNDPTQTYKTSSPNSWAIASADEELGLVYFPMGNRTPDQLGSYRNAAEEKYATSVVALDINTGEARWVQQFVHHDLWDMDTPAQPTLLDLDTADGVQPALVVPTKQGDVYVLNRATGEPIVPIKERDAPQGYLIAGEHAAPTQPYSGLSFEPPMLKEKDMWGASLIDQMMCRIEFNQLNYDGRYTPPSTNGSIVYPGNFGTFNWGGIAVDPENGVMFGMPTYLAFTSKLIPKETLGDVETNKGEQGVNANEGADYAVEMGPFLSPLGVPCQQPPWGTIAGADLATGEIAYQRKNGTVQDLSPIPLKLELGVPGIGGPIITKGGVALLSAATENNFRAYDLKNGDVLWNVRIPAGGQATPMTYLNSKGEQMVVLVAGGHGSVGTTIGDYVMAYKLAK

SEQ ID NO: 4122 - DNA, 2334 bp, Pseudomonas syringae pv. phaseolicola 1448A
  CDS (1)..(2334): transl_table=11
ttgctgctgcttgggctgggagtactgatcgccctgatcgggctcggtctggcaggtggcggcggctatctggtgacattgggcggcagctggttcttcctgctgatgggactggcgatgctggtcagtggtgcgctgatcgccgtgcgcaaacccaaaggtgccgggttgtatggcatcgccctgatactgaccgccgtctgggctatctgggatgcaggcctgcactattggccgctggtgtcccgcctattgacctttgccgtgatcggcctggtgattgcgctgatctacccgacactggttcgcgcttcgggtgctcaggcaggccgcggtgcctatggtctggccggtctgttggccatcggtgttgtggcgaccatcggctacatgttcgttccgagccatgtggtcagcgccagcagcgtgccggctattgtcccggtggcaccgggtgccgagcagaaggactgggcacactggggcaataccccggcaggtaaccggttcgctgctctggatcagatcaacaagagcaacgtcgacaagctgcaggttgcctggaccttccacaccggcgacattccgcagagcacaggtgccggtgcagaagaccagaacaccccgctgcagatcggcgacacggtgtacacctgcaccgcctacggcaaagtattcgcactggatgctgacaccggcactcagcgctggaagttcgacccgcagggcagtgcgcccaactggcagcgctgccgaggcctgggctacttccccgcacccgcagctgcacccgacgcacctgcccagccagccgccgcgtgcgccacacgcgtgtttctgccgactggcgacgctcgcctgatcgcactcgatgccaggaccggcgagacctgcaaggactttggtaatcaaggcgtagtcgatctgaaaaccgacatgggcgaagtcaaggaaggctactaccagcagacctcgacgccgctggtggcgggcaatgtggttgtggtgggcggtcgggttgccgacaacttctccaccggcgaacctccaggcgtggtgcgtgctttcgacgtacacagcggcgagctggtctgggcatgggatccgggtaacccgaataccaacaagcgtccgccagcaggcgaaacctatacgcgtggcacgccgaacgtctggtcggccatgtcctacgatgacaagctcggcctgatctacctgccgaccggtaacgctacacccgacttcttcggcgggacgcgtaccgagcaggacgacaaatggtcctcatcagtcgttgcggtggacgtaaagaccggtcaggtgcgctggaacttccagatgacccaccatgatctatgggacttcgacattccggcgcagccgttgctgtatgacatcccggacggcaagggcggtacgcagccggcattggcgcaagtcaccaagcagggcgagatttttctgctcaaccgcgaaaccggcgtgccgatttcgcgtgtcgaagaacgccctgtgccgcagggcaatgtgccgggcgagcgctattcgccgacccagccgttctcggtggacatgccgtcgattggcaaccagaccctcaaagagtcggacatgtggggtgctacggcgttcgaccagctgatgtgccgcatcgctttcaaaggcatgcgtcacgagggcgtttacacaccgccaggcctggcccctgcgttgcagttccccggctcgctgggcggcatgaactggggcagcgtctcggtcgacccgaccaacaactatatgttcgtcaatgacatgcgcctgggcctggccaactacatgatcccgcgcgacaagatcgccgccggtgccagtggtatcgagatgggcgtcgtgccgcaaaccggcacgccgtttggtgccatgcgccagcgcttcctgtctgccgtcggcataccgtgccaggcaccgccgttcggcaccatgtcggcgattgacctgaaaaccaaaaagctgatgtggcaggttccggtcggcaccgtgaaagacacaggtccgatgggcatccgcatgggcctgccgattccgattggcatgccgacgctgggcgcttcgttgtctacccagtcgggcttgctgttcttcgccggtacccaggacttctacctgcgtgccttcgacagcggcaacggcaacgaagtctggaaggcccgtctgccagtcggcagtcagtccggcccgatgacctacgtgtcgcccaaaaccggcaagcaatacatcctgctcaccgccggcggcgcccgccaatcgccggatcgtggcgattacgtgattgcctacgcgttacccaagtaa

SEQ ID NO: 4123 - protein, 777 aa, Pseudomonas syringae pv. phaseolicola 1448A
MLLLGLGVLIALIGLGLAGGGGYLVTLGGSWFFLLMGLAMLVSGALIAVRKPKGAGLYGIALILTAVWAIWDAGLHYWPLVSRLLTFAVIGLVIALIYPTLVRASGAQAGRGAYGLAGLLAIGVVATIGYMFVPSHVVSASSVPAIVPVAPGAEQKDWAHWGNTPAGNRFAALDQINKSNVDKLQVAWTFHTGDIPQSTGAGAEDQNTPLQIGDTVYTCTAYGKVFALDADTGTQRWKFDPQGSAPNWQRCRGLGYFPAPAAAPDAPAQPAAACATRVFLPTGDARLIALDARTGETCKDFGNQGVVDLKTDMGEVKEGYYQQTSTPLVAGNVVVVGGRVADNFSTGEPPGVVRAFDVHSGELVWAWDPGNPNTNKRPPAGETYTRGTPNVWSAMSYDDKLGLIYLPTGNATPDFFGGTRTEQDDKWSSSVVAVDVKTGQVRWNFQMTHHDLWDFDIPAQPLLYDIPDGKGGTQPALAQVTKQGEIFLLNRETGVPISRVEERPVPQGNVPGERYSPTQPFSVDMPSIGNQTLKESDMWGATAFDQLMCRIAFKGMRHEGVYTPPGLAPALQFPGSLGGMNWGSVSVDPTNNYMFVNDMRLGLANYMIPRDKIAAGASGIEMGVVPQTGTPFGAMRQRFLSAVGIPCQAPPFGTMSAIDLKTKKLMWQVPVGTVKDTGPMGIRMGLPIPIGMPTLGASLSTQSGLLFFAGTQDFYLRAFDSGNGNEVWKARLPVGSQSGPMTYVSPKTGKQYILLTAGGARQSPDRGDYVIAYALPK

SEQ ID NO: 4124 - DNA, 2418 bp, Pseudomonas syringae pv. phaseolicola 1448A
  CDS (1)..(2418): transl_table=11
atgagcactgacagtgcttcaaatagaaatcgcctgttgccgaccctgctcgggctggtgatcctgttgatggggctggccttgctggtcggtggtgcccgactgctgcaactggatggctcgttgtattacctgttggccggtatcggcttcgccgtgaccggcgtgttgctgatcactggtcgcgcggctgcgctgggcctttatgcactgctgctgttcgcgagcaccgtatggtcgttgtgggaagtcggactcgattggtggcaactggtgccacgcctggcgctgtggttcgcactgggcatcgtcctgctgctgccgtggttccgcaagccactgctgcgcaatggcccggcgcgcctgggcactggcgcattgagcgttgctgtcgtgctggccggtctgaccgcgctggcgagccagttcaccaaccctggccgtatcgaaggccagctggaccgcgaaactgctggcaccaccaacaccgctccggccatgcctgacggcgactggcagtcctacggccgtaccgcattcggcgaccgctactcgcctctggcacagatcaccccggaaaacgtcaacaaactggaaccggcctggaccttccgcactggcgacatccctgggccgaacgacccgggtgaaaccactgccgagaacaccccgctcaaggtcaacggcatgctctacgtgtgtacgccgcacagccaggtgatcgcgcttgatccggattcgggcaaggaaatctggcgcttcgatccgaagctcagcacccagaatgcgaaaaacttcaaaggctgggcgcacatgacctgccgtggcgtcacttatcatgacgacgcagcctatgcagccagcgccccggcacaaagcccggcagcaccggccgcagccagtgccacttcaagtgcctgtccacgcagaatcttcctgccgactgccgacacccgtctgatcgcgctgaacgccgataccggcaagatgtgtgaagatttcggcaacaagggttcggttgacctgaccgccaacatgggcacattcgcgccgggcggctattactccacgtcgccaccggcagtgaccaaagacctggtgatcatcggcggccacgttaccgataacgtctccatggatgaaccgtccggcgtgatacgtacctacgacgtgcacactggccgtctggtctggaactgggacagcggcaacccggaagagactgcgccgattgccgaaggcaagatctacacgcgcaactcgccgaacatgtggtccatgttcagcgtcgatgaaaagctcggcatgatctacctgccgatgggtaaccagacgcctgaccaatggggcggcgatcgtacgccggattccgagaaatacagcgcgggcctggttgcgctggacatcgcgacgggtcgcgtacgttggaattaccagttcacccaccatgacctgtgggacatggacgtgggtggtcaaccgaccctgctggacatgaaaacggctgatggcgtgaagccggcggtattggcatcgaccaagcagggcagcatctacgtgctggaccgcagcaccggtcagcccattgtgccgatcaacgaaataccggttccgcaaggcgctgttgcaggcgatcacacctcgccgacccagcccaagtccgacctgaacttcatgccgccgccgcttaaagagcgcgacatgtggggcgtgacgccatttgaccagatgatgtgccggatcgacttcaagtcgctgcgctacgacggcccgttcacgccgccatcgctgcagggttcgattgtttatccaggtaacttcggtgtgttcgactggggcggtatttccgtcgacccggttcgtcagattgccttcgtcaacccgagctacatggcgttccgttcaaagctggtgcctgctgccgaagtcgaaggcggccctggccgcaagagcgaaaccgaaggcgtgcagccaaacaagggcgcaccttatggcgtgatcctggaagcactgctgtcgccaatggccctgccgtgccaggcaccggcgtggggttacgtggcggcggtcgatctgaccacccacaaaaccatctggatgcacaagaacggtaccgtgcgtgacagttcgccaatcccgatcccgctgaccatgggcgttccaagcctgggtggcccgatcacaacggcgagcggtctggccttcctgagcggtacgcttgaccaatacctgcgcgcctacgatgtacgtaacggcaaacagctgtgggaaggtcgcctgccagcaggcgcccaaaccacaccgatgacctacaccggcaaggacggtcagcaatacgtgctggtcgtggcgggcggtcacggttcactgggcaccaaacagggtgactacgtgatggcattcaaactgccgaagtga

SEQ ID NO: 4125 - protein, 805 aa, Pseudomonas syringae pv. phaseolicola 1448A
MSTDSASNRNRLLPTLLGLVILLMGLALLVGGARLLQLDGSLYYLLAGIGFAVTGVLLITGRAAALGLYALLLFASTVWSLWEVGLDWWQLVPRLALWFALGIVLLLPWFRKPLLRNGPARLGTGALSVAVVLAGLTALASQFTNPGRIEGQLDRETAGTTNTAPAMPDGDWQSYGRTAFGDRYSPLAQITPENVNKLEPAWTFRTGDIPGPNDPGETTAENTPLKVNGMLYVCTPHSQVIALDPDSGKEIWRFDPKLSTQNAKNFKGWAHMTCRGVTYHDDAAYAASAPAQSPAAPAAASATSSACPRRIFLPTADTRLIALNADTGKMCEDFGNKGSVDLTANMGTFAPGGYYSTSPPAVTKDLVIIGGHVTDNVSMDEPSGVIRTYDVHTGRLVWNWDSGNPEETAPIAEGKIYTRNSPNMWSMFSVDEKLGMIYLPMGNQTPDQWGGDRTPDSEKYSAGLVALDIATGRVRWNYQFTHHDLWDMDVGGQPTLLDMKTADGVKPAVLASTKQGSIYVLDRSTGQPIVPINEIPVPQGAVAGDHTSPTQPKSDLNFMPPPLKERDMWGVTPFDQMMCRIDFKSLRYDGPFTPPSLQGSIVYPGNFGVFDWGGISVDPVRQIAFVNPSYMAFRSKLVPAAEVEGGPGRKSETEGVQPNKGAPYGVILEALLSPMALPCQAPAWGYVAAVDLTTHKTIWMHKNGTVRDSSPIPIPLTMGVPSLGGPITTASGLAFLSGTLDQYLRAYDVRNGKQLWEGRLPAGAQTTPMTYTGKDGQQYVLVVAGGHGSLGTKQGDYVMAFKLPK

SEQ ID NO: 4126 - DNA, 2406 bp, Pseudomonas fluorescens PfO-1
  CDS (1)..(2406): transl_table=11
gtgaagcagagtcaacgcctctcgggcatatcaacattcattctggtcgggctgggcgtgatcatcgccctgctcggcctggcactggccgctggcggtgtgaaattggtcagcctgggaggctcctggtacttcctggtgggtggtctggtgatggccgtttccggtctgctgatcgcgcggcgcaagcctgccggtgcctggctgttcgcggcgtttctggttgggaccgccatctgggccgtgatcgacgcagggctggtgttctggccggtgttctctcgcctgttcatgttcagcgcggtgggtctggtggtcgcgctggtctatccgctgctcaaacgcgccaatggtgacgttgcaggtcgcggtgcttacggcgttgcggctgttctggccgttggactggccgtggctgccggcaacatgttcgtcgcgcacccgaccgtcgcccctaccggcaccggcccgggcctcaccccggtcgagccggaaaaggcgcagaaagactgggcccactacggcaataccgaaggcggcagccgcttcgccgcgctggaccagatcaaccgcagcaacgtcgacaagctgaaagtggcgtggacctaccacaccggcgacatcgccgagagcgatggcaacggtgccgaagaccagctgaccccactgcagattggcaacaaggtgttcatctgcaccccgcacaacaacctgattgcgctggatgccgataccggtaaagagctctggaaaaacgcgatcaacgctcaatccaaagtctggcagcgttgccgtggcatggcgtatttcgacgccagcgccgccgtcgccaaaccggccagcgcgccagtgagcgaaaccccgaccgctccaatcgccaactgcacacgtcgcttgctgaccaacaccatcgacgcccgcctgatcgcggttgatgccgacaccggcgagttctgccggggtttcggcaacaatggccaggtcgatctgaaggccggtctgggtgatgtcccggacagctactatcaactgtcctccgcgccgctgatggccggcaccactgtggtggttggcggtcgtgtggccgacaacgtgcagaccgacatgccgggcggcgtgatccgtggtttcgacgtgatgaccggtgccatgcgctgggcattcgacccgggcaatccaaccgatcgcaaggcacccgcagacggcagcacttatgtgcgcagcacgccgaacagctgggccccgatgtcctacgacccggcgaccaacaccgtattcctgccgatgggcagttcttccaccgacatctatggtgtcgagcgcagcaaactcgatcacacctacggtgcctccgtcctggcgctggacgccaacagcggcgaagaaaagtgggtattccagaccgtgcacaacgacctctgggacttcgacttgccgatgcagccaagcctgatcgacttcaccaaggacggtaaaaccgtaccggcggtggtcatcggcaccaaggccgggcagatttacgtgctcgaccgcgccactggcaaaccgttgaccgacgtaaaggaagtgccggtcaaggccgccaatatccccaacgagccgtactcgccgacccagccgaaatccgtgggcatgccgcaaatcggtgcccagcacttgactgaatcggacatgtggggcgccaccccgtacgaccagctgctgtgccggatcgatttcaagtcgatgcgttacgacggcttgtacaccgcgccgggcactgacaaatccctgagtttcccgggttcgctgggcggcatgaactggggcagcatttccactgacccggtgcacggtttcatcttcgtcaacgacatgcgtctgggcctgtggattcagatgatcccgtcgcagaacaaggctcaggcctcttccggtggcgaagcgctgaacaccggcatgggtgccgtgccgctcaagggcacgccttacgccgtgaacaaaaaccgcttcctgtcggtcgccggcattccgtgccaggccccgccgttcggtacgctgaccgccatcgacatgaaaacccagaaagtcgcctggcaagtgccggtcggcaccgttgaagacaccggtcccttgggcatccgcatgcacctgccgatcaagatcggtctgccaaccctcggcggcacgctgtcgacccagggcggcctgatcttcatcgccggcacccaggacttctacctgcgcgccttcaacagcgccaatggtgaagaaatctggaaagcgcgtctgccggtcggcagtcagggtggcccgatgacctatgtgtcgccgaaaaccggcaagcaatacgtggtcatcaccgccggtggcgctcgccagtcgactgatcgcggtgactacgtgatggcttacgccctgccgtaa

SEQ ID NO: 4127 - protein, 801 aa, Pseudomonas fluorescens PfO-1
MKQSQRLSGISTFILVGLGVIIALLGLALAAGGVKLVSLGGSWYFLVGGLVMAVSGLLIARRKPAGAWLFAAFLVGTAIWAVIDAGLVFWPVFSRLFMFSAVGLVVALVYPLLKRANGDVAGRGAYGVAAVLAVGLAVAAGNMFVAHPTVAPTGTGPGLTPVEPEKAQKDWAHYGNTEGGSRFAALDQINRSNVDKLKVAWTYHTGDIAESDGNGAEDQLTPLQIGNKVFICTPHNNLIALDADTGKELWKNAINAQSKVWQRCRGMAYFDASAAVAKPASAPVSETPTAPIANCTRRLLTNTIDARLIAVDADTGEFCRGFGNNGQVDLKAGLGDVPDSYYQLSSAPLMAGTTVVVGGRVADNVQTDMPGGVIRGFDVMTGAMRWAFDPGNPTDRKAPADGSTYVRSTPNSWAPMSYDPATNTVFLPMGSSSTDIYGVERSKLDHTYGASVLALDANSGEEKWVFQTVHNDLWDFDLPMQPSLIDFTKDGKTVPAVVIGTKAGQIYVLDRATGKPLTDVKEVPVKAANIPNEPYSPTQPKSVGMPQIGAQHLTESDMWGATPYDQLLCRIDFKSMRYDGLYTAPGTDKSLSFPGSLGGMNWGSISTDPVHGFIFVNDMRLGLWIQMIPSQNKAQASSGGEALNTGMGAVPLKGTPYAVNKNRFLSVAGIPCQAPPFGTLTAIDMKTQKVAWQVPVGTVEDTGPLGIRMHLPIKIGLPTLGGTLSTQGGLIFIAGTQDFYLRAFNSANGEEIWKARLPVGSQGGPMTYVSPKTGKQYVVITAGGARQSTDRGDYVMAYALP

SEQ ID NO: 4128 - DNA, 2412 bp, Pseudomonas fluorescens PfO-1
  CDS (1)..(2412): transl_table=11
atgagcactgaaggtgcttcgagtcgaagccgtcttctgccgaacctgctcggcattctgcttctgctgatgggcctggccatgctggccgggggaatcaagctgagtacgctcggcggctcgctgtattacctgctggccggtatcggcatcacgctgaccggcattctgatgctgatgcgccgtcgcgcagcattgggcctgtacgccatcgtgctgttcgccagcactgtctgggcgctgtgggaagttggtctggactggtggcaactggtgccgcgtctggcgctgtggtttgtcctcggtttcgtgatgctgctgccgtggttccgtcgtccgctgctgctcgcaggccctgcgccgatgggcaccggcggtttgaccgtggctgtgattctggccggcgtcactgccctggccagcctgttcacccacccgggcgaaaccttcggcgaactgggtcgcgacaccgccgacaccaccagcaccgccccgcaaatgccggacggcgactggcaggcctacggccgcaccgaattcggtgaccgctactcgccactgaaacagatcaccccggccaacgtcggcaagctgcaagaagcctggcgcatccagaccggcgacctgccgactgccgacgacccggtcgagctgaccaacgaaaacaccccgctgaaagccaacggcatgctttacgcctgcactgcgcacagcaaagtgctggcactggacccggacaccggcaaggaactatggcgcttcgatccgcagatcaaaagcccggaaggcttcaagggcttcgcccacatgacctgccgtggcgtgtcgtactacgacgaagccgcgtacgccaagtctgaaaacgcggcgtccaccgtgatctccgaggccggcaaagccgtcgcccaggcctgcccgcgtcgcctgtacctgcctaccgccgatgcccgcctgatcgcactgaacgccgacaccggcaagatctgcgaaggcttcggcaccaacggtgtggttgacctgacccagggcatcggcccgttcaccgctggcggttactactccacctctcctgccgcgatcacccgtgatctggtgatcatgggcggtcacgtcaccgacaacgaatcgaccaacgagccgtccggcgtgatccgcgcctacgacgtgcgcgacggccatctggtctggaactgggacagcaacaacccggacgccaccgaacccttggccccgggccagacctacagccgcaactcggccaacatgtggtcgctggccagcgtcgatgaaaaactcggcatggtctatctgccattgggcaaccagacgcctgaccagtggggcggcgatcgcacccccggtgccgagaaattcagcgccggcctggtcgcgctggacctggcgaccggcaaggtgcgctggaactaccagttcacccaccacgacctgtgggacatggacgtcggcagccagccaaccctgctggacatgaaaaccgccgacggcatcaagcctgcgctgatcgccccgaccaagcagggcagcctgtacgtcctcgaccgtcgtgacggcacgccgatcatcccgatccgcgagatcccggtgccgcaaggcgccgtgaaaggcgaccacaccgccccgacccaggcccgttcggacctgaacctgctggccccggaactgaccgaaaaagccatgtggggcgccagcccgttcgaccagatgttgtgccgcatccagttcaaggaactgcgctacgaaggccaatacacgcctccgtcggaacagggcagcctgatctacccgggtaacgtcggcgtgttcaactggggcggtgtttctgtcgacccggttcgccagatgctgttcaccagcccgaactacatggctttcgtctccaagatgatcccacgtgccgacgtacccgccgacagcaagcgcgaaagcgaaacttccggcatccagaaaaacaccggtgcgccgtatgccgtgaccatgcacccgttcatgtcgccactgggcgtaccttgccaggccccggcctggggctacgtcgccggtatcgacctgaccaccggcaaagtcgtctggaaacgcaaaaacggtaccagccgcgacagctcgccaatcccgatcggcttcaccctgggcgtgccaagcatgggcggctcgatcgtcactgccggcggcgtcggcttcctcagcggcacgctggaccagtacctgcgcgcctacgacgtgaacaccggtaaagaactgtggaaatcgcgtctgccggccggcggccaggcgaccccaatgacctacaccggcaaggacggcaagcaatacgtcctgctcgtggtgggtggtcacggctcgctgggcaccaagatgggtgactatgtgattgcctacaaactgccggaataa

SEQ ID NO: 4129 - protein, 803 aa, Pseudomonas fluorescens PfO-1
MSTEGASSRSRLLPNLLGILLLLMGLAMLAGGIKLSTLGGSLYYLLAGIGITLTGILMLMRRRAALGLYAIVLFASTVWALWEVGLDWWQLVPRLALWFVLGFVMLLPWFRRPLLLAGPAPMGTGGLTVAVILAGVTALASLFTHPGETFGELGRDTADTTSTAPQMPDGDWQAYGRTEFGDRYSPLKQITPANVGKLQEAWRIQTGDLPTADDPVELTNENTPLKANGMLYACTAHSKVLALDPDTGKELWRFDPQIKSPEGFKGFAHMTCRGVSYYDEAAYAKSENAASTVISEAGKAVAQACPRRLYLPTADARLIALNADTGKICEGFGTNGVVDLTQGIGPFTAGGYYSTSPAAITRDLVIMGGHVTDNESTNEPSGVIRAYDVRDGHLVWNWDSNNPDATEPLAPGQTYSRNSANMWSLASVDEKLGMVYLPLGNQTPDQWGGDRTPGAEKFSAGLVALDLATGKVRWNYQFTHHDLWDMDVGSQPTLLDMKTADGIKPALIAPTKQGSLYVLDRRDGTPIIPIREIPVPQGAVKGDHTAPTQARSDLNLLAPELTEKAMWGASPFDQMLCRIQFKELRYEGQYTPPSEQGSLIYPGNVGVFNWGGVSVDPVRQMLFTSPNYMAFVSKMIPRADVPADSKRESETSGIQKNTGAPYAVTMHPFMSPLGVPCQAPAWGYVAGIDLTTGKVVWKRKNGTSRDSSPIPIGFTLGVPSMGGSIVTAGGVGFLSGTLDQYLRAYDVNTGKELWKSRLPAGGQATPMTYTGKDGKQYVLLVVGGHGSLGTKMGDYVIAYKLPE

SEQ ID NO: 4130 - DNA, 2346 bp, Rhodobacter sphaeroides 2.4.1
  CDS (1)..(2346): transl_table=11
ttgaccgctaccctgaccgccatcgtccttgccctcgccgggctgggcctcctcatcccgggcgcctggctggccgttctgggcgggagctggttctacctcgtggccggagccctcatgctgctgacggcatggcaggtgttccgccgctcctcctccgccgaatggatctatggcggcctcatcctcggcgcgctcgtctggtccgtctgggaagtgggcttcgactggtgggaactcattccccgcggcggcatcatcgcgcttctgggcatctggctctacctgcccttcatgcggcggcagctgctgaccgaggacggccgccccgcgcccggcctgcccttggccctgccccttctggcggccatcggggccgccatctggtcatggaccggagacgaagcgggacatgcaggctcgctgccgacggaagtggtcagcgccgagcccgatctcggcccctccgcgcctcccggcgagtggcaccagtacggccgcacgcagtacgggcagcgctacagcccgctcgaacagatcaacatccagaatgtcgccgagctcgagcaggtctggcagtatcagaccggcgatgtgaagctgccgcaggacgtgaccgagaccacctatcaggtcacgccgctgaaggtcgccgaccgtctctacatctgcaccccgcacgatctggccatcgcgctcgatgcggcgaccggcaaggaagcctggcgcttcgacgcgcgctccgggctcgagtccgaccggcagcaccagacctgccgcggcgtgacctactggcgggatccggcacgcgccgagggagagctctgcgccgagcgggtctatctgccgacggccgatgcgcggctgatcgcgctcgacgcaaagtccggcgcggtctgcaccttcttcgccgacgagggtacgctccatctcgagaacgggatgccctacaccccggcaggcttctactattccacctccccgcccgtggcggtcggaggccggatcatcatcggcggcgcggtcaacgacaatttctcggtctattcgcagtcgggcgtgatccgggccttcgatgccaacaccggggcgctcctgtggaactgggacagcgccaaccccgacaagaccgcccccatcgactggatgaacggcgagacctataccgcaaattcgcccaactcctggtcggtcttctcggtcgatgaggaacgcggcctcgtctacatcccgctcggcaaccaggtccccgaccagctgggcttcaaccgctcgcccgccgtcgaggaacattcctcctcggtcgtggcgctcgacgtggcgacgggtcagaaggcctgggtgttccagaccgtgcaccatgacctgtgggacatggacgtgcccgcccagcccgttctgatcgatctcgacatcgacggtcagacggtgcccgcgctcgtgcagccgacgaagcagggcgacatctatgtgctcaaccgcgagacgggcgagccgatcctgcccgtcaccgaagagcccgccccgcaggagggcgctctgcgcgaagagacccctgccccgacgcagcccacctcggcgctgagcttcaaacccgaggcgctgcgcgagaaggacatgtggggcgtcacgctctacgaccagctcgcctgccggatccagtatcaccggttgaactacgagggccgctacacgcccccgtcgctgaacggcaccatcgtctatccgggcaatttcggcaccttcaactggggctccgtcgccgtcgatcccgagcggcaggtgatgttcggcatgcccacctacctgcccttcacgagccagctggttccggccgaggacatcccgccgcccggcgcagatcagaaggccagcgaacagggcctgaaccgcaacgagggcgcgccctacggcgtcatcatggggcccttcctcgggccgctcggcgtgccctgctcggcgccgccgtggggcttcgtcgcgggggcggacctccgcaccggagagatcgcctacatgcaccgcaacggcaccgtgcgcgacatgacgcccctgccgctgcccttcaaggtgggcgtgccggggatcggcgggccgatcgtcacgcgcggcggcgtggccttcctcggagcggcggtcgacgactacctgcgcgcctacgatgtgaccacgggcgatcagctctggcaggcgcggctgcccgcgggcggccagtcgacgccgatgacctacgagcaggacggccggcagttcgtggtgatcgtggcgggcgggcacggctcggtcggcacgaaaccgggcgactatgtgatcgcctacgccctgcccgacggctcggagggttga

SEQ ID NO: 4131 - protein, 781 aa, Rhodobacter sphaeroides 2.4.1
MTATLTAIVLALAGLGLLIPGAWLAVLGGSWFYLVAGALMLLTAWQVFRRSSSAEWIYGGLILGALVWSVWEVGFDWWELIPRGGIIALLGIWLYLPFMRRQLLTEDGRPAPGLPLALPLLAAIGAAIWSWTGDEAGHAGSLPTEVVSAEPDLGPSAPPGEWHQYGRTQYGQRYSPLEQINIQNVAELEQVWQYQTGDVKLPQDVTETTYQVTPLKVADRLYICTPHDLAIALDAATGKEAWRFDARSGLESDRQHQTCRGVTYWRDPARAEGELCAERVYLPTADARLIALDAKSGAVCTFFADEGTLHLENGMPYTPAGFYYSTSPPVAVGGRIIIGGAVNDNFSVYSQSGVIRAFDANTGALLWNWDSANPDKTAPIDWMNGETYTANSPNSWSVFSVDEERGLVYIPLGNQVPDQLGFNRSPAVEEHSSSVVALDVATGQKAWVFQTVHHDLWDMDVPAQPVLIDLDIDGQTVPALVQPTKQGDIYVLNRETGEPILPVTEEPAPQEGALREETPAPTQPTSALSFKPEALREKDMWGVTLYDQLACRIQYHRLNYEGRYTPPSLNGTIVYPGNFGTFNWGSVAVDPERQVMFGMPTYLPFTSQLVPAEDIPPPGADQKASEQGLNRNEGAPYGVIMGPFLGPLGVPCSAPPWGFVAGADLRTGEIAYMHRNGTVRDMTPLPLPFKVGVPGIGGPIVTRGGVAFLGAAVDDYLRAYDVTTGDQLWQARLPAGGQSTPMTYEQDGRQFVVIVAGGHGSVGTKPGDYVIAYALPDGSEG

SEQ ID NO: 4132 - DNA, 2400 bp, Burkholderia xenovorans LB400
  CDS (1)..(2400): transl_table=11
atgcacagttccgcctcaattcgcgtagcgcatttgcttagcgttctgtttgcctcattgtcgggggtgtacctgctggtcggcgggatctggctagcggcgaccggcggatcgctgtactacgttttcgccggtatcgtcatgctcgttacggcggttctgatttatcggcgttccccactagcactcggcctctacgcattactgctgttgtgcacgatcgtgtggtcgctgtgggaggtcggcacggatttctgggctcttgccccgcgtctggacgtactggtcgtcttcggcatctggctgctgttgccgtatgtctatcgcgcgttcgagccgtccgcaaaaacgcatggtctcgcgctcggggccacgttgatcgtgagcgtcgcagtgctggtttttgcagtcttcaacgacccacaggaaatcaacggcacgctggcgagcgcgcctgcccaggcggcggcgacgcccgccggcgagcgcgtcgccgagggcgactggcccgcctacggccgtacccagcacggtacgcgctactctccgctcaagcagatcaacgcggataacgtcaaggatctgaaggtcgcgtggatattccggaccggcgacatgaagcgctccaccgacccaggtgaaatcacgaacgaagttaccccgatcaaggtgggcgacatgctgtatctgtgctcgccgcaccagatactgttcgcgcttgacgctgccaccggccaggaaaaatggcgcttcgatcccaagctgaagaccgatcccagttttcagcatgtcacgtgccgtggggtgtcgtaccatgattcgaccgcttcgggcagtaacaacgacagcccggaccaggccccggctacggcgcctgcaatctgcgcgcgccgcgtctacctgcctgtcaacaacgggcatctgtacgcgctcgacgcgcagaccggccagctatgcccggacttcgccaatcacggcgacctcgacctgcaagtgggccagcccgtgacgaccgcgggtcaatatgaacccacttcgccgccggtcatcaccgggaaggtgatcgtaatcgcaggctcagtcgaggataactattcgacgcgggagccctcgggagtgatccggggtttcgatgtcaacaccggcaaactgttgtgggcgttcgatccgggcgcgaagaacccggaagcggtgctcggcgcaggccagcattattcggtcaactcgccgaactcctgggcaccggctgtttatgacgcaaagctcgatcttgtctatctgccgatgggcgtaagcacgcccgacatctggggcggctaccgcacgccggagcaggaacgctttgcgagcgggctgctcgcgctcaacgcgacgaccggcaagctcgcctggttttatcagacggtccaccacgacctgtgggacatggacctgccggcgcagccgacgctcgccgatatcacggaccggtcgggcaacctcgtgccggcggtctacgccccggcaaagacgggcaacattttcgttcttgaccgccgcacaggcacgccgatcgttcctgctccggagaagccggttccgcaaggcgcggcgcaaggcgatcacgtgtcgcccacccagccgttttcggcgctgaccttccggccggacaggaaactgaccggcgcggacatgtggggcgcaacgatgtttgaccagctcgtgtgccgagtgatgttccagcgcctgaactatgacggcacgtttacccctccgtcggtgaagggcaccctggtttttccgggtaacctcgggatgttcgagtggggcggcatagcagtggataccgatcgccagatcgcgattgcgaacccgatcgcactgccgttcgtgtccaggttgatgccgcgtgggccgggcaacccgatcgaaccggccgccggcggcacgggcggcagcggtaccgaatccggtatccagccgcagtacggcgtgcccttcggtgtgacgttgaatgccttcatgtcgccgctcggcctgccgtgcaagcagccggcgtggggctacatatccgcggtcgatctgaagaccaaccagattgtctggaaaaagcgcattggcaccgtgcgtgacagttcaccgctgccgctgccgttcaagatggggatgccgatgctcggcggcccgatgacaacggccggcgacgtgttcttcatcggggccaccgccgacaactacatccgcgcgttcgacaccaacaccggcaagcagttgtggcaagcacgtttgcccgcgggtggccaggcgacgccaatgacctacgaggcgaaagggaagcagtacgtggtcatcgcggccggcggccacggctcgttcggcaccaggttgggcgactacgtgatggcttatgcgctgccttga

SEQ ID NO: 4133 - protein, 799 aa, Burkholderia xenovorans LB400
MHSSASIRVAHLLSVLFASLSGVYLLVGGIWLAATGGSLYYVFAGIVMLVTAVLIYRRSPLALGLYALLLLCTIVWSLWEVGTDFWALAPRLDVLVVFGIWLLLPYVYRAFEPSAKTHGLALGATLIVSVAVLVFAVFNDPQEINGTLASAPAQAAATPAGERVAEGDWPAYGRTQHGTRYSPLKQINADNVKDLKVAWIFRTGDMKRSTDPGEITNEVTPIKVGDMLYLCSPHQILFALDAATGQEKWRFDPKLKTDPSFQHVTCRGVSYHDSTASGSNNDSPDQAPATAPAICARRVYLPVNNGHLYALDAQTGQLCPDFANHGDLDLQVGQPVTTAGQYEPTSPPVITGKVIVIAGSVEDNYSTREPSGVIRGFDVNTGKLLWAFDPGAKNPEAVLGAGQHYSVNSPNSWAPAVYDAKLDLVYLPMGVSTPDIWGGYRTPEQERFASGLLALNATTGKLAWFYQTVHHDLWDMDLPAQPTLADITDRSGNLVPAVYAPAKTGNIFVLDRRTGTPIVPAPEKPVPQGAAQGDHVSPTQPFSALTFRPDRKLTGADMWGATMFDQLVCRVMFQRLNYDGTFTPPSVKGTLVFPGNLGMFEWGGIAVDTDRQIAIANPIALPFVSRLMPRGPGNPIEPAAGGTGGSGTESGIQPQYGVPFGVTLNAFMSPLGLPCKQPAWGYISAVDLKTNQIVWKKRIGTVRDSSPLPLPFKMGMPMLGGPMTTAGDVFFIGATADNYIRAFDTNTGKQLWQARLPAGGQATPMTYEAKGKQYVVIAAGGHGSFGTRLGDYVMAYALP

SEQ ID NO: 4134 - DNA, 2430 bp, Burkholderia xenovorans LB400
  CDS (1)..(2430): transl_table=11
atgtccagacaatcggcatcgccgggtttcatcgccgtcatcacactcctgtttactgcgctaaccgccctctatctgctgataggcggtgcatggctgctctcgctcggcgggtccgcgtattacgtcgtggtcgggttcgtgctgctcggcgtgacctggctgctgtaccgccgcagtccggcggcgctcacactctacgcactcgtgctggtcggcacggcggtctgggcgctgtgggagtcgggtcccgacttctgggcgcttgcgccgcgctccggcgtgctcgtcgtgttcggcgtgtggctgctgctgctcgtgagctggcgcctcgatgcgccgcgcaagctcggcgtaacgtcgctagtcggcgcgctcgtgatctgggccggcgtgctggtctacgcgagcttcaatgatccgcagacgatcaacggcacgctgagctcagtggccgccacgcccgccgccaatcccaacggcatcgatccgtccgactggcccgcctatggccgaacccaggaaggcacgcgctacgcgccgctgcagcagatcacgcccgaaaacgtcaagaacctgcaggtggcctggaccttccgcacaggcgatatgaaaggtccaaacgatccggtcgagatcaccaatgaagtcacgccgatcaagatcggcaatctgctctatctgtgctcgccccaccagatcctgttcgcgctcgatgcgaagaccggcgaacagaaatggaagttcgacccgaaactgcggcccgatccgtcgttccagcacgtgacctgccgcggcgtgtcgtatgtcgatctctcggcaagcgctgcgaccgcgcaacccaacgcgcccgccgcacccgcgagcgacaccgcgccggcggcatcggccgcatcggcggccagcggcgcctgcctgcgccgcatctatctgcccgtcaacgacggccacctctacgcgctcgacgcgcagacaggcgagcgctgcgcgggcttcggcaacaacggcgatctcgaccttcagcacgcgcagccggtcacgacgccgggcatgtacgagccgacttcgccgccgatcgtcacgaacacgacgatcatcgtggcgggcgcggtggaagacaacttctcgacgcgcgagccctcgggcgtgatccgcggcttcgacgtgcgcaccggccagctgcagtgggcgttcgatcccggcgcgcaagacccgaacaggattccgggcgcgggcgagcactacaccatcggttcgccgaactcgtgggcgccctccgcctacgacgcgaagctcgacatcatctatctgccgatgggcgtgaccacgcccgacatctggggcggcaaccgcacacccgagcaggagcgctatgcgagcggcctgctggcgctgcatgcgtcgacgggcaagctggcctggttctaccagaccgcgcaccatgacctgtgggacatggaccagccgtcgcagcccacactggcggacatcaccggcaaggacggcaagaccgtgccggtcgtgtatgcgcccgccaagaccggcaacctgttcgtgctcgatcgccgcaccggcaccccggtcgtacccgcgcccgaaatgccggtgccgcaaggcgccgcgcccggcgatcacgtttcgcccacgcaaccgttctccgatctcacattccgcccgaagaacctgctcaccgacgccgacatgtggggcgcgacgatgtacgaccagctcgtatgccgcgtcatgtttcacaagctgcggtatgaaggcacgttcacgccgccgtcgctgcagggcacgctggtgtttccgggcaacctcggcatgttcgagtggggcggcattgccgtcgacaccgaccggcagatcgccattgccaatccgattgcactgccgttcgtctcgcgcctgatcccacgcggcccaggcaacccgatgcaacccgagccgggcgcaaaaggcagcggcaccgaagcgggcatccagccgcaatacggcgtgccgtacggcgtgacgctgaacgcgttcctctcgccgttgggcttgccgtgcaaacagccggcctggggctacatctcggcggtcgatctgaagaccaacgagatcgtgtggaagaagcgcatcggcacggtgcgcgacagttcgccgattccgctgccgttcagaatgggcatgccgatgctcggcggtccgatcgtgacggcgggcggcgtcgtgttcatcggtgcgacggcggacaactacatccgcgcgttcgacgtgaacaacggcaaggaactgtggcgcgcgcgtctgccggcgggcggccaggccacgccgatgagctattccatcgacggccgccagtacatcgtgatcgccgcgggcgggcacggttcgttcggcaccaaactcggcgattacgtgatggcttacgcgttgccgcagtaa

SEQ ID NO: 4135 - protein, 809 aa, Burkholderia xenovorans LB400
MSRQSASPGFIAVITLLFTALTALYLLIGGAWLLSLGGSAYYVVVGFVLLGVTWLLYRRSPAALTLYALVLVGTAVWALWESGPDFWALAPRSGVLVVFGVWLLLLVSWRLDAPRKLGVTSLVGALVIWAGVLVYASFNDPQTINGTLSSVAATPAANPNGIDPSDWPAYGRTQEGTRYAPLQQITPENVKNLQVAWTFRTGDMKGPNDPVEITNEVTPIKIGNLLYLCSPHQILFALDAKTGEQKWKFDPKLRPDPSFQHVTCRGVSYVDLSASAATAQPNAPAAPASDTAPAASAASAASGACLRRIYLPVNDGHLYALDAQTGERCAGFGNNGDLDLQHAQPVTTPGMYEPTSPPIVTNTTIIVAGAVEDNFSTREPSGVIRGFDVRTGQLQWAFDPGAQDPNRIPGAGEHYTIGSPNSWAPSAYDAKLDIIYLPMGVTTPDIWGGNRTPEQERYASGLLALHASTGKLAWFYQTAHHDLWDMDQPSQPTLADITGKDGKTVPVVYAPAKTGNLFVLDRRTGTPVVPAPEMPVPQGAAPGDHVSPTQPFSDLTFRPKNLLTDADMWGATMYDQLVCRVMFHKLRYEGTFTPPSLQGTLVFPGNLGMFEWGGIAVDTDRQIAIANPIALPFVSRLIPRGPGNPMQPEPGAKGSGTEAGIQPQYGVPYGVTLNAFLSPLGLPCKQPAWGYISAVDLKTNEIVWKKRIGTVRDSSPIPLPFRMGMPMLGGPIVTAGGVVFIGATADNYIRAFDVNNGKELWRARLPAGGQATPMSYSIDGRQYIVIAAGGHGSFGTKLGDYVMAYALPQ

SEQ ID NO: 4136 - DNA, 2559 bp, Mesorhizobium sp. BNC1
  CDS (1)..(2559): transl_table=11
gtgtttcgtatcatactatcagtaatcattgctgttcttggccttgtcattgccgccggcggcgtttggctcgctgttcttggcggctcctggttctacatcctgcttgggcttcttctcgttctttccggcgctttgcttttgaggcgcagcgcaagcgggcttcttctgtacggcctgaccattcttctcactcttgcctggagtgtttgggaagtgggcttcgactggtgggctttggttccccgcggtgctctcatcctagtcctgggcgttcttttgctactgccgcccatattgcgggccatgcgcgttccagaaggccgacgggcgagctacgggatgaacagcggcgtgcttgcggcctcgatcttcatcgcagccatcgttggcatctattcgatgtttcaacagccgcacgatatcgatggcgcattccccgagcagcggattgccgtgtccccggcgccgcagcaaggcgatgtgccgcctggcgaatgggcagcctatggccgcacctcctttggccagcgctattcaccactggaccagatcacgcctgaaaacgtgtcgcagttggaagtggcatggagctatcagacgggagagatgcgcgatgaaaacgatcccggcgagacgacatatgaggtgacgccgctgatggtgaacaacaccctctatatctgtacgcccttcagcacggtgatcgcgcttgatcctgttactggccaggaaaagtggcgcttcgacccgcaactgagacagccgccgaccgagacaacgcagcatatgacctgccgcggcgtttcgtatcacgaggcagcgccgggggatcttcctgcgaccagccccacggctcaggctgcaccggaaaccgcgccgacgggccaagccggagcaccggatgaaacggcggagatcgcgacgagcgtggatgagataacgacgcaggcagcacctgtgccgcagaacatcgttaccggacaggcagaacccggcgcacttagctttgttgttacgcgcgaagagccgcctgcgcgcgtgacgctcagccagcagtgcatgaagcggctgttcgtgcccacgtcggatgggcggctgatcacgataagtgccgatacgggggagatctgccccggcttcggcggcgacggcacgatcaatctctgggcgaatatgccgaacgttacgcccggctcctactattccacctcgcctcccctgattgccggccggcttgtcatcatcggcggggccgtaaacgataacgaagcgatcacctcgccctccggcgtaatccgggccttcgatctctacaccggcgcacttgtctggaatttcgacagcaagaatcccgaagcgacgcagccgatcgcgccagacggcgtatattcccagaacgcaccaaattcctggagcgtggcgagctacgaccctaatctcggcctcgcctattttccgatgggcaacgaatcgccggaccagttcggcggaaatcggggtgaaaataccgaacgctactcctcctcggttctggcgctgcgggctgacaccggcgaggtggcatgggtgttccagacagtgcatcacgacatctgggactatgacgtgcccgctcagcctgtcctgatcgacctcacggtcgatggacaggcagtgccagcgctggtgcaggccacaaaacaaggcgacatcttcgtgctcaaccgggcaaccggcgagcccattttccctatcgaggagcggccaacgccgcagggcgcggtggagggcgaccggacagcgcccacccagccgcattcagccatttcgttcggcccggcccccctcagagaagccgatatgtggggcgcgacgccgatcgatcagctctattgccgggttcgtttccaccagcttcgctacgaaggccgatacacgccgccttcactccaaggcacaattgtgtatccgggcaatttcggcacgttcaactggggttctgtggctgtggaccccaaccgcgacatcatgtttgcgatgcccgtctatcttgccttcgaggtgaaacaggttcctcggcagaacgagctttcccgggttgtgacacaggagggcgaggcgatcttcaacgagaatttcggtgcaccttacgcggcgcagatggggccgttttattcgccccttcagcttccctgccaaaggccgccttggggctatatcgcagcggtggacctgaccacgggcgaaaccgtttacaagcaagtaaacggcacagtgcgggatctttcgcccattcccctgccgtttgaaatgggcgtgccgggaattggcgggccgatcgttaccgctggcggtgtagcctttctctcgggcacgctcgactattatgtgcgcggctatgacctgcgtaccggcgaggagctgtggcgtgagcggctgcccgccggcggccaagccacgccttccacctatgtgggcgaggatggccggcaatatctggtcgtggtcgccggcggccacggttccaccggcacaaaggcgggcgattcgattatcgcttatgcactgccgcaatag

SEQ ID NO: 4137 - protein, 852 aa, Mesorhizobium sp. BNC1
MFRIILSVIIAVLGLVIAAGGVWLAVLGGSWFYILLGLLLVLSGALLLRRSASGLLLYGLTILLTLAWSVWEVGFDWWALVPRGALILVLGVLLLLPPILRAMRVPEGRRASYGMNSGVLAASIFIAAIVGIYSMFQQPHDIDGAFPEQRIAVSPAPQQGDVPPGEWAAYGRTSFGQRYSPLDQITPENVSQLEVAWSYQTGEMRDENDPGETTYEVTPLMVNNTLYICTPFSTVIALDPVTGQEKWRFDPQLRQPPTETTQHMTCRGVSYHEAAPGDLPATSPTAQAAPETAPTGQAGAPDETAEIATSVDEITTQAAPVPQNIVTGQAEPGALSFVVTREEPPARVTLSQQCMKRLFVPTSDGRLITISADTGEICPGFGGDGTINLWANMPNVTPGSYYSTSPPLIAGRLVIIGGAVNDNEAITSPSGVIRAFDLYTGALVWNFDSKNPEATQPIAPDGVYSQNAPNSWSVASYDPNLGLAYFPMGNESPDQFGGNRGENTERYSSSVLALRADTGEVAWVFQTVHHDIWDYDVPAQPVLIDLTVDGQAVPALVQATKQGDIFVLNRATGEPIFPIEERPTPQGAVEGDRTAPTQPHSAISFGPAPLREADMWGATPIDQLYCRVRFHQLRYEGRYTPPSLQGTIVYPGNFGTFNWGSVAVDPNRDIMFAMPVYLAFEVKQVPRQNELSRVVTQEGEAIFNENFGAPYAAQMGPFYSPLQLPCQRPPWGYIAAVDLTTGETVYKQVNGTVRDLSPIPLPFEMGVPGIGGPIVTAGGVAFLSGTLDYYVRGYDLRTGEELWRERLPAGGQATPSTYVGEDGRQYLVVVAGGHGSTGTKAGDSIIAYALPQ

SEQ ID NO: 4138 - DNA, 2340 bp, Rhizobium leguminosarum bv. viciae 3841
  CDS (1)..(2340): transl_table=11
atggcgatcatcgtcacctccatcttcttcatcatcgtcggtcttactctcggcggcggtgggctctggcttgtcacgctcggcggcagcgtcttctatctgttcgccgggctgatgttcctgattaccgccgggctgctgttgatgcgcaaggcggtggcgctctgggtctatgcggtgctcgtcgtcgcagcactcgcctgggcgatctgggaggtcggcttcgactggtggcaactcggcccgcgcggcggcatgatcatcctgctcgggctctggctgctgacgccgtggatccgccggccgctcggcctgcgcagcccgacgggcattacctatgccgccaacccgtggccgctcgccgtgcctgtcatcctcgccatcctcgtcgccctttattcgatgacgactgacccgcatgatctcgccggcgaactgccgaaggatacggtcgccgccaatcccgccttcggcggcagcgtaccggatggcgaatggcatcaatacggccgcacgcccttcggccagcgctattcgccgctcgaccagatcaccgccgagaacgtctccaccctcaaggaagcgtggcgataccagaccggcgacgtcaagcggccggacgatgtcggcgagacgacctatcaggtgacgccgctcaaggtgaaggacacgctctatctctgcacgccgcataactgggcgatcgcgctcgacgccaagaccggcaaggagaaatggaaatacgacgccaactccggcatgaaccccgaccggcagcatcagacctgccgcggcgtcacctattatgccgatcctgccgttgccgccggccagccctgcgccgagcgcgtctacctgccgacctccgacgcccggctgatcgcgctcgatgctgcggacgggaaggtctgcaccagctttgccgatcaaggcgtgctgcatttggaaaccggcatgcgctacaacccggccggctattattattccacttcgccgccggtcgcggtggcgggcaagatcatcgtcggtggggcggtcaacgacaattattcgactgaggaacaatccggcgtcatccgcgccttcgacatcaataccggcgccttggtctggaactgggattccggcaatcccgatctgacgacgccgatcaccgagggccagacctacacgaccaactcaccgaacagctggtcagtcttcagcgtcgatgaggcgctcggcatggtctacatcccgctcggcaaccaggtgcccgaccagatcggcatcaaccgcagcgacaatgtcgagaaattttcctcctctatcgtcgcgctcgatatcgccaccggccagttgcgctgggtacgccagacagtgcatcacgatctctgggacatggacgtgccggcccaaccggcgctgatcgatctgacgaagcaggacggcaccgttgttccggccttggtcggcccgaccaagcagggcgatatctatgtgctcgaccggcgcagcggcgagccgatcatcccggtcaaggaaataccagcgccaggcggcgctgtctcgggcgatcatacctcgccgacacagccgatctcggacctcaccttctcgcccgagccgcttcaggaaaaggacatgtggggcgtgtcgctgtttgatcagatggcctgccgcatcgacttccaccgctaccactatgagggccgctatacgccgccttcgctcaaaggcacgatcgtctatcccggcaatttcggcaccttcaactggggctcggtggcggtggatccggagcggcagatcatgttcggcatgccgacctatctcgccttcacctcgcgcctggtaccggccgccgatattccgccgcgaggccaggacgagaagggcagcgaacaggggctcaaccgcaatgacggcgcgccctacggcgtcttcatgggtcccttcctcgggctgcttcaaatcccctgccaggcgccgccatggggctatgtcgccggcgtcgacctgcgcaccggcaagatcgcctatatgcacaagaacggcaccgtgcacgacatgacgccactgcccctgcccttcaaggtcggcgtacccggcatcggcgggccgatgctgaccaagggcggcgttgccttcctgggggccgcggtcgacaactacctgcgcgcctatgacgtgacgagtggccgggagctctggcagggacggcttcccgccggcggccaggcgactccgatgacctacatgactgatgacaacaagcaatatgtcgtcatggtcgccggcggccacggctcggtcggcacgacacccggcgactacgtgatcgcctatacgctgccttga

SEQ ID NO: 4139 - protein, 779 aa, Rhizobium leguminosarum bv. viciae 3841
MAIIVTSIFFIIVGLTLGGGGLWLVTLGGSVFYLFAGLMFLITAGLLLMRKAVALWVYAVLVVAALAWAIWEVGFDWWQLGPRGGMIILLGLWLLTPWIRRPLGLRSPTGITYAANPWPLAVPVILAILVALYSMTTDPHDLAGELPKDTVAANPAFGGSVPDGEWHQYGRTPFGQRYSPLDQITAENVSTLKEAWRYQTGDVKRPDDVGETTYQVTPLKVKDTLYLCTPHNWAIALDAKTGKEKWKYDANSGMNPDRQHQTCRGVTYYADPAVAAGQPCAERVYLPTSDARLIALDAADGKVCTSFADQGVLHLETGMRYNPAGYYYSTSPPVAVAGKIIVGGAVNDNYSTEEQSGVIRAFDINTGALVWNWDSGNPDLTTPITEGQTYTTNSPNSWSVFSVDEALGMVYIPLGNQVPDQIGINRSDNVEKFSSSIVALDIATGQLRWVRQTVHHDLWDMDVPAQPALIDLTKQDGTVVPALVGPTKQGDIYVLDRRSGEPIIPVKEIPAPGGAVSGDHTSPTQPISDLTFSPEPLQEKDMWGVSLFDQMACRIDFHRYHYEGRYTPPSLKGTIVYPGNFGTFNWGSVAVDPERQIMFGMPTYLAFTSRLVPAADIPPRGQDEKGSEQGLNRNDGAPYGVFMGPFLGLLQIPCQAPPWGYVAGVDLRTGKIAYMHKNGTVHDMTPLPLPFKVGVPGIGGPMLTKGGVAFLGAAVDNYLRAYDVTSGRELWQGRLPAGGQATPMTYMTDDNKQYVVMVAGGHGSVGTTPGDYVIAYTLP

SEQ ID NO: 4140 - DNA, 2319 bp, Rhizobium leguminosarum bv. viciae 3841
  CDS (1)..(2319): transl_table=11
atgaaatttctggccaccctgttctgtattgttctcgcccttatcggattggggctgatcggaggcggcgcctggctgctgcgcctcggcggctcaccctattacgcagccgtcgggcttgcctatctggttgccgcgcttttgctgtggcgccggaagacgcgaggcgcactcatcgtcctgcttgtcgccgttttcacccttccctgggctctatgggagtcgggcctcaatttctgggcgctgtttgcccgcttgatgtcccccatcgcgctggcgggctttgcccttctctttgcaccatcgctttccccgaccgccaaccggaagctcttttatggcggcgctttggtgaccgctctcatctttgccacgggtttcggtctcagcttcgtgccgcatgggatcatccagccctccgccgacatcaccgcctataaaaccgccaagggcgacaactctccctccgactggacatcctatggccgcaccacggcaggagatcgttattccccgttcgatcagatcaaccgcggcaatgtgtccaagctcgatctcgcctggacatatcgcaccggaaaaggcgatggcgccgatcagaacacgcctctgcagatcggcgacacggtctacacctgcacgccgacagatgtgatcgcagcgctcgatgcagataccggcaaacctcgctggactttcgatcccaaggcgacggcgccttattggcaacgctgccgcggcctcggttactacaagatgccgatggaggcccagtccgccgacggtctttgcaatgagcgcctggtgcagacgacgatcgatgcccgtctcctggcgatcgacagcaagaccggcgcgccctgcaaggacttcggagacaatggcaccgtgcagctttcccagggcatgggcgaagtcaagacgggctattatttccagacatcggcgccgctgattgcccgcaacctgatcgtcgtcggaggctgggtcacggacaatcaggaggtcggggaaccctctggcgtcatccgtgcgttcaacgtcgtcaccggcgagctcgaatgggcatgggatctcggcaacccggagatcaccaaacttccgccggagggccagacttatacgcgggccacgcccaacatgtggacgacggccgcattcgacgacaagcttggcctcatctatgcaccgctcggcaataccacgccggattattacggcgtcaatcgccctgccttcgccgatcaatataatgcgacattggtggcactcgatgtaacgacgggtcgggagaaatggaaattccagaccgtccatcacgacatctgggactatgatctgccggcccaaccggtcctggtcgacctgcctgacggtaatggcgtcactgtgcctgctctgctgcagaccaccaaacgcgggcagctttttctcctcgaccgccgaaccggcacaccgcttgccgaagttcaggagaagccggtgccgcagcaaggcggcgtgccggaagagaaactctccccgacgcagccctactccgtcggcatgccgacaattggtgcggagcgcgtgacggagcagacggcctggggcctgacgatattcgatcagctggcatgccgcatcgccttccgcaagatgcgctatgacggcgatttcaccccgatcggcacgcaatatgcgatccagcagccgggaaatctgggtggcctcaattggggaagcgtatccgtcgatctgcccaacaacagggtcttcatgaacgatatccgcgtccccagtctcttcgcactcatcccacgcgaggagtatgtcgactttgccctcaccacgaccgcgcatggcccctcagctccgcagcgcggtacgccttacgccatggccaccgagatgtggacatcaaggctccgcgttccctgcacccaaccacccttcggcaccgtcactgcagtggatctgaagacgcgcaagatcgcgtggcaggttccggcaggcacagccgaagaactcgggccgttcaagatcaaaaccaagctgcctatgccgatgggcctgccgagctatgccggcacttccgcgaccgccggcggcgtcgtctttttcgctggcttccaggactattatatccgcgcctatgatgccgagaacggtacagaactctggaaatatcccctgccggtcggttcgagcgcgacgcccatgacctatgtctctccgaaaacaggcaagcaatatgtcctgatatcggttggcggcgcaccctattcgaaggatgtcggcgactacgtccttgccttctctttgaagaaccgagattag

SEQ ID NO: 4141 - protein, 772 aa, Rhizobium leguminosarum bv. viciae 3841
MKFLATLFCIVLALIGLGLIGGGAWLLRLGGSPYYAAVGLAYLVAALLLWRRKTRGALIVLLVAVFTLPWALWESGLNFWALFARLMSPIALAGFALLFAPSLSPTANRKLFYGGALVTALIFATGFGLSFVPHGIIQPSADITAYKTAKGDNSPSDWTSYGRTTAGDRYSPFDQINRGNVSKLDLAWTYRTGKGDGADQNTPLQIGDTVYTCTPTDVIAALDADTGKPRWTFDPKATAPYWQRCRGLGYYKMPMEAQSADGLCNERLVQTTIDARLLAIDSKTGAPCKDFGDNGTVQLSQGMGEVKTGYYFQTSAPLIARNLIVVGGWVTDNQEVGEPSGVIRAFNVVTGELEWAWDLGNPEITKLPPEGQTYTRATPNMWTTAAFDDKLGLIYAPLGNTTPDYYGVNRPAFADQYNATLVALDVTTGREKWKFQTVHHDIWDYDLPAQPVLVDLPDGNGVTVPALLQTTKRGQLFLLDRRTGTPLAEVQEKPVPQQGGVPEEKLSPTQPYSVGMPTIGAERVTEQTAWGLTIFDQLACRIAFRKMRYDGDFTPIGTQYAIQQPGNLGGLNWGSVSVDLPNNRVFMNDIRVPSLFALIPREEYVDFALTTTAHGPSAPQRGTPYAMATEMWTSRLRVPCTQPPFGTVTAVDLKTRKIAWQVPAGTAEELGPFKIKTKLPMPMGLPSYAGTSATAGGVVFFAGFQDYYIRAYDAENGTELWKYPLPVGSSATPMTYVSPKTGKQYVLISVGGAPYSKDVGDYVLAFSLKNRD

SEQ ID NO: 4142 - DNA, 2412 bp, Pseudomonas aeruginosa UCBPP-PA14
  CDS (1)..(2412): transl_table=11
atgagcgaaggtaaccacagtcgatcgcgcctgctgccgagcctgctcggcctgttgatcctgctgtccggcctggcgctgctggccggcggcatcaagctggcgagcctgggcggctcgctgtactacctgctggccggcatcggcctggccctgagcgggctgttgctgctgctgggcaagcgtgcggcgctaggcctgtacgccctggtgctgttcgccagcaccgtctgggcgctgtgggaagtcggcctggactggtggcaactggtgccgcgcctggccctgtggttcgtcttcggcctgctgctctggctgccctggttccgtcgtccgctgctggccgaggggccggcgccgctgggcaccgcggcgctgggcgtggcggtggtcctggccggcgccgccgcggtgggcagccagttcaccaatccggggcagatcgtcggtcgcatcgaccgcgacagcggcatgaccagcaccgccccggcgatgccggacggcgactggcaggcctacggccgcaccgagttcggcgaccgctactcgccgttgaagcagatcaccccggccaacgtcggccagctcgaggaagcctggcgcatccgtaccggcgacctgccgaccgccgacgatccgctcgaactgaccaacgagaacaccccgctgaaggtcaacggcatgctctacgcctgcaccgcgcacagcaaggtgctggccctcgacccggacaccggcgcggaaatctggcgcttcgacccgcagatccagagcccggtaggcttcaagggcttcgcccacatgacttgccgtggcgtctcctactacgacgaagagcagtacgccaggagcgacgtcggcgcgccgccggccgcgctctccgaggccggcaaggcggtcgccgccagttgtccgcggcgcctgttcctgcccaccgccgacgcccgcctgatcgcgatcaacgccgacaacggcaaggtctgcgaggacttcggggtcaagggcgcggtcgacctgacggccggcatcggtccgttcaccccgggcggctactactccacctcgccggcggcggtcacccgcaatctggtgatcatcggcggccacgtcaccgacaacgagtcgaccaacgagccgtccggggtgatccgcgccttcgacgtgcacgacggcaagctggtgtggaactgggacagcggcaacccggacgagaccgagcccctggctcccggcaagttctatacccgcaactcgccgaacatgtggtcgctggccagcgtcgacgagaagctcggccaggtctacctgccgctgggcaaccagatgcccgaccagtggggcggcaaccgcacccccggtgccgagaagttcagcgccggcctggtggctctcgacctgaacaccggcaagctgcgctggaactaccagttcacccaccacgacctgtgggacatggacgtcggcagccagccgaccctgctcgacctgaagaccgccgatggcgtcaagccggcgctgatcgcgccgaccaagcagggcagcctgtacgtgctggaccgccgcgacggcacgccgatcgtgccgatccgcgaagtgccggcgccgcagggcgcggtggagggcgaccataccgcgccgacccaggcgcgttccgacctcaacctgctgcgcccgccgctgaccgagcgcgacatgtggggcagcagcccgttcgaccagatgctctgccgcatccagttccgctcgctgcgctacgagggccagtacaccccgccgtcggagcagggcagcctgatctatccgggcaacgtcggggtgttcaactggggcggggtgtcggtcgacccggtgcgccagatcctcttcaccagccccaactacatggccttcgtctcgcagatggtgccgcgcgacaaggtgcccagcggaagcaagcgcgagggcgagaccagcggcgtgcagccgaacaccggcgcgccctacgcggtgatcatgcatccgttcatgtcgcccatcggcctgccgtgccaggcgccgtcctggggtgacgtggcgggtatcgacctgaccaccgccaaggtcgtctggcagcacaagaacggcaccagccgcgacaacaccccggtgccgatcggcctcaccgtcggcgtaccgagcatgggcggctcgatcaccaccgccggcggcgtggccttcctcagcggcacgctcgaccagtacctgcgcgcctacgacgtgaaggacggcaagcagctctggcaggcgcgcctgccggccggcggccaggccacgccgatgagctacaccggcaaggacggtcgccagtacgtgctgatcgtcgctggcggacacggctccttcggcacccgcatgggcgactacatcatcgcctacgccctgcccaggcaatga

SEQ ID NO: 4143 - protein, 803 aa, Pseudomonas aeruginosa UCBPP-PA14
MSEGNHSRSRLLPSLLGLLILLSGLALLAGGIKLASLGGSLYYLLAGIGLALSGLLLLLGKRAALGLYALVLFASTVWALWEVGLDWWQLVPRLALWFVFGLLLWLPWFRRPLLAEGPAPLGTAALGVAVVLAGAAAVGSQFTNPGQIVGRIDRDSGMTSTAPAMPDGDWQAYGRTEFGDRYSPLKQITPANVGQLEEAWRIRTGDLPTADDPLELTNENTPLKVNGMLYACTAHSKVLALDPDTGAEIWRFDPQIQSPVGFKGFAHMTCRGVSYYDEEQYARSDVGAPPAALSEAGKAVAASCPRRLFLPTADARLIAINADNGKVCEDFGVKGAVDLTAGIGPFTPGGYYSTSPAAVTRNLVIIGGHVTDNESTNEPSGVIRAFDVHDGKLVWNWDSGNPDETEPLAPGKFYTRNSPNMWSLASVDEKLGQVYLPLGNQMPDQWGGNRTPGAEKFSAGLVALDLNTGKLRWNYQFTHHDLWDMDVGSQPTLLDLKTADGVKPALIAPTKQGSLYVLDRRDGTPIVPIREVPAPQGAVEGDHTAPTQARSDLNLLRPPLTERDMWGSSPFDQMLCRIQFRSLRYEGQYTPPSEQGSLIYPGNVGVFNWGGVSVDPVRQILFTSPNYMAFVSQMVPRDKVPSGSKREGETSGVQPNTGAPYAVIMHPFMSPIGLPCQAPSWGDVAGIDLTTAKVVWQHKNGTSRDNTPVPIGLTVGVPSMGGSITTAGGVAFLSGTLDQYLRAYDVKDGKQLWQARLPAGGQATPMSYTGKDGRQYVLIVAGGHGSFGTRMGDYIIAYALPRQ

SEQ ID NO: 4144 - DNA, 2418 bp, Pseudomonas putida GB-1
  CDS (1)..(2418): transl_table=11
atgaaagaaacaccgcgcgcctctggcgccccaaacatcattctgatcggcctgggcgtaatcatcgccctgctcggcctcctcctggctgccggcggcgtcaagctcgccggcctgggcgggtcctggtacttcctgatcggcggcctggccatggccatcgccggtgtactcattgctcgccgcaagctggctggcgcctggctgtatgccgcattcctgatcggcaccgtgatctgggcactgagcgatgtcggcctggtgttctggccgttgttctcgcgcctgttcatgttcggcgcaatcggcatggtggtggcactggtctacccgctgctggcgcgtaccaacggcgccagcgccggtcgcggtgcctacggtatcgccggggtaatggcggtggtgttggtgatcgctgccggcaacatgttcgttgcccacccaagcgtcgcccccaccggcaaaggcccaggcatgaccccggtcgaagccggcaaggaacagaaagactgggcccactacggcaacaccgaaggtggcagccgcttcgccgcgctggaccaaatcaaccgggacaacgtcaacaagctgaaagtggcctggacctaccacaccggtgacgtcgccatcagtgacggcaacggtgccgaagaccagctgacaccgctgcagatcggcaacaaggtgttcatctgcaccccgcacaacaacctgatcgccctcgatgccgacaccggcaaagagctgtggaaaaacgcaatcaacgcccagtccaaggtctggcagcgttgccgtggcatggcctacttcgacgccactgccgccatcgctcagccgacccagccgaacagctcgccgattaccggcggtagcgtagcggcgggtgccaactgccagcgtcgcctgctgaccaacaccatcgatggccgcctgattgccgtcgacgccgacaccggcgagttctgccagggctttggcaacaatggccaggtcaacctgatggccggcctgggcaatgtcccggactcctactaccagctctcctcggcaccgctgatggccggtaccaccgtggtggttggcggccgcgttgccgacaacgtccagaccgacatgccaggtggcgtgatccgtggcttcgacgtgatcaccggtgaaatgcgctgggccttcgacccgggcaacccggaagatcgccaggcaccgcaaggcgacagcacctatgtgcgcagcacgccgaacagctgggcaccgatgtcctacgacccggcgatgaacaccgtgttcctgccgatgggctcgtcgtccaccgacatctacggtgttgagcgcaacaagctggaccacacctacggcgcttcggtgctggccctggacgccactaccggcaaccagaagtgggtataccagaccgtgcacaacgacctctgggacttcgacctgccgatgcagccaagcctgatcgacttcaccaaggatgacggccagtcggtacctgcggtagtgatcggcaccaaggccgggcagatctacgtgctcgaccgcgccaccggtaagccgttgacccaggtcgacgaagtacccgtcaagccaagcaacatcccgaacgagccatactccccaacccagcccaaatcggtaggcatgccgcagatcggcgcacagaccctgaccgagtcggacatgtggggtgccaccccgtatgaccagctgctgtgccgcatcgacttcaagaaaatgcgctacgacggcctgtacaccgcgccgggcaccgacctgtcgctgagcttcccaggttcgctgggtggcatgaactggggcagcatttccaccgacccggtgcatggtttcatcttcgtcaacgacatgcgtctgggcctgtggatccagatgatcccgtcgcagaacaaaggtggcgcggcctctggcggtgaggcactgaacaccggcatgggcgcggtaccactcaagggcacgccgtatgccgtgaacaagaaccgcttcctgtcggtagcgggcattccatgccaggcgccgccgttcggcaccctgaccgccatcgacatgaaaacccgccaggtggcctggcaggtacccgtgggcaccgttgaagacactggcccgctcggcatccgcatgcacctgccgatcaagatcggcctgccaaccctgggcggcaccctgtcgacccaaggcggcctggtgttcattgccggcacccaggacttctacctgcgcgcctatgacagcagcaacggtaacgaaatctggaaagctcgcctgccagtgggcagccagggcggcccgatgacctacgtttcgccgaagaccggcaagcagtacgtggtgatcactgctggcggcgcccgccagtcgactgaccgtggcgactacgtgatttcttacgcgctgccgtaa

SEQ ID NO: 4145 - protein, 805 aa, Pseudomonas putida GB-1
MKETPRASGAPNIILIGLGVIIALLGLLLAAGGVKLAGLGGSWYFLIGGLAMAIAGVLIARRKLAGAWLYAAFLIGTVIWALSDVGLVFWPLFSRLFMFGAIGMVVALVYPLLARTNGASAGRGAYGIAGVMAVVLVIAAGNMFVAHPSVAPTGKGPGMTPVEAGKEQKDWAHYGNTEGGSRFAALDQINRDNVNKLKVAWTYHTGDVAISDGNGAEDQLTPLQIGNKVFICTPHNNLIALDADTGKELWKNAINAQSKVWQRCRGMAYFDATAAIAQPTQPNSSPITGGSVAAGANCQRRLLTNTIDGRLIAVDADTGEFCQGFGNNGQVNLMAGLGNVPDSYYQLSSAPLMAGTTVVVGGRVADNVQTDMPGGVIRGFDVITGEMRWAFDPGNPEDRQAPQGDSTYVRSTPNSWAPMSYDPAMNTVFLPMGSSSTDIYGVERNKLDHTYGASVLALDATTGNQKWVYQTVHNDLWDFDLPMQPSLIDFTKDDGQSVPAVVIGTKAGQIYVLDRATGKPLTQVDEVPVKPSNIPNEPYSPTQPKSVGMPQIGAQTLTESDMWGATPYDQLLCRIDFKKMRYDGLYTAPGTDLSLSFPGSLGGMNWGSISTDPVHGFIFVNDMRLGLWIQMIPSQNKGGAASGGEALNTGMGAVPLKGTPYAVNKNRFLSVAGIPCQAPPFGTLTAIDMKTRQVAWQVPVGTVEDTGPLGIRMHLPIKIGLPTLGGTLSTQGGLVFIAGTQDFYLRAYDSSNGNEIWKARLPVGSQGGPMTYVSPKTGKQYVVITAGGARQSTDRGDYVISYALP

SEQ ID NO: 4146 - DNA, 2412 bp, Pseudomonas putida GB-1
  CDS (1)..(2412): transl_table=11
atgagcactgaaggtgccaaccaaggaagccgctggctaccgcgcctgattggcgcgctgctgttgctgatgggcctggccctgctggctggcggtatcaagctgagccagctgggcggatcgctgtactacctgatcgccggtatcggttttgccctctcgggcatcctgctgctggcccagcgccgcatcgccctgggcctgtatggcctggtgctgttgggcagcaccgtgtgggccctgctcgaggtaggcctggactggtggcaactggtaccgcgcctggctatctggttcgccatcggcgtggtgctgctgctgccgtgggcacgtcgcccgctgatcggcccagccagcaaagccaatacagcactgctcagcgtggcagtggtcgcttcgggcgcttgcgcgctgggcagccagttcacccaccccggtgaagtgttcggcgaactgggccgcgaaagcagcgaaatggccagcgccgccccggcgatgcccgacggcgaatggcaggcctatggccgcaccgaacatggcgaccgctactcgccactgcgccagatcaccccgcagaacgcctaccgcctggaagaagcctggcgtattcgcaccggcgacctgccgaccgaaaacgacccggtggagctgaccaaccagaacaccccgctgaaggtcaacggcatgctctacgcctgcaccgcgcacagccgcctgctggccctggacccggacaccggcgcggaaatctggcgctacgacccacaggtcaagagcccgaccggcacgttcaagggctttgcccacatgacctgccgtggtgtttcgtactatgacgaaaaccgctacgtcagtcgcgacggcagcccagcgccgaaaattaccgaggccggccaagccgtggcccaggcctgcccgcgccgcctgtacctgcctaccgcagatgcccgcctgatcgccatcaacgccgacaacggcaaggtctgcgaaggcttcgccaaccagggtgtgatcgatctcaccaccggcatcgggccgttcactgccggcggctattactccacctcgcctgccgcggtcacccgtgacctggtgatcatcggtggccacgtcaccgacaacgagtcgaccaacgagccgtccggggtgatccgcgcctacgacgtgcacgatggccacctggtgtggaactgggacagcaacaacccggacgacaccaagccattggctgccggcaaaatgtacagccgcaactcggccaacatgtggtcaatcgccagcgtcgacgaagaccttggcatgatctacctgccgctgggcaaccagaccccggaccagtggggcgccaaccgcactccaggtgccgagaagtacagcgccggcgtagtcgcccttgacctgaccaccggcaaggcgcgctggaactaccagttcacccatcacgacctgtgggacatggacgtcggcagccagccgaccctggtgcacctgaagaccgacgatggcgtgaaaccggcgatcatcgtaccgaccaagcaaggcagcctgtacgtgctcgaccgccgcgacggtacgccgatcgtgccgatccgcgaaatccctaccccacagggtgcggtgaaaggcgaccacacctcgccgactcaagcccgctccgacctcaacctgctcggcccagagctgaccgaacaggccatgtggggcgctacgccgttcgaccagatgctgtgccgcatccagttccgcgaactgcgctacgaaggccagtacaccccgccatccgaacagggttcgctgatttatccgggcaacgtgggtgtattcaactggggcagcgtgtcggtcgacccggtgcgccagttgctgttcacctcgcccaactacatggcattcgtgtcgaagatggtcccccgcgagcaggtagccgaaggcagcaagcgcgaaagcgagaccagcggcgtgcagcccaataccggcgcgccgtacgcggtgaccatgcacccgttcatgtcgccgctgggcgtaccgtgccaggccccggcctggggctatgtcgccgccatcgacctgttcaccaacaaggtggtgtggaagcacaagaacggcaccacccgcgacagcaccccggtaccgatcggcctgccggttggcgtgccgagcatgggcggttcgatcgtcactgccggtggcgtcggcttcctcagcggcaccctcgaccagtacctgcgtgcctatgacgtgaacaacggcaaggaactgtggagtgcccgcctgccagcgggtggccaggccactccgatgagctacaccggcaaggatggcaagcagtatgtgctggtgaccgccggcggccatggctcgctgggtaccaaaatgggcgattacatcatcgcttacaaactcgctgagtaa

SEQ ID NO: 4147 - protein, 803 aa, Pseudomonas putida GB-1
MSTEGANQGSRWLPRLIGALLLLMGLALLAGGIKLSQLGGSLYYLIAGIGFALSGILLLAQRRIALGLYGLVLLGSTVWALLEVGLDWWQLVPRLAIWFAIGVVLLLPWARRPLIGPASKANTALLSVAVVASGACALGSQFTHPGEVFGELGRESSEMASAAPAMPDGEWQAYGRTEHGDRYSPLRQITPQNAYRLEEAWRIRTGDLPTENDPVELTNQNTPLKVNGMLYACTAHSRLLALDPDTGAEIWRYDPQVKSPTGTFKGFAHMTCRGVSYYDENRYVSRDGSPAPKITEAGQAVAQACPRRLYLPTADARLIAINADNGKVCEGFANQGVIDLTTGIGPFTAGGYYSTSPAAVTRDLVIIGGHVTDNESTNEPSGVIRAYDVHDGHLVWNWDSNNPDDTKPLAAGKMYSRNSANMWSIASVDEDLGMIYLPLGNQTPDQWGANRTPGAEKYSAGVVALDLTTGKARWNYQFTHHDLWDMDVGSQPTLVHLKTDDGVKPAIIVPTKQGSLYVLDRRDGTPIVPIREIPTPQGAVKGDHTSPTQARSDLNLLGPELTEQAMWGATPFDQMLCRIQFRELRYEGQYTPPSEQGSLIYPGNVGVFNWGSVSVDPVRQLLFTSPNYMAFVSKMVPREQVAEGSKRESETSGVQPNTGAPYAVTMHPFMSPLGVPCQAPAWGYVAAIDLFTNKVVWKHKNGTTRDSTPVPIGLPVGVPSMGGSIVTAGGVGFLSGTLDQYLRAYDVNNGKELWSARLPAGGQATPMSYTGKDGKQYVLVTAGGHGSLGTKMGDYIIAYKLAE

SEQ ID NO: 4148 - DNA, 2340 bp, Marinobacter sp. ELB17
  CDS (1)..(2340): transl_table=11
atgatcctgctcgcgatattacttgttgtgttcggccttcccatgttggtagggggcgtctggcttattgccctcgggggaagctggtactacgctctggccgggacgacactgatagtgattgccttgctgataaagccccaacgcaccttcgcacagaccctttacgcattactgctggcagccaccgccgtttgggcctattgggaagcagggttcgactggtggcccttagcgtcgaggctgggggttttgctgctgctggccattccgctgctgtttcccggaccggcgggccgtcgacatggcgctatcacgctcgccattgtctggattggagtgggcctgttcaccgttgccagcattccttacgacgcccaccgcatcgagggagagctgaccacagatgctgtgatcccgaatccccggctcggggacgtaccgcagggcgactggctcagttatgggcgtagcaacctcggccagcgctattccccgctggaccagattacaccagaaaatgtccgtgggctggagctggcctggcaataccagaccggcgaccttaagggcccggacgatgtcggcgaaaccacctacgaagccacacctctgaaagtggacaatacgctatatctgtgtactccccataactggctggtggcactggatgcggataccggaaaagaacgctggatctacaacgcccgggtgccttccgagagccagcgccaacaccaaacctgtcgtggcgtgtcctacctccctccaggcacgggcctaggtgatattccggaggtaaaaacccttcagtcaccttccgaaaatcaggccagcagggaatgcgacgcccagcttttcctgccaacctctgatgcccggctgttggctctggacccggttaccggagcccgctgcagcaattttgctgacgacggatcgctgaatctgatgcacaacatgccccacaagcaagatggtttttattactccacctccccgccagtggttgccaacggcgtggtagtcgtcgccggggcggtcaatgacaactacgccatcaactcaccgtctggcgttatccgtgcctacgacgtcaagaccggtgagctggtctggaactgggaccctgcaaacccggaccagacgcaacctattggcgagaacgacacctactccaccagttcacccaacagctgggccgtggccagcgcggacgaggagctcggcctggtctatttccccatgggtaaccgcacgccggaccaattgggtatgtaccgcaccccggaggaagaaatctactcatcttcggtggtcgctctcaagctggataccggacaggtagcctgggtgcagcagtttgttcatcacgacctctgggacatggatactccggctcagcccagcctggtggatattgagactgagcagggcctgcaacctggactggtggtacccaccaaacaaggagatgtgtacgtactcaatcgggaaaccggcgagccactgattcccattacggaacagtcagccccccagggcactattgagggagactatgccgccgcgacccagccagtatctgccctgagctttcggcctccaaccctaaaagcctccgatatgtggggcgccagcgccgttgaccagatgatctgccgtataaggtttcagtctctgcgttacgaaggcatatataccccgccttcggtccagggcacccttgtctacccgggcaatttcggcgtgttcaactggggcggcattgctgttgatccggagcgccaggtaatgtttggcatgccactgtatatggcgttcattcagaggctggtgcccaaagacaataacacccccatgggccctaccaaccagggtgaacagggattgaacgaaaatgcgggggcggaatacgccgtcgaaatgaagcccctgatgtcgcccctgggtattccctgccaacgtccaccctggggctatgtggcgggcgcggacttgcgtaccggtgaaatcgtgtggaagcacaaaaatggcaccgttgaagatatggcacccattccgatacctctggagctgggtgtaccaggcatcggcggccccatcatcacccgcggtggagtggtattccttgcagccaccgtggataactaccttcgtgcctacaacctgacgaatggtgaagaactgtggcgggcacgtctgccggcaggtggtcaggccacccccatgacctatctgaacagccagggtgagcagatggtggtgcaggttgccggtgggcacggctctgttgggaccactattggggactatgtactggcttacaaactgaaataa

SEQ ID NO: 4149 - protein, 779 aa, Marinobacter sp. ELB17
MILLAILLVVFGLPMLVGGVWLIALGGSWYYALAGTTLIVIALLIKPQRTFAQTLYALLLAATAVWAYWEAGFDWWPLASRLGVLLLLAIPLLFPGPAGRRHGAITLAIVWIGVGLFTVASIPYDAHRIEGELTTDAVIPNPRLGDVPQGDWLSYGRSNLGQRYSPLDQITPENVRGLELAWQYQTGDLKGPDDVGETTYEATPLKVDNTLYLCTPHNWLVALDADTGKERWIYNARVPSESQRQHQTCRGVSYLPPGTGLGDIPEVKTLQSPSENQASRECDAQLFLPTSDARLLALDPVTGARCSNFADDGSLNLMHNMPHKQDGFYYSTSPPVVANGVVVVAGAVNDNYAINSPSGVIRAYDVKTGELVWNWDPANPDQTQPIGENDTYSTSSPNSWAVASADEELGLVYFPMGNRTPDQLGMYRTPEEEIYSSSVVALKLDTGQVAWVQQFVHHDLWDMDTPAQPSLVDIETEQGLQPGLVVPTKQGDVYVLNRETGEPLIPITEQSAPQGTIEGDYAAATQPVSALSFRPPTLKASDMWGASAVDQMICRIRFQSLRYEGIYTPPSVQGTLVYPGNFGVFNWGGIAVDPERQVMFGMPLYMAFIQRLVPKDNNTPMGPTNQGEQGLNENAGAEYAVEMKPLMSPLGIPCQRPPWGYVAGADLRTGEIVWKHKNGTVEDMAPIPIPLELGVPGIGGPIITRGGVVFLAATVDNYLRAYNLTNGEELWRARLPAGGQATPMTYLNSQGEQMVVQVAGGHGSVGTTIGDYVLAYKLK

SEQ ID NO: 4150 - DNA, 2361 bp, Pantoea citrea
  CDS (1)..(2361): transl_table=11
atgtctcgggtctctactatacttcatgggttaacacggatattttcgctattctgtgccgcatggctgctgattggcggcgtgtggctattatctgtcggagggagtgcttactaccttatctgcggtatagccatggcgatattttctatattgttatggaagcgcagaagcagtgcattttacctctattcgcttatcctgattctgtcagccctctgggcatggcgggaggcggggactgacttctggaacctggttccacgtctggatatctggatactgtttggtatctggttgatattgccgttcagttaccggcgttttaacactgccggtaaaaaaccattgctggcaatggtgattggcctcgggattaatgccctgctgctgctgggcgcgtcactgcacgacccacaggaaatcaacggtgtgcttaatgtcagtgataagccgccagccgaatctgcggcgtctgcagcagactggccggcctatggacgtactcaggaaggggtccgttattctccgctgacacaaatcaacgataaaaacgttcaacaattacaggttgcctggcagttccataccggtgaccataaaacagcgaatgacccgggtgagatcactaatgaagtgacaccgctgaaagtcggtaatatgctgtacctctgtacaccgcatcagatactgattgccctggatgctgccagtggcagagagaaatggcgttttgatccgcagctcaaatctgatccgacattccagcatattacctgccggggtgtttcctatcatgaaatcaaatctgttcagggcgactcatcagcgccggccgcctgttcacggcgtattttcctgccggttgatgacggtcgtctgttcgcggttgatgccttaaccggacaacgttgcagtaattttgctaataatggtgaactgaacctgcaacacctgcagccgaacgcttatccgggagggtatgagccaacctcaccgcccatcattactgataaagtggtgatcattgccggttctgtcactgataacttgtctacccgtgaaccatcaggggtcatccgcggtttcgatatcgacagcgggaaactcttatgggtatttgatccgggagcaaaagaccctaatgccgtgcctgctgacgggcagacatttgtggcgaactcaccaaactcctgggcgccggcggcttatgacgcgcagagggatattatttatctgcctatgggggtttcgaccccggatatctggggcggtgccgtaacgcgttgcaggaacgttttgccagcggtttactggctctgcatgcctcaactggcaagctggcatggttttaccagacggtacaccatgcaatcattctgggacatggatttaccctcacagccaaccctggcagatattaccgatgagcagggtaagaccgtgccggtggtctatgtgccggccaaaacgggtaatatttttgttctgaaccgtgacaccggaaaacccgtcgttcctgcccctgaaacaccggtaccgcagggaccggcgaaaggcgaccatctgtctccaacccagcctttttctgagctgactttccgtcctaagaataagctgcagggtagggatatgtggggcgcaaccatgtttgaccagctgatgtgccgggtgatgttccataaactgcgctatgaagggccgtttaccccgccgtctgagcagggtaccctggttttcccaggtgatttcgggatgtttgaatggggcggtatctctgttaacaccgatcagcagtttgcgattgctaatccgatggcgatgccttttatttctaaactgatcccacgcggaccaggcaatcccatagaacccggggctgatggtgccgccggttccggttcagagtccggggtacagcatatgtatggtgtgccttacggagttgaactgaatccgttcctgtcaccgttgggcttaccttgtctgcaaccttcatggggctttgtctcagcgatcaatttacgtaatcaccagatcatctggaaaaaacggattggtactgttcgtgacagtgcgccggtacctctaccctttaaaatgggtgttccaatgttgggcggtccggtgacaacggcaggtaatatcttctttgttgctggcacactggacaactacctgcgggcgtacagtgtccgtgacggcaaactgctgtggcaggctcgtctgccggcaggtggacaagcgacaccaatgacgtatgaggttgatggtaagcaatatgtcgtgattatggccggcggacatggttcttttgggacccggctgggcgattcactgatcgcttataaactaccgtaa

SEQ ID NO: 4151 - protein, 786 aa, Pantoea citrea
MSRVSTILHGLTRIFSLFCAAWLLIGGVWLLSVGGSAYYLICGIAMAIFSILLWKRRSSAFYLYSLILILSALWAWREAGTDFWNLVPRLDIWILFGIWLILPFSYRRFNTAGKKPLLAMVIGLGINALLLLGASLHDPQEINGVLNVSDKPPAESAASAADWPAYGRTQEGVRYSPLTQINDKNVQQLQVAWQFHTGDHKTANDPGEITNEVTPLKVGNMLYLCTPHQILIALDAASGREKWRFDPQLKSDPTFQHITCRGVSYHEIKSVQGDSSAPAACSRRIFLPVDDGRLFAVDALTGQRCSNFANNGELNLQHLQPNAYPGGYEPTSPPIITDKVVIIAGSVTDNLSTREPSGVIRGFDIDSGKLLWVFDPGAKDPNAVPADGQTFVANSPNSWAPAAYDAQRDIIYLPMGVSTPDIWGGAVTRCRNVLPAVYWLCMPQLASWHGFTRRYTMQSFWDMDLPSQPTLADITDEQGKTVPVVYVPAKTGNIFVLNRDTGKPVVPAPETPVPQGPAKGDHLSPTQPFSELTFRPKNKLQGRDMWGATMFDQLMCRVMFHKLRYEGPFTPPSEQGTLVFPGDFGMFEWGGISVNTDQQFAIANPMAMPFISKLIPRGPGNPIEPGADGAAGSGSESGVQHMYGVPYGVELNPFLSPLGLPCLQPSWGFVSAINLRNHQIIWKKRIGTVRDSAPVPLPFKMGVPMLGGPVTTAGNIFFVAGTLDNYLRAYSVRDGKLLWQARLPAGGQATPMTYEVDGKQYVVIMAGGHGSFGTRLGDSLIAYKLP

SEQ ID NO: 4152 - DNA, 2391 bp, Enterobacter asburiae
  CDS (1)..(2391): transl_table=11
atggcaattaacaatacaggctcgcgacgattactcgtcacgctaacagccctttttgcagcgctttgcgggctgtatctactcattggcggaggctggctggtcgcgattggcggctcctggtactaccctatcgctggccttgtgatgctcggcgtcgcctggatgctgtggcgcagtaaacgcgccgcgctttggctatacgcagccctgctgctcggcaccatgatttggggcgtctgggaagttggtttcgacttctgggcgctgactccgcgcagcgacattctggtcttcttcggcatctggctgatcctgccgtttgtctggcgtcgcctggtcattcctgccagcggcgcagttgccgcactggtggtcgcactgctgattagcggtggtatcctgacctgggccggatttaacgatccgcaggagatcaacggcaccttaagcgccgatgccacacctgctgaagctatctcccccgtagccgatcaggactggcctgcctatggtcgtaatcaggaaggtcaacgcttttcgccgctgaaacaaattaacgccgataacgtccataatctgaaagaagcctgggtgttccgtactggcgatgtgaagcagccgaacgatccgggtgaaatcaccaatgaagtgacgccgattaaagtgggcgacaccctttacctgtgtaccgctcaccagcgcctgtttgcgcttgatgccgccagcggcaaagagaaatggcattacgatcctgagctgaaaaccaacgagtctttccagcacgtaacctgccgtggtgtctcttatcatgaagccaaagcagaaaccgcttcgccggaagtgatggcggattgcccgcgtcgtatcattcttccggtcaatgatggtcgactgattgcgattaacgctgaaaacggcaaactgtgcgaaaccttcgccaataaaggcgtgctcaatctgcaaagcaatatgccagacaccaaaccgggtctgtatgaaccgacttcgccaccgattatcaccgataaaaccatcgtgatggccggttcagttaccgataacttctcaacccgcgaaacgtctggcgtgatccgtggttttgatgtcaacaccggggagctgctgtgggccttcgacccgggcgcgaaagatcctaacgcgatcccatcggatgaacacacctttacctttaactcaccgaactcctgggcaccggcagcgtatgacgcgaagctggacctggtctacctgccgatgggcgtgaccacgccggatatctggggcggtaaccgtacgccggagcaggaacgttacgccagctccatcgtggcgctgaacgcaacgaccggtaaactggcatggagctaccagaccgttcaccacgatctgtgggatatggatatgccgtcccagccgacgctggcggacattaccgttaacggtaaaaccgtaccggtgatttacgccccggcgaaaaccggtaacatcttcgtgcttgatcgtagcaacggtaagctggttgttcctgcgccggaaaaaccggttccgcagggtgcggccaaaggcgactacgtcaccaaaacgcagccgttctctgacctgagcttccgtccgaagaaagatctcagcggtgcagacatgtggggtgccaccatgtttgaccagctggtatgccgcgtgatgttccaccagctgcgctacgaagggattttcacccccccgtcagagcagggtacgctggtcttcccgggtgacctggggatgttcgaatggggtgggatctccgttgaccctaaccgtcaggtcgccatcgctaacccaatggcgctgccgttcgtttcccgcctgatccctcgtggtccgggtaacccaatggagcagccgaaagatgcgaaaggcagcggtaccgaagccggtatccagccgcagtatggcgttccttatggtgtgaccctgaatccgttcctttctccgttcggtctgccgtgtaaacagcctgcctggggttacatctccggtctggatctgaagaccaacaagatcgtctggaagaaacgtattggtacgccacaggacagcatgccgttcccgatgcctgttccagtgcctttcaatatgggtatgccaatgctgggtggcccaatctccaccgccggtaacgtgctgttcatcgcggcaaccgcagataactacctgcgcgcgtacaacatgaccaacggtgagaaactgtggcaaggccgtctgccagccggtggacaggcaacgccgatgacctatgaagtgaatggcaagcagtacgttgtcatctctgcgggtggtcacggttcgtttggcacgaagatgggcgactatattgtggcttatgcgctgccggatgatgtgaagtaa

SEQ ID NO: 4153 - protein, 796 aa, Enterobacter asburiae
MAINNTGSRRLLVTLTALFAALCGLYLLIGGGWLVAIGGSWYYPIAGLVMLGVAWMLWRSKRAALWLYAALLLGTMIWGVWEVGFDFWALTPRSDILVFFGIWLILPFVWRRLVIPASGAVAALVVALLISGGILTWAGFNDPQEINGTLSADATPAEAISPVADQDWPAYGRNQEGQRFSPLKQINADNVHNLKEAWVFRTGDVKQPNDPGEITNEVTPIKVGDTLYLCTAHQRLFALDAASGKEKWHYDPELKTNESFQHVTCRGVSYHEAKAETASPEVMADCPRRIILPVNDGRLIAINAENGKLCETFANKGVLNLQSNMPDTKPGLYEPTSPPIITDKTIVMAGSVTDNFSTRETSGVIRGFDVNTGELLWAFDPGAKDPNAIPSDEHTFTFNSPNSWAPAAYDAKLDLVYLPMGVTTPDIWGGNRTPEQERYASSIVALNATTGKLAWSYQTVHHDLWDMDMPSQPTLADITVNGKTVPVIYAPAKTGNIFVLDRSNGKLVVPAPEKPVPQGAAKGDYVTKTQPFSDLSFRPKKDLSGADMWGATMFDQLVCRVMFHQLRYEGIFTPPSEQGTLVFPGDLGMFEWGGISVDPNRQVAIANPMALPFVSRLIPRGPGNPMEQPKDAKGSGTEAGIQPQYGVPYGVTLNPFLSPFGLPCKQPAWGYISGLDLKTNKIVWKKRIGTPQDSMPFPMPVPVPFNMGMPMLGGPISTAGNVLFIAATADNYLRAYNMTNGEKLWQGRLPAGGQATPMTYEVNGKQYVVISAGGHGSFGTKMGDYIVAYALPDDVK

SEQ ID NO: 4154 - DNA, 2767 bp, Pantoea citrea
  CDS (263)..(2635): transl_table=11
ctctaaaaattggttttctacaatatgggtatatccatagttaaagtaatattctgaattttgccgcgaatctatggatttttttcataaaattttgcgaacaaatgaacacatttgttggtaccgtgtcatgatttctatgaacaaatgttattgtcaatggatatggatcacaaaaaacgatattaaatacaactaaaaaggactaaccttatgcggctctttacatatctataaagttgttgattctaaggttaattcaatgtcacaggaatccagaggcctgcgcctcatcacactagcaatatcagtgttctgcaccttgtggctgataatcggcggtggctggttactggcaattggcggcagcgcatactatctcatcagcggcatcgttatggcggtgttcactgtaatgttgttaaagaaaagaagctgtgctttttatctttactcactcattctgctgggcacagctatctgggcctggtgcgaatccggccttgatttctgggctctggctccgcgtctcgatatctgggtactgtttggtatctggatgattttgccgtttgtttatcgccaactggcggctcccaaccgtaaagctactgcgctgatggtgattgctatcgtcatcaacctggccatggtcgttggcgcctttttcggcaaagacccgcaggcagtctacggtgacctgaatgttcaggctcctgcaactcagccagtgtctgccggtaaagactggaccgcttatggtggtactcaggccggtgaccgttactcttcattaagtcagattaacgaaagcaatgtcaaaaatctgcaggtggcatggacctaccagtctggtgacgtaaaacgccctgatgatccgggtgagatcactaacgaatcaactccactgaaagtaggtaatctcctttatacctgtacagcgcaccagattctggtcgcgattgatgctgcaacaggtaaagaaaaatggcgttttgaccctaaaatcaaatatgaccctaccttccagcacatgacctgtcgtggtgtttcctatcatgactttaatacggcaacagatcctcagagtgctccggtttctccggcggcctgttcacgtcgtatctatctgccggttaacgatggtcgtctgattgcggtggatgctgaaaatggtcaactgtgtaaagactttggtaataatggtgagctggatctgcagcatcagcagccgaatgctttcccgggcggctatgaaccaacatcacctccggtaattaccgataaagtaattgtgattgccggggccgttaccgataactactcaacccgtgagccgtcaggtgttatccgtggttttgacgtgaaaaccggtaaactgctgtgggcattcgatccgggtgccaaagatccgaacgcaattcctgcggacggtcagcactgttcagcgaactcaccaaactcctgggcaccagctgcttacgatccgaaactggatttggtatatctgccgatgggtgtgaccacgccggatatctggggtggaaaccgtactcctgagcaggaacattatgcgagtggtatcctggcactgaatgccaccacaggtaaagaagcctggttctaccagactgtccaccacgatctgtgggacatggatattccggcgcagccttcactggcagatattaccgataaagacggcaacaaagttcctgtcatctacgttccgaccaaagtaggtaacatctttgttctgaaccgtgcaaccggtcagctggtggtaccggctcctgagcgtgcggtaccgcaaggtgctgctaaaggcgaccatacctctgcgactcagccgttccctgaactgaccttccgtccggaagcgaaactgaccgacagtaagatgtggggcggtacgatgtttgaccagatgatctgtcgtatcatgttcaaacgtctgcattataacgggactttcactccaccttcagagcagggcaccctggtattcccgggtaacctgggtatgtttgaatggggtggtatttcggtcaacagtggtagcgagtttgccattgctaacccaatgcaactgccgtttgtttcaaaactgatcccacgtggtccaaacaacccaatggaaccgggtaaaaacggtgccggtggttccggtggtgaagccggtctgcaacacatgtatggcgtgccttttggtgtggaactgaatccgttcctgtcaccattcggtctgccatgcatggaaccttcatggggctttgtttcagccgttaacctgaaaactaaccagattgtgtggaaaaaacgtattggtactatccgtgacagcggtggcccgattccgttaccaccgattactgtaggtactccgatgctgggtgctcctatcactacagccggtaatatcttctttatcgccgctactctggatgactacatccgtgcctatagtgtgcgtgacggtaaactgctgtggcaggcacgtctgccggcgggtggtcaggcaacaccaatgacctatgaagtagacggtaagcagtatctggtaattgttgccggcggacacggttcgttcggtacgaaaatgggcgattacattattgcttataaattgccttaacaggggcggttccggaagcggtatccagcttccgggttaaccccctggtaatatcaatccccgccggtagccagctaccggcggggttttttttatgttccgagtggggtattcgcttcgggcggggcggaa

SEQ ID NO: 4155 - protein, 790 aa, Pantoea citrea
MSQESRGLRLITLAISVFCTLWLIIGGGWLLAIGGSAYYLISGIVMAVFTVMLLKKRSCAFYLYSLILLGTAIWAWCESGLDFWALAPRLDIWVLFGIWMILPFVYRQLAAPNRKATALMVIAIVINLAMVVGAFFGKDPQAVYGDLNVQAPATQPVSAGKDWTAYGGTQAGDRYSSLSQINESNVKNLQVAWTYQSGDVKRPDDPGEITNESTPLKVGNLLYTCTAHQILVAIDAATGKEKWRFDPKIKYDPTFQHMTCRGVSYHDFNTATDPQSAPVSPAACSRRIYLPVNDGRLIAVDAENGQLCKDFGNNGELDLQHQQPNAFPGGYEPTSPPVITDKVIVIAGAVTDNYSTREPSGVIRGFDVKTGKLLWAFDPGAKDPNAIPADGQHCSANSPNSWAPAAYDPKLDLVYLPMGVTTPDIWGGNRTPEQEHYASGILALNATTGKEAWFYQTVHHDLWDMDIPAQPSLADITDKDGNKVPVIYVPTKVGNIFVLNRATGQLVVPAPERAVPQGAAKGDHTSATQPFPELTFRPEAKLTDSKMWGGTMFDQMICRIMFKRLHYNGTFTPPSEQGTLVFPGNLGMFEWGGISVNSGSEFAIANPMQLPFVSKLIPRGPNNPMEPGKNGAGGSGGEAGLQHMYGVPFGVELNPFLSPFGLPCMEPSWGFVSAVNLKTNQIVWKKRIGTIRDSGGPIPLPPITVGTPMLGAPITTAGNIFFIAATLDDYIRAYSVRDGKLLWQARLPAGGQATPMTYEVDGKQYLVIVAGGHGSFGTKMGDYIIAYKLP

SEQ ID NO: 4156 - DNA, 2406 bp, Acinetobacter calcoaceticus
  CDS (1)..(2406): transl_table=11
atgaatcaacctacttcaagatcaggtttaacgacttttaccgtaattattattgggttactggcgttattcctgttaattggaggtatttggctcgctacactaggcggttcaatttactacattatagctggagtattactcctcattgttgcatggcaactctacaagcgtgcttctactgctttgtggttttatgctgcattaatgctaggtaccattatctggagtgtctgggaagttggaacagacttttgggcgcttgcaccacgtttagatattttaggtattcttggtttatggttattggttccggctgtaactcgtggaatcaacaaccttggatcaagtaaagttgccttatcttcaactttagcaattgcaatcgtgttgatggtttattctatcttcaatgatccgcaagaaattaatggtgaaatcaaaacacctcaaccagaaacagctcaagccgtgcctggtgttgctgaaagtgattggccagcttatggtcgtactcaagcaggcgtgcgttattctccattgaaacagatcaatgatcaaaacgtaaaagacttgaaagttgcttggactttacgtactggcgatcttaagacagataacgactctggcgaaacgactaatcaggttacaccgattaaaatcggtaataacatgtttatctgtacagctcaccagcagttaattgctattgatcctgctacaggtaaagaaaaatggcgttttgatccgaaacttaaaacggataaatcgttccagcatctaacttgtcgtggtgtgatgtactacgatgcaaacaatacaactgagtttgcaacgagtcttcaaagcaagaaatctagctctacacaatgtccacgtaaggtatttgtaccagtcaacgatggccgtttagtggctgtaaatgctgacactggtaaagcatgtactgactttggtcaaaatggtcaagtgaacttacaagagttcatgccatatgcttatccaggcggttataacccgacatctcctggtatcgtgactggttcaactgttgttattgctggttctgtaacagataactactcaaataaagagccatctggtgtgattcgtggatacgacgttaacactggtaaacttctttgggtatttgacactggcgcagcggatccaaatgcaatgccgggcgaaggtactacttttgttcacaactcaccaaatgcgtgggcacctttagcatacgatgccaaacttgacatcgtttatgtaccaacaggtgtaggtacaccagacatctggggtggtgaccgtaccgagctgaaagagcgttatgcaaactcaatgttagcgattaatgcttctactggtaaattagtgtggaacttccagacaacccatcacgatttatgggatatggatgtaccatcacaaccatctttagctgatatcaaaaacaaagctggccaaactgttcctgcaatctatgtattgacgaaaacaggtaatgcctttgtgcttgatcgccgtaatggtcaaccgattgttcctgtaactgagaaaccagttccacaaacagttaaacgtggaccacaaactaaaggtgagttctattcaaaaactcagccattctctgacttgaacttggcgccacaagataaattgactgataaagacatgtggggtgccactatgcttgatcagctcatgtgtcgtgtatctttcaaacgtctaaattacgatggtatttatacgccaccatctgaaaacggtactttagttttccctggtaacttaggtgtatttgaatggggcggtatgtcagttaaccctgatcgtcaggttgctgtaatgaacccgattggtctgccattcgtcagtcgtttaattcctgctgatccaaaccgtgcacaaactgcaaaaggtgcgggaactgagcagggcgtacaaccgatgtacggcgtaccatatggtgttgaaattagcgcattcttatctccgcttggtttaccttgtaaacaaccggcttggggctatgtagctggcgttgatttgaaaactcatgaagtggtatggaaaaaacgtattggtacaatccgtgacagtttaccgaacttgttccagttgccagctgtgaaaattggtgtgcctggtttaggtggttcaatttctactgccggtaatgtcatgtttgttggtgcaactcaagataactacttacgtgcgtttaacgttactaacggtaagaaactttgggaagcgcgtttaccagcaggtggacaagcaacaccaatgacttatgaaatcaatggtaagcaatatgttgtaatcatggctggtggtcatggttcatttggtacgaaaatgggcgactatttagtggcttatgccttaccagataacaaataa

SEQ ID NO: 4157 - protein, 801 aa, Acinetobacter calcoaceticus
MNQPTSRSGLTTFTVIIIGLLALFLLIGGIWLATLGGSIYYIIAGVLLLIVAWQLYKRASTALWFYAALMLGTIIWSVWEVGTDFWALAPRLDILGILGLWLLVPAVTRGINNLGSSKVALSSTLAIAIVLMVYSIFNDPQEINGEIKTPQPETAQAVPGVAESDWPAYGRTQAGVRYSPLKQINDQNVKDLKVAWTLRTGDLKTDNDSGETTNQVTPIKIGNNMFICTAHQQLIAIDPATGKEKWRFDPKLKTDKSFQHLTCRGVMYYDANNTTEFATSLQSKKSSSTQCPRKVFVPVNDGRLVAVNADTGKACTDFGQNGQVNLQEFMPYAYPGGYNPTSPGIVTGSTVVIAGSVTDNYSNKEPSGVIRGYDVNTGKLLWVFDTGAADPNAMPGEGTTFVHNSPNAWAPLAYDAKLDIVYVPTGVGTPDIWGGDRTELKERYANSMLAINASTGKLVWNFQTTHHDLWDMDVPSQPSLADIKNKAGQTVPAIYVLTKTGNAFVLDRRNGQPIVPVTEKPVPQTVKRGPQTKGEFYSKTQPFSDLNLAPQDKLTDKDMWGATMLDQLMCRVSFKRLNYDGIYTPPSENGTLVFPGNLGVFEWGGMSVNPDRQVAVMNPIGLPFVSRLIPADPNRAQTAKGAGTEQGVQPMYGVPYGVEISAFLSPLGLPCKQPAWGYVAGVDLKTHEVVWKKRIGTIRDSLPNLFQLPAVKIGVPGLGGSISTAGNVMFVGATQDNYLRAFNVTNGKKLWEARLPAGGQATPMTYEINGKQYVVIMAGGHGSFGTKMGDYLVAYALPDNK

SEQ ID NO: 4158 - DNA, 2427 bp, Gluconobacter oxydans
  CDS (1)..(2427): transl_table=11
atgagcacaacatcccggccagggctctgggccctgattacggccgcggtattcgcgctttgcggcgcgatccttaccgttggcggcgcatgggtcgctgccatcggcggccctctctattatgtcatccttggcctggcacttctcgccacggctttcctctcattcaggcgcaacccggctgccctctacctgttcgcagtcgtcgtcttcggaacggtcatctgggaactcaccgttgtcggtctcgacatctgggccctgatcccgcgctcggacatcgtcatcatcctcggcatctggctgctgttgccgttcgtctcccgccagatcggcggcacgcggacgaccgtcctgccgctcgccggtgccgttggcgttgcggttctggcgctgttcgccagcctcttcaccgacccgcatgacatcagtggcgacctgccgacgcagatcgcaaacgcctcccccgccgacccggacaacgtcccggccagcgagtggcacgcctatggtcgtacgcaggccggtgaccgctggtccccgctgaaccagatcaacgcgtccaacgtcagcaacctcaaggtcgcatggcatatccacaccaaggatatgatgaactccaacgacccgggcgaagcgacgaacgaagcgaccccgatcgagttcaacaacacgctttatatgtgctcgctgcaccagaagctgtttgcggttgatggtgccaccggtaacgtcaagtgggtctacgatccgaagctccagatcaaccctggcttccagcatctgacctgccgtggcgtcagcttccacgaaacgccggccaatgccacggattccgatggcaatcctgctccgacggactgcgccaagcgcatcatcctgccggtcaatgatggccgtctggttgaagtcgatgccgacacgggcaagacctgctccggcttcggcaacaatggcgagatcgatctgcgcgttccgaaccagccttacacgacgcccggccagtacgagccgacgtccccgccggtcatcacggacaagctgatcatcgccaacagcgccatcaccgataacggttcggtcaagcaggcttcgggcgccacgcaggcattcgacgtctacaccggcaagcgtgtctgggtgttcgatgcgtccaacccggacccgaaccagcttccggatgacagccaccctgtcttccacccgaactccccgaactcctggatcgtgtcgtcttacgacaggaacctgaacctcgtgtacatcccgatgggcgtgggtactcccgatcagtggggcggtgaccgcacgaaggattccgagcgtttcgctccgggtatcgttgctctgaacgcagacacgggcaagctcgcctggttctaccagaccgttcatcacgatctgtgggacatggacgttccgtcacagccgagcctcgtggacgtaacgcagaaggacggcacgcttgttccggccatctacgctccgaccaagaccggcgacatcttcgtcctcgaccgtcgtaccggcaaggaaatcgtcccggctccggaaaccccggttccccagggcgccgctccgggcgatcacaccagcccgacccagccgatgtcgcagctgaccctgcgtccgaagaacccgctgaacgactccgatatctggggcggcacgatcttcgaccagatgttctgcagcatctatttccacaccctgcgctacgaaggccccttcacgccgccgtcgctcaagggctcgctcatcttcccgggcgatctgggaatgttcgagtggggtggtctggccgtcgatccgcagcgtcaggtggctttcgccaacccgatctccctgccgttcgtctcccagcttgttccccgtggaccgggcaacccgctctggcctgaaaaggacgccaagggtacgggtggtgaaaccggcctgcagcacaactatggcattccgtatgccgtcaacctgcatccgttcctggatccggtgctgctgccgttcggcatcaagatgccctgccgtacgccgccctggggctatgtcgccggtattgacctgaagaccaacaaggtcgtctggcagcaccgcaacggcaccctgcgtgactcgatgtatggcagctccctgccgatcccgctgccgccgatcaagatcggtgtcccgagcctcggtggcccgctctccacggctggcaacctcggcttcctgacggcgtccatggattactacatccgtgcgtacaacctgacgacgggcaaggtgctgtggcaggaccgtctgccggctggcgcccaggcaacgccgatcacctatgccatcaacggcaagcagtacatcgtgacctatgcaggcggacacaactcgttcccgacccgcatgggcgacgacatcatcgcctacgccctgcccgatcagaaatga

SEQ ID NO: 4159 - protein, 808 aa, Gluconobacter oxydans
MSTTSRPGLWALITAAVFALCGAILTVGGAWVAAIGGPLYYVILGLALLATAFLSFRRNPAALYLFAVVVFGTVIWELTVVGLDIWALIPRSDIVIILGIWLLLPFVSRQIGGTRTTVLPLAGAVGVAVLALFASLFTDPHDISGDLPTQIANASPADPDNVPASEWHAYGRTQAGDRWSPLNQINASNVSNLKVAWHIHTKDMMNSNDPGEATNEATPIEFNNTLYMCSLHQKLFAVDGATGNVKWVYDPKLQINPGFQHLTCRGVSFHETPANATDSDGNPAPTDCAKRIILPVNDGRLVEVDADTGKTCSGFGNNGEIDLRVPNQPYTTPGQYEPTSPPVITDKLIIANSAITDNGSVKQASGATQAFDVYTGKRVWVFDASNPDPNQLPDDSHPVFHPNSPNSWIVSSYDRNLNLVYIPMGVGTPDQWGGDRTKDSERFAPGIVALNADTGKLAWFYQTVHHDLWDMDVPSQPSLVDVTQKDGTLVPAIYAPTKTGDIFVLDRRTGKEIVPAPETPVPQGAAPGDHTSPTQPMSQLTLRPKNPLNDSDIWGGTIFDQMFCSIYFHTLRYEGPFTPPSLKGSLIFPGDLGMFEWGGLAVDPQRQVAFANPISLPFVSQLVPRGPGNPLWPEKDAKGTGGETGLQHNYGIPYAVNLHPFLDPVLLPFGIKMPCRTPPWGYVAGIDLKTNKVVWQHRNGTLRDSMYGSSLPIPLPPIKIGVPSLGGPLSTAGNLGFLTASMDYYIRAYNLTTGKVLWQDRLPAGAQATPITYAINGKQYIVTYAGGHNSFPTRMGDDIIAYALPDQK

SEQ ID NO: 4160 - DNA, 24 bp, Artificial sequence
  primer
atggcaattaacaatacaggctcg

SEQ ID NO: 4161 - DNA, 23 bp, Artificial sequence
  primer
ttacttcacatcatccggcagcg

SEQ ID NO: 4162 - protein, 914 aa, Artificial sequence
  consensus sequence
  Variant (3)..(3): Xaa in position 3 is any amino acid
  Variant (5)..(6): Xaa in position 5 to 6 is any amino acid
  Variant (9)..(10): Xaa in position 9 to 10 is any amino acid
  Variant (12)..(14): Xaa in position 12 to 14 is any amino acid
  Variant (18)..(18): Xaa in position 18 is any amino acid
  Variant (21)..(23): Xaa in position 21 to 23 is any amino acid
  Variant (25)..(33): Xaa in position 25 to 33 is any amino acid
  Variant (34)..(43): Xaa in position 34 to 43 is any or no amino acid
  Variant (46)..(54): Xaa in position 46 to 54 is any amino acid
  Variant (56)..(58): Xaa in position 56 to 58 is any amino acid
  Variant (60)..(60): Xaa in position 60 is any amino acid
  Variant (62)..(64): Xaa in position 62 to 64 is any amino acid
  Variant (66)..(66): Xaa in position 66 is any amino acid
  Variant (68)..(69): Xaa in position 68 to 69 is any amino acid
  Variant (71)..(77): Xaa in position 71 to 77 is any amino acid
  Variant (79)..(140): Xaa in position 79 to 140 is any amino acid
  Variant (141)..(174): Xaa in position 141 to 174 is any or no amino acid
  Variant (176)..(177): Xaa in position 176 to 177 is any amino acid
  Variant (180)..(183): Xaa in position 180 to 183 is any amino acid
  Variant (185)..(185): Xaa in position 185 is any amino acid
  Variant (187)..(189): Xaa in position 187 to 189 is any amino acid
  Variant (191)..(191): Xaa in position 191 is any amino acid
  Variant (194)..(196): Xaa in position 194 to 196 is any amino acid
  Variant (199)..(200): Xaa in position 199 to 200 is any amino acid
  Variant (202)..(203): Xaa in position 202 to 203 is any amino acid
  Variant (206)..(208): Xaa in position 206 to 208 is any amino acid
  Variant (212)..(219): Xaa in position 212 to 219 is any amino acid
  Variant (220)..(226): Xaa in position 220 to 226 is any or no amino acid
  Variant (229)..(235): Xaa in position 229 to 235 is any amino acid
  Variant (237)..(237): Xaa in position 237 is any amino acid
  Variant (240)..(240): Xaa in position 240 is any amino acid
  Variant (242)..(245): Xaa in position 242 to 245 is any amino acid
  Variant (249)..(251): Xaa in position 249 to 251 is any amino acid
  Variant (253)..(255): Xaa in position 253 to 255 is any amino acid
  Variant (257)..(258): Xaa in position 257 to 258 is any amino acid
  Variant (261)..(269): Xaa in position 261 to 269 is any amino acid
  Variant (270)..(277): Xaa in position 270 to 277 is any or no amino acid
  Variant (282)..(282): Xaa in position 282 is any amino acid
  Variant (284)..(292): Xaa in position 284 to 292 is any amino acid
  Variant (293)..(365): Xaa in position 293 to 365 is any or no amino acid
  Variant (367)..(368): Xaa in position 367 to 368 is any amino acid
  Variant (370)..(372): Xaa in position 370 to 372 is any amino acid
  Variant (374)..(375): Xaa in position 374 to 375 is any amino acid
  Variant (377)..(377): Xaa in position 377 is any amino acid
  Variant (380)..(380): Xaa in position 380 is any amino acid
  Variant (382)..(383): Xaa in position 382 to 383 is any amino acid
  Variant (385)..(386): Xaa in position 385 to 386 is any amino acid
  Variant (388)..(389): Xaa in position 388 to 389 is any amino acid
  Variant (391)..(392): Xaa in position 391 to 392 is any amino acid
  Variant (394)..(396): Xaa in position 394 to 396 is any amino acid
  Variant (398)..(400): Xaa in position 398 to 400 is any amino acid
  Variant (402)..(410): Xaa in position 402 to 410 is any amino acid
  Variant (411)..(411): Xaa in position 411 is any or no amino acid
  Variant (413)..(413): Xaa in position 413 is any amino acid
  Variant (415)..(416): Xaa in position 415 to 416 is any amino acid
  Variant (419)..(419): Xaa in position 419 is any amino acid
  Variant (421)..(430): Xaa in position 421 to 430 is any amino acid
  Variant (432)..(432): Xaa in position 432 is any amino acid
  Variant (434)..(434): Xaa in position 434 is any amino acid
  Variant (437)..(442): Xaa in position 437 to 442 is any amino acid
  Variant (443)..(443): Xaa in position 443 is any or no amino acid
  Variant (449)..(450): Xaa in position 449 to 450 is any amino acid
  Variant (453)..(454): Xaa in position 453 to 454 is any amino acid
  Variant (456)..(456): Xaa in position 456 is any amino acid
  Variant (458)..(458): Xaa in position 458 is any amino acid
  Variant (460)..(461): Xaa in position 460 to 461 is any amino acid
  Variant (463)..(482): Xaa in position 463 to 482 is any amino acid
  Variant (483)..(485): Xaa in position 483 to 485 is any or no amino acid
  Variant (488)..(488): Xaa in position 488 is any amino acid
  Variant (490)..(494): Xaa in position 490 to 494 is any amino acid
  Variant (496)..(497): Xaa in position 496 to 497 is any amino acid
  Variant (499)..(501): Xaa in position 499 to 501 is any amino acid
  Variant (503)..(503): Xaa in position 503 is any amino acid
  Variant (505)..(505): Xaa in position 505 is any amino acid
  Variant (507)..(509): Xaa in position 507 to 509 is any amino acid
  Variant (512)..(513): Xaa in position 512 to 513 is any amino acid
  Variant (515)..(516): Xaa in position 515 to 516 is any amino acid
  Variant (518)..(529): Xaa in position 518 to 529 is any amino acid
  Variant (530)..(531): Xaa in position 530 to 531 is any or no amino acid
  Variant (534)..(536): Xaa in position 534 to 536 is any amino acid
  Variant (539)..(541): Xaa in position 539 to 541 is any amino acid
  Variant (543)..(544): Xaa in position 543 to 544 is any amino acid
  Variant (546)..(547): Xaa in position 546 to 547 is any amino acid
  Variant (554)..(554): Xaa in position 554 is any amino acid
  Variant (556)..(558): Xaa in position 556 to 558 is any amino acid
  Variant (561)..(561): Xaa in position 561 is any amino acid
  Variant (563)..(563): Xaa in position 563 is any amino acid
  Variant (565)..(568): Xaa in position 565 to 568 is any amino acid
  Variant (569)..(569): Xaa in position 569 is any or no amino acid
  Variant (571)..(572): Xaa in position 571 to 572 is any amino acid
  Variant (573)..(573): Xaa in position 573 is any or no amino acid
  Variant (575)..(580): Xaa in position 575 to 580 is any amino acid
  Variant (582)..(582): Xaa in position 582 is any amino acid
  Variant (584)..(586): Xaa in position 584 to 586 is any amino acid
  Variant (591)..(592): Xaa in position 591 to 592 is any amino acid
  Variant (594)..(600): Xaa in position 594 to 600 is any amino acid
  Variant (602)..(602): Xaa in position 602 is any amino acid
  Variant (604)..(604): Xaa in position 604 is any amino acid
  Variant (606)..(610): Xaa in position 606 to 610 is any amino acid
  Variant (611)..(615): Xaa in position 611 to 615 is any or no amino acid
  Variant (617)..(621): Xaa in position 617 to 621 is any amino acid
  Variant (625)..(625): Xaa in position 625 is any amino acid
  Variant (627)..(634): Xaa in position 627 to 634 is any amino acid
  Variant (635)..(642): Xaa in position 635 to 642 is any or no amino acid
  Variant (644)..(647): Xaa in position 644 to 647 is any amino acid
  Variant (651)..(651): Xaa in position 651 is any amino acid
  Variant (653)..(654): Xaa in position 653 to 654 is any amino acid
  Variant (657)..(658): Xaa in position 657 to 658 is any amino acid
  Variant (661)..(662): Xaa in position 661 to 662 is any amino acid
  Variant (664)..(667): Xaa in position 664 to 667 is any amino acid
  Variant (669)..(669): Xaa in position 669 is any amino acid
  Variant (671)..(672): Xaa in position 671 to 672 is any amino acid
  Variant (673)..(673): Xaa in position 673 is any or no amino acid
  Variant (677)..(684): Xaa in position 677 to 684 is any amino acid
  Variant (685)..(685): Xaa in position 685 is any or no amino acid
  Variant (688)..(689): Xaa in position 688 to 689 is any amino acid
  Variant (691)..(693): Xaa in position 691 to 693 is any amino acid
  Variant (696)..(698): Xaa in position 696 to 698 is any amino acid
  Variant (702)..(720): Xaa in position 702 to 720 is any amino acid
  Variant (722)..(740): Xaa in position 722 to 740 is any amino acid
  Variant (741)..(751): Xaa in position 741 to 751 is any or no amino acid
  Variant (753)..(753): Xaa in position 753 is any amino acid
  Variant (756)..(756): Xaa in position 756 is any amino acid
  Variant (758)..(761): Xaa in position 758 to 761 is any amino acid
  Variant (762)..(763): Xaa in position 762 to 763 is any or no amino acid
  Variant (765)..(765): Xaa in position 765 is any amino acid
  Variant (767)..(768): Xaa in position 767 to 768 is any amino acid
  Variant (769)..(774): Xaa in position 769 to 774 is any or no amino acid
  Variant (776)..(776): Xaa in position 776 is any amino acid
  Variant (779)..(780): Xaa in position 779 to 780 is any amino acid
  Variant (782)..(783): Xaa in position 782 to 783 is any amino acid
  Variant (785)..(789): Xaa in position 785 to 789 is any amino acid
  Variant (792)..(792): Xaa in position 792 is any amino acid
  Variant (794)..(797): Xaa in position 794 to 797 is any amino acid
  Variant (799)..(802): Xaa in position 799 to 802 is any amino acid
  Variant (805)..(806): Xaa in position 805 to 806 is any amino acid
  Variant (808)..(809): Xaa in position 808 to 809 is any amino acid
  Variant (810)..(815): Xaa in position 810 to 815 is any or no amino acid
  Variant (817)..(823): Xaa in position 817 to 823 is any amino acid
  Variant (824)..(827): Xaa in position 824 to 827 is any or no amino acid
  Variant (829)..(829): Xaa in position 829 is any amino acid
  Variant (831)..(832): Xaa in position 831 to 832 is any amino acid
  Variant (835)..(837): Xaa in position 835 to 837 is any amino acid
  Variant (839)..(839): Xaa in position 839 is any amino acid
  Variant (841)..(843): Xaa in position 841 to 843 is any amino acid
  Variant (845)..(849): Xaa in position 845 to 849 is any amino acid
  Variant (851)..(851): Xaa in position 851 is any amino acid
  Variant (853)..(853): Xaa in position 853 is any amino acid
  Variant (856)..(860): Xaa in position 856 to 860 is any amino acid
  Variant (862)..(863): Xaa in position 862 to 863 is any amino acid
  Variant (866)..(867): Xaa in position 866 to 867 is any amino acid
  Variant (873)..(873): Xaa in position 873 is any amino acid
  Variant (875)..(876): Xaa in position 875 to 876 is any amino acid
  Variant (879)..(879): Xaa in position 879 is any amino acid
  Variant (881)..(883): Xaa in position 881 to 883 is any amino acid
  Variant (884)..(885): Xaa in position 884 to 885 is any or no amino acid
  Variant (887)..(887): Xaa in position 887 is any amino acid
  Variant (890)..(893): Xaa in position 890 to 893 is any amino acid
  Variant (898)..(901): Xaa in position 898 to 901 is any amino acid
  Variant (903)..(903): Xaa in position 903 is any amino acid
  Variant (904)..(904): Xaa in position 904 is any or no amino acid
  Variant (908)..(909): Xaa in position 908 to 909 is any amino acid
  Variant (912)..(912): Xaa in position 912 is any amino acid
GLXLXXGGXXLXXXGGSXYYXXXGXXXXXXXXXXXXXXXXXXXLYXXXXXXXXXWXXXEXGXXXWXLXXRXXXXXXXGXXXXXXXXXXXXXXXXXXXXXXXXXXXXXXXXXXXXXXXXXXXXXXXXXXXXXXXXXXXXXXXXXXXXXXXXXXXXXXXXXXXXXXXXXXXXXXXXWXXYGXXXXGXRXXXLXQIXXXNVXXLXXAWXXXTGDXXXXXXXXXXXXXXXTPXXXXXXXYXCTXHXXXXALDXXXGXXXWXXDPXXXXXXXXXXXXXXXXXCRGVXYXXXXXXXXXXXXXXXXXXXXXXXXXXXXXXXXXXXXXXXXXXXXXXXXXXXXXXXXXXXXXXXXXXXXXXXXXXXXXXXXXXCXXRXXXPXXDXRLXAXXAXXGXXCXXFXXXGXXXLXXXXXXXXXXGXYXXTSXPXXXXXXXXXXGXVXDNXXXXXXXSGVIRXXDVXXGXLXWXXDXXXXXXXXXXXXXXXXXXXXXXXPNXWXXXXXDXXLXXXYXPXGXXXPDXXGXXRXXXXXXXXXXXXXXALXXXTGXXXWXXQXXHHDLWDXDXXXQPXLXDXXXXXGXXXPXXXXXXKXGXXXVLDRXXGXXXXXXXEXPXPXXXXXXXXXXGXXXXXTQPXSXXXXXXXXXXXXXXXXLXXXXMWGXTXXDQXXCRXXFXXXXYXGXXXTPPXXXXXXXXXPGXXGXXXWGXXXVDPXXXXXXXXXXXXXXXXXXXPXXXXXXXXXXXXXXXXXXXXXXXXXXXXXXGXPYXVXXXXXXFXSXXXXXXXXGXPCXXPXXGXXXXXDLXTXXXXWXXXXGTXXDXXXXXXXXPXXXXXXXXXXXGXPXXGGXXXTXGXXXFXXXXXDXYXRAXXXXXGXXLWXXRLPAGXQXXPMXYXXXXXGXQYXXXXAGGHXXXXTXXGDYXXAYXLP

SEQ ID NO: 4163 - protein, 29 aa, Artificial sequence
  protein pattern
  Variant (4)..(4): Xaa in position 4 is any amino acid
  Variant (5)..(5): Xaa in position 5 is Ser or Thr
  Variant (6)..(7): Xaa in position 6 to 7 is any amino acid
  Variant (10)..(10): Xaa in position 10 is Leu or Met
  Variant (11)..(11): Xaa in position 11 is any amino acid
  Variant (14)..(14): Xaa in position 14 is Ile or Val
  Variant (15)..(15): Xaa in position 15 is any amino acid
  Variant (17)..(20): Xaa in position 17 to 20 is any amino acid
  Variant (22)..(22): Xaa in position 22 is any amino acid
  Variant (24)..(24): Xaa in position 24 is any amino acid
  Variant (25)..(25): Xaa in position 25 is Phe or Tyr
  Variant (27)..(27): Xaa in position 27 is any or no amino acid
  Variant (29)..(29): Xaa in position 29 is Gly, Pro or Ser
MWGXXXXDQXXCRXXFXXXXYXGXXTXPX

SEQ ID NO: 4164 - protein, 30 aa, Artificial sequence
  protein pattern
  Variant (3)..(5): Xaa in position 3 to 5 is any amino acid
  Variant (7)..(8): Xaa in position 7 to 8 is any amino acid
  Variant (10)..(10): Xaa in position 10 is any or no amino acid
  Variant (12)..(12): Xaa in position 12 is any or no amino acid
  Variant (14)..(14): Xaa in position 14 is any amino acid
  Variant (16)..(16): Xaa in position 16 is Ala, Ile or Leu
  Variant (19)..(19): Xaa in position 19 is any amino acid
  Variant (21)..(21): Xaa in position 21 is any amino acid
  Variant (22)..(22): Xaa in position 22 is Gly or Pro
  Variant (23)..(23): Xaa in position 23 is any amino acid
  Variant (26)..(26): Xaa in position 26 is any amino acid
  Variant (27)..(27): Xaa in position 27 is Phe or Leu
  Variant (28)..(28): Xaa in position 28 is any amino acid
  Variant (29)..(29): Xaa in position 29 is Asp or His
  Variant (30)..(30): Xaa in position 30 is Phe, Ile, Leu, Met or Val
TGXXXWXXQXTXHXDXWDXDXXXQPXXXXX

SEQ ID NO: 4165 - protein, 54 aa, Artificial sequence
  protein pattern
  Variant (2)..(2): Xaa in position 2 is any amino acid
  Variant (4)..(5): Xaa in position 4 to 5 is any amino acid
  Variant (8)..(8): Xaa in position 8 is Pro, Ser or Thr
  Variant (9)..(9): Xaa in position 9 is Phe, Ile, Leu, Met or Val
  Variant (10)..(10): Xaa in position 10 is any amino acid
  Variant (12)..(12): Xaa in position 12 is any amino acid
  Variant (13)..(13): Xaa in position 13 is any or no amino acid
  Variant (15)..(16): Xaa in position 15 to 16 is any amino acid
  Variant (17)..(17): Xaa in position 17 is any or no amino acid
  Variant (19)..(19): Xaa in position 19 is Phe, Ile, Leu, Met or Val
  Variant (20)..(20): Xaa in position 20 is Ala, Gly, Ser or Thr
  Variant (21)..(21): Xaa in position 21 is Ala or Gly
  Variant (22)..(22): Xaa in position 22 is Ala, Ser or Thr
  Variant (23)..(23): Xaa in position 23 is any amino acid
  Variant (25)..(26): Xaa in position 25 to 26 is any amino acid
  Variant (27)..(27): Xaa in position 27 is Phe, Ile, Leu or Val
  Variant (29)..(29): Xaa in position 29 is Ala or Gly
  Variant (30)..(30): Xaa in position 30 is any amino acid
  Variant (31)..(31): Xaa in position 31 is Asp, Asn or Ser
  Variant (32)..(33): Xaa in position 32 to 33 is any amino acid
  Variant (34)..(34): Xaa in position 34 is Asp, Asn, Ser or Thr
  Variant (36)..(37): Xaa in position 36 to 37 is any amino acid
  Variant (38)..(38): Xaa in position 38 is Ile, Leu or Val
  Variant (40)..(40): Xaa in position 40 is any amino acid
  Variant (41)..(41): Xaa in position 41 is Ala, Asp, Glu, Gly or Ser
  Variant (42)..(42): Xaa in position 42 is Lys or Arg
  Variant (45)..(45): Xaa in position 45 is Ala or Val
  Variant (47)..(47): Xaa in position 47 is Ala, Gly or Ser
  Variant (49)..(49): Xaa in position 49 is Ala, Gly, Ser or Thr
  Variant (50)..(50): Xaa in position 50 is Gly, Asn or Thr
  Variant (52)..(52): Xaa in position 52 is any amino acid
  Variant (53)..(53): Xaa in position 53 is Ser, Thr or Val
GXPXXGGXXXTXXGXXXFXXXXXDXXXRXXXXXXGXXXWXXXLPXGXQXXPXXY

SEQ ID NO: 4166 - protein, 39 aa, Artificial sequence
  protein pattern
  Variant (2)..(4): Xaa in position 2 to 4 is any amino acid
  Variant (5)..(6): Xaa in position 5 to 6 is any or no amino acid
  Variant (9)..(9): Xaa in position 9 is Ile or Leu
  Variant (10)..(10): Xaa in position 10 is any amino acid
  Variant (11)..(11): Xaa in position 11 is Ala, Ile or Val
  Variant (12)..(12): Xaa in position 12 is any amino acid
  Variant (13)..(13): Xaa in position 13 is Asp, Gly, Asn or Ser
  Variant (14)..(14): Xaa in position 14 is any amino acid
  Variant (15)..(15): Xaa in position 15 is Leu, Met or Val
  Variant (16)..(16): Xaa in position 16 is Phe or Tyr
  Variant (17)..(17): Xaa in position 17 is any amino acid
  Variant (20)..(20): Xaa in position 20 is Ala, Pro or Thr
  Variant (21)..(21): Xaa in position 21 is Phe, His or Tyr
  Variant (22)..(22): Xaa in position 22 is Asp, Gly, Asn, Gln or Ser
  Variant (23)..(23): Xaa in position 23 is any amino acid
  Variant (24)..(24): Xaa in position 24 is Ala, Ile, Leu or Val
  Variant (25)..(25): Xaa in position 25 is Phe, Ile, Leu, Met or Val
  Variant (27)..(27): Xaa in position 27 is Ile, Leu or Val
  Variant (29)..(29): Xaa in position 29 is Ala or Pro
  Variant (30)..(30): Xaa in position 30 is any amino acid
  Variant (31)..(31): Xaa in position 31 is Ser or Thr
  Variant (33)..(33): Xaa in position 33 is any amino acid
  Variant (34)..(34): Xaa in position 34 is Glu, Gln or Thr
  Variant (35)..(35): Xaa in position 35 is any amino acid
  Variant (37)..(38): Xaa in position 37 to 38 is any amino acid
  Variant (39)..(39): Xaa in position 39 is Ala, Asp, Glu or Asn
EXXXXXTPXXXXXXXXXCTXXXXXXAXDXXXGXXXWXXX

SEQ ID NO: 4167 - protein, 40 aa, Artificial sequence
  protein pattern
  Variant (2)..(3): Xaa in position 2 to 3 is any or no amino acid
  Variant (5)..(6): Xaa in position 5 to 6 is any amino acid
  Variant (7)..(7): Xaa in position 7 is Trp or Tyr
  Variant (9)..(9): Xaa in position 9 is any amino acid
  Variant (10)..(10): Xaa in position 10 is Asn, Ser or Thr
  Variant (11)..(12): Xaa in position 11 to 12 is any amino acid
  Variant (14)..(14): Xaa in position 14 is any amino acid
  Variant (16)..(16): Xaa in position 16 is Phe or Tyr
  Variant (17)..(17): Xaa in position 17 is Ala or Ser
  Variant (18)..(18): Xaa in position 18 is Ala, Pro or Ser
  Variant (19)..(19): Xaa in position 19 is Phe or Leu
  Variant (20)..(20): Xaa in position 20 is any amino acid
  Variant (22)..(22): Xaa in position 22 is Ile or Val
  Variant (23)..(25): Xaa in position 23 to 25 is any amino acid
  Variant (27)..(27): Xaa in position 27 is Ala, Ile or Val
  Variant (28)..(29): Xaa in position 28 to 29 is any amino acid
  Variant (31)..(32): Xaa in position 31 to 32 is any amino acid
  Variant (35)..(37): Xaa in position 35 to 37 is any amino acid
  Variant (38)..(38): Xaa in position 38 is Ser or Thr
  Variant (40)..(40): Xaa in position 40 is Asp or Lys
DXXWXXXGXXXXGXRXXXXXQXXXXNXXXLXXAWXXXXGX

SEQ ID NO: 4168 - protein, 37 aa, Artificial sequence
  protein pattern
  Variant (2)..(2): Xaa in position 2 is any amino acid
  Variant (3)..(3): Xaa in position 3 is any or no amino acid
  Variant (5)..(5): Xaa in position 5 is Ala, Glu, Asn or Thr
  Variant (8)..(8): Xaa in position 8 is any amino acid
  Variant (9)..(9): Xaa in position 9 is Ala, Glu, Gln or Ser
  Variant (10)..(12): Xaa in position 10 to 12 is any amino acid
  Variant (13)..(13): Xaa in position 13 is Pro, Gln or Thr
  Variant (14)..(14): Xaa in position 14 is Gly, Pro or Ser
  Variant (17)..(17): Xaa in position 17 is Ile or Val
  Variant (19)..(19): Xaa in position 19 is Ala, Gly or Thr
  Variant (20)..(20): Xaa in position 20 is Phe or Tyr
  Variant (21)..(21): Xaa in position 21 is Asp or Asn
  Variant (22)..(22): Xaa in position 22 is Ala, Ile, Leu or Val
  Variant (23)..(23): Xaa in position 23 is any amino acid
  Variant (24)..(24): Xaa in position 24 is Asp, Ser or Thr
  Variant (26)..(26): Xaa in position 26 is any amino acid
  Variant (27)..(27): Xaa in position 27 is Leu or Met
  Variant (28)..(28): Xaa in position 28 is any amino acid
  Variant (30)..(30): Xaa in position 30 is any amino acid
  Variant (31)..(31): Xaa in position 31 is Phe or Trp
  Variant (33)..(34): Xaa in position 33 to 34 is any amino acid
  Variant (35)..(35): Xaa in position 35 is Ala or Asn
  Variant (36)..(36): Xaa in position 36 is any amino acid
  Variant (37)..(37): Xaa in position 37 is Ala, Asp, Glu, Asn, Gln or Thr
GXXVXDNXXXXXXXGVXRXXXXXXGXXXWXXDXXXXX

SEQ ID NO: 4169 - protein, 29 aa, Artificial sequence
  protein pattern
  Variant (3)..(3): Xaa in position 3 is any or no amino acid
  Variant (5)..(5): Xaa in position 5 is any or no amino acid
  Variant (7)..(7): Xaa in position 7 is Ala, Gly, Pro or Ser
  Variant (8)..(8): Xaa in position 8 is Phe, Trp or Tyr
  Variant (10)..(10): Xaa in position 10 is any amino acid
  Variant (11)..(11): Xaa in position 11 is Ile, Leu, Met or Val
  Variant (12)..(12): Xaa in position 12 is Ala, Ser or Thr
  Variant (13)..(13): Xaa in position 13 is Ala or Gly
  Variant (14)..(14): Xaa in position 14 is Ala, Ile, Leu or Val
  Variant (16)..(16): Xaa in position 16 is Leu or Met
  Variant (17)..(17): Xaa in position 17 is any amino acid
  Variant (18)..(18): Xaa in position 18 is Asn, Ser or Thr
  Variant (19)..(22): Xaa in position 19 to 22 is any amino acid
  Variant (23)..(23): Xaa in position 23 is Trp or Tyr
  Variant (24)..(27): Xaa in position 24 to 27 is any amino acid
PCXQXPXXGXXXXXDXXXXXXXXXXXXGT

SEQ ID NO: 4170 - protein, 35 aa, Artificial sequence
  protein pattern
  Variant (2)..(2): Xaa in position 2 is any amino acid
  Variant (3)..(3): Xaa in position 3 is any or no amino acid
  Variant (5)..(5): Xaa in position 5 is any amino acid
  Variant (7)..(9): Xaa in position 7 to 9 is any amino acid
  Variant (10)..(10): Xaa in position 10 is Ala, Ser or Val
  Variant (11)..(11): Xaa in position 11 is any amino acid
  Variant (13)..(15): Xaa in position 13 to 15 is any amino acid
  Variant (16)..(16): Xaa in position 16 is Asp, Gly or Asn
  Variant (17)..(17): Xaa in position 17 is any amino acid
  Variant (18)..(18): Xaa in position 18 is Ile, Leu or Val
  Variant (19)..(19): Xaa in position 19 is Phe or Tyr
  Variant (20)..(20): Xaa in position 20 is Phe, Ile, Leu, Met or Val
  Variant (22)..(22): Xaa in position 22 is any amino acid
  Variant (24)..(24): Xaa in position 24 is Asn, Ser or Val
  Variant (25)..(26): Xaa in position 25 to 26 is any amino acid
  Variant (27)..(27): Xaa in position 27 is Gly, Pro, Thr or Val
  Variant (29)..(30): Xaa in position 29 to 30 is any amino acid
  Variant (32)..(33): Xaa in position 32 to 33 is any amino acid
  Variant (35)..(35): Xaa in position 35 is Asn, Ser or Thr
SXXNXWXXXXXDXXXXXXXXPXGXXXXDXXGXXRX

SEQ ID NO: 4171 - protein, 35 aa, Artificial sequence
  protein pattern
  Variant (3)..(4): Xaa in position 3 to 4 is any amino acid
  Variant (6)..(7): Xaa in position 6 to 7 is any amino acid
  Variant (8)..(8): Xaa in position 8 is Asp, Glu or Asn
  Variant (11)..(11): Xaa in position 11 is Gly or Ser
  Variant (12)..(12): Xaa in position 12 is Ile, Leu, Met or Val
  Variant (13)..(13): Xaa in position 13 is Ala or Ser
  Variant (15)..(15): Xaa in position 15 is Asp or Asn
  Variant (16)..(17): Xaa in position 16 to 17 is any amino acid
  Variant (18)..(18): Xaa in position 18 is Asn, Gln, Arg or Ser
  Variant (19)..(19): Xaa in position 19 is Asp, Glu, Gly, Asn, Gln or Ser
  Variant (20)..(21): Xaa in position 20 to 21 is any amino acid
  Variant (22)..(22): Xaa in position 22 is Phe, Ile or Val
  Variant (23)..(27): Xaa in position 23 to 27 is any amino acid
  Variant (28)..(28): Xaa in position 28 is Leu, Met or Val
  Variant (29)..(29): Xaa in position 29 is Ala, Gly or Pro
  Variant (30)..(34): Xaa in position 30 to 34 is any amino acid
  Variant (35)..(35): Xaa in position 35 is Ile, Leu, Met or Val
PGXXGXXXWGXXXVXXXXXXXXXXXXXXXXXXXXX

SEQ ID NO: 4172 - protein, 36 aa, Artificial sequence
  protein pattern
  Variant (2)..(3): Xaa in position 2 to 3 is any amino acid
  Variant (4)..(4): Xaa in position 4 is Lys or Arg
  Variant (5)..(5): Xaa in position 5 is Ile, Leu or Val
  Variant (6)..(7): Xaa in position 6 to 7 is any amino acid
  Variant (8)..(8): Xaa in position 8 is Ala, Asn or Pro
  Variant (9)..(10): Xaa in position 9 to 10 is any amino acid
  Variant (12)..(12): Xaa in position 12 is Ala, Gly or Thr
  Variant (15)..(15): Xaa in position 15 is any amino acid
  Variant (17)..(17): Xaa in position 17 is Ile, Leu or Val
  Variant (18)..(18): Xaa in position 18 is Asp or Asn
  Variant (20)..(20): Xaa in position 20 is any amino acid
  Variant (21)..(21): Xaa in position 21 is Asp, Asn, Ser or Thr
  Variant (23)..(24): Xaa in position 23 to 24 is any amino acid
  Variant (26)..(27): Xaa in position 26 to 27 is any amino acid
  Variant (29)..(29): Xaa in position 29 is Ala or Gly
  Variant (30)..(31): Xaa in position 30 to 31 is any amino acid
  Variant (33)..(33): Xaa in position 33 is any amino acid
  Variant (34)..(35): Xaa in position 34 to 35 is any or no amino acid
CXXXXXXXXXDXRLXAXXAXXGXXCXXFXXXGXXXL

SEQ ID NO: 4173 - protein, 31 aa, Artificial sequence
  protein pattern
  Variant (2)..(2): Xaa in position 2 is any amino acid
  Variant (3)..(7): Xaa in position 3 to 7 is any or no amino acid
  Variant (9)..(9): Xaa in position 9 is Ala, Gln or Thr
  Variant (11)..(11): Xaa in position 11 is Asp, Glu, Asn, Gln or Ser
  Variant (12)..(12): Xaa in position 12 is Ala, Ile, Leu or Val
  Variant (13)..(13): Xaa in position 13 is Phe or Tyr
  Variant (16)..(16): Xaa in position 16 is Asp or Asn
  Variant (18)..(18): Xaa in position 18 is any amino acid
  Variant (19)..(19): Xaa in position 19 is Asp, Asn, Ser or Thr
  Variant (21)..(22): Xaa in position 21 to 22 is any amino acid
  Variant (23)..(23): Xaa in position 23 is Ile, Leu or Val
  Variant (24)..(25): Xaa in position 24 to 25 is any amino acid
  Variant (26)..(26): Xaa in position 26 is Ala, Ile or Val
  Variant (27)..(27): Xaa in position 27 is any amino acid
  Variant (29)..(29): Xaa in position 29 is any amino acid
  Variant (30)..(30): Xaa in position 30 is Ala, Asp, Pro or Ser
  Variant (31)..(31): Xaa in position 31 is Ala, Thr or Val
PXXXXXXKXGXXXVLXRXXGXXXXXXXEXXX

SEQ ID NO: 4174 - protein, 19 aa, Artificial sequence
  protein pattern
  Variant (2)..(2): Xaa in position 2 is any amino acid
  Variant (3)..(3): Xaa in position 3 is any or no amino acid
  Variant (5)..(5): Xaa in position 5 is Ala, Gly or Ser
  Variant (6)..(7): Xaa in position 6 to 7 is any amino acid
  Variant (8)..(8): Xaa in position 8 is Asp or Glu
  Variant (9)..(9): Xaa in position 9 is any amino acid
  Variant (11)..(13): Xaa in position 11 to 13 is any amino acid
  Variant (15)..(15): Xaa in position 15 is any amino acid
  Variant (17)..(17): Xaa in position 17 is any amino acid
  Variant (18)..(18): Xaa in position 18 is Pro or Ser
TXXWXXXXXGXXXWXLXXR

SEQ ID NO: 4175 - protein, 17 aa, Artificial sequence
  protein pattern
  Variant (2)..(3): Xaa in position 2 to 3 is any amino acid
  Variant (4)..(4): Xaa in position 4 is any or no amino acid
  Variant (8)..(8): Xaa in position 8 is any amino acid
  Variant (9)..(10): Xaa in position 9 to 10 is Phe or Tyr
  Variant (11)..(11): Xaa in position 11 is Ile, Leu, Pro or Val
  Variant (12)..(12): Xaa in position 12 is Phe, Ile, Leu or Val
  Variant (13)..(13): Xaa in position 13 is any amino acid
  Variant (15)..(15): Xaa in position 15 is Ala, Ile, Leu or Val
  Variant (16)..(16): Xaa in position 16 is any amino acid
  Variant (17)..(17): Xaa in position 17 is Phe, Ile, Leu, Met or Val
LXXXGGSXXXXXXGXXX

SEQ ID NO: 4176 - DNA, 1425 bp, Escherichia coli
  CDS (1)..(1425): transl_table=11
atgaaaaaaaccacattagcactgagtgcactggctctgagtttaggtttggcgttatctccgctctctgcaacggcggctgagacttcttcagcaacgacagcccagcagatgccaagccttgcaccgatgctcgaaaaggtgatgccttcagtggtcagcattaacgtagaaggtagcacaaccgttaatacgccgcgtatgccgcgtaatttccagcagttcttcggtgatgattctccgttctgccaggaaggttctccgttccagagctctccgttctgccagggtggccagggcggtaatggtggcggccagcaacagaaattcatggcgctgggttccggcgtcatcattgatgccgataaaggctatgtcgtcaccaacaaccacgttgttgataacgcgacggtcattaaagttcaactgagcgatggccgtaagttcgacgcgaagatggttggcaaagatccgcgctctgatatcgcgctgatccaaatccagaacccgaaaaacctgaccgcaattaagatggcggattctgatgcactgcgcgtgggtgattacaccgtagcgattggtaacccgtttggtctgggcgagacggtaacttccgggattgtctctgcgctggggcgtagcggcctgaatgccgaaaactacgaaaacttcatccagaccgatgcagcgatcaaccgtggtaactccggtggtgcgctggttaacctgaacggcgaactgatcggtatcaacaccgcgatcctcgcaccggacggcggcaacatcggtatcggttttgctatcccgagtaacatggtgaaaaacctgacctcgcagatggtggaatacggccaggtgaaacgcggtgagctgggtattatggggactgagctgaactccgaactggcgaaagcgatgaaagttgacgcccagcgcggtgctttcgtaagccaggttctgcctaattcctccgctgcaaaagcgggcattaaagcgggtgatgtgatcacctcactgaacggtaagccgatcagcagctttgccgcactgcgtgctcaggtgggtactatgccggtaggcagcaaactgaccctgggcttactgcgcgacggtaagcaggttaacgtgaacctggaactgcagcagagcagccagaatcaggttgattccagctccatcttcaacggcattgaaggcgctgagatgagcaacaaaggcaaagatcagggcgtggtagtgaacaacgtgaaaacgggcactccggctgcgcagatcggcctgaagaaaggtgatgtgattattggcgcgaaccagcaggcagtgaaaaacatcgctgaactgcgtaaagttctcgacagcaaaccgtctgtgctggcactcaacattcagcgcggcgacagcaccatctacctgttaatgcagtaa

SEQ ID NO: 4177 - protein, 474 aa, Escherichia coli
MKKTTLALSALALSLGLALSPLSATAAETSSATTAQQMPSLAPMLEKVMPSVVSINVEGSTTVNTPRMPRNFQQFFGDDSPFCQEGSPFQSSPFCQGGQGGNGGGQQQKFMALGSGVIIDADKGYVVTNNHVVDNATVIKVQLSDGRKFDAKMVGKDPRSDIALIQIQNPKNLTAIKMADSDALRVGDYTVAIGNPFGLGETVTSGIVSALGRSGLNAENYENFIQTDAAINRGNSGGALVNLNGELIGINTAILAPDGGNIGIGFAIPSNMVKNLTSQMVEYGQVKRGELGIMGTELNSELAKAMKVDAQRGAFVSQVLPNSSAAKAGIKAGDVITSLNGKPISSFAALRAQVGTMPVGSKLTLGLLRDGKQVNVNLELQQSSQNQVDSSSIFNGIEGAEMSNKGKDQGVVVNNVKTGTPAAQIGLKKGDVIIGANQQAVKNIAELRKVLDSKPSVLALNIQRGDSTIYLLMQ

SEQ ID NO: 4178 - DNA, 1452 bp, Borrelia burgdorferi B31
  CDS (1)..(1452): transl_table=11
ttgagtaattatgtggaggttataaaagtggaaaaaaagtttttttctggatttcttcttagttttttggctttgagtattggattttttattgggatgcattatttagcttctaatagaagcaacattgtttttgcagaagaaaaggacaataccgtacgagccttacaagattcttttagagaggtttccaagaaaattttaccatcatctgtggaagttcatgcaacaggggtaatcaagcagagttttcctattccatttttcttttttgatatgccagaatttgattctgagagaaaaagcaattgggcggggtctggagtaataattggtagagattctcaaaaaaaatcattattttatgtggttacgaatagtcatgtggtagataaggcaactgaacttgaagttgtatcttatgataaaaaaaagcacaaggctaagttaattggcaaagatgaaaaaaaggatattgcccttattagctttgaaagtgatgacgcaactattaaagtagctgatcttggagatagtgataagcttgaaataggtgattgggttatggcagtgggcagcccttttcaatttagttttacagttacagcaggtattgtaagtggattgcaacgttctgcaaatcctaatttgcaatcaaggaatctgtttattcaaaccgatgctgcaatcaacaggggtaattcaggtggtcctcttgtaaatataaagggcgaggttattggaattaatgcttggatagcttcaaattctggcggaaatattgggttgggttttgcaattcctgttaacaatattaaaagcactgtagattttttccttaaaggtaaaaaaattgaatcggcttggcttggaatttctttttatccgctaaagacaagagattctgaggtgctaaaaagcttaggggttgaaagtaatgatgtttcagctgcaattattgcttctctttatccgggttcacccgctgttaaatcagggcttagggcaggggatattattatgaaggttaatggggtttccatgagcgtttttcaagatgttacatcatatattagtgatttttatgctggtgagaaagtaaatgtagaaatcttaagaggcaatgtcaaaaaaaatattgagattgttcttgctgttagacctaaggataaagagctttcttcttcaaagatgcttccaggctttgttgtgtatccattggttgaggatattaaagctcagcttaatttaagaaattggattaaaggtgttgttgttgattatattgataaaaatttagcatcaaatattaaaatgaaatcaggagatgtaattctttctgtaaattcaaaaagtgtttctaatttaagagaattttatgatgctcttgaggttggaaaaaatacttataaaattttgagaggaaacgattcttttaaaattacattttag

SEQ ID NO: 4179 - protein, 483 aa, Borrelia burgdorferi B31
MSNYVEVIKVEKKFFSGFLLSFLALSIGFFIGMHYLASNRSNIVFAEEKDNTVRALQDSFREVSKKILPSSVEVHATGVIKQSFPIPFFFFDMPEFDSERKSNWAGSGVIIGRDSQKKSLFYVVTNSHVVDKATELEVVSYDKKKHKAKLIGKDEKKDIALISFESDDATIKVADLGDSDKLEIGDWVMAVGSPFQFSFTVTAGIVSGLQRSANPNLQSRNLFIQTDAAINRGNSGGPLVNIKGEVIGINAWIASNSGGNIGLGFAIPVNNIKSTVDFFLKGKKIESAWLGISFYPLKTRDSEVLKSLGVESNDVSAAIIASLYPGSPAVKSGLRAGDIIMKVNGVSMSVFQDVTSYISDFYAGEKVNVEILRGNVKKNIEIVLAVRPKDKELSSSKMLPGFVVYPLVEDIKAQLNLRNWIKGVVVDYIDKNLASNIKMKSGDVILSVNSKSVSNLREFYDALEVGKNTYKILRGNDSFKITF

SEQ ID NO: 4180 - DNA, 1431 bp, Helicobacter pylori J99
  CDS (1)..(1431): transl_table=11
atgatgaaaaaaactttttttgtctctttggctttagcgttaagcttgaatgcgggcaatatccaaatccaaaacatgcccaaagtgaaagagcgaataagcgtcccctctaaagaggatacgatctattcttaccacgattctattaaggattctattaaagcggtggtgaatatctccactgaaaagaagattaaaaacaattttataggtggcggtgtgtttaatgacccctttttccaacaatttttcggggatttgggtggcatgatccctaaagaaagaatggaaagggctttaggcagcggcgtcatcatttctaaagatggctatatcgttacgaataaccatgtgattgatggcgcggataagattaaagtaaccattccagggagcaacaaagaatattccgccactttagtaggcacggattctgaaagcgatttagcggtgattcgcatcactaaagacaacttacccacgatcaaattctctgattctaatgatattttagtgggcgatttggtttttgccatcggtaacccttttggcgtgggtgaaagcgttacgcaaggcattgtttcagcgctcaataaaagcgggattgggatcaacagctatgaaaatttcattcaaacagacgcttccattaatcctggaaattccggcggcgctttaattgatagccgtggagggttagtggggatcaataccgctatcatttctaaaaccggcggtaaccacggtattggctttgccatcccttctaacatggttaaagatattgtaacccagctcatcaaaaccggtaagattgaaagaggttacttgggcgtgggcttgcaagatttgagcggcgatttgcaaaattcttatgacaataaagaaggggcggtggtcattagcgtagaaaaagactctccggctaaaaaagcagggattttggtgtgggatttgatcactgaagtcaatgggaaaaaggttaaaaacacgaatgagttaagaaacctaatcggctccatgctacccaatcaaagagtaaccttaaaagtcattagagacaaaaaagaacgcactttcaccctcactcttgctgaaaggaaaaaccctaacaaaaaagaaaccatttctgctcaaaacggtgtgcaaggtcagttgaacgggcttcaagtagaagatttaacccaaaaaaccaaaaggtctatgcgtttgagcgatgacgttcaaggggttttagtctctcaagtgaatgaaaattccccagcagagcaagccggcttcagacaaggcaacatcatcacaaaaattgaagaggttgaagttaaaagcgttgcggattttaaccatgctttagaaaaatataaaggcaaacccaaacgattcttagttttagacttgaaccaaggttatagaatcattttggtgaaatga

SEQ ID NO: 4181 - protein, 476 aa, Helicobacter pylori J99
MMKKTFFVSLALALSLNAGNIQIQNMPKVKERISVPSKEDTIYSYHDSIKDSIKAVVNISTEKKIKNNFIGGGVFNDPFFQQFFGDLGGMIPKERMERALGSGVIISKDGYIVTNNHVIDGADKIKVTIPGSNKEYSATLVGTDSESDLAVIRITKDNLPTIKFSDSNDILVGDLVFAIGNPFGVGESVTQGIVSALNKSGIGINSYENFIQTDASINPGNSGGALIDSRGGLVGINTAIISKTGGNHGIGFAIPSNMVKDIVTQLIKTGKIERGYLGVGLQDLSGDLQNSYDNKEGAVVISVEKDSPAKKAGILVWDLITEVNGKKVKNTNELRNLIGSMLPNQRVTLKVIRDKKERTFTLTLAERKNPNKKETISAQNGVQGQLNGLQVEDLTQKTKRSMRLSDDVQGVLVSQVNENSPAEQAGFRQGNIITKIEEVEVKSVADFNHALEKYKGKPKRFLVLDLNQGYRIILVK

SEQ ID NO: 4182 - DNA, 1380 bp, Pasteurella multocida subsp. multocida str. Pm70
  CDS (1)..(1380): transl_table=11
atgagaaaaagacgttttctattaacaagtattgcactcggattaagcattttatcgacgccgatgataagtcaagcgtccttaccaactcaagttgacggtcagcaagtccctagcctcgcccctatgttagaaaaagtcttaccagcggtggtatctatttctgtggaagggaaagccaagaatcatggtagtacaccatttcaaggtatcccagaagaatttcgttttttctttggtcccgatcttttcaatgatcgcgcaccacgtaatttccgtggtatcggctcaggcgtcatcattaacgctgaaaaaggttatgtgttaacgaataatcacgtcattgacagtgcagataaaatcaccgtgcagttacaagatggtcgagagttaagcgcaaaagtgattggtactgatgaattatctgatgttgcactgattcaaattgaaaaacccaaaaatttgaccgcactaacgattgctgattccgataaactccgcgttggcgattttactgtagctattggtaatccttttggcttgggacaaaccgtgacatctggtatcgtctctgccttaggtcgttcaacgggttcagataacggtacgtatgaaaactatatccaaactgatgccgcagtaaaccgcggaaattcaggaggtcctttaatcaacctacaaggagagctaattggtattaatactgcgattatttcaccaagtgggggaaatgccggcattgcttttgcaattccaagtaatatggcaaataacttagtacaacaaattttagaattcggtgaagtacgtcgtggcatgctaggcattaaagggggcgagctcaacgcggatctagcgaaagcttttgatattgaagctcaacaaggggcatttgtaagtgaagtcttgcctaattctgctgcagaaaaagccggtttaaaagcaggtgatgtcattgtcgcgatgaatggtcagaaaatttccagttttgctgaaatgcgagcaaagatcgcgacatctggtgcagggaaagaaattgctctcacctatctacgcgacggtaaaacacatcaaacaaaggtcacattacaatcagatgatcaaactcaagccgatgcaagtcacttattaccggcattagctggggctgagatgagcaatcatgatgataaaggcgtcaaaggcgtactcatcacgagtgtgacacctaaatcgcttgcagaacaacgtggtttgaaaaagggcgatgtcatcattggggtgaaccgtcaaaaagtagaaaatttaggtcaactgcgtaaaattttagatgcaaaaccttcggcgattgctctaaatattgtgcgtggcaatacgaatttctatcttcttattcaataa

SEQ ID NO: 4183 - protein, 459 aa, Pasteurella multocida subsp. multocida str. Pm70
MRKRRFLLTSIALGLSILSTPMISQASLPTQVDGQQVPSLAPMLEKVLPAVVSISVEGKAKNHGSTPFQGIPEEFRFFFGPDLFNDRAPRNFRGIGSGVIINAEKGYVLTNNHVIDSADKITVQLQDGRELSAKVIGTDELSDVALIQIEKPKNLTALTIADSDKLRVGDFTVAIGNPFGLGQTVTSGIVSALGRSTGSDNGTYENYIQTDAAVNRGNSGGPLINLQGELIGINTAIISPSGGNAGIAFAIPSNMANNLVQQILEFGEVRRGMLGIKGGELNADLAKAFDIEAQQGAFVSEVLPNSAAEKAGLKAGDVIVAMNGQKISSFAEMRAKIATSGAGKEIALTYLRDGKTHQTKVTLQSDDQTQADASHLLPALAGAEMSNHDDKGVKGVLITSVTPKSLAEQRGLKKGDVIIGVNRQKVENLGQLRKILDAKPSAIALNIVRGNTNFYLLIQ

SEQ ID NO: 4184 - DNA, 1368 bp, Escherichia coli O157:H7 EDL933
  CDS (1)..(1368): transl_table=11
  misc_feature (265)..(265): k is g or t
atgaaaaaacaaacccagctgttgagtgcattagcgttaagtgtcgggttaactctctcggcgtcatttcaggccgttgcgtcgatcccaggccaggttgccgatcaggcccccctccccagtctggctccaatgctggaaaaagtgcttccggcagtggtgagcgtacgggtggaaggaacggccagtcagggacagaaaatcccggaagaattcaaaaagttttttggtgatgatttaccggatcaacctgcacaacccttckaaggtttaggctccggtgtcatcatcaacgccagtaaaggctatgtgctgaccaacaaccatgtgattaatcaggcacagaaaatcagtattcagctcaatgatgggcgcgagtttgatgcaaaactgattggtagcgatgaccagagcgatatcgccctgttgcaaattcaaaacccgagcaaattaacgcaaatcgctattgccgactccgataaattgcgcgtcggtgattttgccgtggcggtcggtaacccatttggccttgggcaaaccgccacctctggcattgtttccgcattaggacgcagcgggttgaatcttgaaggtctggaaaactttatccagacagatgcttccattaaccgcggtaactccggcggtgcactgttaaaccttaacggtgagttaattggcatcaacactgcaatccttgcgcctggcggcgggagcgtcggaattggatttgccatccccagtaatatggcgcgaacactggcgcagcagcttatcgactttggtgaaatcaaacgcggtttgttaggcatcaaaggcaccgagatgagtgccgatatcgccaaagccttcaaccttgacgtgcagcgtggcgcgtttgtcagcgaagtgttgccaggttctggctcggcgaaagcgggcgtcaaaacgggcgatattattaccagcctcaacggcaaaccgctgaatagctttgctgagttgcgctctcgtatcgcgaccaccgagccgggcacgaaagtgaagcttggcctgctgcgtaacggcaaaccactggaagtagaagtgacgctcgataccagcacctcttcgtcggccagcgctgaaatgatcacgccagcgctggaaggtgcaacgttgagcgatggtcagctaaaagatggcggcaaaggtattaaaatcgatgaagttgtcaaaggaagcccagctgctcaggctggcttgcaaaaagacgatgtgatcattggcgtcaaccgcgatcgggtgaactcgattgctgaaatgcgtaaagtgctggcggcaaaaccggccatcatcgccctgcaaattgtacgcggcaatgaaagcatctatctgctgatgcgttaa

SEQ ID NO: 4185 - protein, 455 aa, Escherichia coli O157:H7 EDL933
  misc_feature (89)..(89): The Xaa at location 89 stands for Stop, or Glu.
MKKQTQLLSALALSVGLTLSASFQAVASIPGQVADQAPLPSLAPMLEKVLPAVVSVRVEGTASQGQKIPEEFKKFFGDDLPDQPAQPFXGLGSGVIINASKGYVLTNNHVINQAQKISIQLNDGREFDAKLIGSDDQSDIALLQIQNPSKLTQIAIADSDKLRVGDFAVAVGNPFGLGQTATSGIVSALGRSGLNLEGLENFIQTDASINRGNSGGALLNLNGELIGINTAILAPGGGSVGIGFAIPSNMARTLAQQLIDFGEIKRGLLGIKGTEMSADIAKAFNLDVQRGAFVSEVLPGSGSAKAGVKTGDIITSLNGKPLNSFAELRSRIATTEPGTKVKLGLLRNGKPLEVEVTLDTSTSSSASAEMITPALEGATLSDGQLKDGGKGIKIDEVVKGSPAAQAGLQKDDVIIGVNRDRVNSIAEMRKVLAAKPAIIALQIVRGNESIYLLMR

SEQ ID NO: 4186 - DNA, 1446 bp, Xylella fastidiosa 9a5c
  CDS (1)..(1446): transl_table=11
atgcgaccgctacctactttactgacgctatctatcgctgccgcattcggcggttttgccgccactgggatgaatgcttggcttgacaaccgggccgaagcggcatccaacaccaatgccatctcaccaatatcatcactgccaacgggcacggtgcctcaaaccacggctgccaaccagccgctaccatcgttagcacccatgctgcaacaagtgatgccagcagtggtcagcatcaacagtaaacaagtggtacgggtgcgcaatccatttttcgacgacccgatcctacgtcggctattcccagagatcccccaagaacgcattaatgagtcgctcggatctggggtgatcatcgacgcgcgcaatggctacgtacttaccaatcatcacgtgatcgaaaatgccgacgccgtgcaggtgacattagcagatgggcgcagcttcaaggccgagttcctcggttctgacgcagacaccgacatcgccttgatccggatcaaagcaaataaactgaccgaaatcaaactcgcagacagtaacaaattacgcgtgggcgacttcgtcgtagccattggtaacccgttcggctttacccaaacggtgacctcaggcatcgtttcggcggtaggtcgcagtggcatcctcggcctgggttaccaaaacttcatccagaccgacgcatcgatcaacccgggtaactcaggcggcgcactggtgaatcttcatggccagttggttggcatcaacacggccagcttcaacccacagggcagcatggctggcaacatcggcttaggcctggcgattccttcgaatctagcgcgcaacgtcgtcgagcaattggtcacgaaaggcgttgtggtacgcgggacaatcggcgtacaaacacagaatattgatgcacgaatggcacgaagcttaggcctgagtaatccacacggcgcattagtgacgcgcgtattacccaattccgctggtgccacagccggactgcaaccaggtgatgtgatcctggcagccaatgaccaaagggtggacaacgcggaaacattgcacaactacgaaggactacagcccgtcggtagctcagtaacactggaagtacaccgtggcggcaagccactcaaaatacgcctcacacttaaagaattgccacgcgcaatcgccggagaaacgctggattcacgactgtcgggcgccatcttcgttgacctgcccgagtccctccgtcaatcgggagtcggtggagtcatggtcaacaaagtcaaacacggcagccgcgctgcggccaatgggttggtagccggagatgtcatcattgccgcatccatcggtggattctctgatctggcgagctggcgggcaagcttttcccacccaccacaacggctgatactgcgtgtgctacgtgataacacccagtacgatgcgctgatgcgctga

SEQ ID NO: 4187 - protein, 481 aa, Xylella fastidiosa 9a5c
MRPLPTLLTLSIAAAFGGFAATGMNAWLDNRAEAASNTNAISPISSLPTGTVPQTTAANQPLPSLAPMLQQVMPAVVSINSKQVVRVRNPFFDDPILRRLFPEIPQERINESLGSGVIIDARNGYVLTNHHVIENADAVQVTLADGRSFKAEFLGSDADTDIALIRIKANKLTEIKLADSNKLRVGDFVVAIGNPFGFTQTVTSGIVSAVGRSGILGLGYQNFIQTDASINPGNSGGALVNLHGQLVGINTASFNPQGSMAGNIGLGLAIPSNLARNVVEQLVTKGVVVRGTIGVQTQNIDARMARSLGLSNPHGALVTRVLPNSAGATAGLQPGDVILAANDQRVDNAETLHNYEGLQPVGSSVTLEVHRGGKPLKIRLTLKELPRAIAGETLDSRLSGAIFVDLPESLRQSGVGGVMVNKVKHGSRAAANGLVAGDVIIAASIGGFSDLASWRASFSHPPQRLILRVLRDNTQYDALMR

SEQ ID NO: 4188 - DNA, 1572 bp, Agrobacterium tumefaciens str. C58
  CDS (1)..(1572): transl_table=11
atgtctcattcgcaaaacggccattcctcgctgaagacggcctcgctgaagacggccctgaaggccacgaccgttggcggcctcgcggcgctgatgctgtcgaccggtatcgccgcaccgatcctccactcctttgctgcccccgtcgaagtgaccgcaccgcaggttccgagcttcgccaatgtggttgatgccgtctcgcccgccgtcgtttccgttcgcgtgcagtcgaacgtgcagccggcttccgacgattccagcaacttctccttcaatttcggcggccgcggcctcgaccagctgccggatgatcacccgctgaagcgtttcttcaaggaattcggcggccagaaccaggatcgctccgaccgtggtccgaaccgccaccgtgacggcaagggtccgctgcgcccggtcgcgcaaggctccggcttcttcatctccgaagacggttatgtcgtcaccaacaatcacgtcgttgacgacggttccgcctatacggtcgtgatgaatgacggtaccgaactcgaagccaagcttgtcggccgcgatccgcgtaccgatctggcgctgctgaaggtcgatgtgaaccgcaagttcacctatgtgaaattcgccgatgacaccaagattcgcgtcggtgactgggtcgttgccgtcggtaaccccttcggcctcggcggtacggtgacgtcaggtatcatttcggcccgcggccgtgacatcggctcaggcccctatgacgactatctgcagatcgacgctgccgtgaaccgtggtaactcgggtggtcccgccttcaaccttaacggtgaagtggtgggcatcaacaccgccatcttctcgccctccggcggcaatgtcggtatcgccttcgccatcccgtcctcggtcgccaaggatgtgatcgccgacctgcaaaaggacggcaaggtcgaacgcggctggctcggcgtgcagatccagcccgtcagcaaggatatcgccgaatcgctcggccttgccgaagccaagggcgcgctggtcgtttcgccgcagtccggttctccgggcgacaaggccggcatcaagcagggtgacatcatcaccgccgtcaacggcgatccggtcaaggatgcccgcgatctgtcgcgccgcatcggcggcatggcgcccaacagcaaggttgaaatctcgctgtggcgtggcggcaagtcgcagtccgtgacggtgacgctcggtgatctcaccagcgatgaagcctccaaggcgacgccaagccagaacgatgacaagggcggcagccagtcctccagcgagaaggtgctgtccagcctcggcctgacggtttcgccttccgatgacggcaacggccttgccatcaccgatgtcgaccccgatagcgacgccgctgcccggggcctgaagacgggcgagaagatcacctcggtcaacaaccagcaggtggcttccgcagctgatatcgagaagatcctcgagcaggccaagaaggacggacgttccaaggcgctgttccagatccagacggatgacggcagccgcttcatcgcgctggatatcgaccagggttga

SEQ ID NO: 4189 - protein, 523 aa, Agrobacterium tumefaciens str. C58
MSHSQNGHSSLKTASLKTALKATTVGGLAALMLSTGIAAPILHSFAAPVEVTAPQVPSFANVVDAVSPAVVSVRVQSNVQPASDDSSNFSFNFGGRGLDQLPDDHPLKRFFKEFGGQNQDRSDRGPNRHRDGKGPLRPVAQGSGFFISEDGYVVTNNHVVDDGSAYTVVMNDGTELEAKLVGRDPRTDLALLKVDVNRKFTYVKFADDTKIRVGDWVVAVGNPFGLGGTVTSGIISARGRDIGSGPYDDYLQIDAAVNRGNSGGPAFNLNGEVVGINTAIFSPSGGNVGIAFAIPSSVAKDVIADLQKDGKVERGWLGVQIQPVSKDIAESLGLAEAKGALVVSPQSGSPGDKAGIKQGDIITAVNGDPVKDARDLSRRIGGMAPNSKVEISLWRGGKSQSVTVTLGDLTSDEASKATPSQNDDKGGSQSSSEKVLSSLGLTVSPSDDGNGLAITDVDPDSDAAARGLKTGEKITSVNNQQVASAADIEKILEQAKKDGRSKALFQIQTDDGSRFIALDIDQG

SEQ ID NO: 4190 - DNA, 1482 bp, Agrobacterium tumefaciens str. C58
  CDS (1)..(1482): transl_table=11
gtggcgggcagcctttcggcgccggttgcggcaagagcgcagagccatgggccggaatcggtggctgatcttgccgagccgctgctcgatgcggtggtgaatatttccacgtcccagaacgtcaagaccgagggcaagggtccagttccgccgaagctgccggaaggttcgcccttccaggagttcttcaaggattatttcgacagccagaagccggaaggcggcgaaaaggtcaattcgctggggtcgggtttcgtgatcgatccggctggctatgtcgtgaccaacaaccacgtcatcgagggtgctgatgccatcgaggtgattttcccgaatggctcgaagctcaaggcgacgctggtcggtaccgataccaagaccgacctttcggtcctgaaggtggagccgaaaacaccgctgaaggccgtgaagttcggcgattcgcgcagcatgcgcatcggcgactgggtgatggctgtcggcaatccgttcgggcttggcggatcgctgaccgtgggcgtcatttccgcgcgcggccgcaatatcaatgccggcccctatgacaatttcatccagacggatgcggccatcaacaagggtaactccggtggcccgctcttcaacatgaagggtgaggtgatcggcatcaatacggcgatcatttcgccgagcggcggttcgatcggtattggtttcgccgtaccgacggagcttgcccagaatatcgtgcagcagctcatcgaattcggcgagacccgccgcggctggctcggcgttcgcgttcagcctgttactgatgatgtggctgcgagcctcggcatggacagcgccaagggcgcgctgatatcaggcgtggccaagggcggcccggtggagaacggcccgatccaggcgggtgatgtcgtgctgaagttcgacggcaaggatatcaatgaaatgcgcgacctcttgcgtatcgtggcggaaagccctgtcggcaaggaagtcgatgttgtcgtttatcgcgacggcaaggaagagaccgtcaaggtcaagctcgggcaattgcaggatacgaccgacgagaaggcctcgaccgacgacccgcagggtgaagacggtgatggcagcatggtcgcccccgacgataaagacggtggcgacgatcaggcgcaggaccagacacctgaagtgcgcgaagcaccgcagaccgtgctcggcatgaatctcgtggtgctgagcaatgagctgcgcacggaaaagggcattgccgaaagcgtggaaggcgtgcttgtcgcaagcgtcgatcccggttctcccgccgaacagaagggcatgaaggccggcgacgtcatcgtcgaggtcgggcaggatttcatggaagttcctggcgacgtgctggtacgtgtgaacggcctgaagtccgaaggccgcaagaacgcgcatatgatggtggcggatgctcagggcaatctgcgcgtggtggcgttgccgctggaataa

SEQ ID NO: 4191 - protein, 493 aa, Agrobacterium tumefaciens str. C58
MAGSLSAPVAARAQSHGPESVADLAEPLLDAVVNISTSQNVKTEGKGPVPPKLPEGSPFQEFFKDYFDSQKPEGGEKVNSLGSGFVIDPAGYVVTNNHVIEGADAIEVIFPNGSKLKATLVGTDTKTDLSVLKVEPKTPLKAVKFGDSRSMRIGDWVMAVGNPFGLGGSLTVGVISARGRNINAGPYDNFIQTDAAINKGNSGGPLFNMKGEVIGINTAIISPSGGSIGIGFAVPTELAQNIVQQLIEFGETRRGWLGVRVQPVTDDVAASLGMDSAKGALISGVAKGGPVENGPIQAGDVVLKFDGKDINEMRDLLRIVAESPVGKEVDVVVYRDGKEETVKVKLGQLQDTTDEKASTDDPQGEDGDGSMVAPDDKDGGDDQAQDQTPEVREAPQTVLGMNLVVLSNELRTEKGIAESVEGVLVASVDPGSPAEQKGMKAGDVIVEVGQDFMEVPGDVLVRVNGLKSEGRKNAHMMVADAQGNLRVVALPLE

SEQ ID NO: 4192 - DNA, 1374 bp, Yersinia pestis CO92
  CDS (1)..(1374): transl_table=11
atgaagaaaacatcattacttcttagtgcgctagcaataagcgtcggcttaggtctcgcttctgttcctatggtgagtgcagcagcactgcctgcggcggtcgccggacaaacgttacctagcctggcaccaatgctggaaaaagtattacccgccgttgtcagtgttcatgtctctgggagccaggcacagcaacaacgcttgccagaagagtttaaattcttctttggcccgaatgcaccatcaggaaaagagagcagccggccattcgaaggcttaggatcaggcgttattattaacgctgagaagggctacatcctgaccaacaatcacgtcatcaataatgccgataaaattcgtgttcagctgaatgatggtcgtgaatacgatgcaaaattgttgggtcgtgatgaacaaaccgacatcgctttactgcaattaacggatgctaaaaatctgactgcgatcaaaattgcagattccgataacctgcgggtgggggattttgctgtcgccgtaggtaacccgtttggtctagggcaaaccgcgacgtcaggtattatttcagcactgggtcgtagtggcttgaatctggaagggctggaaaactttatccagaccgatgcctcaatcaaccgtggtaattctggcggtgctctggtgaatctggatggggaactgatcggaattaataccgccatccttgcgccaggtggcggtaatatcggtatcggcttcgctatcccaagtaacatggcacaaaacctcagccagcagttgatcgagtttggcgaagtgaaacgtgggctgctcggtatccgtggtagtgagatgacggctgacattgcgaaagcctttaatattgatgctcagcgtggggcttttgtcagtgaagtgctgccaaaatcagcggcagcgaaagccgggatcaaaccaggtgatgtgttgatttccgttgatgggaaaaagattagcagctttgctgaattgcgcgccaaagtcgggacaacggggccaggcaaaaccattaaaattggtttactgcgcgaagggaaaccactggaagtatcggtgacgctggataacagtagctcaacatccaccagcgctgaaaatctatcgccatcattacagggcgcatccctgagtaacggtgagctcaaagacggtagtaaggggatcaaagttgatagcgtcactaaaggttcgccagccgcacaatctggcttacaaaaagatgatgtgattattgccgtaaaccgcgaacgggttaaggatattgctgagttgcgtaaagccatcgaagccaaacctgccgtgattgcactgaatatcgtgcgtggtgaagataatatttacttattaatccgctaa

SEQ ID NO: 4193 - protein, 457 aa, Yersinia pestis CO92
MKKTSLLLSALAISVGLGLASVPMVSAAALPAAVAGQTLPSLAPMLEKVLPAVVSVHVSGSQAQQQRLPEEFKFFFGPNAPSGKESSRPFEGLGSGVIINAEKGYILTNNHVINNADKIRVQLNDGREYDAKLLGRDEQTDIALLQLTDAKNLTAIKIADSDNLRVGDFAVAVGNPFGLGQTATSGIISALGRSGLNLEGLENFIQTDASINRGNSGGALVNLDGELIGINTAILAPGGGNIGIGFAIPSNMAQNLSQQLIEFGEVKRGLLGIRGSEMTADIAKAFNIDAQRGAFVSEVLPKSAAAKAGIKPGDVLISVDGKKISSFAELRAKVGTTGPGKTIKIGLLREGKPLEVSVTLDNSSSTSTSAENLSPSLQGASLSNGELKDGSKGIKVDSVTKGSPAAQSGLQKDDVIIAVNRERVKDIAELRKAIEAKPAVIALNIVRGEDNIYLLIR

SEQ ID NO: 4194 - DNA, 1368 bp, Salmonella typhimurium LT2
  CDS (1)..(1368): transl_table=11
atgaaaaaacacacccagctgttaagtgcattagcgttaagtgtcgggttaactctttcggcgccgtttccagcccttgcatcgataccaggccaggtgccaggccaggcgacgctgccaagccttgcccctatgctggagaaagtgctgcctgctgtcgtcagcgtaaaagtcgagggaaccgccgcccagagccaaaaagtgccggaggagtttaaaaaattctttggcgaggatctgccagaccagccgtcccagccgtttgaaggactcggttcgggggtgattatcgatgccgcgaaaggctatgtattaaccaataatcatgtgattaatcaggcacagaagatcagcattcaactgaatgacggacgcgaattcgacgcgaagcagatcggcggcgacgaccagagcgatatcgctctgttacaaattcagaatcccagcaagttaacgcaaattgccatcgccgattccgacaaactccgcgtcggcgatttcgccgtggcggtcggtaatccgtttggtcttggacaaaccgccacctccgggattatttcagcgctgggacgcagcgggcttaatctggaagggcttgagaactttattcaaaccgatgcctctattaaccgcggcaactccggcggcgcgctgcttaacctgaacggcgagctgatcgggattaataccgcgatcctcgcgccagggggcgggagcatcggcattggctttgctattccttccaatatggcgcagacgctggcgcagcagttgattcagttcggcgaaatcaaacgcggattgctgggaattaaaggcactgaaatgaccgctgatatcgccaaggcattcaaactgaacgttcagcgtggcgcttttgtcagcgaggttttacccaattcaggttcggcgaaggccggggtgaaatccggagacgtgattatcagtcttaacggtaagcagctgaatagctttgccgaactgcgttcacgtatcgccaccaccgaaccgggcacgaaagtgaagctgggcctgctgcgcgatggtaagccgctggaggtggaagtcacgctggattccaatacctcttcttccgccagcgccgaaatgatcgccccggcgttgcaaggcgcaacgttgagcgacggccaactgaaagacgggacgaaaggcgttaaggttgatagcgtcgaaaaaagcagtcctgccgcgcaggccggtttgcaaaaagatgatgttatcatcggcgttaatcgcgatcgcatcagttctatcgccgaaatgcgcaaagtgatggcggcaaaaccgtccatcattgctcttcaggtagtacgcggcaacgagaacatttatctattgctgcgctaa

SEQ ID NO: 4195 - protein, 455 aa, Salmonella typhimurium LT2
MKKHTQLLSALALSVGLTLSAPFPALASIPGQVPGQATLPSLAPMLEKVLPAVVSVKVEGTAAQSQKVPEEFKKFFGEDLPDQPSQPFEGLGSGVIIDAAKGYVLTNNHVINQAQKISIQLNDGREFDAKQIGGDDQSDIALLQIQNPSKLTQIAIADSDKLRVGDFAVAVGNPFGLGQTATSGIISALGRSGLNLEGLENFIQTDASINRGNSGGALLNLNGELIGINTAILAPGGGSIGIGFAIPSNMAQTLAQQLIQFGEIKRGLLGIKGTEMTADIAKAFKLNVQRGAFVSEVLPNSGSAKAGVKSGDVIISLNGKQLNSFAELRSRIATTEPGTKVKLGLLRDGKPLEVEVTLDSNTSSSASAEMIAPALQGATLSDGQLKDGTKGVKVDSVEKSSPAAQAGLQKDDVIIGVNRDRISSIAEMRKVMAAKPSIIALQVVRGNENIYLLLR

SEQ ID NO: 4196 - DNA, 1407 bp, Agrobacterium tumefaciens str. C58
  CDS (1)..(1407): transl_table=11
atgcgaggcgtgttgaagtatctgtccaccggctttcttgctgcgctcgttctcctgcccgtgggcgcaagagcgcaggacaacaagaccgtgccggcaagccacacggaaatgcagctctccttcgcgccgctggtgaagcgcaccgcaggtgctgtggtgaatgtctatgccgagcgcgtcgtgcagcggcgtgtttccccttttgccggtgatcccttcttcgagcagtttttcggccagcaaatgccgaaccgtacggaaaagcagtcatcgctcggttcgggcgtgatcgtaacggcgggcggcctcgtggtgacgaacaatcacgtcatcgacggcgctgatgacatcaaggtggcgctggcggatggtcgcgagttttcctccaaggtgctgatgaaggacgatcgggttgatctcgccgtgttgcagattgacgccaaggagcaattccccgtgctgtcgctcggcgattccgacaagatcgaggttggtgatctggtgctcgccatcggcaaccccttcggggtcggccagacggtgacgagcggcatcgtctccggtctagcgcgcaaccaggtgacgcagggtgatttcggcttcttcatccagaccgacgcctccatcaaccccggcaattccggcggtgcgctgatgaacatggcgggcgagctggtcggcatcaataccgcgatcttttccaagggcggcgggtcgaacggcatcggttttgccattcccgccaatctggttcgggttttcgtagcggccgcggagcgcggcgacgctaacttccagaggccctatatcggtgcaacgttcgatccggtgacgtcagatgtcgcggaagcgctcggcttgcatcgcgcgcgcggcgcgctcgtcgtcggcgtcaccaagggtggtccggcggagaaggctggtatcgagcccggacaggtggtgactgcggtcaatggcctggaagtggagcatcccgatgcgctgggttatcgcctgacgacggccggcatcggcaaatcggccgaattgacggtggtggaaaagggcaaagaaaagaagctgaccatcgctctcaatacggcacccgaaaccgcgccgcgtgacgagcggctgctcgaaggccgcaatcccttcgcaggtgctaccgtcgccaacctctcgccgaagcttgcggatgaattgcgcatgccttcgcaggtgacgggcgtcgtcatcaccgatgtgaagcgtggctcaccggcctatcgcgtcggtttccagccgaaggatgtcatcctgtcgctgaatggtgcggatatcggctccaccgctgcggttgaaaaggcgctggacgacaatcccggcttctggcgggtggaaatcctgcgcgacgggcagcgtatccggcagttcctgcgatga

SEQ ID NO: 4197 - protein, 468 aa, Agrobacterium tumefaciens str. C58
MRGVLKYLSTGFLAALVLLPVGARAQDNKTVPASHTEMQLSFAPLVKRTAGAVVNVYAERVVQRRVSPFAGDPFFEQFFGQQMPNRTEKQSSLGSGVIVTAGGLVVTNNHVIDGADDIKVALADGREFSSKVLMKDDRVDLAVLQIDAKEQFPVLSLGDSDKIEVGDLVLAIGNPFGVGQTVTSGIVSGLARNQVTQGDFGFFIQTDASINPGNSGGALMNMAGELVGINTAIFSKGGGSNGIGFAIPANLVRVFVAAAERGDANFQRPYIGATFDPVTSDVAEALGLHRARGALVVGVTKGGPAEKAGIEPGQVVTAVNGLEVEHPDALGYRLTTAGIGKSAELTVVEKGKEKKLTIALNTAPETAPRDERLLEGRNPFAGATVANLSPKLADELRMPSQVTGVVITDVKRGSPAYRVGFQPKDVILSLNGADIGSTAAVEKALDDNPGFWRVEILRDGQRIRQFLR

SEQ ID NO: 4198 - DNA, 1545 bp, Agrobacterium tumefaciens str. C58
  CDS (1)..(1545): transl_table=11
atggccgtgacccttctttcgccttttcgcagcagcattgccgcagttgcgggcatcgcgcttgtggcgggcagcctttcggcgccggttgcggcaagagcgcagagccatgggccggaatcggtggctgatcttgccgagccgctgctcgatgcggtggtgaatatttccacgtcccagaacgtcaagaccgagggcaagggtccagttccgccgaagctgccggaaggttcgcccttccaggagttcttcaaggattatttcgacagccagaagccggaaggcggcgaaaaggtcaattcgctggggtcgggtttcgtgatcgatccggctggctatgtcgtgaccaacaaccacgtcatcgagggtgctgatgccatcgaggtgattttcccgaatggctcgaagctcaaggcgacgctggtcggtaccgataccaagaccgacctttcggtcctgaaggtggagccgaaaacaccgctgaaggccgtgaagttcggcgattcgcgcagcatgcgcatcggcgactgggtgatggctgtcggcaatccgttcgggcttggcggatcgctgaccgtgggcgtcatttccgcgcgcggccgcaatatcaatgccggcccctatgacaatttcatccagacggatgcggccatcaacaagggtaactccggtggcccgctcttcaacatgaagggtgaggtgatcggcatcaatacggcgatcatttcgccgagcggcggttcgatcggtattggtttcgccgtaccgacggagcttgcccagaatatcgtgcagcagctcatcgaattcggcgagacccgccgcggctggctcggcgttcgcgttcagcctgttactgatgatgtggctgcgagcctcggcatggacagcgccaagggcgcgctgatatcaggcgtggccaagggcggcccggtggagaacggcccgatccaggcgggtgatgtcgtgctgaagttcgacggcaaggatatcaatgaaatgcgcgacctcttgcgtatcgtggcggaaagccctgtcggcaaggaagtcgatgttgtcgtttatcgcgacggcaaggaagagaccgtcaaggtcaagctcgggcaattgcaggatacgaccgacgagaaggcctcgaccgacgacccgcagggtgaagacggtgatggcagcatggtcgcccccgacgataaagacggtggcgacgatcaggcgcaggaccagacacctgaagtgcgcgaagcaccgcagaccgtgctcggcatgaatctcgtggtgctgagcaatgagctgcgcacggaaaagggcattgccgaaagcgtggaaggcgtgcttgtcgcaagcgtcgatcccggttctcccgccgaacagaagggcatgaaggccggcgacgtcatcgtcgaggtcgggcaggatttcatggaagttcctggcgacgtgctggtacgtgtgaacggcctgaagtccgaaggccgcaagaacgcgcatatgatggtggcggatgctcagggcaatctgcgcgtggtggcgttgccgctggaataa

SEQ ID NO: 4199 - protein, 514 aa, Agrobacterium tumefaciens str. C58
MAVTLLSPFRSSIAAVAGIALVAGSLSAPVAARAQSHGPESVADLAEPLLDAVVNISTSQNVKTEGKGPVPPKLPEGSPFQEFFKDYFDSQKPEGGEKVNSLGSGFVIDPAGYVVTNNHVIEGADAIEVIFPNGSKLKATLVGTDTKTDLSVLKVEPKTPLKAVKFGDSRSMRIGDWVMAVGNPFGLGGSLTVGVISARGRNINAGPYDNFIQTDAAINKGNSGGPLFNMKGEVIGINTAIISPSGGSIGIGFAVPTELAQNIVQQLIEFGETRRGWLGVRVQPVTDDVAASLGMDSAKGALISGVAKGGPVENGPIQAGDVVLKFDGKDINEMRDLLRIVAESPVGKEVDVVVYRDGKEETVKVKLGQLQDTTDEKASTDDPQGEDGDGSMVAPDDKDGGDDQAQDQTPEVREAPQTVLGMNLVVLSNELRTEKGIAESVEGVLVASVDPGSPAEQKGMKAGDVIVEVGQDFMEVPGDVLVRVNGLKSEGRKNAHMMVADAQGNLRVVALPLE

SEQ ID NO: 4200 - DNA, 1437 bp, Xanthomonas campestris pv. campestris str. ATCC 33913
  CDS (1)..(1437): transl_table=11
atgcgaccgctgcccaccctgctgtccctttcgctggccgccgcgttcggcggtttcgctgccagcggcatcaatgcctggctggacaaccgcgccgaagcggcgcccactgccggtgcggcgtttacgctgcccaccgccgccacgttgccggcggcggtcgccgggcagccggtgccctcactggcgccgatgctgcagcaggccatgccggcagtggtgagcgtcaacaccaagcaggtggtgcgggtacgcaacccgttcttcaatgatccgatcctgcgccggctgtttccggaaattccgcaggaccgcatcaacgagtcgctgggctcgggggtgatcatcgatgcgcaaaaaggctatgtgctgaccaaccaccacgtcatcgaaaacgccgacgacgtacaggtgacgctcggcgacgggcgcacggtcaaggccgatttcattggctccgatgccgataccgacatcgcgctgatccgcatcaaggccgacaacctcaccgacatcaaactggctgacagcaacgccttgcgcgtcggcgactttgtggtggcgatcggtaacccgttcggcttcacccagacggtcacctcgggcatcgtgtcggcggtgggccgcagcggcatccgtgggctgggctaccagaacttcatccagaccgatgcgtcgatcaaccccggcaattccggcggtgcgctggtcaatctgcagggccagttggtcggcatcaataccgccagcttcaacccgcaaggcagcatggccggcaacatcggcctgggcctggcgatcccgtccaacctggcgcgcaacgtggtcgagcaattggtgaccaagggcgtggtggtgcgcggcacgcttggcctggaaacccagaacctgacccagcaaatgctgcagggcctgggtgtggattcgctgcgcggtgcgctggtgacgcgcgtgctgccgggttcggccgcggcagcggctggcgtgcaacctggtgatgtgatcgtggcagccaacgatcaacgcgtggacagcgcgcaggcgctgcacaactacgaaggcctgcaggcagtaggcagtgcggtcacgctggacatccgccgcgacggcaagccgctcaagctcaaggccaccttgaaggaacaggaccgcacagtcaccggcgacatgctcgacccgcgcctgggcggcgccaccttcgtggatctgcccgaatcgctgcgccagtccggtgtcaccggggtcatggtgagcgaggtcaaacgcggcgggcgcgcggctgccaacgggctggtgagcggcgatgtgatcgtggccagcagcgtgggcgagttcgccgacctggccagctggcgggccaatttccagcgcaagccgcaacagctggtgctacgcatcctgcgcggaaacgcccagtacgacgcgctcatgcgttga

SEQ ID NO: 4201 - protein, 478 aa, Xanthomonas campestris pv. campestris str. ATCC 33913
MRPLPTLLSLSLAAAFGGFAASGINAWLDNRAEAAPTAGAAFTLPTAATLPAAVAGQPVPSLAPMLQQAMPAVVSVNTKQVVRVRNPFFNDPILRRLFPEIPQDRINESLGSGVIIDAQKGYVLTNHHVIENADDVQVTLGDGRTVKADFIGSDADTDIALIRIKADNLTDIKLADSNALRVGDFVVAIGNPFGFTQTVTSGIVSAVGRSGIRGLGYQNFIQTDASINPGNSGGALVNLQGQLVGINTASFNPQGSMAGNIGLGLAIPSNLARNVVEQLVTKGVVVRGTLGLETQNLTQQMLQGLGVDSLRGALVTRVLPGSAAAAAGVQPGDVIVAANDQRVDSAQALHNYEGLQAVGSAVTLDIRRDGKPLKLKATLKEQDRTVTGDMLDPRLGGATFVDLPESLRQSGVTGVMVSEVKRGGRAAANGLVSGDVIVASSVGEFADLASWRANFQRKPQQLVLRILRGNAQYDALMR

SEQ ID NO: 4202 - DNA, 1437 bp, Xanthomonas axonopodis pv. citri str. 306
  CDS (1)..(1437): transl_table=11
atgcgaccgctgcctaccctgctgactctttcgctggccgctgccttcggcggctttgccgccaccggcatcaacgcctggctcgacaatcgcgccgaagccacaccccccagcaacgccgcctttaccctgccgacggccgccgcattgccggcggcggtggccggccaacctgtgccgtcgctggcgccgatgctgcagcaggccatgcccgcggtggtgagcgtgaacaccaaacaggtggtgcgcgtccgcaacccgttcttcaacgacccgatcctgcgccggctgtttccgcaggtgccgcaggaccgcatcaacgagtcgctgggttcgggcgtgatcatcgatgcgcaaaaagggtatgtgctgaccaatcaccacgtcatcgaaaacgccgacgacgtgcaggtgacgctcggcgacggacgcacggtcaaggccgagttcatcggctccgatgccgataccgatattgcgctgatccgcatcaaggccgacaacctcaccgatatcaaactggccgacagcaacgcgctacgcgtgggcgattttgtggtggccatcggcaacccgttcggcttcacccagaccgtcacctccggcatcgtctcggcagtggggcgcagcgggattcgcggcttgggctaccagaacttcatccagaccgatgcctcgatcaaccccggcaactcgggcggcgcgctggtcaacctgcaaggccagttggttggcatcaacaccgccagcttcaatccgcagggcagcatggccggcaatatcggcctggggctggcgattccgtccaacctggcgcgcaatgtcgtcgagcaattggtgaccaagggcgtggtggtgcgcggcacgctcggcctggagacccagaacctcacccaacagatgctgcagggcctgggggtggattcgttgcgcggcgcattggtgacacgggtgttgccgggctccgcagcggcggcggcaggcgtgcaaccgggcgatgtcgtggtggcggccaacgaccagcgcgtggacagcgccgaagcgctgcacaactacgaaggcctgcaggcggttggcagtgcggtgaccctggatatccgtcgcgatggcaagccgctcaaactcaaggccacgctgagagagcaggaccgcgccatcaccggcgacatgctggacccgcgtctgaccggcgcgaccttcgtcgatctccccgaatcgctgcgtcagtcgggcatcaccggggtgatggtgagcgaggtcaaacgcggcggtcgcgctgccgccaacggcctggtcgccggcgatgtgatcgtggccagcagcgtgggcgagttcgccgaccttgccagctggcgggccaatttccaacgtaaaccgcagcagcttgtcgtgcgtatcctgcgtggcaacgcgcagtacgacgcgctgatgcgttga

SEQ ID NO: 4203 - protein, 478 aa, Xanthomonas axonopodis pv. citri str. 306
MRPLPTLLTLSLAAAFGGFAATGINAWLDNRAEATPPSNAAFTLPTAAALPAAVAGQPVPSLAPMLQQAMPAVVSVNTKQVVRVRNPFFNDPILRRLFPQVPQDRINESLGSGVIIDAQKGYVLTNHHVIENADDVQVTLGDGRTVKAEFIGSDADTDIALIRIKADNLTDIKLADSNALRVGDFVVAIGNPFGFTQTVTSGIVSAVGRSGIRGLGYQNFIQTDASINPGNSGGALVNLQGQLVGINTASFNPQGSMAGNIGLGLAIPSNLARNVVEQLVTKGVVVRGTLGLETQNLTQQMLQGLGVDSLRGALVTRVLPGSAAAAAGVQPGDVVVAANDQRVDSAEALHNYEGLQAVGSAVTLDIRRDGKPLKLKATLREQDRAITGDMLDPRLTGATFVDLPESLRQSGITGVMVSEVKRGGRAAANGLVAGDVIVASSVGEFADLASWRANFQRKPQQLVVRILRGNAQYDALMR

SEQ ID NO: 4204 - DNA, 1356 bp, Rhizobium etli
  CDS (1)..(1356): transl_table=11
atgtcgcgttcgttgctcgccttggcggcgctcttcatcgcaggtgagagcctattgtcggctccagccgttgcagacagcctgtcgctcgcgccgatgctccagcgtgtcgtgccgagcgtcgtcagcatctcggtgcagggcagggaactcgacgacgcggatgcaacgcttgctgatcccttctacagaaagttcttcggactacctgacgacgctgcgccggcagagcacagcttccaatcggccggatcgggtgtcgtcatcgacgaggtccacggctacatcgtcaccaaccagcatgtcatagcaagcgcctcaaaaatcgaggtggcgctctccgacggccgacgcttccaagcgaaacttgtcggcgccgatcccgagacggatgtcgctgtcgttcaaattccacctgatcatcttgttcaagccgagtttggaagcgcgtcctcgcttcacgtcggcgacgtcgtcgtggcgatcgggaatcccttcggcctgggccagaccgcgacgatgggcatcgtaagcgcgcttgggcgccgtgccgtgggatcggaggggtacgaaggattcattcagacggacgcgtcgaccaatcccggcaattcgggcggcgcgcttgtaagcgaggacggcgtcgtggtcgggatcaatagcgcgatcatcggccccgccggaggaagcatcggcatcggttttgcggtcccagccgagactgtcggcatcgtgatgcggcagctcatcctgaccggcaagttggtacgcggcgaggtgggaattttaacgcaggacctgacgcccggtctcgcaaaggcgttcggcatcgatgaaggggcgggcgcgctggtcagcgaagtccttccgggttcaccggcggcaaatgcaggaattcagccgggcgacgtcattcggatggtcgacggaaggacggtgcgcggcgcgtccgacgttcgaaggcttgtgggatcgctaccgttgcagtccaagccgtccttccagatcgaccgcgcgagccgaaggatagaagcatttcccgtggtgtccgacgcaccggttgccgaaccggctgctccgcgtaccattcatatcggccgcggccctctcgccgacgccgagatggcgaactctcccgatggtcccggcgcccgcgtcgtcgtcgtcgccgagggttcggtcgcggcacaggccggcctgcagccggacgacgttatcgtcgctctcgaccagcagccggtgacggacgtcgggcaactcctctcaatactcgtgaaggagcatgcccgtgctctcatcaccgtcgtgaggaacggccaccgcctcttcgtggccgctgacgtgcagacccagtag

SEQ ID NO: 4205 - protein, 451 aa, Rhizobium etli
MSRSLLALAALFIAGESLLSAPAVADSLSLAPMLQRVVPSVVSISVQGRELDDADATLADPFYRKFFGLPDDAAPAEHSFQSAGSGVVIDEVHGYIVTNQHVIASASKIEVALSDGRRFQAKLVGADPETDVAVVQIPPDHLVQAEFGSASSLHVGDVVVAIGNPFGLGQTATMGIVSALGRRAVGSEGYEGFIQTDASTNPGNSGGALVSEDGVVVGINSAIIGPAGGSIGIGFAVPAETVGIVMRQLILTGKLVRGEVGILTQDLTPGLAKAFGIDEGAGALVSEVLPGSPAANAGIQPGDVIRMVDGRTVRGASDVRRLVGSLPLQSKPSFQIDRASRRIEAFPVVSDAPVAEPAAPRTIHIGRGPLADAEMANSPDGPGARVVVVAEGSVAAQAGLQPDDVIVALDQQPVTDVGQLLSILVKEHARALITVVRNGHRLFVAADVQTQ

SEQ ID NO: 4206 - DNA, 1446 bp, Yersinia pestis KIM
  CDS (1)..(1446): transl_table=11
atgaaaaaaacaactttagtattaagtgcattggcattgagcattggtttcgccatgggcccggtttcttccgtcgttgcggcagagacggcagcatcgagtagccagcagctccctagcctggcgccaatgctagagaaagtaatgccttcagtggtcagtatcaacgttgaaggtagtgcgcctgtaagcagtgctggtgcacgcggtatgccaccacaattccagcagttttttggtgataactcgccattctgtcaggacggttcaccgttccaaggctcgccaatgtgtcaaggggatctgggcggactagggcagggaatgccaagtaagcgggaattccgttcgcttggttcaggtgtcattattgatgcgggcaaggggtatgtcgttaccaataaccacgtggtcgataatgcgaacaagatcagcgtaaaactgagcgatggccgcagttttgatgccaaggtgatcggtaaagatccacgtaccgatatcgcactgttacaactgaaagacgctaaaaatctgactgcgattaagattgccaattcggatcaactgcgtgtcggtgattataccgtcgctatcgggaacccgtatggcttgggtgaaaccgtgacatccggtattgtctctgctttagggcgcagtggtttgaatgtagaaaactatgaaaactttatccagactgatgcggcgattaaccgtggtaattccggcggcgcattaatcaacctgaacggtgagttgattggtattaacaccgctattctggcaccggatggcggtaacattggtattggctttgctatcccaagcaacatggtgaagaacctgacatcacagatggttgagtttggtcaggtaaaacgcggtgaactgggcattatggggaccgagctaaactctgaactggcaaaagccatgaaggttgatgcgcagaaaggtgcctttatcagccaggtcgtgcctaaatctgctgcggcaaaagcgggtatcaaagcgggcgatatcattgtcagtatgaatgggaaagccatcaatagttttgcagggttccgcgccgagatcggcacgttacctgttggcagcaaaatgaccttgggtctgctgcgtgatggcaaaccgatcaatgtggatgtcgtcctggagcagagcagccacagtcaggtggaatccggcaatctctacaccggtattgagggggctgaactgagtaacagcgacgttagcggcaagaaaggggtgaaagttgatagcgtaaaaccaggcactgctgcggcgcgtatcggcctgaaaaaaggtgatatcatcatggggattaaccagcaaccagtccagaacctaggtgagctgcggaaaatcctcgatgctaaaccaccggtattggcgttgaatattcaacgtggtgatacttcactctatttattgatgcagtaa

SEQ ID NO: 4207 - protein, 481 aa, Yersinia pestis KIM
MKKTTLVLSALALSIGFAMGPVSSVVAAETAASSSQQLPSLAPMLEKVMPSVVSINVEGSAPVSSAGARGMPPQFQQFFGDNSPFCQDGSPFQGSPMCQGDLGGLGQGMPSKREFRSLGSGVIIDAGKGYVVTNNHVVDNANKISVKLSDGRSFDAKVIGKDPRTDIALLQLKDAKNLTAIKIANSDQLRVGDYTVAIGNPYGLGETVTSGIVSALGRSGLNVENYENFIQTDAAINRGNSGGALINLNGELIGINTAILAPDGGNIGIGFAIPSNMVKNLTSQMVEFGQVKRGELGIMGTELNSELAKAMKVDAQKGAFISQVVPKSAAAKAGIKAGDIIVSMNGKAINSFAGFRAEIGTLPVGSKMTLGLLRDGKPINVDVVLEQSSHSQVESGNLYTGIEGAELSNSDVSGKKGVKVDSVKPGTAAARIGLKKGDIIMGINQQPVQNLGELRKILDAKPPVLALNIQRGDTSLYLLMQ

SEQ ID NO: 4208 - DNA, 1425 bp, Brucella suis 1330
  CDS (1)..(1425): transl_table=11
atgaattggcggtgtttgggatttgcaggcgtcgttctggcttttttcagcctggcggcggggcctgtggcggcgcaggatagccccgcaaccgccgtaagacagataccgctcagccggggggatatgcagctttccttcgcgccgctcgtcaaggaaacggcgcccgccgtggtaaatgtttatgcggcgcggcaggtacaggcgcgctcgccttttgagggcgaccccttcttcgagcagttctttggcagccagtttggcgcaagcaagccgcgtatccagcagtcgctcggttccggtgtgatcgttgatcgctccggtattattgtgacgaataatcacgtcatcaaggatgcagacgaaatcaaggtcgcgctttccgacgggcgtgagtttgaaagcaggatactgctgcgcgacgagacgaccgatctcgcggtgctgaagatcgaggcgaagcagcaattccctgtgcttgctctgggaaattccgacgaggttgaggtgggtgatctggtgctcgccatcggcaatccattcggtgtcggccagacggttacgagcggcatcgtatcggcgcaatcacgtacgcaggtcggcatttcagattttgatttcttcatccagacagatgccgccatcaaccccggtaattccggcggcgcacttatcgatatgcgcgggcgtctgatcggcatcaatacggcgatctattcgcggtcgggcggctcggtcggtatcggctttgccattccctccaacatggtgcgcgctgtcgtggatgccgccttgcagggcagcacgcgtttcgagcggccctatatcggtgcaactttccaggggatcacgcccgatctggctgaaagcctcggcatggaaaaaccttatggtgcgctgataacggcggtcgtcaaggatggcccggccgaaactgcgggcctgaaggttggcgacgtggttctgtccgttcaaggtgtgcgtgtcgataatcaggatgtgctcggctaccgtctttcgacggcagggatcggaaagacaatttccgtcgaagtcatgcgcaatggcaagaacctttcgcttccggtgaagcttaccaaggcgcccaaggtcaagcaggccgagccgaaggtcattgaaggtgataacccctttgacggggctgccgtaggggatctgacagcttcgacggcggcgaagctgcggttgaagcgaggccagcaaggggttgcggtgtttgatgtctattccggctcgccggcggcgcgtcttggcttgcgtcccggcgatattatccgcagcatcaacggcaatcagattcgcaccgttgacgatatgaccgccgtgcttgaggccggacgtggtctggcatggcggctggaaattgaacgcaacggcgctttgctgcgccagttcgtgcgctag

SEQ ID NO: 4209 - protein, 474 aa, Brucella suis 1330
MNWRCLGFAGVVLAFFSLAAGPVAAQDSPATAVRQIPLSRGDMQLSFAPLVKETAPAVVNVYAARQVQARSPFEGDPFFEQFFGSQFGASKPRIQQSLGSGVIVDRSGIIVTNNHVIKDADEIKVALSDGREFESRILLRDETTDLAVLKIEAKQQFPVLALGNSDEVEVGDLVLAIGNPFGVGQTVTSGIVSAQSRTQVGISDFDFFIQTDAAINPGNSGGALIDMRGRLIGINTAIYSRSGGSVGIGFAIPSNMVRAVVDAALQGSTRFERPYIGATFQGITPDLAESLGMEKPYGALITAVVKDGPAETAGLKVGDVVLSVQGVRVDNQDVLGYRLSTAGIGKTISVEVMRNGKNLSLPVKLTKAPKVKQAEPKVIEGDNPFDGAAVGDLTASTAAKLRLKRGQQGVAVFDVYSGSPAARLGLRPGDIIRSINGNQIRTVDDMTAVLEAGRGLAWRLEIERNGALLRQFVR

SEQ ID NO: 4210 - DNA, 1425 bp, Shigella flexneri 2a str. 301
  CDS (1)..(1425): transl_table=11
atgaaaaaaaacacattagcactgagtgcactggctctgagtttaggtttggcgttatctccgctctctgcaacggcggctgagacttcttcagcaacgacagcccagcagatgccaagccttgcaccgatgctcgaaaaggtgatgccttcagtggtcagcattaacgtagaaggtagcacaaccgttaatacgccgcgtatgccgcgtaatttccagcagttcttcggtgatgattctccgttctgccaggaaggttctccgttccagagctctccgttctgccaggggggccagggcggtaatggcggcggccagcaacagaaattcatggcgctgggttccggcgtcatcattgatgccgataaaggctatgtcgtcaccaacaaccacgttgttgataacgcgacggtgattaaagtccagctgagcgatggtcgtaagttcgacgcgaagatggttggcaaagatccgcgctctgatatcgcgctgatccaaatccagaacccgaaaaaactgaccgcaattaagatggcggattctgatgcactgcgcgtgggtgattacaccgtagcgattggtaacccgtttggtctgggcgagacggtaacttccgggattgtctctgcgctggggcgtagcggcctgaatgctgaaaactacgaaaacttcatccagaccgatgcagcgatcaaccgtggtaactccggtggtgcgctggttaacctgaacggcgaactgatcggtatcaacaccgcgatcctcgcaccggacggcggcaacatcggtatcggttttgctatcccgagtaacatggtgaaaaacctgacctcgcagatggtggaatacggccaggtgaaacgcggtgagctgggtattatggggactgagctgaattccgaactggcgaaagcgatgaaagttgacgcccagcgcggtgctttcgtaagccaggttctgcctaattcctccgctgcaaaagcgggcattaaagcgggtgatgtgatcacctcactgaacggtaagccgatcagcagctttgccgcactgcgtgctcaggtgggtactatgccggtgggcagcaaactgaccctgggcttactgcgcgacggtaagcaggttaacgtgaacctggaactgcagcagagcagccagaatcaggttgattccagctccatcttcaacggcattgaaggcgctgagatgagcaacaaaggcaaagatcagggcgtggtagtgaacaacgtgaagacgggcactccggctgcgcagatcggcctgaagaaaggtgatgtgattattggtgcgaaccagcaggcagtgaaaaacatcgctgaactgcgtaaagttctcgacagcaaaccgtctgtgctggcactgaacattcagcgcggcgacagcaccatctacctgttaatgcagtaa

SEQ ID NO: 4211 - protein, 474 aa, Shigella flexneri 2a str. 301
MKKNTLALSALALSLGLALSPLSATAAETSSATTAQQMPSLAPMLEKVMPSVVSINVEGSTTVNTPRMPRNFQQFFGDDSPFCQEGSPFQSSPFCQGGQGGNGGGQQQKFMALGSGVIIDADKGYVVTNNHVVDNATVIKVQLSDGRKFDAKMVGKDPRSDIALIQIQNPKKLTAIKMADSDALRVGDYTVAIGNPFGLGETVTSGIVSALGRSGLNAENYENFIQTDAAINRGNSGGALVNLNGELIGINTAILAPDGGNIGIGFAIPSNMVKNLTSQMVEYGQVKRGELGIMGTELNSELAKAMKVDAQRGAFVSQVLPNSSAAKAGIKAGDVITSLNGKPISSFAALRAQVGTMPVGSKLTLGLLRDGKQVNVNLELQQSSQNQVDSSSIFNGIEGAEMSNKGKDQGVVVNNVKTGTPAAQIGLKKGDVIIGANQQAVKNIAELRKVLDSKPSVLALNIQRGDSTIYLLMQ

SEQ ID NO: 4212 - DNA, 1353 bp, Shewanella oneidensis MR-1
  CDS (1)..(1353): transl_table=11
atgaaaacgaaattatctgtactttcagccgcaatgttagccgcaaccctgacaatgatgccagctgtctcacaggccgctattccgcaatctgttgagggacaatccatacccagtcttgcgcccatgttagagcgtacgactcccgccgtggtttctgtggcggtttctggaacccatgtttctaaacaacgcgtgcccgatgtgttccgttatttctttggccctaatgcgccacaagaacaagtgcaagagcgtccatttagaggcttaggctccggcgttattatcgatgccgacaaaggctatattgtcaccaataaccacgtgatcgacggtgccgatgatatccaagtgggtttacacgatggccgtgaagtcaaagccaaattgattggtactgactccgaatccgacattgcgttattgcaaatcgaggctaaaaatctggtcgcgattaaaacctctgattctgatgaactgcgcgtcggtgactttgccgtcgctatcggtaaccccttcggtctaggacaaaccgtaacatcagggattgtcagtgccctaggccgtagcggtttaggcattgaaatgcttgaaaactttatccaaaccgacgcagccatcaacagtggtaactcgggcggcgctctagttaaccttaaaggcgaactgatcggtattaacacggctatcgtcgcgcctaacggcggtaacgtaggtatcggttttgcgattccagcaaacatggtgaaaaacctcatcgcacagattgctgagcatggtgaagttcgccgcggcgtattggggattgctggccgtgatttagatagccaacttgcccaaggctttggcttagacactcaacacggtggctttgtgaatgaagttagcgcgggcagtgccgccgaaaaagctggtattaaggcgggcgatattatcgttagcgtcgatggccgtgcgatcaagtcgttccaagagctgcgtgctaaagtcgcgacgatgggcgctggcgctaaagtcgaactgggccttatccgtgatggcgataagaaaactgtcaacgtcaccttaggtgaagcaaaccaaacgacagaaaaagcagctggtgcagtgcatcctatgctacaaggtgcctcattagaaaatgcctctaaaggggtcgaaattaccgatgttgcacaaggatctccagcggcaatgagcggtctgcaaaaaggcgatttgattgtcggtatcaaccgtactgcggttaaagatcttaaatcgctcaaagagctgctcaaagatcaagaaggtgctgtcgccctgaagattgtccgtggtaagagcatgctttacttagtgcttcgttaa

SEQ ID NO: 4213 - protein, 450 aa, Shewanella oneidensis MR-1
MKTKLSVLSAAMLAATLTMMPAVSQAAIPQSVEGQSIPSLAPMLERTTPAVVSVAVSGTHVSKQRVPDVFRYFFGPNAPQEQVQERPFRGLGSGVIIDADKGYIVTNNHVIDGADDIQVGLHDGREVKAKLIGTDSESDIALLQIEAKNLVAIKTSDSDELRVGDFAVAIGNPFGLGQTVTSGIVSALGRSGLGIEMLENFIQTDAAINSGNSGGALVNLKGELIGINTAIVAPNGGNVGIGFAIPANMVKNLIAQIAEHGEVRRGVLGIAGRDLDSQLAQGFGLDTQHGGFVNEVSAGSAAEKAGIKAGDIIVSVDGRAIKSFQELRAKVATMGAGAKVELGLIRDGDKKTVNVTLGEANQTTEKAAGAVHPMLQGASLENASKGVEITDVAQGSPAAMSGLQKGDLIVGINRTAVKDLKSLKELLKDQEGAVALKIVRGKSMLYLVLR

SEQ ID NO: 4214 - DNA, 1479 bp, Pseudomonas putida KT2440
  CDS (1)..(1479): transl_table=11
gtgcaggggtctttccaaactaccgctcgttgtgacgggagtcgtatgtcaataccacgcttgaaatcctacctaatgatgttcgctgctgtgctgatgctcggccaagtagtcgccgcccaggccgaggaagccctgccggacttcaccaccctggtggagcaggcttcgccggcggtggtcaacatcagtaccaagcagaagctgcctgaccgccggatcgccgcaaaccagatgccggatctggaaggcctgccgccgatgttccgcgagttcttcgagcgcaacatgccccagcagccccgttcgccgcgcggcgaccgccagcgcgaggcgcagtcgctgggctcgggcttcatcatttccagtgatggctacgtgctcaccaataaccatgtggtggccgatgccgacgagatcatcgtccgcctgtcggaccgtagcgagctccaggccaagctggtcggcaccgacccgcgcactgacgtggcgctgctgaaggtcgatggcaagaatttgccaacggtgaaactgggtgactccgagaagctcaaggtgggcgagtgggtactggccatcggttcgccgttcggcttcgaccattcggtgaccaaaggtatcgtcagcgccaagggccggaccctgcccaatgacacctacgtaccgttcatccagaccgacgtggccatcaacccgggtaactccggcggcccgctgttcaacatgaaaggcgaagtggtggggatcaactcgcagatcttcacccgttctggcggtttcatgggcctgtcgttcgccatcccgattgatgtggcgatcgatgtctccaaccagctgaagaaagacggcaaggtcagccgcggctggctgggcgtggtgattcaggaggtcaacaaggacctggctgaatcgttcggcctggacaagccggcgggcgccctggtggcccaggtgctggaaaacggcccggcagccaaaggcggcctgcaggtgggcgacgtgatcctcagcatgaacggccagccaatcgtcatgtcggccgatctgccgcacctggtaggcggcctcaaggatggcgagaaggccaagctggaaatcatccgcaatggcaagcgccagaacctggacatcagcgtcggcgcgctgccggatgacgacgttgacattggcgctggcaccgaaggcagcgccgagcgcagcagcaaccgcctgggtgtatcggtcgccgacctgaccgccgagcagaaaaaatccctggagctcaaaggtggcgtggtcatcaaggaagtgcaggatggcccggcagccatgatcggcttgcgccctggtgatgtcatcagccatctgaacaaccaggccatcggttcggccaaggaattcaccgaaatcgccaaggaactgccgaagaatcgttccgtgtcgatgcgcgtactgcgtcagggccgtgccagcttcatcactttcaagcttgctgaataa

SEQ ID NO: 4215 - protein, 492 aa, Pseudomonas putida KT2440
MQGSFQTTARCDGSRMSIPRLKSYLMMFAAVLMLGQVVAAQAEEALPDFTTLVEQASPAVVNISTKQKLPDRRIAANQMPDLEGLPPMFREFFERNMPQQPRSPRGDRQREAQSLGSGFIISSDGYVLTNNHVVADADEIIVRLSDRSELQAKLVGTDPRTDVALLKVDGKNLPTVKLGDSEKLKVGEWVLAIGSPFGFDHSVTKGIVSAKGRTLPNDTYVPFIQTDVAINPGNSGGPLFNMKGEVVGINSQIFTRSGGFMGLSFAIPIDVAIDVSNQLKKDGKVSRGWLGVVIQEVNKDLAESFGLDKPAGALVAQVLENGPAAKGGLQVGDVILSMNGQPIVMSADLPHLVGGLKDGEKAKLEIIRNGKRQNLDISVGALPDDDVDIGAGTEGSAERSSNRLGVSVADLTAEQKKSLELKGGVVIKEVQDGPAAMIGLRPGDVISHLNNQAIGSAKEFTEIAKELPKNRSVSMRVLRQGRASFITFKLAE

SEQ ID NO: 4216 - DNA, 1425 bp, Escherichia coli CFT073
  CDS (1)..(1425): transl_table=11
atgaaaaaaaccacattagcactgagtgcactggctctgagtttaggtttggcgttatctccgctctctgcaacggcggctgagacttcttcagcaacgacagcccagcagatgccaagccttgcaccgatgctcgaaaaggtgatgccttcagtggtcagcattaacgtagaaggtagcacaaccgttaatacgccgcgtatgccgcgtaatttccagcagttcttcggtgatgattctccgttctgccaggagggttctccgttccagagctctccgttctgccaggggggcctgggcggtaatggcggcggccagcaacagaaattcatggcgctgggttccggcgttatcattgatgccgataaaggctatgtcgtcaccaacaaccacgttgttgataacgcgacggtgattaaagtccaactgagcgatggtcgtaagttcgacgcgaagatggttggcaaagatccgcgctctgatatcgcgctgatccagatccagaacccgaaaaacctgaccgcaattaagatggcggattctgatgcgctgcgcgtgggtgattacaccgtagcaattggtaacccgttcggcctgggcgagacagtaacttccgggattgtctctgcgctgggacgtagcggcctgaacgctgaaaactacgaaaacttcatccagaccgatgcagcgatcaaccggggtaactcaggtggtgcgttggttaacctgaacggcgaactgatcggtatcaacaccgcgatcctcgcaccggacggcggaaacatcggtatcggttttgctatcccgagcaacatggtgaaaaacctgacctcgcagatggtggaatacggccaggtgaaacgtggtgagttgggtattatgggcactgagctgaactccgatctggcgaaagcgatgaaagttgacgcccagcgcggtgctttcgtaagccaggttctgccgaattcttccgccgcgaaagcgggcattaaagcgggtgatgtgatcacctcactgaacggtaagccaatcagcagctttgccgcactgcgtgctcaggtgggcactatgccggtaggtagcaaactgaccctgggcttactgcgcgacgggaagcaggttaacgtgaacctggaacttcagcagagcagccagaatcaggttgattccagcaccatcttcaacggcattgaaggcgctgagatgagcaacaaaggtaaagatcagggcgtggtggtgaacaacgtgaaaacgggcactccggctgcgcagatcggcctgaagaaaggtgatgtgattattggcgcgaaccagcaggcagtgaaaaacatcgctgaactgcgtaaagttctcgacagcaaaccgtctgtgctggcactgaacattcagcgcggcgacagcaccatctacctgttaatgcagtaa

SEQ ID NO: 4217 - protein, 474 aa, Escherichia coli CFT073
MKKTTLALSALALSLGLALSPLSATAAETSSATTAQQMPSLAPMLEKVMPSVVSINVEGSTTVNTPRMPRNFQQFFGDDSPFCQEGSPFQSSPFCQGGLGGNGGGQQQKFMALGSGVIIDADKGYVVTNNHVVDNATVIKVQLSDGRKFDAKMVGKDPRSDIALIQIQNPKNLTAIKMADSDALRVGDYTVAIGNPFGLGETVTSGIVSALGRSGLNAENYENFIQTDAAINRGNSGGALVNLNGELIGINTAILAPDGGNIGIGFAIPSNMVKNLTSQMVEYGQVKRGELGIMGTELNSDLAKAMKVDAQRGAFVSQVLPNSSAAKAGIKAGDVITSLNGKPISSFAALRAQVGTMPVGSKLTLGLLRDGKQVNVNLELQQSSQNQVDSSTIFNGIEGAEMSNKGKDQGVVVNNVKTGTPAAQIGLKKGDVIIGANQQAVKNIAELRKVLDSKPSVLALNIQRGDSTIYLLMQ

SEQ ID NO: 4218 - DNA, 1338 bp, Vibrio vulnificus CMCP6
  CDS (1)..(1338): transl_table=11
ttgtctttgagcttaagctcagcccttgcccctcttccagcaaccgccgcactgccttttagcgtcagtggacaggagttgccgagcttagcgccaatgctcgaacgtgttacccctgcggtcgtcagtatcgcggttgaaggtaaacaggtagaacgctcgcgtattcccgatcaatttcaattcttttttggtcctgatttcccaacagaacaagttcgtgaacgtccattccgtggtttaggttctggtgtcatcattaatgccaataaaggctatatcgtgacgaactaccacgtcatcaaaggcgctgatgagatacgaattcagcttcacgatggtcgtgaatacgatgccgagttaattggtggcgatgagatgtccgatgttgctctgcttaaagtcgatggcgctaaagacttaaccgagattaagctcgccgattccgacaagttacgtgtgggtgatttcagcgtcgccattggtaacccatttggtttgggacagacagtgacgtccggcattgtttcagccttaggtcgtagtggtttgaacattgaaaacttcgaaaactttattcaaaccgacgcggcaattaacagcggcaactccggtggtgcgctcgtcaacctcaatggtgaactgatcggcatcaatacggcgattctcggccccaatggcggcaacgttggtattggcttcgccattccatcgaatatgatgaagaacttaactgaccaaatcttggaatttggtgaagtcaaacgtggcatgttaggcgttcaaggtggcgaaatcacctctgagctggctgaggcgctgggctataactcgagcaaaggtgcatttgtcagccaagtggttcctgactccgccgcagataaagccggcatcaaggcgggcgacatcattgtgtctctcaatggtaagaaaatcgataccttctctgagctaagagccaaaattgcaacactcggggctggcaaagaaatcgagcttggcgtggtgcgtgatggtaaggataagcgctttgatgtcactttgggtgagtcgcaacaaaccaaggccaaagccgataaaatgcacgaaggccttgctggtgctgagttggctaataccacgtcagacgatcgcattgctggcgttaaagtgatcaacgtggcagataactcgccagcggcacaataccagttacaaaaagacgacatcattatcggtgtcaaccgtcagcgagtgaaaaatctcgccgatttccgtgccattgttgaaaaacaaactggtgtgcttgcgctcaatatccaacgtggtgagcgcactatctatttagtcattcgctaa

SEQ ID NO: 4219 - protein, 445 aa, Vibrio vulnificus CMCP6
MSLSLSSALAPLPATAALPFSVSGQELPSLAPMLERVTPAVVSIAVEGKQVERSRIPDQFQFFFGPDFPTEQVRERPFRGLGSGVIINANKGYIVTNYHVIKGADEIRIQLHDGREYDAELIGGDEMSDVALLKVDGAKDLTEIKLADSDKLRVGDFSVAIGNPFGLGQTVTSGIVSALGRSGLNIENFENFIQTDAAINSGNSGGALVNLNGELIGINTAILGPNGGNVGIGFAIPSNMMKNLTDQILEFGEVKRGMLGVQGGEITSELAEALGYNSSKGAFVSQVVPDSAADKAGIKAGDIIVSLNGKKIDTFSELRAKIATLGAGKEIELGVVRDGKDKRFDVTLGESQQTKAKADKMHEGLAGAELANTTSDDRIAGVKVINVADNSPAAQYQLQKDDIIIGVNRQRVKNLADFRAIVEKQTGVLALNIQRGERTIYLVIR

SEQ ID NO: 4220 - DNA, 1368 bp, Vibrio parahaemolyticus RIMD 2210633
  CDS (1)..(1368): transl_table=11
atgaaaaagccattgcttgcgctaaccgttctatctttaagtttgagttccattatcacgccgataacggccacggcagcactgcctctaagtgttgatggccagcaattaccaagcctagccccgatgctagaaaaagtgaccccagcagtcgtgagtattgcggttgagggtaaacaagttcaaaccagtcgtattccggaacaatttcagttcttcttcggccctgacttcccgatggagcaaactcgagagcgtccattccgcggattgggctctggcgtcattattgatgcccaaaaagggcacatcgtcactaactatcatgtgatcaaaggcgcggatgaaattcgagtgcgcctctatgacggccgcgagtacgatgcagaactcgttggcggtgatgagatggcagacgtcgcattgctgaaattagaaaaagcgaaaaatctaactcagattaagattgccgactctgacaagttacgcgtcggcgactttactgttgctatcggcaacccatttggtctcggccaaaccgtcacctcgggtatcgtttctgctctgggtcgtagtggtttaaacgtggagaacttcgaaaacttcatccaaaccgatgccgcaatcaatagtggtaactctggcggtgcactggtaaaccttaacggtgagctgatcggtattaacaccgccattttgggaccaaatggcggcaacgtcgggattggttttgcgatcccatcgaacatgatgagaaacctcactgagcagattttagaatttggtgaagtaaaacgtggcatgttgggcgttcaaggtggtgaagtgacctctgagctggcagaagcactgggttacgagtcaagtaaaggggcattcatcagccaagtcgtgcccgatagcgcagcggacaaagcgggtctaaaagccggtgatgtggttgtatcagttaacggtaagtcaatcgacactttctctgagttgcgcgctaaagtcgccacattaggagcgggtaagaagatcacgctaggcgttattcgtgatggtaagagcaagtcgtttgacgtgactcttggcgagtccaccaacatgaaagccaaagcggaaacgttgcatgaaggcctaaaaggagcagagttaagtaacactacaccgagtgatgccatccaaggggtaaaagtctccagtgttgcagagaattcacctgccgcgcaataccagctaaaacaaggtgacatcattattggcgtcaatcgtcaacgagtgaaaaaccttgcggagcttcgctctattgttgataaacacaaaggtgtgcttgcactaaatattcaacgaggggaacgcactatctacttggtgattcgatag

SEQ ID NO: 4221 - protein, 455 aa, Vibrio parahaemolyticus RIMD 2210633
MKKPLLALTVLSLSLSSIITPITATAALPLSVDGQQLPSLAPMLEKVTPAVVSIAVEGKQVQTSRIPEQFQFFFGPDFPMEQTRERPFRGLGSGVIIDAQKGHIVTNYHVIKGADEIRVRLYDGREYDAELVGGDEMADVALLKLEKAKNLTQIKIADSDKLRVGDFTVAIGNPFGLGQTVTSGIVSALGRSGLNVENFENFIQTDAAINSGNSGGALVNLNGELIGINTAILGPNGGNVGIGFAIPSNMMRNLTEQILEFGEVKRGMLGVQGGEVTSELAEALGYESSKGAFISQVVPDSAADKAGLKAGDVVVSVNGKSIDTFSELRAKVATLGAGKKITLGVIRDGKSKSFDVTLGESTNMKAKAETLHEGLKGAELSNTTPSDAIQGVKVSSVAENSPAAQYQLKQGDIIIGVNRQRVKNLAELRSIVDKHKGVLALNIQRGERTIYLVIR

SEQ ID NO: 4222 - DNA, 1428 bp, Salmonella enterica subsp. enterica serovar Typhi Ty2
  CDS (1)..(1428): transl_table=11
atgaaaaaaaccacattagcaatgagtgcactggctctgagtttaggtttggcattgtcgcctctgtctgccacggcggctgaaacgtcctcttcagcaatgactgcccagcagatgccaagcctggcaccgatgctcgaaaaagtgatgccatcggtggtcagtattaatgtagaaggtagcaccacggtgaatacgccgcgtatgccgcgtaatttccagcaattctttggcgatgactccccgttctgccaggacggttctccgttccagaattctccgttctgccagggcggcggtaacggcggcaacggcggtcaacaacagaaattcatggcgctgggctccggcgtaattattgacgccgcgaagggctacgtcgtcaccaacaaccacgtggttgataacgccagcgtgattaaagtacagcttagcgatgggcgtaaattcgatgctaaagtggtgggcaaagatccgcgttctgatatcgcgctgattcaaattcagaatccgaagaacctgacggcgattaagctggcggactccgacgcgctgcgcgtgggggattataccgtcgctattggtaacccgtttggtctgggcgaaacggtgacgtcaggtatcgtttcggcgctggggcgtagcggcctgaacgtagaaaattacgagaactttattcagaccgacgccgcgattaaccgcggtaactccggcggcgcgctggtgaacctgaacggtgagctgatcggtattaacaccgcgattctggcgccggacggcggcaacatcggtatcggcttcgctatccccagtaacatggtgaaaaacctgacgtcgcagatggtggaatacggccaggtgaaacgcggcgaactggggatcatggggactgagctgagctctgagctggcgaaagcgatgaaagtcgacgcccagcgtggcgcgttcgtcagccaggtgatgccgaattcgtccgcagcgaaagcgggtatcaaagccggggatgtcattacctcgctgaacggtaaaccgatcagcagctttgcggcgctgcgcgctcaggtcggcactatgccggtcggcagcaaaatcagcctcggtctgctgcgtgaaggtaaagcgattacggttaatctggaactgcagcagagcagccagagtcaggttgattccagcaccatcttcagcgggattgagggcgctgaaatgagtaataaaggccaggataaaggcgttgtggtgagcagcgtgaaagcgaactcacccgccgcgcaaattggcctcaaaaaaggcgatgtgattatcggcgctaaccagcagccggtgaaaaatatcgccgagctgcgtaagattctcgacagcaagccgtcggtgctggcgctgaatattcagcgtggtgatagttctatttatttgctgatgcagtaa

SEQ ID NO: 4223 - protein, 475 aa, Salmonella enterica subsp. enterica serovar Typhi Ty2
MKKTTLAMSALALSLGLALSPLSATAAETSSSAMTAQQMPSLAPMLEKVMPSVVSINVEGSTTVNTPRMPRNFQQFFGDDSPFCQDGSPFQNSPFCQGGGNGGNGGQQQKFMALGSGVIIDAAKGYVVTNNHVVDNASVIKVQLSDGRKFDAKVVGKDPRSDIALIQIQNPKNLTAIKLADSDALRVGDYTVAIGNPFGLGETVTSGIVSALGRSGLNVENYENFIQTDAAINRGNSGGALVNLNGELIGINTAILAPDGGNIGIGFAIPSNMVKNLTSQMVEYGQVKRGELGIMGTELSSELAKAMKVDAQRGAFVSQVMPNSSAAKAGIKAGDVITSLNGKPISSFAALRAQVGTMPVGSKISLGLLREGKAITVNLELQQSSQSQVDSSTIFSGIEGAEMSNKGQDKGVVVSSVKANSPAAQIGLKKGDVIIGANQQPVKNIAELRKILDSKPSVLALNIQRGDSSIYLLMQ

SEQ ID NO: 4224 - DNA, 1356 bp, Coxiella burnetii RSA 493
  CDS (1)..(1356): transl_table=11
atgaaaaaattatccaaaattattctcagcagtatttttgcggggctcccattactcctgcccgtcagtagttacgctcacttaccctccgctgtcgaaggaaaaacaatacccagccttgcaccaatgttgaataagaccacaccgagcgtcgtcaacattgccgtggaaaagctgattcctcaaacgccaaaccccttacaacccgaaatggatcaaaacacagcaccaacgaaagtcttaggcgtaggctcgggtgtaatcatagacgccaaaaaaggctatatcgtaacaaatgctcatgtcgtcaaagaccaaaaaatcatggtggtgacgcttaaagatggtcgccgttatcgagcgaaagtcatcggaaaagatgaagggtttgatctggctgtgattcaaattcacgcgaaccatttgaccgcacttcccatcggaaattcagatcaattaaaagtgggtgatttcgtcgtcgccgtgggaagcccttttggcttaactcaaacagtcacttccggcgtcattagcgccttgaatcgccaagaaccgcgtatcgataattttcaaagctttattcaaaccgacgcgccgattaatcccggcaattccggcggggctttaatcgatttagagggcaaattaattggtattaatacagcgattgtcaccccgtccgcgggaaatatcggcatcggctttgccattcccagcgacatggtcaaaagcgtggccgaacaattaattaaatatggaaaagtcgaacgcggcatgctcggcgtaacggctcaaaatattaccccggaattagcggacgccctaaatttaaaacataacaaaggagcgctggtaaccaaagtggttgctgaaagtccagcggctaaagccggggttgaggtgcaggatattattgaatctgtcaacggtattcggattcatagttcagcacaactccacaacatgctcgggctggtgcgtccaggaactaagattgaactaaccgtattgcgcgaccataaggttctgcctataaaaacggaagtagccgatcctaaaaaagtgctattgcaacgcgaactgcccttcctcggcggcatgcgtatgcagaaattcaacgacctagagcccgatggcactattttgcaaggtgttttagttaccggcgtggacgatagcagcgatggagcgctcggcgggttagagcccggcgatatcattatcagtgctaatggccaattaacgcccacggtcgatgagctaatgaaaatcgctgaaggcaagccaaaggagttgttactgaaagtggcgcggggcgcgggacaattatttttagttatccaacaatcacaataa

SEQ ID NO: 4225 - protein, 451 aa, Coxiella burnetii RSA 493
MKKLSKIILSSIFAGLPLLLPVSSYAHLPSAVEGKTIPSLAPMLNKTTPSVVNIAVEKLIPQTPNPLQPEMDQNTAPTKVLGVGSGVIIDAKKGYIVTNAHVVKDQKIMVVTLKDGRRYRAKVIGKDEGFDLAVIQIHANHLTALPIGNSDQLKVGDFVVAVGSPFGLTQTVTSGVISALNRQEPRIDNFQSFIQTDAPINPGNSGGALIDLEGKLIGINTAIVTPSAGNIGIGFAIPSDMVKSVAEQLIKYGKVERGMLGVTAQNITPELADALNLKHNKGALVTKVVAESPAAKAGVEVQDIIESVNGIRIHSSAQLHNMLGLVRPGTKIELTVLRDHKVLPIKTEVADPKKVLLQRELPFLGGMRMQKFNDLEPDGTILQGVLVTGVDDSSDGALGGLEPGDIIISANGQLTPTVDELMKIAEGKPKELLLKVARGAGQLFLVIQQSQ

SEQ ID NO: 4226 - DNA, 1374 bp, Wigglesworthia glossinidia endosymbiont of Glossina brevipalpis
  CDS (1)..(1374): transl_table=11
atgaaaaaaatttttttatttaaaatattaataatattaatattgactttaaactttatttttaacaaagacgcaaaagcatttttttatggagaaaacaaagagcaaataatgccaagtttggctcctatgttaactaaagttcttcctgcagtagtgagcgttcatgttgaaggtagtcagccaatcaaaagatttgttttaccaaaagagtttaaatatttttttgggccagacctaccatttggtagtaatggaataaaaccatttgaaggattagggtctggagtaataatagatgctataaatggatatgtcattacaaacaatcatgttataaatggagctgataaaataaaaattcaattaaatgataatagagaatttgttgcaaaattaattggaaaggatgatcaaacagatttagctttattgcaaattcctatcaacaaaaatctaatagcaattcaaattgctgattcagataatttaaaagtaggagattttgcaattgcaataggtaatccatttggattaggacagactgtaacttctggaatagtatctgccttaggcagaagtggattaaatctagaaggtttagaaaattttatacaaacagatgcttctataaatagaggaaattcaggaggagctttagttaatttaaatggagaattaataggaattaatactgctattttagctcctggaggaggaaacattggaattggatttgccattccaagcaatatagtaaaaaatttatgtcaacaaataatagaacatggaaaagtaaaaagaggacaactaggaataaaaggaacagagcttacatatgatatagctaaagcatttaatatagatgcacaaaggggtgcttttgtaagtgaagttataccaaattctgcagcttccaaagctggaatgaaagctggagatataattttatcagtaaatggaaaatctataaaaagttttgcagaattaagagtaaaagttggaattactgctcctggcaaaacaatttctcttggcatattgagaaatggaaaaccaaaaaatatatctgtaacattggatgataaatctaatatttatacgttagaagatatatcaataccttcattgcagggagtatcattatctaatggatcattaaaagatgggactttaggtgtaaaagtagaagatgtaataaaagattctcctgcttatgttataggtttgaaaaaaaacgatataattataggaattaacagagaaagagtacaaaatttagatcaattaaaaaaagcattaaattctaaaccatcagtaatagctttaaatatagtaagaggagaagcaaaaatttttcttttattaagataa

SEQ ID NO: 4227 - protein, 457 aa, Wigglesworthia glossinidia endosymbiont of Glossina brevipalpis
MKKIFLFKILIILILTLNFIFNKDAKAFFYGENKEQIMPSLAPMLTKVLPAVVSVHVEGSQPIKRFVLPKEFKYFFGPDLPFGSNGIKPFEGLGSGVIIDAINGYVITNNHVINGADKIKIQLNDNREFVAKLIGKDDQTDLALLQIPINKNLIAIQIADSDNLKVGDFAIAIGNPFGLGQTVTSGIVSALGRSGLNLEGLENFIQTDASINRGNSGGALVNLNGELIGINTAILAPGGGNIGIGFAIPSNIVKNLCQQIIEHGKVKRGQLGIKGTELTYDIAKAFNIDAQRGAFVSEVIPNSAASKAGMKAGDIILSVNGKSIKSFAELRVKVGITAPGKTISLGILRNGKPKNISVTLDDKSNIYTLEDISIPSLQGVSLSNGSLKDGTLGVKVEDVIKDSPAYVIGLKKNDIIIGINRERVQNLDQLKKALNSKPSVIALNIVRGEAKIFLLLR

SEQ ID NO: 4228 - DNA, 1419 bp, Haemophilus ducreyi 35000HP
  CDS (1)..(1419): transl_table=11
atgaaaaaatcaattttatcttcattagtcttaggtttaagtgtactttcagtacctgctatgagccaagcggtattaccaacaatattaggcggtcaagcattaccaagtttagcatctatgattgaaaaggttcgcccggcagtagtcagtattgctattgaaggtaaaactaaagttgaaaatgcacaatataaacgtgaacttccggaagaacttcaatttttctttggcccagatatttttggtgagcgttttgctgaacgctttggctttggttttggtgaacaacgtaatgtgccacgtaatttccgaggtcaaggatcaggcgcaattattaatgctgaaaaaggctatgtgattactaataatcacgttattaaagatgcagaaaagatcaccattaaattagaagatgggcgagagtttaaagcgaaattaatcggttcagatgcgttatcggatgttgcgctagtgcaaattgagaatcctaaaaatttaacggaacttaaatttgcggattctgataaattacgtgtaggtgattatagtgttgcaattggtaatccttttggtttagggcaaacggtgacatctggtattatttccgcattaggccgttcgaccggcaattctgatgaaagttatgaaaatttcattcaaacagatgctgcggttaaccaaggtaattcaggtggtccattacttgatctaaatggtgaattaatcggtattaatacggctattatttcaccaagtggtggtaatgcagggatcgcttttgctattccatcaaatatggcaaatagtttagtacaacaaattattgaacatggcgaagtgcaacgtggtatgttgggcattaaaggcggtgagttaaattctgatttagccaaagaatttaaaattgatgctcaacaaggtgcctttgtgagtgaagtgttaactgattctgcggcagcaaaagcgggcttaaaagcaggtgatgtgattatcggcttgaatggtaaacgtattaatggctttggtgaattacgcgcaaaagttgctacttcaggtgtaggcaaagagattgaattgacttacttacgcgatggtaaagaacaaaaagccaaagtaatgttagaagcagacaacagtggtaaaaatggcaaaaataaagatttaattgccggtttaaaaggtgctgagtttgctaatatcaataaaaatggcgtcaaaggtgttgaaatcgtcaaaattcaaaaaggatcaatggcagaataccgtggcttggcagaaggtgacgtgattgttggcgttaaccgagtattgattgaaaacattaaacaattgcgtgaagtgttggataagaaacctgcagttattgcattaaatattatgcgtggtggttctaatttctaccttatcatacaataa

SEQ ID NO: 4229 - protein, 472 aa, Haemophilus ducreyi 35000HP
MKKSILSSLVLGLSVLSVPAMSQAVLPTILGGQALPSLASMIEKVRPAVVSIAIEGKTKVENAQYKRELPEELQFFFGPDIFGERFAERFGFGFGEQRNVPRNFRGQGSGAIINAEKGYVITNNHVIKDAEKITIKLEDGREFKAKLIGSDALSDVALVQIENPKNLTELKFADSDKLRVGDYSVAIGNPFGLGQTVTSGIISALGRSTGNSDESYENFIQTDAAVNQGNSGGPLLDLNGELIGINTAIISPSGGNAGIAFAIPSNMANSLVQQIIEHGEVQRGMLGIKGGELNSDLAKEFKIDAQQGAFVSEVLTDSAAAKAGLKAGDVIIGLNGKRINGFGELRAKVATSGVGKEIELTYLRDGKEQKAKVMLEADNSGKNGKNKDLIAGLKGAEFANINKNGVKGVEIVKIQKGSMAEYRGLAEGDVIVGVNRVLIENIKQLREVLDKKPAVIALNIMRGGSNFYLIIQ

SEQ ID NO: 4230 - DNA, 1386 bp, Candidatus Blochmannia floridanus
  CDS (1)..(1386): transl_table=11
atgaaaatagtaaatccaattattacaatcagcataatatttgcattaatatgcataaataacctacaaacttctaataattattatactgcattaggatcagaaactccatatttatcaatgcctaccagtttagcgccaatgctagataacgttctaccaacagtagtgagtatacacgtagagggaacacaaccttccaaaagacttactttacctaaagaatttagatatttttttggaccagaccttcccaatggaaattttggcaatagaccatttgaaggtttaggatctggagttattatcaattccaataaaggatatattattaccaataatcatgttgttcatggggcagataaaatcaccatacaactaaatgatggtcgcgaatataatgctaaaattattggtcatgatgaacaaactgatttagctttacttcaaatattaaaatttaaaaatctttctgaaattaaaattgcagattccgataccttaaaagttggagattttgccgtcgctataggtaatccatttggattgggccaaactgcaacatcaggtatcatttcagctttaggaaggagcggattaaatcttgaaggattagaaaattttatacaaactgacgcatcaataaatcgaggtaattcagggggagcattagtcaatttaaatggagaactaatcggaataaatactgccattttagctccaggaggaggtaatattggaattgggtttgccattcctagcaatatcgttaaaaatctaagtcaacaattaatcgattttggtgaagtaaaaagaggacaattaggtataaaaggtacagaattaactgctgatattgccaaagcatttaacattgatatacaacgaggtgcatttgtcagtgaagttttaccaggatctgcagctgcaaaagctcgaattaaagctggagatgttattatatctgtagaaggaaaaccaataaaaaactttgctgaattacgagtaaaagttggcaccactgccccaggtaaaatcatcaagataggtttattaagagatggaaaaacacatatagtttccgttctactagatgatagcacttgtgttagtaccagcgaagaaaatttaatcccggcactacaaggtgcaacattaagtaacaattatctaaaagatggcacaccaggagtacaagtagaagaaataaacaaagattctcctgctgcttctataggattacaaaaaggagatatgatcataggtttaaaccgtaccagaataagtaacctatcgcaactacgaaaaatactcaaagaaaatccaacagttatggctctcaatattatacgaggaggtactaatatttttatattgctacgttaa

SEQ ID NO: 4231 - protein, 461 aa, Candidatus Blochmannia floridanus
MKIVNPIITISIIFALICINNLQTSNNYYTALGSETPYLSMPTSLAPMLDNVLPTVVSIHVEGTQPSKRLTLPKEFRYFFGPDLPNGNFGNRPFEGLGSGVIINSNKGYIITNNHVVHGADKITIQLNDGREYNAKIIGHDEQTDLALLQILKFKNLSEIKIADSDTLKVGDFAVAIGNPFGLGQTATSGIISALGRSGLNLEGLENFIQTDASINRGNSGGALVNLNGELIGINTAILAPGGGNIGIGFAIPSNIVKNLSQQLIDFGEVKRGQLGIKGTELTADIAKAFNIDIQRGAFVSEVLPGSAAAKARIKAGDVIISVEGKPIKNFAELRVKVGTTAPGKIIKIGLLRDGKTHIVSVLLDDSTCVSTSEENLIPALQGATLSNNYLKDGTPGVQVEEINKDSPAASIGLQKGDMIIGLNRTRISNLSQLRKILKENPTVMALNIIRGGTNIFILLR

SEQ ID NO: 4232 - DNA, 1467 bp, Chromobacterium violaceum ATCC 12472
  CDS (1)..(1467): transl_table=11
atggccggcgccctgctcgcggcgtcgttactgtccggctgcgacaggatcgagcagtttgtcaaaggcagcaaccagccagcccccgtcgccattcctgcccagcaggacggccgcgtagccatgctgctgcccgacttcactcagctggtcagccgggacggcccggccgtggtcaatatccaggccacccgcgaaggcggcggagccgcgccgcagcaaagcggcaacatgcccttcccggtgccggaagacgacccgctgtacgacttcttccgccgcttcatgcccaaccagccgccgcaacaggagcagggcccggaggaaagcgtgtcctacggttccggcttcatcatcagcagcgacggcttcatcctgaccaacgcccacgtggtggccgacggcggccagatccgcgtcacgctgaccgacaagcgcgaactgcgcgccaagctggtgggcctggacaagcgcagcgacgtggccttgctcaaggtggccgcggccgacctgccggtggccaagatcggcaatccggccgacctgaaggtcggcgaatgggtggccgccatcggcgcgccgttcggcttcgacaacaccgtcaccgccggcatcgtatcggccaagggccgcagcctgcccgacgagaccctggtgcccttcatccagaccgacgtggcgatcaacccaggcaactccggcggcccgctgttcaacctgcgcggcgaggtggtcggcatcaactcgcagatctacagccgttcaggcggcttcatgggcatctccttcgccatcccgatcgacctggcgatgcaagtggccgaccagctgaagaccaagggcaaggtcagccgcggccagctgggcgtcaacatccaggaagtgacccaggagctggcgcaatcgttcggcctgcagcggccctccggcgcgctggtggtgcgcgtcgaccccaagggccccgccgccagggcgggcctgcaggctggcgacatcatcctgaagctcaacaaccagtccatcgacagctccaaggatctgccgatgctggtgggctcgctgggccccggcaccaagatcaagctggtggtgtggcgcaagggtttcgagaagacgatggaagccacactggtggaacaggcacaggaacccggcagcaacacgaaaccggccagcgacaactcgccgcaaggctaccagttcggcaagctgggcctgacgctgtccgagctgacggcggagcagcgcggcgacctcggcatccgcggcggcctgctgatccagaagtcgcaaggcccggccgcgcgctccggcctgatgccgggcgacatcatcctgggactgaaccagaacgacatcaccagcatcagcgccttcgagaaagcgctggccagcgccggcggccacgccgcgctgctggtgcgccgcggcgaggcggtgctctacatcgcgctgcgcaccgactga

SEQ ID NO: 4233 - protein, 488 aa, Chromobacterium violaceum ATCC 12472
MAGALLAASLLSGCDRIEQFVKGSNQPAPVAIPAQQDGRVAMLLPDFTQLVSRDGPAVVNIQATREGGGAAPQQSGNMPFPVPEDDPLYDFFRRFMPNQPPQQEQGPEESVSYGSGFIISSDGFILTNAHVVADGGQIRVTLTDKRELRAKLVGLDKRSDVALLKVAAADLPVAKIGNPADLKVGEWVAAIGAPFGFDNTVTAGIVSAKGRSLPDETLVPFIQTDVAINPGNSGGPLFNLRGEVVGINSQIYSRSGGFMGISFAIPIDLAMQVADQLKTKGKVSRGQLGVNIQEVTQELAQSFGLQRPSGALVVRVDPKGPAARAGLQAGDIILKLNNQSIDSSKDLPMLVGSLGPGTKIKLVVWRKGFEKTMEATLVEQAQEPGSNTKPASDNSPQGYQFGKLGLTLSELTAEQRGDLGIRGGLLIQKSQGPAARSGLMPGDIILGLNQNDITSISAFEKALASAGGHAALLVRRGEAVLYIALRTD

SEQ ID NO: 4234 - DNA, 1425 bp, Wolinella succinogenes DSM 1740
  CDS (1)..(1425): transl_table=11
atgaatctcagactcttctgtttaggctccctcttcatgacctatgctctagcctttagcgtgagcgaagcccctgcaatcgagcggcgtgtagctcccgatgtatcgagcggcgtggtctactcctactatgattccatcaaagacgctaaacgcggtgttgtgaatatctccactcaaaaaaaagtcaaaggcgcctcaggaatcgacccctcacaccccctcttcaatgaccccttcttcaaacagttttttggtgatatgtttgggcaggtcatccccaaagatcgaatcgaacgctccttgggtagtggggtcatcatctccaaggatggctacatcctcaccaacaaccatgtgatcgatggggcggataaagtgatcgtctccctgcctgataacagtaaagagtatgaggccaaagtgattggcaaagacccaaggagcgatctagcggtcattaaaatcgaaggcaaagatttcccctttgtcatttttggctctagcaatgatttgcgcgtgggcgatgtggtatttgcgattggaaatccctttggcgtgggcgaaacggtgacacagggaatcgtttcagccctcaataagagcggaattggaatcaacgactatgaaaacttcatccaaaccgatgcctccatcaaccccggaaactctggaggggcactggtggatagccgaggggcactggtgggaatcaacacggccatcctttctcgcacgggagggaatcatggcgtaggctttgctatcccctcggacatggccaaaaaaatcgccatcaccctcattgacaaaggagtgattgagcgaggctatatgggagtctctatccaagatgtcacccaagatttgcgcgatctctatggggacaaagagggggcagtcatcatctccaccgaatcaagctctccagccgccaaagcgggtctaaaggtgtgggatttaatcactaaaatcgatgaaaagcccgtgaaaaatgccgccgatttaaaaaatatcatcggatcttactctcccaatgataaggtcaaggtgacctacatccgggacaaaaaagaatccaccgccactctcaagctcatcgaagccccaagcaatgccaaaacaagtggtgctggggtgagcaacagtgcgattgatgggctgatgctaagcgcgattgatgatcgtatacgacagcgctatagacttgccattgatacgagtggcgtgctagtcattggcgtgcaggcaggaagttatgccgaggagatcggctttagcgagggagatatcatccttcagattgagaactatcccatcaaagacattgcctctttcaacgaagcgatgaaacaacacaaaggtaaagccaagcgactccttgtgagccgtggcggaaccatcttcagcgtggttgtaaaataa

SEQ ID NO: 4235 - protein, 474 aa, Wolinella succinogenes DSM 1740
MNLRLFCLGSLFMTYALAFSVSEAPAIERRVAPDVSSGVVYSYYDSIKDAKRGVVNISTQKKVKGASGIDPSHPLFNDPFFKQFFGDMFGQVIPKDRIERSLGSGVIISKDGYILTNNHVIDGADKVIVSLPDNSKEYEAKVIGKDPRSDLAVIKIEGKDFPFVIFGSSNDLRVGDVVFAIGNPFGVGETVTQGIVSALNKSGIGINDYENFIQTDASINPGNSGGALVDSRGALVGINTAILSRTGGNHGVGFAIPSDMAKKIAITLIDKGVIERGYMGVSIQDVTQDLRDLYGDKEGAVIISTESSSPAAKAGLKVWDLITKIDEKPVKNAADLKNIIGSYSPNDKVKVTYIRDKKESTATLKLIEAPSNAKTSGAGVSNSAIDGLMLSAIDDRIRQRYRLAIDTSGVLVIGVQAGSYAEEIGFSEGDIILQIENYPIKDIASFNEAMKQHKGKAKRLLVSRGGTIFSVVVK

SEQ ID NO: 4236 - DNA, 1377 bp, Photorhabdus luminescens subsp. laumondii TTO1
  CDS (1)..(1377): transl_table=11
atgaaaagaaaacacttattccttagtgcattagcaatcagtatcgggttgtctgcaatttctgtccctacgattagcaatgctgctttacctgctgctatcgccggtcagacattaccaagcctcgcaccgatgcttgaaaaagtcctgccagccgttgtcagcgtgcatgtctctggtacgcaagtacaacaggaacagagtatacctgaagaattcagattcttctttggcccaaatctacccatgggccgtgaaagtacccgcccattccaagggcttggttcaggtgtcatcattgacgctgccaaaggttatatattaaccaacaatcacgttattgagaatgcagataaaatccgtgtgcaattgaatgatggacgtgaatatgaagccaaattattaggccgcgatcctcagacagatattgccttgctgcaactgaaagatgctaagaatttaactgcaattactatggccgattccgataagctccgagttggtgattttgctgttgcggttggtaatccattcggccttggtcaaactgcaacctccggcattatctctgcgttaggacgtagcggtctgaatctggaaggattagaaaattttatccaaacggatgcctctattaaccgtggcaactccggtggtgcactggtcaatttgaatggtgaattaatcggtatcaataccgctattctagccccgggtggtggtaacatcggtatcggctttgctatcccaagtaatatggcaaaaaccctgagcgagcagcttatcgcgcatggtgaagtaaaacgcggtatcctcggtattaaaggtactgaaatgaattccgatatcgctaaggcattcaatattgacgcccaacgcggagcatttgtcagtgaagtcttaccaaaatccgccgcagcgaaagcaggtattaaatccggcgatattcttatttccgttgatggtaagaagattagtagctttgctgaactgaaagccaaaatcggcacaacgataccaggtaaagaaattaaaattggcttattacgcaaaggtaagccaatggaggtttctgttacgctagaaaacagtgaaggtcaaacaaccaaagccggaaatctaacccttgccctgcaaggtgcaaccctaagcaatggtgaagtgaaagggacttacggtgtgaaaatcgatagtgttgctcaaaactcaccggcggcgttatctggcttacagaaaaatgacctgattgttgggatcaataatgaacggatacagaatattaatgaactgcgcaaagttattgattctaaaccgccagttatagcgctgaacattcttcgcggagaagagagtatttatctgttgctaagaaattaa

SEQ ID NO: 4237 - protein, 458 aa, Photorhabdus luminescens subsp. laumondii TTO1
MKRKHLFLSALAISIGLSAISVPTISNAALPAAIAGQTLPSLAPMLEKVLPAVVSVHVSGTQVQQEQSIPEEFRFFFGPNLPMGRESTRPFQGLGSGVIIDAAKGYILTNNHVIENADKIRVQLNDGREYEAKLLGRDPQTDIALLQLKDAKNLTAITMADSDKLRVGDFAVAVGNPFGLGQTATSGIISALGRSGLNLEGLENFIQTDASINRGNSGGALVNLNGELIGINTAILAPGGGNIGIGFAIPSNMAKTLSEQLIAHGEVKRGILGIKGTEMNSDIAKAFNIDAQRGAFVSEVLPKSAAAKAGIKSGDILISVDGKKISSFAELKAKIGTTIPGKEIKIGLLRKGKPMEVSVTLENSEGQTTKAGNLTLALQGATLSNGEVKGTYGVKIDSVAQNSPAALSGLQKNDLIVGINNERIQNINELRKVIDSKPPVIALNILRGEESIYLLLRN

SEQ ID NO: 4238 - DNA, 1368 bp, Vibrio vulnificus YJ016
  CDS (1)..(1368): transl_table=11
atgaaaaaacctttgcttgttttgactgcattgtctttgagcttaagctcagcccttgcccctcttccagcaaccgccgcactgccttttagcgtcagtggacaggagttgccgagcttagcgccaatgctcgaacgtgttactccagcggtcgtcagtatcgcggttgaaggtaaacaggtagaacgctcgcgtattcccgatcaatttcagttcttttttggccctgatttcccaacagaacaagttcgtgaacgtccattccgtggtttaggttctggtgtcatcattaatgccaataaaggctatatcgtgacgaactaccacgtcatcaaaggggcagatgagatacgaattcagcttcacgatggtcgtgaatacgatgccgagttaattggtggcgatgagatgtccgatgtcgctctgctcaaagtcgatggcgctaaagacttaaccgagattaagctcgccgattccgacaagttacgtgtgggtgatttcagcgtcgccattggtaacccatttggtttaggacagacagtgacgtccggcattgtttcagccttaggtcgcagtggtttgaacattgaaaacttcgaaaactttattcaaaccgacgcggcaattaacagcggcaactccggtggtgcactcgtcaacctcaatggtgagctcatcggcatcaatacggcgattctcggccctaatggcggcaacgtcggtattggcttcgccattccatcgaatatgatgaagaacttaactgaccaaatcttggaatttggtgaagtaaaacgtggcatgttaggcgttcaaggtggcgaaatcacctctgaactggctgaagcgctgggctataactcgagcaaaggcgcatttgtcagccaagtggttcctgactcagcagcagataaagccggcatcaaggcgggcgacatcattgtgtctctcaatggaaagaaaatcgataccttctctgagctaagagccaaaattgcaacactcggggctggcaaagaaatcgagcttggcgtggtgcgtgatggtaaggataagcgctttgatgtcactttgggtgaatcacagcagaccaaagcgaaagccgataagatgcacgaaggccttgccggtgctgagttggcgaatactacgtcagacgatcgcattgctggggttaaagtgatcaacgtggcagataactcgccagcggcacaataccagttacaaaaagacgacatcattatcggcgttaaccgtcagcgagtgaagaatctcgccgatttccgtgccattgttgaaaaacaaactggtgtgcttgcgctcaatatccaacgtggtgagcgcactatctacttagtcattcgctaa

SEQ ID NO: 4239 - protein, 455 aa, Vibrio vulnificus YJ016
MKKPLLVLTALSLSLSSALAPLPATAALPFSVSGQELPSLAPMLERVTPAVVSIAVEGKQVERSRIPDQFQFFFGPDFPTEQVRERPFRGLGSGVIINANKGYIVTNYHVIKGADEIRIQLHDGREYDAELIGGDEMSDVALLKVDGAKDLTEIKLADSDKLRVGDFSVAIGNPFGLGQTVTSGIVSALGRSGLNIENFENFIQTDAAINSGNSGGALVNLNGELIGINTAILGPNGGNVGIGFAIPSNMMKNLTDQILEFGEVKRGMLGVQGGEITSELAEALGYNSSKGAFVSQVVPDSAADKAGIKAGDIIVSLNGKKIDTFSELRAKIATLGAGKEIELGVVRDGKDKRFDVTLGESQQTKAKADKMHEGLAGAELANTTSDDRIAGVKVINVADNSPAAQYQLQKDDIIIGVNRQRVKNLADFRAIVEKQTGVLALNIQRGERTIYLVIR

SEQ ID NO: 4240 - DNA, 1392 bp, Rhodopseudomonas palustris CGA009
  CDS (1)..(1392): transl_table=11
atgaacccgatccgcacgttcgccgtcctctgtgtgtcactcgccctcaccacgccgctcgcggcgcaggaccggcgggtgccgtcgtcgccggcggagctgaagctgtcttacgcgccgatcgtgcagcatgtgcagccggcggtcgtgaacgtctatgccgccaaggtggtgcagaaccgaaatccgctgctggaagatccgatcttccgccggttcttcggcgtgcccggccagccggagcagatccagcgctcgctcggctcgggcgtgatggtcgatgcctcgggcctcgtcgtcaccaacaatcacgtcatcgagggcgccgatcaggtcaaggttgcgctcgccgacaagcgcgagttcgaagccgagatcgtgctgaaggacagccgcaccgatctggcggtgctgcggctcaaggacaccagcgagaaattccccacgctcgacttcgccaactccgacgacctgctggtcggcgacgtggtgctggcgatcggcaatccgttcggcgtcggccagaccgtcactcacggcatcgtctcggcgctggcgcgcactcaggtcggcatcaccgactatcagttcttcattcagaccgacgcggcgatcaacccgggcaattccggcggcgcgctggtcgacgtctcgggcaagctggttggtatcaacaccgcgatcttctcgcgctcgggcggctcgcaggggatcggcttcgcgatccccgccaacatggtgcgcgtcgtggtcgcctcggccaagagcggcggcaaggccgtgaagcggccgtggctcggcgcgcggctgcaggcggtgagcccggagattgccgagaccctcgggctgaagcggccgggcggtgcgctggtcgccagcgtcaccaagggcagcccggcggagcgggcagggctgaagctgtccgacctgatcgtgtcgatcgacggctttgcgatcgatgatcccaacgcgttcgattatcggtttgcgacccgtccgctcggcggtgccgcgcagctcgaagtgcagcgcagcggcaaggcggtgaagctgtcgatcccgctcgaaaccgcgccggactccggccgcgacgagctggtgatcacctcgcgctcgccgttccagggcgccaagatcgccaacatctcgccggcgatcgccgacgaaatgcggctcgatccgagcgtcgaaggcgtcgtggtcactgatcttcccgacgacagcaccgccgcgaatgtcggcttccagaagggtgacatcatcgtcgcggtcaacaacacccggatcggcaagacaagcgacctcgaacgcgtcgccggccagacggcgcggctgtggcgcatcatgctggtccgcggcggccagcagatccaagtcacgctcggcggatga

SEQ ID NO: 4241 - protein, 463 aa, Rhodopseudomonas palustris CGA009
MNPIRTFAVLCVSLALTTPLAAQDRRVPSSPAELKLSYAPIVQHVQPAVVNVYAAKVVQNRNPLLEDPIFRRFFGVPGQPEQIQRSLGSGVMVDASGLVVTNNHVIEGADQVKVALADKREFEAEIVLKDSRTDLAVLRLKDTSEKFPTLDFANSDDLLVGDVVLAIGNPFGVGQTVTHGIVSALARTQVGITDYQFFIQTDAAINPGNSGGALVDVSGKLVGINTAIFSRSGGSQGIGFAIPANMVRVVVASAKSGGKAVKRPWLGARLQAVSPEIAETLGLKRPGGALVASVTKGSPAERAGLKLSDLIVSIDGFAIDDPNAFDYRFATRPLGGAAQLEVQRSGKAVKLSIPLETAPDSGRDELVITSRSPFQGAKIANISPAIADEMRLDPSVEGVVVTDLPDDSTAANVGFQKGDIIVAVNNTRIGKTSDLERVAGQTARLWRIMLVRGGQQIQVTLGG

SEQ ID NO: 4242 - DNA, 1395 bp, Bradyrhizobium sp. ORS278
  CDS (1)..(1395): transl_table=11
atgacgctgattcgctcctccatggtcctgctgcttgcgctgctggccgccactccgctcgcggcgcaggagcggcgggtgccgcaatcccaggccgagctgcggctgtcctatgcgccgatcgtgcagcgcgtgcagccggcggtcgtcaacgtctatgccgccaaggtggtgcagaaccgcaatccgttcctcgatgatccgatcttccgccgcttcttcggtctgcagggcggtccgcaggagcaaatgcagcgctcgctcggctcgggcgtgatgatcgattcctccggtctggttgtcaccaatgtgcacgtcatcgagggcgccgacgaggtgaaggtgtcgctcgccgacaagcgcgagtacgaggccgagatcgtgctcaaggacagccgcaccgaccttgcggtgctcaggctgaagggcaccaaggagcagtttccgaccctcgacctcgccaattccgacgatctgcaagtcggcgacgtcgtgctcgcgatcggcaatccgttcggcgtcggccagaccgtgacccacggcatcgtttcggcgctggcgcgcacccaggtcggcatcaccgactatcagttcttcatccagaccgatgcggccatcaatcccggcaactcgggcggcgcgctggtcgacatgaccgggaagctcgccggcatcaacaccgcgatctattcgaagtcaggcggctcacagggcatcggcttcgcgatcccggcgaacatggtgcgcgtcgtggtcgcctcggccaagagcggcggcaaggcggtcaagcgtccctggctgggcgcgcgcttgcaggcggtgacgcctgacatcgccgagagcctcggcctgcgctcgccgaccggcgcgctggtcgcgagcgtcacgccgaacagcccggcggcgcgtgccggcatcaaatcgtccgacctgatcgtgtcgatcgacgggcagaccgtcgatgatcccaacgccttcgactatcgcttcgcgacccgcccgctcggtggcagcgcacagatcgaggtgcagcgcggcggcaagccggtgaaggtcgcggtcgcgctggagaccgcgccagacaccgggcgcaacgagatcgtcatcagcggccgctcgccgttccagggagccaaggtcgccaacatctcgccggcggtggccgacgagctgcatctcgacgccgacaccgagggcgtcgtcgtgctcgagcccggcgacggcacaacggccgccaatgtcggcttccagaagggcgacgtgatcatggccgtcaacaaccagaagatcgccaagaccaccgatctcgacaaggcctcgcgcgagtccgctcgcctctggcgtattaccgtgctgcgcggcggccagcagatcaacgtcacgctcggcggatga

SEQ ID NO: 4243 - protein, 464 aa, Bradyrhizobium sp. ORS278
MTLIRSSMVLLLALLAATPLAAQERRVPQSQAELRLSYAPIVQRVQPAVVNVYAAKVVQNRNPFLDDPIFRRFFGLQGGPQEQMQRSLGSGVMIDSSGLVVTNVHVIEGADEVKVSLADKREYEAEIVLKDSRTDLAVLRLKGTKEQFPTLDLANSDDLQVGDVVLAIGNPFGVGQTVTHGIVSALARTQVGITDYQFFIQTDAAINPGNSGGALVDMTGKLAGINTAIYSKSGGSQGIGFAIPANMVRVVVASAKSGGKAVKRPWLGARLQAVTPDIAESLGLRSPTGALVASVTPNSPAARAGIKSSDLIVSIDGQTVDDPNAFDYRFATRPLGGSAQIEVQRGGKPVKVAVALETAPDTGRNEIVISGRSPFQGAKVANISPAVADELHLDADTEGVVVLEPGDGTTAANVGFQKGDVIMAVNNQKIAKTTDLDKASRESARLWRITVLRGGQQINVTLGG

SEQ ID NO: 4244 - DNA, 1455 bp, Candidatus Protochlamydia amoebophila UWE25
  CDS (1)..(1455): transl_table=11
atgaaacaactatcaatatttaccaaattgtgtttacttgccacaggagctgccttaataggctcttcttttacgaacccaaatttaatagaggcggcaactcaggaacagaatcgaactgaagatatcaaacgtttgcccggaaaggagaccgtcgttgattttagaggcgtcgcaaagaaagcgattcctgccgtcgtctctattaaggttaaaggacaaaaaaaaggacctttgtttggggatgaaaattctttagaagattattttggagaaaatggggatttttggaacttttttggattgccaaagagagattctcgtcaacaattgttatcgggtcaagcaacgggtgtgattgtgagtccagaagggtatattttaacaaatagccatgtcgttcatgacatgacaacaattgctgtgcagcttcatgatggaagagaacttgcagcgaaactgttaggagaagatcctagtagtgatttagcgctcattaaaattgacgcaaaagatcttccatatttgacacttggtaattcagacgatttagaagttggacaatgggttgccgcagttggaaatccttttggcttgcaagcgaccttaactgttggtgtcgtgagtgcaaaaagtcgcaataatttagatattgctcgctatgaagactttattcaaacggatgcttctatcaatcgaggaaattcaggcggtcctttgctcacattaaatggagaaattgtagggattaatacagcaattgcgactaatgcatcagcaggttacatcggaattggttttgcaatcccaagtaatatggctaaacatgtgatggatgaaattttatctcaaggaaaagtctctagaggatttttgggcgtttctttacagtcaattgattataatctggctcaatcttttggtttagataaagtagaaggagcattagtcacaaatattgttaaaaattctcctgctgaaaaagctggaattcaggtagaggatattattttaaaactaaatggtcgttcgattgagagcgcggctagtttacgtaacgcgatttatcggatgaaacctggtacaaaagtgaatttgacaattttgagaaaagaaaaacagattgacctttctcttactattggtgattttactgaagaaactgtcgcagcagcatcttctcacaaaagtcagctcggaattgaagtcgcaaatatcccttccgaaatgaaatcagatgaacaaggggtgatgattacaaaggtgtatccaggctcagttgctaactttgctgggttaaaaaaaggagccattattcttggcattaatcatcaaaaaatcgaaaatgtagagcaatttaataacgctttaaaaaatagttctgcagataagccaattcttttgcaagtaaaacaaggaaatgcttatctattcgtttcgcttcgctctgaatag

SEQ ID NO: 4245 - protein, 484 aa, Candidatus Protochlamydia amoebophila UWE25
MKQLSIFTKLCLLATGAALIGSSFTNPNLIEAATQEQNRTEDIKRLPGKETVVDFRGVAKKAIPAVVSIKVKGQKKGPLFGDENSLEDYFGENGDFWNFFGLPKRDSRQQLLSGQATGVIVSPEGYILTNSHVVHDMTTIAVQLHDGRELAAKLLGEDPSSDLALIKIDAKDLPYLTLGNSDDLEVGQWVAAVGNPFGLQATLTVGVVSAKSRNNLDIARYEDFIQTDASINRGNSGGPLLTLNGEIVGINTAIATNASAGYIGIGFAIPSNMAKHVMDEILSQGKVSRGFLGVSLQSIDYNLAQSFGLDKVEGALVTNIVKNSPAEKAGIQVEDIILKLNGRSIESAASLRNAIYRMKPGTKVNLTILRKEKQIDLSLTIGDFTEETVAAASSHKSQLGIEVANIPSEMKSDEQGVMITKVYPGSVANFAGLKKGAIILGINHQKIENVEQFNNALKNSSADKPILLQVKQGNAYLFVSLRSE

SEQ ID NO: 4246 - DNA, 1371 bp, Erwinia carotovora subsp. atroseptica SCRI1043
  CDS (1)..(1371): transl_table=11
atgaaaaaaacgtcattattatttagtgcactggcaatgagtataggtttgaccctgtccacgcttcccgcagcgaatgctgcgctaccttccgtggttcaagggcaacaaacgccaagcctggccccaatgctggaaaaagtcttaccagctgtcgtcagcgtgcatgttgaaggtacacaggtacagcgccagcgcgtaccggaagagttcaagttcttctttgggccaaatttcccgacggacaaacaaaattctcgtccgtttgaagggctgggttccggcgtgattattgatgcagcaaaagggtatgtgctcaccaacaatcacgttatcaataatgccgacaaaattcgcgtccagcttaatgacgggcgtgaatatgatgcgaaactgattggtcgcgacgagcagaccgatattgccctgctacagctgaatgacgccaaaaacctagtatccgtaaaaatggcggattccgatcagttgcgcgtcggtgattttgccgttgccgtgggtaacccattcggcctcggccagaccgcgacatccggcattatctctgcactgggacgtagcggcctgaaccttgaagggctggaaaacttcatccagaccgatgcttctatcaaccgcggtaactccggcggtgcgctggttaacctcaacggcgaactgatcggtatcaacaccgcgattctggctccgggcggaggaaacatcggtatcggtttcgccatccccagcaacatggctcagaatctggcgcagcagttggttgaatttggtgaagttaaacgcgggctgctgggtattaaaggcagcgagatgacgtctgagatggcgaaagccttcaacgtcgatgcacagcgcggcgctttcgtcagcgaagtcttaccgaaatctgccgcgtccaaagcgggtatcaaggctggcgacgtgttgactactctggatggtaaaccgatcagcagctttgcagaactgagagccaaagtcggcaccaccgcgccgggcaagaccgtgaaaatcggcctgctgcgtgatggtaaaccacaggaggtttcggtggtgttggataacagcacatcggcatcgaccagcgccgaaacgctttcaccgtcattgcagggtgcatcgctgatcaatggtcaattgaaagatggcagcaaaggcgtgcagattgataacgtcgctaaggacacgcctgctgcgcaggttggtctgcaaaaaggcgatatcatcattggcgtaaaccgcgagcgcattgaaaacatcacgcaactgcgcaagctgctggaagcgaagccttccgttctggcactgaacatcgtccgtggcgaagaaacgatctatctgctgctacgttaa

SEQ ID NO: 4247 - protein, 456 aa, Erwinia carotovora subsp. atroseptica SCRI1043
MKKTSLLFSALAMSIGLTLSTLPAANAALPSVVQGQQTPSLAPMLEKVLPAVVSVHVEGTQVQRQRVPEEFKFFFGPNFPTDKQNSRPFEGLGSGVIIDAAKGYVLTNNHVINNADKIRVQLNDGREYDAKLIGRDEQTDIALLQLNDAKNLVSVKMADSDQLRVGDFAVAVGNPFGLGQTATSGIISALGRSGLNLEGLENFIQTDASINRGNSGGALVNLNGELIGINTAILAPGGGNIGIGFAIPSNMAQNLAQQLVEFGEVKRGLLGIKGSEMTSEMAKAFNVDAQRGAFVSEVLPKSAASKAGIKAGDVLTTLDGKPISSFAELRAKVGTTAPGKTVKIGLLRDGKPQEVSVVLDNSTSASTSAETLSPSLQGASLINGQLKDGSKGVQIDNVAKDTPAAQVGLQKGDIIIGVNRERIENITQLRKLLEAKPSVLALNIVRGEETIYLLLR

SEQ ID NO: 4248 - DNA, 1467 bp, Erwinia carotovora subsp. atroseptica SCRI1043
  CDS (1)..(1467): transl_table=11
atgaaaagaaaatcactggttctgagtgcgctggcgttaagtctggcgatggcgatgggctccactacggcaaatgcggctgagtcagcggcatctgctgcgtcatcaggtcaattacctagtctggcccctatgctggaaaatgttatgccttccgtggtgagcatctatgtggaagggcataccaccaatgcgggtaaagaaagcaatgcaggcaaagaaggtataccgccgcagcttcagccgttttttggtgaaaactcgccgttctgccaagagggatcgccgttccagtcgtcgccgatgtgtcagggcgatagtgacgacgatgacagcggccaaccgcaaccaaaacaggaaaacttccaggcgctgggcgcgggcgtagtgattaatgcggaaaaaggctacgtggtgaccaatagtcacgtggtggataacgccgataaaattcagattcgactcagtgatggccgcaagtatgacggtaaagtgctaggcaaagacccgcgttcagatatcgcgctggtgcagttgaaggactttaaaaatctgacggccattaaggttgcggattccgaccaactgcgggtcggtgattacaccgtagcgattggtaacccatatggcctgggggaaaccgcgacatcgggcattgtgtccgcgctgggacgcagcggcttgaatattgaaaactacgagaactttattcagaccgatgcggcgattaatcggggtaattccggcggggcgctggtgaacctgaatggggaattgattgggctgaataccgcgattcttgcgccagacggcggcaatatcgggatcggtttcgctatccccagcaatatggtgaaaagtgtcgtcgcacagattatcgaatttggcgaagtgaagcgtggcgaactgggcatcacgggtacggagttgaattccgaactggcgcaggcgatgaaggttgatgcacagcgcggcgcgtttgtgagtcaggtgcggccgaaatcggcggcagatgcggcgggtatcaaagcgggcgatgtgatcgtcacgctgaatggcaaagcggttagcagtttctccgcgctgcgtgcgcaggtcggttcgctgccggtgggcagcaaagtcgcactggggctgctgcgtgatggcaaaccgctgacggttgatgtgacgctgcaacagagcaatcaggctcaggtggcttccggtaatctctactccggcattgaaggtgctgaactgagtaatactcagattgacgataaaaaaggcgttaaggtggataacgttaaacccggttccgcggcggctaaagtggggctgaagaaggacgacattattctcggcgttaaccaacaggtggttcagaatatcggcgaattgcgtaaaattctggacagcaaaccggcagtcttggcgttgaacgttcgtcgaggtgacagcacgatttatctgctggctcagtaa

SEQ ID NO: 4249 - protein, 488 aa, Erwinia carotovora subsp. atroseptica SCRI1043
MKRKSLVLSALALSLAMAMGSTTANAAESAASAASSGQLPSLAPMLENVMPSVVSIYVEGHTTNAGKESNAGKEGIPPQLQPFFGENSPFCQEGSPFQSSPMCQGDSDDDDSGQPQPKQENFQALGAGVVINAEKGYVVTNSHVVDNADKIQIRLSDGRKYDGKVLGKDPRSDIALVQLKDFKNLTAIKVADSDQLRVGDYTVAIGNPYGLGETATSGIVSALGRSGLNIENYENFIQTDAAINRGNSGGALVNLNGELIGLNTAILAPDGGNIGIGFAIPSNMVKSVVAQIIEFGEVKRGELGITGTELNSELAQAMKVDAQRGAFVSQVRPKSAADAAGIKAGDVIVTLNGKAVSSFSALRAQVGSLPVGSKVALGLLRDGKPLTVDVTLQQSNQAQVASGNLYSGIEGAELSNTQIDDKKGVKVDNVKPGSAAAKVGLKKDDIILGVNQQVVQNIGELRKILDSKPAVLALNVRRGDSTIYLLAQ

SEQ ID NO: 4250 - DNA, 1455 bp, Desulfotalea psychrophila LSv54
  CDS (1)..(1455): transl_table=11
atgaatagttggtccccagcccttacaaggggtatttgtctgcatcttctctgttcttttttctttgttaccagtcttgcctatgcctcggaaaatgatctggaaattttggaaaaatcgtccaaggcctttgcctctgttgcccggcaggcaaaacctgctgtcgttaatattcgagtggagaagacgattaagggtgggcagatggatggctggcaaatacccgatgagatgctagaacatccgttttttaagcaattttttggtccccagttacgtaaaaggcaaaatgtgcctccacgtctccaacaaggccaaggttccggctttatcgttagtgacgatggctatatcctcaccaataatcatgtggttgatggtgctgactctattacagtacgtcttaatgatgacagcagttatcaggcaaagcttattggtaccgatcccctctccgatgtcgcccttataaaaatagagagttcgaaaaaattaccaagtctggccatgggcagttctgctgctctggaggtgggtgagtgggtaattgccattggtaatccctttggcttgagccagactgtaacggtgggtattgtgagcgccaagggccggagtcaggtggggcttaatgagtatgaaaattttatccaaaccgatgcggctattaatccaggtaacagtggtggacccctccttaatataagaggtcaggtgattggtataaactcagccctcttctcccagacgggtggttatatgggcatcggttttgccattcccattgatatggtaaagtccattgaaagacagttgcaggcaacggggaaggtaagtcgcggctggcttggggtgatgattcaggatatagatgaaaacctggcccaatcctttggcctgaagagcagctctggtgtattgctgacaggtgttcagcctgattctcctgctgaaaaaggtggtttacttggtggtgatgttattatcgcaattgatggcagtgctgtgaaaaacgcctcggccctgcgtaacagggtggcactggtactgcccgggagcaaggtcgtcctgcaggtcattcgtaagggcaaaaaaagagatataggggtgctgattggtgagcggcccgtcggagccaatggactctcaattgaggaccatacggtccttaataataactttggtctctcctttgaaaaacttaccccggaaattgcgaaaaaattcggttatgcccagaaaaagggggttgtcatcagggaggtagccccccagagccctgccagcagggcaggacttaaggccggaatgctcattgaggaggtgaaccgaatggctataggtcaggttgccgatatcaaaaaggctttagctctgggaaaggatgccaggcatgtactcctgcgagtaggatttggccagggcagtcgctatatcgccttggttgcaaaataa

SEQ ID NO: 4251 - protein, 484 aa, Desulfotalea psychrophila LSv54
MNSWSPALTRGICLHLLCSFFFVTSLAYASENDLEILEKSSKAFASVARQAKPAVVNIRVEKTIKGGQMDGWQIPDEMLEHPFFKQFFGPQLRKRQNVPPRLQQGQGSGFIVSDDGYILTNNHVVDGADSITVRLNDDSSYQAKLIGTDPLSDVALIKIESSKKLPSLAMGSSAALEVGEWVIAIGNPFGLSQTVTVGIVSAKGRSQVGLNEYENFIQTDAAINPGNSGGPLLNIRGQVIGINSALFSQTGGYMGIGFAIPIDMVKSIERQLQATGKVSRGWLGVMIQDIDENLAQSFGLKSSSGVLLTGVQPDSPAEKGGLLGGDVIIAIDGSAVKNASALRNRVALVLPGSKVVLQVIRKGKKRDIGVLIGERPVGANGLSIEDHTVLNNNFGLSFEKLTPEIAKKFGYAQKKGVVIREVAPQSPASRAGLKAGMLIEEVNRMAIGQVADIKKALALGKDARHVLLRVGFGQGSRYIALVAK

SEQ ID NO: 4252 - DNA, 1446 bp, Yersinia pseudotuberculosis IP 32953
  CDS (1)..(1446): transl_table=11
atgaaaaaaacaactttagtattaagtgcattggcattgagcattggtttcgccatgggcccggtttcttccgtcgttgcggcagagacggcagcatcgagtagccagcagctccctagcctggcgccaatgctagagaaagtaatgccttcagtggtcagtatcaacgttgaaggtagtgcgcctgtaagcagtgctggtgcacgcggtatgccaccacaattccagcagttttttggtgataactcgccattctgtcaggacggttcaccgttccaaggctcgccaatgtgtcaaggggatctgggcggactagggcagggaatgccaagtaagcgggaattccgttcgcttggttcaggtgtcattattgatgcgggcaaggggtatgtcgttaccaataaccacgtggtcgataatgcgaacaagatcagcgtaaaactgagcgatggccgcagttttgatgccaaggtgatcggtaaagatccacgtaccgatatcgcactgttacaactgaaagacgctaaaaatctgactgcgattaagattgccaattcggatcaactgcgtgtcggtgattataccgtcgctatcgggaacccgtatggcttgggtgaaaccgtgacatccggtattgtctctgctttagggcgcagtggtttgaatgtagaaaactatgaaaactttatccagactgatgcggcgattaaccgcggtaattccggcggcgcattaatcaacctgaacggtgagttgattggtattaacaccgctattctggcaccggatggcggtaacattggtattggctttgctatcccaagcaacatggtgaagaacctgacatcacagatggttgagtttggtcaggtaaaacgcggtgaactgggcattatggggaccgagctaaactctgaactggcaaaagccatgaaggttgatgcgcagaaaggtgcctttatcagccaggtcgtgcctaaatctgctgcggcaaaagcgggtatcaaagcgggcgatatcattgtcagtatgaatgggaaagccatcaatagttttgcagggttccgcgccgagatcggcacgttacctgttggcagcaaaatgaccttgggtctgctgcgtgatggcaaaccgatcaatgtgaatgtcgtcctggagcagagcagccacagtcaggtggaatccggtaatctctacaccggtattgagggggctgaactgagtaacagcaacgttagcggcaagaaaggggtgaaagttgatagcgtaaaaccaggcactgctgcggcgcgtatcggcctgaaaaaaggtgatatcataatggggattaaccagcaaccagtccagaacctaggtgagctgcggaaaatcctcgatgctaaaccaccggtattggcgttgaatattcaacgtggtgatacttcactctatttattgatgcagtaa

SEQ ID NO: 4253 - protein, 481 aa, Yersinia pseudotuberculosis IP 32953
MKKTTLVLSALALSIGFAMGPVSSVVAAETAASSSQQLPSLAPMLEKVMPSVVSINVEGSAPVSSAGARGMPPQFQQFFGDNSPFCQDGSPFQGSPMCQGDLGGLGQGMPSKREFRSLGSGVIIDAGKGYVVTNNHVVDNANKISVKLSDGRSFDAKVIGKDPRTDIALLQLKDAKNLTAIKIANSDQLRVGDYTVAIGNPYGLGETVTSGIVSALGRSGLNVENYENFIQTDAAINRGNSGGALINLNGELIGINTAILAPDGGNIGIGFAIPSNMVKNLTSQMVEFGQVKRGELGIMGTELNSELAKAMKVDAQKGAFISQVVPKSAAAKAGIKAGDIIVSMNGKAINSFAGFRAEIGTLPVGSKMTLGLLRDGKPINVNVVLEQSSHSQVESGNLYTGIEGAELSNSNVSGKKGVKVDSVKPGTAAARIGLKKGDIIMGINQQPVQNLGELRKILDAKPPVLALNIQRGDTSLYLLMQ

SEQ ID NO: 4254 - DNA, 1470 bp, Mannheimia succiniciproducens MBEL55E
  CDS (1)..(1470): transl_table=11
atgaaaaaaacaagttttacattgactgcaatcgcattaggattaagcgttcttgctgcgccaaccgtaagtgtcgcggatttcagttcgttttttggcggcgataaatccgaatccgcagagcaaacctccgcaaacaaagcggcatcaaacgtagcacaatctgccgtaaacagcccgtttatcaccaattcattagcgccaatgcttgaaaaagtgttgccggcggtggtttccattgctgtggaaggtaatcaaaaaatcgctaagcgttcatttgatattccggaagaatttaaatttttcttcggtgaggatttctttggtgataattcttcaaaatcatcctcaagaaaattccgcggtttaggttccggcgtgattattaatgcggaaaaaggctatgtattaacaaacaaccacgttatcgataacgcggataaaatcaccgtattattgcaggacggccgtgaatttaaaggaaaaatcttaggcaaagacagtcaatccgatattgccttagtacaattggaaaaccctaaaaacttaaccgaaattaaatttgccgacagcgataaactacgcgtgggtgatttcaccgtagcgatcggcaacccattcggtttagggcaaaccgtcacctccggtatcatttctgccttagggcgctccaccggttccgacagcggcgcttatgaaaactatattcaaacggatgccgccgtaaaccaaggtaactcgggcggaccgttaattaatttaaacggcgaacttatcggtattaataccgctattctttcacctagcggcgctaatgccgggattgcctttgcaattccttctaacatggcaaataacttagcgcagcaaatcggtgagttcggcgaagtgcgtcgcggtatgttgggaattaaaggcggcgaactaaatgcggatctggcgaaagccttccacgttgatgcgcaacaaggcgcttttgtcagcgaagtcttaccgggatccgccgccgataaagcgggcattaaagcgggcgatgtgattattgccatgaacggacaaaaagtgtcgagtttcgccgaaatgcgcgcgaaaatcgctacttccggcgcaggtaaagaaattgaattaacttatctgcgtgataacaaaaaagaaaatgtaaaagttactctgcaagccgacgaccaggcgcaatctaccgctaatgcggaagccgttattccggcattggaaggtgcggaattgacaaacttcaatgaaaacggcaaaaaaggcgtgaaactcagtaaagtagctgaaaattccccggcagctcaacgaggtttgaaaaccggcgatttaattatcggcgttaaccgtatcgccattgaagatttaacacagttacgcaaagccatggaaaacaaagattccgttatagcgttaaatattgaacgcggaaataataatttctatcttctgattcaataa

SEQ ID NO: 4255 - protein, 489 aa, Mannheimia succiniciproducens MBEL55E
MKKTSFTLTAIALGLSVLAAPTVSVADFSSFFGGDKSESAEQTSANKAASNVAQSAVNSPFITNSLAPMLEKVLPAVVSIAVEGNQKIAKRSFDIPEEFKFFFGEDFFGDNSSKSSSRKFRGLGSGVIINAEKGYVLTNNHVIDNADKITVLLQDGREFKGKILGKDSQSDIALVQLENPKNLTEIKFADSDKLRVGDFTVAIGNPFGLGQTVTSGIISALGRSTGSDSGAYENYIQTDAAVNQGNSGGPLINLNGELIGINTAILSPSGANAGIAFAIPSNMANNLAQQIGEFGEVRRGMLGIKGGELNADLAKAFHVDAQQGAFVSEVLPGSAADKAGIKAGDVIIAMNGQKVSSFAEMRAKIATSGAGKEIELTYLRDNKKENVKVTLQADDQAQSTANAEAVIPALEGAELTNFNENGKKGVKLSKVAENSPAAQRGLKTGDLIIGVNRIAIEDLTQLRKAMENKDSVIALNIERGNNNFYLLIQ

SEQ ID NO: 4256 - DNA, 1401 bp, Legionella pneumophila subsp. pneumophila str. Philadelphia 1
  CDS (1)..(1401): transl_table=11
atgagtaaaatcaggattaataatatgattacacgtataaaattattcatagcaagtctgcttgtatttttcatcccggtagccgatgcagcacaagatcttacaaacatgcccagcttggctcctgttctgaaaaatgctatgccggctattgttaacgtggctgttcaagggtacttgcctaataatatggcatccggaaatgcagacgatgatgacggggaaaacagtaaacagccttccagaatacctgaaaaaggcagaaaatttgaaagtatagggtctggagttatcattgaccctaaaaatggcattattataacgaatgaccatgttattcgtaacgccaatttaattactgtaactcttcaagatggcaggagattaaaagctcgcctgattggaggtgatagcgaaacggacttggctgttttaaaaattgatgctaaaaatttgaaatccctggtaattggtgattccgataagctggaagtcggagattatgttgttgctattggaaacccctttggattaaacagctttggaaatagtcaatctgctacgtttggaatagtgagtgccttaaaacgcagcgatttaaatattgaaggtgttgaaaactttattcaaactgacgcagctatcaatcctggtaattcaggaggggctttggtcaatgcaaaaggcgaattaattggcattaatacagccattatttcaccctatggaggaaatgtaggtatcggctttgcgatcccaattaatatggcaaaagatgtagcgcaacaaatcattaaatttggctctattcatcgtggtttaatgggtatatttgttcaacatttaacaccagaacttgcccaatcaatgggatatgccgaagattttcaaggggctttagtatcacaggtcaatcaaaattcacctgctcaattggctggcctaaaatcaggcgatgtcattgtacaaattaatgacaccaaaataacgcaggcaacacaggtaaaaacaacgattagtctgttgcgagctggctctactgctaaaattaaaatcttgcgagataataagccgcttacattagatgtagaagtcacagacatcaaaaaacatgaacaaaaattacaatccaataatccatttctctacggattagccttgcgtaattttgaacaagagtcaccacctcatggtaatgttgttggagttcaggtagtaggtgcttcggaaaccagtgcgggctggcgagctggcttaaggccaggagatattatcatttctgctaataaaacaccggtcaaagacattaaatctttacaagctgttgcacacgagaaagggaaacagctattagtccaggtgctgagaggagcaggagcactctacctgttgatcatttaa

SEQ ID NO: 4257 - protein, 466 aa, Legionella pneumophila subsp. pneumophila str. Philadelphia 1
MSKIRINNMITRIKLFIASLLVFFIPVADAAQDLTNMPSLAPVLKNAMPAIVNVAVQGYLPNNMASGNADDDDGENSKQPSRIPEKGRKFESIGSGVIIDPKNGIIITNDHVIRNANLITVTLQDGRRLKARLIGGDSETDLAVLKIDAKNLKSLVIGDSDKLEVGDYVVAIGNPFGLNSFGNSQSATFGIVSALKRSDLNIEGVENFIQTDAAINPGNSGGALVNAKGELIGINTAIISPYGGNVGIGFAIPINMAKDVAQQIIKFGSIHRGLMGIFVQHLTPELAQSMGYAEDFQGALVSQVNQNSPAQLAGLKSGDVIVQINDTKITQATQVKTTISLLRAGSTAKIKILRDNKPLTLDVEVTDIKKHEQKLQSNNPFLYGLALRNFEQESPPHGNVVGVQVVGASETSAGWRAGLRPGDIIISANKTPVKDIKSLQAVAHEKGKQLLVQVLRGAGALYLLII

SEQ ID NO: 4258 - DNA, 1398 bp, Methylococcus capsulatus str. Bath
  CDS (1)..(1398): transl_table=11
ttggaccctcttgctatgcggtttagaaagataatcgatagaggtaattccatgcgcatgaaatccatcggcgcgctgttgctactgaccgccagcggcctgtccctctgccccccggtgtgggccgatttgcccgccagcgtcaacggtctgccactgcccagcctcgcgcccgtcttgaagaaggccatgcccgcggtggtcaacatctcgacgaagacccagatcgaaatcgccgagaatcccctgatgcaagaccccttcttccgacatttcttcggtattccgaatcagccgcggcgccgtgagagctccagcctcggctccggggtgatcgtcgacgcccgccgaggctacatcctcaccaacaaccatgtgatcgacaaggcggacgagataagcgtgaccttgagagacggacgccagttgagcgcaaaactggtcggcgccgatccggagtcggatttggccgtcatcaaggtcgaacccaagaatctgacggaactgcccatcggtgattcgagtcagctcgaagtcggcgacttcgtggtagccatcggcaatccctttggcctggggcagacagtgacctccggcatcgtcagtgccctggggcgatccggactcggcattgaggggtacgaggatttcatccagaccgacgcctcgatcaaccccggcaactcgggaggcgccttgatcaatctccgtggcgagctggtcggcgtgaatacggccatcatcgctcccaccggcggaaacgtgggcatcggtttcgccatcccgtccaacatggccgccagcatcatgacccaactggtcgaaaagggcgaaatccgccgcggccagatcggcatcaccatccaagacctgacgccggatctcgctcaggcctttggcctgaagcagagccagggcgcggtgatcaccggcgtccaaaaggattccccggccgcatcttcgggcctggaagccggcgacgtcgtcgtcagcgtcaatgaccgcccggtcaaaaacagcgcggacgtccgcaacaccatcggcctcctgcccataggcgaagaagtccgggtcgaagtgatgcacaagggggagagagtggtacgcgaggtggtgatccgcgcccccaaactggtccaggaagagggcaataaaatccatcccagactgtccggtgtcatacttaagaacaacgaggagggcggtgtccaggtggaaaaaatccacacgagttcttacgccttccaggccggcctgcgccccggcgacgtgatcgtgatggcgaaccgcgaggaaatcgaaacgctcgatgacctgaagcgcgccaccaagggccgctcggagctgctcctcagcgtccagcggggcagcggctcgttcttcttgatgctgaagtag

SEQ ID NO: 4259 - protein, 465 aa, Methylococcus capsulatus str. Bath
MDPLAMRFRKIIDRGNSMRMKSIGALLLLTASGLSLCPPVWADLPASVNGLPLPSLAPVLKKAMPAVVNISTKTQIEIAENPLMQDPFFRHFFGIPNQPRRRESSSLGSGVIVDARRGYILTNNHVIDKADEISVTLRDGRQLSAKLVGADPESDLAVIKVEPKNLTELPIGDSSQLEVGDFVVAIGNPFGLGQTVTSGIVSALGRSGLGIEGYEDFIQTDASINPGNSGGALINLRGELVGVNTAIIAPTGGNVGIGFAIPSNMAASIMTQLVEKGEIRRGQIGITIQDLTPDLAQAFGLKQSQGAVITGVQKDSPAASSGLEAGDVVVSVNDRPVKNSADVRNTIGLLPIGEEVRVEVMHKGERVVREVVIRAPKLVQEEGNKIHPRLSGVILKNNEEGGVQVEKIHTSSYAFQAGLRPGDVIVMANREEIETLDDLKRATKGRSELLLSVQRGSGSFFLMLK

SEQ ID NO: 4260 - DNA, 1383 bp, Silicibacter pomeroyi DSS-3
  CDS (1)..(1383): transl_table=11
atgatccgtgccatcctgctttgtctgccgcttgtcctggccgcgccggttcaggcggaaacccgggtgccgacctcgcgggccgagatcgggctgggttttgccccggtggtgaaaaaggccgcccccgccgtggtcaatatctatgcccggatcatcaccgcgggccggcaaagcccgatctttgacgatcccttctttcgcgatttctttcgcggcttcggggcgccgcagccgcgggtgcagaactcgctcggttcaggcgtgatcctgtcggatgacggctatgtcgtgtccaattatcacgtggtcggcatggcctcggaaatccgggtggtgaccaccgaccggcgcgagttcaccgcacaggtggtgctgggagatgaggagagcgatatcgccatcctgcgcctggacgcggcgcgcgacctgcctttcttggcgctgcgtgacagtgaccatgtcgaggtgggcgagctggcgctggccatcggcaacccgtttggcgtggggcagaccgtcagcagcggcatcgtctcggggttggcgcgctcgggcgcggccaccggcaatgggcggggctatttcattcagaccgatgcgccgatcaatccgggcaattcgggcggtgcgctgatcgacgtgaatggcgacctgatcggcatcaatacctcgatcctcagccggtcgggcggctcgaacgggatcggctttgccattcctgccaatctggtggccgagttcctgcgccaggcccggcagggcaacagcagctttgcccagccttgggcggggatcgcggggcagccgatgaccgccgatatcgccgactcgctggggctggtcctgcccgaaggggtggtgatctcggacctgcatcccgagagcccgctggcgcaggctggctttgccgtgggcgatgtggtgaccgaggtcgatgggcagacggtcaactctccggccgagatgaagttccgcatgtcggtggccgggatcgggggcgaggcgcggatgacccggctgcggcagggtcagcgcgagaccctgagtgtagccctgatcgaggcgcccgatgcccctcccgcgcaggaaaccacgctgggagagcgcacgatcctgcccggtctgaccgtggcccggctgaacccggccgtgatcgcgcgcctgggcctgccgctgtcggcgcgcggggtcgtcgtgctcgaccccggcccctatggggcgcgggcgggtctgcaaccgggcgacgtgctgggcgcgatcaatggcgatcaggtggacagcccgcgcgatgtggaacgggcgctgagcgaggccgggcgccgggtacagatcgacctgcaacggcgcggccagcgggtctcgctgcggttccggctctga

SEQ ID NO: 4261 - protein, 460 aa, Silicibacter pomeroyi DSS-3
MIRAILLCLPLVLAAPVQAETRVPTSRAEIGLGFAPVVKKAAPAVVNIYARIITAGRQSPIFDDPFFRDFFRGFGAPQPRVQNSLGSGVILSDDGYVVSNYHVVGMASEIRVVTTDRREFTAQVVLGDEESDIAILRLDAARDLPFLALRDSDHVEVGELALAIGNPFGVGQTVSSGIVSGLARSGAATGNGRGYFIQTDAPINPGNSGGALIDVNGDLIGINTSILSRSGGSNGIGFAIPANLVAEFLRQARQGNSSFAQPWAGIAGQPMTADIADSLGLVLPEGVVISDLHPESPLAQAGFAVGDVVTEVDGQTVNSPAEMKFRMSVAGIGGEARMTRLRQGQRETLSVALIEAPDAPPAQETTLGERTILPGLTVARLNPAVIARLGLPLSARGVVVLDPGPYGARAGLQPGDVLGAINGDQVDSPRDVERALSEAGRRVQIDLQRRGQRVSLRFRL

SEQ ID NO: 4262 - DNA, 1437 bp, Silicibacter pomeroyi DSS-3
  CDS (1)..(1437): transl_table=11
atgagcattcgcatgtcccgcaaactgaccccctcgctgcccgcctgggccgccgcccccgccctgggtgcgctgctgctgagcagcgcggccctgccggtcagcgccgacgaggcgctggccgatctggtcgaacaggtcgcccccagcgtggtcaccgtgctggccagccagaacgcggcgccgcgcccgaccggcgcccagccctctcccttcgagggcaccccgttcgaggagttctttcaccagttcggcggcccgcgcggcatgccgatgcccgatagcggcccgcgtcaggggctcggctcgggcttcatcctcgattccgagggctatatcgtcaccaacaatcatgtggtggacggcgccgaccgggtgaccgtacgcctcagcgatgaccgcgaattcaccgcccaggtggtcggcaccgacccgctgaccgatctggcgctgctgcggatcgaggcgggcgaggcgctgcccgccgtctcgctgggcgacagcgacgccatccgcgtgggcgaggatgtagtggccgtgggcaacccgttcgggctcagctcgaccgtgaccaccggcatcgtctcggccaaggggcgcaatatctcggacggaccctatgccgagttcatccagaccgacgccgccatcaacaagggcaattcgggcggacctctgttcaacatggccggtcaggtcgttggcgtgaactcggtgatctattcaccctcgggcggctcggtgggactgggctttgccgtcacctcgaacatcgtcgatcacgtaatctcggacctgcgcgaggacggtcaggtcgatcgcggctggctgggcgtttcgatccagaaccttggcgccgatatcgccgccgcactcgggcttgatcagaccaccggcgcgctggtgtccgaggtcgtggccgacggcccctcggacgggaccctgcgccccggtgacgtgatcgtcgccttcgagggcaagccggtgcgcaccagcgccgacctgccccggctggtgggcgcgaccgaggcaggaacccgcgccagtatccgggtgatgcgcgatggcaaggcgcaggatatcgcggtcaccatcggcacccatcaggccagcgccgaggtgatcccggccagcgccgacagccccgccgacgcgcccggcctgggcctgacggtcgccccgctgagcgccgaggcccgcaagggcgccgggctggacagcgacacgggtggtgtgctgatcaccgatatcgcgcccgatggccccgccgcccgcgccggcctgcgcccgggcgacgtgatcctgcggctgggcggcagcgataccatcagcccggcagcactggccaaggcgctggagagcgaaaagaccgatccggcgctgatgctgatcaaccggggcggcaaccagatcttcctcgcggtcaagatcacctga

SEQ ID NO: 4263 - protein, 478 aa, Silicibacter pomeroyi DSS-3
MSIRMSRKLTPSLPAWAAAPALGALLLSSAALPVSADEALADLVEQVAPSVVTVLASQNAAPRPTGAQPSPFEGTPFEEFFHQFGGPRGMPMPDSGPRQGLGSGFILDSEGYIVTNNHVVDGADRVTVRLSDDREFTAQVVGTDPLTDLALLRIEAGEALPAVSLGDSDAIRVGEDVVAVGNPFGLSSTVTTGIVSAKGRNISDGPYAEFIQTDAAINKGNSGGPLFNMAGQVVGVNSVIYSPSGGSVGLGFAVTSNIVDHVISDLREDGQVDRGWLGVSIQNLGADIAAALGLDQTTGALVSEVVADGPSDGTLRPGDVIVAFEGKPVRTSADLPRLVGATEAGTRASIRVMRDGKAQDIAVTIGTHQASAEVIPASADSPADAPGLGLTVAPLSAEARKGAGLDSDTGGVLITDIAPDGPAARAGLRPGDVILRLGGSDTISPAALAKALESEKTDPALMLINRGGNQIFLAVKIT

SEQ ID NO: 4264 - DNA, 1419 bp, Campylobacter jejuni RM1221
  CDS (1)..(1419): transl_table=11
atgaaaaagatttttttatcattaagtttagcaagtgctttatttgctgcaagtattaattttaacgaatcgactgcaacggctaatcgtgtgaatcctgctgctggaaatgcagtgctttcttatcatgattctattaaagatgcaaaaaaatcagtggttaatatttccacctcaaaaactattacaagagcaaatcgtccaagccctttggatgatttttttaatgatccttattttaaacaattttttgattttgattttcctcaaagaaaaggaaaaaatgataaagaagtggtgagttctttgggatcaggggtgattatttcaaaagatggttatatagtaacaaataatcacgttgtagatgatgctgatacgattacagtgaatttaccaggaagcgacatagaatataaagcaaaacttataggtaaagatccaaaaacagatttggctgttataaaaatagaggctaataatctttcagctattacttttacaaattctgatgatttaatggaaggagatgttgtttttgcacttggaaatccttttggagttggttttagtgttacaagtgggataatatctgctttaaataaagacaatataggtttaaatcaatatgaaaattttatacaaacagatgcttctatcaatccaggaaattcaggtggagctttggtggatagtcgcggatatttagtaggtattaattcagctattctttctcgtggtggtggaaataacggcataggttttgccataccttcaaatatggttaaagatatagctaaaaaacttattgaaaaaggcaagattgatagaggatttttaggtgtgactattttagctttgcaaggtgatactaaaaaagcttacaaaaatcaagaaggagctttaatcactgatgttcaaaaaggttcaagtgctgatgaagcagggcttaagcgtggagatttagttactaaagttaatgataaggttataaaaagtcctattgatcttaaaaattatataggaactttagagattggtcaaaaaatttcattaagttacgaaagagatggagaaaataagcaagcaagttttattcttaaaggtgaaaaagaaaatcctaaaggcgtacaaagcgatttgattgatggtttgagtttgagaaatttagatccaagacttaaggatcgtttgcaaattccaaaagatgttaatggtgttttggttgatagtgttaaagaaaagagcaaaggaaaaaattctggtttccaagagggtgatattatcataggtgttggacaaagtgaaattaaaaatttaaaagatttagaacaagctttaaaacaagttaataaaaaagaatttaccaaagtttgggtatatcgcaatggttttgcgactttgcttgtgcttaaataa

SEQ ID NO: 4265 - protein, 472 aa, Campylobacter jejuni RM1221
MKKIFLSLSLASALFAASINFNESTATANRVNPAAGNAVLSYHDSIKDAKKSVVNISTSKTITRANRPSPLDDFFNDPYFKQFFDFDFPQRKGKNDKEVVSSLGSGVIISKDGYIVTNNHVVDDADTITVNLPGSDIEYKAKLIGKDPKTDLAVIKIEANNLSAITFTNSDDLMEGDVVFALGNPFGVGFSVTSGIISALNKDNIGLNQYENFIQTDASINPGNSGGALVDSRGYLVGINSAILSRGGGNNGIGFAIPSNMVKDIAKKLIEKGKIDRGFLGVTILALQGDTKKAYKNQEGALITDVQKGSSADEAGLKRGDLVTKVNDKVIKSPIDLKNYIGTLEIGQKISLSYERDGENKQASFILKGEKENPKGVQSDLIDGLSLRNLDPRLKDRLQIPKDVNGVLVDSVKEKSKGKNSGFQEGDIIIGVGQSEIKNLKDLEQALKQVNKKEFTKVWVYRNGFATLLVLK

SEQ ID NO: 4266 - DNA, 1431 bp, Ehrlichia ruminantium str. Welgevonden
  CDS (1)..(1431): transl_table=11
atgaggaaatttttattagttatatcagtactattactaacaaccgtaccattagttagttcatcttctgaagatattgagcaatatgatccaagatcagggttttctcggctaattcaagattcaagcccagcaatagtaaacgttagtataattcaggattcatcatccgaacaactttctatgttattaaattttgaagagctattaaaaagtttagttgaaggaaaatcaattaaaaaagctgtacctgaagagatattaagttcaggctcaggttttgtaattgataaatcaggcattattgtaactaattatcatgttgtacaaaatgcaaaagaaatttttgttacatttagtgataataagtctgtaccagcaaaacttttaggtatagatccacaaactgatcttgcagtattaaaagttgaagttaaccaaaaccttccatacttaagtttcggtgattctaactctgctaaagtaggagattgggtagttgcaataggtaatccattcggcctcggaggatctgcaagtattggtattatatctgcacgagcaagagatttaaaaatcggagcaacagaatttctacaaactgatgcagcaataaatagcggtaattctggcggtccattgttcaatatacatggagaagtaatcggaattaacacagcaatgatgtcaacacaacgtggaggaggtagtataggagttggttttgcaattccatctaatagtgctattcctataattaaagtcctctctcaaggtaaaaaggtagaacatggttggcttggtatagtaatgcagcccgtaacagaagagctaatagaaccttttaagttaaaagaagtaacaggaattttagtaacaactgtagttaaggatagtccagcaaataaagcaactatattgccaggagacgtaatacttgagtttaatcataataaggtcactactggatcacagctatatcaatctgtactaagatctaagccaggtagtgatgcaaatatcttgatatcacgtcatggtaaattaataaatttaaatgttaaaatgggaaaatttgaggaccctaatttacaggatcagagtaatgagatctaccagaatataaaaaacgttttccaatcacctgaattaggtttaacagtaggtaacatagaacctaatatgctacctaaatgtacagaagatactatcacaggagtaatagtattaaaagcagaacatggaaatgatgccccaagtaaaaatttaaggaaaggagacgtaatatcacaaataaaccaactagcagtagctaacatatcagattttaagaatgccataaaaaaaacaaatagaaataagtctgtagcattgcttgtccacagaaataactttccatcaatatttattcctgttaagttaaagaagtaa

SEQ ID NO: 4267 - protein, 476 aa, Ehrlichia ruminantium str. Welgevonden
MRKFLLVISVLLLTTVPLVSSSSEDIEQYDPRSGFSRLIQDSSPAIVNVSIIQDSSSEQLSMLLNFEELLKSLVEGKSIKKAVPEEILSSGSGFVIDKSGIIVTNYHVVQNAKEIFVTFSDNKSVPAKLLGIDPQTDLAVLKVEVNQNLPYLSFGDSNSAKVGDWVVAIGNPFGLGGSASIGIISARARDLKIGATEFLQTDAAINSGNSGGPLFNIHGEVIGINTAMMSTQRGGGSIGVGFAIPSNSAIPIIKVLSQGKKVEHGWLGIVMQPVTEELIEPFKLKEVTGILVTTVVKDSPANKATILPGDVILEFNHNKVTTGSQLYQSVLRSKPGSDANILISRHGKLINLNVKMGKFEDPNLQDQSNEIYQNIKNVFQSPELGLTVGNIEPNMLPKCTEDTITGVIVLKAEHGNDAPSKNLRKGDVISQINQLAVANISDFKNAIKKTNRNKSVALLVHRNNFPSIFIPVKLKK

SEQ ID NO: 4268 - DNA, 1431 bp, Pseudomonas fluorescens Pf-5
  CDS (1)..(1431): transl_table=11
atgtcgataccacgcttgaagtcctacttcaccattcttgccaccgtgctggtgcttgggcaggccgtttctgcccaggcggccgagctgcctgatttcacccaactggtcgagcaggcctcgcctgcggtggtgaacatcagtaccacgcagaaactgccggaccgccgggtttccaattcggcgcagatgcccgacctcgaaggcctgccgccaatgctgcgcgagttcttcgaacggggcatgccccagccacgctctccgcgcggggatcgtcagcgcgaagcgcagtcgctgggttccgggttcatcatctccgcggacggttacatcctcaccaacaaccacgtgatcgccgatgcggacgaaattcttgtgcgtctggccgatcgcagtgagctgaaagccaagctgatcggtaccgacccacgctccgacgtagcactgctgaaaatcgatggcaaagacctgccggtgctgaaactgggtaaatcccaggacctcaaggccggccagtgggtggtggccatcggctcgccgttcggcttcgaccataccgtgacccagggtatcgtcagtgccatcggtcgcagcctgccgaacgaaaactacgtgccgttcatccagaccgacgtgccgatcaacccgggcaactccggtggcccgctgttcaacctggccggtgaagtggtggggatcaactcgcagatctacacccgctccggtggtttcatgggcgtgtctttcgccatcccgatcgatgtggcgatggacgtttccaaccagctgaaaaccggtggcaaagtcagccgtggctggcttggcgtggtaatccaggaggtcaacaaggacctggctgaatccttcggcctggagaaaccggccggcgcgctggttgcacagatccaggatgatggcccggcggccaagggcggcctgcaagtgggtgacgtgatcctcagcctcaatggccagcccatcgtcatgtcggccgacctgccgcacctggtaggcgcgctgaaggccggggccaaggccaacctggaagtgatccgcgacggcaagcgcaagaatgtcgagctgaccgtcggcgcgattcctgaagaagacaaagacctgagcatgctgcccaagtcgggtgtcgagcgcagcagcaatcgtctgggtgtagcggtggtcgagctcaacgatgagcagaagaaagccttcgacctcaagggcggggtagtcatcaaggaagtccaggacggtcctgcggcgctgatcggcttgcagccgggcgacgtgatcactcacctgaacaatcaggcgatcacttcggcgaaggagttcactgaaatcgccaaggcattgccgaagaaccgctcggtgtccatgcgggtactgcgtcaggggcgagccagcttcatcaccttcaagctggccgagtaa

SEQ ID NO: 4269 - protein, 476 aa, Pseudomonas fluorescens Pf-5
MSIPRLKSYFTILATVLVLGQAVSAQAAELPDFTQLVEQASPAVVNISTTQKLPDRRVSNSAQMPDLEGLPPMLREFFERGMPQPRSPRGDRQREAQSLGSGFIISADGYILTNNHVIADADEILVRLADRSELKAKLIGTDPRSDVALLKIDGKDLPVLKLGKSQDLKAGQWVVAIGSPFGFDHTVTQGIVSAIGRSLPNENYVPFIQTDVPINPGNSGGPLFNLAGEVVGINSQIYTRSGGFMGVSFAIPIDVAMDVSNQLKTGGKVSRGWLGVVIQEVNKDLAESFGLEKPAGALVAQIQDDGPAAKGGLQVGDVILSLNGQPIVMSADLPHLVGALKAGAKANLEVIRDGKRKNVELTVGAIPEEDKDLSMLPKSGVERSSNRLGVAVVELNDEQKKAFDLKGGVVIKEVQDGPAALIGLQPGDVITHLNNQAITSAKEFTEIAKALPKNRSVSMRVLRQGRASFITFKLAE

SEQ ID NO: 4270 - DNA, 1380 bp, Colwellia psychrerythraea 34H
  CDS (1)..(1380): transl_table=11
atgaaaaaatcatttacatcatctaaattatcaattgtcatcagtgccgcattattatcatcgaccttagcacttactagcgctcctgcattagcaaacttacctgcccaagtagatggccatgtaatgcccagcttagctccaatgcttgaacatgcgactccagctgttgttagtatctctgtaataggcacccataatgtgccacaacaaaatgtacctgacgcattcaaatttttctttggtaataaagaaaaaaatcaaggacaacctcaacaaagaccatttcgcggcttgggctcaggtgtaattattgatagtgatgaaggttatgttgttaccaataaccatgtcatagaaaatgctgacaaaattatgatcaccttaaaagacggtcgtcagttagaagcgaagaaaatcggtagcgatgcaaaaagtgacattgctttattacagattgattctgaaaacttaagtgaaatcaaattagccgattccgataatttgcgtgttggagatttcactgtcgcgattggtagtccgtttggtctaggacaaaccgttacttctggcattgttagtgcgctaggacgtagtaatctaaatatcgaacattatgaagactttattcaaaccgatgctgccataaatagtggtaactccggtggcgctttagttaacttgcgcggtgagttgattggtatcaacacagcgatattagggcctagtggtggtaatgtcggtattggctttgctatcccgagtaatatgatgcataacctaattacgcagataattgaatttggtgaagtacaccgcggtattctgggtgtatctggacgaagtgttaacagcgaaattgccaaagcaatggagctagaaacaagtcaaggtggctttattgagcaagtgatgcctgactctgctgcagacgaagcgggtattaaggcaggtgacgtgatcattgccgtgaatggtaaagccattaaaagcttctttgaactacgcgctaaaattggttcaattggtgcgaataaaaaagttaagttaacggtgataagagatggagacaacaaagtatttaccgttaagttaaagcaagatcaaagtgcagatattactgccgccagtattcacactatgttagatggtactaaattagaaaatgacaccaagaaacaggcgattatcatagaacaagttgccgaaggctctccggcacaaagggcaggatttcaagcaggtgatattatcacgggcgttaaccgtagtcgtatcaaagatattgctcaattacgtgattaccttaaagataaaagtggtgtactagcgctaaatattgttcgggataatcattcccagtacataatgatccgttaa

SEQ ID NO: 4271 - protein, 459 aa, Colwellia psychrerythraea 34H
MKKSFTSSKLSIVISAALLSSTLALTSAPALANLPAQVDGHVMPSLAPMLEHATPAVVSISVIGTHNVPQQNVPDAFKFFFGNKEKNQGQPQQRPFRGLGSGVIIDSDEGYVVTNNHVIENADKIMITLKDGRQLEAKKIGSDAKSDIALLQIDSENLSEIKLADSDNLRVGDFTVAIGSPFGLGQTVTSGIVSALGRSNLNIEHYEDFIQTDAAINSGNSGGALVNLRGELIGINTAILGPSGGNVGIGFAIPSNMMHNLITQIIEFGEVHRGILGVSGRSVNSEIAKAMELETSQGGFIEQVMPDSAADEAGIKAGDVIIAVNGKAIKSFFELRAKIGSIGANKKVKLTVIRDGDNKVFTVKLKQDQSADITAASIHTMLDGTKLENDTKKQAIIIEQVAEGSPAQRAGFQAGDIITGVNRSRIKDIAQLRDYLKDKSGVLALNIVRDNHSQYIMIR

SEQ ID NO: 4272 - DNA, 1470 bp, Dechloromonas aromatica RCB
  CDS (1)..(1470): transl_table=11
atgaaactgaaacccctgaaaatgacagttgccgccattgctgtcgctgctgcgctgggcggcgcctattcgctgggtcaatacgcgccctttgccagtgccaacgcgacaacccagcctgccgctagcagcgtcgcccctgccgccgctccggtcagcacgcctaacggcctgccggacatgcgcagcattgtcgccaacaatgcccaggccgtggtcaacatcagcgtgaccggaacgcgcaagacgggcgccaaccttcccggcatgccgcaactcgaccccgatgacccgctttaccagttcttccgccgcttcggtggacagatgccgcaggacaatgaacccacgcacggccttggctccggtttcatcgtgacgcctgacggcacggtgttgaccaatgcccatgtcgtcgacggcgccgaggaagtgaccgtcaagcttaacgacaagcgcgaattcaaggccaaggtgcttggcctggacaaggcaagcgatgtggccgtcctgagaatcgacgccaaaaacctgcctacggtgaagatcggttcatcgacgcagactgccgtcggcgaatgggtgctggccatcggctcgccgttcggattcgaaagcagcgccagtgccggcattgtctcggccaagtcgcgcaacctgccggatggcagctacgtgcccttcatccagaccgatgtggcagtgaatcccggcaactccggcggtccgctgttcaacatgaacggcgaggtaatcggcatcaattcgcagatctactcacgcagcggcggttaccaggggctgtcttttgccattccgatcgaggtcgcgatgaatgtcgaaaagcagatcgtcacgcacggcaaggtgcaacgcggcaagctcggcgtcaccatccaggaggtcaaccagtcgctggcagacagcttcggcctgcccaaaccggccggcgcgctggtcgctgcagtcgagaaaggcagcccggcggccaaggcgggtctggagcctggcgatgtcattctcggcatcgacggcaaaaccgtcgagacgcccggcgaactccctgccgccatcgccaccaagctgcccggcgaatcggcccgcctgcaaatctggcgcaagggtggaacgcagaacattgatgtcaaggttggcagtttcggagacgagaaagtggccgcgaacgacacacagcccgccaccaaaggtcgcctcggcgtcgccgtgcgcccactgacgccggaagaacgacgccaggccgagatcaagggtggcgtgctcgtcgagcaagccgacggcgccgccggtcgtgccggcatccggccgggcgacatcattgtgtcggtcaacggacagccgattggcgacgtcgaacaactgcgcagcctgatcgccaaatccggtaagaaggcagccatcctgatcgaacgcggcgattctcgactattcgttccggtcgacctcggttaa

SEQ ID NO: 4273 - protein, 489 aa, Dechloromonas aromatica RCB
MKLKPLKMTVAAIAVAAALGGAYSLGQYAPFASANATTQPAASSVAPAAAPVSTPNGLPDMRSIVANNAQAVVNISVTGTRKTGANLPGMPQLDPDDPLYQFFRRFGGQMPQDNEPTHGLGSGFIVTPDGTVLTNAHVVDGAEEVTVKLNDKREFKAKVLGLDKASDVAVLRIDAKNLPTVKIGSSTQTAVGEWVLAIGSPFGFESSASAGIVSAKSRNLPDGSYVPFIQTDVAVNPGNSGGPLFNMNGEVIGINSQIYSRSGGYQGLSFAIPIEVAMNVEKQIVTHGKVQRGKLGVTIQEVNQSLADSFGLPKPAGALVAAVEKGSPAAKAGLEPGDVILGIDGKTVETPGELPAAIATKLPGESARLQIWRKGGTQNIDVKVGSFGDEKVAANDTQPATKGRLGVAVRPLTPEERRQAEIKGGVLVEQADGAAGRAGIRPGDIIVSVNGQPIGDVEQLRSLIAKSGKKAAILIERGDSRLFVPVDLG

SEQ ID NO: 4274 - DNA, 1395 bp, Thiobacillus denitrificans ATCC 25259
  CDS (1)..(1395): transl_table=11
atgttgagagcggctctggccatgacgagcttcgtgtttgtgctggcggcgccggtcgcggaagcggtcgacgtcgccgatctggtcgaaaagcagggtccggcggtggtcaacatcagcaccaccaagctggtcaagcgcggcgccgagggctttccgttcgcggtcccggaagaccccgagatgcaggaattctttcgccgcttctttccgggcgtgccgggtcgggcgcccggggcaccggcgcaggagtttccggcgcatggcgccggctccggcttcatcgttagtagcgacggctacatcctgaccaacgcccacgtcgtgaaaggtgcggacgaagtcgtcgtcaagctgaccgacaaacgcaagttcatcgccaaggtcgtgggttcggacccgcgcaccgacgtggccgtgatccgcatcacggcgcgcaacctgccggcggtgcgcctcggcgacccggaaaaacttcgcgtcggtgaggcagtggctgcgatcggctcgcctttcggcttcgagaactcggtcaccgcgggcatcgtgtcggccaagggccgctcgctgccgtccgaaagctacgtgcccttcatccagaccgacgtcgcggttaacccgggtaattcgggggggccgctgttcaacatgcgcggcgaagtcgtcggcatcaactcgcagatctacagccagagcggcggctaccagggggtggcgttcgcgatcccgatcgacatcgcgatggaggtcgtcgaccagttgaaggctggcggcaaggtctcgcgcggctggcttggcgtcatgatccaggaggtcagcgcggacctcgccgaatccttcggcctcgaccggccgcgcggcgcgctcgtgtcgcaggtacaggatggaagccccgcggcccgtgcgggcgtccagaccgccgacgtgatcctcagcttcaacggcaagccggtcgagaattctggcgacctgccgcgcatcgtcggcagcaccaagcccgggtcgaagatcccgatgcaggtctggcggcgcggcaaaatgcagaccctgcaggtcgtcctggccgagctgccgagcgaagagcaggtcgccggcgcgggcaagagcggcaagagctactcgcgcggcggcctcgcgctgtccgaactcaaccccgaacagcggcgcgagctcaagatcgaccacggcctgctcgtcgaggaagtcaccggcgacgccgctcgggccggcatccgggtgggggacatcgtcctcgccgtcaacaatgcaaggatcgcgaccgtcgacgcgttccgccaggcgatcgcggcgatcccgaaaggcaagagcgctgcgctcctggtgcggcgcggcgaaggatcgctgtacatcccgctgaagatttcgggtgagtaa

SEQ ID NO: 4275 - protein, 464 aa, Thiobacillus denitrificans ATCC 25259
MLRAALAMTSFVFVLAAPVAEAVDVADLVEKQGPAVVNISTTKLVKRGAEGFPFAVPEDPEMQEFFRRFFPGVPGRAPGAPAQEFPAHGAGSGFIVSSDGYILTNAHVVKGADEVVVKLTDKRKFIAKVVGSDPRTDVAVIRITARNLPAVRLGDPEKLRVGEAVAAIGSPFGFENSVTAGIVSAKGRSLPSESYVPFIQTDVAVNPGNSGGPLFNMRGEVVGINSQIYSQSGGYQGVAFAIPIDIAMEVVDQLKAGGKVSRGWLGVMIQEVSADLAESFGLDRPRGALVSQVQDGSPAARAGVQTADVILSFNGKPVENSGDLPRIVGSTKPGSKIPMQVWRRGKMQTLQVVLAELPSEEQVAGAGKSGKSYSRGGLALSELNPEQRRELKIDHGLLVEEVTGDAARAGIRVGDIVLAVNNARIATVDAFRQAIAAIPKGKSAALLVRRGEGSLYIPLKISGE

SEQ ID NO: 4276 - DNA, 1449 bp, Pseudomonas fluorescens PfO-1
  CDS (1)..(1449): transl_table=11
atgtcgataccaagcttgaagtcttatctctccattttcgccacggtgctggtgctcggtcaggctgttcctgcagtccatgcggctgaggcggccagcccggccaacctgccggatttcacccagctggtcgaacaggcctcgcctgcggtggtgaacatcagtaccacgcaaaagctgccggatcgcaaagtgaaccagcaaatgcccgacctggaaggcttgccgccgatgctgcgcgagttcttcgagcgcggcatgccgccgcaacagcgttctccgcgtggtgatcgccagcgtgaagcgcagtcgctggggtcgggctttatcatttcgccggatggctacatcctgaccaataaccatgtgatcgccgatgccgacgaaatcctcgtccgtctggctgatcgcagtgaaatgaaagccaagctgatcggcaccgacccacgctccgacgtggcgctgctgaaaatcgaaggcaaggatctgccagtgctgaaactcggcaaatcccaggacctgaaagccggtcaatgggtggtggcaatcggttcgccattcggctttgatcacaccgtgactcaaggcatcgtcagtgccgtcggtcgcagcctgccgaatgaaaactacgtgccgttcatccagaccgacgtaccgatcaacccgggtaactccggtggcccgctgttcaatctgaacggtgaagtggtcgggatcaactcgcagatctacacccgttccggtggcttcatgggcgtgtcgttcgccattccgatcgacgtggcaatggacgtttccaatcagctgaaaagcggcggcaaagtcagccgtggctggttgggcgttgtcatccaggaagtgaacaaggatctggccgagtcgttcggtctggataaaccggccggtgcactggtcgcacagattcaggatgacggcccggctgcaaagggcggcctgcaagtgggtgacgtgatcctgagcatgaacggtcaaccgatcgtcatgtctgctgacctgccacatctggtgggtgcgttgaaggctggcgccaaggccaacctcgaagtgattcgtgacggcaagcgcaagaatgtcgagctgactgtcggcgccattccagatgaagacaaggaactggatgctctgccgaaatctggtgctgaaaccaacagcaatcgtctgggggtatcggttgccgagctgagcgccgagcagaagaaaacctacgacctcaaaggtggtgtggtgatcaaggaagtgcaggacggtcctgcagccctgatcggtctgcaaccgggcgacatcatcacccacctgaacaatcaggccatcggttcttccaaggagttcgccgagatcgccaaggcgctgccgaagaaccgttcggtgtcgatgcgcgttctgcgtcaggggcgtgccagcttcatcacgttcaaactggctgaatga

SEQ ID NO: 4277 - protein, 482 aa, Pseudomonas fluorescens PfO-1
MSIPSLKSYLSIFATVLVLGQAVPAVHAAEAASPANLPDFTQLVEQASPAVVNISTTQKLPDRKVNQQMPDLEGLPPMLREFFERGMPPQQRSPRGDRQREAQSLGSGFIISPDGYILTNNHVIADADEILVRLADRSEMKAKLIGTDPRSDVALLKIEGKDLPVLKLGKSQDLKAGQWVVAIGSPFGFDHTVTQGIVSAVGRSLPNENYVPFIQTDVPINPGNSGGPLFNLNGEVVGINSQIYTRSGGFMGVSFAIPIDVAMDVSNQLKSGGKVSRGWLGVVIQEVNKDLAESFGLDKPAGALVAQIQDDGPAAKGGLQVGDVILSMNGQPIVMSADLPHLVGALKAGAKANLEVIRDGKRKNVELTVGAIPDEDKELDALPKSGAETNSNRLGVSVAELSAEQKKTYDLKGGVVIKEVQDGPAALIGLQPGDIITHLNNQAIGSSKEFAEIAKALPKNRSVSMRVLRQGRASFITFKLAE

SEQ ID NO: 4278 - DNA, 1386 bp, Rhodobacter sphaeroides 2.4.1
  CDS (1)..(1386): transl_table=11
atgcgtcacgctctgcttgccttttccctgatcgctctcctgtcgccgcttgccgcgcctgccgagacgcgcctgcccgagagcgccgccgagatttcgctctccttcgcgccggtggtgcgctcggcggcacctgcggtcgtgaacatctatgccacgcgggtggtcgagcagcgcgtgagcccctttgccgccgatccgttcttcgaccagctcttccgggatttcggtcgccgccagccgcgggtgcagaactcgctgggctccggcgtgatcgtctccggggacgggatcgtggtgtcgaactatcatgtggtgggacaggccgacgccatccgggtcgtgctgaacgaccggcgcgaatatgaggccgaggtgatgctcgccgatcaggacagcgaccttgcggtgctgaagctgaaggaggccagggatctgccgcatctggggctgcgcgattccgacggcgtcgaggtgggggagctggtgctggccatcggcaacccgttcggggtgggccagaccgtgtcgcagggcatcgtctcggggctcgcgcgctcgggtctctcgatcgacggcgggcgcggctatttcatccagaccgatgccgccatcaaccccggcaactcgggcggcgcgctggtcgatacggcggggcggctcgtagggatcaacaccgcgatcctcacccagtcgggcggctcgaacgggatcggcttcgccattcccgccaatctggtgcgcagcttccttgcacaggcggaggcgggcgaggcgcacttccagcgtccctgggcaggggtgaacgggcaggcggtcgatgcaagcatggccgaggcgatggggctcgaacgcccggaaggggtggtgctgaccgagctcgatcccgagagcccgttccgcgccgcgggcctgcgcgcgggcgatgtggtggtggcgctggaggggcagcgcaccgacagcccgcaggaggtgatcttccggctctcctccttgggcatcggcgcgcgcgccacggtgagctatctgcgcgacggcgagacgcgcgaggccgagatcgcgctggtcgtggcgcccgacaagccgccccgcgagacggtggcgctgcgcgagacggtccttgccgggctcacggtcgagcggctcaatcccgcggtgcgggccgagctgaacctgcccctgaccctcgaaggggtggtggtgcgcgcctccgaggcgacggcggcgcagacgggcctccggccgggcgacatcctgctcgagatcaacggccgccggatcgagcgcccgcgcgatgtggagcgcgccgcgcaggagcgggtgcgctggtggcagatcgacgttctccgcgacggcaagccgctgcgactgcgcttccgtctctga

SEQ ID NO: 4279 - protein, 461 aa, Rhodobacter sphaeroides 2.4.1
MRHALLAFSLIALLSPLAAPAETRLPESAAEISLSFAPVVRSAAPAVVNIYATRVVEQRVSPFAADPFFDQLFRDFGRRQPRVQNSLGSGVIVSGDGIVVSNYHVVGQADAIRVVLNDRREYEAEVMLADQDSDLAVLKLKEARDLPHLGLRDSDGVEVGELVLAIGNPFGVGQTVSQGIVSGLARSGLSIDGGRGYFIQTDAAINPGNSGGALVDTAGRLVGINTAILTQSGGSNGIGFAIPANLVRSFLAQAEAGEAHFQRPWAGVNGQAVDASMAEAMGLERPEGVVLTELDPESPFRAAGLRAGDVVVALEGQRTDSPQEVIFRLSSLGIGARATVSYLRDGETREAEIALVVAPDKPPRETVALRETVLAGLTVERLNPAVRAELNLPLTLEGVVVRASEATAAQTGLRPGDILLEINGRRIERPRDVERAAQERVRWWQIDVLRDGKPLRLRFRL

SEQ ID NO: 4280 - DNA, 1431 bp, Geobacter metallireducens GS-15
  CDS (1)..(1431): transl_table=11
atgaagcattggacgctgaaatctgctggcaaaatatcccttctgacagcttttctcctgatttcgctaattttcctggggggatgcgacgggaggagcaagaccgaattcgtgggattcccccaatcattcgccgatctcgccgaaaaaatcagacccgccgtggtgaacatcagcaccacatcaaccgtcaaagtacccggcaatcccttcaggcactttttcggccccgaggaagaagggccgtttggtgatttcttcaagcattttttcggcgacatgcccgaccgtgagctgaaacagcagagtctcggctccgggatcatcaccgacaaggacgggtacatcgtcaccaacaaccacgtggtggataatgccgaggagataaaggtcaagatctctgacggcagagaattcaaggccaaggttatcggaagggatcccaaaaccgatcttgcgctgatcaagatatcttcccccttcagaaatctccccgtcctccccctcggcgactccgacaaaatgagagttggtgattgggtgcttgcagtggggaacccgttcggtctcgaacacaccgtgacccaggggatcatcagcgccaccgggagggtgatcggttccgggccctatgacaatttcctccagaccgacgcccccatcaaccctggcaacagcggcggccccctggtcaacctcaaaggggaggtgatcgggatcaataccgccatcgtccccggcgggcaggggctcggctttgccatcccgagcagcatggccaaaatggtgctcaagcagttgcaggagaaggggaaagtggtgcggggatggctcggtgttacgatccagaccgtaacccccgacctggccgcctcctttggcctcaaggaggcgaagggggccctcgtctccgacatcgcggaaggaggaccggccgccaaagggggaatcaggcggggagatatcatcctttcctttgacgggaaaaatgtgaaggactccatggaactgccccgaatcgtagcggaaaccccggtcggcaaagaggtggatgtcacggtgctcagggaagggaaagaggtgcattgcagggtgagggtcgaggaactcacggaacagaggattgccgcccagaccgaggcgccgacggacagcttcggaatgacgtttgtcgacattacccccaaggtgcggcaacaactcgggatcaaagagaaaacgggagttgtcgttgccggagtggagcccgggagcatcgccgaagatgcgggtatccgggcgggggatgtgatcaaggaagttaatcgcaaaccggtcagaaacctggcggacttgagcagtgccttggagaagtccgcaaaggggcaaccggtcctcttgctgctcaatcggggaagtcagactttctatgtgacgctggaaacttcgtag

SEQ ID NO: 4281 - protein, 476 aa, Geobacter metallireducens GS-15
MKHWTLKSAGKISLLTAFLLISLIFLGGCDGRSKTEFVGFPQSFADLAEKIRPAVVNISTTSTVKVPGNPFRHFFGPEEEGPFGDFFKHFFGDMPDRELKQQSLGSGIITDKDGYIVTNNHVVDNAEEIKVKISDGREFKAKVIGRDPKTDLALIKISSPFRNLPVLPLGDSDKMRVGDWVLAVGNPFGLEHTVTQGIISATGRVIGSGPYDNFLQTDAPINPGNSGGPLVNLKGEVIGINTAIVPGGQGLGFAIPSSMAKMVLKQLQEKGKVVRGWLGVTIQTVTPDLAASFGLKEAKGALVSDIAEGGPAAKGGIRRGDIILSFDGKNVKDSMELPRIVAETPVGKEVDVTVLREGKEVHCRVRVEELTEQRIAAQTEAPTDSFGMTFVDITPKVRQQLGIKEKTGVVVAGVEPGSIAEDAGIRAGDVIKEVNRKPVRNLADLSSALEKSAKGQPVLLLLNRGSQTFYVTLETS

SEQ ID NO: 4282 - DNA, 1419 bp, Geobacter metallireducens GS-15
  CDS (1)..(1419): transl_table=11
atgcgtatctgtcgcctgttcattgtcatcattgcgctctttaccgttgtgcccgcctgctcgaagaaggaagataagctcttctacgagacggggcgggccgaagcgccggtaaaggacgttcccaaggacatcatggctacccagcaggccttcgtggagttggtgaagaaggtgacgccgtcggtggtcaacatctccaccatcagcaggaagaaggtcgagcagccctttttcgaattttctcccttattcggcgacttgttcggcgacggcaggccccgctaccgccgcgacaagagcctcggctccggattcatcatcaacaagagcggctacatcgtcaccaatgaccacgtggtgcgggacgccgagaccatcaaggtcaggctctccaacgaaaatgtctatgacggcagggttgtcggcagtgatcccaagaccgacatcgccgtcatcaagatcgacgccaaggaggatctccccgtggcggtcctggccgattccgacaagctccaggtggggcagtgggccatcgccatcggcaatcctttcggcctcgaccggaccgtgaccgtgggggtagtgtcggccaccggccgctccaacatggggatcgagacctacgaggacttcatccagaccgacgcctccatcaaccccggcaactcgggggggccgctcctgaacgtccacggggaggtgatcggcatcaacaccgccatcgtggccgccggccaggggatcggctttgccatccccgtcaacatggccaagcagatcgtcacccagctcgtcaccaaggggagtgtgagccgtgggtggctcggcgtatcaatccagccggtgaccgacgagattgcccgggagttcggcctcaagaaggcccggggggtgctggtggccgacgtcgtggaggggagccccgctgccaagggggggatcaagcagggagacattatcctcgacttcgccggcaccgagatcaaggacgcccagcacctccagcgggtcgtggccgcaacggcaccggggaagaccgtccaggtcacggtgttccgtggggggcgcgaggtgaagctttccctcacctcggccagcgccgacagcgccggggcccggcaggcccgaccccagggggaggagcccgacctcctcggtctgatggtcgaggaaattccttccgacctgcgccgccgtggcgtatccggcgtggtcgtggccgaggttgacgaggaggggattgccgccgaggcggggatccagcgtggcgacatcatcgtttcggtgaaccgcaagggggtcgcgacccgggccgaatatgaacgcgccatggcggaagccggacgccggggcacggcgatcctgctagtgcgccggggcaacgccagcattttcttctcgctcaggctgcgctaa

SEQ ID NO: 4283 - protein, 472 aa, Geobacter metallireducens GS-15
MRICRLFIVIIALFTVVPACSKKEDKLFYETGRAEAPVKDVPKDIMATQQAFVELVKKVTPSVVNISTISRKKVEQPFFEFSPLFGDLFGDGRPRYRRDKSLGSGFIINKSGYIVTNDHVVRDAETIKVRLSNENVYDGRVVGSDPKTDIAVIKIDAKEDLPVAVLADSDKLQVGQWAIAIGNPFGLDRTVTVGVVSATGRSNMGIETYEDFIQTDASINPGNSGGPLLNVHGEVIGINTAIVAAGQGIGFAIPVNMAKQIVTQLVTKGSVSRGWLGVSIQPVTDEIAREFGLKKARGVLVADVVEGSPAAKGGIKQGDIILDFAGTEIKDAQHLQRVVAATAPGKTVQVTVFRGGREVKLSLTSASADSAGARQARPQGEEPDLLGLMVEEIPSDLRRRGVSGVVVAEVDEEGIAAEAGIQRGDIIVSVNRKGVATRAEYERAMAEAGRRGTAILLVRRGNASIFFSLRLR

SEQ ID NO: 4284 - DNA, 1434 bp, Methylobacillus flagellatus KT
  CDS (1)..(1434): transl_table=11
atgtttaaaaagctaattgccatgtcagcaatttgtttatttgttggtatggcgggggcaacgccggttttagccaaggaattgcccgattttaccgagctggcggaaaagcagggagcggcagtggtcaatatcagcgtgacccaggtcgtacagtctggaataggtggatctccttttcccggattccccgaagatgaggcattgaatgaattctttcgccgttttggcattccagggtttccgggtgtgccgcgcggacaaggtggtccacagcaacctgaatttaaatcccagtccctcgggtcaggattcatcattagcagcgatggttatatcctgacgaatgcccatgtagttcgcgaagccgatgaagtgatcgtcaagctgaatgataaacgtgaatttcaggccaagattgtgggggttgaccgccgcacggatgtcgcgctgcttaaaattgatgcgacagggctgccgaaggtcaccattggcaatcctgagcaactgaaggtaggggagtgggtggtggcaattggctccccgtttggactggaaagtacgttgaccgccggtgtggtcagtgcaaaaggccgtgccttgccacaggaaaattttgtgcctttcatccagaccgatgttgccattaaccctggcaattctggcggaccgttattcaacctcaagggtgaggtggtaggcattaactcccagatatacagccgaactggcggttatatggggttatcgttcgccattccgattgatgtggccatggatgttgccaatcagctcaagatttccggtcgcgtagcgcgtggctggcttgggatcggtattcaggaaatgaccaaggagctggctgagtcgtttggtatgaagaataccaaaggggctttggtcgccggcgtggaaaaaggcagtcctgctgaaaagggcggcctggagccaggtgatgtcgtaatcaagttcgatggcaaggatgtcaatgtttcttccgatttgccgcgtatcgttggttccaccaagcctggcaagaaggtgcaggtcgaagtcttgcgcaggggggctagcaagaccttgaatattacactgggtgaaatgccggccgacaaggatgaggttgtgccaactgcgcagcccgatgccaagccagagtccaatcgcctggggttgaccctacgcgagttgacgccacagcagcgtcgtagcctcaatggtcgcaatgcgctggtcgtggttgatgcgcaaggtgctgctgcacaggcaggcatccgcaggggagatctgatcctagccctgaacaatacggaggtgcaaagcctggagcagttcaccaagcaggtaaatgcggtgcctgcgggtaagacagtggcgttgctcgtgcagcgggaaaacaataccctgtacgtaccagtcaaggttggcaagtaa

SEQ ID NO: 4285 - protein, 477 aa, Methylobacillus flagellatus KT
MFKKLIAMSAICLFVGMAGATPVLAKELPDFTELAEKQGAAVVNISVTQVVQSGIGGSPFPGFPEDEALNEFFRRFGIPGFPGVPRGQGGPQQPEFKSQSLGSGFIISSDGYILTNAHVVREADEVIVKLNDKREFQAKIVGVDRRTDVALLKIDATGLPKVTIGNPEQLKVGEWVVAIGSPFGLESTLTAGVVSAKGRALPQENFVPFIQTDVAINPGNSGGPLFNLKGEVVGINSQIYSRTGGYMGLSFAIPIDVAMDVANQLKISGRVARGWLGIGIQEMTKELAESFGMKNTKGALVAGVEKGSPAEKGGLEPGDVVIKFDGKDVNVSSDLPRIVGSTKPGKKVQVEVLRRGASKTLNITLGEMPADKDEVVPTAQPDAKPESNRLGLTLRELTPQQRRSLNGRNALVVVDAQGAAAQAGIRRGDLILALNNTEVQSLEQFTKQVNAVPAGKTVALLVQRENNTLYVPVKVGK

SEQ ID NO: 4286 - DNA, 1398 bp, Silicibacter sp. TM1040
  CDS (1)..(1398): transl_table=11
atgatccgcagtctcgcccttcccctgacgattgccctcgcaactgctctgccgcttgcgtcaccagcagagaccaagatcccgcagagccagaccgagatctcgctgggctttgcccccttggtcaaagaggccgcgcccgctgtggtgaatatctatgccaagatcatccgtcaggaccgtgcgcgcagcccctttgccgatgatcctttctttgatgatttctttcgccagtttgcccagccgcgcccaagggtgcagaactcgctcggctctggtgtaatcctctccgaagatggcatcgtggtctccaactatcacgtcgtgggcgaggcgtcggatattcgcgtggtgaccaacgaccgccgtgaatatcaggccgaggtgatccttgcggatcaggcgtccgatctggcgatcctgcaactgcaagatgccgaagggctgccgcatctgggattgcgcaacagtgatgaggtcgaggtgggcgagctgaccctggccatcggcaacccgttcggggtcggtcagacggtgtcctccggcattatttccgggcttgcgcgcaccggtaccggcggcgggcagggctttggctattacatccagaccgatgcgccgatcaatcctggcaactctggtggggcgctgattgatgtgaatggcgatctcatcgggatcaacacgcggatcctcagccgttcgggtggctccaacgggattggctttgccattccggccaatctggtgcgtgaatttgtgcgacaggcgcgggccggtgcagaggagtttcaacgcccctgggcggggatgactggccagccggtggattccgatctggcagaagcgctgggccttggtcaggtggatgggatgttgatttcagagctccacccccagagcccctttgtcgaggcgggatttgaggttggcgatgtggtgctggccgtggatggcgagccggtgaactcgccctcggagatggcctttcgcttgtcggtggcggaactgggcggcaccagcgcggtgacgcgggtgcgtcagggcaagacggacactgttgaggtcgccttgatcgaagcgcctgacacccccgccgccgatccgatcacgctgagcgagcgcaccccgatgccgggtctggtggtgggacgggtgaacccgcaggtcatcaccaagatgcagctaccgctatcgaccgagggtgttgtggtgatggaccccggcccctatgccggacgcggcggcgtgcgcgcgggggatttgatttttgcgatcaacggcgaggcggttgaggcccccgaagatgtagcaaatctcctgatgagcagtgaccgctggatgcggatggacctgatgcgtcagggccagcgcgtgtctctgcggttccggctctga

SEQ ID NO: 4287 - protein, 465 aa, Silicibacter sp. TM1040
MIRSLALPLTIALATALPLASPAETKIPQSQTEISLGFAPLVKEAAPAVVNIYAKIIRQDRARSPFADDPFFDDFFRQFAQPRPRVQNSLGSGVILSEDGIVVSNYHVVGEASDIRVVTNDRREYQAEVILADQASDLAILQLQDAEGLPHLGLRNSDEVEVGELTLAIGNPFGVGQTVSSGIISGLARTGTGGGQGFGYYIQTDAPINPGNSGGALIDVNGDLIGINTRILSRSGGSNGIGFAIPANLVREFVRQARAGAEEFQRPWAGMTGQPVDSDLAEALGLGQVDGMLISELHPQSPFVEAGFEVGDVVLAVDGEPVNSPSEMAFRLSVAELGGTSAVTRVRQGKTDTVEVALIEAPDTPAADPITLSERTPMPGLVVGRVNPQVITKMQLPLSTEGVVVMDPGPYAGRGGVRAGDLIFAINGEAVEAPEDVANLLMSSDRWMRMDLMRQGQRVSLRFRL

SEQ ID NO: 4288 - DNA, 1503 bp, Myxococcus xanthus DK 1622
  CDS (1)..(1503): transl_table=11
atggcctgctcgctcccctcccgccgcttcctcagtgcgctggtccttcttcccgccgccacgcttggcgcttgtggccaagccattggcaccgcgtccgcggcatcgcccgctcccaccgcccaggtcgccgccgctgttccggcgcaggcggcgccgcccatccagaaggcgctcttcaatccggccgtggccggaagccagggcggcatcacctcgctggcgccgctggtggacgcggtgaagggcgcggtggtcaacgtggaggtgcgcgcacggccccgcaggtcagccgccatgcagcgcctgccacccggcatggcggagcgcttcggcctgccgcccgggttcggcggtgaaggcaacggcccggcgcgacagggcgcgggctccggcttcatcatcgacgcctcgggcatcgtcctcaccaacaaccacgtggtggaggacgccgaccaggtgcgcgtgaagctggatgacggacgtgccttcgacgcggaggtgatgggccgcgacccgctcaccgacgtggccctgctgaagctgaagggggcgccgggcaacctgccggcggtgccgctgggggactcggacgcgctgcgcgtgggcgacgccgtcatggccattggcaatcccttcggcctggcgtccagcgtgagcgcgggcatcctctccgcgcgggcccgcgacatccaggcgggcccctatgacgaattcctccagacggacgccgccatcaaccccggcaactccggcgggccgctcttcaacatgcagggcgaggtggtgggcatgaacaccgccatcgtcggcggcgccacgggcatcggcttcgcggtgcccagcaagctcatccaggcgctgctgccgcagctcaaggagacgggcgtggtgcgtcgcggctggctgggcctggccgtacaggacctcacgccggacctggcgcgggcgctgggcctggaagcgatgaagggcgcggtggtggcgggcgtcaaccgcggcagcccgggtgagcgcgccggcctgcgcgaggaggacgtcatcacctccgtcaacggcaagccggtggagtccgcgggcggactgacgcgcgccgtggccctgctccagcccgacagccgcgtgaaggtgaacctgctgcgcggtggcaaggcgcagtcgctggacgtcaccctgggcacgcggcccgcgcagaatggcgagcaagaggtacttccgcgcaacgcttccgcttccgcgccgaggcggctgggcgtgcaactgtcggacgcgcgggacggcggcgcgcaggtagtcgccgtggagccgggcagccccgccgagcgcgggggactggtgccaggcatggtgctggtccaggtgggcgaccagaaaatcgccagcgtgtcggacgccgcccaggcgctgacggccgcgaagcccggcgccgcactgctcctgcgcgtgcgcatgccggggtcggagtccacgctgctgcgcgcggtggaagtcccggagcgctga

SEQ ID NO: 4289 - protein, 500 aa, Myxococcus xanthus DK 1622
MACSLPSRRFLSALVLLPAATLGACGQAIGTASAASPAPTAQVAAAVPAQAAPPIQKALFNPAVAGSQGGITSLAPLVDAVKGAVVNVEVRARPRRSAAMQRLPPGMAERFGLPPGFGGEGNGPARQGAGSGFIIDASGIVLTNNHVVEDADQVRVKLDDGRAFDAEVMGRDPLTDVALLKLKGAPGNLPAVPLGDSDALRVGDAVMAIGNPFGLASSVSAGILSARARDIQAGPYDEFLQTDAAINPGNSGGPLFNMQGEVVGMNTAIVGGATGIGFAVPSKLIQALLPQLKETGVVRRGWLGLAVQDLTPDLARALGLEAMKGAVVAGVNRGSPGERAGLREEDVITSVNGKPVESAGGLTRAVALLQPDSRVKVNLLRGGKAQSLDVTLGTRPAQNGEQEVLPRNASASAPRRLGVQLSDARDGGAQVVAVEPGSPAERGGLVPGMVLVQVGDQKIASVSDAAQALTAAKPGAALLLRVRMPGSESTLLRAVEVPER

SEQ ID NO: 4290 - DNA, 1482 bp, Myxococcus xanthus DK 1622
  CDS (1)..(1482): transl_table=11
atgaaccgttcgaccgtctcgttccggaaggcgctcgtcgccgcgctcctggtcgcgttgccccccgctgctgctgtctcgcaggcgccaaagtcgccgcccgcggccacccagccgggcgccgggaacgtcctccagcccgcgacacgggaggcccaggcgcttccgtcgctggcgccgctggtggagtcggtgaagtcggcggtggtcaacgtggacgtgcaggctcgagggggcggcgttccgcgtgggatggaggacaacccgctcttcgagcgcttcttcggtggaggccgcgagggcggcaggccgcgccgcgagccgctgcgccaaggggcagggtccggcttcatcatcgacccgaagggcgtcgtcctcaccaacaaccacgtggtggaggatgccgtcagcatcaccatccgcctggatgacggacgcagcttcagcggcgaagtggtggggcgtgatccgctcacggacgtggcgctcgtgcggctcaaggagaaggtggagaacctgcccaccgtgaagctgggcgactcggatgcattgcgcgtgggggactgggtggtggccattggcaaccccttcggtctggcctccagcgtcagcctgggcatcgtctccgcgagggcgcgtgagattggcgccagccagtacgacgagttccttcagacggacgcggccatcaacccgggcaactcgggcggcccgctcttcaacatgaagggcgaagtggtgggcatcaacaccgccatcgtcggcggtggctccggcatcggcttcgcggtgcccagcaatctcatcggttcactgctgccgcagttggagaaggaaggctccgtcacgcgcgcatggctgggcgtgggcatccaggacttgacgcgggacctggccagcgcgctcaagctccccgtgaatcaaggcgccatcctcacgcaggtgatgccgtcgtctcccgcggcgaaggcgggcctgaagcaggatgacgtcgtcatcgccatcgacggccggaccgtcacctccagcggcgagctgacgcgcaccgtggcgctcaagcgtcccggaagcacctccacgttgacgctctaccgcgacggcaagaagcaggacgtgaaggtgacgctcggtacgcggccagacctggagggcgtggcctcggggaagcagcggccggaggaccagcaggagagctcccggcgcgtgggcgtcagcctccagaacctggatgcgcgcaccgcgcagcaggccggcttcacggacagcagcggcgcgctcatcaccgacgtggtgcccggctcgccagcggaccgcgcgcagttggagcccggcatggtcgtcatcgaggccaaccgcaagaaggtggagaacgcggacgccctggcccgcatcatcaagggcgccgagtccgggagcaccttgctgctgcgcgtgacggcgccgggcggggctcgcaacctgcgcgccctgcgggtgccgtga

SEQ ID NO: 4291 - protein, 493 aa, Myxococcus xanthus DK 1622
MNRSTVSFRKALVAALLVALPPAAAVSQAPKSPPAATQPGAGNVLQPATREAQALPSLAPLVESVKSAVVNVDVQARGGGVPRGMEDNPLFERFFGGGREGGRPRREPLRQGAGSGFIIDPKGVVLTNNHVVEDAVSITIRLDDGRSFSGEVVGRDPLTDVALVRLKEKVENLPTVKLGDSDALRVGDWVVAIGNPFGLASSVSLGIVSARAREIGASQYDEFLQTDAAINPGNSGGPLFNMKGEVVGINTAIVGGGSGIGFAVPSNLIGSLLPQLEKEGSVTRAWLGVGIQDLTRDLASALKLPVNQGAILTQVMPSSPAAKAGLKQDDVVIAIDGRTVTSSGELTRTVALKRPGSTSTLTLYRDGKKQDVKVTLGTRPDLEGVASGKQRPEDQQESSRRVGVSLQNLDARTAQQAGFTDSSGALITDVVPGSPADRAQLEPGMVVIEANRKKVENADALARIIKGAESGSTLLLRVTAPGGARNLRALRVP

SEQ ID NO: 4292 - DNA, 1452 bp, Cytophaga hutchinsonii ATCC 33406
  CDS (1)..(1452): transl_table=11
atgttagcggtagtgtcttctatctttggaggcattgtagctttagtcggctaccagtattttgtcaaaaagaatgaatttacgtccattgaatcgatgcagcgcgcatcctttgcaaatttttcagatacatctgctatcgcagtgcctgcgggtctcaattttattcatgccgcagaattgactacaccggcagtagtgcatataaaaacaacgtatatgcctgaaactacacgccctaaaacgcgtgatgaagaattgttccggtacttctatggtgatccgtatgaaaattacaaccagccgcgcgaagcttccggctccggcgttattgttaccggcggcggatatatcgtaacaaataatcacgtggttgataaagcatctaagattcaggttgtattaaatgacaaaagaacctacgatgcaaaactgatcggaacagatccgacaacggatctggcattgattaaaattgaaggtgaaaatcttccgtttgtagtgtatggcaactcggatcaggtgcgtatcggtgagtgggtactggctgtaggaaatccgtttaacttaacgtctacggttaccgcaggtattatcagcgctaaaacaagaagcatcaatatcctgagagataaagataacatggcgattgaatcttttctgcagacagatgcggtagtaaacccgggcaatagcggtggtgcattggtaaacttaagaggagaactgattggtatcaatacggctattgcaagtcctacgggagcatatgcaggttattcgtttgctgtaccggtatctcttgttaaaaaagtgattgatgacatcatgaactatggccaggtgcaacgtggtttattaggtgtggtgattcaggatatgacgcctgctttagcaaaggaaaaaacaatcgattttatttcaggagtttatgtgagtgccgttaatcagggaagtgcagcagacctgggaggtattaaagaaggcgatattgtaacaaagatcaatgacatcaacatcggcgcaacaacacaattgcaggaagtagtggcgcgctacagacccggcgacaaattgaaagttaagtatgtgcgcaaaggaaaagaacttgaaacttcggttaccttaaaaaataaattaggcgatatggccattgttgctaaagacgacaactctgttaaaacgaagcttggcgcagacttacagccggtatcgggtggtgaaatgagtgtgctggaaatttccggcggtgcaaaggttgcaaaattatttagcggtaaattaaaagaagcaggcgtaagagaaggatttattattacttccatcgataaaaaacctgtcagctcgccggaagatgttgtccgcattcttgaatctactaccaatggcggtatcttgatggaaggtatttatccgaatggaaaaaaagaattctacggcattggttggtaa

SEQ ID NO: 4293 - protein, 483 aa, Cytophaga hutchinsonii ATCC 33406
MLAVVSSIFGGIVALVGYQYFVKKNEFTSIESMQRASFANFSDTSAIAVPAGLNFIHAAELTTPAVVHIKTTYMPETTRPKTRDEELFRYFYGDPYENYNQPREASGSGVIVTGGGYIVTNNHVVDKASKIQVVLNDKRTYDAKLIGTDPTTDLALIKIEGENLPFVVYGNSDQVRIGEWVLAVGNPFNLTSTVTAGIISAKTRSINILRDKDNMAIESFLQTDAVVNPGNSGGALVNLRGELIGINTAIASPTGAYAGYSFAVPVSLVKKVIDDIMNYGQVQRGLLGVVIQDMTPALAKEKTIDFISGVYVSAVNQGSAADLGGIKEGDIVTKINDINIGATTQLQEVVARYRPGDKLKVKYVRKGKELETSVTLKNKLGDMAIVAKDDNSVKTKLGADLQPVSGGEMSVLEISGGAKVAKLFSGKLKEAGVREGFIITSIDKKPVSSPEDVVRILESTTNGGILMEGIYPNGKKEFYGIGW

SEQ ID NO: 4294 - DNA, 1389 bp, Haemophilus somnus 129PT
  CDS (1)..(1389): transl_table=11
gtgaaaaaatctagctttgttttaaccggtattgctttagggttaagtgttctaacaacatcaattaatgttcaagcaagtttgcctatggcagttgatggacaatctcttccaagcttagcaccaatgttacaaaaagttttacccgcagtagtttctattgcggtagaagggaaacaaaaaaatgatttttctttcaataatgaaattcccgaagagtttcgccgtttttttggtgacagctttggttttgaaggatttagcagtcgtgcaccgcgtagttttcgtggtattggatccggagtgattattgatgcagaaaaaggttatgtattgacaaataatcacgtgattgatcaggctgataaaatcacggtcaaattagaagatgggcgtgaatttaaggcaaaggttcttggcaaggatgatatgtcggatattgcacttattcaattagaaaatcctaaaaatctgaccgcagttaagatcgctgattctgataaattaagagtcggggattttacagttgctatcggtaatccattcggtttggggcaaaccgcaacatcgggaattgtttcggcattagggcgttcaacaggatttgatagcggagcttatgagaactatattcaaactgatgctgccgtaaatagaggtaattccggaggaccattagtaaatttaaatggtgagcttatagggattaatactgctattatttctccaagtggcggaaatgcgggaattgcatttgcgattccaagtaatatggcaatcagtttagttaagcaaattattgaatttggcgaagttcgtcgaggattactcggtattaaaggaggtgaattgaatgccaacttagcaaaagaattcaatattgatgtacaacaaggtgcgtttgtgagtgaagtattgccaaattcagcggcagaaaaagccggacttcaagcgggtgatgtgattacggcaattgatggacaaaaactggcaagttttgcggagttgcgtgcaaaaattgcaacaagtggtgccggtaaagaaattaaattgacctatttacgtgacggtaaatcgaaaactgcgaaagtgaaattgcaatctgatgatggagatacaatttctgcagttggcaacatttctatattagaaggtgcggaattaagtaattataatcaaaaaggcacaaaaggcgttgaaattaaagaagttaaatcaagatctcttgctgctcaatatggtttagaaaaaggcgatattattattggagtgaaccgccataaagtagaaaatttatctgatttacgtaaaattttaggcaaaaaaccttcagctattgccttgaacattttacgagataacagtcgtttttatttattaatccaataa

SEQ ID NO: 4295 - protein, 462 aa, Haemophilus somnus 129PT
MKKSSFVLTGIALGLSVLTTSINVQASLPMAVDGQSLPSLAPMLQKVLPAVVSIAVEGKQKNDFSFNNEIPEEFRRFFGDSFGFEGFSSRAPRSFRGIGSGVIIDAEKGYVLTNNHVIDQADKITVKLEDGREFKAKVLGKDDMSDIALIQLENPKNLTAVKIADSDKLRVGDFTVAIGNPFGLGQTATSGIVSALGRSTGFDSGAYENYIQTDAAVNRGNSGGPLVNLNGELIGINTAIISPSGGNAGIAFAIPSNMAISLVKQIIEFGEVRRGLLGIKGGELNANLAKEFNIDVQQGAFVSEVLPNSAAEKAGLQAGDVITAIDGQKLASFAELRAKIATSGAGKEIKLTYLRDGKSKTAKVKLQSDDGDTISAVGNISILEGAELSNYNQKGTKGVEIKEVKSRSLAAQYGLEKGDIIIGVNRHKVENLSDLRKILGKKPSAIALNILRDNSRFYLLIQ

SEQ ID NO: 4296 - DNA, 1353 bp, Shewanella sp. MR-7
  CDS (1)..(1353): transl_table=11
atgaaaacgaaactatctgtactttcagccgcaatgttagccgcaactctgacaatgatgcccgctgcctcacaggccgctattccgcaatctgttgagggtcaatccattccaagtcttgcgcctatgttagagcgcacgacgcccgccgtggtttcagtggcggtatctggcacgcacgtatccaaacaacgtgtacccgatgtgttccgttatttcttcggccccaatgcaccacaggaacaagtgcaagagcgtccttttagaggtttaggctcaggcgtgattatcgacgcggataaaggctatatcgtcaccaacaaccatgtgatcgacggtgccgatgatatccaggtcggtctgcacgatggccgtgaagtcaaagccaagctgattggtaccgactcagagtccgacattgccttgctgcaaatcgaagcgaaaaatctagtcgcaatcaaaacctcagattctgatgaactgcgcgtgggtgactttgccgtcgccattggtaacccctttggtttaggtcaaaccgtcacatcagggatcgtcagcgccctaggccgtagcggtttaggcattgaaatgcttgaaaactttatccaaaccgacgcagcgattaacagcggcaactcgggtggtgcgctagtaaacctgaaaggtgagctgatcggtattaacaccgccatcgtagcgcctggcggtggtaacgtgggtatcggttttgcgatccccgccaatatggtgaaaaacctcgtggcacaaattgccgagcacggtgaagttcgccgtggcgtactggggatttcgggccgcgacctagatagccaactcgcccaaggttttggtttagatacccagcacggtgggtttgtgaatgaagttaccgcgggcagcgcagctgaaaaagccggcatcaaggcgggtgatattatcgtcagtgtcgatggccgtgcgattaaatcgttccaagagctgcgtgcgaaagtcgcgactatgggcgctggtgctaaggttgaactgggacttatccgcgatggcgataagaaaaccgtgaatgtcaccttaggtgaagcaagccaaaccactgaaaaagctgcaggtgctgtgcaccccatgttacaaggtgcctcgctagaaaacgcttcgaaaggggtggaaattactgaggtggcccaaggctcgcctgcggcaatgagtggcttacaaaaaggcgatgtgattgtcggtattaaccgttcggcggtgaaagatctgaaatcactcaaggagcagctcaaagatcaagaaggcgctgtcgccctgaagatcctccgtggtaagagcttgttgtacttagtgctgcgttaa

SEQ ID NO: 4297 - protein, 450 aa, Shewanella sp. MR-7
MKTKLSVLSAAMLAATLTMMPAASQAAIPQSVEGQSIPSLAPMLERTTPAVVSVAVSGTHVSKQRVPDVFRYFFGPNAPQEQVQERPFRGLGSGVIIDADKGYIVTNNHVIDGADDIQVGLHDGREVKAKLIGTDSESDIALLQIEAKNLVAIKTSDSDELRVGDFAVAIGNPFGLGQTVTSGIVSALGRSGLGIEMLENFIQTDAAINSGNSGGALVNLKGELIGINTAIVAPGGGNVGIGFAIPANMVKNLVAQIAEHGEVRRGVLGISGRDLDSQLAQGFGLDTQHGGFVNEVTAGSAAEKAGIKAGDIIVSVDGRAIKSFQELRAKVATMGAGAKVELGLIRDGDKKTVNVTLGEASQTTEKAAGAVHPMLQGASLENASKGVEITEVAQGSPAAMSGLQKGDVIVGINRSAVKDLKSLKEQLKDQEGAVALKILRGKSLLYLVLR

SEQ ID NO: 4298 - DNA, 1452 bp, Hyphomonas neptunium ATCC 15444
  CDS (1)..(1452): transl_table=11
atgaaccggaccgccgttgcggtattcgccctgatggcatgtatggcccccacagcgctcgcacaggcgggtggaagcctgtcgcgtcccggagcgccggtagatgcgaagaccgcgccgcaaagcttcagtgcgctctccaaacgtctcatgccggccgtggtgaacatctccacgtcacaggttgtggccagccgcctgccaacctttccggaaggctcgcccgcagaacgcttcaacgaatactttggccgcaatgatgacggcttccagcggcagggctcgctgggttccggcttcgtcatcagcgccgacggctacatcgtcaccaacaatcacgtcatcgaaaaggctgacacgatcgaggtcaccttctccgatggccgcacgatggacgccaagattatcggccgcgaccgggattccgacattgccgtcctgaaagtcaccgcgcggggcgcgctgccttttgtggaccttgccgacagcgaccgggcagaagtcggtgactgggtgatcgcgatcggtaacccgctgggctttggcggctcggtatctgccgggatcatctcggccacgggccgcgacctcaacactgggcggtctgacaatttcatccagaccgatgcggccatcaaccagggtaactccggtggtccgctgttcaatctgaatggccaggtcgttggcgtgaacacggcgatcatttcccagtcgggcgggtccattggcctgggcttttcggtgccttccaacacggtgaagcgcatctcggcgcagctcatcaaggatggccgggtgaaccggccctggctgggcgtaaatgtgcaggatgcggacgagtccctgatcaaggcctataaggccaaaggttcggcgggcaccatcgtgacccgcgtgacggatgcgagcccggcagcgaaagccaagctcgaagtcggcgatctgatcctctccatcgatgggcgcgccgtggcgggggtgcgtgacatgacgcgccagctttccgaaaagcccatcggtaaggcgatcacgctgagcatcgtcagggatggccgcgcgcgggatgtcgccgtcacgctgggcgaactgcccgatgaggacgaacccgcgacagcggcgccatccgaagccgtcggcatgtcgaacgatctgggcgcagacctcgtggcactcgacgatgacgttcgccgccgcttcggcgcgccgcgggatatgaacggcgtggcggttacgggtgtcagcacgcgcgggcgggcctacaacaagctgcgcaagggcgatgtgatcgtggaggtgaacttccagtccgtcagcgccgtggccgatgtcatcaagcgtcttgataccgcgatgcagacgccaaatcagcccatcctgatccgcgtcaaacggcggggagagacgggaggctggttcgaccagttcgtatcggtcgacatcaagaagtag

SEQ ID NO: 4299 - protein, 483 aa, Hyphomonas neptunium ATCC 15444
MNRTAVAVFALMACMAPTALAQAGGSLSRPGAPVDAKTAPQSFSALSKRLMPAVVNISTSQVVASRLPTFPEGSPAERFNEYFGRNDDGFQRQGSLGSGFVISADGYIVTNNHVIEKADTIEVTFSDGRTMDAKIIGRDRDSDIAVLKVTARGALPFVDLADSDRAEVGDWVIAIGNPLGFGGSVSAGIISATGRDLNTGRSDNFIQTDAAINQGNSGGPLFNLNGQVVGVNTAIISQSGGSIGLGFSVPSNTVKRISAQLIKDGRVNRPWLGVNVQDADESLIKAYKAKGSAGTIVTRVTDASPAAKAKLEVGDLILSIDGRAVAGVRDMTRQLSEKPIGKAITLSIVRDGRARDVAVTLGELPDEDEPATAAPSEAVGMSNDLGADLVALDDDVRRRFGAPRDMNGVAVTGVSTRGRAYNKLRKGDVIVEVNFQSVSAVADVIKRLDTAMQTPNQPILIRVKRRGETGGWFDQFVSVDIKK

SEQ ID NO: 4300 - DNA, 1356 bp, Rhizobium leguminosarum bv. viciae 3841
  CDS (1)..(1356): transl_table=11
atgtcgcgttcgttgctagccttggtggcgctcttcatcgcaggtgagagcctgttgtcggctccagccgtagcaaacagcctgtcgctcgcgccgatgctccagagggtcgtgccgagcgtcgtcagcatctcggtgcagggcaaggaactcgacgacgcggatgcgacgctcgccgatcccttctacagaaagtttttcggactccctgacgacgccgcgccggcagagcacggcttccaatcagccggctcgggtgtcgtcatcgacgaggtccacggctacatcgtcaccaaccagcatgtcatagcaagcgcctcaaaaatcgaggtggtgctttccgatggccgacgcttcaaagcgaaactcgtcggcgccgatcccgagacggatgtcgctgtcgttcaaattccgcccgatcatcttgttcaggccgattttggaagcgcgtcctccctgcatgtcggcgacgtcgtcgtggcgatcgggaatcccttcgggctgggccagactgcgacgatgggcatcgtcagcgcgcttggacgccgcgccgtaggatcggagggttacgaagggttcattcagacggatgcttcgaccaatcccggcaactcgggcggcgcacttgtaaacgagaacggtgtcgtcgtcgggatcaacagcgcgatcatcggccccgccggcggaagcatcggcattggttttgcagtgcccgccgagactgtcggtatcgtgatgcggcagctcatcctaaccggcaagatggtacgcggcgaggtcggagttgtcactcaggacctgacgcccggtcttgcaagggcgttcggcgtcaatgaagggccgggggcgctcatcagcgaagtccggcccggttcgccggcggcgaatgcaggaattcagccgggcgacgtcatccgaatggtcgacggaaggacggtgcgcggcgcgtccgacgtacgcaggcttgtgggatcgctaccattgcagtccaggccgtccttccagatcgatcgcgccagccgaaggatagaggcgtttcccgcggtgtccgccgcaccggtcgccgaaccggccgctccccgcaccatccatatcgctcgcggccctctcgctgacgtcgagatggcgaactcccccgacggtctcggcgcgcgcgtcgtcgtcgtcgccgagggttcggtcgcggcacaggccggtctgcaactggacgacgttatcgtcgctctcgaccagcagccggtgacggacgtcgggcaagtgcttgcaattctcatgaaggagcatgcccgcgctctcgtcaccgtcgtgaggaacggccatcgcctcttcgtggccgccgacgtgcagacccagtag

SEQ ID NO: 4301 - protein, 451 aa, Rhizobium leguminosarum bv. viciae 3841
MSRSLLALVALFIAGESLLSAPAVANSLSLAPMLQRVVPSVVSISVQGKELDDADATLADPFYRKFFGLPDDAAPAEHGFQSAGSGVVIDEVHGYIVTNQHVIASASKIEVVLSDGRRFKAKLVGADPETDVAVVQIPPDHLVQADFGSASSLHVGDVVVAIGNPFGLGQTATMGIVSALGRRAVGSEGYEGFIQTDASTNPGNSGGALVNENGVVVGINSAIIGPAGGSIGIGFAVPAETVGIVMRQLILTGKMVRGEVGVVTQDLTPGLARAFGVNEGPGALISEVRPGSPAANAGIQPGDVIRMVDGRTVRGASDVRRLVGSLPLQSRPSFQIDRASRRIEAFPAVSAAPVAEPAAPRTIHIARGPLADVEMANSPDGLGARVVVVAEGSVAAQAGLQLDDVIVALDQQPVTDVGQVLAILMKEHARALVTVVRNGHRLFVAADVQTQ

SEQ ID NO: 4302 - DNA, 1446 bp, Solibacter usitatus Ellin6076
  CDS (1)..(1446): transl_table=11
atggttcgaacctgcctggtaattgttgcctgttttttcctcgcctcgtgccacagcccgcaggcggtcagtgcgaacaacgaaaaacgccagctacccgcggcaaatacgggcgagaatcttccgattctctcctactccccggtggtggaccacgtggcgcccgccgttgtcaccatccgtgcctcgcaccgcgtgcgcgccccgcggcagttccctttctccgacaccccgctcttccgcgagttcttcggcggcggatcgcccgtcccgcgcgatcgcccggaagtggagtcggcgctcggctccggtgtcatcgtccggtccgatggacatatcctcaccaaccaccacgtgatcgatggcgcggaagatatcaaggttgatctcagtacccgccgcacttactccgccaaggtcgtcggcagcgattctcctagtgacatcgcggtactcaagatcagcggaggagaccttccggtcctccagcttggcgattcggaccgtgtgcgcgtgggggacgtctgtctcgccgtcggcaatcctttggcggtcggtgaatccgtcaccgccggtatcatcagcgccaagggacgctccaccgacagtgtcggcggcggcagctttcaggatttcctccagacggatgcgcccattaaccagggcaactccggaggagcgctggtcaatacccgcggcgaactgatcgggatcaattcgcagatcctctcctctaacggcggcaatgtcggcatcggcttcgcgattccttccaacatggccaagagcgtgatggatcagttgatcgggaagggaagcgtgcagcgaggtatgctcggcgttagcatccagcctgtcaccagcgacatcgcttccagcctcggcctgaaggatgtgcgcggcatcctcatcaattccgtgactcccgccggcccggccgaaaaagccggtctccagcgcggtgacgtgattctgcaggtcgatggcaaggacgtgaacgagcccaaccagctgcgcaatgagatcgccgcgcgcgccccgggtgcggagatcaacctcaccattcagcgcgacgggaaacaacagcaggtccgcaccaaactgggcactctcactccgcagactgccgccgcggacgcgccgggaggcggatcgggtggaggcggcaaactgggtattggcgtagtgcccctcactcccgaccttgccgcgcagcttggcctgcgccgcggagcgcaggggctggccgtccagtcgatcgaccccgaaggtcccgccgcacaggccggcctgcgcgaaggcgacgtcattcaggaggtgaaccgccagcccgtccacaccatcgacgagctgcgcagcgccctccagaaatccggcgaccgcgcacccttactgctgattaaccgcgaaggtcaatccgcctacgtgccagtgccattgaagtga

SEQ ID NO: 4303 - protein, 481 aa, Solibacter usitatus Ellin6076
MVRTCLVIVACFFLASCHSPQAVSANNEKRQLPAANTGENLPILSYSPVVDHVAPAVVTIRASHRVRAPRQFPFSDTPLFREFFGGGSPVPRDRPEVESALGSGVIVRSDGHILTNHHVIDGAEDIKVDLSTRRTYSAKVVGSDSPSDIAVLKISGGDLPVLQLGDSDRVRVGDVCLAVGNPLAVGESVTAGIISAKGRSTDSVGGGSFQDFLQTDAPINQGNSGGALVNTRGELIGINSQILSSNGGNVGIGFAIPSNMAKSVMDQLIGKGSVQRGMLGVSIQPVTSDIASSLGLKDVRGILINSVTPAGPAEKAGLQRGDVILQVDGKDVNEPNQLRNEIAARAPGAEINLTIQRDGKQQQVRTKLGTLTPQTAAADAPGGGSGGGGKLGIGVVPLTPDLAAQLGLRRGAQGLAVQSIDPEGPAAQAGLREGDVIQEVNRQPVHTIDELRSALQKSGDRAPLLLINREGQSAYVPVPLK

SEQ ID NO: 4304 - DNA, 1479 bp, Solibacter usitatus Ellin6076
  CDS (1)..(1479): transl_table=11
atgtcaacgcgaactatgttgatcgctccggccgtggtgctggtcgcgcttgccgcctgcggcaggcaaacctcaagcagcagcaagaattctgcgaatcgcgaggagacaagctcctccgcgattgtcagcaggcccggccccccgctctcctatgctgacgtcgtggatcacgcctcgcccgcggtagtaacgatccgctcggaacgccgtgtgcgcgctccggagcaatttccgttcgcggaagatccgtcgtttcgccagttcttcggcaacccgttgccggggcgcggcgggcaatccgcgcccagccaggtggaacacgccctcggctccggggtaattgttcgcgctgacgggcacatcctgacaaaccatcacgtggtcgatggcgccgaagatattaaagtcgatctcaacgaccaccgtacgttgtccgcgaaagtggtaggcgtggatccgccgagcgatctggcggtcctgaagatcgacgcccaggatctgcccgtgctggccctggccgattccgatcgcgtgcgtgtcggagatatttgcctcgccgtcggaaaccccctcggcgtggggcagaccgtcaccgccggcatcatcagcgccagaagccgcagcacggatctaagtacgggaagtttcgaagacttcctgcagaccgacgccccaatcaatcagggcaactcgggcggagcgctgatcaataccaacgcggcgctaatcggcatcaactcgcagattctctcgccgaccggaggcaacatcggaatcggcttcgccattccgtctaatctggcgaagaacgtcatggatcagctgatcaccacgggcaaggtccaccgcggccagctcggcgtaggtgtgcaacccctcacatccgatctcgcatccggcctcggcctgaaggaagttcgcggtgtgctggtcaacctggtcaagcctggaagccccgcggaccgtgcaggaattcgcaatggcgacgtgatcacggctatcgatggacaccctgtggacgaacccaacgcactgaggaatcgagttgccaccaccgcaccggattcccaggcgaagctctcctttattcgcgatggcaaggaacagcaggtaacggtcaaactcggcgagctgacggcggaatcggcagcgatggagcggcctaacggcatgcccggcaacgctcccaccgatcggcgcctcggcgtaagcgttgagcccttgtctcctgccctcgcgcaggagctcggcgtgcgccgggatatgcagggactggcggtgcgcgacgtccagcccgatgggccggccgcgcgggccggcgtgcaacccggcgacgtgatcatcgcgttaaaccggcaggccgtgcggtccgcggccgatgtcgcggcagcgctcaggagtgcgtcctccaggccgagcctgttactgattaatcgagccggacagaatgtgtttctaaccgtgagtccgcagtag

SEQ ID NO: 4305 - protein, 492 aa, Solibacter usitatus Ellin6076
MSTRTMLIAPAVVLVALAACGRQTSSSSKNSANREETSSSAIVSRPGPPLSYADVVDHASPAVVTIRSERRVRAPEQFPFAEDPSFRQFFGNPLPGRGGQSAPSQVEHALGSGVIVRADGHILTNHHVVDGAEDIKVDLNDHRTLSAKVVGVDPPSDLAVLKIDAQDLPVLALADSDRVRVGDICLAVGNPLGVGQTVTAGIISARSRSTDLSTGSFEDFLQTDAPINQGNSGGALINTNAALIGINSQILSPTGGNIGIGFAIPSNLAKNVMDQLITTGKVHRGQLGVGVQPLTSDLASGLGLKEVRGVLVNLVKPGSPADRAGIRNGDVITAIDGHPVDEPNALRNRVATTAPDSQAKLSFIRDGKEQQVTVKLGELTAESAAMERPNGMPGNAPTDRRLGVSVEPLSPALAQELGVRRDMQGLAVRDVQPDGPAARAGVQPGDVIIALNRQAVRSAADVAAALRSASSRPSLLLINRAGQNVFLTVSPQ

SEQ ID NO: 4306 - DNA, 1374 bp, Magnetococcus sp. MC-1
  CDS (1)..(1374): transl_table=11
atgctgggacagaagcaaaaatggcgggtggttgggggcgtattggttgggttggcgctgctgttgggcagtgctcccctgcatgcgggtgcttggccggtggcggtggagggcgacaaactgcccaccctggccgatatgctggagcggaccacgccgggggtggtgaacattgccaccagcggttcggtagaggtggcggagacgcccctgttgaacgatcccttttttcggcatttttttgatatacctaccatgcgtcgggcgaaaaagatccgctcgttgggctcgggggtggtggtggatgccgcgcatggttacatcctgaccaaccatcatgtgatcgacaaggcacaggtaattaccgtgaccttgcatgatgggcgggccttgaaagcggtgcaagtgggggcagatcccgagaccgatgtggcggtgattaaggtagaggcgaaggatctgcatgccctgcccttaggcaattcagatatcctgcgggttggggattttgtggtggccattggtaacccctttggtctggggcagacggtgacctcgggcattgtgagtgcgctggggcgtagtggtttaggcattaaggggtatgaggatttcattcagaccgatgcttcgattaatccgggtaactcggggggggccttggtcaacttgcgtggggagttggtggggattaacaccgccattttggccaagggcggtggtaatgtgggcattggttttgctatccccgccaacatgaccaagcagttgatggcccaattgattgagtatggcgaggtgcgccgtgggctcctgggtatctccagccaggatctcaccccggagttgaaccaggcctttgggctggagcatcaacatggcagtgtggtaacccgtgtcacccgtggttcagcggcccaaaaggcgggtttacaagcaggggatattattaccgaggtcaatggtgtggcggtgcgcaatgcagcccatatgcgcaatttagtggggctgctgcgggtgggggaggcggtgcagttaacccgtctgcgggatggtcatagccgcacggtcaaagcggtggttgaggcttctaaacgggagcagattgagggcagccggttaagcccccgccttgagggcgctgtgttggaaaaagaggagcaggatgaaaaacccggcgtggtggtgcgcaaggtggtccggggcagcatggccgcccgcatggggctgcaagagggggatcgtctccttgaagtcaaccagcaatcggtgaaaaatttggccgatatggggaaagcgctagctgtggatgggcggcagatgctgctcaccttggagcggggtgagcgtcggatacgggtgatggtacgctga

SEQ ID NO: 4307 - protein, 457 aa, Magnetococcus sp. MC-1
MLGQKQKWRVVGGVLVGLALLLGSAPLHAGAWPVAVEGDKLPTLADMLERTTPGVVNIATSGSVEVAETPLLNDPFFRHFFDIPTMRRAKKIRSLGSGVVVDAAHGYILTNHHVIDKAQVITVTLHDGRALKAVQVGADPETDVAVIKVEAKDLHALPLGNSDILRVGDFVVAIGNPFGLGQTVTSGIVSALGRSGLGIKGYEDFIQTDASINPGNSGGALVNLRGELVGINTAILAKGGGNVGIGFAIPANMTKQLMAQLIEYGEVRRGLLGISSQDLTPELNQAFGLEHQHGSVVTRVTRGSAAQKAGLQAGDIITEVNGVAVRNAAHMRNLVGLLRVGEAVQLTRLRDGHSRTVKAVVEASKREQIEGSRLSPRLEGAVLEKEEQDEKPGVVVRKVVRGSMAARMGLQEGDRLLEVNQQSVKNLADMGKALAVDGRQMLLTLERGERRIRVMVR

SEQ ID NO: 4308 - DNA, 1434 bp, Azoarcus sp. BH72
  CDS (1)..(1434): transl_table=11
atgcaacaccccctgcgcgccaccaccaccgcctctgccctgatcctcgccctcgccggcgccttcggcaccgacgcgctggcgcaggcgcctgctccacgcggattgcccgccggcagcatcgtgctgccgagcttcgacaccatcatccagcgcgtcggccccgcggtcgtcaacatcagcaccgaaggcccggtgcgcaccggcgggccgtccggcggcctcagcccggatgatccgttctccgaattcttccgtcgcttcggcccgccgctcggcccccagttcggcaacccgccggggcagggcccggtacgcggccaggggtccggcttcatcgtcagcgccgacggtatcgtactgaccaacgcacacgtggtcgacggcgctagcgaagtcaccgtgaagctgaccgacaagcgcgagttcaaggccaaggtgctcggcgtcgacaaaccgaccgacgtcgcggtgctgcgcatcgacgccaagaacctgcccacggtgccgctgggcgatccgcagaaagcgcacgtgggcgactgggtgctcgcgatcggcgcgcccttcggcttcgaaaactccgttacggccggcatcatctcggccaagtcgcgctcgctgcccaatgaaggctacgtgcccttcatccagaccgacgtcgcgatcaacccaggcaactcgggtggcccgctgctcaatcttgccggcgaagtggtgggcatcaactcacagatctactcgcgctcgggtggctaccagggcctttcgttcgcgattccgatcgacgtcgcggccggcgtgcgcgaccagatcgtggcccacggcaaggtcacgcgcggccgcatcggcgttgccgtacaggacgtcaatcaggcgttggcggaatccttcggcctcaagagcgccggcggcgcgctgatcagctcggtcgaacccggcgcgccgggcgacaaggccgggttgaaggtcggcgacgtcatcatcgaactgaacggcgagaagatcgtcaactcggctgacctgccgccgcgcgtggcagcggtacgccccggcaacacggtgcgcatgaaggtctggcgcaagggcgaaagccgcgacctggaggtgaaggtcggcgagttcccggacgacagccaggtggcaagcagcaccggcaaggccgaccagggtcgcctcgggctggcggtgcgcgcgttgtcgggcgaggagcggcgccaggcgggcttgccgggcgggctggtcgtgaccgaggtggcagggcccgcggcccgcgccggcatccagcgcggcgacctcatcctgtcgatcaacggccagccggtggaaacggtggaccagctgcgcgcgctggtggccaaggctggcaagcatgtcgcgctgctcgtccagcgcgatgaagcacgcatattcgtaccggtcgagctgggttga

SEQ ID NO: 4309 - protein, 477 aa, Azoarcus sp. BH72
MQHPLRATTTASALILALAGAFGTDALAQAPAPRGLPAGSIVLPSFDTIIQRVGPAVVNISTEGPVRTGGPSGGLSPDDPFSEFFRRFGPPLGPQFGNPPGQGPVRGQGSGFIVSADGIVLTNAHVVDGASEVTVKLTDKREFKAKVLGVDKPTDVAVLRIDAKNLPTVPLGDPQKAHVGDWVLAIGAPFGFENSVTAGIISAKSRSLPNEGYVPFIQTDVAINPGNSGGPLLNLAGEVVGINSQIYSRSGGYQGLSFAIPIDVAAGVRDQIVAHGKVTRGRIGVAVQDVNQALAESFGLKSAGGALISSVEPGAPGDKAGLKVGDVIIELNGEKIVNSADLPPRVAAVRPGNTVRMKVWRKGESRDLEVKVGEFPDDSQVASSTGKADQGRLGLAVRALSGEERRQAGLPGGLVVTEVAGPAARAGIQRGDLILSINGQPVETVDQLRALVAKAGKHVALLVQRDEARIFVPVELG

SEQ ID NO: 4310 - DNA, 1404 bp, Magnetospirillum magnetotacticum MS-1
  CDS (1)..(1404): transl_table=11
atgaccacgtccctgaagatcctcgccgccgcccttgccctggtgattctcgtgcccgccgcccaggcccaaacccaggtcgtgccgacctcgcgcgagcaggtgaaactgaccttcgcgccggtggcccgtcaggtggcgcccgccgtggtcaatatctataccaagcgggtggtcagggccgccgcctcgcccatgttcgccgatcccttcttccgccgcttcttcggtgatgtgccgggcatgagccaggaccgggtgcagcgctctctgggctcgggcgtgatgatcggggccgacggcacggtggtcaccaaccaccacgtcatcaaggacgccgacgaggtcaccgtgatcctctccgaccgccgcgaattcgaggcccgcatcgtcggctcggacgagcgcaccgatctggcggtgctcaagatcgacggcggaaaagagagctttcccaccctggttctgggcgattccgacgccatcgaggtgggcgacgtggtgctggccgtgggcaatccgttcggcgttggccagacggtgacccagggcatcatctcggccctggcgcgcaccaatgtgggcgtgtccgacgtgcaaagcttcatccagaccgatgccgccatcaatcccggcaattccggcggcgccctggtggatctgcaaggccgcctgatcggcatcaacagcgccatctattccaaggacggcggctccaacggcatcggcttcgccattcccaccgccctggtccggcaggtgaccacctccatcgccaagggcggcaaggtggtgcggccctggctgggcgcatcgggtcaggcggtaaccgccgatctggcccaggccatgaagcttccccggcccgtgggcgtgctggtcaaccatatcagccccgattcccccgcccagcgggccggtctggccgatggcgacgtgatcgtcgcggtggaaggacgcgaggttgacgataccgaaggcatgcgttttcgcctcgccaccctggccatcggctcggaggcgcgccttaccgtgttacggggcggcgtggaacggattctgaccgtccgtctggtggcgcccccggaaaacccgccccgcgacaaaaccgagatcaacggccgcaaccccttttccggcacgaccctggtcaatctcaacccggccctggccgaggaactgggcatcaattccagcctgaccggcgtgatgatcctggccatcaagcgtggctcggtggccaaccgcctggggctgcagcccggcgacatgctgatcaagatcaacgaacgcgccattgccagcgtcgccgacgcccgccggtcgctggacgccgaatcggcccgctgggccatcaccatcaagcgtaacggcgaggtgatgagcttggtcctgggcggatga

SEQ ID NO: 4311 - protein, 467 aa, Magnetospirillum magnetotacticum MS-1
MTTSLKILAAALALVILVPAAQAQTQVVPTSREQVKLTFAPVARQVAPAVVNIYTKRVVRAAASPMFADPFFRRFFGDVPGMSQDRVQRSLGSGVMIGADGTVVTNHHVIKDADEVTVILSDRREFEARIVGSDERTDLAVLKIDGGKESFPTLVLGDSDAIEVGDVVLAVGNPFGVGQTVTQGIISALARTNVGVSDVQSFIQTDAAINPGNSGGALVDLQGRLIGINSAIYSKDGGSNGIGFAIPTALVRQVTTSIAKGGKVVRPWLGASGQAVTADLAQAMKLPRPVGVLVNHISPDSPAQRAGLADGDVIVAVEGREVDDTEGMRFRLATLAIGSEARLTVLRGGVERILTVRLVAPPENPPRDKTEINGRNPFSGTTLVNLNPALAEELGINSSLTGVMILAIKRGSVANRLGLQPGDMLIKINERAIASVADARRSLDAESARWAITIKRNGEVMSLVLGG

SEQ ID NO: 4312 - DNA, 1383 bp, Actinobacillus pleuropneumoniae serovar 1 str. 4074
  CDS (1)..(1383): transl_table=11
atgaaaaaatcaattttagcttcattattattaggtctaggtttattttcaacgccggcgacgacttttgccactttaccgattgccattgacgggcaaacaatgcccagccttgcgccgatgatagaaaaagtacgtcctgcggtagtaagtattgcggttgaagggaaaacacaagcgggaaaaacccaatatcgccgtgatattccggaagaattcgaatttttctttggaccggatatgttcggtgaacgcagtgcgccacgtaatttccgagggcaaggatccggcgcgatcatcaatgccgaaaaaggttatgtgattaccaataaccacgtaatcaaggatgcggataaaattactattaaacttgaagacggtcgtgaatttaaagcgaaattagtcggtgcggatccgttatccgacgtggcattagtacaaatggaaaacccgaaagatttaatcgaattaaaatttgccgactcggataaattgcgcgtcggtgattttagtgtagcaatcggcaatccgttcggtttaggtcaaaccgtaacatccggtattatctccgcattaggacgttcgaccggtagtatcgacgaaggttatgaaagctatattcaaacggatgctgcggtaaaccaaggtaactctggcggtccgttaatcaatttaaacggtgaattaatcggtattaatacggcgattatctctccgagcggtgggaatgcgggcattgctttcgcaattccgagtaatatggcgaatagccttgtacaacaaattatcgaattcggtgaagtgaaacgcggtatgttgggtattaaaggcggtgaattaaatgccgatcttgcaaaagagtttaatatcagcgcacaacaaggtgcatttatcagcgaagtgtttgctgattcggctgcagctaaagccggcttaaaagcaggcgatgttattactgaaattaacggtcaaaaaatccgtagtttcagtgaattacgtgcaaaagttgcaacgtccggcgtaggtaaagaaatcgagctaacttatttacgtgacggtaaaacggaaaaagcgaaagtgactttacaagcggaacaaggtaaaagcgtaagcgcaaccacgaaggacattctccccggacttaaaggggcggaattaactaacttcgataaagatcgcgttaaaggcgtcgcgattgcgaaagtagaaaaaggctcgttagcggaacaacgcggtttggcggaaggcgatgtgattgtcggggtaaaccgcattgctgtagaaaatcttacgcaattacgtcaagtcttagattcaaaaccgtctgtcgttgcccttaatattttacgtaacggcgcaaacttttacttaattcttcaataa

SEQ ID NO: 4313 - protein, 460 aa, Actinobacillus pleuropneumoniae serovar 1 str. 4074
MKKSILASLLLGLGLFSTPATTFATLPIAIDGQTMPSLAPMIEKVRPAVVSIAVEGKTQAGKTQYRRDIPEEFEFFFGPDMFGERSAPRNFRGQGSGAIINAEKGYVITNNHVIKDADKITIKLEDGREFKAKLVGADPLSDVALVQMENPKDLIELKFADSDKLRVGDFSVAIGNPFGLGQTVTSGIISALGRSTGSIDEGYESYIQTDAAVNQGNSGGPLINLNGELIGINTAIISPSGGNAGIAFAIPSNMANSLVQQIIEFGEVKRGMLGIKGGELNADLAKEFNISAQQGAFISEVFADSAAAKAGLKAGDVITEINGQKIRSFSELRAKVATSGVGKEIELTYLRDGKTEKAKVTLQAEQGKSVSATTKDILPGLKGAELTNFDKDRVKGVAIAKVEKGSLAEQRGLAEGDVIVGVNRIAVENLTQLRQVLDSKPSVVALNILRNGANFYLILQ

SEQ ID NO: 4314 - DNA, 1392 bp, Haemophilus influenzae R2866
  CDS (1)..(1392): transl_table=11
atgaaaaaaacacgttttgtattaaatagtattgcacttggattaagtgtattaagcacatcatttgttgctcaagccactttgccaagttttgtttcggaacaaaacagtcttgcaccgatgttagaaaaagtacaacctgccgttgtcactctttccgttgaaggaaaagctaaagtagattctcgttctcctttcctagacgatattcctgaagaatttaaattcttctttggcgatcgttttgccgaacaatttggtggacgtggagaatcaaagcgtaacttccgtggtttaggttctggtgtcattattaatgcaagcaaaggctatgttttaaccaataatcatgttattgatggagctgataaaattaccgtgcaattacaagatgggcgtgaatttaaagcaaaattagtgggtaaagatgaacaatcagatattgcattagtacagcttgaaaaaccaagtaatttaacagaaatcaaatttgctgattccgacaaattacgcgtaggcgatttcactgttgcaatcggtaatccatttggtttaggtcaaactgtgacatcaggtattgtttctgcattgggtcgttcaacaggttctgacagtggcacttatgaaaactatattcaaaccgatgcagcagtaaaccgcggtaattcgggtggtgcattagtcaatctaaatggcgaacttattggaattaataccgcaattatttcgccaagcggtggcaatgcaggaattgcctttgcgattccaagtaatcaagcaagcaatttagtgcaacaaattttagaatttggtcaagtgcgtcgcggattgcttggtattaaaggtggcgaactcaatgctgatttagccaaagcctttaatgtaagcgcgcaacaaggtgcatttgtaagtgaagttttaccgaaatctgctgctgaaaaagcaggacttaaagcgggcgatattatcacggcgatgaacggtcaaaaaatctcaagtttcgctgaaattcgtgcaaaaatcgcaaccactggtgcaggcaaagaaattagcttgacttacttacgtgatggcaaatcccacgacgttaaaatgaaattacaagcggatgatagtagccaactttcctcaaaaactgagttgcctgcattagatggtgcaacattgaaagactacgatgctaaaggcgttaaaggaattgaaatcacaaaaattcaacctaattcgctggctgcacaacgtggtttaaaatcgggcgatattattattggtattaatcgtcaaatgatcgaaaacattcgtgaattaaataaagtgcttgaaactgaaccgtcagcagttgcacttaatattttacgaggtgacagtaatttctatttattagtgcaataa

SEQ ID NO: 4315 - protein, 463 aa, Haemophilus influenzae R2866
MKKTRFVLNSIALGLSVLSTSFVAQATLPSFVSEQNSLAPMLEKVQPAVVTLSVEGKAKVDSRSPFLDDIPEEFKFFFGDRFAEQFGGRGESKRNFRGLGSGVIINASKGYVLTNNHVIDGADKITVQLQDGREFKAKLVGKDEQSDIALVQLEKPSNLTEIKFADSDKLRVGDFTVAIGNPFGLGQTVTSGIVSALGRSTGSDSGTYENYIQTDAAVNRGNSGGALVNLNGELIGINTAIISPSGGNAGIAFAIPSNQASNLVQQILEFGQVRRGLLGIKGGELNADLAKAFNVSAQQGAFVSEVLPKSAAEKAGLKAGDIITAMNGQKISSFAEIRAKIATTGAGKEISLTYLRDGKSHDVKMKLQADDSSQLSSKTELPALDGATLKDYDAKGVKGIEITKIQPNSLAAQRGLKSGDIIIGINRQMIENIRELNKVLETEPSAVALNILRGDSNFYLLVQ

SEQ ID NO: 4316 - DNA, 1509 bp, Prosthecochloris aestuarii DSM 271
  CDS (1)..(1509): transl_table=11
atgaaaagaaaatatacctacttgtttcttgtgctcgccggtgtgctggttggcgcgcttgctttttctcatattgatgtcactgtaccggttgccgagaaaaagatcgcggtcacgagtttttcgaatgatgctgctgcgtcgccgggggtcgagcatcagcctatccgttcgctgaaggacctgaacgaagcatttgtccagttggctgagtctgcgacaccttccgttgtgacgatttttaccgaaaagacggtcaacagaaaaaccatttctccgtttgatcttttcggcagtccctttgacgattttttcaatgttccacgtgacaggggagggcagaatggatccaaggaggtgctcagaggactcggctcaggggtggtcgtcagtgcggatggttatatccttaccaacaaccatgttgtcgataatgccgatgtgatctacattcgtacgtatgaaaataataaagtggcggccaaagtggtcggcaaggacccgaagacagatctggcggttatcaaggctgacgtcaaaggattgaagcctatcgctatcggcgacagtgacgcactgagggttggtgagtgggtgatcgctattggcagtccgctcggagagaaccttgcccgcacagtaacgcagggtattgtcagcgctaaaggccgcgccaatgtcggacttgctgattatgaagattttattcagacagacgctgccatcaatcccggcaattccggtggtcccctggtcaatatcaacggtgaacttgtcgggatcaacactgctattgcaagtcggacaggtggttttgaagggatcggctttgctgttccttcgaatatggcaaaaaaagtgatgcagtcgctcatcagcaacggcaaggttacaagaggatggctgggcgtcaccattcaggatgtcgatgaaaatatcgccaaggggctgcagcttgatccgccagagggtgttcttgtcggaacggttgttgacgatggtcctgctgcatcggcaggggtgaagacgggagatgtgatcattgccatcgatggtaaaaaagtgaccgataccattgaacttcgtaacggcattgcagagacacctccggggacgactgtaaaactcagggtgtggcgaaacgggcaggtaaagctcttgagcgtgcggttgagcgagcttcccggaaaggaggaggttgctgtcgaagagaaggctgaaatcactgatctcctgggtttcagtgtttcggaactgacctccgagctggcttcacgatacaggctgagtcgggataagggtgctgttcttgtgaccggtatcgatccatcgagcaaggcgtatcgagctggtttgcgacagggagatctcattctttccgtcaacaagaaaaacgtaagcacctacaaggagtttcttgcggtggccggctcagtgaaaaaaggcgatctcctctttctcttgatcgaacgtcagggcagcaaagtgtattttgcctttaacatttaa

SEQ ID NO: 4317 - protein, 502 aa, Prosthecochloris aestuarii DSM 271
MKRKYTYLFLVLAGVLVGALAFSHIDVTVPVAEKKIAVTSFSNDAAASPGVEHQPIRSLKDLNEAFVQLAESATPSVVTIFTEKTVNRKTISPFDLFGSPFDDFFNVPRDRGGQNGSKEVLRGLGSGVVVSADGYILTNNHVVDNADVIYIRTYENNKVAAKVVGKDPKTDLAVIKADVKGLKPIAIGDSDALRVGEWVIAIGSPLGENLARTVTQGIVSAKGRANVGLADYEDFIQTDAAINPGNSGGPLVNINGELVGINTAIASRTGGFEGIGFAVPSNMAKKVMQSLISNGKVTRGWLGVTIQDVDENIAKGLQLDPPEGVLVGTVVDDGPAASAGVKTGDVIIAIDGKKVTDTIELRNGIAETPPGTTVKLRVWRNGQVKLLSVRLSELPGKEEVAVEEKAEITDLLGFSVSELTSELASRYRLSRDKGAVLVTGIDPSSKAYRAGLRQGDLILSVNKKNVSTYKEFLAVAGSVKKGDLLFLLIERQGSKVYFAFNI

SEQ ID NO: 4318 - DNA, 1446 bp, Xylella fastidiosa Ann-1
  CDS (1)..(1446): transl_table=11
atgcgaccgctacctactttactgacgctatctatcgctgccgcattcggcggttttgcagccactgggatgaatgcttggcttgataaccgcgccgaagcggcatccaacaccaatgccatctcaccaatatcatcactgccaacgggcacggtgcctcaaaccacggctgccaaccagccgctaccatcgttagcacccatgctgcaacaagtgatgccagcagtggtcagcatcaacagtaaacaagtggtacgggtgcgcaatccatttttcgacgacccgatcctacgtcggctattcccagagatcccccaagaacgcattaatgagtcgctcggatctggggtgatcatcgacgcgcgcaatgggtacgtacttaccaatcatcacgtgatcgaaaatgccgacgccgtgcaggtgacattagcagatgggcgcagcttcaaggccgagttcctcggttctgacgcagacaccgacatcgccttgatccggataaaagcaaataaactgaccgaaatcaaactcgcagacagtaacaaattacgcgtgggcgacttcgtcgtagccattggtaacccgttcggctttacccaaacggtgacctcaggcatcgtctcggcggtaggtcgcagtggcatcctcggcctgggttaccaaaacttcatccaaaccgacgcatcgatcaacccgggtaactcaggcggcgcactggtgaatcttcatggccagttggttggcatcaacacggccagcttcaacccacagggcagcatggctggcaacatcggcttaggcctggcgattccttcgaatctagcgcgcaacgtcgtcgagcaattggtcacgaaaggcgttgtggtacgcgggacaatcggcgtacaaacacagaatattgatgcacgaatggcacaaagcttaggcctgagtaatccacacggcgcattagtgactcgcgtattacccaattccgctggtgccgcagccggactgcaaccaggtgatgtgatcctggcagccaatgaccaaagggtggacaacgcggaaacattgcacaactacgaaggactacagcccgtcggtagctcagtaacactggaagtacaccgtggcggcaagccactcaaaatacgcctcacactcaaagaattgccacgcgcaatcgccggagaaacgctggattcacgactgtcgggcgccatcttcgttgacctgccagagtccctccgtcaatcaggaatcggtggagtcatggtcaacaaaatcaaacacggcagccgcgctgcggccaatgggttggtagccggagatgtcatcattgccgcatccatcggtgaattctctgatctggcgagctggcgggcaagcttttcccacccaccacaacggctgatactgcgtgtgctgcgcggtaacgcacagtatgatgcgctgatgcgctga

SEQ ID NO: 4319 - protein, 481 aa, Xylella fastidiosa Ann-1
MRPLPTLLTLSIAAAFGGFAATGMNAWLDNRAEAASNTNAISPISSLPTGTVPQTTAANQPLPSLAPMLQQVMPAVVSINSKQVVRVRNPFFDDPILRRLFPEIPQERINESLGSGVIIDARNGYVLTNHHVIENADAVQVTLADGRSFKAEFLGSDADTDIALIRIKANKLTEIKLADSNKLRVGDFVVAIGNPFGFTQTVTSGIVSAVGRSGILGLGYQNFIQTDASINPGNSGGALVNLHGQLVGINTASFNPQGSMAGNIGLGLAIPSNLARNVVEQLVTKGVVVRGTIGVQTQNIDARMAQSLGLSNPHGALVTRVLPNSAGAAAGLQPGDVILAANDQRVDNAETLHNYEGLQPVGSSVTLEVHRGGKPLKIRLTLKELPRAIAGETLDSRLSGAIFVDLPESLRQSGIGGVMVNKIKHGSRAAANGLVAGDVIIAASIGEFSDLASWRASFSHPPQRLILRVLRGNAQYDALMR

SEQ ID NO: 4320 - DNA, 1356 bp, Pseudoalteromonas tunicata D2
  CDS (1)..(1356): transl_table=11
atgaaaacaaaattatcccttttgagtgcaattatgctttcttcaagtctgttgattgcaccctctatttcttatgcaaaattaccagttgcagttgatggtcagcaacttccaacacttgcacctatgctcgaaaaagtcacacccggtgtcgtgagtattcaagtttcaggtgcaaaagaagtacgtcgtcgtgttgacccgtttgacttcttttttggaaatccccagcagcgccaaccacaaagtcaaaaacaaccttttaatggtttaggctccggcgttattatcaatgctgatgaaggttatgttgttaccaacaatcatgtaattcaagacgctgaaaaaattattattaccctcgaggatggccgtgaatacgaagccaagctaataggcacagatcaagaagccgacatcgcattactgcaaattaaagctgaaaatctaacagcattaaaattagcagattcagacaaactgcgcgtgggtgatttctctgttgcaattggtaacccattcggtctgagccacacagtaacatcaggtattgtcagtgcgctaggtcgtagcggccttaacattgaaggttttgaagactttattcaaacagacgctgctatcaaccaaggtaattcaggtggtgcattagtaaaccttaacggtgagcttatcggtattaataccgctattttaggtgcatctggcggtaatgttggtattggtttctcaattccatctaacatgatgaaaaatttagttgatcaaattattgagcacggcgaagtacgccgcggatcgctggggatcgaaggtcgaactttagatgcaggtattgccaaagcgcaagatatagatttaaaacaaggcgcttatgtctttaaagttgttgatgattcagcagctgcagaggctggcattcaagcgggtgatgtcattgtaagcattgacaaagccgacgttcacagcttccctgaactacgcagtaaagtagcaaccttaggtgagggtaaaaccgttaagcttggaatttaccgcgatggcaaagttaaaagcgtaaaagtaactctacgaggtaatactgttgcgtcagctgctgcagacaaaatgcacccacgtttacaaggtgcattacttgaagcaactaaagataacaccggcattgtggttaaagagatccaagatcgctcacccgctgcgcgtgttggtcttgaagaaggcgacattattatgcaagtaaatcgcaaacgcgttacgactatcaatgaacttgctcgtgcaatcgatgatataaacggcaatattgtgttaggtgttaaacgcggtgacaattcaatttttgtcttaattcagtaa

SEQ ID NO: 4321 - protein, 451 aa, Pseudoalteromonas tunicata D2
MKTKLSLLSAIMLSSSLLIAPSISYAKLPVAVDGQQLPTLAPMLEKVTPGVVSIQVSGAKEVRRRVDPFDFFFGNPQQRQPQSQKQPFNGLGSGVIINADEGYVVTNNHVIQDAEKIIITLEDGREYEAKLIGTDQEADIALLQIKAENLTALKLADSDKLRVGDFSVAIGNPFGLSHTVTSGIVSALGRSGLNIEGFEDFIQTDAAINQGNSGGALVNLNGELIGINTAILGASGGNVGIGFSIPSNMMKNLVDQIIEHGEVRRGSLGIEGRTLDAGIAKAQDIDLKQGAYVFKVVDDSAAAEAGIQAGDVIVSIDKADVHSFPELRSKVATLGEGKTVKLGIYRDGKVKSVKVTLRGNTVASAAADKMHPRLQGALLEATKDNTGIVVKEIQDRSPAARVGLEEGDIIMQVNRKRVTTINELARAIDDINGNIVLGVKRGDNSIFVLIQ

SEQ ID NO: 4322 - DNA, 1371 bp, Photobacterium sp. SKA34
  CDS (1)..(1371): transl_table=11
atgattaaaaagccttttcttgttattactgcgttagcattaggtatcagttctgctattaccccagtaacggcaacggctgcattacccacctctgttgatagccaacccatgccaagccttgcgccaatgttggagcaagtcacacccgcggttgttagtattgccgttgaaggtaagcatgtttctaagcagcgtttacctgaatctttccgttatttttttggtccagactttccttcagagcaagtccaagagcggccatttagaggtttaggctctggggttattgttgatgcaaagaaaggctatatcgtcactaaccatcatgtaattgatggcgcagataaaatcagtgttcaacttttttatggacgcgaaatcgatgccaaacttattggtagcgatagcatgtcagatattgcattactacagatagacaaaccagaaaacttaactgaagtaaaactggcgaactcagataaattacgtgtcggtgattttgctgtcgcaattggtaacccatttggtttaggtcaaacggtaacatcagggattgtctcggcactgggtcgtagtggcttaaatatcgagaactttgaaaactttattcaaaccgatgctgcaatcaatagcggtaactcaggcggtgcattagttaatcttaatggtgaactcattggtataaacaccgcgattttgggccctaatggcggtaatgtcggtattggctttgctattccctctaatatggtgaaaagcttaactgatcaaatcttagaatttggtcaagtcaaacgcggaattttgggtgttcaaggtggtgaattaactgcagagcttgctaaaaccttcggttattcaactaaccacggtgcatttgtcaaccaagtcatgcctaaatcttctgctgaaaaagcaggactgaaagcaggagatatcattaccgaagtgaacggaaaccctatccgtaccttcagtgagttaagagcgaaaattgcgactatgggcgcaggtaaggcgctaactttaggtattattcgcgatggcaaaaagcaaaccgttaatgtgaccttaaaagcagcaagtgaaaataaagtaaaggctgataatcttcaccctagcctagccggtgctgaatttaccaatactgttgctggcgataaagtcaaaggggttaaggtattaaagcttgacgagcgatctatcgctgcacgttatggcctacaaaaaggtgacattattattggtcttaaccgtaataagataaagaaccttggtgaacttcgtaaagcacttgaagcaaaacctaatgtgcttgcgatggaagttaaacgtgataacaacgtcctgtatctgattattagataa

SEQ ID NO: 4323 - protein, 456 aa, Photobacterium sp. SKA34
MIKKPFLVITALALGISSAITPVTATAALPTSVDSQPMPSLAPMLEQVTPAVVSIAVEGKHVSKQRLPESFRYFFGPDFPSEQVQERPFRGLGSGVIVDAKKGYIVTNHHVIDGADKISVQLFYGREIDAKLIGSDSMSDIALLQIDKPENLTEVKLANSDKLRVGDFAVAIGNPFGLGQTVTSGIVSALGRSGLNIENFENFIQTDAAINSGNSGGALVNLNGELIGINTAILGPNGGNVGIGFAIPSNMVKSLTDQILEFGQVKRGILGVQGGELTAELAKTFGYSTNHGAFVNQVMPKSSAEKAGLKAGDIITEVNGNPIRTFSELRAKIATMGAGKALTLGIIRDGKKQTVNVTLKAASENKVKADNLHPSLAGAEFTNTVAGDKVKGVKVLKLDERSIAARYGLQKGDIIIGLNRNKIKNLGELRKALEAKPNVLAMEVKRDNNVLYLIIR

SEQ ID NO: 4324 - DNA, 1614 bp, Xanthobacter autotrophicus Py2
  CDS (1)..(1614): transl_table=11
atgcgaccgcccatgacccgctcgcccatgacccgctccgacaacaccccctccgtgaccaagcgccaccgcaaggctctcctggccggcgtggtcggtctcgcgctcgccggcgtcgtggccggccagttcgtgccgccgctgaacggtcccgtcgccgcccagatcaccaccagccagccggccggcaccttctccttcgccgatatcgtcgagaaggtctcgcccgccgtcgtctcggtgaaggtgaagaaggatgccggcaacgaacagatggccatgggcggcgatttcggcggcaatgttccgccccagatcgagcagttcctgaagcgcttcggcttcggcgacggccagggccccatgggtccgggtggtcccggcggcccgggcatgggtccgcgcggcggccacggtcccaagggcgagcgcccggtggtgggccagggctccggcttcatcatctcggctgacggctatgtggtgaccaacaaccacgtggtggacggcgccgacgaggtggacgtgaccaccaccgacggcaaggaataccaggccaaggtgatcggcaccgatccgcgcaccgacgtggccctgctgaagatcgagaacgtcaccaacctgccgtgggtgaagctcgcggacggcgccccgcgcgtcggtgactgggtgatcgcggtgggcaatcccttcggcctcggcggcaccgtgaccgccggcatcgtctcggcccgtggccgcgacattggctcgggtccctatgacgacttcatccagatcgacgcccccatcaaccggggcaattcgggcggcccgaccttctcgctgaacggcgaggtgatcggcatgaacaccgccatcgtctccccctcgggtggcaacgtgggcattgccttcgccattccgtccgagaccgtgaagacggtggtggcccagctgcgcgacaagggctcggtggcccgcggctacatcggcgtgcagatccagccggtgaccgaggacctcgcctccggcctcggcatcaaggacgccgagggcgccctggtggcgcaggttcagcccaacacccccggcgccaaggcaggcctgaaggccggcgacgtgatcgtgaaggtcaacaacgagccgatcaaggaagcccgcgatctgacccgcaaggtgggcatgatgaagccgggtaccgagatcaagctctcgctgatccgcgatgccaagcccatggacctgtccctggtgctcgaccagctgcccaacgatcaggtcgcctcgcgctccggtgcgccccagcagggcgaggatgacaccgccggcgccaccaaggacctgccgcgcctcggcctccagctcgccccgtccaagagcgttcagggcgccggcggcgaaggcgtggtggtgaccggtgtggagcccaacggccccgccgcccagcgcggtttcaagaccggcgacgtgatcctgaaggtgggcgacaaagcggtctccaccccgaaggatgtgcgcgacggcctcgccgccgccaaggccgacaaccgcaaggcggtgctcatccaggtgaagagcggcgagggcgtgcgcttcgtcgccatcaccctcgacgccaaggccaagggctga

SEQ ID NO: 4325 - protein, 537 aa, Xanthobacter autotrophicus Py2
MRPPMTRSPMTRSDNTPSVTKRHRKALLAGVVGLALAGVVAGQFVPPLNGPVAAQITTSQPAGTFSFADIVEKVSPAVVSVKVKKDAGNEQMAMGGDFGGNVPPQIEQFLKRFGFGDGQGPMGPGGPGGPGMGPRGGHGPKGERPVVGQGSGFIISADGYVVTNNHVVDGADEVDVTTTDGKEYQAKVIGTDPRTDVALLKIENVTNLPWVKLADGAPRVGDWVIAVGNPFGLGGTVTAGIVSARGRDIGSGPYDDFIQIDAPINRGNSGGPTFSLNGEVIGMNTAIVSPSGGNVGIAFAIPSETVKTVVAQLRDKGSVARGYIGVQIQPVTEDLASGLGIKDAEGALVAQVQPNTPGAKAGLKAGDVIVKVNNEPIKEARDLTRKVGMMKPGTEIKLSLIRDAKPMDLSLVLDQLPNDQVASRSGAPQQGEDDTAGATKDLPRLGLQLAPSKSVQGAGGEGVVVTGVEPNGPAAQRGFKTGDVILKVGDKAVSTPKDVRDGLAAAKADNRKAVLIQVKSGEGVRFVAITLDAKAKG

SEQ ID NO: 4326 - DNA, 1383 bp, gamma proteobacterium HTCC2207
  CDS (1)..(1383): transl_table=11
gtgcttaaaagacttttgcttgttacttcctttgtatgtcttgtttttaaccctctcagtgcgcttgctcagctgccagatttcactgaattggttgaggatacatccgccgcagtggtgaaaatcaacacggtgcagaaagcccgcaagaacaggtcggggcagattgcgcctgaccaaattccggagatcttccgcgatctatttcagcagcgccagcggccgcaaacccaacgtccggttatggcaatgggctcgggctttgtgatttccgaagatggttacattatcaccaaccaccatgtgattgatggtgctgacgagattgttgtgcgcttttcagatcgacgcgaatttactgccacagtggtgggcaaagatcgccgctcagatctcgccgtgctcaaggtcgaagcagataatttgcctacgctcaaacttgccgcgccagaccaacttaaagtcggtgaatgggtgttggccatagggtcgccctttggtctcgactattcggccagcgtcgggattgtcagtgccatagggcgcagtattcccacagaaaaaggggagaattatgtgccctttattcagactgatgtggcaattaatccaggaaattccggtggcccactgttcaatctggacggcgaggttgtgggtatcaactcacagatctattctcgctctggaggctctattgggctctcttttgccatccccaccagtgtcgcagtcggtgttatcgaacagcttaaggaaaatggcgaagtgcagcgcggctggctcggcgtagtgattcaggatgtagacaaagatttggctcaatcactggatctggatcggccgcagggcgcactcattaatgctgttgaaccggatagtccagcagacaaaggaggcattaagcctggcgatgtgattgtccgatttaacaaacaacagatcattgaatccggtgatttaccgcatgttgtcggcatgctggcgcctgaaaaaaaggctccggtggagctctatcgcaagggcaagctaaagaaattgactgtcgcagtgggtcgtctggataacggtgattccagtgtcgccggtggttctgatggaagcgaccgcctgggtttagtggttgccgatctcagtgaccgcgaaaggagctctctgggaattcgcggtggggtgattttggagcaggtttcgccagattcggcgggctcggagtcaggcttaaatcgcggtgacgtgatcttgcagctcggctacagtcgtattgatgacagcgatgagtacaaacaagttgtgcgagaattacctgtggatacgccaatattaatccgattctatcggcagggtagagcgatctcacgaacgattatccttgcgaagtga

SEQ ID NO: 4327 - protein, 460 aa, gamma proteobacterium HTCC2207
MLKRLLLVTSFVCLVFNPLSALAQLPDFTELVEDTSAAVVKINTVQKARKNRSGQIAPDQIPEIFRDLFQQRQRPQTQRPVMAMGSGFVISEDGYIITNHHVIDGADEIVVRFSDRREFTATVVGKDRRSDLAVLKVEADNLPTLKLAAPDQLKVGEWVLAIGSPFGLDYSASVGIVSAIGRSIPTEKGENYVPFIQTDVAINPGNSGGPLFNLDGEVVGINSQIYSRSGGSIGLSFAIPTSVAVGVIEQLKENGEVQRGWLGVVIQDVDKDLAQSLDLDRPQGALINAVEPDSPADKGGIKPGDVIVRFNKQQIIESGDLPHVVGMLAPEKKAPVELYRKGKLKKLTVAVGRLDNGDSSVAGGSDGSDRLGLVVADLSDRERSSLGIRGGVILEQVSPDSAGSESGLNRGDVILQLGYSRIDDSDEYKQVVRELPVDTPILIRFYRQGRAISRTIILAK

SEQ ID NO: 4328 - DNA, 1455 bp, delta proteobacterium MLMS-1
  CDS (1)..(1455): transl_table=11
atgaaatctgcggctatcacgctgaattggcgtaaaactctgtttattttttccttctgctggctactgctggccctggcggccaccgggctcagggccgcgccgccctcctttgccgagctggccgaagagatggggccttcggtggttaatatctataccacccagaccgttaaggcgccccgctcgccccatcctttctttggcggtgaaggctttgaggagctgccggagatgttccgccgcttctttgatatgccgcatccctccccccacggtgagcagcagcaacccccccgggagctacagcggaccagcctgggctccggggtgattatttccaccgatggttatattgttaccaacaaccacgtggtggaaaacgccgattccattaatatccggctgaccaacttcgaggagtatgacgccgaggtcatcggccgtgatcccaaaaccgacctggcattgctgaaaatcgacagcaagcatgagttgccggcggttcgcatgggggattcggaagccctgcgagttggcgattgggtgctggccatcggcaacccctttggtttcgagcagacggtgaccgccgggatcgtcagcggcaaagggcgttccctgggcagcggcccctatgaaaactttatccagaccgatgcctccattaaccccggcaattccggcggcccgctctttgctctggacggggcaatggtgggcatcaacaccgccatttacagccgtggcgggggtaatatcggtattggttttgcgattccggtcaatatggccaagaatgtggtcgagcagttgcgggagcacggcactgtgacccggggctggctgggggtgatgatccagcatgtgaccccggacctggcccggcatctgcaactggagcggcccatcggcgccctggtgggcgaggttgatcccgccgggccggcggccgccgccggcctcaaagccggtgatgtgatcgtcgagtacgccggcaaggaaatcagccagatgaccatggtgcccaccctggtggcccagaccacccccggtgaggaggtggagatggtggtgatgcggcggggcgagcggcagaccctgacggtgaccatcggcaagcttgatgaagaggatgagcgccgggcccggagtgctcccgaatcggaggagcaactggggctggcggtccaggagttgactccggaggtggccgaatccctggggatcagccaggatcaaggggtgctgatcgccgatgtcaaagccggttccgccgccgccgaagccggcttgcgccggggtgaggtgatcgtcgaggttaaccagcaggccatcgagagtctggagcagtatgccgcagtcatcgaagaagccctggaagagggcagtgtgctgctgctggtccgtaaccgccaggggcagagccgctttgtcgccatcaggatcaggtag

SEQ ID NO: 4329 - protein, 484 aa, delta proteobacterium MLMS-1
MKSAAITLNWRKTLFIFSFCWLLLALAATGLRAAPPSFAELAEEMGPSVVNIYTTQTVKAPRSPHPFFGGEGFEELPEMFRRFFDMPHPSPHGEQQQPPRELQRTSLGSGVIISTDGYIVTNNHVVENADSINIRLTNFEEYDAEVIGRDPKTDLALLKIDSKHELPAVRMGDSEALRVGDWVLAIGNPFGFEQTVTAGIVSGKGRSLGSGPYENFIQTDASINPGNSGGPLFALDGAMVGINTAIYSRGGGNIGIGFAIPVNMAKNVVEQLREHGTVTRGWLGVMIQHVTPDLARHLQLERPIGALVGEVDPAGPAAAAGLKAGDVIVEYAGKEISQMTMVPTLVAQTTPGEEVEMVVMRRGERQTLTVTIGKLDEEDERRARSAPESEEQLGLAVQELTPEVAESLGISQDQGVLIADVKAGSAAAEAGLRRGEVIVEVNQQAIESLEQYAAVIEEALEEGSVLLLVRNRQGQSRFVAIRIR

SEQ ID NO: 4330 - DNA, 1350 bp, Rickettsiella grylli
  CDS (1)..(1350): transl_table=11
atgaagagactattatatcaattattattcggcgttttacttataatcaatatttatccttccagttacgccagttggtcccttaattcagtgcatcaaaataaggataacttctctcaggcattacaaccgatactccctgccgttgtgaatgtttccgttcaaggggatatccctttgaatcaattacctccgcctgtccctgggcgtccctatcctcgtcattttgaaagtatgggttcaggcgtcattgtcgatgcaaaagcagggtatgttttaaccaacgctcatgttattcgcgaagctaaaaccattaccgttaccttaagtgatggccgtgttttaaatgccacactgaaaggatcagatcctgcttctgatattgctttactgaccatcacgcctgatcacttaacggctattcctttaggtaattccgatcatttaaaagtgggtgattttgtagccgctatcggcaatccttttggactgaaccaaacagtcacttcaggaatcgtgagtgctttacaacgtacgggattaggaatagaaggttttgaaaatttcattcaaacggacgcgtccatcaatccaggcaattcagggggggctttgatcaatttacaagggcaactcattggcattaatacagccatattaacgcctggtttaaacgcaggaaatattggaattggctttgctatacccattaatatggcctatggcgtgatgaaacaattagctgaatatgggtctgtcaaacggggtttaatgggagttctcgtgcaagatctaacccccatattagcgaccgcgctccatattccatctacactcaacggagcacttgtctctcaagttcctcgttattcacctgccgcggctgcaggtattcacatcggcgatattattcagtccattaatggcatacccattcataatagcggacaagtcaaaaatattgtgggtctgttaagagtgaatgataaaattaatattaagttattgcgaaaagggaaaacgataacgaccgttttaaacctcactgatcctaaacaatataaaaaagtggccgaacaaaataatccgtttttatatgggttaatgttgcgcgattttaatcaaacgattacaggtcaagggaatttacgaggcgttgaggtcgttgatatggatgaaaacagtcctgcctggcatgcgggtatacggcctggcgatgttatcctctctgctaatcaaatcaatgtaaccgaggttccgcaattacaagcgattgcgaagcagaacaaacaaggactattagtgaatgtattatctcgcagcggaagtcggtttgttgtcattaaataa

SEQ ID NO: 4331 - protein, 449 aa, Rickettsiella grylli
MKRLLYQLLFGVLLIINIYPSSYASWSLNSVHQNKDNFSQALQPILPAVVNVSVQGDIPLNQLPPPVPGRPYPRHFESMGSGVIVDAKAGYVLTNAHVIREAKTITVTLSDGRVLNATLKGSDPASDIALLTITPDHLTAIPLGNSDHLKVGDFVAAIGNPFGLNQTVTSGIVSALQRTGLGIEGFENFIQTDASINPGNSGGALINLQGQLIGINTAILTPGLNAGNIGIGFAIPINMAYGVMKQLAEYGSVKRGLMGVLVQDLTPILATALHIPSTLNGALVSQVPRYSPAAAAGIHIGDIIQSINGIPIHNSGQVKNIVGLLRVNDKINIKLLRKGKTITTVLNLTDPKQYKKVAEQNNPFLYGLMLRDFNQTITGQGNLRGVEVVDMDENSPAWHAGIRPGDVILSANQINVTEVPQLQAIAKQNKQGLLVNVLSRSGSRFVVIK

SEQ ID NO: 4332 - DNA, 1353 bp, Alteromonadales bacterium TW-7
  CDS (1)..(1353): transl_table=11
atgaaaatgaaattatcacttatcagtgctgctattttatctacaagcttattaatgagcccggtagcgtcttatgcaaagttaccaatagcagttaacgggcaacagctacctactcttgcacctatgcttgaacaaatttccccaggtgttgtgagtattcaggtttcgggctctaaagaagttcgccgccgcgccgatccacttgagttcttttttggccaacaacaacctcgcagccaaaagcgccaatttagtggtttgggttcaggtgtgattatcaatgcagatgaaggttatgtggttactaataatcacgtgatccaggatgctgaaaaaatgatcgttacactcgaagatggacgtgaatttgaagctactaaaattggtacagataaagagtctgacattgcactactacaaatagacgctgatgatctgacagaaatcaaacttgctaactcagaccaattacgagtcggcgattttgcagttgctataggcaacccgtttggtttaagccacaccgtcacctcaggtattgttagtgcccttggacgcagtggtttaaacattgaaggttacgaagatttcattcaaacagacgccgcaattaaccaaggtaattctggcggtgctttagtgaatttaaatggagaactaattggcattaacaccgctattttaggtgcatctggtggtaacgttggaattggttttgctattccttcaaacatgatgaaaaacttggttgatcagattattgagcatggtgaagtacgccgtggctcgctaggcatatcgggtcgcccacttgatgcgggcttagccaaagcacaacagcttgatgttaaacaaggtgcttatgtaatgcaggtaatggatgatactgctgcaagtaaagcaggcataaaagccggggatgttattgtaagcattaatggcagcgatataagcggcttccatgaactgcgcagtaaaattgctacattaggtgaaggcagagaaataaagctcagtatttaccgagatggaaaaataaaaacgctcaaagtcacactcgacggtgcatctggtgttaaagcggttggcgaagaactgcaccccgcatttcaaggggctgaattagaaaatgttcagaaaaataacgcaaaggggattgaaattacttctgtcgatcctcgctctccttctgcacgggtaggcctagaagaaggtgacatgatagtccaagtgaaccgccaacgtgttgagacaattcgcgatatgaataaaatcatcgaaaatacgaaaggtaatattgtactaggcgttaaacgtggacgtgagtctatatttatcctaattcagtaa

SEQ ID NO: 4333 - protein, 450 aa, Alteromonadales bacterium TW-7
MKMKLSLISAAILSTSLLMSPVASYAKLPIAVNGQQLPTLAPMLEQISPGVVSIQVSGSKEVRRRADPLEFFFGQQQPRSQKRQFSGLGSGVIINADEGYVVTNNHVIQDAEKMIVTLEDGREFEATKIGTDKESDIALLQIDADDLTEIKLANSDQLRVGDFAVAIGNPFGLSHTVTSGIVSALGRSGLNIEGYEDFIQTDAAINQGNSGGALVNLNGELIGINTAILGASGGNVGIGFAIPSNMMKNLVDQIIEHGEVRRGSLGISGRPLDAGLAKAQQLDVKQGAYVMQVMDDTAASKAGIKAGDVIVSINGSDISGFHELRSKIATLGEGREIKLSIYRDGKIKTLKVTLDGASGVKAVGEELHPAFQGAELENVQKNNAKGIEITSVDPRSPSARVGLEEGDMIVQVNRQRVETIRDMNKIIENTKGNIVLGVKRGRESIFILIQ

SEQ ID NO: 4334 - DNA, 1434 bp, Pseudomonas putida GB-1
  CDS (1)..(1434): transl_table=11
atgtcaataccacgcttgaaatcctacctaacgatgttcgccgccgtgctcatgctcggccaggtgctcaccgcccaggccgaggaagccctgccggacttcaccagcctggtcgagcaggcctcgccggcggtggtcaacatcagtaccaagcagaagctgccggatcgccgcatcgctgcagggcagatgccggacctggaaggcctgccgccgatgttccgcgagttcttcgaacgcaacatgccgcaacaaccgcgctcgccacgcggtgaccgccagcgcgaggcgcagtcgctgggctcgggcttcatcatttccagtgatggctacgtgctcaccaacaaccacgtggtcgccgacgccgacgagatcatcgtccgcctgtcggaccgcagcgagctgcaggccaaattggtcggcaccgacccgcgtaccgacgtggccctgctgaaggtcgagggcaagaacctgccgatcgtgaagctgggtgattccgagaagctcaaggtgggtgagtgggtactggccatcggttcgccgttcggcttcgaccattcggtgaccaaaggtatcgtcagcgccaagggccggaccctgcccaatgacacctacgtaccgttcatccagaccgacgtggccatcaacccgggtaactccggtggtccgctgttcaacatgaagggcgaagtggtgggtatcaactcgcagatcttcacccgttctggcggtttcatgggcttgtcgttcgccatcccgatcgatgtggcgatcgatgtctccaaccagctgaaaaaagacggcaaggtcagccgtggctggctgggtgtagtgattcaggaggtcaacaaggacctggctgaatccttcggcctggacaagcctgcgggtgccctggtggcccaggtattggaaaacggcccggctgccaagggcggcctgcaggtgggtgacgtgatcctcagcatgaacggccagcctatcgtcatgtcggccgacctgccgcacctggttggcggcctcaaggatggcgagaaggccaagctggaaatcatccgcaacggcaagcgtcagaacctggacatcagcgtgggcgcactgccggacgacgatgccgacattggcactggcgccgaaggcagcgccgagcgcagcagcaaccgcctgggcgtatcggtggccgacctgaccgccgagcagaagaaatccctggagctcaagggaggcgtggtcatcaaggaagtgcaggatggccccgcagccatgattggcctgcgcccgggtgatgtcatcagccacctgaacaaccaggccatcggttcggccaaggaattcaccgaaatcgccaaggagctgccgaagaaccgttcggtatcgatgcgcgtcctgcgtcaggggcgcgccagcttcatcaccttcaagcttgctgaataa

SEQ ID NO: 4335 - protein, 477 aa, Pseudomonas putida GB-1
MSIPRLKSYLTMFAAVLMLGQVLTAQAEEALPDFTSLVEQASPAVVNISTKQKLPDRRIAAGQMPDLEGLPPMFREFFERNMPQQPRSPRGDRQREAQSLGSGFIISSDGYVLTNNHVVADADEIIVRLSDRSELQAKLVGTDPRTDVALLKVEGKNLPIVKLGDSEKLKVGEWVLAIGSPFGFDHSVTKGIVSAKGRTLPNDTYVPFIQTDVAINPGNSGGPLFNMKGEVVGINSQIFTRSGGFMGLSFAIPIDVAIDVSNQLKKDGKVSRGWLGVVIQEVNKDLAESFGLDKPAGALVAQVLENGPAAKGGLQVGDVILSMNGQPIVMSADLPHLVGGLKDGEKAKLEIIRNGKRQNLDISVGALPDDDADIGTGAEGSAERSSNRLGVSVADLTAEQKKSLELKGGVVIKEVQDGPAAMIGLRPGDVISHLNNQAIGSAKEFTEIAKELPKNRSVSMRVLRQGRASFITFKLAE

SEQ ID NO: 4336 - DNA, 1413 bp, Pasteurella haemolytica
  CDS (1)..(1413): transl_table=11
atgaggaacattcacaatatgaacaaaacaatgaaaaaatcatttttaactgcattcattttaggctcaaccattgccgcaatgccggcgtatgcagaagcaacattacccacagccgtaaatgggcaagctgtgccaagccttgcaccaatgctggaaaaagttcgcccggcggtggtgagtattgcagtagaaggtaaaaccaaaggcgatagccgccgcagtcgtgaaattccggaagaatttgaatttttcttcggtcctcacgccgatttattcggcaaccgctcatcagctccacgcaatttccgtggcgttggatcaggtgcagtcatcaatgccgaaaaaggttatgtgattaccaataaccacgtgatcgacaatgccgataaaattaccgtaaaacttgaagacggacgtgaatttaaagctaaattagttggtgctgatcccctttcagatgtggcgttaattcaagttgaagatccaaaaaacttaactgaaattaaattcgccgattccgataaattacaagtgggcgattttacagttgcaatcggtaacccgtttggcttaggacaaactgttacttcaggcatcatctcggcacttggtcgttcaaccggtcaatccgatgaaggctatgaaaactatattcaaaccgatgcggcagttaaccaaggtaactctggcggcccgttaattaacttaaacggcgaattaatcggaattaacaccgctattatttctccaagtggtggcaatgccggtatcgcctttgcgattccaagtaatatggcaaacagcttggtgactcaaattattgagtttggtgaagtaaaacgtggaatgttaggcattaaaggcggtgaattgaatgctgaccttgctaaagagttcaatatttccacccaacaaggggcatttgtaagcgaagtcttaccggattctgctgctgctaaagccggctttaaagcaggtgatgtgattactgaaatcaacggtcaaaaaatccgtagtttcagcgaattacgagcaaaagtagctacttcaggtgtaggtaaagagattgaacttacttacctgcgtgacggcaaagaagccaaagcaaaagtgaccttacaatcggattctgaagccaaagttactgcttcaaacctcattccggcattaaaaggggcagattttaacaactacaatgccaaaggcattaaaggggttgaaatttctaacgtagaaaaaggctcgattgctgaaatgcgaagcctcaaaaaaggcgatattatcatcggcgtgaaccgccactcggtagaaaacattgccgatttacgcaaaatattagaaaccaagccatctgtggttgcactcaatattgtgcgtgacggtgcaaatttctatgtgattttgcaataa

SEQ ID NO: 4337 - protein, 470 aa, Pasteurella haemolytica
MRNIHNMNKTMKKSFLTAFILGSTIAAMPAYAEATLPTAVNGQAVPSLAPMLEKVRPAVVSIAVEGKTKGDSRRSREIPEEFEFFFGPHADLFGNRSSAPRNFRGVGSGAVINAEKGYVITNNHVIDNADKITVKLEDGREFKAKLVGADPLSDVALIQVEDPKNLTEIKFADSDKLQVGDFTVAIGNPFGLGQTVTSGIISALGRSTGQSDEGYENYIQTDAAVNQGNSGGPLINLNGELIGINTAIISPSGGNAGIAFAIPSNMANSLVTQIIEFGEVKRGMLGIKGGELNADLAKEFNISTQQGAFVSEVLPDSAAAKAGFKAGDVITEINGQKIRSFSELRAKVATSGVGKEIELTYLRDGKEAKAKVTLQSDSEAKVTASNLIPALKGADFNNYNAKGIKGVEISNVEKGSIAEMRSLKKGDIIIGVNRHSVENIADLRKILETKPSVVALNIVRDGANFYVILQ

SEQ ID NO: 4338 - DNA, 1736 bp, Edwardsiella tarda
  CDS (224)..(1639): transl_table=11
taatcatctgctggatatatcgtgttcacgcgttggctttgtaaagtcgggcgcataaatatttacgcttccttgactttattgcggtgaacttcatttcagtttactactcttagtaaacataatatcaccgtcacggtgatagcggcgccgtctggcaacgccgttcagcgccgctgaatgaatccgttttatcgttgctattacgagagaaaatcgtgctatgaaaaaaaccactttagtattgagtgccgttgcattgagtctgggtatggcgttgagtccgatgtcggccagcgcggcagagacctcttccgccaccacagcccaggcgctgccgagcctggcaccaatgctggagaaagtgatgccgtccgtggtcagcatcaacgtcgagggcagcgcgaccgtcaataacagccgcgtgccgccgcagttccagcagttttttggcgaagactccccgctgtgccagccgggttcgccgttcggggattcgccgatgtgccagggcggcggcaatgcgccgtccaaagagcgctttaaggcgctgggctccggggtcattatcgacgcgggtaaaggctatgtcgtgaccaacaaccacgtggtggccaacgccgacagcattaaagtgcagctgagcgacggtcgccgcttcgacgccaaggtgatcggcaccgatccgcgtaccgatatcgcgctgatccagctgaaggatgccaagaacctgaccgccattaaaatggcggactctgacaatttgcgcgtgggcgactatgcggtggcgatcggcaacccctacgggctgggtgagaccgtcacctccgggatcgtttccgcgctgggccgcagcggcctgaacgtggaaaactacgaaaactttattcagactgacgcggcgattaaccgcggtaactccggcggtgcgctggtgaacctgaacggcgatctcatcgggatcaacaccgccattctggcgccggacggcggcaacatcggcatcggcttcgccattccgagcaacatggtgaaaaacttgaccggtcagatggtggagtacggccaggtgaaacgcggtgagctggggatcatggggaccgagctgaactccgagctggcgaaggcgatgaagatcgacgcccagcgcggcgcctttatcagccaggtgctgccgaagtcagccgccgcgaaggccgggctgaaacggctagatgtcatcgtctccctgaacgggaagaacatctccagcttcgcttccttccgcgctgaaatcggcaccatgccggtcggcagcaagctggcgctggggatcatccgcgacggtaagccgatgaacgtggaggtaaccttggagcagagcgcgcagagccaggtggcctctgacaacatcttcagcggtatcgaaggggccgagctgagcaatgcggccggtggcaagggcgtgaaggtggacaacgtgaagaaaggctccaccgccgcgcgtatcggtctgcagaagggcgacgtgatcctgggcgtgaaccagcacgcgatcgctaacatcggtgagctgcgtaaaattctggatgccaagccgccggtgctggcgctgaacatccagcgtggcgacaacaccctgtatctgctgatgcagtaattcctccgcgcgtcgcctggatatcgggtgacgcccccggaaagacgaataccccgtgagcgtattgcccacggggtatttttttatccgcatctca

SEQ ID NO: 4339 - protein, 471 aa, Edwardsiella tarda
MKKTTLVLSAVALSLGMALSPMSASAAETSSATTAQALPSLAPMLEKVMPSVVSINVEGSATVNNSRVPPQFQQFFGEDSPLCQPGSPFGDSPMCQGGGNAPSKERFKALGSGVIIDAGKGYVVTNNHVVANADSIKVQLSDGRRFDAKVIGTDPRTDIALIQLKDAKNLTAIKMADSDNLRVGDYAVAIGNPYGLGETVTSGIVSALGRSGLNVENYENFIQTDAAINRGNSGGALVNLNGDLIGINTAILAPDGGNIGIGFAIPSNMVKNLTGQMVEYGQVKRGELGIMGTELNSELAKAMKIDAQRGAFISQVLPKSAAAKAGLKRLDVIVSLNGKNISSFASFRAEIGTMPVGSKLALGIIRDGKPMNVEVTLEQSAQSQVASDNIFSGIEGAELSNAAGGKGVKVDNVKKGSTAARIGLQKGDVILGVNQHAIANIGELRKILDAKPPVLALNIQRGDNTLYLLMQ

SEQ ID NO: 4340 - DNA, 1368 bp, Enterobacter cloacae
  CDS (1)..(1368): transl_table=11
atgaagaaaaaaaaccagctgttgagcgctatcgcgttaagtgtcgggttatctctctcggcgtccgtccctgtatttgccgccattccctcccaggtgcctggccaggcggccattccaagcctcgcgcctatgctggaaaaagtgttgccggcggtcgtcagcgttcaggttgagggcaccgcagtacaaagccaacgcgtccctgaagaactgaaaaaatattttggcgatgagtctcccgaccagcaggctcagccttttgaaggcctgggttctggcgtcattattgatgcggcaaaaggctatatcctgaccaacaaccacgtcatcagccaggccgataaaatcagcgtccagctgaacgatggccgcgaatttgatgccaaactgatcggcggcgatgaccagagcgacatcgcgctgctgcaggtgcaaaacccaagcaacctgacccagattgccatcgcggattccgacaaactgcgcgtcggcgattttgccgtcgccgtgggcaacccctttggtttagggcagaccgccacctccgggatcgtctcggcgctcgggcgcagcggcctcaatctggaagggctggaaaactttatccagaccgatgcctcaatcaaccgtggtaactccggcggagcattgctcaaccttaacggcgagctgattgggattaacacggcgattctggccccgggcggcggcagcatcgggatcggttttgctatccccagcaatatggccaaaaccctggcgcagcaattgatccagttcggtgaaatcaaacgcgggctgctgggtattaaaggtatggagatgagcgcggatatcgcaaaagcgttcaatatcaacgtacagcgcggggcgtttgtcagtgaagtgctgccaaactccggctcggcaaaagcgggcgtgaaatcgggagatgtgatcgtcagcctgaacgacaaaccgctgaatagctttgcagaactgcgctcacggattgccacgacggaacctggcgccaaagtgaagctgggcctgatccgtgacggtaagccgcttgacgttgaagtgacgctggataagagcacttcatcctcggccagcgcggagcttatcgccccggcgctacagggggctacgttgagcgacgggcagctgaaggacggtacgaaaggcatcagcatcgacaccgtcgagaagagcagccctgccgcacaggccggattgcatcaggatgacgtgattatcggtgtcaaccgcaaccgcgtgcagtctattgccgaactgcgcaaggtgctggaaagcaaaccagcggttattgccctgcaggtcatgcgtggcaatgagtccatctatattctgttgcgctaa

SEQ ID NO: 4341 - protein, 455 aa, Enterobacter cloacae
MKKKNQLLSAIALSVGLSLSASVPVFAAIPSQVPGQAAIPSLAPMLEKVLPAVVSVQVEGTAVQSQRVPEELKKYFGDESPDQQAQPFEGLGSGVIIDAAKGYILTNNHVISQADKISVQLNDGREFDAKLIGGDDQSDIALLQVQNPSNLTQIAIADSDKLRVGDFAVAVGNPFGLGQTATSGIVSALGRSGLNLEGLENFIQTDASINRGNSGGALLNLNGELIGINTAILAPGGGSIGIGFAIPSNMAKTLAQQLIQFGEIKRGLLGIKGMEMSADIAKAFNINVQRGAFVSEVLPNSGSAKAGVKSGDVIVSLNDKPLNSFAELRSRIATTEPGAKVKLGLIRDGKPLDVEVTLDKSTSSSASAELIAPALQGATLSDGQLKDGTKGISIDTVEKSSPAAQAGLHQDDVIIGVNRNRVQSIAELRKVLESKPAVIALQVMRGNESIYILLR

SEQ ID NO: 4342 - DNA, 1368 bp, Pasteurella piscicida
  CDS (1)..(1368): transl_table=11
atgagaaaacctctgcttgttttaagtgcactggctttaggtattagttcagttgtcaccccgatgacggcaactgcggcgttacctaccgccgttaataatcaacaagtacctagccttgcgccaatgcttgagcaagtaacaccagctgtagtaagcattgcagttgaaggtaaacacgtttccaaacagcgcctacctgaggcttatcgctttttctttggtccagattttcctaccgagcaagtacgagaacaaccatttagggggttaggctcgggggttatcattgacgctaaaaaagggtatgtcgttaccaataaccatgttattgatggcgcagataccatcaaagtacagctttctgacggacgtgagataaaagcaaagctgcttggtaccgataaaatgtctgatattgcgttgctgcaattagaagatgccaaagatcttacggctatcaaactcgctgattctgataatcttcgcgtaggcgatttcgccgttgctatcggtaacccatttggcctaggacaaacagtaacatcaggtattgtttccgctcttggtcgtagtggtttaaatatcgagaacttcgaaaactttatccaaactgatgcgccaatcaatagcggtaactcaggtggtgccttagtaaacttaaacggtgagttgattggtattaataccgcgattcttgcgcctaacggtggtaacgtcggtatcggttttgcaatccctgctaatatggtgaaaaacttaacagatcaacttatcgaatttggtcaagttaagcgcggtgttctgggtgttactggtggtgagctaacctctgagctagctgaaacctttggttataaaacaaatcacggcgcgtttgtaaaccaagtacttcctgaaggctctgcggcaaaagcaggtctaaaagcaggtgatattattgtttcagtcaataataagccgattcgtactttcagtgaattacgcgcaaaaattgtaactctaggtgctggtaagaaagtaacactaggcctaattcgcgatggtaaagagctgaatgttcctgtgactttagaagcagcaaaacagactcaagttaaagctgatgatctgcatgaaagcttagccggtgctgaatttgctaatactagcccagaagataaagttcacggagttaaagtaaccgagctgaacaagcaatctattgcggctcgctatggcttgaagaagggcgatatcattattggtctaaaccgtcagccaattaaaaaccttggcgaacttcgtaaggcgcttgagaaaaaaccaaacgtacttgcaatggaagttaaacgtggtgatagcgtactgtatttaatcatgcgttaa

SEQ ID NO: 4343 - protein, 455 aa, Pasteurella piscicida
MRKPLLVLSALALGISSVVTPMTATAALPTAVNNQQVPSLAPMLEQVTPAVVSIAVEGKHVSKQRLPEAYRFFFGPDFPTEQVREQPFRGLGSGVIIDAKKGYVVTNNHVIDGADTIKVQLSDGREIKAKLLGTDKMSDIALLQLEDAKDLTAIKLADSDNLRVGDFAVAIGNPFGLGQTVTSGIVSALGRSGLNIENFENFIQTDAPINSGNSGGALVNLNGELIGINTAILAPNGGNVGIGFAIPANMVKNLTDQLIEFGQVKRGVLGVTGGELTSELAETFGYKTNHGAFVNQVLPEGSAAKAGLKAGDIIVSVNNKPIRTFSELRAKIVTLGAGKKVTLGLIRDGKELNVPVTLEAAKQTQVKADDLHESLAGAEFANTSPEDKVHGVKVTELNKQSIAARYGLKKGDIIIGLNRQPIKNLGELRKALEKKPNVLAMEVKRGDSVLYLIMR

SEQ ID NO: 4344 - DNA, 2077 bp, Klebsiella pneumoniae
  CDS (374)..(1807): transl_table=11
tctagatgcaccttgcaggcatgcaagcttcggccgcctaggccgcggccgcacttgtgtataagagtcaggtcaccggcttggcctatgttgaagcggtaaataaactggcgcgtacggcgcccgaatttgcgctgatggaatactattatcgctgccgtctgattcaggactatatcagcgggatgacggatttgtatgcgtgggatgaatatcggcgactcatggcggtggaataggctggagttttgtaaagatggacaataaatttttactttttccagaaacttaattccggaacttagcgttataaaatgactctgatagtcacgtacacagcaactttcgttacctgatattgagattgaaactgatgaaaaaaaccacgttagcaatgagtgcactggctctgagtttaggtctggcgttgtccccgctctctgcgagcgcggcagaaacggcatcttcggccactaatgcacagcagatgccaagcctggccccgatgctggagaaggtgatgccgtcggtggtgagcattaacgttgaaggtagcaccaccgttaataccccacggatgccacgtaacttccagcagttctttggcgataattcgccgttctgccaggatggttctcctttccagagttcgccgttttgccagggcggcggacagggcggtcagcctgacggcggccagcaacagaaatttatggcgctgggctccggcgtcatcattgatgccgccaaagggtatgtggtgaccaacaaccacgtcgttgacaacgccaccacgattaaggttcagctgagcgatggccgtaggtttgatgccaaagtcgtcggcaaagatccgcgctctgatatcgcgctgattcagattcaggatccaaaaaacctgacggcgattaagcttgccgactccgatgcgctgcgcgtcggtgattacaccgtggctatcggcaacccgttcggtctgggcgaaaccgtgacctccgggattgtctccgcgctgggccgtagcggcctcaacgtggaaaactacgaaaactttatccagaccgatgcggcgattaaccgcgggaactccggcggtgcgctggtgaacctcaacggcgagctgatcggtatcaacaccgccattctggcgccggacggcggcaacatcggtatcggttttgctatcccgagcaacatggtgaaaaacctgaccgagcagatggtgaaatatggccaggtgaaacgcggtgagctcggcattatgggcaccgaactgaactctgagctggcgaaagcgatgaaagtcgatgcccagcgcggggccttcgtcagccaggtaatgccaggttcggcggccgcgaaagcgggcattaaagccggcgatgtcatcacgtccctcaacgggaaagcgatcagcagcttcgccgcgctgcgtgcccaggtcggcaccatgcctatcggcagcaaagttgagcttggtctgttgcgcgacggcaaaccggtgaccgtgaccgtcgaactgcagcagagcaaccagacccaggttgactccagcaccatcttcaacgggattgaaggggcagaaatgagcaataagggtcaggataagggcgtggtggtcaataatgtgaaagccggtaccccggcggcacagattggcctcaagaaaggcgatgtcatcattggggcgaatcagcagccggtgaaaaacatcgccgatctgtggaaaatcttcgacgccaaaccgtccgtactggcgctgaacattcagcgcggcgacgcctctatctatctgctgttgcagtaaccgccagcgctcgcttcccagccccttccctcgccgagggcaggggcttttttcgttctgtgaccgcccccacaactccacatatctcaccccggcttagtgcaaatgcacaatgcagcgcgacgatgactcttttatgctggtgcccagcaaaggggaggactacatggctggctggcatcttgataccaaaatggcgcaggatattgtggcgcggaccatgcgcatcatcgataccaatatcaacgtgatggatgcccgtgggcggat

SEQ ID NO: 4345 - protein, 477 aa, Klebsiella pneumoniae
MKKTTLAMSALALSLGLALSPLSASAAETASSATNAQQMPSLAPMLEKVMPSVVSINVEGSTTVNTPRMPRNFQQFFGDNSPFCQDGSPFQSSPFCQGGGQGGQPDGGQQQKFMALGSGVIIDAAKGYVVTNNHVVDNATTIKVQLSDGRRFDAKVVGKDPRSDIALIQIQDPKNLTAIKLADSDALRVGDYTVAIGNPFGLGETVTSGIVSALGRSGLNVENYENFIQTDAAINRGNSGGALVNLNGELIGINTAILAPDGGNIGIGFAIPSNMVKNLTEQMVKYGQVKRGELGIMGTELNSELAKAMKVDAQRGAFVSQVMPGSAAAKAGIKAGDVITSLNGKAISSFAALRAQVGTMPIGSKVELGLLRDGKPVTVTVELQQSNQTQVDSSTIFNGIEGAEMSNKGQDKGVVVNNVKAGTPAAQIGLKKGDVIIGANQQPVKNIADLWKIFDAKPSVLALNIQRGDASIYLLLQ

SEQ ID NO: 4346 - DNA, 1362 bp, Aeromonas hydrophila
  CDS (1)..(1362): transl_table=11
atgcgtaaacctctttctgtgctcagtgtgttagccctcagtgtcggtatcgccatgtctgcggcccccgtgcaggctgcactgccctcccttttggcgaacaatcaggagatgccgagcctggcgccggtactcgaacaagtcacccctgccgtggtcaacatttccgtctccggcaagaagatcacccgccagcgtctgccggaacagttccgcttcttcttcggccccaacatgcctgacgaacaggtaagcgagcagcccttccaggcgctcgggtccggtgtcatcatcgacgccaagaagggctacgtgatcaccaacgcccacgtggtgcacgaggcggacgagatcaaggtcaacctgaaggatggccgtgaatacgccgccaagaagatcggcgaagacaagcagtccgacatcgctctgctgcaaatcaaggccgaggatctggttcaaatcaaattcgccgactctgacgagctgcgggtcggtgactatgcgctggccatcggcaacccgttcggtctcggccagaccgtcacctccggcatcgtcagtgcactcggtcgcagcggcctcaacatcgagaacctggaaaacttcatccagaccgatgcggccatcaactcgggcaactcgggtggcgccctgctcaacctgcgcggcgagctgatcggcatcaacaccgccatcctgggccccaacggcggcaacatcggcatcggctttgccattccgtccaacatggtgcgcgacctgtccgaacagatcgtgaaatacggtgaagtccgtcgcggccagctgggcatcatagggaccgagctcacctctgaagtggccaagaccttcggctacaacaagaaggacggcgccttcgtcaaccaggtgatgcctgactctgccgccgccaaggccggcatcaagccgggcgacatcatcgtcagcatcgacggcaaggccattcgctccttcggcgagctgcgggccaagattgccaccatgggtgccgacaagcaggtggcactgggcctgatccgcgatggcaaggagcagaccgtcaaggtcaccctgaagaaggcggatgacagcgaaatcctggccagcgcgctgcacccggcactggaaggggccaagctgagcaccaccagcgagccggtgagcggcgtggccgtctccgagatcgatccgcgctcccctgccgccgcctccggtctgcagaagggcgacgtcatcatcggcgtcaaccgcctgcgcatcaactcgctggaagagctgagcaaggcactgaagaacaagccggatgtgctggccctcaacatccagcgcggcgactcttcgctctacctggtaattcgttaa

SEQ ID NO: 4347 - protein, 453 aa, Aeromonas hydrophila
MRKPLSVLSVLALSVGIAMSAAPVQAALPSLLANNQEMPSLAPVLEQVTPAVVNISVSGKKITRQRLPEQFRFFFGPNMPDEQVSEQPFQALGSGVIIDAKKGYVITNAHVVHEADEIKVNLKDGREYAAKKIGEDKQSDIALLQIKAEDLVQIKFADSDELRVGDYALAIGNPFGLGQTVTSGIVSALGRSGLNIENLENFIQTDAAINSGNSGGALLNLRGELIGINTAILGPNGGNIGIGFAIPSNMVRDLSEQIVKYGEVRRGQLGIIGTELTSEVAKTFGYNKKDGAFVNQVMPDSAAAKAGIKPGDIIVSIDGKAIRSFGELRAKIATMGADKQVALGLIRDGKEQTVKVTLKKADDSEILASALHPALEGAKLSTTSEPVSGVAVSEIDPRSPAAASGLQKGDVIIGVNRLRINSLEELSKALKNKPDVLALNIQRGDSSLYLVIR

SEQ ID NO: 4348 - DNA, 1476 bp, Shigella sonnei
  CDS (1)..(1476): transl_table=11
atgaaaaaaaccacattagcactgagtcgactggctctgagtttaggtttggcgttatctccgctctctgcaacggcggctgagacttcttcagcaacgacagcccagcagatgccaagccttgcaccgatgctcgaaaaggtgatgccttcagtggtcagcattaacgtagaaggtagcacaaccgttaatacgccgcgtatgccgcgtaatttccagcagttcttcggtgatgattctccgttctgccaggaaggttcaccgtttcagagctctccgttctgccaggggggccagggcggtaatggcggcggccagcaacagaaattcatggcgctgggttccggcgtcatcattgatgccgataaaggctatgtcgtcaccaacaaccatgttgttgataacgcgacggtgattaaagtccagctgagcgatggccgtaagttcgacgcgaagatggttggcaaagatccgcgctctgatatcgcgctgatccaaatccagaacccgaaaaacctgaccgcaattaagatggcggattctgatgcactgcgcgtgggtgattacaccgtagcgattggtaacccgtttggtctgggcgagacggtaacttccgggattgtctctgcgctggggcgtagcggcctgaatgccgaaaactacgaaaacttcatccagaccgatgcagcgatcaaccgtggtaactccggtggtgcgctggttaacctgaacggcgaactgatcggtatcaacaccgcgatcctcgcaccggacggcggcaacatcggtatcggttttgctatcccgagtaacatggtgataaacctgacctcgcagatggtggaatacggccaggtgaaacgcggtgagctggggattatggggactgagctgatctccgaactggccaaagcgatgaaagttgacgcccagcgcggtgctttcgtaagccaggttctgcctaattcctctgctgcaaaagcgggcattaaagcgggtgatgtgatcacctcactgaacggtaagccgatcagcagctttgccgcactgcgtgctcaggtgggtactatgccggtgggcagcaaactgaccctgggcttactgcgcgacggtaagcaggttaacgtgaacctggaactgcagcagagcagccagaatcaggttgattccagctccatcttcaacggcattgaaggcgctgagatgatcaacaaaggcagagatcagggcgtggtagtgaacaacgtgaaaacgggcactccgcgtgcgcagatcggcctgaagaaaggtgatgtgattattggcgcgaaccagcaggcagtgaaaaacatcgctgaactgcgtaaagtgctcgacagcaaaccgtctgtgctggcactcaacattcagcgcggcgaccgccatctacctgttaatgcagtaatctccctcaaccccttcctgaaaacgggaaggggttctccttacaatctgtga

SEQ ID NO: 4349 - protein, 491 aa, Shigella sonnei
MKKTTLALSRLALSLGLALSPLSATAAETSSATTAQQMPSLAPMLEKVMPSVVSINVEGSTTVNTPRMPRNFQQFFGDDSPFCQEGSPFQSSPFCQGGQGGNGGGQQQKFMALGSGVIIDADKGYVVTNNHVVDNATVIKVQLSDGRKFDAKMVGKDPRSDIALIQIQNPKNLTAIKMADSDALRVGDYTVAIGNPFGLGETVTSGIVSALGRSGLNAENYENFIQTDAAINRGNSGGALVNLNGELIGINTAILAPDGGNIGIGFAIPSNMVINLTSQMVEYGQVKRGELGIMGTELISELAKAMKVDAQRGAFVSQVLPNSSAAKAGIKAGDVITSLNGKPISSFAALRAQVGTMPVGSKLTLGLLRDGKQVNVNLELQQSSQNQVDSSSIFNGIEGAEMINKGRDQGVVVNNVKTGTPRAQIGLKKGDVIIGANQQAVKNIAELRKVLDSKPSVLALNIQRGDRHLPVNAVISLNPFLKTGRGSPYNL

SEQ ID NO: 4350 - DNA, 1398 bp, Buchnera aphidicola subsp
  CDS (1)..(1398): transl_table=11
atgaaaaaaataaccatgatcttcaatacagtattaatatttctagtttttttattaatttctggtttttcttggcataagtcagaaattcctactcaagaaaagttttttgaatcaaaatcttttagtttgtctacagttttggaaaaagtaataccgtcagtagtgagtattactgttgaaggtaatgtaacacaatctactagaattcctcgtcaattccagtcgtcttttaataaaaaagttttagattgtttcgggatttcacgatgtatgactcgtcagggaaaatttcatgcgttaggatcaggagtgattttagattctaaaaatggatatatagtaactaatagtcatgttgtagatcgtgcaaacaaaattcaagttcagttaagtaatggttgtaagcacgaagcagtagtaattggaaaagatgcacgttttgacattgctataattaaattaaaaaaagtaaaaaatcttcatgaaattaaaatgtctaattcagatatattaaaagtgggtgactatgttattgctattggaaatccttatggtttaggagaaacagttacatcaggcataatttctgctttacatcgcagcggattaaatattgaaaattatgaaaattttattcaaactgatgctgcaatcaatcgaggaaattctggtggtgctttagttaatttaaaaggtgaattaattggaattaatactgctattttgactcctgacggtggaaatattggcattggttttgcaattcctatcaatatggtaaataatttgactacgcaaattcttgaatatggacaagtcaaacaaaatgaactaggtattgtaggtatggaattaaattctgatttagctaaagtattgaaaattaatgttcacagaggtgcgtttattagtcaagtgttatccaagtctcctgctgatgtgtctggaattaaacctggtgatgttataatattattgaatagaaaaccaattgctagttttgctactttacgtgctgaaatagcatcatttccgataaagacaaaaatagagttaggaatactaagaaataaaaaagttaaatttattattgtagaacttaagcaaaaaattcaaagcaaaattgattcttctgttttatgtaaattaatttcgggtgctagtttaagtaattttcgtattcatggacagaataaaggtatttgcgttaattacgtaaataatggaacgccagcttatcgaacaggactaagaaaaaatgatattatttttgaagtcaataaatatcaagtgtcgtctttaagtaattttcaaaaagtgcttaaaactaaacctttaatattagttttgcatgttaaacgtgggaatgatgttttatatcttgtcacgcattaa

SEQ ID NO: 4351 - protein, 465 aa, Buchnera aphidicola subsp
MKKITMIFNTVLIFLVFLLISGFSWHKSEIPTQEKFFESKSFSLSTVLEKVIPSVVSITVEGNVTQSTRIPRQFQSSFNKKVLDCFGISRCMTRQGKFHALGSGVILDSKNGYIVTNSHVVDRANKIQVQLSNGCKHEAVVIGKDARFDIAIIKLKKVKNLHEIKMSNSDILKVGDYVIAIGNPYGLGETVTSGIISALHRSGLNIENYENFIQTDAAINRGNSGGALVNLKGELIGINTAILTPDGGNIGIGFAIPINMVNNLTTQILEYGQVKQNELGIVGMELNSDLAKVLKINVHRGAFISQVLSKSPADVSGIKPGDVIILLNRKPIASFATLRAEIASFPIKTKIELGILRNKKVKFIIVELKQKIQSKIDSSVLCKLISGASLSNFRIHGQNKGICVNYVNNGTPAYRTGLRKNDIIFEVNKYQVSSLSNFQKVLKTKPLILVLHVKRGNDVLYLVTH

SEQ ID NO: 4352 - DNA, 1428 bp, Salmonella typhimurium
  CDS (1)..(1428): transl_table=11
atgaaaaaaaccacattagcaatgagtgcactggctctgagtttaggtttggcattgtcgcctctgtctgccacggcggctgaaacgtcctcttcagcaatgactgcccagcagatgccaagcctggcaccgatgctcgaaaaagtgatgccatcggtggtcagtattaatgttgaaggtagcaccacggtgaatacgccgcgtatgccgcgtaatttccagcagttctttggcgatgactccccgttctgccaggacggttctccgttccagaattctccgttctgccagggcggcggtaacggcggcaacggcggtcaacaacagaaattcatggcgctgggctccggcgtaattattgacgccgcgaagggctacgtcgtcaccaacaaccacgtggttgataacgccagcgtgattaaagtacagcttagcgatgggcgtaaattcgatgctaaagtggtgggcaaagatccgcgttctgatatcgcgctgattcaaattcagaatccgaagaacctgacggcgattaagctggcggactccgacgcgctgcgcgtgggggattataccgtcgctattggtaacccgtttggtctgggcgaaacggtgacgtcaggtatcgtttcggcgctggggcgtagcggcctgaacgtagaaaattacgagaactttattcagaccgacgccgcgattaaccgtggtaactccggcggcgcgctggtgaacctgaacggtgagctgatcggtattaacaccgcgattctggcgccggacggcggcaacatcggtatcggcttcgctatccccagtaacatggtgaaaaacctgacgtcgcagatggtggaatacggccaggtgaaacgcggcgaactggggatcatggggactgagctgaattccgaattggcgaaagcgatgaaagtcgacgcccagcgaggcgcgttcgtcagccaggtgatgccgaattcgtccgcggcgaaagcgggtatcaaagccggggatgtcattacctcgctgaacggtaaaccgatcagcagctttgcggcgctgcgcgctcaggtcggcactatgccggtcggcagcaaaatcagcctcggtctgctgcgtgaaggtaaagcgattacggtgaatctggaactgcagcagagcagccagagtcaggttgattccagcaccatcttcagcgggattgaaggcgctgaaatgagcaataaaggccaggataaaggcgttgtggtgagcagcgtgaaagcgaactcacccgccgcgcaaattggcctcaaaaaaggcgatgtgattatcggcgctaaccagcagccggtgaaaaatatcgccgagctgcgtaagattctcgacagcaagccgtcggttctggcgctgaatattcagcgtggtgatagttctatttatttgctgatgcagtaa

SEQ ID NO: 4353 - protein, 475 aa, Salmonella typhimurium
MKKTTLAMSALALSLGLALSPLSATAAETSSSAMTAQQMPSLAPMLEKVMPSVVSINVEGSTTVNTPRMPRNFQQFFGDDSPFCQDGSPFQNSPFCQGGGNGGNGGQQQKFMALGSGVIIDAAKGYVVTNNHVVDNASVIKVQLSDGRKFDAKVVGKDPRSDIALIQIQNPKNLTAIKLADSDALRVGDYTVAIGNPFGLGETVTSGIVSALGRSGLNVENYENFIQTDAAINRGNSGGALVNLNGELIGINTAILAPDGGNIGIGFAIPSNMVKNLTSQMVEYGQVKRGELGIMGTELNSELAKAMKVDAQRGAFVSQVMPNSSAAKAGIKAGDVITSLNGKPISSFAALRAQVGTMPVGSKISLGLLREGKAITVNLELQQSSQSQVDSSTIFSGIEGAEMSNKGQDKGVVVSSVKANSPAAQIGLKKGDVIIGANQQPVKNIAELRKILDSKPSVLALNIQRGDSSIYLLMQ

SEQ ID NO: 4354 - DNA, 1368 bp, Escherichia coli
  CDS (1)..(1368): transl_table=11
atgaaaaaacaaacccagctgttgagtgcattagcgttaagtgtcgggttaactctctcggcgtcatttcaggccgtcgcgtcgattccaggccaggttgccgatcaggcccctctccccagtctggctccaatgctggaaaaagtgcttccggcagtggtgagcgtacgggtggaaggaacggccagtcagggacagaaaatcccggaagaattcaaaaagttttttggtgatgatttaccggatcaacctgcacaacccttcgaaggtttaggctccggtgtcatcatcaacgccagtaaaggctatgtgctgaccaacaaccatgtgattaatcaggcacagaaaatcagtattcagctcaatgatgggcgcgagtttgatgcaaaactgattggtagcgatgaccagagcgatatcgccctgttacaaattcaaaacccgagcaaattaacgcaaatcgctattgccgactccgataaattgcgcgtcggtgattttgccgtagcggtcggtaacccatttggccttgggcaaaccgccacctctggcattgtttccgcattaggccgcagcgggttgaatcttgaaggtctggaaaactttatccagacagatgcttccattaaccgcggtaactccggcggtgcactattaaaccttaacggtgagttaattggcatcaacactgcaatccttgcgcctggcggcgggagcgtcgggattggatttgccatccccagtaatatggcgcgaacactggcgcagcagcttatcgactttggtgaaatcaaacgcggtttgttaggcatcaaaggcaccgagatgagtgccgatatcgccaaagccttcaaccttgacgtgcagcgtggcgcgtttgtcagcgaagtgttgccaggttctggctcggcaaaagcgggcgtcaaagcgggcgatattattaccagcctcaacggcaaaccgctgaatagctttgctgagttgcgctctcgtatcgcgaccaccgagccgggcacgaaagtgaagcttggcctgctgcgtaacggcaaaccactggaagtagaagtgacgctcgataccagcacctcttcgtcggccagcgctgaaatgatcacgccagcgctggaaggtgcaacgttgagcgatggtcagctaaaagatggcggcaaaggtattaaaatcgatgaagttgtcaaaggaagcccagctgctcaggctggcttgcaaaaagacgatgtgatcattggcgtcaaccgcgatcgggtgaactcgattgctgaaatgcgtaaagtgctggcggcaaaaccggccatcatcgccctgcaaattgtacgcggcaatgaaagcatctatctgctgatgcgttaa

SEQ ID NO: 4355 - protein, 455 aa, Escherichia coli
MKKQTQLLSALALSVGLTLSASFQAVASIPGQVADQAPLPSLAPMLEKVLPAVVSVRVEGTASQGQKIPEEFKKFFGDDLPDQPAQPFEGLGSGVIINASKGYVLTNNHVINQAQKISIQLNDGREFDAKLIGSDDQSDIALLQIQNPSKLTQIAIADSDKLRVGDFAVAVGNPFGLGQTATSGIVSALGRSGLNLEGLENFIQTDASINRGNSGGALLNLNGELIGINTAILAPGGGSVGIGFAIPSNMARTLAQQLIDFGEIKRGLLGIKGTEMSADIAKAFNLDVQRGAFVSEVLPGSGSAKAGVKAGDIITSLNGKPLNSFAELRSRIATTEPGTKVKLGLLRNGKPLEVEVTLDTSTSSSASAEMITPALEGATLSDGQLKDGGKGIKIDEVVKGSPAAQAGLQKDDVIIGVNRDRVNSIAEMRKVLAAKPAIIALQIVRGNESIYLLMR

SEQ ID NO: 4356 - DNA, 24 bp, Artificial sequence
  primer
atgaaaaaaaccacattagcactg

SEQ ID NO: 4357 - DNA, 25 bp, Artificial sequence
  primer
ttactgcattaacaggtagatggtg

SEQ ID NO: 4358 - protein, 471 aa, Artificial sequence
  consensus sequence
  Variant (2)..(2): Xaa in position 2 is any amino acid
  Variant (5)..(33): Xaa in position 5 to 33 is any amino acid
  Variant (34)..(75): Xaa in position 34 to 75 is any or no amino acid
  Variant (79)..(79): Xaa in position 79 is any amino acid
  Variant (81)..(84): Xaa in position 81 to 84 is any amino acid
  Variant (85)..(90): Xaa in position 85 to 90 is any or no amino acid
  Variant (93)..(94): Xaa in position 93 to 94 is any amino acid
  Variant (97)..(97): Xaa in position 97 is any amino acid
  Variant (100)..(102): Xaa in position 100 to 102 is any amino acid
  Variant (104)..(107): Xaa in position 104 to 107 is any amino acid
  Variant (109)..(109): Xaa in position 109 is any amino acid
  Variant (111)..(111): Xaa in position 111 is any amino acid
  Variant (113)..(113): Xaa in position 113 is any amino acid
  Variant (114)..(114): Xaa in position 114 is any or no amino acid
  Variant (116)..(118): Xaa in position 116 to 118 is any amino acid
  Variant (120)..(122): Xaa in position 120 to 122 is any amino acid
  Variant (124)..(124): Xaa in position 124 is any amino acid
  Variant (126)..(128): Xaa in position 126 to 128 is any amino acid
  Variant (130)..(130): Xaa in position 130 is any amino acid
  Variant (132)..(139): Xaa in position 132 to 139 is any amino acid
  Variant (140)..(141): Xaa in position 140 to 141 is any or no amino acid
  Variant (143)..(148): Xaa in position 143 to 148 is any amino acid
  Variant (149)..(149): Xaa in position 149 is any or no amino acid
  Variant (151)..(153): Xaa in position 151 to 153 is any amino acid
  Variant (154)..(154): Xaa in position 154 is any or no amino acid
  Variant (158)..(160): Xaa in position 158 to 160 is any amino acid
  Variant (162)..(162): Xaa in position 162 is any amino acid
  Variant (168)..(170): Xaa in position 168 to 170 is any amino acid
  Variant (171)..(175): Xaa in position 171 to 175 is any or no amino acid
  Variant (177)..(177): Xaa in position 177 is any amino acid
  Variant (179)..(179): Xaa in position 179 is any amino acid
  Variant (182)..(182): Xaa in position 182 is any amino acid
  Variant (185)..(186): Xaa in position 185 to 186 is any amino acid
  Variant (188)..(195): Xaa in position 188 to 195 is any amino acid
  Variant (196)..(202): Xaa in position 196 to 202 is any or no amino acid
  Variant (209)..(209): Xaa in position 209 is any amino acid
  Variant (212)..(212): Xaa in position 212 is any amino acid
  Variant (218)..(218): Xaa in position 218 is any amino acid
  Variant (220)..(220): Xaa in position 220 is any amino acid
  Variant (222)..(223): Xaa in position 222 to 223 is any amino acid
  Variant (225)..(227): Xaa in position 225 to 227 is any amino acid
  Variant (231)..(231): Xaa in position 231 is any amino acid
  Variant (234)..(234): Xaa in position 234 is any amino acid
  Variant (235)..(240): Xaa in position 235 to 240 is any or no amino acid
  Variant (243)..(243): Xaa in position 243 is any amino acid
  Variant (244)..(244): Xaa in position 244 is any or no amino acid
  Variant (246)..(247): Xaa in position 246 to 247 is any amino acid
  Variant (252)..(260): Xaa in position 252 to 260 is any amino acid
  Variant (262)..(265): Xaa in position 262 to 265 is any amino acid
  Variant (267)..(269): Xaa in position 267 to 269 is any amino acid
  Variant (270)..(270): Xaa in position 270 is any or no amino acid
  Variant (273)..(273): Xaa in position 273 is any amino acid
  Variant (276)..(285): Xaa in position 276 to 285 is any amino acid
  Variant (287)..(294): Xaa in position 287 to 294 is any amino acid
  Variant (295)..(300): Xaa in position 295 to 300 is any or no amino acid
  Variant (303)..(306): Xaa in position 303 to 306 is any amino acid
  Variant (308)..(310): Xaa in position 308 to 310 is any amino acid
  Variant (312)..(312): Xaa in position 312 is any amino acid
  Variant (314)..(314): Xaa in position 314 is any amino acid
  Variant (315)..(315): Xaa in position 315 is any or no amino acid
  Variant (318)..(320): Xaa in position 318 to 320 is any amino acid
  Variant (323)..(323): Xaa in position 323 is any amino acid
  Variant (325)..(328): Xaa in position 325 to 328 is any amino acid
  Variant (330)..(347): Xaa in position 330 to 347 is any amino acid
  Variant (349)..(356): Xaa in position 349 to 356 is any amino acid
  Variant (358)..(358): Xaa in position 358 is any amino acid
  Variant (360)..(396): Xaa in position 360 to 396 is any amino acid
  Variant (397)..(443): Xaa in position 397 to 443 is any or no amino acid
  Variant (445)..(453): Xaa in position 445 to 453 is any amino acid
  Variant (454)..(455): Xaa in position 454 to 455 is any or no amino acid
  Variant (457)..(459): Xaa in position 457 to 459 is any amino acid
  Variant (461)..(463): Xaa in position 461 to 463 is any amino acid
  Variant (466)..(466): Xaa in position 466 is any amino acid
  Variant (468)..(470): Xaa in position 468 to 470 is any amino acid
PXVVXXXXXXXXXXXXXXXXXXXXXXXXXXXXXXXXXXXXXXXXXXXXXXXXXXXXXXXXXXXXXXXXXXXXXXXGSGXIXXXXXXXXXXGYXXTNXHVXXXAXXXXVXLXDXXRXXXAXXXGXDXXXDXAXXXXXXXXXXLXXXXXXXSXXXXVGDXXXAXGNPFGXXXXXXXXTXTXGIXSAXXRXXXXXXXXXXXXXXXFIQTDAXINXGNSGGXLXNXXGXXXGINXAIXXXXXXXGGXXGXXFAIPXXXXXXXXXQXXXXGXXXXRGXLGXXXXXXXXXXAXXXXXXXXXXXXXXGAXXXXVXXXSXAXXAGXXXGDXIXXXXGXXXXXXXXXXXXXXXXXXGXXXXXXXXRXGXXXXXXXXXXXXXXXXXXXXXXXXXXXXXXXXXXXXXXXXXXXXXXXXXXXXXXXXXXXXXXXXXXXXXXXXXXXXXXXXXXXXGXXXXXXXXXXXAXXXGXXXGDXIXXXN

SEQ ID NO: 4359 - protein, 38 aa, Artificial sequence
  protein pattern
  Variant (2)..(2): Xaa in position 2 is Ile or Leu
  Variant (6)..(6): Xaa in position 6 is any or no amino acid
  Variant (8)..(8): Xaa in position 8 is any or no amino acid
  Variant (11)..(11): Xaa in position 11 is any amino acid
  Variant (17)..(17): Xaa in position 17 is Ala or Pro
  Variant (19)..(19): Xaa in position 19 is Phe, Ile, Leu, Met or Val
  Variant (20)..(20): Xaa in position 20 is Ala, Asp, Asn or Thr
  Variant (21)..(22): Xaa in position 21 to 22 is any amino acid
  Variant (24)..(24): Xaa in position 24 is any amino acid
  Variant (25)..(25): Xaa in position 25 is Ile, Leu, Met or Val
  Variant (26)..(26): Xaa in position 26 is Ala, Ile or Val
  Variant (28)..(28): Xaa in position 28 is Ile, Leu, Met or Val
  Variant (30)..(30): Xaa in position 30 is Ala, Ser or Thr
  Variant (31)..(33): Xaa in position 31 to 33 is any amino acid
  Variant (34)..(34): Xaa in position 34 is Ala, Gly, Asn, Pro, Ser or Thr
  Variant (35)..(37): Xaa in position 35 to 37 is any amino acid
  Variant (38)..(38): Xaa in position 38 is Ala, Gly, Asn or Ser
FXQTDXAXINXGNSGGXLXXXXGXXXGXNXXXXXXXXX

SEQ ID NO: 4360 - protein, 15 aa, Artificial sequence
  protein pattern
  Variant (2)..(2): Xaa in position 2 is Glu, Lys or Arg
  Variant (3)..(3): Xaa in position 3 is any amino acid
  Variant (4)..(4): Xaa in position 4 is Ile, Leu, Met or Val
  Variant (5)..(5): Xaa in position 5 is Gly or Leu
  Variant (6)..(6): Xaa in position 6 is any amino acid
  Variant (8)..(10): Xaa in position 8 to 10 is any amino acid
  Variant (12)..(12): Xaa in position 12 is Ile, Leu or Val
  Variant (14)..(14): Xaa in position 14 is Leu or Val
  Variant (15)..(15): Xaa in position 15 is Ile, Leu or Val
AXXXXXDXXXDXAXX

SEQ ID NO: 4361 - protein, 13 aa, Artificial sequence
  protein pattern
  Variant (2)..(2): Xaa in position 2 is any amino acid
  Variant (3)..(3): Xaa in position 3 is Ile or Val
  Variant (4)..(4): Xaa in position 4 is Leu or Val
  Variant (7)..(7): Xaa in position 7 is any amino acid
  Variant (10)..(10): Xaa in position 10 is Ile or Val
  Variant (11)..(12): Xaa in position 11 to 12 is any amino acid
GXXXTNXHVXXXA

SEQ ID NO: 4362 - protein, 15 aa, Artificial sequence
  protein pattern
  Variant (3)..(4): Xaa in position 3 to 4 is any amino acid
  Variant (5)..(5): Xaa in position 5 is any or no amino acid
  Variant (7)..(7): Xaa in position 7 is any or no amino acid
  Variant (9)..(9): Xaa in position 9 is Ile or Val
  Variant (11)..(11): Xaa in position 11 is Asn or Ser
  Variant (13)..(13): Xaa in position 13 is Phe or Tyr
  Variant (15)..(15): Xaa in position 15 is Phe, Leu or Val
VGXXXVXAXGXPXGX

SEQ ID NO: 4363 - protein, 11 aa, Artificial sequence
  protein pattern
  Variant (2)..(2): Xaa in position 2 is Ala, Leu or Val
  Variant (3)..(3): Xaa in position 3 is Ser or Thr
  Variant (4)..(4): Xaa in position 4 is any amino acid
  Variant (6)..(7): Xaa in position 6 to 7 is Ile or Val
  Variant (9)..(10): Xaa in position 9 to 10 is any or no amino acid
TXXXGXXSXXA

SEQ ID NO: 4364 - DNA, 1782 bp, Escherichia coli
  CDS (1)..(1782): transl_table=11
atgcgtagttttagccaactgtggccgactctcaagcgcctgttagcgtacggttcgccgtggcgtaaaccgctggggattgcggtcctgatgatgtgggttgcggcggcggcagaagtcagtgggccgctgcttatcagctattttatcgacaatatggtagcgaaaaataacctgccgttgaaagtggttgcagggctggctgcggcgtatgttgggctgcaactgtttgccgccgggctacattacgcgcagtcgctgctgtttaatcgggcggcagtaggcgtagtgcaacagttgcgtaccgacgtgatggatgctgcgttacgccagccattaagcgagtttgatacccaacccgtcgggcaggtgatttcccgcgtcactaatgacactgaagtgatccgcgatctctacgttaccgtagtggcaactgtcctgcgcagtgccgcgctggtgggcgcgatgctggtggcgatgttcagcctcgactggcgaatggcactggtggcgataatgattttcccggtggtgctggtggtaatggtgatataccagcgttacagcacgccgattgtccgtcgtgtgcgcgcctatttggcggatatcaacgacggctttaacgaaatcatcaatggcatgagcgttatccagcagtttcgtcagcaggcgcgatttggcgaacgtatgggggaggccagtcgttcacactatatggcgaggatgcaaaccctgcgcctcgacggttttctgctgcgtccgctgctgagtctgttttcatcgctcattctttgtggcttgttgatgctgtttggcttctccgccagcggcaccattgaagtgggcgtgctgtatgcgtttatcagctatcttgggcgacttaacgaaccattaatcgaactgaccacgcaacaggcgatgctgcaacaggctgttgttgctggtgagcgcgtgtttgaactgatggacggaccgcgccagcaatatggcaatgatgatcgcccgttacagagtggcaccatcgaagtcgataacgtgtcatttgcttatcgcgatgacaatctggtgctaaagaacattaatctctctgtgccttcgcgcaattttgtggcgctggtcgggcataccggcagtggcaaaagcaccctcgccagtttattgatgggctattacccgctaacggaaggtgagattcgccttgatggtcgtccattaagttcgctaagtcacagcgcgctgcgccagggcgtggcaatggtgcagcaagatccggtggtgctggcggataccttcctcgccaacgtgacgctggggcgggatatctccgaagaacgcgtctggcaggcgctggaaaccgtgcaactggcggagctggcgcgtagcatgagcgacggtatttacacgccgctgggcgagcaggggaataatctctcagttgggcaaaagcaactgctggcactggcgcgcgtgctggtcgagacgccgcaaatcctgatccttgatgaggcaaccgccagcattgactccggtactgaacaggcgattcaacatgctctggcggcggtgcgtgaacataccacgctggtagtgattgctcaccgcttatcgaccattgttgatgccgacaccattctggtgcttcatcgtgggcaagccgtggagcagggcactcaccagcaactgctggcggcccagggacgctactggcagatgtatcaactgcaacttgcgggcgaagagctggcagccagcgtgcgtgaagaggaatcattgagcgcctaa

SEQ ID NO: 4365 - protein, 593 aa, Escherichia coli
MRSFSQLWPTLKRLLAYGSPWRKPLGIAVLMMWVAAAAEVSGPLLISYFIDNMVAKNNLPLKVVAGLAAAYVGLQLFAAGLHYAQSLLFNRAAVGVVQQLRTDVMDAALRQPLSEFDTQPVGQVISRVTNDTEVIRDLYVTVVATVLRSAALVGAMLVAMFSLDWRMALVAIMIFPVVLVVMVIYQRYSTPIVRRVRAYLADINDGFNEIINGMSVIQQFRQQARFGERMGEASRSHYMARMQTLRLDGFLLRPLLSLFSSLILCGLLMLFGFSASGTIEVGVLYAFISYLGRLNEPLIELTTQQAMLQQAVVAGERVFELMDGPRQQYGNDDRPLQSGTIEVDNVSFAYRDDNLVLKNINLSVPSRNFVALVGHTGSGKSTLASLLMGYYPLTEGEIRLDGRPLSSLSHSALRQGVAMVQQDPVVLADTFLANVTLGRDISEERVWQALETVQLAELARSMSDGIYTPLGEQGNNLSVGQKQLLALARVLVETPQILILDEATASIDSGTEQAIQHALAAVREHTTLVVIAHRLSTIVDADTILVLHRGQAVEQGTHQQLLAAQGRYWQMYQLQLAGEELAASVREEESLSA

SEQ ID NO: 4366 - DNA, 2506 bp, Glycine max
  CDS (21)..(1922)
gggggtttcactgtttcagaatgaacggcttaagaagtgaaagagcccctctcttggaggctgagcgtgctggaagaggaaagagggatggtgcctcggaaggtcaagcctcagaccttgagcatggtgatgcagtgccggcggcaaatgtgggattctgtagggtgctttcacttgcaaaacctgaggctggaaagttggtgatcggtactgtggctctgttgattgcagccacatcaagtatcttagttcaaaaatttggtgggaagataattgacattgtctctagggaaatgaaaactccagaggagaaagatgaagctttgaatgctgttaagaacaccatactagaaatctttctggtcgttgtcttcggttcaatttgcactgcacttcgagcttggcttttttatactgctagtgaaagggttgttgcacgactgagaaagaatttgttcagtcatcttgtaaaccaggagatagccttctttgatgttactcgaactggggagcttttaagtaggctatctgaagatacacagatcataaagaatgctgcaactaccaatctttctgaggccctgagaaacttttcaactgcattaattggtctgagcttcatgtttgcaacatcatggaagttaacattgttggctttggctgttgtacctgttctttctgttgctgttcgcaagtttggccgttacctgcgtgaactttctcataaaactcaagctgcagctgcagttgcttcatcaatagctgaggaatcctttggtgcaataagaacagtaagatcatttgcccaagaagattatgaagtaacacgctactcagagaaagttaatgaaacacttaatcttggtcttaaacaagctaaaattgttggactcttttctggaggccttaatgctgcatctacactttcagtcattatagttgttatatatggagctaatttgacaatcaagggttccatgtcctcgggtgatcttacatctttcattctttatagtctctcagtgggttcttctatatccggtctgtcaggattgtatacagtagttatgaaagctgcaggtgctagcagaagggtatttcaacttttggatcgtacctcatccatgcctaagtcaggagataaatgtccacttggtgatcaagatggggaagtagaactagatgatgtgtggtttgcctatccatcacgccctagtcatccggtgctcaagggcattacattgaagctgcatccaggatcaaaggttgctcttgtcggtccaagtggtggtggaaagagtacaattgcaaacttaattgaaagattttatgacccaaccaaggggaagattctactgaatggggttcctttggtagaaatatcacacaagcatttacactggcagatcagtatagtgagtcaggagcctacactcttcaactgttccatagaggagaacatagcttatggatttgatggcaaagtgaacgatgttgatatagaaaatgctgctaaaatggccaatgcacatgaatttatatcaaaattcccagaaaaataccagacctttgttggagagcgtggggtaaggctttcaggagggcagaaacagagaatagcaattgctagagccctgcttatggacccaaaaattctcctcttggatgaagccaccagtgccctagatgctgaaagcgaatacctagtgcaggatgccatggagtctctcatgaaaggaagaacagttctagtcattgctcacaggttatccacagttaaaactgctgatactgttgcagttatatctgatggccaagtagttgagagaggcaaccatgaagagcttctcagcaagaacggtgtctatactgcattggtcaagagacaactgcaaacaacaaaagccgaaatctcggtttagcaaatcatgaataaccaaaccctaccatcttgcttgttaaacactcagtctgctcaaaaaggaggggcaaatgatactgaggcacaagttccttggaagaccttcacttccacagttgcaagttacagcattaccctctgtatcagaggaaagaaaatgagggaagagagaaaaatttaaaaattgaatagaagagaaaatagaaagaaagaaaatttcgaatttttcttcatctaaatgtcaatttttctttcttttcttaaccaaataaaataaaatgtatcattatctgtattttcttactttagtccaaacacatgattaaagtttagcaacaaatttggtgtaactcccgatatttcaaaaccagaagtaatcagtgtgatctatactgtcagtagagtattatcaacatgctttgtctaaaaaaaaaaaagaaaaaaaaagaaaactaatcgaaaaaaaacaacggataaaaaaaacgcagaacacactaatacaaaaggataaaaggtggggggcggcccccacttgagggctctccaggaaattaatgccgaacaggtccttgagggagacccgct

SEQ ID NO: 4367 - protein, 633 aa, Glycine max
MNGLRSERAPLLEAERAGRGKRDGASEGQASDLEHGDAVPAANVGFCRVLSLAKPEAGKLVIGTVALLIAATSSILVQKFGGKIIDIVSREMKTPEEKDEALNAVKNTILEIFLVVVFGSICTALRAWLFYTASERVVARLRKNLFSHLVNQEIAFFDVTRTGELLSRLSEDTQIIKNAATTNLSEALRNFSTALIGLSFMFATSWKLTLLALAVVPVLSVAVRKFGRYLRELSHKTQAAAAVASSIAEESFGAIRTVRSFAQEDYEVTRYSEKVNETLNLGLKQAKIVGLFSGGLNAASTLSVIIVVIYGANLTIKGSMSSGDLTSFILYSLSVGSSISGLSGLYTVVMKAAGASRRVFQLLDRTSSMPKSGDKCPLGDQDGEVELDDVWFAYPSRPSHPVLKGITLKLHPGSKVALVGPSGGGKSTIANLIERFYDPTKGKILLNGVPLVEISHKHLHWQISIVSQEPTLFNCSIEENIAYGFDGKVNDVDIENAAKMANAHEFISKFPEKYQTFVGERGVRLSGGQKQRIAIARALLMDPKILLLDEATSALDAESEYLVQDAMESLMKGRTVLVIAHRLSTVKTADTVAVISDGQVVERGNHEELLSKNGVYTALVKRQLQTTKAEISV

SEQ ID NO: 4368 - DNA, 1779 bp, Klebsiella pneumoniae subsp. pneumoniae MGH 78578
  CDS (1)..(1779): transl_table=11
atgcgtagctttaccgaactctggccgacgcttaaacgcctgctggcctatggttcaccgtggcgcaagccgttggccatcgcggtggcgatgatgtggattgcggcggcggcggaagtgagcggcccgctgcttatcagctatttcatcgacaacatggtggcgaaacatacgctgccgctgaagctggtggccggcctggcggtagcctatatcggcctgcagctgctggcggcgctcctgcactataaccagtcgctgctgtttaaccgcgccgcggtcggcgtcgtccagcagttgcgcagcgacgtgatggatgccgccctgcatcagccgctcagcgagtttgatacccagccggttgggcagcttatctcacgggtaaccaacgatacggaagtcattcgcgatctgtacgtgacggtggtggctacggtactgcgcagcgccgcgctgatcggcgcgatgctggtggcgatgtttagcctcgactggcggatggcgctggtggcgatcgcgattttcccggcggtgctgatcgtgatgattatctatcagcgctatagcacgccgatcgtgcggcgggtgcgcgcctggcttgccgacatcaacgatggcttcaacgaagtgatcaacggcatgggcgtcatccagcagttccgccagcaggcgcgctttggcgaacggatgcgcgaggccagctatgcccactatctggcgcggatgcagacgctgcgcctggacggttttctgctgcgcccgctgctgagccttttttcctcgctggtgctgtgcgggctgctgatgctgttcggctttagcgcggtgggcacgatcgaggttggggtcctgtacgcgtttatcagctatcttggacgccttaacgagccgcttatcgagctgaccacccagcagtcgatgctgcagcaggcggtggtcgccggcgagcgcgttttcgagctgatggatcgcccgcgccaggcgtggggtagggatgacgcgccgctgagcagcggtcgggtggaaattgaccatctctcctttgcttaccggggggaccgtctggttctccaggatatcacgctggatattccctcccgcagcttcgtggcgttggtcggacataccggcagcggaaaaagtaccctcgccagtctgatgatgggctattacccgttaacccacggcgagatccgcatcgatggtcgaccgctcgcatccctcagccacagcgcgttgcgtcggggcatcgcgatggtgcaacaggatcccgtagtgctggcggataccttctacgccaacgtcgcgctgggtcgggacatcagtgaggcgcaggtttgggaagcgctggaggcggtgcagctggcggcggtggcgcgcagcatgagcgatgggctgtacacccaactgggcgagcagggcaataatctctccgtcgggcagaagcagctgctggcgctggcgcgcgtgctggtggacaccccgcaggtactgattttggatgaggcgacggcaaacatcgactccggtaccgagcaggcgatccagcaggcgctggcgaaggtccgccagcataccaccctcgtggttattgcccatcggctgtcgaccattgtggaggccgataccatcctggttctgcatcgaggtcaggctgtcgagcggggcacccatcagcagctgctggcggcgaaaggccgctactggcagatgtatcagctgcagctggccggcgaagagctggcggccagcgccagagaggagtcgctcagcgcctga

SEQ ID NO: 4369 - protein, 592 aa, Klebsiella pneumoniae subsp. pneumoniae MGH 78578
MRSFTELWPTLKRLLAYGSPWRKPLAIAVAMMWIAAAAEVSGPLLISYFIDNMVAKHTLPLKLVAGLAVAYIGLQLLAALLHYNQSLLFNRAAVGVVQQLRSDVMDAALHQPLSEFDTQPVGQLISRVTNDTEVIRDLYVTVVATVLRSAALIGAMLVAMFSLDWRMALVAIAIFPAVLIVMIIYQRYSTPIVRRVRAWLADINDGFNEVINGMGVIQQFRQQARFGERMREASYAHYLARMQTLRLDGFLLRPLLSLFSSLVLCGLLMLFGFSAVGTIEVGVLYAFISYLGRLNEPLIELTTQQSMLQQAVVAGERVFELMDRPRQAWGRDDAPLSSGRVEIDHLSFAYRGDRLVLQDITLDIPSRSFVALVGHTGSGKSTLASLMMGYYPLTHGEIRIDGRPLASLSHSALRRGIAMVQQDPVVLADTFYANVALGRDISEAQVWEALEAVQLAAVARSMSDGLYTQLGEQGNNLSVGQKQLLALARVLVDTPQVLILDEATANIDSGTEQAIQQALAKVRQHTTLVVIAHRLSTIVEADTILVLHRGQAVERGTHQQLLAAKGRYWQMYQLQLAGEELAASAREESLSA

SEQ ID NO: 4370 - DNA, 4539 bp, Oryza sativa (japonica cultivar-group)
  CDS (1)..(4539)
atggctctcctcctcccggggtggatggccaccacggcgtgctcgccgccgtcaggtggttccttccccgacctgctcgccttcctcttcctctcgccctgcccgcagcgcgcgctcctcggcgccgtcgacctcgtcttcgtcgtcgcgtccctcgtcgtcctcgcccttccccgcggcggcggtggcggcgctggggatggtcccgaacgggaggcgcttctgccgaagcctcgggcgtcgggaaggcctttccgggtcgcggtcgcgctcggggcgtcgggggtgttcgcggcggcgtcggccatcctcctcgcgctcgcgttgttcctcctgccgaacacggtatggagggtttgggaatccgccttcctcgccgtccacttcgtcgcgcacgccgtggcggcgtggaccatcgcgtcgcggaggggagcggccggtggcgccctccctctgcagctccgcgtgttttgggtcgtgacggccctcgtcggcgcgctcttctccgcttcggccgcggtccgctgggccgaggattcgctgcttttccccgacgaccccctcgccttcgccggcctcgccctctcgctgcctctggtgtatgtagccatcaccgcctcatccggcgaggtcgcaggtacgtgcgaacgcgaacccgctgacgtcaccaccgcggcggagccctctacgccgtacgacgcggcgtcgtggctgtcgcgcgcgacgttcagttggatcaatccactggtctccaaggggtacgccagcgactcgctcgccgccgaagacgtcccgccggtgtcgccggcccaccgcgccgaggcgtcgtacgctcggttcgtgtccaactggccggcgcaggggtcgcgctacccggtgggcgtcgcgctgtggctgtccttctggccgcgcgtcctattgacggcggcgctcggccttgtgcgcctcgccgccatgtacgttggcccgtcgctcatcaaccatttcgtcgacttcatcagccatggcggcacgacgtgggagggcctccggcttgtcgccatcctcgtcgccggcaaggcggtgcagacgctggcctcgcaccactacaacttccaggggcagctgctggggatgcgcatccgcggcgcgctgctcacggcgctgtaccgcaagtcgctgcgtctgtccaccggcgcgcgccgcgcgcacggctcgggcgccatcgtcaactacatgcaggtggacgccgggacggtgtcctacgccatgcacggtctccacggcctttggctgatgccgctgcagatcgtggtggcgcttgtcctgctgtacgcctacctcggcccctccgtgctcatgacgcttgccgtgatcaccgcggtcaccgtgatcaccgcgttcgccaacaagctcaacttggcctaccagctcaagttcctcggcgtccgcgacagccgcatcaaggccatcaccgagatgctgaaccacatgcgtgtcatcaagctgcaggcctgggaggagaaattcggtggcaaggtgcgagaactcaggcagactgagatggggtggttgaccaagattgtactcttcatgtgcgccaacaatgtcgtgttctccagcggcccactcgccatgactgtgctggtctttgggacctacctcgccaccggaggagagctagatgccgggaaggtgttcacggccaccgcgttcttctcaatgctcgaggggcctatgcacaacttcccgcagacgatcgtgatgtgtatgcaagcgtttgtgtcacttggcaggctgaacaagttcctgtctgatgccgagattgacagcacggctgtggagcgcattgctagtagcgccggtgatgcagcagcggtgaaagtacagaatggagtgtttgcttgggatgtgccagttgaaggtgcagaggatgcccggcagggccatggtacggagaatggccgagaggaggggccagagatggagatggtgctgaaggggattgaggtggaggtgaggaagggtgagctagctgcggtggttgggacagtgggctctggcaagtcgtcactgctgtcctgcattatgggagaaatgcacaaggtttccggcacggttagcatatgtgggagcacagcttgtgttgctcagacagcttggatccaaaatggaaccattcaagagaacattttatttggacaaccaatgcattcagagaggtacagggaagtcatacatgcttgttgcttagagaaagatttagaaatgatggagtttggagacaagactgaaataggagagagggggatcaacctcagtggtggccagaaacaacgcatccagcttgctagggcagtttatcaagattgtgatatatatctgcttgatgatatctttagtgcagttgatgctcatactggttcagctatcttcaaggaatgtctgaaaggtatactcaagaagaagacagttttgcttgtgactcaccaagtggatttcttaaagaatgtggatacagtattcgtaatgaaagatggggtagtcattcagtctgggagctacaaccagctactaacatcatgctcagatttttcagttcttgttactgctcaccatagttcaatggaggttccaggggcagcagagcaaatgtcccatgatcagaccactgagtattctcaggacaccaccgtaccagcaaaatctcctgtcaagtccaattctagtaatgaaaatggaggtaccagtgttgcaccaagcaaagaagcaggttcatctaaactgatcgaggaagaggaaaaggagagtggccgagtaagttggcaagtgtacaagctatacataacagaagcttggggttggtggggagttctggtcattttagctgtatcagttctgtcggaaggctccagtatggctagtaactactggctctcatatgaaacatctgggggcacaatatttgacacttctgtttttcttggtgtttacgtttcgatagttgctgcttcaattgtatgtgatgcgatcagtactcttttcgtgacattcttggggtttaagtcagcccaggtcttctttaacaagatgtttgacagcattctacgggcaccaatgtcattttttgacaccactccttctgggagaatactaagccgggcatcagcagaccaaatgaaaattgacactgcccttgtattctatgttggttttgctacatcaatgtgcatttccgtggtgagcagcattgctgttacctgccaggttgcatggccgtcagtcatagcagtacttccactagtgcttttaaacatttggtaccggaatcgttacatcgcaacatctcgagagttaactcgtcttcaaggagtaacaagggcacctgttattgatcacttctcagaaacctttttgggtgctccaactgtaaggtgctttgggaaggaggatgagttttaccaaataaacttggacagaatcaattcgaatttgcgcatgtcttttcataattatggagctaatgagtggctgggttttcgcctggagttgattggcacacttctactgtctataactgcttttcttatgatcagcttgcctagcaatttcatcaagaaagagtttgtcggcatgtccctttcgtatggtctatctctcaattcactggtgtactatacaatttcaatgacctgtatgatagaaaatgacatggtcgctgtggaaagggtgaatcagtacagtactcttccttctgaggcagcatgggaagtggcagattgtcttccctcaccaaattggcctagaagaggagatattgacgttaaagatctaaaggttaggtatcgatcaaacacacctctaatcttgaagggcattactattagcattaacagcggagaaaagataggagttgtgggaaggactggcagcggaaagtcaactttagttcaggctttgttcaggcttgtggagcctgtagaagggcatatcatcgttgatggagtagatattggcactttgggccttcatgatctcaggtcgcgctttggtgtgattcctcaagagcctgtgctctttgaaggaaccataagaagcaacatcgacccaattgggcgatattctgaggacgagatatggcaggcccttgagcgttgtcaactaaaagatatagtagctacaaaaccagagaaacttgatgcactagttgccgacatgggggagaactggagcgtaggacagaagcagctcctctgctttggtcgtgttattctgaagcgcagccggatcctgttcatggatgaggcaacagcttccgttgattctcagacagatgcgactatccagaggatcatccgagaagagttcactgattgcactatcatcagcattgcgcaccgcataccgactgtcatggacagtgatagagtcctagtgttggatgcagggttagtgaaggaatttgatgagccgtccaagttgatggggaggccatcactttttcgagcaatggttcaggagtatgcaaatcgctcttacagcacagaggcacgcgattga

SEQ ID NO: 4371 - protein, 1512 aa, Oryza sativa (japonica cultivar-group)
MALLLPGWMATTACSPPSGGSFPDLLAFLFLSPCPQRALLGAVDLVFVVASLVVLALPRGGGGGAGDGPEREALLPKPRASGRPFRVAVALGASGVFAAASAILLALALFLLPNTVWRVWESAFLAVHFVAHAVAAWTIASRRGAAGGALPLQLRVFWVVTALVGALFSASAAVRWAEDSLLFPDDPLAFAGLALSLPLVYVAITASSGEVAGTCEREPADVTTAAEPSTPYDAASWLSRATFSWINPLVSKGYASDSLAAEDVPPVSPAHRAEASYARFVSNWPAQGSRYPVGVALWLSFWPRVLLTAALGLVRLAAMYVGPSLINHFVDFISHGGTTWEGLRLVAILVAGKAVQTLASHHYNFQGQLLGMRIRGALLTALYRKSLRLSTGARRAHGSGAIVNYMQVDAGTVSYAMHGLHGLWLMPLQIVVALVLLYAYLGPSVLMTLAVITAVTVITAFANKLNLAYQLKFLGVRDSRIKAITEMLNHMRVIKLQAWEEKFGGKVRELRQTEMGWLTKIVLFMCANNVVFSSGPLAMTVLVFGTYLATGGELDAGKVFTATAFFSMLEGPMHNFPQTIVMCMQAFVSLGRLNKFLSDAEIDSTAVERIASSAGDAAAVKVQNGVFAWDVPVEGAEDARQGHGTENGREEGPEMEMVLKGIEVEVRKGELAAVVGTVGSGKSSLLSCIMGEMHKVSGTVSICGSTACVAQTAWIQNGTIQENILFGQPMHSERYREVIHACCLEKDLEMMEFGDKTEIGERGINLSGGQKQRIQLARAVYQDCDIYLLDDIFSAVDAHTGSAIFKECLKGILKKKTVLLVTHQVDFLKNVDTVFVMKDGVVIQSGSYNQLLTSCSDFSVLVTAHHSSMEVPGAAEQMSHDQTTEYSQDTTVPAKSPVKSNSSNENGGTSVAPSKEAGSSKLIEEEEKESGRVSWQVYKLYITEAWGWWGVLVILAVSVLSEGSSMASNYWLSYETSGGTIFDTSVFLGVYVSIVAASIVCDAISTLFVTFLGFKSAQVFFNKMFDSILRAPMSFFDTTPSGRILSRASADQMKIDTALVFYVGFATSMCISVVSSIAVTCQVAWPSVIAVLPLVLLNIWYRNRYIATSRELTRLQGVTRAPVIDHFSETFLGAPTVRCFGKEDEFYQINLDRINSNLRMSFHNYGANEWLGFRLELIGTLLLSITAFLMISLPSNFIKKEFVGMSLSYGLSLNSLVYYTISMTCMIENDMVAVERVNQYSTLPSEAAWEVADCLPSPNWPRRGDIDVKDLKVRYRSNTPLILKGITISINSGEKIGVVGRTGSGKSTLVQALFRLVEPVEGHIIVDGVDIGTLGLHDLRSRFGVIPQEPVLFEGTIRSNIDPIGRYSEDEIWQALERCQLKDIVATKPEKLDALVADMGENWSVGQKQLLCFGRVILKRSRILFMDEATASVDSQTDATIQRIIREEFTDCTIISIAHRIPTVMDSDRVLVLDAGLVKEFDEPSKLMGRPSLFRAMVQEYANRSYSTEARD

SEQ ID NO: 4372 - DNA, 3477 bp, Arabidopsis thaliana
  CDS (1)..(3477)
atgctttatgtggcttgtgcatcttgggtgatatgtttccttgaaggatattgttggacaagaacaggggagagacaagcagcaaaaatgagagaaaggtacttaagagcagtgttaagacaagatgtgggttactttgatcttcatgtcacaagcacttctgatattattaccagtgtctctagtgacagccttgtcattcaagacttcctcagtgaaaagttaccaaacattttgatgaatgcatctgcgtttgtcggaagctacatagtgggtttcatgttgctgtggagactcacaatcgtaggcttcccattcatcattctcctcttgatccctggactaatgtacggacgagccctcattggcatctcgaggaaaatacgtgaggagtacaatgaagctggttctatcgccgaacaagccatctcttcggttagaaccgtctatgcatttgttagtgagaagaagatgatagaaaagttctcagatgcgcttcaagggtcggtgaagctagggttgagacaagggctagctaaaggaattgctattgggagcaatggtatagtttatgctatatgggggttcttgacttggtatggaagtcggatggttatgaactatggctacaaaggtggtactgtctccacagtcacagtttgcgtcacctttggtggcacagcacttggtcaagcattgtcgaatcttaaatatttctccgaggcgtttgtggcaggggaacggattcaaaaaatgataaaaagagtccctgatatagattcagacaacttgaatggtcatattttggagactataagaggagaagttgaattcaacaacgtgaagtgcaagtacccgtctagacccgaaaccctaatctttgatgatttatgtctgaaaattccatcagggaaaactgtagctctggttggcggaagtggatcgggaaaatcaacagtgatatcgcttttacaaaggttctatgacccgaacgaaggcgatattctcattgatagtgtgtccattaataatatgcaagtgaaatggttgagatcgcaaatgggtatggttagccaagagccatcgctctttgccacatcgataaaggagaacatattatttggtaaagaggacgcatcctttgatgaagtagtggaagcagccaaggcctcaaatgctcataattttatttcgcaatttcctcatggttaccaaactcaggttggggagagaggagtgcatatgtcgggaggccagaagcagagaatcgcaattgcacgagcgttaatcaaatcaccgataattcttctcctagacgaggcaacaagcgcattggatttagaatctgaaagggtggtccaagaagccttagacaatgcatcagttggtcgtacaactattgttattgcccaccgtctctctaccattcgtaatgctgatattatatgtgttctacataatggttgcattgtagaaactggatcgcacgacaaactcatggagatagatggtaaatacacttctctagttcgcttacaacaaatgaagaatgaagaatcatgtgataacactagcgtaggtgtgaaagagggccgagtctcgagtttaagaaacgatttggattataatccaagagacttggctcatagcatgagttcaagcattgttacgaatctttctgactcgattcctcaagataagaagccgcttgtgccatcgtttaagagattgatggcaatgaatagaccagagtggaaacatgcattatgtggttgcttaagtgcatccttaggtggggccgtacaaccaatttacgcatattcgtccgggttaatgatatcggtatttttcctaaccaaccatgagcagatcaaagagaatacaagaatttacgtgttattattttttggtctagctctattcactttttttactagtatcagtcaacaatatagtttttcctacatgggagaatacctgactaaacgtatccgagaacagatgctctcgaagatactaacgtttgaagtcaattggttcgatgaggaagagaactcaagtggtgcaatttgctccagactagcgaaagatgctaacgtggtaaggtcgctcgttggtgaaagaatgtcattgctggtacaaaccatatcaacagttatggtagcttgcacaattggtttggtcatcgcttggagattcaccattgtgatgatttcagtacaaccagtaattattgtctgctattatattcaacgtgttctgctcaagaacatgtcgaaaaaagccatcattgcccaagatgaaagcagtaaactagctgcagaggctgtctccaacatccgaaccatcacaaccttctcatcacaagaacggatcatgaaattactcgagagagttcaagaaggtccacgaagagaaagtgcccgccaatcatggttagctgggattatgttggggactacgcaaagccttataacgtgcacctcagctttgaatttttggtatggtggtaaattaatcgctgatgggaagatggtatcaaaagcattctttgagttatttttgatctttaagactacaggccgggctattgccgaagctgggacaatgacgacagatctagccaagggctcaaattcagttgactcagtattcacagtgttagatcgtcgaaccaccattgagccggagaatccggatgggtatatcttagaaaaaataaagggccaaatcacatttctcaatgtggacttcgcttacccaacgcgacctaatatggttatattcaacaacttctccatagagatccacgagggaaagtcgacagcgatcgtaggtccaagtcggtcgggtaagtcaactgtaatcgggttaatcgaacggttctatgacccgttacaaggtattgtgaaaatcgatggccgtgatataaggtcgtatcatctaagatcacttcgtcaacacatgtctttggttagtcaagaaccaacattattcgcggggacaatccgagaaaacataatgtatggacgagcatctaacaagatcgacgagtcggagattatcgaggcaggaaagacggcaaacgctcacgagttcattacatcactatcagacggctatgatacgtactgcggagacagaggagtacaattgtctggtggtcaaaaacagaggatagctatcgcccgaacgattttaaagaatccatcaattttgctcctcgatgaagctacaagcgctttggacagccaatcagagcgtgtagtgcaagacgccctcgaacatgtgatggtagggaaaacaagcgttgtgatcgcacataggcttagcacgatccagaactgcgacacgattgctgttttagacaaaggaaaagttgtagaaagtgggacacacgcttccttgttagcaaaaggtcccacaggctcttatttctcattggtcagtcttcagagaaaggtcagatatgtataa

SEQ ID NO: 4373 - protein, 1158 aa, Arabidopsis thaliana
MLYVACASWVICFLEGYCWTRTGERQAAKMRERYLRAVLRQDVGYFDLHVTSTSDIITSVSSDSLVIQDFLSEKLPNILMNASAFVGSYIVGFMLLWRLTIVGFPFIILLLIPGLMYGRALIGISRKIREEYNEAGSIAEQAISSVRTVYAFVSEKKMIEKFSDALQGSVKLGLRQGLAKGIAIGSNGIVYAIWGFLTWYGSRMVMNYGYKGGTVSTVTVCVTFGGTALGQALSNLKYFSEAFVAGERIQKMIKRVPDIDSDNLNGHILETIRGEVEFNNVKCKYPSRPETLIFDDLCLKIPSGKTVALVGGSGSGKSTVISLLQRFYDPNEGDILIDSVSINNMQVKWLRSQMGMVSQEPSLFATSIKENILFGKEDASFDEVVEAAKASNAHNFISQFPHGYQTQVGERGVHMSGGQKQRIAIARALIKSPIILLLDEATSALDLESERVVQEALDNASVGRTTIVIAHRLSTIRNADIICVLHNGCIVETGSHDKLMEIDGKYTSLVRLQQMKNEESCDNTSVGVKEGRVSSLRNDLDYNPRDLAHSMSSSIVTNLSDSIPQDKKPLVPSFKRLMAMNRPEWKHALCGCLSASLGGAVQPIYAYSSGLMISVFFLTNHEQIKENTRIYVLLFFGLALFTFFTSISQQYSFSYMGEYLTKRIREQMLSKILTFEVNWFDEEENSSGAICSRLAKDANVVRSLVGERMSLLVQTISTVMVACTIGLVIAWRFTIVMISVQPVIIVCYYIQRVLLKNMSKKAIIAQDESSKLAAEAVSNIRTITTFSSQERIMKLLERVQEGPRRESARQSWLAGIMLGTTQSLITCTSALNFWYGGKLIADGKMVSKAFFELFLIFKTTGRAIAEAGTMTTDLAKGSNSVDSVFTVLDRRTTIEPENPDGYILEKIKGQITFLNVDFAYPTRPNMVIFNNFSIEIHEGKSTAIVGPSRSGKSTVIGLIERFYDPLQGIVKIDGRDIRSYHLRSLRQHMSLVSQEPTLFAGTIRENIMYGRASNKIDESEIIEAGKTANAHEFITSLSDGYDTYCGDRGVQLSGGQKQRIAIARTILKNPSILLLDEATSALDSQSERVVQDALEHVMVGKTSVVIAHRLSTIQNCDTIAVLDKGKVVESGTHASLLAKGPTGSYFSLVSLQRKVRYV

SEQ ID NO: 4374 - DNA, 1773 bp, Buchnera aphidicola str. APS (Acyrthosiphon pisum)
  CDS (1)..(1773): transl_table=11
atgaaaaaacaggtgaaaaaaatttataacatgaatcatttaattgcgttctggccaattttaaaacgtctactaatttatgtaaaacctcataaaaaaaaattaattttagcgtttatttttcttttaagtggatcaacttcagaagttttaggcccaatcttgatcagttattttattaataatattttatctaaacatcaactacatttattaataattttaactataattacattatttataatattacaaatattatcagtatttttgaattattttcaaagtattttatttaataaaatagcagtagaaagcattaacaaattacgtcaagatgttatgtatgctgcattgcaacaacctattagcgaatttgattctcaacctattggacagatgatttcaaaagtaacgaatgatactgaagcagttaaagaactatatgacacagttggacctacattgtttcgaagtataatattaatttttattatattatttgcaatgtttactcttgaatggcatatggcccttgttgctttatttattttaccattagtcattacaattatgctggtttatcaatattatagtacgccacttttacggaaagtaagatattacttagctgaaattaataataaatttaatgaaacgattaatggaatgaatgtaattcagcaattctgtcagcaacgtagatttcaggaaaaaataaaaaaaagtagtgatttacattacatgtcacgtatgaaaatattaagactagacggttttttattaagaccacttctgagtttattatcttctatgatattatgtaacttcatgttcttatttagtttttttccagttggagcttttgaagtaggtgtactatatgcgtttattacttatcttggacgactaaatgaacctttaattgctattacaatccaacagtcagtattacaacaatctattgttgcaggagaaagaatattttcactaatagattcgccaaaacaaaaatatggaaaaaataaagatttattaaaaagtggaaaaataaatattcaaaatgttagtttttatcataaaaactgcaataaaaatatactagaaaatattaatattaaaatttcctctaaaagttttgttgcatttgtaggacatactggtagtggaaaaagcactttagcaaatttaatcatgggatattatcctctaaaaaatggaaaaatatatttagatgacaagtctattgattcaataagtcatagtgttttaagaagaaatgtattaatggtacaacaagatccaatagttctctctgatacttttttttataatattacattgggaagaaagatacctgaagaaaaagtttggaatatattagatacggttcatctttcagatttagtcaaatcgatgcctaaaggtatttattcccttctaggagaagaaggtaataatttatctgttggtcaaaaacaattattagcgattgctagagtattggttgcatatcctaaagtacttatattagatgaagctactgctaatattgattctggaacagagcaattaattcaaaaaacactattatcgatacgaaaaaactgtactttaataataatagctcatagactttcgactattatcgaagcagattcaattatagttttaaaaaaggggaaaattgttgaatttggtactcatgaacaattattaactaaaaaaagttgttattataaaatgtataaatttcaatcatgtaaattttag

SEQ ID NO: 4375 - protein, 590 aa, Buchnera aphidicola str. APS (Acyrthosiphon pisum)
MKKQVKKIYNMNHLIAFWPILKRLLIYVKPHKKKLILAFIFLLSGSTSEVLGPILISYFINNILSKHQLHLLIILTIITLFIILQILSVFLNYFQSILFNKIAVESINKLRQDVMYAALQQPISEFDSQPIGQMISKVTNDTEAVKELYDTVGPTLFRSIILIFIILFAMFTLEWHMALVALFILPLVITIMLVYQYYSTPLLRKVRYYLAEINNKFNETINGMNVIQQFCQQRRFQEKIKKSSDLHYMSRMKILRLDGFLLRPLLSLLSSMILCNFMFLFSFFPVGAFEVGVLYAFITYLGRLNEPLIAITIQQSVLQQSIVAGERIFSLIDSPKQKYGKNKDLLKSGKINIQNVSFYHKNCNKNILENINIKISSKSFVAFVGHTGSGKSTLANLIMGYYPLKNGKIYLDDKSIDSISHSVLRRNVLMVQQDPIVLSDTFFYNITLGRKIPEEKVWNILDTVHLSDLVKSMPKGIYSLLGEEGNNLSVGQKQLLAIARVLVAYPKVLILDEATANIDSGTEQLIQKTLLSIRKNCTLIIIAHRLSTIIEADSIIVLKKGKIVEFGTHEQLLTKKSCYYKMYKFQSCKF

SEQ ID NO: 4376 - DNA, 1800 bp, Bacillus halodurans C-125
  CDS (1)..(1800): transl_table=11
atgatagatcataaagatcgcgtgttatcaagtaaagaacagcgcactgtctttaaaaggttgctgtcgtatgcggcccattataaaggacagctcatggtcgcttttctgttactgtttattgccacaggtgctcagctactcgggccgatcatcgttaagatttttatcgatgattatttaacgccacgctattttccaacagacgtcctttttctccttggagctggctatcttgtccttcatttgacagctgtcatcatcgattattatcaactatttttgtttcaaaaagttgccttgtccattgttcagcgactgcggattgacgtgttctcgagcgtgcaacggctcggtctttccttttttgaccaaacacctgcaggagggcttgtctccagaataacgaatgacacggagtctattaaagaattgtatgtgacggttttagcgacgtttgtgcaaaatatcatattcttaattggtatttttgccgccatgttttatttaaatgtgaccttggccatttactgtcttgttcttctaccactcatttttgctttaatgcaagtgtaccgaaaatatagttctcggttttatgcagatatgagcgaaaaactaagtctcttaaatggacgaataaacgaatcgattcaagggatggctatcattcaaatgtttcgccaagaacggcggatgcggaaagaatttagcgccattaacgacgagcattttttagcgggaatgaaaagcatgaagctggacggtttattgttacgtccagcggttgatgtcttgtccatcttggcgcttatgttgattttgagttattttgggatcatgtctatggacacagcggttgaaattggtgtcgtttacgccttcgtcaattacttagaccgtttttttgagccggttaatcaaatgatgatgcgactttctatgtttcagcaagcgattgtctcagcggggcgcgtctttaaactgatggatcatcgggagttagctccagatcgtgaggggaatgaacatccagcgatcataggggaaggaaatgtggaattccggaatgtttccttttcctatgacgggaaaacaaacgttttaaaaaacatttcgttcacggtgaaaaaaggagagacagtcgccctagtcggccatacgggtagtggaaaaacatcgatcatcaatgtgctaatgcgattttatccgttgcaggatggggaaattctcatcgatggtaaaccgctcacgtcctttgaaaataatgagctgcgcgctaaggtcgggcttgttttgcaagatccgtttctttatacaggaacgattgcgagcaacattcgtttgtatgatcaagccatttccgatgatcggatcaagcgggctgcctcgtttgttcgggcggatggatttatcgagcggctgtctcatggttatgagacaaaggtgacggagcggggagcaacgttttcaagtggccaacgacaactgctctcctttgctcgtaccatggtccgtgagccggcgattcttattttggacgaggcaacggcaagtgtggatacggagacggaagaagcaatacaagaagcacttgagcgaatgaaacaaggacggacgacgattgcgatcgctcaccgattgtcgacgataaaggatgcagatcaaattctcgttcttcaccaaggagaaattgtagagcggggaactcatgatgaactcattgccaaaaagggactttatcaaaaaatgtatgttttgcaaaaaggggatgaacaaggagaagcactgctgtcctaa

SEQ ID NO: 4377 - protein, 599 aa, Bacillus halodurans C-125
MIDHKDRVLSSKEQRTVFKRLLSYAAHYKGQLMVAFLLLFIATGAQLLGPIIVKIFIDDYLTPRYFPTDVLFLLGAGYLVLHLTAVIIDYYQLFLFQKVALSIVQRLRIDVFSSVQRLGLSFFDQTPAGGLVSRITNDTESIKELYVTVLATFVQNIIFLIGIFAAMFYLNVTLAIYCLVLLPLIFALMQVYRKYSSRFYADMSEKLSLLNGRINESIQGMAIIQMFRQERRMRKEFSAINDEHFLAGMKSMKLDGLLLRPAVDVLSILALMLILSYFGIMSMDTAVEIGVVYAFVNYLDRFFEPVNQMMMRLSMFQQAIVSAGRVFKLMDHRELAPDREGNEHPAIIGEGNVEFRNVSFSYDGKTNVLKNISFTVKKGETVALVGHTGSGKTSIINVLMRFYPLQDGEILIDGKPLTSFENNELRAKVGLVLQDPFLYTGTIASNIRLYDQAISDDRIKRAASFVRADGFIERLSHGYETKVTERGATFSSGQRQLLSFARTMVREPAILILDEATASVDTETEEAIQEALERMKQGRTTIAIAHRLSTIKDADQILVLHQGEIVERGTHDELIAKKGLYQKMYVLQKGDEQGEALLS

SEQ ID NO: 4378 - DNA, 1827 bp, Lactococcus lactis subsp. lactis Il1403
  CDS (1)..(1827): transl_table=11
atggagaaatctactgacaaaatgtctgtcagagaaagttggcaagtttttaaatttattttcaaattcttattacctttcaaaaagtatttcgtttgggcttttgtttttagtgtaattacaactgctctggcttcacttatgccttttgttttgtccgtttttatggattcttatttgacacctatgaaagcgactgaccagattattttctattttgcaggtctttatttgattttagcaataatcaattcaatagctttctttttcaaatggaattatctgcaaaatggttcgatttttgttaatcaatacattcgtaagaaagtttatcgaaaaattcatcagctaggcatgcgatattttgaccaaaaaccgacgggttggttaatcaccagaatcacaaatgacaccgatttatttgatttctggcagactttgtttaatgcattaacaagtttgctttctattatcattgccttcattgctttgtttattattgaccaccaaattgcgcttgtgatgttgttgattcttcccctattgattttggcagtattgatttatcaaaaagtgagtacaaaagtttatcaagccatgcttgctaagcgttcagaattgaatacgaaattaaatgaatacatttctgggatgagaattattcaacaatttcgtcaagagagcagactaggaaatgaatttgaaaaaacaaatgatgaatattatggttatcgaaaacgagtgattcagattaatgggattttgttgagccctttggttaattttttgatggccatctcaattgttgttgtcttgttgatgtattctaatcgaagtctacatgcagtggttgaggctggtttaatttatgctttcatcagtaatgtacaaatttactttaatcctatttcaggattgatggattctttatcaaacttttcaaatggattggtggcctctagtcgcattaagacaatcatggaagaaaaagaatttgcgccacaacaaggaatttcaacttctgtcagtaaaaatgttgatgaaaaatttactgacagaaaatctgtcagcaattctccaatcattcaagaaggaaaaattgaatttcgcaatgtcagtttttcatatgacggagaacatcaagttttgaaaaatatctcattcattgtgaatcctggagaaacgcttgcttttgtaggtcatacaggttcaggaaaatcgagtattattaatgttttcatgcgcttctatgaattcacagaaggtcaagttttgattgatgatcaggacattagaagttattcaaaagaagaacttcggaaaaaaattggtttagtattgcaagattcctttatgtttgttgcgtcagttactgacaatatcaaaatgatgaatccacagattactgaccaagcagccaaagaagcggctcgatttgttcaagctgacaaattcatcaaggatttggaaaatggttacgaaaccaaagtaattgaaggtggagctgccttctcggccggtgaacgtcaattaattaactttgctcgaacgattgtgcgtaatccgaaaattctcttattagatgaagcaacagccaatattgatactgaaactgaagcgcttattcaagaaggtctgataaatatgcgacaaaatcgaacgacaatggcaattgctcaccgtttatcaacgattaaagatgctgaccaaattttagtcttgaacaagggagaaattattgagcgaggaaatcatgaccaacttttagagcttaatggttattatgcagacatgtatcgaattcaaactttacaaaaagaactatga

SEQ ID NO: 4379 - protein, 608 aa, Lactococcus lactis subsp. lactis Il1403
MEKSTDKMSVRESWQVFKFIFKFLLPFKKYFVWAFVFSVITTALASLMPFVLSVFMDSYLTPMKATDQIIFYFAGLYLILAIINSIAFFFKWNYLQNGSIFVNQYIRKKVYRKIHQLGMRYFDQKPTGWLITRITNDTDLFDFWQTLFNALTSLLSIIIAFIALFIIDHQIALVMLLILPLLILAVLIYQKVSTKVYQAMLAKRSELNTKLNEYISGMRIIQQFRQESRLGNEFEKTNDEYYGYRKRVIQINGILLSPLVNFLMAISIVVVLLMYSNRSLHAVVEAGLIYAFISNVQIYFNPISGLMDSLSNFSNGLVASSRIKTIMEEKEFAPQQGISTSVSKNVDEKFTDRKSVSNSPIIQEGKIEFRNVSFSYDGEHQVLKNISFIVNPGETLAFVGHTGSGKSSIINVFMRFYEFTEGQVLIDDQDIRSYSKEELRKKIGLVLQDSFMFVASVTDNIKMMNPQITDQAAKEAARFVQADKFIKDLENGYETKVIEGGAAFSAGERQLINFARTIVRNPKILLLDEATANIDTETEALIQEGLINMRQNRTTMAIAHRLSTIKDADQILVLNKGEIIERGNHDQLLELNGYYADMYRIQTLQKEL

SEQ ID NO: 4380 - DNA, 1860 bp, Deinococcus radiodurans R1
  CDS (1)..(1860): transl_table=11
atgacccagaaggcttccgaatacgacaagggcttcgatgtgggcctcacgcgacgcatcatcggctacctcgggccgtacaagaccctggcggcggcgggcgtgctgctcgcgctgctcacggcggccttgcagcccttgcccacgttgctgcaacgctacgccatcgaccactacctcgtgccgtacaccaacggcagcaacacggacgccgccgcgctctaccaggggctgaccatggtggtgctcggctacgtggcgctgcgggtgctggaatttgtgctgacctacctctcgaccatcacggtggggtacctcggccagaacgtgctgcgcgacatccgcgccgacgtgttcggcaagttgcagcggctgcacctgcgctacttcgaccagaacccggtgggacgcctgattacccgcgtgacgagcgacgtggacgccatcaaccagttcatcaccggcggtctgatctcgatgatgacgagcaccttcctgatcatcgtgttcatgaccgtgatgctgacgatcaactggcgcctcgctttgatcgcctttacggtgctgccggtcctgttctacgcgaccaattttttccggggcaagctgcgcgaggcgttccgggaaacccgcacccagcaggccatcgtgaactccaagctcaacgagaacatcaccgggatgctgacggtgcagctcttcgggcgcgagcggcgcagcgccctcgacttcgaccattccaaccgggcgctgctcacgtcgctggaaaactcggtgaagtggttctcgctgttcatgcccaccgtggcggtgctggggcaggtcgccatcgcgctggtgctgtacttcgcggcgcggcagattctgggcgtagacgtggtcgggaccggcacggcggcggccatttcggtgggcacgctcttcgccttcgtgcagtggacgcagcaactctttcagccgattcaggacctcgccgacgtgttcaacaacctccaggccgccaccgcgagcagcgagcgcatcttcggggtgctcgacaccgaggaagaaatcaccgacaagcctgatgccaagaccctggtgaactttcgcggtcaggtggatttcgaccgggtgtggttcgcctacagcgaggacgtgacggcgcagacgcccgacgaagacgaccgctggattctgcgcgacttcgacctgcacattcagcccggcgagagcgtggcgctggtgggcgcgacgggggcgggcaagacgagcgtgaccgcgctggtgagccgcttttacgacgtgcagcgcggcgcagtgagggtggacggcaccgacgtgcgcgacctccaacaacacgacctgcggcggcatgtcggcgtggtgcttcaggacgtgttcctgttcgccggcaccatcgagagcaacctgacgctcgacaaccccgccattccccacgaccgcgtggtggaggcgtgccagtacgtgggcgtacacgactacatcctctcgctggagaacggctaccagaccgaggtgcgcgagcgcggcgccaccctctccaccgggcaaaagcagctgctcgccttcgcccgcgccctgattcagaatcccgacatcttgctcgtgctcgacgaagcgaccgccaacgtggacactgagaccgagctgcggattcaggacgcgctgaaaaaggtgatgcagggccgcacgtccatcatcatcgcccaccgtctctcgaccatcgagcactgcgaccgcatcatcgtgatgcgccggggccgcatcgtggaacagggcacgcacgcccagctcatcgcgcagggcggctactacgccaagctcaacgccttgcagtacgcgggggcagcagactga

SEQ ID NO: 4381 - protein, 619 aa, Deinococcus radiodurans R1
MTQKASEYDKGFDVGLTRRIIGYLGPYKTLAAAGVLLALLTAALQPLPTLLQRYAIDHYLVPYTNGSNTDAAALYQGLTMVVLGYVALRVLEFVLTYLSTITVGYLGQNVLRDIRADVFGKLQRLHLRYFDQNPVGRLITRVTSDVDAINQFITGGLISMMTSTFLIIVFMTVMLTINWRLALIAFTVLPVLFYATNFFRGKLREAFRETRTQQAIVNSKLNENITGMLTVQLFGRERRSALDFDHSNRALLTSLENSVKWFSLFMPTVAVLGQVAIALVLYFAARQILGVDVVGTGTAAAISVGTLFAFVQWTQQLFQPIQDLADVFNNLQAATASSERIFGVLDTEEEITDKPDAKTLVNFRGQVDFDRVWFAYSEDVTAQTPDEDDRWILRDFDLHIQPGESVALVGATGAGKTSVTALVSRFYDVQRGAVRVDGTDVRDLQQHDLRRHVGVVLQDVFLFAGTIESNLTLDNPAIPHDRVVEACQYVGVHDYILSLENGYQTEVRERGATLSTGQKQLLAFARALIQNPDILLVLDEATANVDTETELRIQDALKKVMQGRTSIIIAHRLSTIEHCDRIIVMRRGRIVEQGTHAQLIAQGGYYAKLNALQYAGAAD

SEQ ID NO: 4382 - DNA, 1890 bp, Agrobacterium tumefaciens str. C58
  CDS (1)..(1890): transl_table=11
atgatggccacgaagaaaaaaaccatttcggcggattccagcaatccgacccagaccctgatcaatctctggccctatatgtggccagagggtcggtgggacctgaagatgcgggtgatctgggcaaccgtgttcctcatcgtcgccaagctggtgctgatcgcggttccctatttcttcaaatgggcgacggatgcgctgaacggcaagctcgacatggcagggctggttccggccttcctgctcggcgcggtggcgctggtcatcgcctataatctgacgcggctgatccaggtcgggctcaaccagctgcgcgattcgctgtttgccagcgtcggccaacatgcggtgcgccagctcgcctatcgtaccttcgtgcacatgcaccggctttcgctgcgtttccatctggagcgcaagaccggcgggctgtcgcgggtcatcgagcgcggcacgaagggcatcgaaaccattgtccgcttcaccattctcaataccgcaccgaccttcatcgaattcctgctgacggccatcatcttctgggcgtcctatggtttttcctatgtgctggtcaccgtcgtcaccgtctgggcctatatctggttcacggtcagggccagcaactggcgtatcggcatccgccgcgccatgaatgacagcgataccgacgccaataccaaggcgatcgattcgctactcaacttcgagaccgtcaaatatttcggcaatgaggaaatggaggcacggcgtttcgacgtcgccatggagcgttacgaaaaatcggcgatctcgatctggacctcgctcggctggctgaactttggccagggcgtgattttcggcatcggctccacgatcatgatggtgatgtcggcactggccgtgcagcgcggcgagcagaccatcggcgatttcgtgttcgtcaatgcgctgctgctgcagctttccgtgccgctcaatttcatcggcttcgtttatcgcgaaatccgccagggcctgaccgacatcgaacagatgttcgatcttctcgaggtggaggccgaagtcaccgacaggccggatgcgaagccgcttgcggccggtcccggcgcgatctccttccgcgacgtgcattttgcctacgaccctgaaagaccgatcctcaagggcgtttccttcgatgtgccggcgggcaagacggtggcgatcgtcggcccttccggtgcgggaaaatcgacgatctcgcggctgctttatcgtttctacgatattcaggagggcgccgttaccatcgacgggcaggatattcgcgacgtgacgcaaaagagcctgcgctcgatgatcggcatggtgccgcaggataccgtgctgttcaacgacaccctcgcctacaatatccgctacggtcgcccctccgccaccgacgaggagctgaaggcagcggcggatgcagcgcagatcagcgccttcatcggcaaactgccggacggttacgccaccatggtcggcgaacggggactgaagctttcgggtggcgaaaagcagcgcgtggcgattgcccggaccattctcaaggcaccgccgatcctgatcctcgacgaggcgacctcggcgctcgatacgcataccgagcaggaaatccagagcgccctcgacatcgtctcgaaaaaccgcaccacgctggtcatcgcccaccgcctctccacggtcatccacgcggacgaaatcatcgtgctgaaggaaggactgatcgccgagcggggaacgcatgcctcgctgatggcgcatgatggcctctacgcctcgatgtggagccgccagcgcgaggcgatccgcgccgaagagatgctgcgccatgttcgcgaaagcgacgatctcggcgtcgtggaccgcggcgaaccggcgcattga

SEQ ID NO: 4383 - protein, 629 aa, Agrobacterium tumefaciens str. C58
MMATKKKTISADSSNPTQTLINLWPYMWPEGRWDLKMRVIWATVFLIVAKLVLIAVPYFFKWATDALNGKLDMAGLVPAFLLGAVALVIAYNLTRLIQVGLNQLRDSLFASVGQHAVRQLAYRTFVHMHRLSLRFHLERKTGGLSRVIERGTKGIETIVRFTILNTAPTFIEFLLTAIIFWASYGFSYVLVTVVTVWAYIWFTVRASNWRIGIRRAMNDSDTDANTKAIDSLLNFETVKYFGNEEMEARRFDVAMERYEKSAISIWTSLGWLNFGQGVIFGIGSTIMMVMSALAVQRGEQTIGDFVFVNALLLQLSVPLNFIGFVYREIRQGLTDIEQMFDLLEVEAEVTDRPDAKPLAAGPGAISFRDVHFAYDPERPILKGVSFDVPAGKTVAIVGPSGAGKSTISRLLYRFYDIQEGAVTIDGQDIRDVTQKSLRSMIGMVPQDTVLFNDTLAYNIRYGRPSATDEELKAAADAAQISAFIGKLPDGYATMVGERGLKLSGGEKQRVAIARTILKAPPILILDEATSALDTHTEQEIQSALDIVSKNRTTLVIAHRLSTVIHADEIIVLKEGLIAERGTHASLMAHDGLYASMWSRQREAIRAEEMLRHVRESDDLGVVDRGEPAH

SEQ ID NO: 4384 - DNA, 1752 bp, Streptococcus pneumoniae R6
  CDS (1)..(1752): transl_table=11
atgcagaataaacaagaacaatggactgtattgaagcgcttgatgtcctatctcaagccttatggactccttacctttttggcactcagttttctcctagcgacgacggtcattaaaagtgtcattccccttgtggcttcccactttatcgaccagtatctcagcaatcttaaccaactagccgtgaccgttttgctggtctactatggtctctacatcctacaaactgtagttcagtatgtcggcaatcttctctttgcgcgcgtgtcttacagtattgttagggatattcgtcgggatgcctttgccaatatggagaaactgggcatgtcttactttgacaagacgccagcaggttctatcgtttctcgtttgaccaacgataccgagacgattagtgatatgttttctgggattttatccagctttatctcagcagtttttatctttctgacaaccctttataccatgttggtgctggattttcgtttgacagcattagtcttgctctttctccccttgattttccttttggtcaatctctatcgaaaaaagtcagtgaaaatcatcgagaaaaccagaagtctcttgtcagatatcaatagtaagctggcagagaatatcgagggaatcaggattattcaggcttttaatcaagagaagcgcctgcaggcagaatttgatgaaatcaaccaagagcacttggcctatgccaaccgttctgtagccttggatgccctctttttgagacctgccatgagtttgttgaaacttctaggttatgctgtcttgatgacctattttggctatcgtggtctttctatcgggataacggccgggaccatgtatgcttttatccagtacatcaaccgcctctttgaccctttgattgaggtgacgcaaaacttttcaacactgcaaacgtctatggtttctgcaggccgtgtctttgccttaatcgatgagaggacctatgagccccttcaagaaaatgggcaagccaaagtcaaagaaggcaatatccgttttgaacatgtgtgtttctcgtatgacggtaaacatccgattctggatgacatttctttctctgttaataagggtgaaaccattgcctttgtaggtcatacaggttcagggaaatcgtctattatcaatgtcctcatgcgcttttatgaattccagtcagggagagttctcttggatgatgtggatatcagggatttcagtcaagaagagctgagaaaaaacatcggtttggttttacaggaacccttcctctatcatggaactattaagtccaatatcgccatgtaccaagaaatcagtgatgagcaggttcaggctgcggcagcctttgtggatgcagattcctttattcaagaacttcctcaggggtacgactcccctgtttccgagcgtggttcgagcttctctactgggcagcgccagcttcttgcctttgctagaacagtcgccagccagcctaaaatcctgattttggatgaagcgacagccaatattgactctgaaacagaaagtttggttcaagcttctctggcgaagatgagacagggccgaacaactattgctatcgctcaccgcctttctactattcaagacgccaactgcatctatgtcttggataagggacgcattatcgagagtggaacccatgaggaactcttgactctgggaggaacctatcacaagatgtatagtttgcaggcaggggccatggcctatactctttga

SEQ ID NO: 4385 - protein, 583 aa, Streptococcus pneumoniae R6
MQNKQEQWTVLKRLMSYLKPYGLLTFLALSFLLATTVIKSVIPLVASHFIDQYLSNLNQLAVTVLLVYYGLYILQTVVQYVGNLLFARVSYSIVRDIRRDAFANMEKLGMSYFDKTPAGSIVSRLTNDTETISDMFSGILSSFISAVFIFLTTLYTMLVLDFRLTALVLLFLPLIFLLVNLYRKKSVKIIEKTRSLLSDINSKLAENIEGIRIIQAFNQEKRLQAEFDEINQEHLAYANRSVALDALFLRPAMSLLKLLGYAVLMTYFGYRGLSIGITAGTMYAFIQYINRLFDPLIEVTQNFSTLQTSMVSAGRVFALIDERTYEPLQENGQAKVKEGNIRFEHVCFSYDGKHPILDDISFSVNKGETIAFVGHTGSGKSSIINVLMRFYEFQSGRVLLDDVDIRDFSQEELRKNIGLVLQEPFLYHGTIKSNIAMYQEISDEQVQAAAAFVDADSFIQELPQGYDSPVSERGSSFSTGQRQLLAFARTVASQPKILILDEATANIDSETESLVQASLAKMRQGRTTIAIAHRLSTIQDANCIYVLDKGRIIESGTHEELLTLGGTYHKMYSLQAGAMAYTL

SEQ ID NO: 4386 - DNA, 2022 bp, Bacillus subtilis subsp. subtilis str. 168
  CDS (1)..(2022): transl_table=11
atgaaaataggaaaaacgttatggagatacgcacttctttatcgaaaattgctgatcacagccgtccttttgctaactgttgccgtcggtgcagaactgactgggccctttattggcaaaaaaatgatagacgaccatatcctcggcattgagaaaacatggtatgaagctgcggaaaaagataaaaatgccgttcagtttcacggcgtctcatatgtcagagaggaccgattgcaggagcctgtttcaaaagcaaaagaagcgcatatttatcaagtgggaatggcgttctattttgttgatcaggctgtcagcttcgacgggaatagaacggtttctgacgggaagctgacgatcacaaacggagacaagagccgggcatatgctgccgaaaagctgactaagcaggaacttttccagttctatcagccggaaataaagggaatggtgttactgatctgcctgtatgggggcttgcttgtgttttcggtattctttcaatacggacagcattatctgctgcagatgagcgccaatcggattattcaaaagatgaggcaggacgtgttttcgcacatacagaaaatgccgattcgctattttgacaaccttccggccggaaaagtcgttgcgcggattaccaatgatacggaggctattagggatttatatgtcacagtgctttcaacatttgtgacaagcggaatctatatgttcgggatattcacggctttgtttctgcttgatgtgaagcttgcgtttgtatgtctggcaattgtgccgattatctggctgtggtcggtcatataccggagatatgcgtcatattacaaccaaaaaatccgctcgatcaacagtgacattaacgcaaaaatgaatgagtcaattcaaggcatgaccattattcaggctttccgccatcaaaaggaaacaatgagagaatttgaggaattaaatgaatcacatttttatttccaaaacaggatgctgaatttaaactccttaatgtcccataatctggtcaatgtcatccgcaatcttgcgttcgtctgtctgatctggcattttggcggtgcgagcctgaatgcggcggggattgtttctatcggtgtgctgtacgcgtttgtcgattatttgaaccggttatttcagccgatcacaggcatcgtcaatcagttttcaaagctggagcttgcaagggtctccgccgggcgtgtttttgaactgcttgaagaaaagaatacggaagaagcgggtgaaccggcgaaggagcgcgcgctggggcgggttgaatttcgtgatgtgtcatttgcgtatcaagaaggtgaagaggtattaaagcatatttcctttactgcgcaaaaaggcgaaaccgtagcgctcgtcggccataccggatcaggaaaaagctcgattttgaatcttctgtttcgtttttatgatgcgcaaaaaggtgatgtcttaattgatggaaaaagcatttacaacatgtcaagacaggaactcagatcccatatgggtattgtgcttcaggacccgtacttattctcgggcacaatcggatctaacgtaagtctggatgacgaaagaatgactgaagaagaaataaaaaatgcactgcggcaagtcggtgctgagcctcttcttaagaagcttccgaagggcattaatgagcccgtgattgaaaaaggcagcacgctatcctctggagagcggcagttaatttctttcgctagagctttggcgtttgatcccgcgatcttgattttagatgaggcaacggcgcatattgatacagagacagaggccgtgatccagaaggcgcttgatgtcgtcaaacaaggacgcaccaccttcgtcatcgctcaccggctttcaacaatcagaaatgctgatcagattttggttcttgataaaggagaaattgttgagagagggaaccacgaggaactgatggcattagaaggccaatattatcaaatgtatgaactgcaaaagggacagaaacattccattgcataa

SEQ ID NO: 4387 - protein, 673 aa, Bacillus subtilis subsp. subtilis str. 168
MKIGKTLWRYALLYRKLLITAVLLLTVAVGAELTGPFIGKKMIDDHILGIEKTWYEAAEKDKNAVQFHGVSYVREDRLQEPVSKAKEAHIYQVGMAFYFVDQAVSFDGNRTVSDGKLTITNGDKSRAYAAEKLTKQELFQFYQPEIKGMVLLICLYGGLLVFSVFFQYGQHYLLQMSANRIIQKMRQDVFSHIQKMPIRYFDNLPAGKVVARITNDTEAIRDLYVTVLSTFVTSGIYMFGIFTALFLLDVKLAFVCLAIVPIIWLWSVIYRRYASYYNQKIRSINSDINAKMNESIQGMTIIQAFRHQKETMREFEELNESHFYFQNRMLNLNSLMSHNLVNVIRNLAFVCLIWHFGGASLNAAGIVSIGVLYAFVDYLNRLFQPITGIVNQFSKLELARVSAGRVFELLEEKNTEEAGEPAKERALGRVEFRDVSFAYQEGEEVLKHISFTAQKGETVALVGHTGSGKSSILNLLFRFYDAQKGDVLIDGKSIYNMSRQELRSHMGIVLQDPYLFSGTIGSNVSLDDERMTEEEIKNALRQVGAEPLLKKLPKGINEPVIEKGSTLSSGERQLISFARALAFDPAILILDEATAHIDTETEAVIQKALDVVKQGRTTFVIAHRLSTIRNADQILVLDKGEIVERGNHEELMALEGQYYQMYELQKGQKHSIA

SEQ ID NO: 4388 - DNA, 1782 bp, Salmonella enterica subsp. enterica serovar Typhi str. CT18
  CDS (1)..(1782): transl_table=11
atgcgtagttttggacagctatggccgacgctgaaacggttgctggcgtatggctcgccatggcgaaaaccgctctctgtcgcggtgatgatgctgtggattgcggtggcggcggaggttagcggtccgctgctgatcagctatttcattgataacatggtggcccgccaccatttaccgttgggcaaggtcgcggggctggcggccgcctatgtggggctacagtttctggcggcgggtctgcattacgcccagtctttattatttaaccgggcggccgttggcgtggttcagtccttgcgcacggacgtcatggatgccgccttgcgccagccgctaagcgccttcgacacgcagcctgtcggacaattaatttcacgcgtgaccaacgatacggaagtcatccgcgatctgtacgtcacggtcgtcgcaacggtattacgtagcgcggcgttgatcggcgccatgctggtcgccatgttcagccttgactggcggatggcgctggtggcggttttgatttttccggcggtattgaccgtgatggtcatttatcagcgctacagcacgccgattgtacgccgcgtgcgggcatacctggcggatattaacgacggctttaacgaaatcatcaatgggatgagcgtaattcagcagtttcgccagcaggcgcgcttcggcgaacgcatgggcgaggccagccgctcgcactacatggcgcggatgcagacgctgcgcttggacggctttttattgcgtccgctgcttagcctcttttccgcgctcattttatgcggtttgttgatgcttttcagctttacgtctgccggcacgattgaggtcggggtgctgtatgcgttcattagctatttgtcacgtctgaacgagccgctcattgaactgaccacccagcaatccatgctacagcaggcggttgtggcgggagagcgtgtttttgaactgatggatcgcccgcgccagcgctatggcagcgacgacaggccgttacaaagcggggcgattgatattgatcatctgtcgtttgcttaccgcgacgataatcttgttttacaggacattacgctatcagtaccgtcccgtagctttgtggcgctggtggggcacaccggcagcgggaagagcacgctcgccagcttattaatggggtattaccccctgacacaaggcgaaattcggctggatgggcgagaaatcgcctctcttaatcatcgcgttttacgccagggcgtggcgatggttcaacaggacccggtagtgatggcggatacctttctggctaatgtgacgctggggcgcgatgtctccgaggcgcaggtgtggcaggcgctggaaacggtacaactggcagatctggcgcgcggcctgagcgacgggctgcatacgcatctcggcgagcagggaaatacgctgtccgtcgggcaaaaacagctattggcgctggcgcgcgtgctggttgacgccccgcaaatattaattcttgatgaagcgacggccagcatcgattccggcactgagcaggcgatacagcaggcgctggcggcgattcgcgagcgcaccacgttggtggttattgcccatcggctatcgacaatcgtggaggcggataccattctggttctctatcgcggccaggcggtggagcgcgggacgcatcaacaattgctggcggcgcaagggcgctactggcaaatgtatcaattacagttagttggcgaggagttagccgccagcgtacacgaagaatccggccctacggcgtaa

SEQ ID NO: 4389 - protein, 593 aa, Salmonella enterica subsp. enterica serovar Typhi str. CT18
MRSFGQLWPTLKRLLAYGSPWRKPLSVAVMMLWIAVAAEVSGPLLISYFIDNMVARHHLPLGKVAGLAAAYVGLQFLAAGLHYAQSLLFNRAAVGVVQSLRTDVMDAALRQPLSAFDTQPVGQLISRVTNDTEVIRDLYVTVVATVLRSAALIGAMLVAMFSLDWRMALVAVLIFPAVLTVMVIYQRYSTPIVRRVRAYLADINDGFNEIINGMSVIQQFRQQARFGERMGEASRSHYMARMQTLRLDGFLLRPLLSLFSALILCGLLMLFSFTSAGTIEVGVLYAFISYLSRLNEPLIELTTQQSMLQQAVVAGERVFELMDRPRQRYGSDDRPLQSGAIDIDHLSFAYRDDNLVLQDITLSVPSRSFVALVGHTGSGKSTLASLLMGYYPLTQGEIRLDGREIASLNHRVLRQGVAMVQQDPVVMADTFLANVTLGRDVSEAQVWQALETVQLADLARGLSDGLHTHLGEQGNTLSVGQKQLLALARVLVDAPQILILDEATASIDSGTEQAIQQALAAIRERTTLVVIAHRLSTIVEADTILVLYRGQAVERGTHQQLLAAQGRYWQMYQLQLVGEELAASVHEESGPTA

SEQ ID NO: 4390 - DNA, 1782 bp, Salmonella typhimurium LT2
  CDS (1)..(1782): transl_table=11
atgcgtagttttggacagctatggccgacgctgaaacggttgctggcgtatggctcgccatggcgaaaaccgctctctgtcgcggtgatgatgctgtggattgcggcggcggcggaggttagcggtccgctgctgatcagctatttcattgataacatggtggcccgccaccatttaccgttgggcaaggtcgcggggctggcggccgcctatgtggggctacaatttctggcggcgggtctgcattacgcccagtctttattatttaaccgggcggccgttggcgtggttcagtccttgcgcacggacgtcatggatgccgccttgcgccagccgctaagcgccttcgacacgcagcctgtcggacaattaatttcacgcgtgaccaacgatacggaagtcatccgcgatctgtacgtcacggtcgtcgcaacggtattacgtagcgcggcgttgatcggcgccatgctggtcgctatgttcagccttgactggcggatggcgctggtggcgattttgatttttccggcggtattgaccgtgatgatcatttatcagcgctacagcacgccgattgtacgccgcgtgcgggcatacctggcggatattaacgacggctttaacgaaatcatcaatgggatgagcgtaatccagcagtttcgccagcaggcgcgcttcggcgaacgcatgggcgaggccagccgctcgcactacatggcgcggatgcagacgctgcgcttggatggctttttattgcgtccgctgcttagcctcttttccgcgctcattttatgcggtttgttgatgcttttcagctttacgtctgccggcacgattgaggtcggggtgctgtatgcgttcattagctatttgtcacgtctgaacgagccgctcattgaactgaccacccagcaatccatgctacagcaggcggttgtggcgggagaacgtgtttttgaactgatggatcgcccgcgccagcgctatggcagcgacgacaggccgttacaaagcggggcgattgatattgatcatctgtcgtttgcttaccgcgacgataatcttgttttacaggacattacgctatcagtaccgtcccgtagctttgtggcgctggtggggcacaccggcagcgggaagagcacgctcgccagcttattaatggggtattaccccctgacacaaggcgaaattcggctggatgggcgagaaatcgcctctcttaatcatcgcgttttacgccagggcgtggcgatggttcaacaggacccggtagtgatggcggatacctttctggctaatgtgacgctggggcgcgatgtctccgaggcgcaggtgtggcaggcgctggaaacggtacaactggcagatctggcgcgcggcctgagcgacgggctgcatacgcatctcggcgagcagggaaatacgctgtccgtcgggcaaaaacagctattggcgctggcgcgcgtgctggttgacgccccgcaaatattaattcttgatgaagcgacggccagcatcgattccggcactgagcaggcgatacagcaggcgctggcggcgattcgcgagcgcaccacgctggtggttattgcccatcggctatcgacaatcgtggaggcggataccattctggttctccatcgcggccaggcggtggagcgcgggacgcatcaacaattgctggcggcacaaggacgctactggcaaatgtatcaattacagttagttggcgaggagttagccgccagcgtacacgaagaacccggccctgcggcgtaa

SEQ ID NO: 4391 - protein, 593 aa, Salmonella typhimurium LT2
MRSFGQLWPTLKRLLAYGSPWRKPLSVAVMMLWIAAAAEVSGPLLISYFIDNMVARHHLPLGKVAGLAAAYVGLQFLAAGLHYAQSLLFNRAAVGVVQSLRTDVMDAALRQPLSAFDTQPVGQLISRVTNDTEVIRDLYVTVVATVLRSAALIGAMLVAMFSLDWRMALVAILIFPAVLTVMIIYQRYSTPIVRRVRAYLADINDGFNEIINGMSVIQQFRQQARFGERMGEASRSHYMARMQTLRLDGFLLRPLLSLFSALILCGLLMLFSFTSAGTIEVGVLYAFISYLSRLNEPLIELTTQQSMLQQAVVAGERVFELMDRPRQRYGSDDRPLQSGAIDIDHLSFAYRDDNLVLQDITLSVPSRSFVALVGHTGSGKSTLASLLMGYYPLTQGEIRLDGREIASLNHRVLRQGVAMVQQDPVVMADTFLANVTLGRDVSEAQVWQALETVQLADLARGLSDGLHTHLGEQGNTLSVGQKQLLALARVLVDAPQILILDEATASIDSGTEQAIQQALAAIRERTTLVVIAHRLSTIVEADTILVLHRGQAVERGTHQQLLAAQGRYWQMYQLQLVGEELAASVHEEPGPAA

SEQ ID NO: 4392 - DNA, 1806 bp, Listeria monocytogenes EGD-e
  CDS (1)..(1806): transl_table=11
atggaagcgatgaatgaacaagatgaaatgttagtgatgtccggtaaggaacatcgcgaggttttaaaaagaatgcttagttataccaaatatcatattccgagtttaatttggaccggtgtgcttgttcttctcgtaacgcttgcggatgtgtttgcaccaatcttgattaaaatatttttggatgattatttaacaccgatgaatttggaaatgcaggctttgctaattcttggtgcgggatatttgggacttacgattgggaaatcagttgtttggtatttccaattgctgttctttcaaaaaatcgcgcttgaaattgtgcaacaaatgcggattgatatttttacaaaacttcattcgctaggaatgcgctacttcgacaaaacgcctgcaggaagcattgtgtcgcgcgtgacaaatgataccgaagcggtgaaagatatgtttattaatgtgctttcaacagcgattcaaagtttgtttatgctcgttgggatttatgcagcgatgtttgcgctcaatgttcaattagcgttatatagtttacttttattcccgcttattgtctttattatttttgtttaccggaaatacagttcacaattttaccgggcgagacgagaaaaattaagtcaattaaatgcaaaaattgctgagtcgatttcaggaatgtcgattgttcaacaatttaatcaagagcgtcgtttagtaaaagaatttgagaaaatcaataaagattactatgacgtcggaatgaaaaatatcaaatttaatgcgctattacttggaccggcgattgatttgatttacgcgttggctgtagtgattattcttagtttctttggtgcagagtcattaataggaccggtagcgattgggacgatttatgcctttattagttactttgatcgttttttagaagcgatttataacgtaatggagcggctggcgatgtaccaagaggcgattacggcggcttcccgagtatttcgtattatggatgaaacggaagaagtgccagcccaattaaacgatccagaggcgaaaatcacgcgtgctaaaattgagtttaaagatgtttcgtttgcttatgaaggtgggcgtgacgttcttaaaaatattagctttacggctgaacctggacaaacggtggcgcttgttggccatactgggagcgggaaaagttccattatcaatttaatgatgcgtttttatgaatttgaacgtggggatattttaattgatggtaagtcgattaagtctcacgaaattacagaactacgtaagaaaactggattagttttgcaagatagttttatgttttatggggatattaatacaaatattcgcctctacgataaaagcattacagatgaacaaattgtggatgctgcgaaatttgttcaagcggatggctttattcaaacattatccgatgagtacaaccataaagtgattgagcgaggtgcttcgttttcaagtgggcaaagacagctgatttcatttgccagaacggttgtaaccaatccacaaattctcgttttagacgaagcaacggcaaatattgatacagaaacagaaagcttaattcaaacggggttaaaacgaatgcgagaaggacgcacgacaattgcgattgcgcatcgactttcgacaattaaggatgccgatttaattttagttttatccaaaggaagaattattgagcgtggtacacatgacagtttgattgcagaagaaggggtatatcattcgatgtatcaattacaaaatagtggaatggatttagacgaagcgctttaa

SEQ ID NO: 4393 - protein, 601 aa, Listeria monocytogenes EGD-e
MEAMNEQDEMLVMSGKEHREVLKRMLSYTKYHIPSLIWTGVLVLLVTLADVFAPILIKIFLDDYLTPMNLEMQALLILGAGYLGLTIGKSVVWYFQLLFFQKIALEIVQQMRIDIFTKLHSLGMRYFDKTPAGSIVSRVTNDTEAVKDMFINVLSTAIQSLFMLVGIYAAMFALNVQLALYSLLLFPLIVFIIFVYRKYSSQFYRARREKLSQLNAKIAESISGMSIVQQFNQERRLVKEFEKINKDYYDVGMKNIKFNALLLGPAIDLIYALAVVIILSFFGAESLIGPVAIGTIYAFISYFDRFLEAIYNVMERLAMYQEAITAASRVFRIMDETEEVPAQLNDPEAKITRAKIEFKDVSFAYEGGRDVLKNISFTAEPGQTVALVGHTGSGKSSIINLMMRFYEFERGDILIDGKSIKSHEITELRKKTGLVLQDSFMFYGDINTNIRLYDKSITDEQIVDAAKFVQADGFIQTLSDEYNHKVIERGASFSSGQRQLISFARTVVTNPQILVLDEATANIDTETESLIQTGLKRMREGRTTIAIAHRLSTIKDADLILVLSKGRIIERGTHDSLIAEEGVYHSMYQLQNSGMDLDEAL

SEQ ID NO: 4394 - DNA, 1806 bp, Listeria innocua Clip11262
  CDS (1)..(1806): transl_table=11
atggaagtgatgaatgaacaagacgaaatgttagtgatgtccggtaaagaacaccgtgcagtattaaagcgaatgcttagttacacaaaatatcatattccaagtttgatttggactggaattcttgttcttcttgtaacgcttgcagatgtattcgcgccaattttaattaaaatattcttggatgattatttaacgccaatgaatttagaaatgcaagctttgttaattttaggagcggggtatttagggctgacaattgggaaatccattgtgtggtacttccaattgctttatttccaaaaaatcgcgcttgaaattgtgcagcaaatgcggattgacatttttacgaagcttcattcactcggcatgcgttattttgataaaacgcctgctgggagtatcgtttcgcgtgtgacaaatgatacggaagctgtgaaagatatgtttattaatgtgctttcaactgcgattcaaagtttgtttatgctcgtagggatttatgcggcgatgtttgcgctcaatgttcagttagcgctttatagcttgctgttattcccacttattgtctttattatttttgtttaccggaaatatagttcccagttttaccgggcaagacgagaaaaattaagccaattaaatgcgaaaattgctgagtcgatttcagggatgtcgattgtgcaacaatttaatcaagagcgccgtttagtaaaagaattcgagcacatcaacaaagactattatgatgttggaatgaaaaacattaaatttaatgcgctattacttgggccagccattgacttgatttacgcgctagcagttgtgattattcttagctttttcggggctgaatctttaactggtcctgtagctatcgggacaatttatgcgtttgttagttattttgatcggtttttagaagcgatttataacgtaatggaacgtttggctatgtatcaagaagccatcacagcagcgtctagagtatttcgtattatggatgaaacagaagaagtcccagctcaattaaatgatccagaagcaaaaattactcgtgcaaaaattgagtttaaagatgtttcgtttgcgtatgaaggcggacgtgatgtacttaaaaatattagctttacagcagaacctggtcaaacggtggctttagttggtcatacagggagtggtaaaagttcgattatcaatttaatgatgcgcttttatgaattcgagcgtggcgatattttaattgatggtaagtcgattaaatcccatgaaattgctgaattgcgtaagaagacgggacttgtcttacaagatagttttatgttttatggcgatattaacacgaatattcgtctttatgataaaaacattacggatgagcaaattgtggatgccgcgaaatttgttcaagcagatggttttattcaaacgttatccgatcaatatcaacataaagttattgagcgaggtgcttcattttcaagtgggcaaaggcagttgatttcttttgctagaacagttgtgacgaacccacaaattcttgtgttagatgaagcgacggcaaatattgatacagaaacagaaagcttaattcaaactgggttaaaacgaatgagagaaggacgtacaacgattgcgattgcgcatcgactttcgacaattaaggatgccgatttaattttagttttatctaaagggcgaattattgagcgtggtacacatgattcattaattgcagaacaaggtgtatatcactcaatgtatcaattacaaaatagcggaatggatttagacgaagcgctttaa

SEQ ID NO: 4395 - protein, 601 aa, Listeria innocua Clip11262
MEVMNEQDEMLVMSGKEHRAVLKRMLSYTKYHIPSLIWTGILVLLVTLADVFAPILIKIFLDDYLTPMNLEMQALLILGAGYLGLTIGKSIVWYFQLLYFQKIALEIVQQMRIDIFTKLHSLGMRYFDKTPAGSIVSRVTNDTEAVKDMFINVLSTAIQSLFMLVGIYAAMFALNVQLALYSLLLFPLIVFIIFVYRKYSSQFYRARREKLSQLNAKIAESISGMSIVQQFNQERRLVKEFEHINKDYYDVGMKNIKFNALLLGPAIDLIYALAVVIILSFFGAESLTGPVAIGTIYAFVSYFDRFLEAIYNVMERLAMYQEAITAASRVFRIMDETEEVPAQLNDPEAKITRAKIEFKDVSFAYEGGRDVLKNISFTAEPGQTVALVGHTGSGKSSIINLMMRFYEFERGDILIDGKSIKSHEIAELRKKTGLVLQDSFMFYGDINTNIRLYDKNITDEQIVDAAKFVQADGFIQTLSDQYQHKVIERGASFSSGQRQLISFARTVVTNPQILVLDEATANIDTETESLIQTGLKRMREGRTTIAIAHRLSTIKDADLILVLSKGRIIERGTHDSLIAEQGVYHSMYQLQNSGMDLDEAL

SEQ ID NO: 4396 - DNA, 1881 bp, Nostoc sp. PCC 7120
  CDS (1)..(1881): transl_table=11
atgagcatctaccaactttcccaaaaatcttacaaacgaaaccgttggcgtaacaatgactggcggctgttttcccgtttggttccttacgcccggcgtaatactaaactcctaattctggcaatggtactgctattaccacttgctttggctaatgccgtacaacccttgttaattggacaagctgtatccttaattcgtaaggaatctagcgcatacgagtttttgagaaatcgccccttgtcccaagggctacatataattgagggagtcttactctttacaattgttgttcgtttagcgttgacgggttaccaaggctatttgttacagaagttagggcaaaaaattacagccgctattcgccaagacttatttcatcatgtaacttctctggcagtccgtttcttcgaccgtacacccgttggtaaactaattacccgactcaccagtgatgtagaagtattgggagacgtattttccactggtgctattggcatcgtctctgacgtagttttgatggtggtcattactggtttaatgttttctatccagtggcaacttgcttctttgctcctggtgatgttgttaccagttacttggttaattatttacttccaacaagagtaccgcaaagctaattacaaagcgagggaagaactctctttattgaattcccagctacaagagaatgttttggggattaacgtagtccagttattccgccgggaaaagtttaatgctgagttatttcggactactaaccaacgctataccaaacaggtagatcaaactatcttttttgattcggctgtttccgcaactctggaatggattggcttaattgcgatcgctggtgtattgtgggtgggtggatggttactttcagacaatcaagttgattttgggactttatcgacctttattttatacgcccaacgcttattcgaccctttacgagattttgcggaaaaattcaccgtgattcaatctggatttacggccattgaacgggttagcgacattttagatgaaccgatagaaataagcgatcgctccaactctcgtttttccgtttttgatgctaaatttggttacattgatgaaattgtggctgatttggaatctcaaaatatcagcgacactccaaacatgggagaaatacgttttgaacacgtttggtttgcctataaagacgatgattacgtcatcaaagacttagactttattattcgtcctggcgaaaaagttgcattagtagggcctactggcgcaggtaaaagttctatcatccgtcttttatgtcgtctctacgaacccacccaaggacgtatcttagtcgatggaattgatatccgcgagttacctcaagcagaattacgccgttatatggcggtaattttacaagagggttttttatttgctggtaatgtcaaaagcaacattactttaggtgattactatacttttgaggaaattcaagcagccgcacaacaaacaaatattgccgaatttatcgaagaactacccttaggttacgatactaaattgcgagaacggggtacaaatctttctagtggacaaaagcaactgttagcttttgctcgtgcagctattcgcaatcctcaaattttggttctagatgaagccactgcaagtctcgatgttggtacagaagccttagtgcaggaagcattaaacgaattattaattgggcgaactgccatcattattgcccaccgcctgtctacaattcgcaacgtagatagaatttttgtgttaaaacgtggtgaattagtggaacaaggtagccatgaggaactgttaaattcaggagggctttattctactctgcataatctccaaatgctgggaacctag

SEQ ID NO: 4397 - protein, 626 aa, Nostoc sp. PCC 7120
MSIYQLSQKSYKRNRWRNNDWRLFSRLVPYARRNTKLLILAMVLLLPLALANAVQPLLIGQAVSLIRKESSAYEFLRNRPLSQGLHIIEGVLLFTIVVRLALTGYQGYLLQKLGQKITAAIRQDLFHHVTSLAVRFFDRTPVGKLITRLTSDVEVLGDVFSTGAIGIVSDVVLMVVITGLMFSIQWQLASLLLVMLLPVTWLIIYFQQEYRKANYKAREELSLLNSQLQENVLGINVVQLFRREKFNAELFRTTNQRYTKQVDQTIFFDSAVSATLEWIGLIAIAGVLWVGGWLLSDNQVDFGTLSTFILYAQRLFDPLRDFAEKFTVIQSGFTAIERVSDILDEPIEISDRSNSRFSVFDAKFGYIDEIVADLESQNISDTPNMGEIRFEHVWFAYKDDDYVIKDLDFIIRPGEKVALVGPTGAGKSSIIRLLCRLYEPTQGRILVDGIDIRELPQAELRRYMAVILQEGFLFAGNVKSNITLGDYYTFEEIQAAAQQTNIAEFIEELPLGYDTKLRERGTNLSSGQKQLLAFARAAIRNPQILVLDEATASLDVGTEALVQEALNELLIGRTAIIIAHRLSTIRNVDRIFVLKRGELVEQGSHEELLNSGGLYSTLHNLQMLGT

SEQ ID NO: 4398 - DNA, 1887 bp, Agrobacterium tumefaciens str. C58
  CDS (1)..(1887): transl_table=11
atggccacgaagaaaaaaaccatttcggcggattccagcaatccgacccagaccctgatcaatctctggccctatatgtggccagagggtcggtgggacctgaagatgcgggtgatctgggcaaccgtgttcctcatcgtcgccaagctggtgctgatcgcggttccctatttcttcaaatgggcgacggatgcgctgaacggcaagctcgacatggcagggctggttccggccttcctgctcggcgcggtggcgctggtcatcgcctataatctgacgcggctgatccaggtcgggctcaaccagctgcgcgattcgctgtttgccagcgtcggccaacatgcggtgcgccagctcgcctatcgtaccttcgtgcacatgcaccggctttcgctgcgtttccatctggagcgcaagaccggcgggctgtcgcgggtcatcgagcgcggcacgaagggcatcgaaaccattgtccgcttcaccattctcaataccgcaccgaccttcatcgaattcctgctgacggccatcatcttctgggcgtcctatggtttttcctatgtgctggtcaccgtcgtcaccgtctgggcctatatctggttcacggtcagggccagcaactggcgtatcggcatccgccgcgccatgaatgacagcgataccgacgccaataccaaggcgatcgattcgctactcaacttcgagaccgtcaaatatttcggcaatgaggaaatggaggcacggcgtttcgacgtcgccatggagcgttacgaaaaatcggcgatctcgatctggacctcgctcggctggctgaactttggccagggcgtgattttcggcatcggctccacgatcatgatggtgatgtcggcactggccgtgcagcgcggcgagcagaccatcggcgatttcgtgttcgtcaatgcgctgctgctgcagctttccgtgccgctcaatttcatcggcttcgtttatcgcgaaatccgccagggcctgaccgacatcgaacagatgttcgatcttctcgaggtggaggccgaagtcaccgacaggccggatgcgaagccgcttgcggccggtcccggcgcgatctccttccgcgacgtgcattttgcctacgaccctgaaagaccgatcctcaagggcgtttccttcgatgtgccggcgggcaagacggtggcgatcgtcggcccttccggtgcgggaaaatcgacgatctcgcggctgctttatcgtttctacgatattcaggagggcgccgttaccatcgacgggcaggatattcgcgacgtgacgcaaaagagcctgcgctcgatgatcggcatggtgccgcaggataccgtgctgttcaacgacaccctcgcctacaatatccgctacggtcgcccctccgccaccgacgaggagctgaaggcagcggcggatgcagcgcagatcagcgccttcatcggcaaactgccggacggttacgccaccatggtcggcgaacggggactgaagctttcgggtggcgaaaagcagcgcgtggcgattgcccggaccattctcaaggcaccgccgatcctgatcctcgacgaggcgacctcggcgctcgatacgcataccgagcaggaaatccagagcgccctcgacatcgtctcgaaaaaccgcaccacgctggtcatcgcccaccgcctctccacggtcatccacgcggacgaaatcatcgtgctgaaggaaggactgatcgccgagcggggaacgcatgcctcgctgatggcgcatgatggcctctacgcctcgatgtggagccgccagcgcgaggcgatccgcgccgaagagatgctgcgccatgttcgcgaaagcgacgatctcggcgtcgtggaccgcggcgaaccggcgcattga

SEQ ID NO: 4399 - protein, 628 aa, Agrobacterium tumefaciens str. C58
MATKKKTISADSSNPTQTLINLWPYMWPEGRWDLKMRVIWATVFLIVAKLVLIAVPYFFKWATDALNGKLDMAGLVPAFLLGAVALVIAYNLTRLIQVGLNQLRDSLFASVGQHAVRQLAYRTFVHMHRLSLRFHLERKTGGLSRVIERGTKGIETIVRFTILNTAPTFIEFLLTAIIFWASYGFSYVLVTVVTVWAYIWFTVRASNWRIGIRRAMNDSDTDANTKAIDSLLNFETVKYFGNEEMEARRFDVAMERYEKSAISIWTSLGWLNFGQGVIFGIGSTIMMVMSALAVQRGEQTIGDFVFVNALLLQLSVPLNFIGFVYREIRQGLTDIEQMFDLLEVEAEVTDRPDAKPLAAGPGAISFRDVHFAYDPERPILKGVSFDVPAGKTVAIVGPSGAGKSTISRLLYRFYDIQEGAVTIDGQDIRDVTQKSLRSMIGMVPQDTVLFNDTLAYNIRYGRPSATDEELKAAADAAQISAFIGKLPDGYATMVGERGLKLSGGEKQRVAIARTILKAPPILILDEATSALDTHTEQEIQSALDIVSKNRTTLVIAHRLSTVIHADEIIVLKEGLIAERGTHASLMAHDGLYASMWSRQREAIRAEEMLRHVRESDDLGVVDRGEPAH

SEQ ID NO: 4400 - DNA, 2079 bp, Drosophila melanogaster
  CDS (1)..(2079)
atgctgttaaactgtacgaggctcacacacctctgcacgactctccgggtcaggaaaagcagccaaataaggttgtccacatcatataatcaccatttgggcaggtgcctccaccatcgaaccgcccggtcgcttcaacacagccttccaccgccgaaccgttaccatagccacctgcacccaacactccgcatgccgtggtggtgcatgcgacgtggatttgcacagagcagcaagtggttagccaggaatgcaaaggcgaacttaccaactgcagttggagccggaatcgtgcccgcccccgtcaaaatgggcagatcccagtacggccgcctgctcagcctgactaaatcggagaaatgggtgctgacagcgggcattggctgtctggtagtttcttcagctatcaccatgtcggttcctctgttcctgggcaaggtcattgatgtagtctttaataaatcgggcatggatagcgcagccatggccaaattgggcgagtactcggtgctgctcttcgggatcttcgtgctgggcggattcgccaactttgcccgcgtccatctgtttgggaatgcggctctccgaatagtgcgcagtctaagatcccggctatacagatctatgcttatgcaggaggtgggttggttcgataccaagggcactggagaactaataaatcggctgagcaacgataccttaatggtgggcacctcgttgagccagaacgtatcggatggtctgcgatctgtagccatgatcggcgtcggcacaggcatgatgatctacacctccccccagttggctgccgtgagtgccttggtggttcccgcgatggcgggcatggccatcgtgtacggacgctacgtaaggcggatcaccaaagtagaactagacaagtacgccgagattatgaagtttgcggaggagcgatttggtaatgttaaaacggttaagaccttctgccgagaacaacaggaagtagctgccttcgatggcaaactggatgaagctctccagattggctacaaagagacacgtgccagagctattttctttggattgactggcttctgtggcaacttcatcattatttcagtgctgtattatggaggaaccttggtattacaagactcgctgacgattggagccctcacagccttcatgctgtacgccggttatgtggccatctcaatgaatgggttgtccaacttctatagccaactgaacaaaggcattggagcctcggagcgtatttgggagatcctggacagggagtgttctatacccattgacaaaggtgtcgtgccgttggagaagccggtgggcgaagttggattccagaatgtattctttacgtttccaactagacctgaatcggccgtcctcaccgacttttcgctaaatttgatgccgggaacaaccacagcggtagtgggtcgttcaggatctggaaagacgacgatagctctgctaatgctccgactatatgacccccaagggggaacagtgcatttggatggcatagatttgcgaacagtgaatccacagtggttgcgaaataacattggtgccgtcagtcaggagccggtgctcttctcgtgctccattcgagagaatattctttatggcgctaatcctggcgaaacaccgagcccggagcgactgcagcaggttattgaagatgcaaatgtcagccagttcaccgaccaactgccggatggactagacacgctcgtcggccaacggggaatgatgctcagtggcggacaaaagcaaagagtagccattgccagggctctaattaagaaccccgctatcctgattttggatgaagctaccagtgcgttggacgccgtttcggaaaatctggtgcagaatgccttagacaatcttatccagggacgcaccgtactgacaattgcccatcgactcagtacaattcgaaatgcggatcaaatcgccgtcttaagcgacggaaaaattgtagagcagggcagctacaacgagcttatgggcatccaggagggcgtcttccgggaactggtggccagccaagcgttcggcagccgaaactaa

SEQ ID NO: 4401 - protein, 692 aa, Drosophila melanogaster
MLLNCTRLTHLCTTLRVRKSSQIRLSTSYNHHLGRCLHHRTARSLQHSLPPPNRYHSHLHPTLRMPWWCMRRGFAQSSKWLARNAKANLPTAVGAGIVPAPVKMGRSQYGRLLSLTKSEKWVLTAGIGCLVVSSAITMSVPLFLGKVIDVVFNKSGMDSAAMAKLGEYSVLLFGIFVLGGFANFARVHLFGNAALRIVRSLRSRLYRSMLMQEVGWFDTKGTGELINRLSNDTLMVGTSLSQNVSDGLRSVAMIGVGTGMMIYTSPQLAAVSALVVPAMAGMAIVYGRYVRRITKVELDKYAEIMKFAEERFGNVKTVKTFCREQQEVAAFDGKLDEALQIGYKETRARAIFFGLTGFCGNFIIISVLYYGGTLVLQDSLTIGALTAFMLYAGYVAISMNGLSNFYSQLNKGIGASERIWEILDRECSIPIDKGVVPLEKPVGEVGFQNVFFTFPTRPESAVLTDFSLNLMPGTTTAVVGRSGSGKTTIALLMLRLYDPQGGTVHLDGIDLRTVNPQWLRNNIGAVSQEPVLFSCSIRENILYGANPGETPSPERLQQVIEDANVSQFTDQLPDGLDTLVGQRGMMLSGGQKQRVAIARALIKNPAILILDEATSALDAVSENLVQNALDNLIQGRTVLTIAHRLSTIRNADQIAVLSDGKIVEQGSYNELMGIQEGVFRELVASQAFGSRN

SEQ ID NO: 4402 - DNA, 2286 bp, Drosophila melanogaster
  CDS (1)..(2286)
atgctgcgcctactcgtgtccaattgcggcaggagcagcgacatatttagtcgccacctgctgcagcccacgcagcagccactgccacgcctccagaatgccgcccgcctgatgcgccaacatttgcgtggaacgaacgctccccaaccgcccgcgataccgcccacaaatgccagccgcctgctgcagacgacacgcctgcttgtgtggggcggtggtagtttagctatcggtctgggcgcccgttcctggtgggcggggcatcgcggagcgatcgttcattgcgaaggcagccggctggccattcgaaaggaggaggaggaggaggacactgcgtcggagcagcacttcgactggaagcgtttgtggacctacttggagccacatctctgggagctgatcggggccgtatgcgccgccctgatagtggcttatatcaacatacgcatcccaaatcttctcggtgacctggtaaacacactggccagatatgccaacacgtacgtgatggatccgattaacaactcgttcgtaaaggacgtgagcaaaccggccagcaatctgctgagcctatacatgctgcaatctggtttcacctttatgtacatctacctgttgagccgcgtcggtgagcagatggcagccaagatgcggcaggatctgttcacgcagattgtcgtccaggacatcgcattcttcgatgagaatcgaacgggcgagctggtcaatcgactaaccgccgatgtacaggacttcaagacctcgttcaagcagttcgtctcccagggactgcgaagtgctgcccagctgattggcggcagtatatcgctcttcatgatttcaccgcacatggccgccattgcgctggccagcgttccgtgcgtggttatgttcatgacgtatttgggcaagaaactgcgctctctaagcaaaagctcacaggcgcaggcggaacgagcgacgggtgtctgcgaggaggcgctgtccaacatccgaacggttagatccagtgcctgtgaataccgcgagatgcagctgttcgaggcggagaccaatgaggcggctcgcctggcgcagaaactcggctacggcatcgcaatcttccagggcctgaccaacttcttcctcaatacactagtcctatctacgctctttatgggcggccacctcatgtctacggagagtctgtcgccgggtgctctgatggccttcctggtcgcttcgcagggtgtgcagcgatcccttgcccagggatccatcctgctgggcaccatgatcagaggcatgtcggccggcagtcgagtcttcgagttcctatcgctgcagccacaggtggaattgctgcgcggctacatcatcccgcaggagcggctgcacggcgagattcgattcgagaacgtctcattcgcatatcccatgcaacccgatcatctggtgctcaaggactttagcctgacgctccgcccgggccagacggtggccctggtgggagccagtggatcgggcaagtcgacgatagcgtcgctggtggaacgcttctacgaaccatcggcgggcaatatcaaactggacggctacaagctgtcggacatatcgccctattggctgcggtccaatgtcctcggtttcatcgaacagcagccggtgctgtttggcacatcgatattggagaacatccgatatggtaaaccagatgcgggcgaggaggatgtgtatgcggcagcgcgtctatcacaatcgcacgactttgtgaccgccctgcccgatggatatgcgacgcatgtgggcgaacggggcacccagttgagcggcggtcagcggcaacgcatcgccattgcacgggcgctgctcaagaatccgcgcatcctcatcctcgacgaggcgacgagtgccttggacgccaccagcgaggcggaagtgcagaaggcactcgatacagtggtccagaatcgcaccactctggtgattgcccatcgcttgtccacgatacgaaacgctgacctcattgtcgtccttgatcagggacgcgtcgtggagaccggcaaacatgacgaactgatgggcaagcggggcctgtactttgagctggtgcgtcagcaggaacgacgggacatccaggagcaagtccaggcggtggaggacgttgtggccgtcaaggagcagcaggcaactgcaacagaaacttcaacagccgcaacaattgcaactgccgcagaaacttccgcagcaacagtgacagtggggagcagcagcttcggtggcagggcaaacgcagcgcaaggatag

SEQ ID NO: 4403 - protein, 761 aa, Drosophila melanogaster
MLRLLVSNCGRSSDIFSRHLLQPTQQPLPRLQNAARLMRQHLRGTNAPQPPAIPPTNASRLLQTTRLLVWGGGSLAIGLGARSWWAGHRGAIVHCEGSRLAIRKEEEEEDTASEQHFDWKRLWTYLEPHLWELIGAVCAALIVAYINIRIPNLLGDLVNTLARYANTYVMDPINNSFVKDVSKPASNLLSLYMLQSGFTFMYIYLLSRVGEQMAAKMRQDLFTQIVVQDIAFFDENRTGELVNRLTADVQDFKTSFKQFVSQGLRSAAQLIGGSISLFMISPHMAAIALASVPCVVMFMTYLGKKLRSLSKSSQAQAERATGVCEEALSNIRTVRSSACEYREMQLFEAETNEAARLAQKLGYGIAIFQGLTNFFLNTLVLSTLFMGGHLMSTESLSPGALMAFLVASQGVQRSLAQGSILLGTMIRGMSAGSRVFEFLSLQPQVELLRGYIIPQERLHGEIRFENVSFAYPMQPDHLVLKDFSLTLRPGQTVALVGASGSGKSTIASLVERFYEPSAGNIKLDGYKLSDISPYWLRSNVLGFIEQQPVLFGTSILENIRYGKPDAGEEDVYAAARLSQSHDFVTALPDGYATHVGERGTQLSGGQRQRIAIARALLKNPRILILDEATSALDATSEAEVQKALDTVVQNRTTLVIAHRLSTIRNADLIVVLDQGRVVETGKHDELMGKRGLYFELVRQQERRDIQEQVQAVEDVVAVKEQQATATETSTAATIATAAETSAATVTVGSSSFGGRANAAQG

SEQ ID NO: 4404 - DNA, 1971 bp, Corynebacterium glutamicum ATCC 13032
  CDS (1)..(1971): transl_table=11
atgagtaatactgcaggcccccgcgggcgttcccatcaggcagacgccgcgccgaatcaaaaggcacagaatttcggaccatctgccaaaaggcttttcggaattctaggccatgaccgtaacaccttaatttttgttatcttcctagccgtcctgagcgttggacttaccgtcttgggcccatggttgctgggtaaagccaccaacgtggtgtttgaaggattcctatctaagcgcatgccggctggtgcgtcaaaggaagatatcatcgcgcagttgcaggctgcaggtaaacataatcaggcttccatgatggaagacatgaaccttgttccaggctcaggcattgattttgaaaaattagccatgatcctcggactggtgatcggtgcttatctcatcggtagcctgttgtcgttgttccaggcgcggatgctcaaccgcatcgtgcaaagtgccatgcaccggctgcgcatggaggtggaggaaaaaatccaccgcctaccgctgagctatttcgattccatcaaacgtggtgatctgcttagccgtgtgaccaacgatgtggataatatcggtcaatccctgcaacaaaccttgtcacaggcgatcacttccctactgaccgtcatcggtgtgttggtgatgatgtttatcatctccccactgctcgcactcgtggcgctggtatccattccggtcaccatcgtggtcactgtggtggttgcgagccgttcccagaaactctttgcggaacagtggaagcagaccggtattttgaatgcgcgcgtggaggaaacctactctggccacgccgtggttaaggttttcggacaccaaaaggatgttcaagaagcattcgaggaagaaaatcaggctgtgtataaggccagctttggtgcccagttcatctctggcatcatcatgcccaccatgatgtttgtgggtaacttgagctacgtggccatcgcagtcgttggcggcttacaggttgcctctggatcactatccatcggtggcgtgcaatcctttatccaatactcacgccaattcacccaaccgctgtcgcaattgggttccatggccaacttgctgcagtccggcgtggccagcgccgagcgcgtttttgagcttatcgacgaagacgaacaggacagtgatcctgcgcagcccaacaccgttgctgctggcgcgaaccgtctggaattcaaagatgtgtccttcggctactcggaggatcgtccactgatcaacaacttggatctggaagttcgttccggcagcaccattgccatcgtgggtcccaccggtgcgggcaagaccacattggtgaatttgatcatgcgtttctacgacatcaacagcggttccatcactcttggtgaaacagcacaagacgccgtggatatccgcaccatggctagagaagatctgcgatcacgaaccggcatggtgttgcaggatacgtggctgtttgccggaaccatcagggataacattctttacggtagacctgaagcaactgaggaagaaatgcttgctgcgtccaaggccgcctacgtggatcgttttgtccgttccctgccagaaggctacgacaccgtacttgatgatgaagccatgaacctatcggtgggtgaacgccagctgatcaccatcgcgcgtgcattcttggctaatccccgactgctgattctggatgaagccacctcatcggtggatacgcgtaccgaattgttgattcagcgcgccatgtccaagctgcgccaagaccgcaccgccttcgtcatcgcgcaccggttgtccacgattcgtgatgccaacctgattttgatgatgaaagacggcgagatcgtggagcagggcaatcaccgtgagttgatggccctggagggcgcatattgggagttgtataactcccaattcaacgcccccgcgaaagaagaattacaggctgacggagatcactga

SEQ ID NO: 4405 - protein, 656 aa, Corynebacterium glutamicum ATCC 13032
MSNTAGPRGRSHQADAAPNQKAQNFGPSAKRLFGILGHDRNTLIFVIFLAVLSVGLTVLGPWLLGKATNVVFEGFLSKRMPAGASKEDIIAQLQAAGKHNQASMMEDMNLVPGSGIDFEKLAMILGLVIGAYLIGSLLSLFQARMLNRIVQSAMHRLRMEVEEKIHRLPLSYFDSIKRGDLLSRVTNDVDNIGQSLQQTLSQAITSLLTVIGVLVMMFIISPLLALVALVSIPVTIVVTVVVASRSQKLFAEQWKQTGILNARVEETYSGHAVVKVFGHQKDVQEAFEEENQAVYKASFGAQFISGIIMPTMMFVGNLSYVAIAVVGGLQVASGSLSIGGVQSFIQYSRQFTQPLSQLGSMANLLQSGVASAERVFELIDEDEQDSDPAQPNTVAAGANRLEFKDVSFGYSEDRPLINNLDLEVRSGSTIAIVGPTGAGKTTLVNLIMRFYDINSGSITLGETAQDAVDIRTMAREDLRSRTGMVLQDTWLFAGTIRDNILYGRPEATEEEMLAASKAAYVDRFVRSLPEGYDTVLDDEAMNLSVGERQLITIARAFLANPRLLILDEATSSVDTRTELLIQRAMSKLRQDRTAFVIAHRLSTIRDANLILMMKDGEIVEQGNHRELMALEGAYWELYNSQFNAPAKEELQADGDH

SEQ ID NO: 4406 - DNA, 1806 bp, Thermoanaerobacter tengcongensis MB4
  CDS (1)..(1806): transl_table=11
atggaataccagcaagaagaaatcatggcaaagccttttgactggaaaataatgaaacgtctccttacctatgcaaagccttattggttttatatactaataggagtcatagcaattttacttgtaaccgtctcaaacctcttaaggccttaccttgtacagcaagcaatagataactacataaacaatccccacatctccaaagaacaggcgatacaaggtgtaataagaattggaagtctgtacatagtaataataacagtagcatttttgataaattatgggcaggtgtacctcatccaatacacaggtcaaaaaataatatttaacttaaggcagcaaatttttgaacacctgcaaaaactctccctatcattttttgatagaaaccctgttggtaggttagtaactcgcgtaacaaatgatacagacactttaaatgaaatgtacacaagtgtcataacaaacctatttaatgatgtgttcataatcgcgggaatcgtcatagccatggtgagttacaacttaaagcttgcatttatcgctctatctaccactcctttgatactgacaggaatgtacatttacagaaagcttgcttctcaggcatatcgccttgtgagagtgagacttgcccggataaatgcctttctttcagaacacataagcggcatgaaaatagttcagctttttgtgacggaaaacaaaaaaatggaggagtttaaaaaaatcaacaaagagtactacgacgccaacatgagacagcttacaatatttgctatattccgcccttctatggacgtcatttactctctcactctagccctcttgatatggtatggaggcagagatataatcgctgggaaaatagaatttggcgtgctgtacgcttttgtaaattaccttcaacagctttttcagcccatattcgacatatctgaaaaatacgacatacttcagtcagcaatggcatctgcagagagaatattcattctcttagatactaaagaggaagttaaagaccctgaagaccccattccccttgaggaagttaaagggaaaattgagtttaaaaacgtgtggttttcttacaatggcaaagagtgggtgctaaaagatgtatcttttgaagtaaatcccggagaaacagtggcttttgttggagctacaggtgcaggtaaaacttctataataaaccttttgtgcagattttacgacattcaaaaaggagaaatattaattgacggaattgacataagaaaagtaaggcagcaagacttgagaaaacacatcggcatagtccttcaggatgtattcctgtttacaggagacataaagtcaaacataaggctaaataacaaaaacataactgacaacgacatatacagagtagcgaagtacgtaaatgcccatcagttcataaaaaaactcccagaaggatataactcaaaggtcacagaaagagggtcaaccctttcagcaggtcagaggcagcttttagctttcgctagagctttagcatttaaccccaagatattagttttagatgaagctacagcaaacatagacacagaaacagaaaggctgatacaggacgctcttgaaaaattgacaaaagggcgcactacgcttgtcatcgcccataggctttccacaatacagcacgctgacaaaataatagtccttcacaaaggccgcataagagaaataggaactcatcaggaacttcttcagaaaaaaggcctttactacaacctctatatgctgcagtataaagatcagctgtcagaaagtaaaatcagctag

SEQ ID NO: 4407 - protein, 601 aa, Thermoanaerobacter tengcongensis MB4
MEYQQEEIMAKPFDWKIMKRLLTYAKPYWFYILIGVIAILLVTVSNLLRPYLVQQAIDNYINNPHISKEQAIQGVIRIGSLYIVIITVAFLINYGQVYLIQYTGQKIIFNLRQQIFEHLQKLSLSFFDRNPVGRLVTRVTNDTDTLNEMYTSVITNLFNDVFIIAGIVIAMVSYNLKLAFIALSTTPLILTGMYIYRKLASQAYRLVRVRLARINAFLSEHISGMKIVQLFVTENKKMEEFKKINKEYYDANMRQLTIFAIFRPSMDVIYSLTLALLIWYGGRDIIAGKIEFGVLYAFVNYLQQLFQPIFDISEKYDILQSAMASAERIFILLDTKEEVKDPEDPIPLEEVKGKIEFKNVWFSYNGKEWVLKDVSFEVNPGETVAFVGATGAGKTSIINLLCRFYDIQKGEILIDGIDIRKVRQQDLRKHIGIVLQDVFLFTGDIKSNIRLNNKNITDNDIYRVAKYVNAHQFIKKLPEGYNSKVTERGSTLSAGQRQLLAFARALAFNPKILVLDEATANIDTETERLIQDALEKLTKGRTTLVIAHRLSTIQHADKIIVLHKGRIREIGTHQELLQKKGLYYNLYMLQYKDQLSESKIS

SEQ ID NO: 4408 - DNA, 1929 bp, Streptomyces coelicolor A3(2)
  CDS (1)..(1929): transl_table=11
atggccgggcctgcgggtcgcatgatggccgggggcggccccgaccagcgatcgatggacttcaaggggtcgagcaaacggctcgtctcccagttccgcccggagcgggcgacgctgttcacgctgctggcgtgcgtcgtcgtcagcgtcggtctcaacgtggtcgggccgaagatcctcggccgggccaccgacctggtcttcgcgggcatcgtcgggcgggacatgccgtccggggccacgaaggagcaggttctggccaccatgcgcgagcacggtgacggcaacgtcgccgacatgctccgcagcacggacttcgtcccggggcagggcatcgacttcggcgcggtgggcgaggtgctgctgctcgcgctggcgacgttcgcggtggccggtctgctgatggcggtggccacccgcctggtgaaccgggcggtgaaccggacgatgttccggctgcgcgaggacgtccagaccaagctgtcccggctgccgctgtcctacttcgacaagcgccagcggggcgaggtgctcagccgcgccaccaacgacatcgacaacatcgggcagacgctccagcagtcgatgggccagctcatcaactcgctgctcaccatcatcggcgtgctcgcgatgatgttctacgtctcctggatcctggcgctggtcgccctggtgaccgtgccgctgtccttcgtggtggccacgcgggtgggcaagcggtcgcagccgcagttcgtgcagcagtggcgctcgacggggcagctgaacgcgcacatcgaggagatgtacaccgggcacgcgctggtgaaggtgttcgggcgccaggaggagtcggcgaagcagttcgccgagcagaacgacgcgctgtacgaggccgggttcaaggcgcagttcaacagcggcatcatgcagccgctgatgatgtgcgtgtccaacctgaactacgtgctggtcgcggtggtcggcgggctgcgggtggcctcgggccagctgtccatcggcgacgtgcaggccttcatccagtactcccggcagttctcgatgccgctgacgcaggtcgcgtcgatggcgaacctggtgcagtcgggcgtggcgtcggcggagcgggtgttcgaactcctcgacgccgaggagcagtcggccgaccccatcccgggcgcccggcccgaggacctgcgcgggcgggtggaactggagcacgtctccttccgctacgacccggagaagccgctgatcgaggacctgtcgctgaaggtggagcccggccacacggtcgccatcgtcggcccgacgggcgcgggcaagacgaccctggtcaacctgctgatgcggttctacgaggtctccggcgggcggatcaccctggacggcgtcgacatagcgaagatgtcccgggacgagctgcgggccggcatcggcatggtgctccaggacacctggctgttcggcggcaccatcgcggagaacatcgcgtacggcgcctcgcgggaggtcacccgcggggagatcgaggaggccgcgcgggccgcgcacgccgaccggttcgtacggacgctgccggacggctacgacacggtgatcgacgacgagggcacgggggtgagcgcgggtgagaagcagctgatcaccatcgcgcgggcgttcctgtccgacccggtgatcctggtcctcgacgaggcgacgtcgtccgtggacacgcgcaccgaggtgctgatccagaaggcgatggcgaagctcgcgcacgggcggacgtcgttcgtgatcgcgcaccggctgtcgacgatccgggacgcggacacgattctggtgatggaggacggggcgatcgtggagcagggggcgcatacggagctgctgaccgcggacggcgcgtacgcgcggttgtacaaggcgcagttcgcggaggctgtggccgaggtggggtga

SEQ ID NO: 4409 - protein, 642 aa, Streptomyces coelicolor A3(2)
MAGPAGRMMAGGGPDQRSMDFKGSSKRLVSQFRPERATLFTLLACVVVSVGLNVVGPKILGRATDLVFAGIVGRDMPSGATKEQVLATMREHGDGNVADMLRSTDFVPGQGIDFGAVGEVLLLALATFAVAGLLMAVATRLVNRAVNRTMFRLREDVQTKLSRLPLSYFDKRQRGEVLSRATNDIDNIGQTLQQSMGQLINSLLTIIGVLAMMFYVSWILALVALVTVPLSFVVATRVGKRSQPQFVQQWRSTGQLNAHIEEMYTGHALVKVFGRQEESAKQFAEQNDALYEAGFKAQFNSGIMQPLMMCVSNLNYVLVAVVGGLRVASGQLSIGDVQAFIQYSRQFSMPLTQVASMANLVQSGVASAERVFELLDAEEQSADPIPGARPEDLRGRVELEHVSFRYDPEKPLIEDLSLKVEPGHTVAIVGPTGAGKTTLVNLLMRFYEVSGGRITLDGVDIAKMSRDELRAGIGMVLQDTWLFGGTIAENIAYGASREVTRGEIEEAARAAHADRFVRTLPDGYDTVIDDEGTGVSAGEKQLITIARAFLSDPVILVLDEATSSVDTRTEVLIQKAMAKLAHGRTSFVIAHRLSTIRDADTILVMEDGAIVEQGAHTELLTADGAYARLYKAQFAEAVAEVG

SEQ ID NO: 4410 - DNA, 1848 bp, Streptomyces coelicolor A3(2)
  CDS (1)..(1848): transl_table=11
atgacgagcacgcagaccagggagcgaccgcccgcccggaagaccggcgcgaagaacgcgccggagcccggaccgcccgccccgccggtccgcaaggtcgggctgcgctccctgttcccctatctccagggctactggccgacgctggggatcgtcgcggtgctctccctggtggtcaccctgctgaccctcagccagccggtgctgacccgggacgtactggccgacatcgaggcggacaggccggtggggcggctggtggccctgctcatcggcgtcctcgtggtggtggccgtgctcggcggggtccgcgactacctgctccagcgggccgccgaagggctcgtgctgaccgcccgccgccggctggtggcccggctgctgcggctgcccatcaccgagtacgaccagcgccgcaccggcgacatgctctcccgggtcggcgccgacaccaccatgctgcgcgcggtggtcacctccggcctcttcgacaccgtgaccaacgtcgtcatggtcggcggctccgcgctcatgatgtgcctgatcgaccccaccctgttcgcggccaccgccctcggcctcggactcggcgtcctcgccgtcgtcgggctctcccggcgggtgcggggcgcctcccgcgacgcccaggaccggatcggcgagatgacctccgccgtcgagcgcgccatctccgccgtgcgcaccatccgcgccagcggcgccgaggaacgcgagggcaaggccgtcgacgggtacgcgcagcaggcctaccacgccgggatgcgcatcgcccggctccaggcgatgatcaacccgatcacctcgaccaccatccaggtggcgttcctcgtcgtcctcggcctcggcggcgcccgggtggccagcggcgccatccaggtcggcgacatggtcgccttcgtgctcttcctgttcatgctgtggttcccgctcggccgcgcgctgaccgcctactcccggctccagtccgggctgggcgccctccagcgcatcgaggagatggtggacctgccgcaggagaccgacgccgtcgcgggaccgctcacggtgcgcgaacgcacccggcccgggaccgagcccgccgacgcggaaccgcggccgcccgcgatcgagttcgagggcgtcagcttcggctacggcgacggcgagacggtcctgcgggacgtctccctcgccgtcccccgcggcacccgcaccgcgctcgtcggcccctccggagcgggcaagtccaccctcctgtcgctggtggaacggttctacgacgtcacctccggcaccgtccgggtcggcggcaccgacgtacgcgacctgccccgccgcgaactgcgcggacgcctcggctacgtcgagcagtcggcgccggtcctcgccggcaccgtccgcgacaacctctccctcgccgcgcccgacgccaccgacgacgacatgcgggaggtgctgcgctcggtcaacctcatgggcgtgatcgagcgggcgccgcagggcctggacaccgaggtcggcgagggcggcgtcctgctgtccggcggcgaacggcagcgcctggcgctggcccgcaccttcctggccgcgccgccgatcatgctgctcgacgaggcgaccagcaacctcgacgcccgcaacgaggccctgatgcgggaggccatcggcaccgtcaccgccgaccggacgctgctcgtggtcgcccaccggctgtccaccgtcgtggacagcgaccagatcgtcgtcctggagcacggccgggtcgtcgccgcgggccggcacgaggaactcaccggcaccagccccctctaccgggagctggccagccaccaactgctcatccagtag

SEQ ID NO: 4411 - protein, 615 aa, Streptomyces coelicolor A3(2)
MTSTQTRERPPARKTGAKNAPEPGPPAPPVRKVGLRSLFPYLQGYWPTLGIVAVLSLVVTLLTLSQPVLTRDVLADIEADRPVGRLVALLIGVLVVVAVLGGVRDYLLQRAAEGLVLTARRRLVARLLRLPITEYDQRRTGDMLSRVGADTTMLRAVVTSGLFDTVTNVVMVGGSALMMCLIDPTLFAATALGLGLGVLAVVGLSRRVRGASRDAQDRIGEMTSAVERAISAVRTIRASGAEEREGKAVDGYAQQAYHAGMRIARLQAMINPITSTTIQVAFLVVLGLGGARVASGAIQVGDMVAFVLFLFMLWFPLGRALTAYSRLQSGLGALQRIEEMVDLPQETDAVAGPLTVRERTRPGTEPADAEPRPPAIEFEGVSFGYGDGETVLRDVSLAVPRGTRTALVGPSGAGKSTLLSLVERFYDVTSGTVRVGGTDVRDLPRRELRGRLGYVEQSAPVLAGTVRDNLSLAAPDATDDDMREVLRSVNLMGVIERAPQGLDTEVGEGGVLLSGGERQRLALARTFLAAPPIMLLDEATSNLDARNEALMREAIGTVTADRTLLVVAHRLSTVVDSDQIVVLEHGRVVAAGRHEELTGTSPLYRELASHQLLIQ

SEQ ID NO: 4412 - DNA, 1884 bp, Streptomyces coelicolor A3(2)
  CDS (1)..(1884): transl_table=11
atgaccgcgcccacggccaccgcgccgggcagggaacagccggagcgccccgggcccggggacccggccgaggcggggaccggcaccgccgccgacgacggcttcgaccaggacgtcctgcccagcccgccgggtgcgaccggcgccctgctgcgctccctgctgatgcccatgaaggcccgggtcgccctcaccgtcctcctcctgctgctccagcaggcggccgtgcaggcgggcccgctgctggtggcgtacgccatcgaccacgccgtgccggcgctgcgggacgacgaccacggcccgctgatcgcggtgggcgccggctacctgctgtgctcgctggcggcgggcggactccagtacgccttcatcgcggcggcggcccgcgtcagccaggacgtgctgctcgacctgcgcgggcgcatcttccggcacgcgcaggcgctgagcgtcgacttccacgagcgctacacctcgggccgcctcatctcgcgttccaccacggacgtggagtccctgcgcgagctgctcgacgaggggctccaggagctggtgacggtcatcctgtccttcgtctacatcgccgcgctgctgctctggctggacctgggcctgggcgccgtggcggtggcgtcgttcgtgccgctgtacgcgctggtccggctctaccagcggcgcgcggggcgggtgtaccggcagcggtccacggcgatcgcggcggtgatcgtgaagttcgtggagacgatgaacggcatccggccggtgcgctccttccgccgggaggccgccaatgacgccgacttcgcggtgctgaaccaccggcacgagcggaccaacggcgacgcgctgctggagatggcgcgttacgtggtcggttcccgcctggtcgccaacacggccgtcgcgggcatcgtgctgtggggcgcctaccgggtcgcggacggcacgctggcgctcggggtgctggcggcggcggtgctgtacctgcgccggctgtacgacccgatcgaccggctgggcatgttcctcaactcgtaccagtcggcggccgcctcgctggagaagatcgccgggctgctggcccagacgccgtcggtgccggagccgaccgcgccgaaggagctgccgccgctggagtcggagcaccccggccgcgaggtcgtcttcgactcggtgagcttcggctaccgcaccggcggtgaggtcctgccgcgcttcgggctgacgctcccggccggtcagacggtcgccgtcgtgggctcgaccggcgccggcaagtcgacgctggccaagctgctcgcccggttctacgacccctccgcagggcgggtcctgctggacggcaccgacctgcgcgacctggccgtgcccgaactgcggcgcggggtggtgatggtgacgcaggaggcgttcctgttctccggcacggtcgccgacaacatcgccatcggccgtccggaggcgacgcgggaggagatcgagcgggccgcgaaggcgatcggcgcccacgacttcatcgccgcgctgccggacggctacgacaccgacgtacgcaagcggggcggccgtatctccgccggtcagcggcagctcgtggcgttcgcgcgggcgctgctcgccgacccggcggtgctgatcctggacgaggcgaccagttcgctggacatccccggggagcgggcggtgcagcgggcgatgacgacggtgctgaagggccgtacggcggtcgtcatcgcgcaccggctctccaccgtggagatcgccgaccgggtgctggtgatggagcacggccggatcgtcgaggacggcgcgccggacgaactcatcgccggtacgggccggttcgcggatctgcaccgcgcctggcgggacagcctggcgtga

SEQ ID NO: 4413 - protein, 627 aa, Streptomyces coelicolor A3(2)
MTAPTATAPGREQPERPGPGDPAEAGTGTAADDGFDQDVLPSPPGATGALLRSLLMPMKARVALTVLLLLLQQAAVQAGPLLVAYAIDHAVPALRDDDHGPLIAVGAGYLLCSLAAGGLQYAFIAAAARVSQDVLLDLRGRIFRHAQALSVDFHERYTSGRLISRSTTDVESLRELLDEGLQELVTVILSFVYIAALLLWLDLGLGAVAVASFVPLYALVRLYQRRAGRVYRQRSTAIAAVIVKFVETMNGIRPVRSFRREAANDADFAVLNHRHERTNGDALLEMARYVVGSRLVANTAVAGIVLWGAYRVADGTLALGVLAAAVLYLRRLYDPIDRLGMFLNSYQSAAASLEKIAGLLAQTPSVPEPTAPKELPPLESEHPGREVVFDSVSFGYRTGGEVLPRFGLTLPAGQTVAVVGSTGAGKSTLAKLLARFYDPSAGRVLLDGTDLRDLAVPELRRGVVMVTQEAFLFSGTVADNIAIGRPEATREEIERAAKAIGAHDFIAALPDGYDTDVRKRGGRISAGQRQLVAFARALLADPAVLILDEATSSLDIPGERAVQRAMTTVLKGRTAVVIAHRLSTVEIADRVLVMEHGRIVEDGAPDELIAGTGRFADLHRAWRDSLA

SEQ ID NO: 4414 - DNA, 1983 bp, Streptomyces coelicolor A3(2)
  CDS (1)..(1983): transl_table=11
atgcccacgaaacctgcacccgccacggatctcgtcccggacgccgccccggacgccgccgagaagcgttccaccgtacgtgccctgctgcggctgtggccctatgtgcgaccggtgcgcgcgcggttggggacggccgcggtcatagcgatcctcgcctcctgcgtgggtctggtgatcccgctggtcctgaagtggatggtggacgggccggtcgccgacggtgatccggcgggcgtgtggctcggggcgctgtacctgctgctcctcgggctggcggaggcgctgctgttcggtgtgcggcggtggctggtggccaggccgctggcgggtgtcgaggcgggcatgcgggcggatctctaccggcgtctgcaacgcctgccggtggccttccacgaccgctgggcctcggggcagttgctgtcgcgcgggacgaccgacctgatgctgctccgcatgttcctcgccttcccgctgacgttcctgctggtcaacggcgtgacgatcctggtcggcgtgggcatcatgctggtccaggactggacgctcgggctggtcatcctggggcccgccatcccggtgatgatcacctgcgggatcttcgagaagaagtactccgcggtggcgcggcgcgcgcaggaccaggtcggggatctgacgaccgtggtcgaggagagcgtgctcggcatccggatcgtcaagggcttcggccggcaccgcagccaggcccgcgccttccacgaactgtcgcacacactgcgcggcacggagctgcgcaaggcgcggctgctcgcggccatctgggcggtcatcgtgacgctgcccgaggtggcgatcggtgcggcgctggtggtcggggcggtccaggtggcggacggggcgctgtcggcggggacgctggtggcgttcctgtccacggcgctggcgctgcggtggccggtggagtccatcggcttcctgctggcgatgagccaggaggcggcgacggccacggaccggtacttcgaggtgatggacgcggaggtggaagccgacccggctgcgggcggtcgtgccgccggggcgatgggggtccccccgctcgagcgaagccgagagcgggggagggtggacgatgggggtacctcccaggccgtccgggcaccgggggaggcaccgtccagcgagcagcgccccctccccgaggtcagcgccaacgccggtcgtccacaaggcctgcgcttcgagcacgtccggttccggtatcccgacgccgctcccgactccacgccgctcctgacggacgtcgacctgcacatccgtcccggcgagtccatggccctggtcggtgccaccggcagtggcaagacgacgctgaccgcgctcgtcccgcgcctgcacgaggtgaccgagggccggatcacgctggacggcgaggacatcaccgccctgtcccgcgaggagctgcgttcgatggtcgccgtggccttcgaggagcccaccctcttctcggccaccgtcggtgagaacgtgctgatgggtgcgggtgagggcgccgacgacgaggcgctggaccgcgcgctcgccgtcgcgcaggccgacttcgcgcacgcgctcccgcagggcaccggcacccaggtcggcgagcagggcctcagcctctccggcggccagcgtcagcgcctcgcgctcgcgcgggccgtggtgggcagaccgaggttcctcgtcctggacgacccgctgtccgcgctggacgtgcacacggaggccgccgtcgaggccgccctgcggcaggtcctcgcggacaccaccgcgctgatcgtggcccaccgcccttccaccgtcctgctcgccgaccgcgtcgccctgctgtccgagggccgcatcgccgccgtcggcacccatcacgaactgctgcgcaccagccccgagtacgcccatctgatgtccgggtccgacgggcacgagggcgacgaggggccccaggaaggagacggccgatga

SEQ ID NO: 4415 - protein, 660 aa, Streptomyces coelicolor A3(2)
MPTKPAPATDLVPDAAPDAAEKRSTVRALLRLWPYVRPVRARLGTAAVIAILASCVGLVIPLVLKWMVDGPVADGDPAGVWLGALYLLLLGLAEALLFGVRRWLVARPLAGVEAGMRADLYRRLQRLPVAFHDRWASGQLLSRGTTDLMLLRMFLAFPLTFLLVNGVTILVGVGIMLVQDWTLGLVILGPAIPVMITCGIFEKKYSAVARRAQDQVGDLTTVVEESVLGIRIVKGFGRHRSQARAFHELSHTLRGTELRKARLLAAIWAVIVTLPEVAIGAALVVGAVQVADGALSAGTLVAFLSTALALRWPVESIGFLLAMSQEAATATDRYFEVMDAEVEADPAAGGRAAGAMGVPPLERSRERGRVDDGGTSQAVRAPGEAPSSEQRPLPEVSANAGRPQGLRFEHVRFRYPDAAPDSTPLLTDVDLHIRPGESMALVGATGSGKTTLTALVPRLHEVTEGRITLDGEDITALSREELRSMVAVAFEEPTLFSATVGENVLMGAGEGADDEALDRALAVAQADFAHALPQGTGTQVGEQGLSLSGGQRQRLALARAVVGRPRFLVLDDPLSALDVHTEAAVEAALRQVLADTTALIVAHRPSTVLLADRVALLSEGRIAAVGTHHELLRTSPEYAHLMSGSDGHEGDEGPQEGDGR

SEQ ID NO: 4416 - DNA, 1875 bp, Streptomyces coelicolor A3(2)
  CDS (1)..(1875): transl_table=11
atggagaccacggcgtggacgcagctgtacagcgtcatgaacgccaaagacgagcgccgccccttcgcccgtgccacgatgcgccgcatcggcgcgttcgcccgcccgcaccgccgccgcatcgtccgtttcgtgctgctcggggtggcgaccgcactgctcgccgtcgccacccccgtcctggccggaaaggtcgtcgacgcgatcgtgtcggacggcgacgagggcacggtcgtgcgcctcgccctgctcatcgcgctcatcgccgtcgcggaggcggtgctcggcatcttctcccgcaggctctcggcgacgctcggggagggactcatcctcgacctgcggacggccgtgttcgatcatgtgcagcgcatgccggtcgcgttcttcacgcgtactcgtacgggagcgctcgtctcccgtctcaacaacgacgtcatcggcgcccagcgcgccttcagcaacaccctttccggcgtggtcagcaacgtggtcaccctgctgctcaccctcgcggtgatgctgaccctgtcctggcagatcaccctgctcgccctggtgctgctcccggtgttcgtgctcccggcgcgccggatgggccgccgcatggcccgcatgcagcgcgaggccgccgccctcaacgccgccatgggcacccggatgaccgagcgcttctccgcacccggcgccaccctgatcaagctgttcggccgccccgaggaggagtccgccgagttcgccgaccgggcccgccgcgtcgccgacatcggcgtgcgcaccgccaccgcccaggccgccttcatcaccgcgctcaccctggtctccgcgctcgccctggccctcgtctacggcctcggcggcttcttcgccctgcgcggcaccctggacgcgggcgccgtcgtggcgctggccctgctgctgacccgcctgtacgccccgctcaccgcgctcgccggagcccgggtggaggtcatgagcgccctcgtcagcttcgagcgggtcttcgaggtgctggacctggccccgctcatcgacgagaagcccgatgcccgcccggtccccgacggccccgtggccgtcgagttcgacgacgtccgcttcggctacccgtccgccgacaaggtgtccctcgcctccctcgaagaggtggccaccctggacacccgcggcggcgaagaggtcctgcacggcctctccttccgcgcggaaccgggccagaccatcgcgctggtcggatcgtccggcgccggcaagtccaccatcgcccagctgctgccgcgcctgtacgacaccgacggcggcaccgtccgcgtcggcggcgtcgacgtgcgcgagctgagcgcgcggtcgctgcgcgacaccgtcggcatggtcacccaggacggccacctcttccacgacaccgtccgggccaacctgctcctcgcccggccggacgccaccgaggacgacctctgggaggcgctgcgccgcgcccgcctggccgacctcgtacggtccctgccggacgggctcgacaccgtggtcggcgagcgcggctaccggctctccggcggcgaacgccagcgcatgaccatcgcccggctgctgctggcccgccagcgcgtcgtcatcctcgacgaggccaccgcccacctcgacaacacgtccgaggcggccgtccaggaagccctcaccgaagccctccagggccggaccgccgtggtgatcgcgcaccggctgtccacggtccgggcggccgaccgcatcctggtcgtcgaagccggccgcatcgtggagagcggcacccacgaggaactcctcgcggtcgacggccgctacgcccaactgcaccgcacccagttcgagcgcccggccctcgacaaggccgcgtag

SEQ ID NO: 4417 - protein, 624 aa, Streptomyces coelicolor A3(2)
METTAWTQLYSVMNAKDERRPFARATMRRIGAFARPHRRRIVRFVLLGVATALLAVATPVLAGKVVDAIVSDGDEGTVVRLALLIALIAVAEAVLGIFSRRLSATLGEGLILDLRTAVFDHVQRMPVAFFTRTRTGALVSRLNNDVIGAQRAFSNTLSGVVSNVVTLLLTLAVMLTLSWQITLLALVLLPVFVLPARRMGRRMARMQREAAALNAAMGTRMTERFSAPGATLIKLFGRPEEESAEFADRARRVADIGVRTATAQAAFITALTLVSALALALVYGLGGFFALRGTLDAGAVVALALLLTRLYAPLTALAGARVEVMSALVSFERVFEVLDLAPLIDEKPDARPVPDGPVAVEFDDVRFGYPSADKVSLASLEEVATLDTRGGEEVLHGLSFRAEPGQTIALVGSSGAGKSTIAQLLPRLYDTDGGTVRVGGVDVRELSARSLRDTVGMVTQDGHLFHDTVRANLLLARPDATEDDLWEALRRARLADLVRSLPDGLDTVVGERGYRLSGGERQRMTIARLLLARQRVVILDEATAHLDNTSEAAVQEALTEALQGRTAVVIAHRLSTVRAADRILVVEAGRIVESGTHEELLAVDGRYAQLHRTQFERPALDKAA

SEQ ID NO: 4418 - DNA, 1962 bp, Chlorobium tepidum TLS
  CDS (1)..(1962): transl_table=11
atgagaatgggcgcaggagcggcatcgggattccgcacgcagcaggacgaaaccctcggcaatcggaaaaagggttccgttgaccgctatattatcaagcagctgctcggctacatcaagcccttcaaggggctggtggcgggcgcggtggcgctgaccgccttcggcgcgatcctgacgccgctgcgcccctggctgacccgcatcgccatcgacgaccacatcgccaagggcgaccacaagggccttgccgtcatcagcctgttgatgctgctcgtaatcgtgctcgacggcgtcaagcagtacgccgccacctggctgacacagctcatcggccagaaagcggtctatgccatccgcctcgacatcttccgccacttgcagcgcctgccgatccgctacttcgaccgaaacccggtggggcgcatcatcacccgcaccaccaacgacgtcgaggcgctcaacgaaatgttgtcaagcagcctcatcaccatcatcggcgacatgctgcaactgctcttcatcgtggcgatgatgttcctgaccgactggcggctgacgctggtcgtgctgagcattttgccggtgatgatctactcgaccatctttttcaagaacaagatgcgccaggcgtttctcgatgtccggacgcatctggcccgcctgaacgcctttttccaggagcacatcaccggcatgaaggtggtgcagctcttctcgcgcgaagaggccgagttcatgaagcactccgccatcaacgccgaccaccgcgacgccaacatcaaaacggtcttctacttttcgatctactccccgctgatcgagttcctcagctcggcggcggcgggtctggtggtctggttcagcgcgacgcgcatcatgcagaccgatctgtcggtgggcgtggtagtgtcattcgtgcagttcatctggctcttcttccgcccgttgcagcacctctccgaccagttcaacattatgcagaccgccatcaccagctccgaccgtatcttccggctgctcgaagagccgctcgatgccgaaccgacggagagcgctcactcactcgattcttttcgggatcggatccgtttcgacaaggtgtggttcgcctacgacgaggagcactgggtgctgcgcgacatttcgctggagatcaaggcgggcgaaaccgtggccatcgtcggcgcaaccggcagcggcaagaccacactcatcaacattctttcgagattttatccctacgcaaagggttcagtgaccatcgacggcatcgagctgagcgacattccccgccacgatctgcgcaagctcgtaggagtagtgatgcaggatgtggtgctcttcaccggttcgatccgtgagaatctctcgttcggcgatccatcgatttcggacgaaacgattcacgaggcggcacgcatcgtaggcgctgaccgtttcatcgaaaagctgccggacggctacgactaccgcatccgcgagaacggctccggcctctcggcgggccagaagcagcttctcgccttcgtgcgggcgctgctctacaacccggacattctcgtgctcgacgaagccaccagctcggtcgacaccgaaaccgagtcgctcatcgaacaggcaaccgaccggctgatgaagcaccgaacctcgatcatcatcgcccaccgcctctcgacgatccagcacgccgacaaaatcgtggtgctgcacaaaggcaccatccgcgaaaccggcacccaccaggagctgctcgcccagcgcggtttgtactacaagctgtatttattgcagcacccggagcgcggcagaatggaaggcgcgggggtgaagaattcgccaggtcagtcggataagtccgagccggccgatcttccctctacaaattgctctcccgcaacaccgtcaccggctccagccttgctgcccggagcgaaggaatcgctgccgcaatcgtgctga

SEQ ID NO: 4419 - protein, 653 aa, Chlorobium tepidum TLS
MRMGAGAASGFRTQQDETLGNRKKGSVDRYIIKQLLGYIKPFKGLVAGAVALTAFGAILTPLRPWLTRIAIDDHIAKGDHKGLAVISLLMLLVIVLDGVKQYAATWLTQLIGQKAVYAIRLDIFRHLQRLPIRYFDRNPVGRIITRTTNDVEALNEMLSSSLITIIGDMLQLLFIVAMMFLTDWRLTLVVLSILPVMIYSTIFFKNKMRQAFLDVRTHLARLNAFFQEHITGMKVVQLFSREEAEFMKHSAINADHRDANIKTVFYFSIYSPLIEFLSSAAAGLVVWFSATRIMQTDLSVGVVVSFVQFIWLFFRPLQHLSDQFNIMQTAITSSDRIFRLLEEPLDAEPTESAHSLDSFRDRIRFDKVWFAYDEEHWVLRDISLEIKAGETVAIVGATGSGKTTLINILSRFYPYAKGSVTIDGIELSDIPRHDLRKLVGVVMQDVVLFTGSIRENLSFGDPSISDETIHEAARIVGADRFIEKLPDGYDYRIRENGSGLSAGQKQLLAFVRALLYNPDILVLDEATSSVDTETESLIEQATDRLMKHRTSIIIAHRLSTIQHADKIVVLHKGTIRETGTHQELLAQRGLYYKLYLLQHPERGRMEGAGVKNSPGQSDKSEPADLPSTNCSPATPSPAPALLPGAKESLPQSC

SEQ ID NO: 4420 - DNA, 1815 bp, Thermosynechococcus elongatus BP-1
  CDS (1)..(1815): transl_table=11
atgacagcagcaacacgctccacggattggcaacttttgcaacgactgcttccttacctcaagccctatcgctggggactggtgggaagtggcttgcttttgattcccttggcggcagccgcagcattacaaccgatcatcattgggcaggcgatcgccctcctgaagggggaagagagtacctacggctttttgaaaaccttaacgctgacccaagggattgatctactgagcatggcgctgttggtaaccgtggtgctgcgctttggggtgcaggcagcccaggggtactggattcaaaaaattggtcaaaacattactgccgatcttcgccatgacttatttgaccacgtgctgcggttatcctcccgcttctttgaccgcactcccgtcggtaagctcattacccgcttgaccagtgatgtggatgccttaggggatgtgtttgccactggcgctgtgggggttctcagtgatgtcttctcgatgctggtggtcatcctgacgatgtttttcattgaccgcctgttggcaacactgctgctggccttggttctgccgatcgctgccctgattatctattttcaacattgctatcgcgtcgccaactacaagtcccgcgaggagctgtcgctactgaatgccgatcttcaggaaaacattgttggtattacggtggtgcaattgtttcgccgtgaggccttcaatagtcaactgtttcggcggcgcaatcagcgctacatcaaagaggtcgatcggacgattttctatgattcagcggtatcagcgaccttagagtggattgcctttgtggcgatcgcgggggttctctggctcggcggcgccttagtgcagcagcgcacgattgactttggcaccttagccacgtttatcctcttttcacagcgcgtctttgatccactgcggcagttggcggagaaatttaccacagtgcaagcgggcttaaccgccattgagcgcatccatgatctgctctcagaacccattgaaattcacgatcccgatcgcacctttttgcgtttgccccagatagaaaatacagcccctgccgttgagtttcgtgatgtctggctggcctacaaagacgatgactatgtcctcaagcagctttcctttcaaattcatgctggcgagaaggtggccattgttggccccacgggtgcaggcaaaagttcgattattcgcttgctctgtcgtctttatgagccaacgcgcggtgaagtcctcattggtggtcgcaatgtgcgcgactttacccaagcagaactgcggcagcacattggtgtgattttacaggagagctttctcttctctggggatgtcaaaggcaacattgcccttggcgacaactacacccttgccgaaattcagcgagtggccgcagaaatgaacattgctgagttcattgagcagttgccccaaggctatgacacagccctgcggcagcggggcacaaacctctcggcggggcagcgacaacttttggcctttgcgcgggtcgccattcgcaatccagaaattcttgtccttgatgaggcaacggccaatttggatgtgggcaccgaggcactgattcaggaggccttgaaccgtctcttggtgaatcgaaccgcaatgattattgcccaccgcctcgccacaatccgccatgtggatcgcatttttgtgctcaaacggggacaactggtggagcagggcagccacagtgaactgttggctcgcaatggcgtgtacgcccatctctaccggttgcaggcactcaccaaagacgtagcccctcaacaggatgcctaa

SEQ ID NO: 4421 - protein, 604 aa, Thermosynechococcus elongatus BP-1
MTAATRSTDWQLLQRLLPYLKPYRWGLVGSGLLLIPLAAAAALQPIIIGQAIALLKGEESTYGFLKTLTLTQGIDLLSMALLVTVVLRFGVQAAQGYWIQKIGQNITADLRHDLFDHVLRLSSRFFDRTPVGKLITRLTSDVDALGDVFATGAVGVLSDVFSMLVVILTMFFIDRLLATLLLALVLPIAALIIYFQHCYRVANYKSREELSLLNADLQENIVGITVVQLFRREAFNSQLFRRRNQRYIKEVDRTIFYDSAVSATLEWIAFVAIAGVLWLGGALVQQRTIDFGTLATFILFSQRVFDPLRQLAEKFTTVQAGLTAIERIHDLLSEPIEIHDPDRTFLRLPQIENTAPAVEFRDVWLAYKDDDYVLKQLSFQIHAGEKVAIVGPTGAGKSSIIRLLCRLYEPTRGEVLIGGRNVRDFTQAELRQHIGVILQESFLFSGDVKGNIALGDNYTLAEIQRVAAEMNIAEFIEQLPQGYDTALRQRGTNLSAGQRQLLAFARVAIRNPEILVLDEATANLDVGTEALIQEALNRLLVNRTAMIIAHRLATIRHVDRIFVLKRGQLVEQGSHSELLARNGVYAHLYRLQALTKDVAPQQDA

SEQ ID NO: 4422 - DNA, 3666 bp, Arabidopsis thaliana
  CDS (1)..(3666)
atgaagagttttggaagcgtaagatcaatattcatgcatgcgaacagtgtggatttagtgctgatgggattaggtttaatcggagccgtcggtgatggcttcatcactcctataatatttttcatcaccgggctgctactcaacgacatcggtgattcctcattcggtgataaaaccttcatgcatgccatcatgaagaatgccgtagctttgctttatgtcgctggtgcatctttggtgatatgtttcgttggggagagacaagcatcaagaatgagagagaagtacttaagagcagtgttaagacaagatgtgggttactttgatcttcatgttacaagcacttctgatgttatcaccagtgtctctagtgacaccctcgtgatccaagacgtccttagtgaaaagttaccaaattttttgatgagtgcatcggcgtttgtcgcaagctacatcgtgggtttcatcatgctgtggagactaacaatagtaggtttcccgttctttatcctcctcttgatccctggactgatgtgcggacgagccctcatcaacatctcgagaaaaatacgtgaagagtataatgaggctggttctattgccgagcaagccatctcgttggtgcgaaccgtctacgcatttggtagtgagaggaagatgatatcgaaattctcagctgcgcttgaaggctcagtgaagctagggttgagacaaggaatagctaaaggaatcgccattgggagcaatggtgtcacttacgccatttgggggttcatgacttggtacggaagtcggatggttatgtaccatggagctaaaggcggtactatcttcgcagtcatcatatgcatcacctatggtggcacatcacttggtcgaggtttgtcgaatctcaaatatttctccgaggcggttgtagcaggggaaaggattattgaagtgataaaaagagttcccgatattgattcggacaacccgagaggtcaagttcttgagaatattaaaggagaagtccagtttaagcatgtgaagttcatgtactcatcaagacccgagacaccaatctttgatgatttatgtctaagaatcccatctggtaaatctgttgctctggtgggtggaagcggatcaggaaaatcaactgtgatatcgcttttacaaagattttatgaccccatcgtaggagagattcttatcgatggtgtgtctattaaaaagttgcaagtgaaatggttgagatcacaaatgggtctagttagccaagagccagcactcttcgccacatcgatagaggagaacatattatttggtaaagaggacgcatcctttgatgaagtagtggaagctgcaaagtcctcaaatgctcatgatttcatttctcagttccctcttggttacaaaactcaggttggggagagaggagtgcaaatgtcagggggtcagaagcaaaggatttcaattgcacgtgcgataatcaaatcaccgacacttctactgctagacgaggcaacaagcgcattagattcagaatccgaaagagtagtccaagaagccttagacaatgccactattggtcgtacaactattgttattgctcaccgcctctctactattcgtaatgttgatgttatatgtgtattcaaaaatggtcagattgtagaaactggatcacacgaagagctcatggagaatgtagatggtcaatacacttctctagtccgcttacaaatcatggaaaatgaagaatcaaatgataacgttagcgtaagtatgcgagagggtcaattctcaaatttcaacaaagacgtgaagtatagttcaagactttctattcaaagtcggtcttcccttttcgcaacttcaagcattgatacaaatcttgctggttcaattccaaaggataagaagccatcttttaagagattgatggcgatgaataaaccagagtggaaacatgcattgtatggttgcttaagtgcagtcttgtatggagccttacacccaatttatgcatatgcttcaggatcaatggtgtcagtgtattttctaacgagtcatgatgagatgaaggagaaaacaaggatctatgtgttgcttttcgttggtctagctgttttatgtttcttgatcagtatcattcaacaatatagttttgcttacatgggtgaatacctaacgaaacgtatacgagaaaatattctctcaaagctattgacctttgaggtaagctggttcgatgaagacgagaactcgagcggatcaatttgctctagactagccaaagacgcaaacgtggtgagatcgcttgttggtgaacgagtgtcgttgttggtacaaactatatcagcagtgagtgtagcttgcacacttggtttggccatttcttggaaattatccattgtgatgattgcaatacaaccagtggttgttggatgcttctacactcaacgcattgtactcaaaagcatatcgaaaaaagccattaaagcacaagatgagagcagcaaactagcggcagaagctgtatccaacatccgaaccataacagcattttcgtcacaagaacggatcctaaaattactcaaaatggttcaagaaggaccacaaagagaaaatatccgtcaatcgtggttagcagggattgtgctagcaacttctagaagtctcatgacatgcacttcagctttgaattactggtacggtgctagacttattattgatgggaagatcacgtcaaaagcattctttgagttgtttatactctttgtgagtacgggtcgggttattgcggacgcgggagcaatgacgatggatctagccaagggctcggatgcggtcggatcagtatttgcggtgttagatcgttacacaaacattgaaccggagaaaccggatggtttcgtcccacaaaacataaagggacaaataaagtttgtcaatgtggactttgcgtacccaacacgccctgatgtgattatatttaagaacttctccattgatattgacgagggaaagtcgacagcgatagtgggtccaagcgggtcaggtaaatcaactataatcgggttaatcgaacggttttatgacccgttaaagggtattgtaaagatcgatggtcgtgatataaggtcttatcatttgagatcacttcgtcaacacataggtttggttagccaagagccaatattatttgctgggacaatccgagagaacatcatgtatggaggagcatctgacaagattgacgagtcagagattatcgaggcggccaaggcagccaacgctcatgatttcatcgtaacattatcggacggctatgatacgtactgtggagacagaggagtacaactatctggtggtcaaaaacagaggatcgcgattgctcgtgcggttttgaagaacccatcagtgttgcttcttgatgaagctacgagcgctcttgacaaccaatcagagcgcatggtgcaggatgcactcgggcgtttgatggttggaaggacaagtgttgtgatcgctcataggcttagcaccattcaaaactgtgacacgataactgttttagacaaagggaaagttgtcgaatgtggaacacactcttccttgttagctaaaggtcctacgggtgtatatttctctctggtcagtctccaaagaactcgttactga

SEQ ID NO: 4423 - protein, 1221 aa, Arabidopsis thaliana
MKSFGSVRSIFMHANSVDLVLMGLGLIGAVGDGFITPIIFFITGLLLNDIGDSSFGDKTFMHAIMKNAVALLYVAGASLVICFVGERQASRMREKYLRAVLRQDVGYFDLHVTSTSDVITSVSSDTLVIQDVLSEKLPNFLMSASAFVASYIVGFIMLWRLTIVGFPFFILLLIPGLMCGRALINISRKIREEYNEAGSIAEQAISLVRTVYAFGSERKMISKFSAALEGSVKLGLRQGIAKGIAIGSNGVTYAIWGFMTWYGSRMVMYHGAKGGTIFAVIICITYGGTSLGRGLSNLKYFSEAVVAGERIIEVIKRVPDIDSDNPRGQVLENIKGEVQFKHVKFMYSSRPETPIFDDLCLRIPSGKSVALVGGSGSGKSTVISLLQRFYDPIVGEILIDGVSIKKLQVKWLRSQMGLVSQEPALFATSIEENILFGKEDASFDEVVEAAKSSNAHDFISQFPLGYKTQVGERGVQMSGGQKQRISIARAIIKSPTLLLLDEATSALDSESERVVQEALDNATIGRTTIVIAHRLSTIRNVDVICVFKNGQIVETGSHEELMENVDGQYTSLVRLQIMENEESNDNVSVSMREGQFSNFNKDVKYSSRLSIQSRSSLFATSSIDTNLAGSIPKDKKPSFKRLMAMNKPEWKHALYGCLSAVLYGALHPIYAYASGSMVSVYFLTSHDEMKEKTRIYVLLFVGLAVLCFLISIIQQYSFAYMGEYLTKRIRENILSKLLTFEVSWFDEDENSSGSICSRLAKDANVVRSLVGERVSLLVQTISAVSVACTLGLAISWKLSIVMIAIQPVVVGCFYTQRIVLKSISKKAIKAQDESSKLAAEAVSNIRTITAFSSQERILKLLKMVQEGPQRENIRQSWLAGIVLATSRSLMTCTSALNYWYGARLIIDGKITSKAFFELFILFVSTGRVIADAGAMTMDLAKGSDAVGSVFAVLDRYTNIEPEKPDGFVPQNIKGQIKFVNVDFAYPTRPDVIIFKNFSIDIDEGKSTAIVGPSGSGKSTIIGLIERFYDPLKGIVKIDGRDIRSYHLRSLRQHIGLVSQEPILFAGTIRENIMYGGASDKIDESEIIEAAKAANAHDFIVTLSDGYDTYCGDRGVQLSGGQKQRIAIARAVLKNPSVLLLDEATSALDNQSERMVQDALGRLMVGRTSVVIAHRLSTIQNCDTITVLDKGKVVECGTHSSLLAKGPTGVYFSLVSLQRTRY

SEQ ID NO: 4424 - DNA, 2031 bp, Oceanobacillus iheyensis HTE831
  CDS (1)..(2031): transl_table=11
atgaaagggagtacagaaaaaaggttattaaaatatgcgttattatataaaaaaggaattgttattgggctagtctgcttgatcattgctgttgctttagaattagcaggtccattgattgcaaagcgagtcattgatgaacatatcgttggtgtagaaggctactggatagaagtctctgaacaagaaaccgattcagttgaatataataatcagtattttaaaagagaggatcgcgtagaaggtagtaatttatctagtactgatactatcacacttttacaagtaggtttatcttattatgtttttgatgaagagttacctttaactggaaagcgatcggtaaatgataatgaaataacgattgaatcaggtgaaggagaaattactgcgattggggataaattatcagcttcagaagcatatccttttttcgaacctgaaaaacgaccgattattatgttgcttgtactttatatggttttactagttattgctggtgtatttcaattctttcaaacattcttgttgcaaaagtcagcaaatcaaattgtaaaacaaatgcgaacagacttattccaacatacgcaacgaattccaattcgctattatatagatcaaccagctggttctgttgtcgctcgtattactaatgatactgaagctatacgagatttatatgaaagggtattatcgattgttgttacgagtctaatctatatgggtggtatttttgtagcattatttattttagatccaactttagcagctatgtgtctatttattatcccgttattatatatttggatgagagtctacaagtattttgggactaaatataataaagtagttcggaaaaccataagtgaaattaatgggaatatcagtgaagcaattcaaggaatgacaatcatccaggcatttaatcgtcaaaagaagacaaaagaagagtttgaagtgctaaataatcgtaattataaatatcagaaaaaattaattaaattaagtgcattaacttcctataatcttgtgacagtaattaagaatttaacgttagttggattcatctggtatttcgggtcagcatcttttgatatgacgagtgttatttccattggtatgctttatgcattcgtagattatattaatcgattatttgaacctgcttcagatatagtcaaccaattaccgttattagaacaggcaagagtagctggaactcgagtatttgaattgctagatcagaatggggaacaagtcgaagttcaatcgatccctcgttataaagggaatattgaatttgatcaagtcatctttgcgtataaagagaatgaaaatgtattgcataatctttctttttccgttcactcaggtcaaacagttgcatttgttggtcacaccggatcaggaaaaagttcgataatgaacctattatttcgcttttatgaccctcaagcaggaacgatacgaatcgatgggattgacacgaaagatttatcccgacaacaagttcgcagccatatgggaatcgtattacaagatccatttctttttacaggcaccatcgtgtcaaacgtaacgatgaacgatcctaatgtatcaagagacgacgccattcaagctttacaagctgttggtgcatcttcctttattgagagattaccaaagggatatgatgagccagtgactgaaagtggcaccacgtattcattaggggagagacaattgatttcttttgctagagcgttagcatttaaccctgctatccttatattggatgaagcaactgcaaatatagataccgagacagaacaagttattcaacgagctttagaagttctaaaaaaaggtcgaacaacgctcgtgattgcccatcgtttatccacaattcagcaggcggatcatataattgtgttggatcacggaactattaaagaacagggaaatcatgatacactgattaaagagaaaggttattattacgaaatgtatcaaatgcagcaaggatcactgagagcaaacgtttcttaa

SEQ ID NO: 4425 - protein, 676 aa, Oceanobacillus iheyensis HTE831
MKGSTEKRLLKYALLYKKGIVIGLVCLIIAVALELAGPLIAKRVIDEHIVGVEGYWIEVSEQETDSVEYNNQYFKREDRVEGSNLSSTDTITLLQVGLSYYVFDEELPLTGKRSVNDNEITIESGEGEITAIGDKLSASEAYPFFEPEKRPIIMLLVLYMVLLVIAGVFQFFQTFLLQKSANQIVKQMRTDLFQHTQRIPIRYYIDQPAGSVVARITNDTEAIRDLYERVLSIVVTSLIYMGGIFVALFILDPTLAAMCLFIIPLLYIWMRVYKYFGTKYNKVVRKTISEINGNISEAIQGMTIIQAFNRQKKTKEEFEVLNNRNYKYQKKLIKLSALTSYNLVTVIKNLTLVGFIWYFGSASFDMTSVISIGMLYAFVDYINRLFEPASDIVNQLPLLEQARVAGTRVFELLDQNGEQVEVQSIPRYKGNIEFDQVIFAYKENENVLHNLSFSVHSGQTVAFVGHTGSGKSSIMNLLFRFYDPQAGTIRIDGIDTKDLSRQQVRSHMGIVLQDPFLFTGTIVSNVTMNDPNVSRDDAIQALQAVGASSFIERLPKGYDEPVTESGTTYSLGERQLISFARALAFNPAILILDEATANIDTETEQVIQRALEVLKKGRTTLVIAHRLSTIQQADHIIVLDHGTIKEQGNHDTLIKEKGYYYEMYQMQQGSLRANVS

SEQ ID NO: 4426 - DNA, 1833 bp, Oceanobacillus iheyensis HTE831
  CDS (1)..(1833): transl_table=11
atggcgaaaaataaggataatttaaaatcagaaagtaaacatttacaacgatttcattacacaatcgatcaagcgattgaaaaaccgtttaactggcaacaaatgtggagactgttgcaatttttaaaaccatattcgaagacttatttaccaggagcagtcctggctatgatggtatcaacagcaatccgcttagctataccgattttaattggtaaagtagcattcgatgtagctattgcaaataaagatactacgttgttaacctatttagttatcggtattgcggttctttatagtataagttttgtcgcaaatacatttcgaatcaagtgggtaaatatcttaggacaaaatgttatctatgatttgcgacaaaagttattttcccacgtgcaacgattgtcacaccgattttttgatagtcgttcagcaggttctattttagttcgaattctcaatgatataaattctctgcaggaattatttacgaatggaatcatcaacttattaatggatttattaatgttatcggggattttagtaattttatttgtactaagcccaccacttgctttagcagtaattattattattccattgatgtttttaatatcaaccacattacgtcgtaaaatacgtcgttcatggcaagtagtaagattacatcaatccagaatgaactcacatttaaatgaaggcattcaagggatgcgtattacccaatctttctcacaagagaaagagaacgcggagttttttgacggtgtaaattctggatttttccagagttttcgtgatgcagctaagaagagtgctatgtttcgtccgcttgtagatatttgtgatgctgcaggtacaattatacttatttcttatggtgcatacttaatattaaatggaaccataactgtaggtacatttgtctcttttgcttttttcttgggaatgttttgggaacctatatcacgtcttgggcagatgtataatcagctcttaatggcaatggcatcatctgagcgaatttttgaattcctggatgaacgcccaaacgtagcagaaaagaacaatgcgcttcaaatggaagagatgcgcggagaaatcgaatttgataaagttgaattctcatacaataaagacagaattgcattgaaaaaactatccattcatattcatgctggagagaccatagctctagtcggtcatacaggaagtggtaagtctacaattgcgaatttaataagtaggttttatgatcctacttctggtgcagtaaaaattgatggaagtgatttgcgagatgttaccattgatagtttgcgacaaaaaattagtgttgtattacaagatacatttattttttcgggtacaataatggaaaatattcgttttggaagacctaatgcaacagatgaagaagttattgatgctgctaaggtagtaggggcggatgattttattcagcgccttgcagacgggtatcagacagaagtggaagagagaggaaatattctttcagctggagaaagacagttattatcgtttgcaagagctctgttagcaaatccaagtattattattcttgatgaagcaactgccagtattgatacagaatcagaagtgaagatacagcaggcattaaaacgattattaaaaggaagaacttctatcattattgcgcatagattgtctacaattcgagaagcagataatatttttgttcttgaacaaggagaagttttggagcaaggaaatcatcaatcgttaatacaacaaaaaggaaaatattacgaactggtgaagtcacagtttactatgttagatgcaatgtaa

SEQ ID NO: 4427 - protein, 610 aa, Oceanobacillus iheyensis HTE831
MAKNKDNLKSESKHLQRFHYTIDQAIEKPFNWQQMWRLLQFLKPYSKTYLPGAVLAMMVSTAIRLAIPILIGKVAFDVAIANKDTTLLTYLVIGIAVLYSISFVANTFRIKWVNILGQNVIYDLRQKLFSHVQRLSHRFFDSRSAGSILVRILNDINSLQELFTNGIINLLMDLLMLSGILVILFVLSPPLALAVIIIIPLMFLISTTLRRKIRRSWQVVRLHQSRMNSHLNEGIQGMRITQSFSQEKENAEFFDGVNSGFFQSFRDAAKKSAMFRPLVDICDAAGTIILISYGAYLILNGTITVGTFVSFAFFLGMFWEPISRLGQMYNQLLMAMASSERIFEFLDERPNVAEKNNALQMEEMRGEIEFDKVEFSYNKDRIALKKLSIHIHAGETIALVGHTGSGKSTIANLISRFYDPTSGAVKIDGSDLRDVTIDSLRQKISVVLQDTFIFSGTIMENIRFGRPNATDEEVIDAAKVVGADDFIQRLADGYQTEVEERGNILSAGERQLLSFARALLANPSIIILDEATASIDTESEVKIQQALKRLLKGRTSIIIAHRLSTIREADNIFVLEQGEVLEQGNHQSLIQQKGKYYELVKSQFTMLDAM

SEQ ID NO: 4428 - DNA, 1782 bp, Shigella flexneri 2a str. 301
  CDS (1)..(1782): transl_table=11
atgcgtagttttagccaactgtggccgactctcaagcgcctgttagcgtatggttcgccgtggcgtaaaccgctggggattgcggtcctgatgatgtgggttgcggcggcggcagaagtcagtgggccgctgcttatcagctattttatcgacaatatggtagcgaaaaataacctgccgttgaaagtggttgcagggctggctgcggcgtatgttgggctacaactgtttgccgccgggctacattacgcgcagtcgctgctgtttaatcgggcggcagtaggcgcagtgcaacagttgcgtaccgacgtgatggatgctgcgttacgccagccattaagcgagtttgatacccaacccgtcgggcaggtgatttcccgcgtcactaatgacactgaagtgatccgcgatctctacgttaccgtagtggcaactgtcctgcgcagtgccgcactggtgggcgcgatgctggtggcgatgttcagcctcgactggcgaatggcgctggtggcgataatgattttcccggtggtgctggtggtaatggtgatataccagcgttacagcacgccgattgtccgccgtgtgcgcgcctatctggcggatatcaacgacggctttaacgaaatcatcaatggcatgagcgttatccagcagtttcgtcagcaggcgcgatttggcgaacgtatgggggaggccagtcgttcacactatatggctaggatgcaaaccctgcgcctcgacggttttctgctgcgtccgctgctgagtctgttttcatcgctcattctttgtggcttattgatgctgtttggcttctccgccagcggcaccattgaagtgggcgtgttgtatgcgtttatcagctatcttgggcgacttaacgaacccttaatcgaactgaccacgcaacaggcgatgctgcaacaggctgttgttgctggtgagcgcgtgtttgaactgatggacggaccgcgccagcaatatggcaatgatgattacccgttacagagtggcaccatcgaagtcgataacgtgtcatttgcttatcgcgatgacaatctggtgctaaagaacattaatctctctgtgccttcgcgtaactttgtggcgctggtcgggcataccggcagtggtaaaagtaccctcgccagtttattgatgggctattacccgctaacggaaggtgagattcaccttgatggtcgtccattaagttcgctaagtcatagcgcgctgcgccagggcgtggcaatggtgcagcaagatccggtggtgctggcggataccttcctcgctaatgtgacgctggggcgggatatctccgaagaacgcgtctggcaggcgctggaaaccgtgcaactggcggagctggcgcgcagcatgagtgattgtatttatacgccgctgggcgagcagggaaataatctctcagtcgggcaaaagcaactgctggcactggcgcgcgtgctggtggagacgccgcaaatcctgatccttgatgaggcaaccgccagcattgactccggtactgaacaggcgattcaacatgctctggcggcggtgcgtgaacataccacgctggtggtgattgctcaccgcttatcaactattattgatgccgacaccattctggtgcttcatcgtgggcaagccgtggagcagggcactcaccagcaactgctggcggcccagggacgctactggcagatgtatcaactgcaacttgcgggcgaagagctggcagccagcgtgcgtgaagaggaatcattgagcgcctga

SEQ ID NO: 4429 - protein, 593 aa, Shigella flexneri 2a str. 301
MRSFSQLWPTLKRLLAYGSPWRKPLGIAVLMMWVAAAAEVSGPLLISYFIDNMVAKNNLPLKVVAGLAAAYVGLQLFAAGLHYAQSLLFNRAAVGAVQQLRTDVMDAALRQPLSEFDTQPVGQVISRVTNDTEVIRDLYVTVVATVLRSAALVGAMLVAMFSLDWRMALVAIMIFPVVLVVMVIYQRYSTPIVRRVRAYLADINDGFNEIINGMSVIQQFRQQARFGERMGEASRSHYMARMQTLRLDGFLLRPLLSLFSSLILCGLLMLFGFSASGTIEVGVLYAFISYLGRLNEPLIELTTQQAMLQQAVVAGERVFELMDGPRQQYGNDDYPLQSGTIEVDNVSFAYRDDNLVLKNINLSVPSRNFVALVGHTGSGKSTLASLLMGYYPLTEGEIHLDGRPLSSLSHSALRQGVAMVQQDPVVLADTFLANVTLGRDISEERVWQALETVQLAELARSMSDCIYTPLGEQGNNLSVGQKQLLALARVLVETPQILILDEATASIDSGTEQAIQHALAAVREHTTLVVIAHRLSTIIDADTILVLHRGQAVEQGTHQQLLAAQGRYWQMYQLQLAGEELAASVREEESLSA

SEQ ID NO: 4430 - DNA, 1743 bp, Streptococcus mutans UA159
  CDS (1)..(1743): transl_table=11
atgaagaataatgaacaccaaggccatgttttttggcgtctgatgtcttatcttaagccctataaatggttgactttcttcgccttgcttttccttttgtcaacaacagtgattaaaagtttcgtccccttagtggcctcttattttattgatcattttttgactcatttcaatcagacagcagcttcacttttgctgggctactacttgctctatgttttgcagacgattttacaatattttggcaatcttctttttgcgcgtgtttcttttagtgttgttcgcgacattcgtagggatgcctttgccaatatggaaagattgggaatggcctatttcgataaaacgccagcaggttcgattgtatcgcgcttaaccaatgatacagaaagtattagtgacatgttttcaggcatcttatctagttttatttcagctatttttatttttagtgttaccctttataccatgttaatgctgaattatcgcctaacctttcttgtcatgctttttttgccttttatttttattttggtcaatctctatcgtaaaaagtctgttaaggttattgctaaaacgaggagtttattgagtgatatcaataccaatttatctgaaagtattggaggtatcaatattattcaagcttttggacaagaagagcgtttaaaagcagaatttgaggcaatcaatgaagaacattttcattatgccaatcgttctatggccttggacagtcttttcctacgtccagctatgtcgcttttgaagcttttggcttatgctcttttgatggcttattttggatttaattggcagactattggtatttcagctgggatgatgtatgcctttattcaatatgttaatcgcctctttgaccctttaattgaagtgactcagaatttctcaaccttgcaaacttctatggtctcagctggacgtgtttttgatctgatagatgaaagggattatgaaccacatcaagatgatagtgacattagcatttcagctggtaatattgaatttagggatgtttctttctcatatgatggtcagcatcaaattttagatcatatttcttttaaagtcaatcaaggtcaaacgattgcttttgttggtccaacagggtcaggcaagtcttctattattaatgttttcatgcgcttttatgaatttcaaaaaggtcaagttaccattgatggacatgatatccgtaactatagccaagaagaattacgcaaaaatgttggtctggttttgcaagagcccttcctttatcatgggacaatcaagtctaatataaaaatgtatcaggatttgacagatgcggatattgaagctgcggcaaaatttgtggatgctgatcaatttattcaaaaattggctcataaatatgaggaacctgttagtgaaggtggttcaagtttttcaactggtcagcgtcagctaatggcttttgccagaacggtagcaagttcgcctaaaattttaattcttgatgaagcgacagctaatattgactcagaaacagaacaattggttcaaaattctttggctaaaatgcgtagaggacggacaaccattgcgattgcccatcgtttatcaaccattcaagatgccaactgtatttatgttcttgataagggtaaaattattgagtcgggaactcatgaggaacttctagcgaaaaaaggaacctatcacaaaatgtatcaactccaagcaggtatgatggattga

SEQ ID NO: 4431 - protein, 580 aa, Streptococcus mutans UA159
MKNNEHQGHVFWRLMSYLKPYKWLTFFALLFLLSTTVIKSFVPLVASYFIDHFLTHFNQTAASLLLGYYLLYVLQTILQYFGNLLFARVSFSVVRDIRRDAFANMERLGMAYFDKTPAGSIVSRLTNDTESISDMFSGILSSFISAIFIFSVTLYTMLMLNYRLTFLVMLFLPFIFILVNLYRKKSVKVIAKTRSLLSDINTNLSESIGGINIIQAFGQEERLKAEFEAINEEHFHYANRSMALDSLFLRPAMSLLKLLAYALLMAYFGFNWQTIGISAGMMYAFIQYVNRLFDPLIEVTQNFSTLQTSMVSAGRVFDLIDERDYEPHQDDSDISISAGNIEFRDVSFSYDGQHQILDHISFKVNQGQTIAFVGPTGSGKSSIINVFMRFYEFQKGQVTIDGHDIRNYSQEELRKNVGLVLQEPFLYHGTIKSNIKMYQDLTDADIEAAAKFVDADQFIQKLAHKYEEPVSEGGSSFSTGQRQLMAFARTVASSPKILILDEATANIDSETEQLVQNSLAKMRRGRTTIAIAHRLSTIQDANCIYVLDKGKIIESGTHEELLAKKGTYHKMYQLQAGMMD

SEQ ID NO: 4432 - DNA, 1740 bp, Streptococcus agalactiae NEM316
  CDS (1)..(1740): transl_table=11
atgaagtctaatcaatggcaagtctttaagagattaatctcctatttacgcccttataaatggtttacagtattagctctatctctcttattgttgacgactgttgttaaaaatattattcctttaattgcttcacattttattgatcactatctgacaaatgttaatcaaacagcagttcttattttagtgggatattattcaatgtatgtcttgcagaccttaattcaatattttgggaatctcttttttgcgcgtgtttcttatagtattgttagagatattcgtagagatgcttttgctaatatggaaaggctaggcatgtcttattttgataggacaccggcaggatctattgtgtcacgtattactaatgatactgaagcaatatctgatatgttttcgggtattttatcaagttttatctcggcgatatttatttttacagttactctgtacactatgttgatgctagacattaaactaacaggactcgtcgctcttttgttacctgttatctttatattagtgaatgtctatcggaaaaaatcagtcactgtcattgctaaaacgagaagtttacttagtgatatcaacagtaaattatcagaaagtattgaaggaattcgcattgtacaggcttttggtcaagaagagcgcttgaagactgaatttgaggaaattaacaaagagcatgttgtgtatgccaatcgttctatggctcttgatagtctcttcttaagaccggcgatgtctcttttaaaactcctagcatatgctgttcttatgtcttattttggatttacaggagttaaaggaggtcttacggcaggattaatgtatgcttttattcagtacgttaatcgtctatttgaccctttaattgaagtaacgcaaaatttttcaaccttacaaacatcaatggtatcagcagggcgtgtgtttgatctgattgatgaaacaggttttgaaccaagccaaaaaaatacagaagcttttgtgagagaaggaaatatcgaatttaaaaatgtatcattctcatatgatggaaaaaaacaaatccttgataatgtttcttttagtgttaaaaaaggtgaaactattgcttttgtaggagcgacaggttctggaaaatcatctattattaatgtctttatgaggttttacgaatttcaatctggacaagttttattagatgggaaggatattagggattactcacaagaacaattgcgaaagaatattggactcgtcttacaagacccctttttatatcatggcactattaaatctaatatcaaaatgtaccaagacatcaccgatcaagaggtacaggacgcagcagagtttgttgatgctgatcaatttattcagaagttgccagataagtacgattcagctgtttcagaacgtgggtcaagtttttcaactggacaacgccaactattagcgtttgccagaactgtggctagtaaacctaaaattttaatcttagatgaggcgacagcaaatattgattcggaaacagagcagattgtacaagattcgttagcaaaaatgcgtcaaggtcgaacaacaattgccattgctcaccgcttatcaaccattcaagatgctaattgtatctatgttcttgatagaggaaagataattgaaagtgggaatcacgagtctttattagaccaaaaagggacttattatcgtatgtaccaattacaagccggcatgatggaggtctag

SEQ ID NO: 4433 - protein, 579 aa, Streptococcus agalactiae NEM316
MKSNQWQVFKRLISYLRPYKWFTVLALSLLLLTTVVKNIIPLIASHFIDHYLTNVNQTAVLILVGYYSMYVLQTLIQYFGNLFFARVSYSIVRDIRRDAFANMERLGMSYFDRTPAGSIVSRITNDTEAISDMFSGILSSFISAIFIFTVTLYTMLMLDIKLTGLVALLLPVIFILVNVYRKKSVTVIAKTRSLLSDINSKLSESIEGIRIVQAFGQEERLKTEFEEINKEHVVYANRSMALDSLFLRPAMSLLKLLAYAVLMSYFGFTGVKGGLTAGLMYAFIQYVNRLFDPLIEVTQNFSTLQTSMVSAGRVFDLIDETGFEPSQKNTEAFVREGNIEFKNVSFSYDGKKQILDNVSFSVKKGETIAFVGATGSGKSSIINVFMRFYEFQSGQVLLDGKDIRDYSQEQLRKNIGLVLQDPFLYHGTIKSNIKMYQDITDQEVQDAAEFVDADQFIQKLPDKYDSAVSERGSSFSTGQRQLLAFARTVASKPKILILDEATANIDSETEQIVQDSLAKMRQGRTTIAIAHRLSTIQDANCIYVLDRGKIIESGNHESLLDQKGTYYRMYQLQAGMMEV

SEQ ID NO: 4434 - DNA, 1833 bp, Pseudomonas putida KT2440
  CDS (1)..(1833): transl_table=11
gtgcttgatgtaccagggtcacccgacccggtaccgggcaagccatacactgcgggcgatcgactgagctgggcggaaatccgccgcctggccttgcatcacaagaaaaacctctggtccgccaacctcattgcgttactggcggcgtgttgcagtgtgcccattccgctgctgctgccgctgttggtggacgaagttctgctcggccatggcgatgctgcgctgaagtggatgaaccatctgctgccgtccagctggcaggtggcagccggctacatcggcctgatgctggcgctcaccctgtgcctgcgcctggctgcactggcgttcaacgttatccagtccaagctgttcgccgggctggccaaggacatcgtctaccgcctgcgcatccgcctgatcgagcgcctcaagcgtatttcgctgaaagagtacgaaagcctgggcagcggcacggtgaccacccacctggtcaccgacctggacaccctcgacaagttcgttggcgaaaccctcagccgcttcctggtggccatgctgacactgaccggcacggcggccatcctgatctggatgcactggcagctggccttgctgatcttgctgttcaacccgctggtgatctacttcaccgtgcagttgggcaagcgcgtcaagcacctgaaaaagctcgaaaacgacagcaccgcgcgctttacccaggcgctagcggaaaccctcgatgccatccaggaaatccgcgccggcaaccgccagggctacttccttggccgcctgggcttgcgtgcccgcgaggtgcgcgattacgccgtggactcgcaatggaaaagcgatgccagtggccgtgccagtggcctgctgttccagttcggcatcgacatcttccgcgcggcggccatgctgaccgtgctgttttccgacctgtcgatcggccagatgctggcggtgttcagctacctgtggttcatgatcggtccggtggagcaactgcttaatctgcaatatgcctactacgccgcaggcggtgcgctgagccgcctcaacgagctgctggcgcgtgccgacgagccgcaatacccggccgccagcgacccgttcgccgggcgcgaaacggtgggcattgaagtgcgcgacctgcgctttgcctatgccgacgagccggtgctcgagcacctcgacctgtccatcgctgcgggtgagaaggtggcgattgtcggtgccagcggcggcggcaagagcacgctggtgcagctactgctgggcctttacagcgcccaggccgggaccatccgctttggcggggccagcctgcaggaaatcggcctggaaaccctgcgcgagaacgtcgcggtggtgttgcagcacccgtcgctgttcaacgacagcgtgcgggccaacctgaccatgggccgcgactgcagcgatgatgcgtgctggcaggcgctgcgcatcgcccagctggatgccaccatcgccgccttgccgcagggcctggacagcgtggtagggcgttcaggcgtgcgcttgtccggtggccagcgccagcgcctggccattgcccgcatggtactggctgagcccaaggtggtgatcctcgacgaggccacctcagccctggatgccgccaccgagtacaacctgcatcaggccttggcgtgcttcctcagcggccgcaccacgctgatcatcgcccaccgcttgtcggcggtgaaacaggccgaccgggtgctggtgttcgatggcgggcacgtggccgaagacggcgaccatcagcagctgattgccgagggtgggttatacgccaagctgtatgggcatctgcagcagagctga

SEQ ID NO: 4435 - protein, 610 aa, Pseudomonas putida KT2440
MLDVPGSPDPVPGKPYTAGDRLSWAEIRRLALHHKKNLWSANLIALLAACCSVPIPLLLPLLVDEVLLGHGDAALKWMNHLLPSSWQVAAGYIGLMLALTLCLRLAALAFNVIQSKLFAGLAKDIVYRLRIRLIERLKRISLKEYESLGSGTVTTHLVTDLDTLDKFVGETLSRFLVAMLTLTGTAAILIWMHWQLALLILLFNPLVIYFTVQLGKRVKHLKKLENDSTARFTQALAETLDAIQEIRAGNRQGYFLGRLGLRAREVRDYAVDSQWKSDASGRASGLLFQFGIDIFRAAAMLTVLFSDLSIGQMLAVFSYLWFMIGPVEQLLNLQYAYYAAGGALSRLNELLARADEPQYPAASDPFAGRETVGIEVRDLRFAYADEPVLEHLDLSIAAGEKVAIVGASGGGKSTLVQLLLGLYSAQAGTIRFGGASLQEIGLETLRENVAVVLQHPSLFNDSVRANLTMGRDCSDDACWQALRIAQLDATIAALPQGLDSVVGRSGVRLSGGQRQRLAIARMVLAEPKVVILDEATSALDAATEYNLHQALACFLSGRTTLIIAHRLSAVKQADRVLVFDGGHVAEDGDHQQLIAEGGLYAKLYGHLQQS

SEQ ID NO: 4436 - DNA, 1896 bp, Escherichia coli CFT073
  CDS (1)..(1896): transl_table=11
gtggcaatcatgatgagctggcgcaacaaagtggctggtatcgcgatatgtatcgctatcaacaactggaggcggcgctcgacgacgctccggaaattcgcgaggaggccatcgatgcgtagttttagccaactgtggccgactctcaagcgcctgttagcgtacggttcgccgtggcgtaaaccgttggggattgcggtcctgatgatgtgggttgcggcggcggcagaagtcagtgggccgctgcttatcagctattttatcgacaatatggtagcgaaaaataacctgccgttgaaagtggttgcagggctggctgcggcgtatgttgggctgcaactgtttgccgccgggctacattacgcgcagtcgctgctgtttaatcgggcggcagtaggcgtagtgcaacagttgcgtaccgacgtgatggatgctgcgttacgccagccattaagcgagtttgatacccaacccgtcgggcaggtgatttcccgcgtcactaatgacactgaagtgatccgcgatctctacgttaccgtagtggcaactgtcctgcgtagcgccgcactggtgggcgcgatgctggtggcgatgttcagcctcgactggcgaatggcgctggtggcgataatgattttcccggtggtgctggtggtaatggtgatatatcagcgttacagcacgccgattgtccgtcgtgtgcgcgcttatctggcggatatcaacgacggctttaacgaaatcatcaatggcatgagcgttatccagcagttccgtcagcaggcgcgatttggcgaacgtatgggtgaggccagtcgttcacactatatggcgaggatgcaaaccctgcgcctcgacggttttctgctgcgtccgctgctgagtctgttttcatcgctcattctttgtggcttgttgatgctgtttggtttctccgccagcggcaccattgaagtgggcgtgttgtatgcgttcatcagttatttggggcgacttaacgaacccttaatcgaactgaccacgcagcaggcgatgctgcaacaggctgttgttgctggtgagcgcgtttttgagctgatggacggaccgcgccagcaatatggcaatgatgatcgcccgttgcagagcggcaccatcgaagtcgataacgtgtcatttgcttatcgcgatgacaatctggtgctaaagaacattaatctctctgtgccttcgcgcaactttgtggcgctggtcgggcataccggcagtggcaaaagcaccctcgccagtttattgatgggctattacccgctaacggaaggtgagattcgccttgatggtcgtccattaagttcgctaagtcacagcgcgctgcgccagggcgtggcaatggtgcagcaagatccggtggtgctggcggataccttcctcgccaacgtgacgctggggcgtgatatctccgaagaacgcgtctggcaggcgctggaaaccgtgcaactggcggagctggcgcgtagcatgagcgacggtatttacacgccgcttggcgagcaggggaataatctctcagtcgggcaaaagcaactgctggcactggcacgcgtgttggtggagacgccgcaaatcctgatccttgatgaggcaacagccagcattgactccggtactgaacaggcgattcaacatgctctggcggcggtgcgtgaacatactacgcttgtggtgattgctcaccgcttatcaactattgttgatgccgacaccattctggtgcttcatcgtgggcaagctgtggagcagggcactcaccagcaactgctggcggcccagggacgctactggcagatgtatcaactgcaacttgcgggcgaagagctggcagccagcgtgcgtgaagaggaatcattgagcgcctga

SEQ ID NO: 4437 - protein, 631 aa, Escherichia coli CFT073
MAIMMSWRNKVAGIAICIAINNWRRRSTTLRKFARRPSMRSFSQLWPTLKRLLAYGSPWRKPLGIAVLMMWVAAAAEVSGPLLISYFIDNMVAKNNLPLKVVAGLAAAYVGLQLFAAGLHYAQSLLFNRAAVGVVQQLRTDVMDAALRQPLSEFDTQPVGQVISRVTNDTEVIRDLYVTVVATVLRSAALVGAMLVAMFSLDWRMALVAIMIFPVVLVVMVIYQRYSTPIVRRVRAYLADINDGFNEIINGMSVIQQFRQQARFGERMGEASRSHYMARMQTLRLDGFLLRPLLSLFSSLILCGLLMLFGFSASGTIEVGVLYAFISYLGRLNEPLIELTTQQAMLQQAVVAGERVFELMDGPRQQYGNDDRPLQSGTIEVDNVSFAYRDDNLVLKNINLSVPSRNFVALVGHTGSGKSTLASLLMGYYPLTEGEIRLDGRPLSSLSHSALRQGVAMVQQDPVVLADTFLANVTLGRDISEERVWQALETVQLAELARSMSDGIYTPLGEQGNNLSVGQKQLLALARVLVETPQILILDEATASIDSGTEQAIQHALAAVREHTTLVVIAHRLSTIVDADTILVLHRGQAVEQGTHQQLLAAQGRYWQMYQLQLAGEELAASVREEESLSA

SEQ ID NO: 4438 - DNA, 1776 bp, Vibrio vulnificus CMCP6
  CDS (1)..(1776): transl_table=11
atgaaaaagaccacgttgaaacgtttatttgcttatccattggcgcaaccaaaacccatgataacgggtttagtctttttgttgattgcggctgtcagcaatgcgggtggcccttggctcatccaacactttattgacgagcacattaccaaagacgattacactcaacagacacttatcttacttgctagtggctatattggcctgctgctttgctcagctttgtttcaatatctccaaggtttgcaatttaacattgtcgcgacaggcatcattaaaaccattcgcaagcaggcatttaatcgtgtgatcaagcaacctttgtcggctttcgattacacccctactggcaagctggtctcaagactcaccaacgacacggaatctctgcagcagttctacgagcttcttattgcgtcggtggttaagaatcttgtgatgattttagtcatgctgggagtgatgttgatcttaagctggcaactgaccttagttgtactgattctcttgcctgtggtggtggcttttatggccttgttccaaaagttgagcactcacgcctatcgcgttatgcgtgatttgctcactgacatcaatggcaatatgagcgaatcgatccaagggatgagcgtgatccaactgatgcgccaagaaaaacgcttcaaccagcagtttaatcaactgactgagcagcatttcaaagcgggtcgtaaagtcatcaagctgaatggtattttacttcgacccttgatggatttattggcgggcatcgctttactcaccctcgttgccatttttggtttcagtggtaccgagctcattggtgttggtgtactgtacgcgtttatcagctaccttggccgtattaccgaaccattaattgaaatgacgcaacagctagcgctactgcaacaagctttagtggccagcgagcgtatttttgaaatgatggatgcaccggagcaaagctatggtcatgatcagcagccacttaaaagtggttccatcgccatagagcaactgagctttagctacgatggtaagcagcaggtattgaaaaagatcgacattgacgtggaacaccagcagttcgtcgctttggtcggccacacgggtagcggaaaaagtaccctcgcttcgctattgatgggcttttacccagtaagccaaggcaaactgaaactggatggacgccctattgcttcattggcaaaatcggtgctgcgaaaagacgtggcgatggttcaacaagatccacatattctgccaacctcggtcagagaaaatattgccttgggaagagaagtctcagacgacatcatttggcaatctttagaacaagtaggtttggctgagcagatcaaacgctaccctcaattgctggacacccaactgggccaaggagaaaccaacctctctgctggacaaaaacagttgttggccatggcccgagtgcttatcgctaagccgaaaattttaatcctcgacgaagcgacggcaaacatcgattcagggactgaggcgctgatacagcgcagtttgaatgccctacgccatgatatgacgctagtggtgattgcacaccgcctttccaccattatggaggccgacaaaattgtggttttacaccacggagatttggttgaaatgggcagtcacaaacaactgcttgcccagcaagggcgctacgcacagatgtaccagttgcaacaagcaggccagcatatcaaggaaattgaacagcaggaggagcaagaactggaacaagccagctaa

SEQ ID NO: 4439 - protein, 591 aa, Vibrio vulnificus CMCP6
MKKTTLKRLFAYPLAQPKPMITGLVFLLIAAVSNAGGPWLIQHFIDEHITKDDYTQQTLILLASGYIGLLLCSALFQYLQGLQFNIVATGIIKTIRKQAFNRVIKQPLSAFDYTPTGKLVSRLTNDTESLQQFYELLIASVVKNLVMILVMLGVMLILSWQLTLVVLILLPVVVAFMALFQKLSTHAYRVMRDLLTDINGNMSESIQGMSVIQLMRQEKRFNQQFNQLTEQHFKAGRKVIKLNGILLRPLMDLLAGIALLTLVAIFGFSGTELIGVGVLYAFISYLGRITEPLIEMTQQLALLQQALVASERIFEMMDAPEQSYGHDQQPLKSGSIAIEQLSFSYDGKQQVLKKIDIDVEHQQFVALVGHTGSGKSTLASLLMGFYPVSQGKLKLDGRPIASLAKSVLRKDVAMVQQDPHILPTSVRENIALGREVSDDIIWQSLEQVGLAEQIKRYPQLLDTQLGQGETNLSAGQKQLLAMARVLIAKPKILILDEATANIDSGTEALIQRSLNALRHDMTLVVIAHRLSTIMEADKIVVLHHGDLVEMGSHKQLLAQQGRYAQMYQLQQAGQHIKEIEQQEEQELEQAS

SEQ ID NO: 4440 - DNA, 1788 bp, Lactobacillus plantarum WCFS1
  CDS (1)..(1788): transl_table=11
atggcagcacgtcagtcggtatgggcacgttccatgcctgttaaggaacaactcacggttattcggcgactattgccgtatgcgaaaccgttcaaatggttttttattgcggccatcgttttttccggtctgattagtgtggttaatatctatctgccgcgtgtattacagacctttattgatcattatctcaaaacaggacacgccacggtaccggtcatgtggtactttgcgggcctgtatttcttcggcatggttgtgcgcgcgttgatgcagttcgtacagaacttcagtagtacgatgggggcagaatatatgcttgaaaatgtccgccgacaaatgttcgccaagttgcatcggatgggcatgcgctactttgatcaagtccctggtggctcaattttgtcacgcctgactaacgatacgatgtcgttttccaatttttgggcgttgtttaatacattatttaccgccttttttgcggtgatttcgtcgtttgtcgcgatgtatctcaccgatgcgcagattgccttgtggttattggttttcatgccttttttggctgtaacgatttggtattatcaacggtatagctcacgggtttaccggcgaatgcgggaacggctcagtgagttgaataccaagttgagtgaagcaattactggaattagtgttattcagcaatttcgacaagaacaccgtatcaatggtgaatttgatcataccaatgatgcctattttaagacccgccaagcgatgatccggacgaactcattattattaagtccactgatcgacttgttttatgcgttagggacggtcatggttctgggaatcttcggggttcgtggactcaatggttatgtggctgccggggtcgtttatgcgttcatcacgtacctgaataacttctataatccgatgacgtcgatgatggataatttgtcagactttcaagatggcgtcgtcgccggatcacgggttttacgggtcatggatgatccaacgattgccccggcccaacacgccgatcctacggctaagattacgcgcggtaagattgaatttcggcacgtcacctttgcctatgacggccagcatccggtcttaaaagacgtttcattcgtggctgaaccaggccaaacggtggcactagttggtcagacggggagtggaaaaacgtcgacgattaatgttttgatgcggttttatgagtttcagtcaggagaagttttaattgatgatcgcgacattcgtgagtatccggctgaggaattgcgacagaagatggggttggtcttgcaagaaccgtttatgttttatggtgatattaattccaacatccgaatgtttaacgatcagatttcagatgaacaagttcaagcagcggcacggtttgtaaaggccgatgacttcatcaacgatttacctgagaattatcagtcacgcgtcattgagcgcggggccagttattcttcaggacagcggcaattgatttcatttgcgcggacgattgtgactgaccctaagattttaatcttggacgaagccacggcgaacgtcgatactgagaccgaagagatgattcagactggtttggatcggattcaggagaaccgcacgacgattgcgattgcccaccgcttgtccacgattcaaaatgctgatttgatcctggtcttaaatcaggggcaaatcgttgaacgcgggtccaacgacgagctattgcaacagcatggttactactatgatatgattcagttgcaaaattccgctcacgtcgattaa

SEQ ID NO: 4441 - protein, 595 aa, Lactobacillus plantarum WCFS1
MAARQSVWARSMPVKEQLTVIRRLLPYAKPFKWFFIAAIVFSGLISVVNIYLPRVLQTFIDHYLKTGHATVPVMWYFAGLYFFGMVVRALMQFVQNFSSTMGAEYMLENVRRQMFAKLHRMGMRYFDQVPGGSILSRLTNDTMSFSNFWALFNTLFTAFFAVISSFVAMYLTDAQIALWLLVFMPFLAVTIWYYQRYSSRVYRRMRERLSELNTKLSEAITGISVIQQFRQEHRINGEFDHTNDAYFKTRQAMIRTNSLLLSPLIDLFYALGTVMVLGIFGVRGLNGYVAAGVVYAFITYLNNFYNPMTSMMDNLSDFQDGVVAGSRVLRVMDDPTIAPAQHADPTAKITRGKIEFRHVTFAYDGQHPVLKDVSFVAEPGQTVALVGQTGSGKTSTINVLMRFYEFQSGEVLIDDRDIREYPAEELRQKMGLVLQEPFMFYGDINSNIRMFNDQISDEQVQAAARFVKADDFINDLPENYQSRVIERGASYSSGQRQLISFARTIVTDPKILILDEATANVDTETEEMIQTGLDRIQENRTTIAIAHRLSTIQNADLILVLNQGQIVERGSNDELLQQHGYYYDMIQLQNSAHVD

SEQ ID NO: 4442 - DNA, 1779 bp, Vibrio parahaemolyticus RIMD 2210633
  CDS (1)..(1779): transl_table=11
atgaaacaaaccagtacatttaagcggttgttgtcttatccattgtctcagccgaagccaatgataaaaggcttagctttgctgtttatcgcggcgttagcgagtgcgagtggcccttggttgatccagtattttattgatgaacacattgccaaaggtgactactctcgtaacgtattgattgctttagcgttgggctacgtgtcacttcaagtcatttcggcaacgttccaatatcttcaatcgttgcaatttagcatggtggcaacgaacacgatcaaaaccattcgcaagcaagtgttttcgggagtgatcaaacagccactttctgcgtttgacttcacgcctgctggtaagcttgtttctcgaatcacgaatgatacagaatcacttcagcagttttacgagttgttaatcgcgaccatggttaagaacgttgtgatgatcgtggtgatgttgggtgtcatgttcttcatgagttggaagttgacgctggttgttctcgtcctgttaccgatcgtaattggttttatgtatctgtttaaacaactcagtaccgagagttatcgtagaatgcgtgacttgctcacggacattaacgccaacttaagcgaatcaatccaaggaatgagcgtgattcagcttatgcaacaagaggggcgctttaataaacagtttaacaaactcactgctgagcatttggtcgcgtccaaaaaagtgattcgcttaaacgggtatctgctgcggcctctcatggatctgttggctggccttgccctactctgcttagttgccatctttggctttaatggtgtcgagttgattggtgtcggtgtactttatgcattcatcagttatttggcgcgtgtgaccgaacctctgattgaaatgacccaacaacttgcacttttacaacaagcgttggtgtcgagtgaacgtgtttttgagttgattgatgcgaagccacaaacttacggtgacgatcataaaccacttaaaacgggctcaattgagctaagtaatctgacgttcagttatgatggtaagcaagatgtattgaaagacatctccttgaaagccgctcatcaagattttatcgcgctggtcggccatacgggcagcggcaagagcacgttagcatctttgctcatgggcttttatccaaccaatgtgggcgagttattaattgatgggcggccacttaatacattgggtaaagacgtacttcgcaaagacgtagcaatggttcaacaagatccgcacattctcccagcctctgtacgtgagaacatttctcttagccgagtagtgagcgatgagcagatatgggatgcgttagataaggtaggtttatcggtgcaaattcgccgctatccaaacggcttagacactcaactcggccaaggtgaaaccaacctttcggcaggtcaaaagcaattacttgcgttagcccgagtgttagtggcgaaaccaaaaatcttaattttggatgaggcaacggcgaacatcgattccggaactgaggctctcattcaaaaaagcttaaaagttttgcgccaaaacatgacgttagtggtcattgctcaccgactgtccaccatattggatgcagaccaaattgtggttctacaccatggtgacttggtcgaacaaggcacgcataaagccttattgcaacaaaatggtcgctacgctcaaatgtaccagttacaacaagcgaatagacaccttcaacagattgagcaagaagatgctaaacaactagaagaagctgtttaa

SEQ ID NO: 4443 - protein, 592 aa, Vibrio parahaemolyticus RIMD 2210633
MKQTSTFKRLLSYPLSQPKPMIKGLALLFIAALASASGPWLIQYFIDEHIAKGDYSRNVLIALALGYVSLQVISATFQYLQSLQFSMVATNTIKTIRKQVFSGVIKQPLSAFDFTPAGKLVSRITNDTESLQQFYELLIATMVKNVVMIVVMLGVMFFMSWKLTLVVLVLLPIVIGFMYLFKQLSTESYRRMRDLLTDINANLSESIQGMSVIQLMQQEGRFNKQFNKLTAEHLVASKKVIRLNGYLLRPLMDLLAGLALLCLVAIFGFNGVELIGVGVLYAFISYLARVTEPLIEMTQQLALLQQALVSSERVFELIDAKPQTYGDDHKPLKTGSIELSNLTFSYDGKQDVLKDISLKAAHQDFIALVGHTGSGKSTLASLLMGFYPTNVGELLIDGRPLNTLGKDVLRKDVAMVQQDPHILPASVRENISLSRVVSDEQIWDALDKVGLSVQIRRYPNGLDTQLGQGETNLSAGQKQLLALARVLVAKPKILILDEATANIDSGTEALIQKSLKVLRQNMTLVVIAHRLSTILDADQIVVLHHGDLVEQGTHKALLQQNGRYAQMYQLQQANRHLQQIEQEDAKQLEEAV

SEQ ID NO: 4444 - DNA, 1785 bp, Enterococcus faecalis V583
  CDS (1)..(1785): transl_table=11
atggaagaaaagtatcaatccgaatggtccagagaattaccgatgaaagaacaattaacgattgttcagcgtttgtttcgttttgccaaaccgtttcgacgcatgttttacacagctattctctttgcatttggcttatcaattatcaatattcttttgcctagagtcattcaagtttttatggataattatttaacgcctaaaactgctacaatgcaagtgattctaacttttgctgctatttatttctttggtgtcattgtcaaaagtattgtttggtttttccaatggtatttgtattcgatggcttctttaaaaacgtatcaatatatacgagtgaaattatttgaaaaattacacactttaggtatgcgttattttgatcaaacaccagcgggttcgacggtgtctcgtgttacaaatgacacagaaacattgtttgaattctggtatgtattcctaatggtgattacaggaatttttgccgtaatctcgtcattttttgcaatgtttcaactcagtccagaaatctcattttattgtctaattttcttgccgattttattagttgtgatttggtattaccaaaaatttagttcaaaattatatcgcagtatgcgggaaaaattaagtcaattaaacaccaaactaaatgaatacatctctggtatgcaaatcattcaacaatttcgccaagaaaagcgtttggaaaaagaatttgaggaaaccaatgatgattatttaaaaacacgagtagcaatgattcgtatgaattcgttattattaagtcccatcattaatttgttgtatacgttggcgattgcattggccttaactatgtttggcatcgatgctttacattcacctgttgaagcggggatgatttatgcttttgtaacgtatgtccaagctttttttaatccgatgacgcaaatgatggacttcctaagtatctttacagatgggattgtcgcaggtagccgtattttaaaaattatggatacggaagaattaacgccgcaacaatcagtaggtgcgaatggggaaattattcgcgggaaaattgaatttcgcaatgttactttttcttatgacggcaaaaacgaagtattgaaaaatattagctttgtcgcaaatcccggggaaaccgtcgctttagtcggtcatacaggaagtggtaaaagttcaattattaatgtactcatgcgtttctatgaattttatgaagggcagattttaattgatgatcgtgacattcgtgattttcccatgacagaattacgggaaaagatgggcttagtattacaggacgctttcatgttttatggagatattgctggaaatatccgtttactgaatcccaatattacagatgagcaaattaaacaggctgcggaatttgttcaggcagataaatttattcacacgttacccaatacctatcatgcgaaagtcattgaacgaggagcgagttattctagcgggcaacgtcaattaatttcgtttgcacgaacgattgtgactgatcccaaaattttagttttagatgaagcaaccgctaatattgatacagaaacagaaggattgattcaagaaggattagccaaaatgcgtcaagggagaacgacaattgcgattgcgcatcgcctttcgacgattcgtgacgcaaacttgattttagttttagacaaagggcagattgtagaacgaggaacgcacgaaacgttactggcagaaggtggcctttatgcggatatgtatcagttacaaagtacggaagtttaa

SEQ ID NO: 4445 - protein, 594 aa, Enterococcus faecalis V583
MEEKYQSEWSRELPMKEQLTIVQRLFRFAKPFRRMFYTAILFAFGLSIINILLPRVIQVFMDNYLTPKTATMQVILTFAAIYFFGVIVKSIVWFFQWYLYSMASLKTYQYIRVKLFEKLHTLGMRYFDQTPAGSTVSRVTNDTETLFEFWYVFLMVITGIFAVISSFFAMFQLSPEISFYCLIFLPILLVVIWYYQKFSSKLYRSMREKLSQLNTKLNEYISGMQIIQQFRQEKRLEKEFEETNDDYLKTRVAMIRMNSLLLSPIINLLYTLAIALALTMFGIDALHSPVEAGMIYAFVTYVQAFFNPMTQMMDFLSIFTDGIVAGSRILKIMDTEELTPQQSVGANGEIIRGKIEFRNVTFSYDGKNEVLKNISFVANPGETVALVGHTGSGKSSIINVLMRFYEFYEGQILIDDRDIRDFPMTELREKMGLVLQDAFMFYGDIAGNIRLLNPNITDEQIKQAAEFVQADKFIHTLPNTYHAKVIERGASYSSGQRQLISFARTIVTDPKILVLDEATANIDTETEGLIQEGLAKMRQGRTTIAIAHRLSTIRDANLILVLDKGQIVERGTHETLLAEGGLYADMYQLQSTEV

SEQ ID NO: 4446 - DNA, 1908 bp, Streptomyces avermitilis MA-4680
  CDS (1)..(1908): transl_table=11
atgagtatggagaccaccgcctggacccagttgcacagcgtcatgaacgcgcagcgggagacccgccccttcgcccgtgcgacgctgcgccgcatcgccgcgttcgcccgcccgcaccgccgccgtatcgcgcagttcgtcgtgctcagcgtggtgaccgcgctgctcgccgtcgcgacaccggtgctcgccggacgcgtcgtcgacgcgatcgtgtcgggtggcgacgagagcacggtcgtacgcctggccgtcctcatcgcggtcatcgcgctcgccgaggccggactcggactcgtcagccgcctgctgtcggcgaccctcggagaagggctcatcctcgatctgcgcacggctgtgttcgatcatgtgcagcgcatgccggtcgcgttcttcacacgtactcgtacgggcgcgctggtcagtcgtctcaacaacgacgtgatcggcgcccagcgcgcgttcagcaacaccctgtccggagtcgtcggcaatgtggtgaccctgctgctcaccctcgccgtgatgctcaccctgtcctggccgatcaccctgctcgcgctggcgctgctgccggtcttcgtgctgcccgcccggcggatgggcagccggatggcgaagctccagcgggaggccgcggacctgaacgcggccatggggacccggatgacggagcggttctcggcgccgggtgccacgctggtgaagctcttcggccggcccgacgaggagtccgccgagttcgcggcgcgggcccggcgggtgcgggacatcggggtgcgtacggcgatggcgcagtgggcgttcatcacggcgctgacgctcgtttccgccctggccctcgcccttgtctacggcctcggtggctggttcgccctgcgcggccgcctcgagccgggcgccgtcgtctcgctcgccctcctgctgacccgcctctacgcgccgctgacctccctcgcgggggcgcgcgtcgaggtcatgagcgccctggtgagcttcgagcgcgtcttcgaagtgctggatctgaagccgctcatcgaggagaaggcggacgcgcgcgcggtgccggacggcccggcgtcggtggagttcgacaacgtccgcttcggctacccggcggcggacaaggtgtccctcgcctcgctggaggaagtggccgccctggacacccgcggcggcgcggaggtcctgcacggcgtctccttccgtgccgaacccgggcagacggtggcgctggtcggctcgtccggcgccggcaagtcgaccatcgcccagctgctgccgcggctgtacgacgccgacgagggcaccgtacgcatcgggggcgtcgacgtacgcgacctgagcgcgccgtcgctgcgggccacgctcgggatggtcacccaggacgggcacctgttccacgactcggtacgggcgaacctgctgctggcgcgcccctcggccgccgaggacgaactgtgggacgtcctgcgccgggcccgcctcgacgagctcgtacgctccctgcccgacggcctcgacaccgtggtcggcgagcgcggctaccggctctccggcggcgagcgccagcgcatgaccatcgcccgtctgctgctcgcccgccagcgcgtggtgatcctcgacgaggcgaccgcccatctcgacaacacctccgaggcggccgtccaggaggcgctcgccgaggcgctcgcggggcgcacggccgtggtcatcgcgcaccgactgtccacggtgcgggccgcggacgtgatcctggtcgtcgaggccggccggatcgtggagcggggcacgcacgagcaactgctcgcggcggacgggcggtacgcggaactgcaccgcacacagttcgggaagcccgtgccgggggcggcggaggtcgccgaggcgggggaggcggtggcctag

SEQ ID NO: 4447 - protein, 635 aa, Streptomyces avermitilis MA-4680
MSMETTAWTQLHSVMNAQRETRPFARATLRRIAAFARPHRRRIAQFVVLSVVTALLAVATPVLAGRVVDAIVSGGDESTVVRLAVLIAVIALAEAGLGLVSRLLSATLGEGLILDLRTAVFDHVQRMPVAFFTRTRTGALVSRLNNDVIGAQRAFSNTLSGVVGNVVTLLLTLAVMLTLSWPITLLALALLPVFVLPARRMGSRMAKLQREAADLNAAMGTRMTERFSAPGATLVKLFGRPDEESAEFAARARRVRDIGVRTAMAQWAFITALTLVSALALALVYGLGGWFALRGRLEPGAVVSLALLLTRLYAPLTSLAGARVEVMSALVSFERVFEVLDLKPLIEEKADARAVPDGPASVEFDNVRFGYPAADKVSLASLEEVAALDTRGGAEVLHGVSFRAEPGQTVALVGSSGAGKSTIAQLLPRLYDADEGTVRIGGVDVRDLSAPSLRATLGMVTQDGHLFHDSVRANLLLARPSAAEDELWDVLRRARLDELVRSLPDGLDTVVGERGYRLSGGERQRMTIARLLLARQRVVILDEATAHLDNTSEAAVQEALAEALAGRTAVVIAHRLSTVRAADVILVVEAGRIVERGTHEQLLAADGRYAELHRTQFGKPVPGAAEVAEAGEAVA

SEQ ID NO: 4448 - DNA, 1626 bp, Bacillus cereus ATCC 14579
  CDS (1)..(1626): transl_table=11
gtgtataaagcgaaagcattaacgaaagaagaagtgtttgcattttataaaccagaaataaaccgtctattattacttggtggtggctatttcgctttattagtagtcgtgtcattatttgcatacggaaagcagttcttcttgcagaaggcagcgaacaaaattattcaaattatgagggaagatgttttttctcatattcaaacgttgccaattcggtactttgatcatttaccggcggggaaaattgtttcgcgtgtgacgaatgatacagaggccattcgtgatttatatgtaacggtgctggcaacattcgtttctagtatcatctatattattgggatattcgctgcgttatttttattagatgtgaagctcgcttcattatgtttattaattatcccaattttaattgtttgggcgattctttatagaaaatatgcgtctgtatacaatcataaaatgcgctctcgcttatctgatattaacggaacagtgaatgaatccattcaagggatgccaattattcaagcgtttcgtcaagagcgtgaaacgaaaaaagaatttgaagaattaaatggcgattattttaagtatcaaaataaaattttaaatttaaatgcagcaacttcgcataacttagtagccgtattaagaaatatcgctttcacaggagtaatttggtatttcggcggtgcgtcattaagtgctacaggtattatttcacttggggtactgtatgcgttcgtcgattatttaacacgattattctcgccaattacgaatatggtgaaccagcttgcaaacttagagcaagcgcgcgttgcatcagaacgtgtctttgaattgttagaggaaaaaggggaaccggtagaagaagaacgtatgcctcgtttaaaaggaaatgtaaaatttgataatgtatcattttcttataatggaaaagatgaagtgttaaaaaatatttcttttgaagcgaaacaaggcgagacagtggcacttgtcggtcatactggatcaggaaaaagttctatcatgaatgtactctttcaattttatgagtttgaaaaaggaaagcttacgattgatggtcacgatgtaaaagagatgccgaaacaagcaacccgtgaacatatgggaatcgtactgcaagacccgtttctttttagcgggacggtcgcttccaatgtaagcttagaaaatgaaaaaatttcaaaagagcgtatcataaaagcattgcatgatgttggtgctgaaagatttgcgaataatataaatgaagaaattacagaaaagggaagtacgctttccactggagaacgtcagcttatttcatttgctagggcgcttgcttttgatccagctatcttaattttagatgaagcaacgtctagtattgatacagaaacagaggcgatgattcaacaagcactagaagttgtaaaaaaaggaagaacgacatttattatcgctcaccgcctttcaacgattaaaagcgcagatcaaattattgtgctcgatagaggaaccattttagaaaaaggctctcatgatgaactcatgaaaaagcgggggcgttattacgatatgtataaaacgcaaatggaaggcaatcagagtgcttaa

SEQ ID NO: 4449 - protein, 541 aa, Bacillus cereus ATCC 14579
MYKAKALTKEEVFAFYKPEINRLLLLGGGYFALLVVVSLFAYGKQFFLQKAANKIIQIMREDVFSHIQTLPIRYFDHLPAGKIVSRVTNDTEAIRDLYVTVLATFVSSIIYIIGIFAALFLLDVKLASLCLLIIPILIVWAILYRKYASVYNHKMRSRLSDINGTVNESIQGMPIIQAFRQERETKKEFEELNGDYFKYQNKILNLNAATSHNLVAVLRNIAFTGVIWYFGGASLSATGIISLGVLYAFVDYLTRLFSPITNMVNQLANLEQARVASERVFELLEEKGEPVEEERMPRLKGNVKFDNVSFSYNGKDEVLKNISFEAKQGETVALVGHTGSGKSSIMNVLFQFYEFEKGKLTIDGHDVKEMPKQATREHMGIVLQDPFLFSGTVASNVSLENEKISKERIIKALHDVGAERFANNINEEITEKGSTLSTGERQLISFARALAFDPAILILDEATSSIDTETEAMIQQALEVVKKGRTTFIIAHRLSTIKSADQIIVLDRGTILEKGSHDELMKKRGRYYDMYKTQMEGNQSA

SEQ ID NO: 4450 - DNA, 1719 bp, Bacillus cereus ATCC 14579
  CDS (1)..(1719): transl_table=11
atgaagccatataaagggttactatctttagcatttatctttttagttggtgcgacagtaacggaaatgatgggtccttttttaattaaacaattcctcgatgaacacctagtaccgcgggattttgaacgatcagcgctcgttactttatttgtaatttacatagttgctcatttattaaaagtactatttacgtatttaaatctattgtactttcagaacattgcttttaagattgttcaagatatgcgagttgaagtatatgaacatgttcaaaagctgtcattaagtttctttgatcgtacgccgattggtacacttgtatcgcgtataacaaatgatacggaagcgattaaagatttttatgtcagtgtattatcaacatttgtaaaaaatgtagtctttttagtaggtattttagtagcgatgtttttattagatgtaaaattagcgctattttctctcgtattaattccgataatgtttgcgattatggtattatatcgccggaaaagtgcagctttttatttagaagtacgtaatcaactaagcgtgttaaatgcaaagttgaacgagtccatacaaggaatgaatattgttcaagtgttcagacaagaaaaacgtatgagaaaagagtttgaagaagtgaataataaacattatagtgcagggcgacgtactttgaagttagacgcattacttttacgaccagctacggatttagtacatattgtagctattgcgttagtactaggtttatttgggattgatgctttaaagagccctgttgaagtaggagttttatatgcttttgttaactatatacatcgtttcttccaacctgtaaatgagatgatgatgaaattgtccttcttccaacaggcacttgtttcgtcatcacgtgtatttcatttaatggacgagaaagatttagcaccggttcaaaaaggtaatgagaatcctcaaatcgtggatggagatattgaatttaaaaatgttactttttcatatgatggaaagcgtgacgttttaaaaaatgtatcatttcacgtgaaacaagggcaaacggttgcttttgttgggcatactggtagcggaaaaagtacgattatgaatttgttaatgcgattttataatattaagtcaggaaatattgtaatagacggtgtagatttagaaaaatttgaagaacgagaaattagaaagaaaataggactcgtattgcaagatgcatttttatttgctggaaatgtaaagcaaaatattcgtatgtataatgaagaaattacggatgaagaagtaaaagaagctgctcgatttgtgcaagcgaatacgtttattgaaaagttaccaaaacagtatgaaacagaagtagtagaaagaggtgcagcattttcaagcggtcaacgacaattaattgcttttgctagaacgatagcaacgaatccgaaagtattagtattagatgaagcaacagctaatatcgatacagaaacagaagaggctattcaaacagcgttgcaacaaatgcgaaaaggtagaacgacgatagccattgcgcataggttatctacaattcaagatgcggatcaaatttttgtgatgcatgatggagagatagtagagagagggacacatcaagaattattaagtgagcaaggtttgtattataatatgtatttgctacaaaataaagtgagtttgcaaaaggccttgtaa

SEQ ID NO: 4451 - protein, 572 aa, Bacillus cereus ATCC 14579
MKPYKGLLSLAFIFLVGATVTEMMGPFLIKQFLDEHLVPRDFERSALVTLFVIYIVAHLLKVLFTYLNLLYFQNIAFKIVQDMRVEVYEHVQKLSLSFFDRTPIGTLVSRITNDTEAIKDFYVSVLSTFVKNVVFLVGILVAMFLLDVKLALFSLVLIPIMFAIMVLYRRKSAAFYLEVRNQLSVLNAKLNESIQGMNIVQVFRQEKRMRKEFEEVNNKHYSAGRRTLKLDALLLRPATDLVHIVAIALVLGLFGIDALKSPVEVGVLYAFVNYIHRFFQPVNEMMMKLSFFQQALVSSSRVFHLMDEKDLAPVQKGNENPQIVDGDIEFKNVTFSYDGKRDVLKNVSFHVKQGQTVAFVGHTGSGKSTIMNLLMRFYNIKSGNIVIDGVDLEKFEEREIRKKIGLVLQDAFLFAGNVKQNIRMYNEEITDEEVKEAARFVQANTFIEKLPKQYETEVVERGAAFSSGQRQLIAFARTIATNPKVLVLDEATANIDTETEEAIQTALQQMRKGRTTIAIAHRLSTIQDADQIFVMHDGEIVERGTHQELLSEQGLYYNMYLLQNKVSLQKAL

SEQ ID NO: 4452 - DNA, 1734 bp, Wigglesworthia glossinidia endosymbiont of Glossina brevipalpis
  CDS (1)..(1734): transl_table=11
atgtatattaaatacaatttaaaaaattatttaaaacgtctattaatatatgcatatccttttaagaaaaaattcatattagcatgttctatgttattgttgtcctcagctatggaaatttctggtccaataataattagttattttatagataatctatttaaaatagttaaaatgccaatatggatgtttttaatttttatgtttagttttttagttttacaaattatgtctgcgattttgaggtattatcaatcttacatattcagtaaaatatctttaaatatagtagctaaaattagaaatattgttatgaattcaattttacataaaccattatcttggtttgacaaacaatcaatgggcaaattaatttcgatcataataaatgatactgaaattataaaaaacttacttatacattttatatcttctataataaaaagtataacattaatttttagtatatctgtagctatttttatattaaattggaagttaggatttatttcattaattttatttcctataataattttcataatgaaaacttatcagatttatagtataccaattttttttagaataaggcattgcgtagaaaatattaataatttttttaatgaaattattaaaaatatgaaaattattcaacaatttagacagcaaaaaagattcagagaaaaattatataaaataaataaagaacattttaaagctcgtatggacagtctaaaactagaaggatatcttcttaggcctttactaagtttagtattttctttaattctttgcattatattacttttatttggtttaagtccaaataacattgttggagtaggaactttatatgcttttattcattatttaggaagattaagcgagccattaatagaaattacttctcatcaatctattttacaacaagcacatgttgcatgtgagagaatttttaatttgttagaatcaccaatccaatcttatggaaaagataataaaaaaatatttagcggatgcattcaagcaaaaaatataactttttcatatgactataaaaatttaattttaaatcatatatctttttatgttccagaaaaaagttttttagctttagtaggtcaaacaggaagtggaaaaagcactttagctaatttaattatgggtcattattcattgaaaaatggaactctactaatagataacagaccaatagaaacattgtctagaaaagtaattcgtaaaggaatatcaatggttcaacaagatccagttataatatcaagatcaatttacgataacatcgtatttggaagaaaaattaaagaaaaacaagtttggtctactttaaaaaatttaaatcttgtatcttttattaattcttttccaaatggaatattttctaaattagacgaatatggaaacatgctttctgctggacaaaaacaattaatatctttagcaagggttttagtatctgtaccttcaatattaatattagatgaatctacatcaaacattgattatgatacagaaaaattaattaataatattttatgcaagataaaaaaaactactactataatagttatagctcatagatttagtactattttaaatgctgataatattttagttttacataaaggaaatattgcagaacaaggaaatcatttatctcttataaaagagaaaggaaaatattacaaaatgtataatttacaaaaaaattaa

SEQ ID NO: 4453 - protein, 577 aa, Wigglesworthia glossinidia endosymbiont of Glossina brevipalpis
MYIKYNLKNYLKRLLIYAYPFKKKFILACSMLLLSSAMEISGPIIISYFIDNLFKIVKMPIWMFLIFMFSFLVLQIMSAILRYYQSYIFSKISLNIVAKIRNIVMNSILHKPLSWFDKQSMGKLISIIINDTEIIKNLLIHFISSIIKSITLIFSISVAIFILNWKLGFISLILFPIIIFIMKTYQIYSIPIFFRIRHCVENINNFFNEIIKNMKIIQQFRQQKRFREKLYKINKEHFKARMDSLKLEGYLLRPLLSLVFSLILCIILLLFGLSPNNIVGVGTLYAFIHYLGRLSEPLIEITSHQSILQQAHVACERIFNLLESPIQSYGKDNKKIFSGCIQAKNITFSYDYKNLILNHISFYVPEKSFLALVGQTGSGKSTLANLIMGHYSLKNGTLLIDNRPIETLSRKVIRKGISMVQQDPVIISRSIYDNIVFGRKIKEKQVWSTLKNLNLVSFINSFPNGIFSKLDEYGNMLSAGQKQLISLARVLVSVPSILILDESTSNIDYDTEKLINNILCKIKKTTTIIVIAHRFSTILNADNILVLHKGNIAEQGNHLSLIKEKGKYYKMYNLQKN

SEQ ID NO: 4454 - DNA, 1797 bp, Prochlorococcus marinus str. MIT 9313
  CDS (1)..(1797): transl_table=11
atggctgttactgattttcagcgggttcggcgtctagggcgctatctccgtgaggaccgccggcgtctatggatggtgcttgtcctcttggtgccggtagctcttgctggtgcgattcaacccttcttggttggccaggcaatcagtgttttgaagcaagagtcaaccttcccttggctcagtgatctgccagtgagctcagcaataagagttttggtggggattctgctgatttctgtgcttctgcgcttgggtctgcagggctttcagtctttcaatatcgaggccttagggcaacggctaacggcgcgtattcgtaacgatctgtttggccacgccatggccctttcgctgcgctttcacgatcgaatgcctgtgggcaagttgttgactcggctgaccagtgatgtgaatgcactatcggaggtttttggtagtggggcagtaggagttttgggggatctcgtcagccttgtggtgattgcagtcaccatgattttgattgattggcgcctgggggggttgctgctggtgacgcaggtaccagtcaccttggtgatcctttggttgcaacgccgataccggaaagccaattaccgcgtgagggaggaactctctcagctcaatgccgattttcaggaaaaccttcaggggcttgaggttgtccagatgtttcgtcgagaaacgtttaatgggcagctatttgatcgcactggctcggcctacaggcaagccgtgaatggaacgatcttttatgacagcagcatttcagcttttatcgaatgggtggccctggcagccgtggctgtggtgttggcgcttgggggatggatggtaactgccgagacaatgggccttggcaccttgacaacattcatcctttattcccagcgtttgtttgatcccctgcgtcaacttgctgatcgcttcactcagattcaggggggcctgactgctgttgaacggattggcgagttgctggagcagccactggacattgtcgatgcaaagcctgttaaagacgaacccagctttgttaggccctcggcttctgctgcttgcggtgaggtggtgtttgagggggtgagctttgcctatcggccagacgagccgattctccaggaccttagttttcgcatttctgctggtgaacatgttgccctggtaggaccaaccggttcaggcaagacgaccctgatccgcttgctttgtcgtctttacgagcctcaagtcgggcggatcatgcttgatggtgttgacatcaaaacaatccctctttggcggctacgcaaacaactgggggttgtgcttcaggacacctttctatttagcggcaatgtggcagataacctccgattggattcctcgattgaggatgaccgtttgcggacgatctgtagagatcttggccttgatcctttgctcaatcggctacccaacggcttggagactgagctcagggagcgtggcggcaatttgtcatcgggagagagacagctcttagcagttgcaagggtggccattcgcaaccccactgtgctggtaatggatgaggcgaccgctttcatggacccttctacggaagcgacattgcaaagggatctagatcgcttgcttgaacgtcgtaccgcggttgttattgcccatcgcttggccactgtggaagcagccgatcgaattatggtgcttcggcggggcaagctgattgagcagggaacccaccttgagcttcgtgccaagggaggcctttattctcagttagcggaactacaggaaaggggactggcgaaactttga

SEQ ID NO: 4455 - protein, 598 aa, Prochlorococcus marinus str. MIT 9313
MAVTDFQRVRRLGRYLREDRRRLWMVLVLLVPVALAGAIQPFLVGQAISVLKQESTFPWLSDLPVSSAIRVLVGILLISVLLRLGLQGFQSFNIEALGQRLTARIRNDLFGHAMALSLRFHDRMPVGKLLTRLTSDVNALSEVFGSGAVGVLGDLVSLVVIAVTMILIDWRLGGLLLVTQVPVTLVILWLQRRYRKANYRVREELSQLNADFQENLQGLEVVQMFRRETFNGQLFDRTGSAYRQAVNGTIFYDSSISAFIEWVALAAVAVVLALGGWMVTAETMGLGTLTTFILYSQRLFDPLRQLADRFTQIQGGLTAVERIGELLEQPLDIVDAKPVKDEPSFVRPSASAACGEVVFEGVSFAYRPDEPILQDLSFRISAGEHVALVGPTGSGKTTLIRLLCRLYEPQVGRIMLDGVDIKTIPLWRLRKQLGVVLQDTFLFSGNVADNLRLDSSIEDDRLRTICRDLGLDPLLNRLPNGLETELRERGGNLSSGERQLLAVARVAIRNPTVLVMDEATAFMDPSTEATLQRDLDRLLERRTAVVIAHRLATVEAADRIMVLRRGKLIEQGTHLELRAKGGLYSQLAELQERGLAKL

SEQ ID NO: 4456 - DNA, 1740 bp, Chromobacterium violaceum ATCC 12472
  CDS (1)..(1740): transl_table=11
ctgcaaacccgcgaagccgtcgcgctgctggccgacgccgcccgtcccgaccgccgccacctgtggctgggcggcttctggctgctgatcgccgccctgctggaggccggcgcgccgctgctgggcaaggtgttcatcgacagctacctgctgccgcaccggctggactggagcgccatcgccggcctgctggccggcagcctgctgctgggcctcgccgccgccgcgctgcgctaccggcagctggtgcgcttggccggcgtggcgatgcgcgcggtgctgcggctgcgcgagcgggtgtacggccacgtgatgcggctgccgatggccttcttcgacaaggccatcaccggccagctggtcagccgcgtcaccaacgacaccgagtccgtcaaggcgctgtatgtgcaggcgctgttcgtcatcctcaacagcagcatcgtggtgctcggcgcgctggcggcgatggcctggctggactggcggctgatgctggtcaccctgctgctgttccccgccaccttcgccatcgtctggctgtaccagcggctgagcgcgccgtcggtggcgcgcgcgcgcgcgctgcgcagcgacatcaacgcccagatggcggaatccatctccggcatcgccgtgctgcaggccagcaacgccgagggccgcttcatcgcccgcttcgacgacaccaaccagcgctattaccaggcgcggctgcgcgagctgcgcgccaacgcctggctgctgcgcccggcgctggacctgctcaacgtgctgctgctgatcgccgtgatccacagctacggccagcggccgctggacgggctggagatcggcgtgctgtacgccttcgtcggctacattggccgggtggtggagccgctgatccagatcacgctgcaattcggccagttgcagcaggcggtggtggccgccagccgcgtcagccagctgctggccgagtcgcccgcgccgggcccggcggaaaccggccgcgtctgcgacggcgcggtcagcttccgcggcctgcgcttcggctaccagcccgagcacccggtgctgcacgatctgagcctggagattcccgccggcggcttcgtcggcatcgtcggccataccggcagcggcaaatcgacgctgctgtcgctgctgctgcgcttctatcggccgcagcagggcgagatcctggtcgacggccagccgctggacgcgataggcgacgccgcctttcgcgccggcataggcctggtgccgcaagacccgttcctgctggccgccagcgcgcgcgaaaacatagacatgggccgcggcctgccgcaagacgagatcgaggaagccgcccgcgccgccggcgtgcacgaactgatcctgtcgctggaaaacggctacgacagcgatatgggcgagagcggcgcgcggctgtccagcggccagaagcagctgatcgccatcgcccgcgcgctggcgggcaagccgcgcatcctgctgctggacgaggccacctcgcacatcgacagcgaaaccgagcaactggtgcagcaggcgctggccaagctggccggcaagatcacgctgatctccatcgcccaccggctgtccaccatccgcgacgccgacaccatcgtcgtgctcaaccacggccgcatcgccgaatccggtgaccacgacgcgctgatgcgccagggcggcatctaccacaagctctacttgctgcaacaattgcaacccgaggaggaagcgtaa

SEQ ID NO: 4457 - protein, 579 aa, Chromobacterium violaceum ATCC 12472
MQTREAVALLADAARPDRRHLWLGGFWLLIAALLEAGAPLLGKVFIDSYLLPHRLDWSAIAGLLAGSLLLGLAAAALRYRQLVRLAGVAMRAVLRLRERVYGHVMRLPMAFFDKAITGQLVSRVTNDTESVKALYVQALFVILNSSIVVLGALAAMAWLDWRLMLVTLLLFPATFAIVWLYQRLSAPSVARARALRSDINAQMAESISGIAVLQASNAEGRFIARFDDTNQRYYQARLRELRANAWLLRPALDLLNVLLLIAVIHSYGQRPLDGLEIGVLYAFVGYIGRVVEPLIQITLQFGQLQQAVVAASRVSQLLAESPAPGPAETGRVCDGAVSFRGLRFGYQPEHPVLHDLSLEIPAGGFVGIVGHTGSGKSTLLSLLLRFYRPQQGEILVDGQPLDAIGDAAFRAGIGLVPQDPFLLAASARENIDMGRGLPQDEIEEAARAAGVHELILSLENGYDSDMGESGARLSSGQKQLIAIARALAGKPRILLLDEATSHIDSETEQLVQQALAKLAGKITLISIAHRLSTIRDADTIVVLNHGRIAESGDHDALMRQGGIYHKLYLLQQLQPEEEA

SEQ ID NO: 4458 - DNA, 1767 bp, Gloeobacter violaceus PCC 7421
  CDS (1)..(1767): transl_table=11
atgtccgaagccgtcgagccgcagccgggtgagcgccgcaactgggaactgctcaagcgcgtctggccttttgcccgtcggcaggtgcgcctttttatactggccttggtcctgctgccgcccctggccaccgcgagcgccatcggcccgattctcatccagcgggccatcgacggaccggccaagaccggcgacatggggcttctgcattggctggcgtttttgttcgcccttacggtgctggtgcggttgggtctacaggcctggcagggctatttgctgcagcaggcgggccagcggatgaccgccgacatccgctcagcactttttgaccacgtcacccgcctatcgagcagctacttcagccgcacgccggtgggcaagctgatcacccgcctcaccagcgacgtcgaagcgttgggcgaagtcttttccaccggcggcgtgggtatcctcagcgatgccgtctcgattgtgatcgtggccgccttcatgttcacgctgcgctgggatctggccctggtggtagtaatcttactcttcccgatcaccgccatcgtcatctggtttcagaacacctaccgggcggccaattcccgcgtgcgcgaggcgctttccaacctcaacgccatcttgcaggaaaatctaatcggcgtgaacgtcgtgcagatgttccgccgcgaggggcgcaacgccgagcagttcgaccgggtcaaccgcgggtacatcaagtcggtggacgagacgatcctctacgattcggccctctcggcggtgatggagtggatttcgctggtggccattgccggggtgctctggttcggcggcggccaggtgctccaaaatgccattacttttgggacgctggtggcctttatccagtacgcccagcgcctgtttgatccgattcgccagttgggcgagcgcttcacgtcgatccagtcgggctttacgtccctggagcggatcaccgacatcctcgatgaacccatcgagatcaaagaccaggacaaaccgttgcaactgcccgcggacggtaccggagaagtcacgtttcaaaacgtctggtttgcctacaaagcggacgaatacgtgctcaaaaatgtcagcttcacgatcaaacccggccagaccgtggccctggtcggtcccaccggctccggcaagagcacgattatccggctgttgtgccgcctgtacgaacccacccaggggcgcatcctcatcgacggcgtcgatatccaactgattgcccaggaagagttgcgccgccgcatcggggtcattttgcaggaggggttcctcttctccggcgatatcaactcgaacatcgcccttggtgaacccttcagcgaagaagagattcaacaagccgcgcgggcgatgaacgtcgatcgcttcatccgcgagttaccgaacggctacaagacccaggtgcgcgagcgcggcaacaacctttccggcggccaaaagcagctgttggccttcgcccgcgccgccgtgcgcaacccacgcatcctgatccttgacgaggccaccgcttcgctcgatgtaggcaccgagtcgctcatccaacaagatctgggtcgtctgctcgaagggcgcacctgtatcatgatcgcccaccggctatccaccatccgcgacgtcgatcgcattttggtgttgcgcaaaggtgaactgatcgaagacggcagtcacgaacagctattggcccagcacgggctttacgagagcctctacaagctacaggctctggcctcttga

SEQ ID NO: 4459 - protein, 588 aa, Gloeobacter violaceus PCC 7421
MSEAVEPQPGERRNWELLKRVWPFARRQVRLFILALVLLPPLATASAIGPILIQRAIDGPAKTGDMGLLHWLAFLFALTVLVRLGLQAWQGYLLQQAGQRMTADIRSALFDHVTRLSSSYFSRTPVGKLITRLTSDVEALGEVFSTGGVGILSDAVSIVIVAAFMFTLRWDLALVVVILLFPITAIVIWFQNTYRAANSRVREALSNLNAILQENLIGVNVVQMFRREGRNAEQFDRVNRGYIKSVDETILYDSALSAVMEWISLVAIAGVLWFGGGQVLQNAITFGTLVAFIQYAQRLFDPIRQLGERFTSIQSGFTSLERITDILDEPIEIKDQDKPLQLPADGTGEVTFQNVWFAYKADEYVLKNVSFTIKPGQTVALVGPTGSGKSTIIRLLCRLYEPTQGRILIDGVDIQLIAQEELRRRIGVILQEGFLFSGDINSNIALGEPFSEEEIQQAARAMNVDRFIRELPNGYKTQVRERGNNLSGGQKQLLAFARAAVRNPRILILDEATASLDVGTESLIQQDLGRLLEGRTCIMIAHRLSTIRDVDRILVLRKGELIEDGSHEQLLAQHGLYESLYKLQALAS

SEQ ID NO: 4460 - DNA, 1785 bp, Photorhabdus luminescens subsp. laumondii TTO1
  CDS (1)..(1785): transl_table=11
atgactaaagttcgtcaattgtggccgtctctgaagcgtctgttggtttatggaaaaaattatcgtaagccgttggggctggctgtactcatgttatggggggctgcaattgcggaagtcagtggtccggttctcattagttattttatcgataatatggttgcaacgggtaatatgcctactagagtggttatcgggctagctataacttttattgttctgcaactgattacggcggcgttacactattttcaggctttattgttcaatcaagtgtcagttgatgtggttcagcagcttcgtactgatgtgatgaatgcagcattgcgccagcctctgagtgcttttgataatcaaccggtagggcagttgatttcccgtgtaacgaatgacaccgaagtcattaaagatctttatgttaatgtagttccatcggtatttcgcagcatggcattgattggtacgatgctgattgctatgtttatgttggaatggcgtatggcattgattgcaattcttatttttcctgtcgtattgattgttatggcaatatatcagcattttagtacacccattgtccgccgggtacgtagttatttggctgatattaatgatgagtttaatgaagtcattaatggaatgagtgttattcagcagttccggcagcaggcgcgttttggtgaacgtatgttgttaaccaatcgggcccattatcaggcgagaatgcaagcgttgagattagatgggcttttgttacgcccattattgagtttgctatctgctatggtactgtgcggtcttatcgtgttgtttggaattagtgggccaggggcgattggtatcggggtattgtatgcttttattaattatttggggcggttgaatgaacctcttattgagctgacatctcagcaatcgattttgcaacaagctgtcgtttctggcgagagaatatttgaattaatggatagccctcaacaaggttatggtatggatggtcagccactatccagtggtcgaattgatatagaaaatgtcagtttttcctaccggcatggaaaaatagttttgcaagatattaacttacaggttccggctcatggttttgttgctttggttggtcatactggtagtggtaaaagtacgctggcaaatttgctgatgggatattacccgtggcagaaaggggaaatttatctcgatggcaggcctgtatcatctctgtctcattcggtattacgcaatggtgtggcaatagttcagcaggacccggttgttcttgcggactctttctttgacaatattacgcttggtcggaatatttcagaagagaaggtttggcaagtactggaaacggttcaattagctgagttagtacgtacattgcctgatggacttcatactatcttgggagagcagggtaatacgttgtcagccggtcaaaaacaattgcttgctatggcgagagtgttagtgcaaacgccacaaattttgatccttgatgaagcgactgcaaatattgattctggtacggaacaggcggtacaacaggctttgagattgattcgtcaacaaacaacattgatcgtgattgctcatcgtctgtctaccattgtggaggctgatactattctggtgctgcatcgtggtgcagttgttgaacagggatgccatcaacaattatttgtgagtcgtggacgttattatcagatgtatcagttgcaacaagtaggtgagacattaaatgaatgtggcacaatctctgagaaagaggtgttaatttaa

SEQ ID NO: 4461 - protein, 594 aa, Photorhabdus luminescens subsp. laumondii TTO1
MTKVRQLWPSLKRLLVYGKNYRKPLGLAVLMLWGAAIAEVSGPVLISYFIDNMVATGNMPTRVVIGLAITFIVLQLITAALHYFQALLFNQVSVDVVQQLRTDVMNAALRQPLSAFDNQPVGQLISRVTNDTEVIKDLYVNVVPSVFRSMALIGTMLIAMFMLEWRMALIAILIFPVVLIVMAIYQHFSTPIVRRVRSYLADINDEFNEVINGMSVIQQFRQQARFGERMLLTNRAHYQARMQALRLDGLLLRPLLSLLSAMVLCGLIVLFGISGPGAIGIGVLYAFINYLGRLNEPLIELTSQQSILQQAVVSGERIFELMDSPQQGYGMDGQPLSSGRIDIENVSFSYRHGKIVLQDINLQVPAHGFVALVGHTGSGKSTLANLLMGYYPWQKGEIYLDGRPVSSLSHSVLRNGVAIVQQDPVVLADSFFDNITLGRNISEEKVWQVLETVQLAELVRTLPDGLHTILGEQGNTLSAGQKQLLAMARVLVQTPQILILDEATANIDSGTEQAVQQALRLIRQQTTLIVIAHRLSTIVEADTILVLHRGAVVEQGCHQQLFVSRGRYYQMYQLQQVGETLNECGTISEKEVLI

SEQ ID NO: 4462 - DNA, 1776 bp, Vibrio vulnificus YJ016
  CDS (1)..(1776): transl_table=11
atgaaaaagaccacgttgaaacgtttatttgcttatccattggcgcagccaaaacccatgatgacgggtttagtctttttgttgattgcggccgtcagcaatgcgggtggcccttggctcatccaacactttattgacgagcacattaccaaagacgattacactcaacagacacttatcttacttgctagtggctatattggcctgctgctttgctcagctttatttcaatatcttcaaggtttgcaatttaacattgtcgcgacaggcatcattaaaaccattcgcaagcaggcttttaatcatgtgatcaagcaacctttgtcggctttcgattacacccctactggcaaactggtctcaagactcaccaacgacacggaatctctgcagcagttctacgagctgttgatcgcctccgtggtgaagaacctagtgatgatcttagtgatgctgggcgttatgctgattttgagctggcagctaacgttggtggtcttggttttgctgcccgttgtggttggttttatggtgctatttcaaaagctcagcacccatgcataccgagtgatgcgtgacttgcttaccgacatcaatggcaatatgagcgaatcgatccaaggaatgagcgtgatccaactgatgcgccaagaaaaacgcttcaacctgcagtttaatcaactgaccgagcagcatttcaatgcgggtcgtaaagtcatcaagctgaatggtattttacttcgacccttgatggatttattggcgggcatcgctttgctcaccctcgttgctattttcggtttcagtggtaccgagctcattggtgttggcgtactgtacgcgtttatcagctaccttggccgtattactgaaccgttaattgaaatgacgcaacagctagcgctactgcaacaagctttagtggccagcgaacgcatttttgaaatgatggatgctccagaacaaagctatggtcatgatcagcagccacttaaaagtggttctatcgccatagagcagctgagctttagctacgatggtaagcagcaggtattgaaacagatcgacattgacgtggaacaccagcaattcgtcgctttggtcggccacacgggtagcggaaaaagtaccctcgcgtcgctattgatgggcttttacccagtaagccaaggcaagctgaaactggatggtcgccctattgcctcattggcaaaatcggtgctgcgaaaagacgtggcgatggttcaacaagatccacatattctgccaacctcggtcagagaaaatattgccttgggaagagaagtctcagacgacatcatctggcaatctttagaacaagttggtttggctgagcagatcaaacgttaccctcaattgctggacacccaactgggccaaggagaaaccaacctctctgctggacaaaaacagttgttggccatggcccgagtgcttatcgctaagccgaaaattttaatcctcgacgaagcgacggcaaacatcgattcagggactgaggcgctgatacagcgcagtttgaatgccctacgccatgatatgacgctagtggtgattgcacaccgcctttccaccatcatggaggccgacaaaattgtggttttacaccacggagatttggttgaaatgggcagtcacaaacaactgcttgcccagcaagggcgctacgcacagatgtaccagttgcaacaagcaggccagcatatcaaggaaattgaacagcaggaggagcaagaactggaacaagccagctaa

SEQ ID NO: 4463 - protein, 591 aa, Vibrio vulnificus YJ016
MKKTTLKRLFAYPLAQPKPMMTGLVFLLIAAVSNAGGPWLIQHFIDEHITKDDYTQQTLILLASGYIGLLLCSALFQYLQGLQFNIVATGIIKTIRKQAFNHVIKQPLSAFDYTPTGKLVSRLTNDTESLQQFYELLIASVVKNLVMILVMLGVMLILSWQLTLVVLVLLPVVVGFMVLFQKLSTHAYRVMRDLLTDINGNMSESIQGMSVIQLMRQEKRFNLQFNQLTEQHFNAGRKVIKLNGILLRPLMDLLAGIALLTLVAIFGFSGTELIGVGVLYAFISYLGRITEPLIEMTQQLALLQQALVASERIFEMMDAPEQSYGHDQQPLKSGSIAIEQLSFSYDGKQQVLKQIDIDVEHQQFVALVGHTGSGKSTLASLLMGFYPVSQGKLKLDGRPIASLAKSVLRKDVAMVQQDPHILPTSVRENIALGREVSDDIIWQSLEQVGLAEQIKRYPQLLDTQLGQGETNLSAGQKQLLAMARVLIAKPKILILDEATANIDSGTEALIQRSLNALRHDMTLVVIAHRLSTIMEADKIVVLHHGDLVEMGSHKQLLAQQGRYAQMYQLQQAGQHIKEIEQQEEQELEQAS

SEQ ID NO: 4464 - DNA, 1956 bp, Rhodopseudomonas palustris CGA009
  CDS (1)..(1956): transl_table=11
atggctcacccacactcgcattcgagcagcggctctcctgtcgcgattccggaagacaagatcgcacagaaggcgacgctcggcggcaccctgatgcatctgtggccgtatatttggcccggcgaccggtccgatctgaagatgcgggtggtgtgggcgatcgtgctgctgatcgccgccaaggcggcgacgctgatcgttccgttcaccttcaaatgggcgaccgacgcgctgaccggcgctgataccgcaccgatcgagccgtcgaactggacgctgtggctgatcgcgtcaccgctggcgctgacggcgagctacggtttggttcgtgctttgatggcggtgctgacgcaatggcgtgacggcatcttcgccaaggtcgcgatgcacgcggtgcgcaagctggcgtaccgtaccttcgtgcacatgcacgatttgtcgctgcggtttcacctcgagcgcaagaccggcggtctgacccgcgtgctggagcgtggccggctcggcatcgaagtgatcgtgcggatggtgatcctgcagctggtgccgaccatcatcgagctgtcgctggtgatggcggtgctgctgtggcagttcgactggcgctacgtcgcggccgtgatggtcaccgtggtgttctacatgctgtacacctacaaggctaccgagtggcggatcggcatccgccgccgcatgaacgattccgacagcgacgccaatcagaaggcgatcgactcgctgctcaactacgagacggtgaagtatttcggcgccgaggagcgcgaggcgaagcgctacgacaagtcgatgcggcactatgaggacgccagcgtcgcgacctatacgtcgctggcggtcctcaacgccgggcaggcggtgatcttcaccttcggcctgaccgcgacgatgctgatgtgtgcctcgggcgtccgcaacggcaccaacaccgtcggcgacttcgtgatgatcaatgcgatgatgattcagctgtatcagccgctgaacttcatgggcatggtgtatcgcgagatcaagcaggcgatcatcgacatcgagaagatgttcgcggtgctgtcgcgcaagccggaggtcgaggatcgtgccggcgccaagccgctggcagtcgaagccggcaccgtgcggttcgaggacgtgaagttcgcttatgatccggcgcggccgatcctgaagggcctcaacttcgaggtcccggccggcaagacggtggcgatcgtcggcccgtcgggcgccggcaagtcgacgatctcgcggctgctgttccggctgtacgacgtctcgggcggccgcatcctgatcgatggtcaggacatccgcagcgtcacccagacctcgctgcgcgcggcgatcggcatggtgccgcaggacaccgtgctgttcaacgacaccatccgctacaacatccgctacggccgttgggacgccaccgatgccgaggtggaggaggccgccaagaccgcgcagatcgacgccttcatcaaggcgtcgccgaagggctacgacaccgaagtcggcgagcgcgggctgaagctctcgggcggcgagaagcagcgggtggcgattgcgcgaacggttctcaaggcgccgccgattctggtgctcgacgaagcgacctcggcgctcgacagccacaccgagcacgagatccagggcgcgctggagcgtgtggcacaaaaccgcacctcgctggtgatcgcgcaccggctttcgaccatcgtcggggccgatgagatcattgtgctcgatcaggggcggatcgccgaacgcggcacccattcgcaattattggcagcgggcgggctctacgccagcatgtggaacaggcagcgcgaggccgaagaggcgcgcgagcggctggcgctgatcggcgacgatgattcaccggttcgtaagccggaaatcgacgacgatctggcaacttcggcggcggcggagtaa

SEQ ID NO: 4465 - protein, 651 aa, Rhodopseudomonas palustris CGA009
MAHPHSHSSSGSPVAIPEDKIAQKATLGGTLMHLWPYIWPGDRSDLKMRVVWAIVLLIAAKAATLIVPFTFKWATDALTGADTAPIEPSNWTLWLIASPLALTASYGLVRALMAVLTQWRDGIFAKVAMHAVRKLAYRTFVHMHDLSLRFHLERKTGGLTRVLERGRLGIEVIVRMVILQLVPTIIELSLVMAVLLWQFDWRYVAAVMVTVVFYMLYTYKATEWRIGIRRRMNDSDSDANQKAIDSLLNYETVKYFGAEEREAKRYDKSMRHYEDASVATYTSLAVLNAGQAVIFTFGLTATMLMCASGVRNGTNTVGDFVMINAMMIQLYQPLNFMGMVYREIKQAIIDIEKMFAVLSRKPEVEDRAGAKPLAVEAGTVRFEDVKFAYDPARPILKGLNFEVPAGKTVAIVGPSGAGKSTISRLLFRLYDVSGGRILIDGQDIRSVTQTSLRAAIGMVPQDTVLFNDTIRYNIRYGRWDATDAEVEEAAKTAQIDAFIKASPKGYDTEVGERGLKLSGGEKQRVAIARTVLKAPPILVLDEATSALDSHTEHEIQGALERVAQNRTSLVIAHRLSTIVGADEIIVLDQGRIAERGTHSQLLAAGGLYASMWNRQREAEEARERLALIGDDDSPVRKPEIDDDLATSAAAE

SEQ ID NO: 4466 - DNA, 1683 bp, Lactobacillus johnsonii NCC 533
  CDS (1)..(1683): transl_table=11
atgggaattgcaatttttggagctttcttagtaagtgtaattaatatgcttttaccaaggggactacagtttttcttagataattatttgatcaaacaaaaagcaacggtacagattatagtttgggctggactattatatggacttggaacaattattaaggcaattcttcaatttgtatatcaatatttatatgcacttggcgctgaaaaaacacttgaaagtgtaagaaaagatttatatcgaaaacttcatagtttagggatgcgctattttgaccagaccccagcaggttcaattgtatcaagagtcactaatgatacgatgactctaagcgactttttaggagtactttgtcaagtagtcattggagtattttctttagtaactgcttttatagcgatgtatgtaaccaataaatttgcggcgttaattgtcttgctgtttttaccaattttaggttttattttctggatttatacacaaaagagttctagattgtatcgtgcttttagggaacggcttagtcgaattaatactaacttaaatgaatctattgaaggagtttctctaattcagcaatttaagcaggaaaaaagaatgacaaaccattttgaaaatgagaatggtactttaatgagaacacgttttaacttgatccgagttaactcgcttttgctctcgccaatgactagtttgctttattcattggctcttgcattagtgttaatgtattttggttttccattgcaagagacttttgttcctgccggaattgtatatgctttttctcaatatgtacaacaattttttaatcctatttctactatgatggatcgaatgacttcttttcaggatgggattgtggcaggtaaacgtatttttagaattatggatgaaaaagaatacgaaccgcgacaagaaaatgatgaaagagcagttatttcaaaaggaaagattgaatttaaaaatgtcagcttttcttatgatggaaagaatgaaatcttacatgatgtatcttttgtagttaatccgggtgaaactttaggaattgttggtcatactggatcaggaaagagttcaattatcaatgtaatgatgagattttatgaatttggtagtggggaagtacttattgatggcattgatattaggaagtttccaaagaaagaattacgtaaaaaactaggattagttttacaagaaccctttatgttctatggggacatttcttcaaatattcgcttgtataatgacaaaattacagatcaacaaattaaagatgctgctaaaaccgtacaagcagattcatttattgaaaagatgcctggtaaatatcatgcaaaagtgattgaaggtggatcagaacttagtcaaggacaacgacaattaatttcatttgcacgaaccttagtaactgatcctaaaattttagttctagatgaagcaacggctaatgtcgatacagaaaccgaaaatttaattcaagagggattaaagaagcttcgtcaaggaagaacgactttggcaattgcgcaccgtctttcaacaattgcagatgcggaccagattattgttttggataaaggaagaattgttgaacgtggtacacatgaggaactattgaagaagaaagggtattactacaatctttataagcttcaacaaaatagcgataaataa

SEQ ID NO: 4467 - protein, 560 aa, Lactobacillus johnsonii NCC 533
MGIAIFGAFLVSVINMLLPRGLQFFLDNYLIKQKATVQIIVWAGLLYGLGTIIKAILQFVYQYLYALGAEKTLESVRKDLYRKLHSLGMRYFDQTPAGSIVSRVTNDTMTLSDFLGVLCQVVIGVFSLVTAFIAMYVTNKFAALIVLLFLPILGFIFWIYTQKSSRLYRAFRERLSRINTNLNESIEGVSLIQQFKQEKRMTNHFENENGTLMRTRFNLIRVNSLLLSPMTSLLYSLALALVLMYFGFPLQETFVPAGIVYAFSQYVQQFFNPISTMMDRMTSFQDGIVAGKRIFRIMDEKEYEPRQENDERAVISKGKIEFKNVSFSYDGKNEILHDVSFVVNPGETLGIVGHTGSGKSSIINVMMRFYEFGSGEVLIDGIDIRKFPKKELRKKLGLVLQEPFMFYGDISSNIRLYNDKITDQQIKDAAKTVQADSFIEKMPGKYHAKVIEGGSELSQGQRQLISFARTLVTDPKILVLDEATANVDTETENLIQEGLKKLRQGRTTLAIAHRLSTIADADQIIVLDKGRIVERGTHEELLKKKGYYYNLYKLQQNSDK

SEQ ID NO: 4468 - DNA, 1704 bp, Bdellovibrio bacteriovorus HD100
  CDS (1)..(1704): transl_table=11
atggcgatctttgcggtcgccggcggcgccaccgtggcccgcctgattccactgttgattggacaggccatcgacaaaggtgtcgtgggtcgcgatctgtcgattttcaccaaagtggcttacgcgtacctggcacttgaaatcatgcgttcggtgttttctttcggaaatgcctttttattccagttgttcggaaaccgcatgctgtaccacctgcgcgaagatctgatgaaccacgtgcaaagactgccgatgcagttcttcaacaaaacacccaacgggcgcattgtcacgcgcctgaccaatgacgtgatgtccttgggcgaactgttttcagaaggtgtgatttcggtcttcaccaacgcggtgatcatcgtgtcggtggtgattgcgctcagcctgatttcctggaagctgaccgtggtgtcgctgtttctggcgccgttctttatctgggccacgttccacctttcaaataaaatccgtgcgatcctaagcgaacagaaaaagaagctctccacgatcaacgctttcctggctgaaaatctgaacggcatcaaagtgattcagctctacaatcgtgtcacccgcaatcgcgacaagttcagcaccctgtcggtggactatcgcgacaccaatatgcgctcgatcaaggcctatgccctgatgcagccggtgatgaatctgttcaacgccgtgaccatcacctcggctttgtatttcggtggttacttaagcgctgaaaactcgatcgccattggttccttggtggccttcctgatgaacatccaggacttcatcccgccattgcgagagattttagagaaataccagcagttccaaaactccctgaccagcgccgaacgtattttcacgctgatggatgaaccgaaagagcacgaactggccgccctgaccagcccgggatctttgcggggggaactggaaatcaagaatctgaacttccagtacgaaagccatctgccgctggttttgaaaaacatcaacctgcacattaaagccggagaatccgtggctttggtggggcgtaccggcagcggcaagtccacgttcatctcgctgttgcagcgattctatgatgccccggagcagacggtctttgtcgatggtcttgccctggaaagcatcccgcgcgaggaaatccgccaccacgtcggcgtggttcagcaggataacttcatcttccgcggcaacatccgcgacaatattggcctgggcgacccgcgcatcacagaagaacaaatccgcatggcctgtgaaaaaaccggctatatggctctattgacccgcacaggccgcgatctgctaagcccggtggcagaacgcggagccaacttgtcggtcggcgaacgccagctgatcgcctttgcgcgcattctggccttcaatccggatattttaattctggatgaagccaccgccaacattgactctgaaagtgaacacatcattcaggatgcgaccaaagagatcaccaaaggccgtacaagcatcatcattgcccaccgtctttcaacgattgaacagtgcgatcgcattattgttctgaatcagggggaagtggccgagatgggctcgcacgaagaacttatgcaagcccagggcatgtattatcagttcgcgtctttaggtttgaaatccaccttgatcgacgcatccgcagcgggcaccgcagttccatag

SEQ ID NO: 4469 - protein, 567 aa, Bdellovibrio bacteriovorus HD100
MAIFAVAGGATVARLIPLLIGQAIDKGVVGRDLSIFTKVAYAYLALEIMRSVFSFGNAFLFQLFGNRMLYHLREDLMNHVQRLPMQFFNKTPNGRIVTRLTNDVMSLGELFSEGVISVFTNAVIIVSVVIALSLISWKLTVVSLFLAPFFIWATFHLSNKIRAILSEQKKKLSTINAFLAENLNGIKVIQLYNRVTRNRDKFSTLSVDYRDTNMRSIKAYALMQPVMNLFNAVTITSALYFGGYLSAENSIAIGSLVAFLMNIQDFIPPLREILEKYQQFQNSLTSAERIFTLMDEPKEHELAALTSPGSLRGELEIKNLNFQYESHLPLVLKNINLHIKAGESVALVGRTGSGKSTFISLLQRFYDAPEQTVFVDGLALESIPREEIRHHVGVVQQDNFIFRGNIRDNIGLGDPRITEEQIRMACEKTGYMALLTRTGRDLLSPVAERGANLSVGERQLIAFARILAFNPDILILDEATANIDSESEHIIQDATKEITKGRTSIIIAHRLSTIEQCDRIIVLNQGEVAEMGSHEELMQAQGMYYQFASLGLKSTLIDASAAGTAVP

SEQ ID NO: 4470 - DNA, 1764 bp, Bacillus cereus ATCC 10987
  CDS (1)..(1764): transl_table=11
atggctgagaaaaaacagagcgatttaagaagattactgtcttatatgaggccatataaaggactgttagcattagcatttttatttctagttggtgcaactgtaacagaaatgatgggtccttttttaattaaacaatttcttgatgaacacttagtaccacgtaactttgatcaatcagcacttgttactttatttgtagtgtatattgttgctcacttattaaaagtattatttacttatttagacttgttatattttcaaaatattgcttttaaaattgttcaagatatgcgtgttgaagtatatgagcatgttcaaaagttgtcattaagtttctttgatcgtacgccgattggtacgctcgtatcgcgcataacgaatgatacagaagcaattaaagatttttatgtcagtgtattatcaacatttgttaaaaatatcgtatttttagcagggattttagtagcgatgtttttattaaatgtaaaattagcgctattttctctcgtattaattccgatcatgtttgcgattatggtgctatatcgccggaaaagtgcagctttttatttagaagtccgtaatcaattaagtgtgttaaatgcaaagttaaacgagtccattcaagggatgaatattgttcaagtgttcagacaagaaaagcgcatgagaaaagaatttgaagaagtgaataataaacattatagtgcagggcgacgtacattaaagttagatgcattgcttttacgtccagcaactgatttagttcatattgtagctattgcgttagtacttggtttatttggaattgatgctttgaagagtcctgttgaagtaggcgttttatatgcgtttgttaactatatacatcgttttttccagcctgtaaatgagatgatgatgaaattatcatttttccaacaggcactggtttcatcatcacgtgtatttcatttaatggatgagaaagatttagcgccagttcaaaaaggggatggaaatcctcaagttattaatggagatattgaatttaaaaatgttactttttcgtacgatggaaaacgtgatgttttaaaaaatgtatcttttcacgtgaaacaagggcaaacggttgctttcgttgggcacactggcagcggaaagagtactattatgaatttattactgagattctataatattaattccggaaatattgtaatagatggtgtagagttagagaaatttgaagaacaagaaattagaaagaaaataggacttgtattgcaagatgcatttttatttgcgggaaatgtaaaacaaaatattcgtatgtataatgaagaaattacggatgaagaagtaaaagaagcggcacaatttgtgcaagcgaatacgtttattgaaaaattaccagagcagtatgaaacggaagtagtagaaagaggagctgcattttctagtggtcaacgacaattaattgctttcgctagaacgatagcaacgaatccgaaagtgttagtattagatgaagcaacagcaaatattgatacagaaactgaagatgcaatccaaacagcgttacagcaaatgcgaaaaggacggactacgatagcgattgcgcacagattatctaccatacaagatgcagatcaaatttttgttatgcacgatggagagatagtagaaagagggacgcatcaagaattactgagtgaacaaggattgtattataatatgtatttactacaaaataaaggaagtttacaaaaggccttgtaa

SEQ ID NO: 4471 - protein, 587 aa, Bacillus cereus ATCC 10987
MAEKKQSDLRRLLSYMRPYKGLLALAFLFLVGATVTEMMGPFLIKQFLDEHLVPRNFDQSALVTLFVVYIVAHLLKVLFTYLDLLYFQNIAFKIVQDMRVEVYEHVQKLSLSFFDRTPIGTLVSRITNDTEAIKDFYVSVLSTFVKNIVFLAGILVAMFLLNVKLALFSLVLIPIMFAIMVLYRRKSAAFYLEVRNQLSVLNAKLNESIQGMNIVQVFRQEKRMRKEFEEVNNKHYSAGRRTLKLDALLLRPATDLVHIVAIALVLGLFGIDALKSPVEVGVLYAFVNYIHRFFQPVNEMMMKLSFFQQALVSSSRVFHLMDEKDLAPVQKGDGNPQVINGDIEFKNVTFSYDGKRDVLKNVSFHVKQGQTVAFVGHTGSGKSTIMNLLLRFYNINSGNIVIDGVELEKFEEQEIRKKIGLVLQDAFLFAGNVKQNIRMYNEEITDEEVKEAAQFVQANTFIEKLPEQYETEVVERGAAFSSGQRQLIAFARTIATNPKVLVLDEATANIDTETEDAIQTALQQMRKGRTTIAIAHRLSTIQDADQIFVMHDGEIVERGTHQELLSEQGLYYNMYLLQNKGSLQKAL

SEQ ID NO: 4472 - DNA, 1851 bp, Yersinia pestis biovar Microtus str. 91001
  CDS (1)..(1851): transl_table=11
atgacggtgagcaggaggtcgaagccgatgaataacgttcagcaactttggccgacattgaaacgcctgctttcctacggttcgccttatcgtaaaccgctggggctggcagtcttaatgctgtgggttgcggcggcagcagaggtaagtggtccactactgatcagttattttattgaccatgtagtcgccaaaggcacattacctctggggctagtcagtgggttggcattggcctatctgttgttgcaattattggccgcgacattgcactattttcaggcattgctgtttaaccgtgcggcagtgggggtcgttcagcggctacgcattgatgtgatggacgctgcattacgtcaacctctcagtgcttttgatactcagcctgttgggcagttaatttcccgagtaaccaatgacaccgaagtgatcaaagatttatatgtcatggtggtttctacggttttgaaaagtgcggccttaattagtgcgatgctggtggcaatgtttagtctggattggcggatggcgctgatttcaatttgtatcttccctgcggtgttggtggtgatgacaatctatcagcgctatagcacccctatcgttcgccgggtacgatcctatctggctgatattaacgatggttttaatgaagtcattaatggtatgggcgtcattcagcaattccgtcagcaggcccgtttcggagaacgcatggcgtctgccagccgtgcgcattatgttgcccggatgcaaaccttacggctggagggctttctattacgccctttattgagcctattctctgccttggtgctatgtggtctactgctgcttttcggtttcagccctgaaggttctgtgggggtaggtgtgctgtatgcgttcattaattaccttggccgcctgaatgagccgttgattgaactgacatcgcagcaatcaattatgcaacaggccgtagtggcaggagagcgtatttttgatctgatggatcgtgcgcagcagggctatggtagcgacaatattcccttgagcagtggccgtattcaggtggaaaacgtcagctttgcgtatcgctcggataaaatggtgttacacaatatttctctcaatgtcccctcccgtggattcgtggctttagttgggcacaccggcagtggtaaaagtacgctagctaacctgttgatgggctactatcccgttcagcaaggtgagattttgcttgatggccggccattatcccgcctctcccatcaggttctgcgccagggggtagcgttggtacagcaagatcccgtggtgttggctgactccttctttgcgaatatcacccttgggcgtgaccttagtgaacagcaagtgtgggaggcactcgaaaccgttcaattggcaccgttggttcgtaccttacctgatggcttgtacagtttacttggggaacagggcaataccttgtctgttgggcaaaaacagttgctggcgatggcgcgggtgttggtgcaagcgccccaaatcctgattctggatgaagccactgcgaatattgactctggcactgaacaggctattcagcgggcattacaggtgattcgaaaaaataccacgctggtggttattgctcatcgcctttcgacgattgtggaggcggatagtattttggtactgcaccgtggtgttgcggttgagcagggtaatcatcaagcgctgctagctgcccgtgggcgttattaccagatgtaccagttgcagttagtcagcgaagatttggctgccattgatcaggaagctattgataaaggctctattgatcaaagtactattgatcaagccggaatgagcgtgagttaa

SEQ ID NO: 4473 - protein, 616 aa, Yersinia pestis biovar Microtus str. 91001
MTVSRRSKPMNNVQQLWPTLKRLLSYGSPYRKPLGLAVLMLWVAAAAEVSGPLLISYFIDHVVAKGTLPLGLVSGLALAYLLLQLLAATLHYFQALLFNRAAVGVVQRLRIDVMDAALRQPLSAFDTQPVGQLISRVTNDTEVIKDLYVMVVSTVLKSAALISAMLVAMFSLDWRMALISICIFPAVLVVMTIYQRYSTPIVRRVRSYLADINDGFNEVINGMGVIQQFRQQARFGERMASASRAHYVARMQTLRLEGFLLRPLLSLFSALVLCGLLLLFGFSPEGSVGVGVLYAFINYLGRLNEPLIELTSQQSIMQQAVVAGERIFDLMDRAQQGYGSDNIPLSSGRIQVENVSFAYRSDKMVLHNISLNVPSRGFVALVGHTGSGKSTLANLLMGYYPVQQGEILLDGRPLSRLSHQVLRQGVALVQQDPVVLADSFFANITLGRDLSEQQVWEALETVQLAPLVRTLPDGLYSLLGEQGNTLSVGQKQLLAMARVLVQAPQILILDEATANIDSGTEQAIQRALQVIRKNTTLVVIAHRLSTIVEADSILVLHRGVAVEQGNHQALLAARGRYYQMYQLQLVSEDLAAIDQEAIDKGSIDQSTIDQAGMSVS

SEQ ID NO: 4474 - DNA, 1920 bp, Nasonia vitripennis
  CDS (1)..(1920)
atgacgctgctctgcaatgtgtccaagagatgctacgttcaggcatatatcatccagacctcacaactgtctcggaagaagcttctgaacctcaagcatctcaagaggttctccacagacagcatcaagacaaaactaggagaacctgtcaaacaggtcaacaacattcggagaaccaagaacaatgagctgcgcaggctgttcttgttggctgcgccagaaaagtggcgcctaataggtgctattgcctttttaattatatcctccacggttaccatggctgtgccattctgtcttggcaaaattattgacattctttatacaaatgatcagaataagaccaaggagaatctcaacaaggtctgctttgttctgcttggaattttcatatttggtggaatgtgtaattttgcaaggatttacctcatgtctaccactggacacaagatcacgcagtctctcaggaagaaggcctatgctgctatattgagtcaggagactgcaatgtttgataaagtcagcactggagaacttgttggaagactatctggagatgcccagttggtcagttcagcaattacgagtaacatttcagatggactaaggtcaggcataatgacaacagcaggaatttccatgatgttctatgtctctccacaattagcccttgttggcttagcaatagttcctccagtagctgcaatgggaatcctgtatggcagatttgtcaaaaagatctcaaaagatgtacaaaatagtttggctgtgttaaatacaacagctgaagagaaaattagtaatattaggactgttaaagcttttgcacaagagctcaatgaaattgaaaattatcgtacaaagttacaagacttactgcaactctgttacaaagaaagcttctacagaggaatattttttggcatgactgggctgtctggtaatgctataatattgtcggttctttattatggaggagttatgctctccgattcaacaatcactgttggaaacctaagttcatttttgttatatgctgcatatgtgggcatttccatgggtggattgtcgagtttttattctgaattgaacaaatctcttggtgccagtactagattatttgagttgattgaccgcaagcctgcaatacccattcatggtggaaaaattttagaaaaagaattgacaggagacattgtctttaaggatgttagttttacttatcccactagaactgaatcaatgattttgaaggatttcaacctgcatattccaaagaattcagtcactgctgttgttggtccatcagggtctggaaagtctactctggcttctttactactgcgattgtacgaccctgtatcaggttctgttttattggatggatataacttaagggaattggatccttgttgggtgaaacaacaaattggttttgtgtcccaagagcctatactgtttaatggaacagtgagagaaaatataacttatggaagcaaaggtgctgcagatgaagaagtaagagaagctgctaagcaagctaatgtattagaatttatagagagaatgtccgatggacttgacacttatgtcggagaaagaggaattactttgagtggaggccagcgccaaagagttgctattgcaagagctctcatcaagaacccgaagatcctgattctggacgaggcgacaagcgccctcgactcggagtcggagagtctggtccaacaagccctggagcgagccacccttggtcgaaccgttctgacgatagcccatcggctcagcacgattcgcaatgccgacaagatagccgtgctggacggcggctcggtacgcgagagcggcagctacgacgatctcatggctctgccaaacggcctcttcaggaaactcgttcagcaccaaacgttcggctga

SEQ ID NO: 4475 - protein, 639 aa, Nasonia vitripennis
MTLLCNVSKRCYVQAYIIQTSQLSRKKLLNLKHLKRFSTDSIKTKLGEPVKQVNNIRRTKNNELRRLFLLAAPEKWRLIGAIAFLIISSTVTMAVPFCLGKIIDILYTNDQNKTKENLNKVCFVLLGIFIFGGMCNFARIYLMSTTGHKITQSLRKKAYAAILSQETAMFDKVSTGELVGRLSGDAQLVSSAITSNISDGLRSGIMTTAGISMMFYVSPQLALVGLAIVPPVAAMGILYGRFVKKISKDVQNSLAVLNTTAEEKISNIRTVKAFAQELNEIENYRTKLQDLLQLCYKESFYRGIFFGMTGLSGNAIILSVLYYGGVMLSDSTITVGNLSSFLLYAAYVGISMGGLSSFYSELNKSLGASTRLFELIDRKPAIPIHGGKILEKELTGDIVFKDVSFTYPTRTESMILKDFNLHIPKNSVTAVVGPSGSGKSTLASLLLRLYDPVSGSVLLDGYNLRELDPCWVKQQIGFVSQEPILFNGTVRENITYGSKGAADEEVREAAKQANVLEFIERMSDGLDTYVGERGITLSGGQRQRVAIARALIKNPKILILDEATSALDSESESLVQQALERATLGRTVLTIAHRLSTIRNADKIAVLDGGSVRESGSYDDLMALPNGLFRKLVQHQTFG

SEQ ID NO: 4476 - DNA, 2640 bp, Gibberella zeae PH-1
  CDS (1)..(2640)
atgaaggaggcaggatattatgagcctacccggaacatcaaaaccccggcaaccttgacatcacctcacaacaccgaaactatccttcatacatcatcactgcttccagtcatggccaaggaagaacttgggttgaagataggcttctatgcctatccgtgcgccctattcgtcacgcttctgggtgttcaatccgcccagttctacctcgctcgtcatggcgatccgaaaacgcgtcagaacgcgttggacaatgatctcaagacaaagattgagaaactccaacggttctacgcaaggttaatatggggctttcaacttattctttcaggattgattactgcgagtatcgttcttgctacaaaggaggtttttgcggatcagaaaaatattgaagggaaaatactgttctcattcagcgcttacttggcatcatttgttggcgttttactttatttccttgccggtctcctccccgatcccgaaggtccatggaatccgaatagctctcatctcgcagcatggtgtgttgctgcgcttgcagaaatcgtcatcgcagcagtcttgtctgtggttgagccccaacttcgtgtctcgcccaattttgtcgataccatcaacattctcggctcggcgagagtctttgttcttgctctcatgatcggctcgtttactttgagagagtataagatgaaatccctcgaaccaaaatccttgcccgaagaacgccagggtttgttggagaatggcaatggcaacggttatggaagcgttccaccctccgcagctgaaccaagacgtacacaggtttcgggaacaggctggctcgattatttcgctggtttcaaagtcctatttccttacctctggcccaaggattcacctctctaccaagccatcgtccttgtctgcatcctcctcctgatcggccaacgtaccgtcaacgttctcggtccgctccaactcggtgtacttgtcgacaaccttggcgaaggaaaactgccttacaaggagatcatcctttacgtcgtctaccgggcccttcaaggcaaccaaggtgctctcggagcagcgcgttccgtcctctggatcccagtatcacaatctctgttccgacgactatcttctgctgcatttgagcacgttctcggtctatccctagaattccatctcaacaaaaaggttggcgaggtcaccagtgcgctaagcagaggcgcttctataaacaccttcctcgagagtttctgtttccaggttttccccatggttttcgacatctttgttgccggcgtggtgttcttttacaagtatgatcctttttatctcattatagtgttcttcatcatgtggtcctatatcttccttactatatacgtggccaagtaccgtggtaagcagaggagagacatggccgtcaagacacgagagatggaggctgtcaagacggatgccattgtggcgtatgagacggtccagcacaattgtgctgtcgttcgtgagactgggaggttcagagaacatgtcactatcttccaacgcgctgagcgacttgtgcagtggtctctggcggctctcaaccttacccagagctccatcttttctctgggcacagccctcctcgttgctgtctcggcatacaagatttctatcggagaacagactgttggagagttcgtgagtctcatcaactactttgttcagcttcagggacccttgaacttcttcggcacatactacaccatgctgcagaacaacctcattgaagcagagcgacttctcgacctgttcaaagaaactgctggcgtagtcgaaaagccagatgccatcgttcttcctcccatcaggggcgaagttgccttcaacgacgtcaaattcgcttaccagactaaaaagggcggtcttgtcctcgacggcattaactttaccgttgcacccggcacaaagacagccatcgtcggcgagtctggcagtggaaagtccacctcgctcaagcttctcttccgcttctacgacgtgacagacggttctattaccattgatggccatgatctgagggatgtcaagctcgacagcgtacgcagaaacatcggtgtcgtgccgcaggataccgtgctgttcaacgcgaccatcatgtacaatctgctgtatgcgagacctgatgcaacagaggaagatgtgtttgaggcatgcaaggctgcgaacatccatgagaggatcttgaacttccctgatgggtacgagaccaaggttggagagcgaggtctaaagttgtctggaggtgaacgacagcgaattgctatcgcacgtgctattcttaaagatgcgcgaatccttcttcttgatgaagccactgcttctctagactctcacactgagcgacagattcaggatgctcttgagcgcgtaacagccggacgtacaaccatcaccatcgcacatcgattatccacaatcacaacttcagatcaaatcatcgtccttcacaagggcgagattgtagaacgcggcacacacaacgagctcttggcctctaagggaagatatcatgccatgtgggagaagcagacgacgattgagaagaaggaaaaggagaagaaggaacttgagggggaggcatctgagactgcatctcaagaatga

SEQ ID NO: 4477 - protein, 879 aa, Gibberella zeae PH-1
MKEAGYYEPTRNIKTPATLTSPHNTETILHTSSLLPVMAKEELGLKIGFYAYPCALFVTLLGVQSAQFYLARHGDPKTRQNALDNDLKTKIEKLQRFYARLIWGFQLILSGLITASIVLATKEVFADQKNIEGKILFSFSAYLASFVGVLLYFLAGLLPDPEGPWNPNSSHLAAWCVAALAEIVIAAVLSVVEPQLRVSPNFVDTINILGSARVFVLALMIGSFTLREYKMKSLEPKSLPEERQGLLENGNGNGYGSVPPSAAEPRRTQVSGTGWLDYFAGFKVLFPYLWPKDSPLYQAIVLVCILLLIGQRTVNVLGPLQLGVLVDNLGEGKLPYKEIILYVVYRALQGNQGALGAARSVLWIPVSQSLFRRLSSAAFEHVLGLSLEFHLNKKVGEVTSALSRGASINTFLESFCFQVFPMVFDIFVAGVVFFYKYDPFYLIIVFFIMWSYIFLTIYVAKYRGKQRRDMAVKTREMEAVKTDAIVAYETVQHNCAVVRETGRFREHVTIFQRAERLVQWSLAALNLTQSSIFSLGTALLVAVSAYKISIGEQTVGEFVSLINYFVQLQGPLNFFGTYYTMLQNNLIEAERLLDLFKETAGVVEKPDAIVLPPIRGEVAFNDVKFAYQTKKGGLVLDGINFTVAPGTKTAIVGESGSGKSTSLKLLFRFYDVTDGSITIDGHDLRDVKLDSVRRNIGVVPQDTVLFNATIMYNLLYARPDATEEDVFEACKAANIHERILNFPDGYETKVGERGLKLSGGERQRIAIARAILKDARILLLDEATASLDSHTERQIQDALERVTAGRTTITIAHRLSTITTSDQIIVLHKGEIVERGTHNELLASKGRYHAMWEKQTTIEKKEKEKKELEGEASETASQE

SEQ ID NO: 4478 - DNA, 4089 bp, Gibberella zeae PH-1
  CDS (1)..(4089)
atgataaatccccagcatcaccagcttattccgacaacatgtatcagcgtctttaaggcgtatggcaagacttcctcgctctatgatcctctaaacgttttccacattctcattcaaaccatactgtctcccaggccctattctcttctccagtggggatgttcgatccttcgcgtctctagctcgctgaccttatccccattagaggtgccaagccaagaccagggaacactcacggcttgcgccgccggtgctccgttccctctgatgggcatcatctttggtcaactcgtcaacgacctcaatactgcatcttgcgataatagtgaagtcgcgtcccagtactcgccaaaagaactccaagacagcatcaacaagaaagttgtcatgatcacatggattggcgtaatcagttttgcgcttatctacacgtacatcgtgtcttggtccatcttcagtcgccgtctcgagaaccgcattcgcgatcgctacttcatgagccttctgttgcaggatgcaaccttctttgacaagaggcaggctggagagattacttctcgccttaataccgatattcaggcaatccagtctggtacttccgagaaggtcggtattatcatgggatgtacatcattcttcgtctcgtcgtatgtcgttgcatttgtcaagaatgtcacactcgcaggtattcttgtatcacttgtgcctgctttcatgctgcttgcaatcgtgggaagcatgtttactgcaaagtttgcgacggctatgtctgaaaagatcgcatctgcctcttcaatcgcctcggaagctcttgcaaacattcccgttgtacaggcctttggcgcaggtcctcgactagaggccatctttgccgaaaggatgaagggagcaagaaagcaaggaatcaacaaggcctttgttgctgctgtccaggctggattgctttactttatcgcctactcagcaaatgctcttgctttctggcagggcagtgggcagattgctgatatggttgagggtaatagcgacacatctgtgggtgatatttatactgttattctcttgctagttgatgcttgcgtcgtcctcggcggtattgctcctttgctgccgcttgttggggctgctgttggatcttttgaaaaacttcgcgaagatatggacagcccagctactatcgacacaggatccagcaacggagagaagatcgcatcagtagaaggcactgtgtcttttagaaacgtctcttttgcttatgtctcccgacctcaccacaccgtactgaaaaacgtctccttcgaatgtcctgctggcaagcacactgcccttgttggtctttctggcagtggtaagtctaccgttgctggactcacatctcgaatctatgatcccaccgaaggtacagttcttctcgatggacatgatgtaaaggaccttaacgtcaagggcctgagaagtcatatgagtcttgtacaacaagagccctctcttctagaccggtcaatcgttgagaacattgcccttggcatcttgaactccgctcaacctgaacacgagagattcaaagctacaatcctaggcactggccttgctgagcttgccgctaaactccgtgagggcgatagtttggtgacggcagcgcaaagtttcggtcaggaaatggttgatctgattgatcgtgttcaggaggctgcccgacttgccgatgcatctgatttcgttgatagactcgagtacggttacggaacactggttggtactggcggaaagctagtaagtggaggtcaacgacagcgacttgcgcttgctcgagccttggttcgtgatcccaagatcctcatacttgatgaggccaccgcttcccttgactcagcaagtgagcaccgcatccagatggccatcgaatccattgccaagaatcgtactgtcattgcaatcgcccaccgtctatccaccatcaagaatgctgataacatcatcgttatgaacaatggcgagatcatagagcaaggaaatcacctcgagctgatggctttgaacggctcatatgccagtatggtacgcttgcagacagttgactcagaggatgctggatctaccacaagcactgtccacaccgatggtgtcttgtccgagaaagactctctcgtagacatcaaggtcaggggtacagaaaaggaagaagcagatgtgtccaaggaggaggaagctaaagagaaagaggtatctcccgaggcagacgctgctcttgactcgactaaatctgcgtgggtcgtcacaaagaccattggcggcatggtacgaccctatctcctcctcatcgttgtctgcctttttgcagctactattgttgggctcaccttctcttcgtctggtctgattttcggctatactatcgacaacctgagtccctgcaaccctgttgaagatatccggtgggcaggcaagttctttggaggcatgtggtttctgattgcttgcgtcgagctgttggccaataccacaagctggaccggtttcggcatggttgcagagaagttgctgtacaagattcgagttctctgtttccgctctctgtatgaacaggaccttgactggcatcagtcggaaggccgtactccaactgcactcctgtctgtcattacttcggatgctgcagcagttggagggttcagcggctctattattggtaccatcttctctatcgtggtcaatttcttggttgccatcatcctttcacacattcttgcttggaaaattgcgattgtatgcttagtcattgtgcctatccttctgggttgtggcattatgcaacttcgatcgctgtccaagtttgagcgtcgtcacgctggggctttctccggtgccgttggcatcgctaacgaggctgtcaattcattcaagaccatctcttcattgtctattgaagaagaagtcatgagctcctaccgccgtgctctcagggcgccccagaaggagataactctagcttcgatgtacgccaacttgtggctttccctggccaacagcactggaaacctgatatatgcctttgcgtattggtgggggtcaacacggattactgcaggcgaggctagccagagagagttctttataattctcatttgcatgcttgtcagcgcacagctttggggccaaatgttcagtcttgcgcctgaagtgtctcgagccagagctgccgcttcgcgtattctgagtctgattaatctaggatcttccaaagagaaggccaagaaaggcaagcttgcactggctctcgagagtactaaaagagatgtcgaagcttgtgctgaagcttctgcaaagagcagcggcggcaagggggcaaccatcgttttcaaagatgtcaaattctcatacccggctcgacctcatattcagatcttgacaggcatgtcgttcaccatctctgctggtcagttcgttggtcttgtaggaccttccggtgctggcaagtcgaccatcatgtcgttggtccaacgcatgtaccggccaacaggcggaactgttgagattgatggtgttgatatttgcgcacgtgaaggaaatgagttccgcaacgatatagcagttgtccctcaagactgtgctctctttgacgggacaatccggttcaatgtttcgctaggttcaactcctgatcacgagcccacagacgatgagatccatgaagcttgcaagctagccaatatccacaacgttattatggagttgcctgaagcttatgataccgaatgcgggcctaacggctcgcggctctctggcggtcagcgtcaacggctagcgattgcgcgtgcccttgtgcgtaagcctaagctgctgttgcttgacgaaagcacgagcgcgctagacgccgagagtgaacgagctctgcaagaggggctagaacgtgtagcacgcggtattactgtgattgccatcactcataggcttcacacggtgcgcaaggcggatgtcatctttataattgaagggggtaaggtggtagaaaagggtcggcatgaggaactggtagaaaggagcgagacatatcgtacaaatgccctgcagcagatgctgggaaactaa

SEQ ID NO: 4479 - protein, 1362 aa, Gibberella zeae PH-1
MINPQHHQLIPTTCISVFKAYGKTSSLYDPLNVFHILIQTILSPRPYSLLQWGCSILRVSSSLTLSPLEVPSQDQGTLTACAAGAPFPLMGIIFGQLVNDLNTASCDNSEVASQYSPKELQDSINKKVVMITWIGVISFALIYTYIVSWSIFSRRLENRIRDRYFMSLLLQDATFFDKRQAGEITSRLNTDIQAIQSGTSEKVGIIMGCTSFFVSSYVVAFVKNVTLAGILVSLVPAFMLLAIVGSMFTAKFATAMSEKIASASSIASEALANIPVVQAFGAGPRLEAIFAERMKGARKQGINKAFVAAVQAGLLYFIAYSANALAFWQGSGQIADMVEGNSDTSVGDIYTVILLLVDACVVLGGIAPLLPLVGAAVGSFEKLREDMDSPATIDTGSSNGEKIASVEGTVSFRNVSFAYVSRPHHTVLKNVSFECPAGKHTALVGLSGSGKSTVAGLTSRIYDPTEGTVLLDGHDVKDLNVKGLRSHMSLVQQEPSLLDRSIVENIALGILNSAQPEHERFKATILGTGLAELAAKLREGDSLVTAAQSFGQEMVDLIDRVQEAARLADASDFVDRLEYGYGTLVGTGGKLVSGGQRQRLALARALVRDPKILILDEATASLDSASEHRIQMAIESIAKNRTVIAIAHRLSTIKNADNIIVMNNGEIIEQGNHLELMALNGSYASMVRLQTVDSEDAGSTTSTVHTDGVLSEKDSLVDIKVRGTEKEEADVSKEEEAKEKEVSPEADAALDSTKSAWVVTKTIGGMVRPYLLLIVVCLFAATIVGLTFSSSGLIFGYTIDNLSPCNPVEDIRWAGKFFGGMWFLIACVELLANTTSWTGFGMVAEKLLYKIRVLCFRSLYEQDLDWHQSEGRTPTALLSVITSDAAAVGGFSGSIIGTIFSIVVNFLVAIILSHILAWKIAIVCLVIVPILLGCGIMQLRSLSKFERRHAGAFSGAVGIANEAVNSFKTISSLSIEEEVMSSYRRALRAPQKEITLASMYANLWLSLANSTGNLIYAFAYWWGSTRITAGEASQREFFIILICMLVSAQLWGQMFSLAPEVSRARAAASRILSLINLGSSKEKAKKGKLALALESTKRDVEACAEASAKSSGGKGATIVFKDVKFSYPARPHIQILTGMSFTISAGQFVGLVGPSGAGKSTIMSLVQRMYRPTGGTVEIDGVDICAREGNEFRNDIAVVPQDCALFDGTIRFNVSLGSTPDHEPTDDEIHEACKLANIHNVIMELPEAYDTECGPNGSRLSGGQRQRLAIARALVRKPKLLLLDESTSALDAESERALQEGLERVARGITVIAITHRLHTVRKADVIFIIEGGKVVEKGRHEELVERSETYRTNALQQMLGN

SEQ ID NO: 4480 - DNA, 3975 bp, Aspergillus nidulans FGSC A4
  CDS (1)..(3975)
atgggggagaaaacagcagaggccgaggccgagaagcccagtctcctcacacgttgcaccacattcacccgtcttctattctatggcagtccctcccttaaggaagccctcgtgttgctcacgggcctaatctccgccatcgcctcggggatccccttccctataatggcgattgtgttcggtcagctcgtcgatgagatgaactcgtcgacgtgcaatgcaacgcccgaaaacgcagactcataccaatccagcatcaacgccaaggtcctgcagatcgtctatattggcatcgcatatttcgtcctcatatacatctatgtcttttgctggaatatttccggagagtggcttgcgcagcggttacgcgaaagatactttcagagtctcttgcgtcaggacgcaggtttcttcgatactttggcgcctggagaggcttcgtcacgtattactggggatatcagtacgatccagcaggggacaagcgagaaggtgggaattgtacttaacagcattgcgttctttgtgacgagttatgtggtcgcgtttatcaaggatgctcggttggccggaatgcttgtctccctcgcgcctgcgtacctgatcatgtcgttggccggagggtattttgtgcggaagtactttgggcgggctctagagtgcatggcggctgcgtcggccgttgctctggaggcgttcagcaatacgatgctcgtgcatgcgttttcggcgggtgggaggcttgaagagcgcttcattgagcacctggggcctgcccgggtcgcgggtattcgcaagtcaatcgcgacagctacgcaggccggcttgctgtacttcattgcgttctcggcaaatgcgctggctttctggcaggggtcgatgaagattgcgggcgcggttgagggaggtgcggatggggtcactgtggggaatacgtatactgtgatcctggtgttggttgatgcgagtttgatactgagccaggttgcgccgttcctgcagagctttgatgcggcagccgtggcgtttaaaaagttggagaaggatatcgagaggccgagtccgattgatggaaccgctgattctggccttgttccggcagcagcaaagatagagtcggatatcgagtttcgcaacgtctcgtttcggttcccttcaaggcctgataaaccgatcctgcaggatctgacgctgcgcatcccggcaggcaagcagacggcgcttgtcggactgagtggcagcggcaagtcaactgtcgcgggcttgatcacgcggttctatgatgctgaggaagggcaggtgacgattgggggccatgacgtgcgcgagctgaatgtgcggtttctgcgcagtgctattagtcttgtccagcaggaaccttgtctgctcgatcggtcgatactggagaatattgctcttggactggtgaactcctcagcacatgtgcatttgatggatgtgctgaagagcagtgccttggaggatattgccactgctattcgggaaaaaggcttgagtctcaaccacgccattgacttgcaacccagcaacaaagaccagatccgcgagattgtgtccttggtcgaaacagcagctggcctagcagacgcaagcaacttcatcaacaagctcgaccacggctacgcaacaatggtcggatcaagcgggaacctcatcagtgggggccagaagcagcgtatctcgatcgcccgagccttggtcaaaagcccccaaatccttatccttgatgaagccaccgcatctctggattccgctacggaattacgcgtgcaacgggcgttggaggcggcggctgctggacgcactctagtcactatagcccatcggctctcgaccatcaagaaggcggataacattattgtgatgagacagggaaagctcattgagcagggctctcatgcagaacttcttgcggcagatggagcgtatgcagagctggtaaggttgcagaatctcaatgtcaatgcctcgcaggagagtgcgtcttcgtctgctcggccgtcactggacagtacggcgcttgagaaagaaaggaatgcagaggtaacatcggtacaagacgacgaaagctccactccatcccctaaagagaagccagcagacgaagaaccagttactaccgagcgctctgtcggttctacctctaaggccattgcctctctcttccgtccgtactcgctagccctccttgtagccatcatcggtgccgtcgtcatcggaggcacatactgcggttctgctgtcatattcggtaacgttgtgggcaagctaagctcgtgcgagacagcagaatccatccgccacgcgggagaattctgggggctcatgttcttcgtcctggctctgattgagtttttcgcaaacctcatcagctggtccctcttcggctggatcgcggagcagctcatatataaagtccgcgtgctctctctacgttccattctcgagcagaagctggaatggcatgaagcgcgcacaccctccggcctcctatcactcattgtcaaggacagcaacgcgctcaatggcctcacgggatccgtcatttgcacaatcctcagcatcctcgtcaacctcttcgccgccattattatgacccacatcattgcctggagaattgcactcgtttgtctctccgtcgtgccacttctcttgggcgctgggttcatgcgtgtctcaaccttagcccgctttgaggagcgccacaatgacgccttcgcccgctccctgggcataaccgtcgaagccgtgacatccattaagaccgtccacgcgctggccattgagtccgaagttctttccacctaccgccgctccctgcagggccccatgcgcgagataacagggcaatccgccttcaccaacctctggctcgccgtcggttacggcctcagcaacttcgtctatgcgcttgcatactggtggggtgcgaagcagattatcgctggtcactacacccagacacagttcttcattgttcagctggccctgctcgtctcgtctcagctctggggccagatgtttgctttggctcctgatgtgtctcgcgccgtgcaggccacccgccggctcttgaacttgctggacctaggctcaacgaagagactctccgatcccatcttaccccctcactcggcatcaacagatatcgaagcaacctcgcacccatccgaaaaaccccctccccctgatccatcaggcacgcagtccggcctcagcgtctcctttaagcaagttcaattcacctacccggcccgcccagacacccaggtcctacacgggctagatctcaccatctccgcagggcaattcgccgcgctcgttgggccctccggtgctgggaagtcaaccataatatcccttatcgaacgcctctacacacccagttctggaacaatcgagcttggcaaccgcaacatcgcacacatggacgcctccttccgcgacgaggttgcctatgtcccgcaacactccgtccttttcgacgggtccatcaggttcaatcttgaactcggtgcgcggccgaaccaggccctttcacaaactgagattgaggaagcgtgtaagcttgccaatatccacgatacaattgtgtctctaccagacgggtatgacacagccgttggaccgaacggtgacagactaagcggtggtcagaagcagcgtcttgcgattgcaagggcattgctgagaaggccgagactgttgctgctggatgagtcgacgagtgcgctggatgcggagagcgagcggttactgcaggatggcttggagaaggcggcaaggggaatcactgtcattgcaattgctcatcggctgtatacgattcgcaaggcggatgtgatcttcctcattgaagaggggaggtgtgtggaaagggggtcgcatacagaactgatggagaggagtgagagttatcgggttaatgccctgaatcaggctgtggatggctaa

SEQ ID NO: 4481 - protein, 1324 aa, Aspergillus nidulans FGSC A4
MGEKTAEAEAEKPSLLTRCTTFTRLLFYGSPSLKEALVLLTGLISAIASGIPFPIMAIVFGQLVDEMNSSTCNATPENADSYQSSINAKVLQIVYIGIAYFVLIYIYVFCWNISGEWLAQRLRERYFQSLLRQDAGFFDTLAPGEASSRITGDISTIQQGTSEKVGIVLNSIAFFVTSYVVAFIKDARLAGMLVSLAPAYLIMSLAGGYFVRKYFGRALECMAAASAVALEAFSNTMLVHAFSAGGRLEERFIEHLGPARVAGIRKSIATATQAGLLYFIAFSANALAFWQGSMKIAGAVEGGADGVTVGNTYTVILVLVDASLILSQVAPFLQSFDAAAVAFKKLEKDIERPSPIDGTADSGLVPAAAKIESDIEFRNVSFRFPSRPDKPILQDLTLRIPAGKQTALVGLSGSGKSTVAGLITRFYDAEEGQVTIGGHDVRELNVRFLRSAISLVQQEPCLLDRSILENIALGLVNSSAHVHLMDVLKSSALEDIATAIREKGLSLNHAIDLQPSNKDQIREIVSLVETAAGLADASNFINKLDHGYATMVGSSGNLISGGQKQRISIARALVKSPQILILDEATASLDSATELRVQRALEAAAAGRTLVTIAHRLSTIKKADNIIVMRQGKLIEQGSHAELLAADGAYAELVRLQNLNVNASQESASSSARPSLDSTALEKERNAEVTSVQDDESSTPSPKEKPADEEPVTTERSVGSTSKAIASLFRPYSLALLVAIIGAVVIGGTYCGSAVIFGNVVGKLSSCETAESIRHAGEFWGLMFFVLALIEFFANLISWSLFGWIAEQLIYKVRVLSLRSILEQKLEWHEARTPSGLLSLIVKDSNALNGLTGSVICTILSILVNLFAAIIMTHIIAWRIALVCLSVVPLLLGAGFMRVSTLARFEERHNDAFARSLGITVEAVTSIKTVHALAIESEVLSTYRRSLQGPMREITGQSAFTNLWLAVGYGLSNFVYALAYWWGAKQIIAGHYTQTQFFIVQLALLVSSQLWGQMFALAPDVSRAVQATRRLLNLLDLGSTKRLSDPILPPHSASTDIEATSHPSEKPPPPDPSGTQSGLSVSFKQVQFTYPARPDTQVLHGLDLTISAGQFAALVGPSGAGKSTIISLIERLYTPSSGTIELGNRNIAHMDASFRDEVAYVPQHSVLFDGSIRFNLELGARPNQALSQTEIEEACKLANIHDTIVSLPDGYDTAVGPNGDRLSGGQKQRLAIARALLRRPRLLLLDESTSALDAESERLLQDGLEKAARGITVIAIAHRLYTIRKADVIFLIEEGRCVERGSHTELMERSESYRVNALNQAVDG

SEQ ID NO: 4482 - DNA, 4134 bp, Aspergillus nidulans FGSC A4
  CDS (1)..(4134)
atgaactcagcccatctcggatcaggattcaggaatcaggaaccccccaatccactcgctggatcggcatcgacgatagccatgaggtccatgacgcatttacgtaaagacaccctccccttcccgcatggttatgccacggctgcggatgattcgatgtggcttggattcagcaccgtcggtatgaagcttgttcagaatctggcgggctttcctcgcctgctgctggccggcaacccttcaaaaatcgaccttggcatgctcctggtggccatcctgagtgcgatagcgtccggcgtaccctttccattgatcggtatcctgttcggtcagctcctcgacgatttcaacgcggcgacatgtaaatcaggcgactcctctggcgacggcgagcaagggagcatcaacgacaagatcctgattatcgtatatttggcaatcgctcagttcgtccttatctacatccatctttcgttttggactctaaatggcgctcggctggcgcagcgactgcgagaatcctacctgcaaaacctccttcgacaggaaccctcgttttttgacaaccttcctccgggagaggtagcctctcgactcaatggcgacatccagacgattcgttccggcacgtccgagaaagtgggaatttgtctcgcgagtttctcgttcttcgttacggcctatatcgttgcatttattaaggacaccaaacttgcaggaatgcttgtttcgttgattccggcctatttcctgatgtcgtttgtcggaagccactatatcgagaaatactcaggtctgatgtcggaatatgccgctaccgccgcttcgatagcttcagaagcgctttcaaacttcaccgttgtccaggcctttggcgcaaacgaccgcttggaggagaaattctccaaggcgctcaagtcctcggaaaaggaagggctgaaaaaggctacggcagttggcatacagtctggagttctgtatttcgtcgcttattctgcgaacggtttggcgttctgggaaggcagcagacaggttgcccgcacagtgaacggcgagcctggcggtgttactgtcggcgctacgttcacggtcatcttcattctagttgaagcgaccctgcttctgagtcaagtcgcaccattccttcacctgttcactgcaggagttgcctcgtacgagaaattgcatgcagacatcaatcgccagccgctgattgatggaactactccttcaggaagccgcctcacccaggctggtgggttcgagctaaacgaagtctcatttagctatccctcacggcctgaggtcaccgtcctcgacaaggtttccctcagcatacctcccaacaaacatactgcaattgtaggcctttcgggaagtggaaagtcgacaatcgccggcctggttacaaggctgtatgatcccacggaagggcaaatcttgttcgatggccatgatcttcgcgacgtcaatactcgtgacttgagaagttttgtcagtttggtgcagcaagagccgaaccttttggaccgttccatcctggagaacatcgcacatggtttggtcaattcgagcaatcccagccatacgcctctgagagcagcccttctcagctccgacattgcggacatcgctagcgaagttagggagggaaaagatttaatggaagcggctgagaaaaggggcccagagttcgttgagattgccaaactggtccagaaagccgcgcagctcgcggatgcagaagctttcattcttgcactgcaacatggatatggcacacttgttggatccagtgggaggttgatcagtggtggtcagaaacaacgaatctcccttgcgagagcccttgtcaaggatccagccgtacttattctggacgaagcaacggcctctctggattcgcgaagtgaacaacgtattcaaagggctatttctaacatagctagcggacgaaccatgattactattgctcatcgtctatccacaattaccaatgcggataatatcgtcgttatgcacaagggccatatcgtggaacaggggaaccatgcaacattgatggcaaaagatggggcttatgctgatctagtcaaactgcaaacgctatccactactgacaagaatgaatctacaaccagtgttgatactatcagcaaaactgatcagatctcgtcggacggcgacctcgagtcgagcagtcttactgacggtcccagatttatcgaggatgagaagaagcctgaaacaactgaaactccggttaccgactcaacagaagagcctgaagaacctgatacgccaaacaaatccttatgggctctcgttaagggttatgcgccgactctgaggccgcatttgctttttctcctccttgcgctgctgggctccagtattgttggcggtgcattttctggtgaagccgtgatttttggaaatactgttggaagtttgaatccatgcaacagtgcggattacatccgatccaagggaaactttttcggactcatgttcttcgtgttggcgatcatcgagttctttgcgaacgttgttagttggaccggatttggatgggtgtcggagaaagtagtctacactgtccgagttctatccttccggtcactgatggagcaagatctccagtggcaccaatcgaaaggtcgctcaccacccttgctcctctcatacatcaccagagatggcaacgctttggctggactaagcggctctgtcgtcggcacactgttttcaattactgttaatctcatcgcagcgattatcttgacgcacatcattgcatggaggattgctctggtttgcctcgctctagttccactgctgcttggtgccggtcttatggaactccatatactcgggaagttcgaggagcgtcacgagaacgcttataccaagtcggtcgacattggtgttgaagccatcacctccatcaaaacgattgcatctctttcccttgaagatgagacactgaagacctaccaacggtccctgaagggtcctcgtaaggaaacgcttacagttactctacaggcaagcttttggcaggcgatgacctacttcctgggtaacctcgtgaatgcgttagcctactggtggggttccaaacaaatcttggcgggcaattatacccagactcagttcttaattgtggtgttttccctgcttgttagtgctttgctttggagtcaaatgtttgctcttgcgccagagctttcggcagcacgagctgcaatggccaggttactgggtcttattgagatagggtcagataagatgcaaggacacgtaccccctcgctcccttacggcatcgtcttcaggggaggaagaggcagctgtcgaaactaagcaacatgcatcagacagcaaagcctccagcgtccagcttcgcgacgttcactttgcgtacccagcccgaccagacattaaggttatgaacgggttgactattgacatcaagcccggaaagttcgccgccctcgtcggtcccagtggtgcaggcaagtccacaatcatttcactagttgaacgcctttacacgccgcaatctggctcgatcctcgtcgacggcgtggacattaccaagcatcgggatgtcggcttccgagactcaatcgctctggtgccccaggaaagcgtcctcttcgaagggaccatcaaattcaacattagcctcggcgccaaaccaggccacgaggtttcgcagggggacattgaaaaagcttgcaaactagcaaacatccacgataccattgccgcccttcccgacggctacgacaccctctgcggtcccaacgggagccagttttccggaggccagaaacagcgcctctctatcgccagagctcttgttcggaaaccgaagctgcttatccttgacgagtcaactagcgctcttgacgcggagtctgagaaactgctgcaggatgggctcgaaaaggctgctaagggaatcacagtcattgccattgcgcatcgtttgcatacaatcaagaaggcggatgtcatctttttgattgagggaggtcggtgtgttgaacatggcacacatgaggagttactggccaggtcagagagctacagggctaatgttatgcaccagactgtggctacatga

SEQ ID NO: 4483 - protein, 1377 aa, Aspergillus nidulans FGSC A4
MNSAHLGSGFRNQEPPNPLAGSASTIAMRSMTHLRKDTLPFPHGYATAADDSMWLGFSTVGMKLVQNLAGFPRLLLAGNPSKIDLGMLLVAILSAIASGVPFPLIGILFGQLLDDFNAATCKSGDSSGDGEQGSINDKILIIVYLAIAQFVLIYIHLSFWTLNGARLAQRLRESYLQNLLRQEPSFFDNLPPGEVASRLNGDIQTIRSGTSEKVGICLASFSFFVTAYIVAFIKDTKLAGMLVSLIPAYFLMSFVGSHYIEKYSGLMSEYAATAASIASEALSNFTVVQAFGANDRLEEKFSKALKSSEKEGLKKATAVGIQSGVLYFVAYSANGLAFWEGSRQVARTVNGEPGGVTVGATFTVIFILVEATLLLSQVAPFLHLFTAGVASYEKLHADINRQPLIDGTTPSGSRLTQAGGFELNEVSFSYPSRPEVTVLDKVSLSIPPNKHTAIVGLSGSGKSTIAGLVTRLYDPTEGQILFDGHDLRDVNTRDLRSFVSLVQQEPNLLDRSILENIAHGLVNSSNPSHTPLRAALLSSDIADIASEVREGKDLMEAAEKRGPEFVEIAKLVQKAAQLADAEAFILALQHGYGTLVGSSGRLISGGQKQRISLARALVKDPAVLILDEATASLDSRSEQRIQRAISNIASGRTMITIAHRLSTITNADNIVVMHKGHIVEQGNHATLMAKDGAYADLVKLQTLSTTDKNESTTSVDTISKTDQISSDGDLESSSLTDGPRFIEDEKKPETTETPVTDSTEEPEEPDTPNKSLWALVKGYAPTLRPHLLFLLLALLGSSIVGGAFSGEAVIFGNTVGSLNPCNSADYIRSKGNFFGLMFFVLAIIEFFANVVSWTGFGWVSEKVVYTVRVLSFRSLMEQDLQWHQSKGRSPPLLLSYITRDGNALAGLSGSVVGTLFSITVNLIAAIILTHIIAWRIALVCLALVPLLLGAGLMELHILGKFEERHENAYTKSVDIGVEAITSIKTIASLSLEDETLKTYQRSLKGPRKETLTVTLQASFWQAMTYFLGNLVNALAYWWGSKQILAGNYTQTQFLIVVFSLLVSALLWSQMFALAPELSAARAAMARLLGLIEIGSDKMQGHVPPRSLTASSSGEEEAAVETKQHASDSKASSVQLRDVHFAYPARPDIKVMNGLTIDIKPGKFAALVGPSGAGKSTIISLVERLYTPQSGSILVDGVDITKHRDVGFRDSIALVPQESVLFEGTIKFNISLGAKPGHEVSQGDIEKACKLANIHDTIAALPDGYDTLCGPNGSQFSGGQKQRLSIARALVRKPKLLILDESTSALDAESEKLLQDGLEKAAKGITVIAIAHRLHTIKKADVIFLIEGGRCVEHGTHEELLARSESYRANVMHQTVAT

SEQ ID NO: 4484 - DNA, 1941 bp, Tribolium castaneum
  CDS (1)..(1941)
atggcccagaaagtgagtcagaacaagacatacatcgctgtgaatatccccgaaaattcgaataaagcagttcgaaaatcattttggtcggtttttaaaagggacgctagcacaaagaaaagcaaagaagcgcccaaagaagtagccccagcgaccccgcgcattaacaaagctgatttggcccgcctgctgtccttagccaagccagaaaaatggaaacttttcggagcgatttgtttcttgctggtgtcaagcaccgtcacaatgagcatcccttttagtttaggcaaagtccttgacatcatttatagtagtagtgaaaatagtgatgaggctcgagcgaaattaaataaagtttgcggtgttttattgtgcgtgtttgtcttaggggcgatttgcaattttggacgtgtgtacctaatgtcagtatcaggttatagaatgactcaagctttaagaaaacgtgttttttctaccataatgaagcaggaacaaggctggtttgataagagatcaactggggagttggtaaacagactctctgccgatactcaaattgtgggaaatgctctctctagcaatatttcagacgggctaaggtcaattgtcatggtctgtgctggtacaggcatgatgttttatatgtcggcagaactggcacttgttggcttggctattgtgcccccggttgcgattattgccgttatttatgggagattccttagagggatttctaggaaggttcaggattctttagcaggggctactagtgttgcagaggaacgtattgctaatatcaggactgttaaaactttctcgcaggaaccgagagaagttgattcgtacgcaaatgccattaaagaggttctaggcttgagttacagagaggctaaagctagggccattttttatgggctgaccggctttagcggccacgtaatcataatatcagtgctttattatggtggtgtgatggtgtcttcaaacaccataacagtgggaaatctgtcttcttttctcttatatgcggcttatatcggcgtatcgttgggcacattttcaaatttttactccgaattgaacaaatcaattggtgctgcggccagaatttgggaaattatcgacagagaacccataattccgatgaaaggtggtttagtgccaattgcaccccctgaaggtcacatacaatttaacgacatccagtttagttacccagcgcgcgacgatgtccgcattttcgaaaatttcaaactcgaaatatcccccggaaaaatggttgcagtagtcggtccgagtggttccggcaaaagcaccctcgctgctcttttattgcgactatacgatcctgcaaaaggacaagttctattagacggacaggacattaaagaaattgatccgagttggttgcgccgacatgtcggtaccgttagccaggaaccagttttattttcgtgttcaattcgtgataatattttatacggagctgatgatccttccaaagtgacagaagatgaattagttcaagtggccaaagaggccaatgtttacgaattcgtccaacagttgcccgacggttttgatactttggtaggggaacgtggggtgatgttgagcggtggccagaaacaacgcattgccatagcgagagctttgattaaagatccgaagatattgttgttagatgaagccacgagtgcgttagatgcgcaatcggagcacttggtgcaagaagctttggagaggattatgaaagggaggactgttttaacgattgctcataggctgtcgacgattcaaaatgccgatactattgctgtgctgcgcgatggacatatcgtggaacaggggaaataccaggatttacttaatatcaagaagggcgcgtttagggaattaatgaaacatcaaacgtttcaagggaatatagagaagacgtga

SEQ ID NO: 4485 - protein, 646 aa, Tribolium castaneum
MAQKVSQNKTYIAVNIPENSNKAVRKSFWSVFKRDASTKKSKEAPKEVAPATPRINKADLARLLSLAKPEKWKLFGAICFLLVSSTVTMSIPFSLGKVLDIIYSSSENSDEARAKLNKVCGVLLCVFVLGAICNFGRVYLMSVSGYRMTQALRKRVFSTIMKQEQGWFDKRSTGELVNRLSADTQIVGNALSSNISDGLRSIVMVCAGTGMMFYMSAELALVGLAIVPPVAIIAVIYGRFLRGISRKVQDSLAGATSVAEERIANIRTVKTFSQEPREVDSYANAIKEVLGLSYREAKARAIFYGLTGFSGHVIIISVLYYGGVMVSSNTITVGNLSSFLLYAAYIGVSLGTFSNFYSELNKSIGAAARIWEIIDREPIIPMKGGLVPIAPPEGHIQFNDIQFSYPARDDVRIFENFKLEISPGKMVAVVGPSGSGKSTLAALLLRLYDPAKGQVLLDGQDIKEIDPSWLRRHVGTVSQEPVLFSCSIRDNILYGADDPSKVTEDELVQVAKEANVYEFVQQLPDGFDTLVGERGVMLSGGQKQRIAIARALIKDPKILLLDEATSALDAQSEHLVQEALERIMKGRTVLTIAHRLSTIQNADTIAVLRDGHIVEQGKYQDLLNIKKGAFRELMKHQTFQGNIEKT

SEQ ID NO: 4486 - DNA, 1800 bp, Tribolium castaneum
  CDS (1)..(1800)
atgacaacatacaggacatcctctggcaaacagcaaaaatttgattgggataaattttggcagtatttaaaaccccatatttggtatcttattgcggcaattgctggagctttagctgttgcgatcttaaatatacaaataccgcaagtaatgggaggggttattaatgttatagctcagtatacagacaacaagaatagtgaatcatttataaatgaaatgaaagtgcctgcgattaaacttattgcaatgtatgttggccaatcactttgtacgtttttttacatttacatgttatctaatttgggtgaaagaatttcatttcaaatgaaaaccgatttatttgctgcaataatgcgccaagatattgcgttctttgaccaacaaagaaccggtgaggtgatcaacagactgacttccgatatccaagactttaaaagcagttttaaacagacggtatcgggcggtttaagggcaattgcccaaattgtgggatgctcagtgtccctaattatgatttcacctcacatgacttttattacgttactttgtgtccccacagttattgctgttgggacgctttttgggggcttgttaaggaacacttcaaggaaagcacaggcacagattgaaaaaacaaccgctgtcgcggatgaagctgtaagcaacataagaacagtccgagcgtttgggatggaagatcaagagagggaattatttgatgctgaggctgaattagcaatggttttaaatgaaaatttgggttttggtattgggtggttccaagcgggtacaaatttatttttaaatgggatggttttaattacactttacatgggtggttatttgctctcaactgataagttgtctccgggagaattgatggcgtatttgatggcctcccaaactattcagaggtcattggggcaactgtccctgctttttgggtccgtggtcaggggggttgcggcaggatcgcgtgtttttgagtatatgaatttacgaccaactatgcctttaagaggagggaaaataattccagaagataatctgaagggtgatattgagttcaaaaacgtaacatttgcttatccaacgcgacgacaacagtatgttttaaagaattttgatttaaaaataccttctggtaaaactttggcaatagttggagcttcaggtaacggcaaatctacggttgttgcgctgatagaacgattttacgacgtaaattgcggttcggtcactttagacggtcatgacattaaaaccctcgacccatcatggttgagacagcgtgttctggggctaataagccaagagccaattttgtttggtacttccattgtcgaaaatatcagatatgggctccctagtgcctcagatgaggaagtcaaagaagcggcaaaattagcaaacgcccatgactttatctccagttttccgcaagggtatgacactatggtgggtgagagaggggtgacattatccggtggccaaaaacaaagaattgccattgctagagcgttacttaaaaacccgacagtattactattagatgaagcaacaagtgctttagacacagaatcggagaaagtcgtacaaaacgcattagaaaatgctaaaaaggggaggaccgttgtggtgatcgcccaccgactgtccacggttcagaacgctgacataattgttgttttgaataagggggttatagttgagatggggacccatgaggagttgacacgcaagcggggctattactggtctctgacgtaccaacagcaggaggttcccgccggttaa

SEQ ID NO: 4487 - protein, 599 aa, Tribolium castaneum
MTTYRTSSGKQQKFDWDKFWQYLKPHIWYLIAAIAGALAVAILNIQIPQVMGGVINVIAQYTDNKNSESFINEMKVPAIKLIAMYVGQSLCTFFYIYMLSNLGERISFQMKTDLFAAIMRQDIAFFDQQRTGEVINRLTSDIQDFKSSFKQTVSGGLRAIAQIVGCSVSLIMISPHMTFITLLCVPTVIAVGTLFGGLLRNTSRKAQAQIEKTTAVADEAVSNIRTVRAFGMEDQERELFDAEAELAMVLNENLGFGIGWFQAGTNLFLNGMVLITLYMGGYLLSTDKLSPGELMAYLMASQTIQRSLGQLSLLFGSVVRGVAAGSRVFEYMNLRPTMPLRGGKIIPEDNLKGDIEFKNVTFAYPTRRQQYVLKNFDLKIPSGKTLAIVGASGNGKSTVVALIERFYDVNCGSVTLDGHDIKTLDPSWLRQRVLGLISQEPILFGTSIVENIRYGLPSASDEEVKEAAKLANAHDFISSFPQGYDTMVGERGVTLSGGQKQRIAIARALLKNPTVLLLDEATSALDTESEKVVQNALENAKKGRTVVVIAHRLSTVQNADIIVVLNKGVIVEMGTHEELTRKRGYYWSLTYQQQEVPAG

SEQ ID NO: 4488 - DNA, 1797 bp, Prochlorococcus marinus str. MIT 9303
  CDS (1)..(1797): transl_table=11
atggctgttactgattttcagcgggttcggcgtctggggcgttatctccgtgaggaccgtcggcgtttatggatcgtcctgtctctcttggtgccgctagctcttgctggtgcgattcaacccctcttggttggccaggcaatcagtgttttgaagcaagagtcaaccttcccttggctcagtgatctgccagtgagctcagcaataagacttttggtggggattctgctgatttctgtgcttctgcgcttgggtctgcagggctttcagtctttcaatatcgaggccttagggcaacggctaacggcgcgtattcgtaacgatctgtttggccacgccatggccctttcgctgcgctttcacgatcgaatgcctgtgggcaagttgttgactcggctgaccagtgatgtgaatgcactgtctgaggtttttggcagtggggcagtgggagttttgggcgacctcgtcagccttgtggtgattgcagtcaccatgattttgattgattggcgcctgggggggttgctgctggttacgcaggtaccggtcaccttggtgatcctttggttgcaacgccgataccggaaagccaattaccgcgtgagggaggaactctctcagctcaatgccgattttcaggaaaaccttcaggggcttgaggttgtccagatgtttcgtcgagaaacggttaatgggcagctatttgatcgcactggctcggcctacaggcaagccgtgaatggaacgatcttttatgacagcagcatttcagcttttatcgaatgggtggccctggcagccgtggctgcggtgctggcgcttgggggatggatggtaactgccgagacaatgggccttggcaccttgacaacgttcatcctttattcccagcgtttgtttgatcccctgcgtcaacttgctgatcgcttcactcagattcaggggggactgactgctgttgaacggattggcgagttgctggagcagccacttgacattgtcgatgcaaagtctgttaaagacgaacccagcgttgttaggccctcggcttctgctgcttgcggtgaggtggtgtttgagggggtgagctttgcctatcggccggacgagccgattctccaggaccttagttttcgcatttctgctggtgaacatgttgccctggtaggaccaaccggttcaggcaagacgaccctgatccgcttgctgtgtcgtctttacgagcctcaagtcgggcggatcatgcttgatggtgttgacatcaaaacaatccctctttggcggctacgcaaacaactgggggttgtgcttcaggacacctttctatttagcggcaatgttgcagataacctccgattggattcctcgattgaggatgaccgtttgcgggcgatctgtagagatcttggccttgatcctttgctcaatcggctacccaacggcttggagactgagctcagggagcgtggcggcaatttgtcatcgggagagagacagctcttagcagttgcaagggtggccattcgcaaccccactgtgctggttatggatgaggcgacggctttcatggacccttctacggaagcgacattgcaaagggatctagatcgcttgcttgaacgtcgcaccgcggttgttattgcccatcgcctggccactgtggaagcagccgatcgaatcatggtgcttcggcggggcaagctgattgagcagggaacccaccttgagcttcgtgccaagggaggcctttattctcagttagcggaactacaggaaaggggactggcgaaactttga

SEQ ID NO: 4489 - protein, 598 aa, Prochlorococcus marinus str. MIT 9303
MAVTDFQRVRRLGRYLREDRRRLWIVLSLLVPLALAGAIQPLLVGQAISVLKQESTFPWLSDLPVSSAIRLLVGILLISVLLRLGLQGFQSFNIEALGQRLTARIRNDLFGHAMALSLRFHDRMPVGKLLTRLTSDVNALSEVFGSGAVGVLGDLVSLVVIAVTMILIDWRLGGLLLVTQVPVTLVILWLQRRYRKANYRVREELSQLNADFQENLQGLEVVQMFRRETVNGQLFDRTGSAYRQAVNGTIFYDSSISAFIEWVALAAVAAVLALGGWMVTAETMGLGTLTTFILYSQRLFDPLRQLADRFTQIQGGLTAVERIGELLEQPLDIVDAKSVKDEPSVVRPSASAACGEVVFEGVSFAYRPDEPILQDLSFRISAGEHVALVGPTGSGKTTLIRLLCRLYEPQVGRIMLDGVDIKTIPLWRLRKQLGVVLQDTFLFSGNVADNLRLDSSIEDDRLRAICRDLGLDPLLNRLPNGLETELRERGGNLSSGERQLLAVARVAIRNPTVLVMDEATAFMDPSTEATLQRDLDRLLERRTAVVIAHRLATVEAADRIMVLRRGKLIEQGTHLELRAKGGLYSQLAELQERGLAKL

SEQ ID NO: 4490 - DNA, 1728 bp, Clostridium thermocellum ATCC 27405
  CDS (1)..(1728): transl_table=11
atgaagaattttatcagaatacttaaacagggacgacaatactggaaatatttgatagtcgccggtataagcctgctcgcgattacggctttcaaccttgttaccccatggaaagtcagagaactggttgatatattgtcaaaagaaggcacgaagaatatggcaagtatacgcaatattgcaattatacttgccgttgcatacatcgcaagagcgtttttttcctatctgtatcgctatttcagccatgttgccgcatggagactggttgcggacatgagggtgattgtgtacgaacatctgcagaagctgtctttgagtttctatcaagacaagcagaccgggcagcttatgtcaagggcaataaatgacacggccacttttgaggttttaatagcccatgctgttccggaccttgttaccaatgtgcttattctcgttggcaccggtatactgttgtttgtaataaaccctttgctggcggcgcttacccttatacccataccgtttttggtactgggttcgggaatatttaccaaaaaagttcttccgaatttccgggaggcgcagggaaaacttggggatcttaacgcagtggtgcaggacaatatttcgggtatcaaggaaattcaggctttcaaccaacagtcaagggagaaaaaacgcgttgaaaaaagggcaagaaaatacacttccgcaatacttcatgctttaagggtaagtgcgatatttcatcccgttgtggaaatgataagctcccttggaacggttattgtcgtggcctttggcggatggtttgcattaaaaggttatgtcagcacggctgatattgtaggatttataatgtttctgggacttttttatcagcctatcaccacactggcaagagtaatagaagatttacagcaggctgcggcgggagcggaaagagtgtttgagcttcttgacaccgagccggatattgtcgacagtgaaggggcgaaaaccattacaagttccaaaggtgaaataacctttaaaaatgtaagtttccactatattccttcaaatccggttttgaaaaatataagctttaccgcaaagcccggtcagatgatagcattggtggggccgaccggagtgggaaaaagcactgtaattagtttaatagcaagattttatgacccggtttcgggagaaattcttcttgacggtatgaatattaaggatataacaatatcttctctaagaaaccagataagcatagtgcttcaggatacattccttttcaacggcagtgtggctgacaatattgcttacggaagcagggacgcttcttttgaagatattgttagagcggcaaaaatcgcaagggctcatgattttataatgcagcttcccgaaggctatgacaccgtgataggtgaaaggggcgtaaagctttccggagggcagaaacagcgtttgtccatcgccagagcggttcttagaaacactcctatattgatattggacgaagcaaccgcgtcagttgatgtcgaaacggaagcggaaatccagaaagcgattggtgaattggcaggaacccgcactattattgtgatagcccacaggctgtccaccgtaaagcaggcagacaacatccttgtcttaaaagacggggaaattgtagagtcgggcactcatgacgagcttataaagcaagacggcttgtacaaatatctttgcgaagtacaattcggaatatga

SEQ ID NO: 4491 - protein, 575 aa, Clostridium thermocellum ATCC 27405
MKNFIRILKQGRQYWKYLIVAGISLLAITAFNLVTPWKVRELVDILSKEGTKNMASIRNIAIILAVAYIARAFFSYLYRYFSHVAAWRLVADMRVIVYEHLQKLSLSFYQDKQTGQLMSRAINDTATFEVLIAHAVPDLVTNVLILVGTGILLFVINPLLAALTLIPIPFLVLGSGIFTKKVLPNFREAQGKLGDLNAVVQDNISGIKEIQAFNQQSREKKRVEKRARKYTSAILHALRVSAIFHPVVEMISSLGTVIVVAFGGWFALKGYVSTADIVGFIMFLGLFYQPITTLARVIEDLQQAAAGAERVFELLDTEPDIVDSEGAKTITSSKGEITFKNVSFHYIPSNPVLKNISFTAKPGQMIALVGPTGVGKSTVISLIARFYDPVSGEILLDGMNIKDITISSLRNQISIVLQDTFLFNGSVADNIAYGSRDASFEDIVRAAKIARAHDFIMQLPEGYDTVIGERGVKLSGGQKQRLSIARAVLRNTPILILDEATASVDVETEAEIQKAIGELAGTRTIIVIAHRLSTVKQADNILVLKDGEIVESGTHDELIKQDGLYKYLCEVQFGI

SEQ ID NO: 4492 - DNA, 1881 bp, Mycobacterium sp. JLS
  CDS (1)..(1881): transl_table=11
atgagtatcgaaacggtcgcccggcagaccctgtaccgccaggcgcacgcccgcagcggagatctgcactcgctggccgaccgtgccctgctgcgccgcatctggcggttcgccggccggcaccaccgcaggctcgccgcgttcgtggcggtcagcgtggtgagcgcgacgctggcggtggccacgcccgtgctggccggccgggtggtcgacgagatcacgcgcggcggcgcggcgtcggtcgtgatcgggctcgccgccgtcatcgcgaccgtcgcactcgccgaggccggggtgtcgctgctgacgcgctggctgtcgtcgaacatcggcgagggcctcatcttcgacctgcgcaccgccgtcttcgagcacgtccagaagatgcccgtggcgttcttcatgcgcacccgcaccggtgcgctggtcagccgcctcggcaacgatgtgctcggcgcacagcgcgcgttctccgacacgctgtccggggtggtctccaacctggtcacgctgacgctgacgctcggcgtgatgctcgcgatctcctggcagatcaccgtcgtcgcactcgtgctggtcccggttttcgtgctgcccgcccgccgaatcggcgccaggatggcgcacctgtcgcgggagagcgccattcacaacgcgacgatgaacacgcagatgaccgaacggttctccgcgcccggcgccaccctggtcaagctgttcggccgccccgatagcgaatcccacgagttcgcggtccgcgccgggcgcgtccgcgacatcggggtgcggtcggcgatgctgcagtcgacgttcatgaactcgctgacgctgatgtcggcgctcgccctggcgctggtgtacgggctcggcggggtgatcgccctcggtggtcatctgcaggccggggcgatcgtgtcgctggcgctgttgttgacccgtctctacgcaccgctgactgcgttggccaatgcccgggtcgagatcgccagtgcgctggtgtctttcgagcgtgtcttcgaggtgctggatctggagccgatcatccgggaggagcccgacgccgtcgcggtacccgacggcccggtgcgcgtcgaatttgatcacgtgcggttctcctacccgacggcggacaaggtctcgctggcctcgctcgaggaggtcgcggtgctcgacgaccgcgacgacggtgaggtgctgcacgacatctcgttcaccgcggagccggggcagatggtcgcgctggtcgggtcttcgggcgccggcaagtcgacgatcgccgcgctgctggcccgtctctacgacgtcgactccggtgcggtgcggctggccgggatggacgtgcgcgacgtgacgttcgaatcgctgcgcgacaccgtcggcatggtcacccaggacggacacctgttccacgagtcgatccgggccaacctgctgctggccgcccccgaggcgacggacgaccggctctgggaggtgctgcgccgcgcccggttggccgatgtcgtcgccgcgatgcccgacgggctcgacacggttgtcggtgagcgtggctaccgtctgtccggcgggcaacggcaacggctgaccatcgcccgcctgctgttggggaggtcacgggtggtggtgctcgacgaggcgacggcgtcgctggactcggcgtcggaggccgccgtgcaacaggccctcggtgaggcgctggccgggcggacgtcgctggtcatcgcccaccggctgtcgaccgtgcgggccgccgacctgatcctcgtggtcgaggacggccggatcgtcgagcgcgggacgcatcgccagctcatcggccgcggcggccgctacgccgagttgtacgagacccagttcgcggagccggaggcggttgcgtga

SEQ ID NO: 4493 - protein, 626 aa, Mycobacterium sp. JLS
MSIETVARQTLYRQAHARSGDLHSLADRALLRRIWRFAGRHHRRLAAFVAVSVVSATLAVATPVLAGRVVDEITRGGAASVVIGLAAVIATVALAEAGVSLLTRWLSSNIGEGLIFDLRTAVFEHVQKMPVAFFMRTRTGALVSRLGNDVLGAQRAFSDTLSGVVSNLVTLTLTLGVMLAISWQITVVALVLVPVFVLPARRIGARMAHLSRESAIHNATMNTQMTERFSAPGATLVKLFGRPDSESHEFAVRAGRVRDIGVRSAMLQSTFMNSLTLMSALALALVYGLGGVIALGGHLQAGAIVSLALLLTRLYAPLTALANARVEIASALVSFERVFEVLDLEPIIREEPDAVAVPDGPVRVEFDHVRFSYPTADKVSLASLEEVAVLDDRDDGEVLHDISFTAEPGQMVALVGSSGAGKSTIAALLARLYDVDSGAVRLAGMDVRDVTFESLRDTVGMVTQDGHLFHESIRANLLLAAPEATDDRLWEVLRRARLADVVAAMPDGLDTVVGERGYRLSGGQRQRLTIARLLLGRSRVVVLDEATASLDSASEAAVQQALGEALAGRTSLVIAHRLSTVRAADLILVVEDGRIVERGTHRQLIGRGGRYAELYETQFAEPEAVA

SEQ ID NO: 4494 - DNA, 1977 bp, Bradyrhizobium sp. ORS278
  CDS (1)..(1977): transl_table=11
ttgatgccccccgattcctccccacatcaccttgccaccgatgcgccggcctctccggagcagggaacgctcgccggcacgctgcgtcatctctggcccttcatctggccgagcgaccgcgccgatctgaagatgcgcgtgttatggtcggtggtgctgctgctcgcagccaaggtcgcgaccttggtgctgcccttcaccttcaaatggaccaccgacgccctgaccggcgccaacaccgcgccgatcaagccggacgattgggcgttctggctggtcgcctcgccgatcgtgatgaccgcgagctatggcgcgatgcgggtgctgatggcggtgctgacgcagtggcgcgacggtatctttgcgcgcgtcgccatgcatgcggtgcgcaagctcgccaccatcaccttcgtccatatgcacgagctgtcactgcgctttcatctggagcgcaagaccggcggattgacacgcgtgctcgaacgcggacgcaatgcgatcgagacgatcgtccgcatggtgatcctccagctgatcccgaccatcgtcgaggtctcgctgctgaccgccgtgctgctgtggcagttcgactggcgctatgtgctggtcacgttgaccatggtcggggcctatctcttctacacatacatcgcgaccgagtggcgcatcgagatccggcgccggatgaacgactccgacaccgacgcgaacacgaaggcgatcgactcgctgctcaactacgagacggtgaaatatttcggcgccgaggcgcgcgaggccgagcgctacgaccgctcgatggagcgttatgagcgggccagcgtgaagacctacacctcgcttgcggtgctaaacgccgggcaggcggtgatcttcaccatcggcctgaccatcgcgatgctgatgtgcgcccatggcgtgcgccaggggcgcaacaccgtcggcgacttcgtcatgatcaacagcatgatgatccagctctaccagccgctgaacttcatgggcatggtgtatcgcgagatcaagcaggcgatcatcgacatcgagaagatgttcggcgtcttgaccagggatgccgaggtgaaggatgcgccgcgcgccaagccgctggtggtgaccgcaggccatgtccgcttcgaggatgtccgctttgcctatgagcccgagcggccgatcctgcaggggctgagcttcgaggtgcccgccggcaagacggtcgcgatcgtcggtccgtccggcgcaggcaagtcgacgatctcgcgcctgttgttccggctgtacgacgtgtccggcggccgcatcctgatcgacggccaggacatccgcgatgtgacgcaggtgtcgctgcgggcgcagatcggaatggtgccgcaggacaccgtgctgttcaacgacaccatccgctacaacatccgctacggccgctgggatgcggacgatgccgcggtcgaggaggcggcgcggctggcgcagatcgacggcctcatccggatggcgccgaagggctacgagactcaggtcggcgagcgcggcctcaagctgtccggcggcgagaagcagcgcgtcgcgatcgcccgcaccatcctgaaggcgccgccgatcctggtgctcgacgaggccacttcggcgctcgacagccacaccgagcaggagattcaggatgcgctggacggcgtgtcgcgcaaccggacctcgctggtgattgcgcaccggctctcgaccatcgtcgcggccgacgagatcatcgtgctcgaccgcggccggatcgccgagcggggcacgcatgccgagttgctggcgaaaagcgggctctatgccggcatgtggaaccggcagcgcgaggccgaggaggcgcgcgagaagctggcgcagatcggcgacgacgcggccgccccgaatcgcaatccgccggcccgaagcgagccagacgtcgccggacccgacctgtccgggcctgtcgccagcgccgcggagtga

SEQ ID NO: 4495 - protein, 658 aa, Bradyrhizobium sp. ORS278
MMPPDSSPHHLATDAPASPEQGTLAGTLRHLWPFIWPSDRADLKMRVLWSVVLLLAAKVATLVLPFTFKWTTDALTGANTAPIKPDDWAFWLVASPIVMTASYGAMRVLMAVLTQWRDGIFARVAMHAVRKLATITFVHMHELSLRFHLERKTGGLTRVLERGRNAIETIVRMVILQLIPTIVEVSLLTAVLLWQFDWRYVLVTLTMVGAYLFYTYIATEWRIEIRRRMNDSDTDANTKAIDSLLNYETVKYFGAEAREAERYDRSMERYERASVKTYTSLAVLNAGQAVIFTIGLTIAMLMCAHGVRQGRNTVGDFVMINSMMIQLYQPLNFMGMVYREIKQAIIDIEKMFGVLTRDAEVKDAPRAKPLVVTAGHVRFEDVRFAYEPERPILQGLSFEVPAGKTVAIVGPSGAGKSTISRLLFRLYDVSGGRILIDGQDIRDVTQVSLRAQIGMVPQDTVLFNDTIRYNIRYGRWDADDAAVEEAARLAQIDGLIRMAPKGYETQVGERGLKLSGGEKQRVAIARTILKAPPILVLDEATSALDSHTEQEIQDALDGVSRNRTSLVIAHRLSTIVAADEIIVLDRGRIAERGTHAELLAKSGLYAGMWNRQREAEEAREKLAQIGDDAAAPNRNPPARSEPDVAGPDLSGPVASAAE

SEQ ID NO: 4496 - DNA, 1764 bp, Bacillus thuringiensis serovar konkukian str. 97-27
  CDS (1)..(1764): transl_table=11
atgactgagaaaaaacagagcgatttaagaagattgctttcttatatgaagccatataaaggactattagcattagcatttttatttctagttggtgcaactgtaactgaaatgatgggaccttttttaattaaacaatttcttgatgaacatttagtaccacgtaactttgatcaatcagcacttgttacactatttgtagtgtatattgttgctcacttattaaaagtattatttacttatttagacttgttatattttcaaaatatcgcttttaaaattgttcaagatatgcgtgttgaagtatatgagcatgttcaaaagttatcattaagtttctttgatcgtacgccgattggtacgcttgtatcacgcataacgaatgatacggaagcaattaaagatttttatgtgagtgtattatcaacatttgttaaaaatatcgtatttttaataggtattttagtagcgatgtttttattaaacgtaaaattagcgctattttctctcgtattaattccaataatgttcgcgattatggtgctatatcgccggaaaagtgcagctttttatttagaagtgcgtaatcaattaagcgtgttaaatgcaaagttaaacgaatccattcaagggatgaatattgttcaagtgtttagacaagaaaagcgtatgagaaaagagtttgaagaagtgaacaataaacattatagtgcagggcgacgtacgttaaagttagatgcgttgcttttacgtccagctacagatttagtacatattgtagcgattgcattagtacttggtttatttggaattgatgctttgaaaagtcctgttgaagtaggcgttttatatgcgtttgttaactatatacatcgtttcttccagccggtaaatgagatgatgatgaaattatcatttttccagcaggcacttgtttcatcatcacgtgtatttcatttaatggatgagaaagatttagcaccagttcaaaaaggggatggaaatcctcaagtcattaatggagatattgaatttaaaaatgttactttttcttatgatggaaaacgtgatgttttaaaaaatgtatcttttcacgtgaaacaagggcaaacggttgctttcgttgggcacacgggtagcggaaaaagtaccattatgaatttattaatgcgattttataatattaagtctggaaatattgtaatagatggtgtagatttagaaaaatttgaagaacaagaaattagaaagaaaataggacttgtactgcaagatgcatttttatttgcgggaaatgtgaaacaaaatattcgtatgtataatgaagaaattacggatgaagaagtaaaagaagcggcacaatttgtgcaagcgaatacgtttattgaaaaattaccagagcagtatgaaacagaagtagtagaaagaggaactgcattttctagtggtcaacgacaattaattgcttttgctagaacgatagcaacgaatccgaaagtattagtattagatgaagcaacagctaatattgatacagaaactgaagatgcgatccaaacagcgttacagcaaatgcgaaaaggacggactacgatagcgattgcacacagattatctaccatacaagatgcagatcaaatttttgttatgcacgatggagagatagtagagagagggacacatcaagaattactgagtgaacaaggattgtattataatatgtacttactacaaaataaaggaagtttacaaaaggccttgtag

SEQ ID NO: 4497 - protein, 587 aa, Bacillus thuringiensis serovar konkukian str. 97-27
MTEKKQSDLRRLLSYMKPYKGLLALAFLFLVGATVTEMMGPFLIKQFLDEHLVPRNFDQSALVTLFVVYIVAHLLKVLFTYLDLLYFQNIAFKIVQDMRVEVYEHVQKLSLSFFDRTPIGTLVSRITNDTEAIKDFYVSVLSTFVKNIVFLIGILVAMFLLNVKLALFSLVLIPIMFAIMVLYRRKSAAFYLEVRNQLSVLNAKLNESIQGMNIVQVFRQEKRMRKEFEEVNNKHYSAGRRTLKLDALLLRPATDLVHIVAIALVLGLFGIDALKSPVEVGVLYAFVNYIHRFFQPVNEMMMKLSFFQQALVSSSRVFHLMDEKDLAPVQKGDGNPQVINGDIEFKNVTFSYDGKRDVLKNVSFHVKQGQTVAFVGHTGSGKSTIMNLLMRFYNIKSGNIVIDGVDLEKFEEQEIRKKIGLVLQDAFLFAGNVKQNIRMYNEEITDEEVKEAAQFVQANTFIEKLPEQYETEVVERGTAFSSGQRQLIAFARTIATNPKVLVLDEATANIDTETEDAIQTALQQMRKGRTTIAIAHRLSTIQDADQIFVMHDGEIVERGTHQELLSEQGLYYNMYLLQNKGSLQKAL

SEQ ID NO: 4498 - DNA, 1776 bp, Erwinia carotovora subsp. atroseptica SCRI1043
  CDS (1)..(1776): transl_table=11
atgaatagccctcaacagttttggccaaccctgaagcgtctgttggcctatggttctccctggagaaaaccgctgatacaaggcgtactcatgctgtgggttgctgctatcgctgaagtctctggtcccgtgctggtgagctattttattgacgatctggtggcaaaaggtcagtttccgctggcgattgcggctggcttggcaatggtctatatcctgctgcaaattctggcggcctcgctgcactatttccagacactgttgtttaaccgggtcgcagtgggtgtcgttcagcaactgcgtattgatgtgatggatgccgctttgcgtcagccgcttagcacatttgatacacagcctgttgggcagttgatttcacgcgtcaccaatgacaccgaggtagtgaaagatctgtatgtcatggtggtgtcaacggtattacgcagtgcggcgttggttggtgcgatgctggtggcgatgttcagtctgaactggcagatggcgctcgttgcgctgatgattttccctgcggtcgcgacggtcatggtgctctatcaccgctttagtacgccgactgtgcgcaaggtgcgaagctatctggcggacattaacgatggtttcaacgaagtgattaatggcatgggtgtcatccagcaatttcgccagcaggcacgctttggcaagaagttgggtgcagccagccatgagcattatgaagcccgtatgaaggccttgcgtctggaaggttttctgctgcggcctctgctgagcttatttgccgcgatggtactgtgtggtttgttgatccaatttggttttagctcgatggggtcggttggcgttggggttctgtacgcgtttatcaactaccttggccgcttaaatgaaccactgattgagctgaccacccagcaatccatgttacagcaggcggtcgtcgccggtgaacgtatctttgaactgatggatggcaaaaagcagacctacggcaatgacgagcgccccctgagtaccgggcgcgttgatattgacgatgtctctttttcttatggtacagaaacacgcgtgctacagaatatttccctgacgatacctgagcgcggttttgtcgccttagtggggcataccggcagtgggaaaagtacgctagccagcctacttatggggtattacgtgccagatgagggtgagattcggcttgatgaccggccgctgtcgacgctctctcataccgttttgcgccaaaatgtggcaatggttcaacaggatcccgttgtcctggcggagtcgatgttcgtgaatgtgactctgggacgtgatatcagcgaagaggccgtctggcgtgtgctggaagtggtgcagcttgctgaactggttagggattttcctgaagggttgcatacacgcattggtgagcaagggaacaacttgtctaccggacaaaaacagctgttagcgattgcgcgggtcttggtgcaaacgcctaaaatcctgattctcgatgaggctactgcgaatattgactctggcacggagcagtcggtgcaaaaggcgttgcgcatcatcagggaacagacgaccttgattatcatcgcccatcggctttctactatcgttgaggctgacatgattatggtgctccatcatgggcaaactgttgagcggggaacgcacgagcaactgctgcaacagcagggccgctattatcaaatgtatcaattacaactggccggagaggatctcgctgccattagcacggaatcttgccctgcataa

SEQ ID NO: 4499 - protein, 591 aa, Erwinia carotovora subsp. atroseptica SCRI1043
MNSPQQFWPTLKRLLAYGSPWRKPLIQGVLMLWVAAIAEVSGPVLVSYFIDDLVAKGQFPLAIAAGLAMVYILLQILAASLHYFQTLLFNRVAVGVVQQLRIDVMDAALRQPLSTFDTQPVGQLISRVTNDTEVVKDLYVMVVSTVLRSAALVGAMLVAMFSLNWQMALVALMIFPAVATVMVLYHRFSTPTVRKVRSYLADINDGFNEVINGMGVIQQFRQQARFGKKLGAASHEHYEARMKALRLEGFLLRPLLSLFAAMVLCGLLIQFGFSSMGSVGVGVLYAFINYLGRLNEPLIELTTQQSMLQQAVVAGERIFELMDGKKQTYGNDERPLSTGRVDIDDVSFSYGTETRVLQNISLTIPERGFVALVGHTGSGKSTLASLLMGYYVPDEGEIRLDDRPLSTLSHTVLRQNVAMVQQDPVVLAESMFVNVTLGRDISEEAVWRVLEVVQLAELVRDFPEGLHTRIGEQGNNLSTGQKQLLAIARVLVQTPKILILDEATANIDSGTEQSVQKALRIIREQTTLIIIAHRLSTIVEADMIMVLHHGQTVERGTHEQLLQQQGRYYQMYQLQLAGEDLAAISTESCPA

SEQ ID NO: 4500 - DNA, 1857 bp, Leifsonia xyli subsp. xyli str. CTCB07
  CDS (1)..(1857): transl_table=11
atgttcggcggcacaccggcgaagaaggcggagcacttctggccgtcgttcaaccggctgatcgggttgctgcgcacggaacggctcgcgatggtctgggtcaccctgctcgtggtggtctcggtcgcgctcaccgtgatcgcgccgaagatcctcgggaacgccaccgatgtgatcgtcaacggcgtcaccggcgctcggcaggcgaacggccagcccgctcccggtcccggggtcgacttcacggatctcggccggctgctgatgatcgtgctcgccatgtacatcgccgcgtcgctgctgcaatggtggcagggctacattctgaacgcgctcgtgatgcgagtggtctaccgcttgcgcgccgagatcgaggacaaactcaaccgtctgccgctcagctacttcgacacccgtcagcgcggtgatctgatgtcgcgcgtcacgaacgatgtcgacaacatccagaccgctctgcagcaggccttctcacagctgatccagtcggttctgatggtcatcgggatcggcgtcatgatgttcatcgtgtcgtggcagctcgcgctcatcgcgcttatcagcatcccgctctccggcatcatcgccggggtgatcggcacgcgctcacagaagctgttcaaacagcagtggaactccaccggcgccctcaacgggcacatcgaggagtcctactccgggctcgacctggtgcgcgccttcggccgcgatgaggtcatgctggaacggttcgacgagcgcaacggcaagctctggtcgtcgatggtcggtgcgcagttcgtctccggcatgatcatgccggcgatgaacttcgtctcctacctctcctacgtgctgatcgccgtcgtcggtgcgctgcgggtgaccgcaggccagctgagcattggcgatgtgacggcgttcatccagtactcgcgcgagttctcccagcccatcggccagatcgcgggcatggcgaacatgttgcagtccggcgtcgcgtcggcggagcgcaccttcgagttcctcgactcggacgagcagacgcccgaacacgagaccgagcacctccccgagcgggcgaacggccgcgtcgagctggacagcgtcgacttctcctacgatcccgagaccgagctcatccgcgatctctcgctctccgtcgagcccggccacacggtcgcgatcgtcggcccgaccggagccggaaagacgacgctggtcaacctcatcatgcggttctacgagctgaacggcggtgccatccgcctcgatggcatcgacaccaccgacctctcgcgctccgagttgcgcggtcaggtcgggatggtgctgcaggatgcgtggctcttctccgggaccattcgtgagaacatccgctatggccgcctcgaagcatccgacgaggaggtggtcgctgccgcgaaggcgacgatggtcgaccgtttcgtccgccagctgccggacggctacgacacggtcatcgaggcggacggcggcaacgtctccgcgggcgagcgccagttgctcaccatcgcccgggctttcatcgccaacccgtcgctgctcatcctggacgaagccacgtcctcggtggacacccgcaccgagttgctggtgcagcacgcgatggcggcgttgcgcagcgaccggacttcgttcgtgatcgcccaccgcctgtccaccatccgggacgcgcacaccatcctcgtgatggagaagggccggatcgtggagcagggcgatcacaagaccctcctcgcgaagaagggcgcctactacgacctgtacatgacgcagttccgcggcgcggctgaggaatcgggccaggaagagcccgagggcgtcgccgcgagatga

SEQ ID NO: 4501 - protein, 618 aa, Leifsonia xyli subsp. xyli str. CTCB07
MFGGTPAKKAEHFWPSFNRLIGLLRTERLAMVWVTLLVVVSVALTVIAPKILGNATDVIVNGVTGARQANGQPAPGPGVDFTDLGRLLMIVLAMYIAASLLQWWQGYILNALVMRVVYRLRAEIEDKLNRLPLSYFDTRQRGDLMSRVTNDVDNIQTALQQAFSQLIQSVLMVIGIGVMMFIVSWQLALIALISIPLSGIIAGVIGTRSQKLFKQQWNSTGALNGHIEESYSGLDLVRAFGRDEVMLERFDERNGKLWSSMVGAQFVSGMIMPAMNFVSYLSYVLIAVVGALRVTAGQLSIGDVTAFIQYSREFSQPIGQIAGMANMLQSGVASAERTFEFLDSDEQTPEHETEHLPERANGRVELDSVDFSYDPETELIRDLSLSVEPGHTVAIVGPTGAGKTTLVNLIMRFYELNGGAIRLDGIDTTDLSRSELRGQVGMVLQDAWLFSGTIRENIRYGRLEASDEEVVAAAKATMVDRFVRQLPDGYDTVIEADGGNVSAGERQLLTIARAFIANPSLLILDEATSSVDTRTELLVQHAMAALRSDRTSFVIAHRLSTIRDAHTILVMEKGRIVEQGDHKTLLAKKGAYYDLYMTQFRGAAEESGQEEPEGVAAR

SEQ ID NO: 4502 - DNA, 1824 bp, Yersinia pseudotuberculosis IP 32953
  CDS (1)..(1824): transl_table=11
atgaataacgctcagcaactttggccgacattgaaacgcctgctttcctacggttcgccttatcgtaaaccgctggggctggcagtcttaatgctgtgggttgcggcagcagcagaggtaagtggtccactactgatcagttattttattgaccatgtagtcgccaaaggcacattacctctggggctagtcagtgggttggcattggcctatctgttgttgcaattattggccgcgacattgcactattttcaggcattgctgtttaaccgtgcggcagtgggggtcgttcagcggctacgcattgatgtgatggacgctgcattacgccaacctctcagtgcttttgatactcagcctgttgggcagttgatttcccgagtaaccaatgacactgaagtgatcaaagatttatatgtcatggtggtttctacggttttgaaaagtgcggccttaattagtgcgatgctggtggcgatgtttagtctggattggcggatggcgctgatttcaatttgtatcttccctgcggtgttggtggtgatgacaatctatcagcgctatagcacccctatcgttcgccgggtacgatcctatctggctgatattaacgatggttttaatgaagtcattaatggcatgggcgtcattcagcaattccgtcagcaggcccgtttcggggaacgcatggcgtctgccagccgtgcgcattatgttgcccggatgcaaaccttacggctggagggctttctattacgccctttattgagcctattctccgccttggtgttatgtggtttactgctgcttttcggtttcagccctgaaggttctgtgggggtgggtgtgctgtatgcgttcattaattaccttggccgcctgaatgagccgttgattgaactgacatcgcagcaatcaattatgcaacaggccgtggtggcaggagagcgtatttttgatctgatggatcgtgcgcagcaggactatggtagcgacaatattcccttgagcagtggccgtattcaggtggaaaacgtcagctttgcgtatcgctcggataaaatggtgttacacaatatttctctcagtgtcccctcccgtggatttgtggctttagttgggcacaccggcagtggtaaaagtacgctagctaacctgttgatgggctactatcccattcagcaaggtgagattttgcttgatggccggccattatcccgcctctcccatcaggttctgcgccagggggtagcgttggtacagcaagatcccgtggtgttggctgactccttctttgcgaatatcacccttgggcgtgaccttagtgaacagcaagtgtgggaggcactcgaaaccgttcaattggcacagttggttcgtaccttacctgatggcttgtacagtttacttggggaacagggcaataccttgtctgttgggcaaaaacagttgctggcgatggcgcgggtgttggtgcaagcgccccaaatcctgattctggatgaagccactgcgaatattgactctggcactgaacaggctattcagcgggcattacaggtgattcgaaaaaataccacgctggtggttattgctcatcgcctttcgacgattgtggaggcggatagtattttggtactgcaccgtggtgttgcggttgagcagggtaatcatcaagcgctgctagctgcccgtgggcgttattaccagatgtaccagttgcagttagtcagcgaagatttggctgccattgatcaggaagctattgataaaggctctattgatcaaagcactattgatcaagccggaatgagcgtgagttaa

SEQ ID NO: 4503 - protein, 607 aa, Yersinia pseudotuberculosis IP 32953
MNNAQQLWPTLKRLLSYGSPYRKPLGLAVLMLWVAAAAEVSGPLLISYFIDHVVAKGTLPLGLVSGLALAYLLLQLLAATLHYFQALLFNRAAVGVVQRLRIDVMDAALRQPLSAFDTQPVGQLISRVTNDTEVIKDLYVMVVSTVLKSAALISAMLVAMFSLDWRMALISICIFPAVLVVMTIYQRYSTPIVRRVRSYLADINDGFNEVINGMGVIQQFRQQARFGERMASASRAHYVARMQTLRLEGFLLRPLLSLFSALVLCGLLLLFGFSPEGSVGVGVLYAFINYLGRLNEPLIELTSQQSIMQQAVVAGERIFDLMDRAQQDYGSDNIPLSSGRIQVENVSFAYRSDKMVLHNISLSVPSRGFVALVGHTGSGKSTLANLLMGYYPIQQGEILLDGRPLSRLSHQVLRQGVALVQQDPVVLADSFFANITLGRDLSEQQVWEALETVQLAQLVRTLPDGLYSLLGEQGNTLSVGQKQLLAMARVLVQAPQILILDEATANIDSGTEQAIQRALQVIRKNTTLVVIAHRLSTIVEADSILVLHRGVAVEQGNHQALLAARGRYYQMYQLQLVSEDLAAIDQEAIDKGSIDQSTIDQAGMSVS

SEQ ID NO: 4504 - DNA, 1863 bp, Symbiobacterium thermophilum IAM 14863
  CDS (1)..(1863): transl_table=11
atgagcgcccggcacggtccccgacccggtcatggtcccggagccggcccggcgatggcgctggtgggcgagaagccccgcgacttccgcgggaccctgcggcggctgctgcgctacctgcggccgaggctctggcagctgggcgccgtcttcctgctggcggctctcagcacggtcttcagcatcgtgagcccgcgcatcatgggcaaggccaccaccatcctgttcgaagggctgctggcgaagctgagcggcgtccccggcgcggggatcgacttcggccgcatcgcccgcatcctggtcctgctggggctgctctacgtggcgagtgccgccttcggcatcgtccagcagttcgtcatgtccggcgtctcccagcgcacggtctacgacctgcgcaaccaggtgaacgagaagctggcccggctgcccctcagcttctacgaccggaagacccacggcgaggtcctgagccgggtgaccaacgacatcgacaccatcgccgggacgctgcagcagagcctgacccagctgatcaccgccatcgtcacgctggtgggcgtggtggtgatgatgctctccatcagccctgtgctcaccctggtcaccctggtctcgctgccgctgtcgctcctggtcacggtcggcgtcgcccggcggtcacagggctacttcaaggcgcagcagaaggcgctgggcgagctgaacggccacgtcgaggagacctacaccggccaccaggtggtgaaggccttcggccgggaggaggacgtggtggccgagttcgaccgcatcaaccagcggctgtacgaggccggctggaaggcccagttcgtctcgggcatcatcatgccgctgatggcgttcgtcaacaacatcggctacgtgatcgtggccgtggtcggcggcatcttcgtcgcccgccgcgcggtggagatcggcgacatccaggccttcctccagtacgcccggcagttcagccagccgatcacccagacggccaacatcgccaacatcctccagtccaccatcgccgccgccgagcgggtctttgagctcctggacgagccggagatcgtcccggacccggccgagccggtgcggctggagcaggtccggggcgaggtccggttcgagaacgtcagcttccgctacaagccggacgagccgctgatcgaggacctgaacctcacggcccggcccggccaggtgatcgccatcgtcggccacaccggcgccggcaagaccaccctggtcaacctgctgatgcgcttctacgagatcgacggcggccggatcacggtcgacggcgtggacatccgccgcctccgccgcgacgacctgcgcagcctcttcggcatggtgttgcaggacacgtggctcttccatggcacgatccgggagaacatcgcctacggccgggagggggccaccgaggaggagatcgtccgggcggcaaaactcgcccacgccgacggcttcatccgatccctgcccgacggctatgacaccgtgctcaacgaggaggcctcgaacatctcccaggggcagaagcagctgctcaccatcgcgcgggcgttcctggccgacccgccgatgctgatcctggacgaggcgacgtcctccgtggacacccgcacggagctgcagatccagcaggccatgcagaccctcatgaagggcaggacgagcttcgtgatcgcccaccggctctcgaccatccgggaggcagacctgatcctggtcatggaccacggccggatcgtggagcagggcacgcaccgggagctcctggccgcaggcggcccgtacgcggacctgtactacagccagttcgccgccgggcagggcctggccggctga

SEQ ID NO: 4505 - protein, 620 aa, Symbiobacterium thermophilum IAM 14863
MSARHGPRPGHGPGAGPAMALVGEKPRDFRGTLRRLLRYLRPRLWQLGAVFLLAALSTVFSIVSPRIMGKATTILFEGLLAKLSGVPGAGIDFGRIARILVLLGLLYVASAAFGIVQQFVMSGVSQRTVYDLRNQVNEKLARLPLSFYDRKTHGEVLSRVTNDIDTIAGTLQQSLTQLITAIVTLVGVVVMMLSISPVLTLVTLVSLPLSLLVTVGVARRSQGYFKAQQKALGELNGHVEETYTGHQVVKAFGREEDVVAEFDRINQRLYEAGWKAQFVSGIIMPLMAFVNNIGYVIVAVVGGIFVARRAVEIGDIQAFLQYARQFSQPITQTANIANILQSTIAAAERVFELLDEPEIVPDPAEPVRLEQVRGEVRFENVSFRYKPDEPLIEDLNLTARPGQVIAIVGHTGAGKTTLVNLLMRFYEIDGGRITVDGVDIRRLRRDDLRSLFGMVLQDTWLFHGTIRENIAYGREGATEEEIVRAAKLAHADGFIRSLPDGYDTVLNEEASNISQGQKQLLTIARAFLADPPMLILDEATSSVDTRTELQIQQAMQTLMKGRTSFVIAHRLSTIREADLILVMDHGRIVEQGTHRELLAAGGPYADLYYSQFAAGQGLAG

SEQ ID NO: 4506 - DNA, 1839 bp, Symbiobacterium thermophilum IAM 14863
  CDS (1)..(1839): transl_table=11
atggcggacttccgcgaagaagaggcccttggcaaggtctacgacgcccgactcatggcccggctgctctcctacgcccgtccgcactggaaggccctgctggtatgcattgcgatgctcggcgtggccgtgagcctggacttgctcgtccccaagctggtgcaggtcgccatcgacgactacctcgtcctcggcgacgcccctgccgcggcggtcggcctcaaccggctcgccttctggctgatcgcggcgctggtcgccaacttcttcgtctcctacggcgaggttctgctgctccagttcaccgggcagaagatcatctatgcgatccgcaaggatctcttcggccaccttcagcggctgcacctccagttctttgaccgcaacccggccgggcggctggtcacccgggtcaccaacgacaccgagaccctgagtgagatgtacaccagtgtgctggtcaacctgttccgggacgtcttcacgctggtcggggtagccgtggttatggtgaggacccatcccaggctggccgcggtcagcctcgccctcatcccgctggtcgcctactacacccgcttcttcgcagcgaaggcgcgcgacgcctggcgtgaggtgcgggtgcggctcgcccgcatcaacgccttcgtctcggagcacgtgagcggcatgcgggtggtgcagctcttcgcccgggaggcgcagacgttcgccgagttcaaacgggagaacgatgagtacaaccgggcctcctggcggcagttgatggtctgggccgtcttccggcccgtcctcgacctcctggccagcgtcaccatcgccctggtgctgtggtatggcggcctgcaggccctgggcggcggcctcacgcccggcgtcctgctcctgttcgtcaccctctcccgccgcttcttcgagccactcatgcaactggccgagaagttcaacatcctgcagagcgccatggcctcggccgagcgcatcttcatgctgatggacacgccgccggccatcgtagacccgccggaccccaaaccgctgggccgggtcaccggcgcggtggagttccgcaacgtctggttcgcgtacaacgagggcgactgggtcctgaaggacgtgtcgttccgggccgagccgggccagaccatcgccttcgtcggccacaccggggccggcaagtcctccatcatcaacctgctgtgccggttctacgacgtgcagaagggccaggtgctggtggacggcctcgacgtacgggaggtcgccaccgccgagctgcggcggtccatcggcctcatggcgcaggacgtcttcctcttcagcggcgacatccggtccaacatccgcttgggcaacacggagatcagcgatgagcgggtgcgggaagcggcccgcatcgtgggggcggacgagttcatccgcgagctgcgcaacggctacgacgagcccgtggccgagcggggcgccaccctttcggcggggcagcggcagctgctctccttcgcccgggccctggccttcgatcccccgatcctcgtgctggacgaggccaccgcctccatcgattccgagaccgaggcgctgatccagaaagccctgagggagctgacgaaggggcgcaccactttcatcgtggcgcaccggctctccaccatccagcacgcggatcagatcatcgtgctgcacaagggccggatccacgagcagggcacccacgaggagctgctggccaggcagggcctgtactacaagctctggcggctgcagttcgaggagcacctggaggagcgggatgcgccgaccgagacgctgatgccggcgacccacccgtcggcgtaa

SEQ ID NO: 4507 - protein, 612 aa, Symbiobacterium thermophilum IAM 14863
MADFREEEALGKVYDARLMARLLSYARPHWKALLVCIAMLGVAVSLDLLVPKLVQVAIDDYLVLGDAPAAAVGLNRLAFWLIAALVANFFVSYGEVLLLQFTGQKIIYAIRKDLFGHLQRLHLQFFDRNPAGRLVTRVTNDTETLSEMYTSVLVNLFRDVFTLVGVAVVMVRTHPRLAAVSLALIPLVAYYTRFFAAKARDAWREVRVRLARINAFVSEHVSGMRVVQLFAREAQTFAEFKRENDEYNRASWRQLMVWAVFRPVLDLLASVTIALVLWYGGLQALGGGLTPGVLLLFVTLSRRFFEPLMQLAEKFNILQSAMASAERIFMLMDTPPAIVDPPDPKPLGRVTGAVEFRNVWFAYNEGDWVLKDVSFRAEPGQTIAFVGHTGAGKSSIINLLCRFYDVQKGQVLVDGLDVREVATAELRRSIGLMAQDVFLFSGDIRSNIRLGNTEISDERVREAARIVGADEFIRELRNGYDEPVAERGATLSAGQRQLLSFARALAFDPPILVLDEATASIDSETEALIQKALRELTKGRTTFIVAHRLSTIQHADQIIVLHKGRIHEQGTHEELLARQGLYYKLWRLQFEEHLEERDAPTETLMPATHPSA

SEQ ID NO: 4508 - DNA, 1764 bp, Bacillus cereus E33L
  CDS (1)..(1764): transl_table=11
atgactgagaaaaaacagagcgatttaagaagattgctttcttatatgaagccatataaaggactattagcattagcatttttatttctagttggtgcaactgtaactgaaatgatgggaccttttttaattaaacaatttcttgatgaacatttagtaccacgtaactttgatcaatcagcacttgttacactatttgtagtgtatattgttgctcacttattaaaagtattatttacttatttagacttgttatattttcaaaatatcgcttttaaaattgttcaagatatgcgtgttgaagtatatgagcatgttcaaaagttatcattaagtttctttgatcgtacgccgattggtacgcttgtatcacgcataacgaatgatacggaagcaattaaagacttttatgtgagtgtattatcaacatttgttaaaaatatcgtatttttaataggtattttagtagcgatgtttttattaaacgtaaaattagcgctattttctctcgtattaattccaataatgtttgcgattatggtgctatatcgccggaaaagtgcagctttttatttagaagtgcgtaatcaattaagcgtgttaaatgcaaagttaaacgaatccattcaagggatgaatattgttcaagtgtttagacaagaaaagcgtatgagaaaagagtttgaagaagtgaacaataaacattatagtgcagggcgacgtacgttaaagttagatgcgttgcttttacgtccagctacagatttagtacatattgtagcgattgcattagtacttggtttatttggaattgatgctttgaagagtcctgttgaagtaggcgttttatatgcgtttgttaactatatccatcgtttcttccagcctgtaaatgagatgatgatgaaattatcatttttccagcaggcacttgtttcatcatcacgcgtatttcatttaatggatgagaaagatttagcaccagttcaaaaaggggatggaaatcctcaagtcgttaatggagatattgaatttaaaaatgttactttttcttatgatggaaaacgtgatgttttaaaaaatgtatcttttcacgtgaaacaagggcaaacggttgctttcgttgggcacactggtagcggaaaaagtaccattatgaatttattaatgcgattttataatattaagtccggaaatattgtaatagatggtgtagatttagaaaaatttgaagaacaagaaattagaaagaaaataggacttgtactgcaagatgcatttttatttgcgggaaatgtgaaacaaaatattcgtatgtataatgaagaaattacggatgaagaagtaaaagaagcggcacaatttgtgcaagcgaatacgtttattgaaaaattaccagagcagtatgaaacagaagtagtagaaagaggagctgcattttctagtggtcaacgacaattaattgcttttgctagaacgatagcaacgaatccgaaagtattagtattagatgaagcaacagctaatattgatacagaaactgaagatgcgatccaaacagcgttacagcaaatgcgaaaagggagaacgactatagccattgcgcaccggttatctacaattcaagatgcagaccaaattttcgttatgcatgatggagagatagtagaaagaggaacacaccaagaattactgagtgaacaagggttgtattataatatgtatttactacaaaataaaggaagtttacaaaaggccttgtag

SEQ ID NO: 4509 - protein, 587 aa, Bacillus cereus E33L
MTEKKQSDLRRLLSYMKPYKGLLALAFLFLVGATVTEMMGPFLIKQFLDEHLVPRNFDQSALVTLFVVYIVAHLLKVLFTYLDLLYFQNIAFKIVQDMRVEVYEHVQKLSLSFFDRTPIGTLVSRITNDTEAIKDFYVSVLSTFVKNIVFLIGILVAMFLLNVKLALFSLVLIPIMFAIMVLYRRKSAAFYLEVRNQLSVLNAKLNESIQGMNIVQVFRQEKRMRKEFEEVNNKHYSAGRRTLKLDALLLRPATDLVHIVAIALVLGLFGIDALKSPVEVGVLYAFVNYIHRFFQPVNEMMMKLSFFQQALVSSSRVFHLMDEKDLAPVQKGDGNPQVVNGDIEFKNVTFSYDGKRDVLKNVSFHVKQGQTVAFVGHTGSGKSTIMNLLMRFYNIKSGNIVIDGVDLEKFEEQEIRKKIGLVLQDAFLFAGNVKQNIRMYNEEITDEEVKEAAQFVQANTFIEKLPEQYETEVVERGAAFSSGQRQLIAFARTIATNPKVLVLDEATANIDTETEDAIQTALQQMRKGRTTIAIAHRLSTIQDADQIFVMHDGEIVERGTHQELLSEQGLYYNMYLLQNKGSLQKAL

SEQ ID NO: 4510 - DNA, 2019 bp, Bacillus licheniformis ATCC 14580
  CDS (1)..(2019): transl_table=11
atgacaacaggaaaaaggcttttccaatatgcgcttctttataaaaaaattctcatctgggcgctcgtcatgctgacgatcgccgtcacagccgagctgactgggccgatgatcgccaaaaagatgatcgacgatcatattctcggaattgaaaaaacgtggtatgaaacgacagagaactcgaaatatactgtttcctacaaaggaaaggaatatatcagggaagacaggacagacccttcagctgaaaagctgcaggaagttcacatctttcaagtcggtatgaactactactttgtggggaaaccggtttcctttgacggggagcggacggtttccgggggagagctgagaatgacgagcggagaccggacggaaacctacaaggccgatcgcctgtctttgtctgaagtgtatgctttttacgagcctgaaataggagggctgatctcgctcgtttctatttatttcggccttctcattttctcgatctttttccattacggccaattctacctcttgcagatgagcgcaaaccgcatcattcaaaagatgagacaggatgtattcgccaacattcaaaggcttcctatccgctattttgataatttgccggcaggaaaaatcgttgcaagggtaacgaatgataccgaagcgatccgcgatctgtatgtgaccgttctttcgacgtttgttacaaatatcatttatatggccggaatattcgccgcactgtttttccttgatgtcaggctggccggcgtctgtctgttgattgtgcccctgattgtcatttgggctgctgtttatcgaaaattcgcttcaggctacaatcataaacttaggtcaatcaacagcgagatcaacgccaaaatgaatgaatcgattcaaggcatgacgattattcaggcattccggcgcggacaggacacaaaagaagaatttgaacagctgaatgacagccactttcattaccaaaataaaatgctgaaattaaactcgcttatgtcccacaacttggtcaacattctgagaaatgtgatgttcaccgctctaatatggtatttcgggggagctgccctgaacgcggaaggaatgatttcaatcggcgtactctatgcattcgtcgattacttgaatcgtttatttcagccgattacgggcatcgtcaaccagtttgccaagcttgaattggcgcgcgtatcatcggagcgggttttccgcctgctggatgagccgggcgtcgatgtcaaagagccgagcagcgaaagagcgcgggggcgagtcgtgtttgaggatgtatcatttcgctatcatgacggtgaagatgtgctgaaaaacatctcatttgaagcgaagcaaggggagaccgttgcattggtcggtcatacgggctcaggcaaaagctcaatcatgaatgttcttttccgcttttacgatattgaaaagggcgatgtcaaaatcgacggcagaagcatatatgatatgtcaaggcaggaaatcagaaagcatatgggcatcgttctccaggatccttacttattttccggcacgattgcttcaaatgtcagccttgacaatgctgatattactagagagcaaatagaagacgccttgaaacaggtcggggctcttgaggtgctcgcccgtctgccgaaaggccttgacgagccggtcatcgaaaaaggaagcaccctttcttcaggagaaaggcagctgatctcgtttgcccgtgcgctggcatacgatccggctattcttattttagacgaggcgacggcccatatcgataccgaaacagaagcggtcattcaaaaagcgcttgacgtcgtcaaacaagggcgcacaacctttatcatcgcccacaggctgtcaacgatcaaaaacgccgaccagattctggtgcttgaaaaaggccggattatcgaaaggggaaatcatgaagagctgatgaagcaaaaaggccaatactatcaaatgtatgaactgcaaaaggggaaaggaaccctgatagggtaa

SEQ ID NO: 4511 - protein, 672 aa, Bacillus licheniformis ATCC 14580
MTTGKRLFQYALLYKKILIWALVMLTIAVTAELTGPMIAKKMIDDHILGIEKTWYETTENSKYTVSYKGKEYIREDRTDPSAEKLQEVHIFQVGMNYYFVGKPVSFDGERTVSGGELRMTSGDRTETYKADRLSLSEVYAFYEPEIGGLISLVSIYFGLLIFSIFFHYGQFYLLQMSANRIIQKMRQDVFANIQRLPIRYFDNLPAGKIVARVTNDTEAIRDLYVTVLSTFVTNIIYMAGIFAALFFLDVRLAGVCLLIVPLIVIWAAVYRKFASGYNHKLRSINSEINAKMNESIQGMTIIQAFRRGQDTKEEFEQLNDSHFHYQNKMLKLNSLMSHNLVNILRNVMFTALIWYFGGAALNAEGMISIGVLYAFVDYLNRLFQPITGIVNQFAKLELARVSSERVFRLLDEPGVDVKEPSSERARGRVVFEDVSFRYHDGEDVLKNISFEAKQGETVALVGHTGSGKSSIMNVLFRFYDIEKGDVKIDGRSIYDMSRQEIRKHMGIVLQDPYLFSGTIASNVSLDNADITREQIEDALKQVGALEVLARLPKGLDEPVIEKGSTLSSGERQLISFARALAYDPAILILDEATAHIDTETEAVIQKALDVVKQGRTTFIIAHRLSTIKNADQILVLEKGRIIERGNHEELMKQKGQYYQMYELQKGKGTLIG

SEQ ID NO: 4512 - DNA, 1794 bp, Legionella pneumophila subsp. pneumophila str. Philadelphia 1
  CDS (1)..(1794): transl_table=11
ttgcgtacaagattaacttctaaattaatgaaaaataacctccctattaaatcccgtctgctatacaaacgcttgttaagctatgtaaaacctttttggccagttttattattaggagtattggcgaatatcctatattcgggcattgacgccggctttacctatatgaccaagctttttttggataaaagctttattactattgatctgaattttgttaaacaaatcccgctgattgttttaatcggtattactctgagaggattggtcagttctttaggcagttattgtatgacatgggtggctcgctcagtagttaaagtattaaggcagaccgtattttctcatattattcacttaccggcggattattatgacgaagccacatcaggtcagcttctttcaaaaattttgtacgatgttgagcaagtggcacaagtcagtgcggatgccctaacagattttattcaaaatatatgtctggtcatcggtttgctgaccgttatgatggttatatgttggcagctgtctttgatgtttttattaactatcccctttgtgggaatcattgttaattatactaataaaagagtaagacgaattagtcacaaagtccaaaaaaccatgggcgaagtcacagaaattgccagtgaggcaatcgagggttatcgagtggttcgcatctttggtggtgaacggtatgaaataacaaaatttaataaagcaacagaatattcacgcaaaaacgatatgaaagttgccataagcaaggcgattaatgtttcaggcgttcaattggtgatcgctatcgggattgccacgattattatggctgccattcatttatctactgtcattactatcagtgccggttcttttttggcaattatcgcagccatgttgcaattaataaaacctatgaaaactctgactactcttaacgcaaccatacaaagaggcttggctggtgcagaaagtgtatttaatttgcttgatttgcctttggaaagaaacaatggtttgatattaaaagaaaagatacgtggtgaaattgagtttaagcatgtataccacgcataccgacagggtcaaaatattttacatgatgtcaattttgtaattgaagcaggaacgtctgttgctctggttgggcattcaggaagtggtaaaacgaccatagccagtttattaccccgcttttatgaattgagtcaaggtatgattactttagatggcatgcccattcaacagcttagtctggaaagtttacgcaagcagatgtccttggtcagtcaaaacgtgacactttttaatgatactttggctaacaacatagcctatggtcgttttgatgcgagccgagagcaaattattactgcggctaaactggcctatgctgatgagtttattaagcaattacctgatggctatgataccagggtcggagaaaatggggtgttgttgtcaggcggacaaaggcaaagaatagcgatagccagggcaattttgaaagatgctccaattttaatactcgatgaggcgacttcagctctggatagtgagtctgagcattatattcaggcggctttggagcaagtgatgaaaggtagaactactttaatcattgcgcaccgattgtcgactattaagcatgctcacaagattatcgtattgcaacatggtcgtattgttgagcaaggtagtcatcaagaattacttgatatggatggtcattacgctcagttgtataaagtgcaacaatttggcaggattaatgaggaagtggtagcttaa

SEQ ID NO: 4513 - protein, 597 aa, Legionella pneumophila subsp. pneumophila str. Philadelphia 1
MRTRLTSKLMKNNLPIKSRLLYKRLLSYVKPFWPVLLLGVLANILYSGIDAGFTYMTKLFLDKSFITIDLNFVKQIPLIVLIGITLRGLVSSLGSYCMTWVARSVVKVLRQTVFSHIIHLPADYYDEATSGQLLSKILYDVEQVAQVSADALTDFIQNICLVIGLLTVMMVICWQLSLMFLLTIPFVGIIVNYTNKRVRRISHKVQKTMGEVTEIASEAIEGYRVVRIFGGERYEITKFNKATEYSRKNDMKVAISKAINVSGVQLVIAIGIATIIMAAIHLSTVITISAGSFLAIIAAMLQLIKPMKTLTTLNATIQRGLAGAESVFNLLDLPLERNNGLILKEKIRGEIEFKHVYHAYRQGQNILHDVNFVIEAGTSVALVGHSGSGKTTIASLLPRFYELSQGMITLDGMPIQQLSLESLRKQMSLVSQNVTLFNDTLANNIAYGRFDASREQIITAAKLAYADEFIKQLPDGYDTRVGENGVLLSGGQRQRIAIARAILKDAPILILDEATSALDSESEHYIQAALEQVMKGRTTLIIAHRLSTIKHAHKIIVLQHGRIVEQGSHQELLDMDGHYAQLYKVQQFGRINEEVVA

SEQ ID NO: 4514 - DNA, 1797 bp, Synechococcus elongatus PCC 6301
  CDS (1)..(1797): transl_table=11
atgcttgctctgttacgtcgttgggatgattggtcactactgagtcggcttttgccttacctcggtcgccacaagcggttactgatcggatcgttgattttgctcgtgcccttggctttggccggcgccgtgcaacccatgctggtggggcaagcgatctcggttctacagaacaagccgacctgggaaatgctgcagggcatgagccgcagtcaaggcttgaacctactctccttggcactgttggccacgatcgttgtgcggctggccttccgaggcgtccaaggctactacgtgcaggaagtcggtcagcgcgtgaccgccgacattcgccaagatttgttccagcacgtcacggctctggccgtgcgctttttcgatcgcacgcctgtgggcaagctggtgacacgactcaccaacgatgtcgaagccctcggcgaagtcttttcgaccggcgcgatcggtattctcagcgatattgtttcattgctggcgatcgcgatcgccatgttttggttgcagtggcaattggcgctgttgctgaccgttttattgccgcccaccacggctgtcatcctctatttccagcgacgctaccgcaaagccaattaccgagcccgcgaggagctgtcgaacctcaacgccagcttgcaggaaaacatggtcgggattggcattgtccaaagcttccgccgcgaagcctacaatgcccagcagtttcgagtggcgaatcaacgctatctcgaagccgtcgatcgcacgatctttcacgactcggccatttccgccacgctggaatggatctcgctggctgcgatcgcggctgtcctctggttaggcagctttctggtattgcaagaccaaatgaattttggtctgttagcagcatttattctttactcgcagcggttgtttgacccgttgcgccaactcgctgaaaaattcacctcgattcaagctggatttacagcgatcgagcgaattgtcgacatcttcaatgaaccaattgaaattcgcgatgccgcccagacccaacaactgagccttgaaacctcacagtctggagaaattcactttgaaaatgtttggtttggctacaagcccgatgagccggtcattcaaaacctcaacatcaccattcaacccggtcaaaaggttgcactagtggggccgactggagccggaaagagtacgattattcgcctgctctgtcgcctctatgagccaactcaaggacggattttaattgacggcattgatatccgaaatctacctcaggtcgagctgcggcgtcacctaggcgtcattctccaagacggctttctgtttgccggggatgtcagcagcaacatcacgctgggagagccctacgaccaggaggcggtgcaggcagcagcgcgtcgcaccaatgttgccacgctgattgaatcgctgccgcaaggctatgccactcctttacgggaacgcgggacaaatttgtcgggcggacaaaggcagctattggcgtttgcgcgggtggccattcgcgatccaaaggtgttgattttggatgaggcgacagcgaatttagatgtcggcactgaagctcttgttcaagaggctttagatgatctcctgagcgatcgcaccgcaattattattgctcaccggctctcgacaattcgcaatgccgatcgcatcttagtcctccgccaaggacagctaatcgaagatggatcacatgatgttttgatggctcgcaacggactatataccagtctctatcgactgcaatcactgggagcagaagtagcctag

SEQ ID NO: 4515 - protein, 598 aa, Synechococcus elongatus PCC 6301
MLALLRRWDDWSLLSRLLPYLGRHKRLLIGSLILLVPLALAGAVQPMLVGQAISVLQNKPTWEMLQGMSRSQGLNLLSLALLATIVVRLAFRGVQGYYVQEVGQRVTADIRQDLFQHVTALAVRFFDRTPVGKLVTRLTNDVEALGEVFSTGAIGILSDIVSLLAIAIAMFWLQWQLALLLTVLLPPTTAVILYFQRRYRKANYRAREELSNLNASLQENMVGIGIVQSFRREAYNAQQFRVANQRYLEAVDRTIFHDSAISATLEWISLAAIAAVLWLGSFLVLQDQMNFGLLAAFILYSQRLFDPLRQLAEKFTSIQAGFTAIERIVDIFNEPIEIRDAAQTQQLSLETSQSGEIHFENVWFGYKPDEPVIQNLNITIQPGQKVALVGPTGAGKSTIIRLLCRLYEPTQGRILIDGIDIRNLPQVELRRHLGVILQDGFLFAGDVSSNITLGEPYDQEAVQAAARRTNVATLIESLPQGYATPLRERGTNLSGGQRQLLAFARVAIRDPKVLILDEATANLDVGTEALVQEALDDLLSDRTAIIIAHRLSTIRNADRILVLRQGQLIEDGSHDVLMARNGLYTSLYRLQSLGAEVA

SEQ ID NO: 4516 - DNA, 1785 bp, Bacillus clausii KSM-K16
  CDS (1)..(1785): transl_table=11
atgaaacatacagatggcgttatgacaggacgtgagcagcgagccgttttttggcggcttctccgttacgctggcccgcataagaagcggttcatgttggctcttgctattatgatggtcgctgccggagcagaactgctgcaaccgattttgattgcccgctttattgacgattatttaacgccgcaattatttgaactgaaaccactgttaacgcttgcagtcttgtatgtagggctattaatcgcggcagtgattggccaatatgtacaaagcgtccttttttggcgaattgcgctaagtattgtccaagcattacggctcgatgtattcgcccatgttcaaaagctagggctgtctttttttgaccgcatgcctggtggcgctcttatttcacggattacaaacgacaccgaagccatcaaggaactatacgttagcgtgctcgcggtctttgttcaaaacggcgtatttatgatcgggacgtttttggcgatgttttacttaaatgcgacacttgccttctattgtttggcttttctgccactccttcttgctgtagttggcttgtaccgtaaaatcagctctcgcttctatgaacaagtgagcgccaaattgagtgagatcaatgcgaagttgagcgagtcgatccaagggatggccattattcaagcgttccggcaagagaagcgtctgcaaaaagaatttgcggatacaaatgaagcccattaccgcgcagggttccgggcaatgaaagcagacggattgctccttaggccgatcgtcgatgtgttaagccaccttgccattgccatcattcttttgtactttggcttcggctcctttgctggtccagtagaaattggcgtgttatatgcgtttgtcaattacctagaccgtttttttgagccggtcaaccaaatcatgcagcggttatctttattccaacaagcgatcgtttctgccgggcgggtcttccgtttaatggaccaacaggagtttgccccaggtaaacagggggacgataagccgcaaatggcagacggtgaaattgaatttgataatgtgactttttcttatgacgggaaaaccgacgtgctaaaaaacatttcattcaccgtcaaaaaaggcgagacacttgccattgttggccacactggtagcgggaaaagctctatcattcatttgttgttgcgtttttacccgctgaagcaaggctctattcgtatagacagaaacgagctatccgcctatccagaagaagagctaaggcaaaaagttgggcttgtgttacaagacccgtttatgtatagcggtacgattgccagcaatattacgctcttccgtgatgggtatacgcaagctgatgtagaggctgccgccgcttttgtcggcgctgatgcattcattaataagttgcctgatggctatcaaacggaagtgactgaaaggggagggacgttttcaagtggcgaacggcaactgctttcctttgcaagaacgatgatagccgacccgcctattttaatcctcgacgaagcgacggctatggtggataccgagacagaagaagcgattcaaaaagcacttgtggcaatggagcaaaaccggacaacgattgccattgcccatcgcctgtcgacgattaagcacgctgaccaaattttggtgctccaccaaggagaaattgcggaacaaggttcccacgaggagttgctgagtaaaaaaggtctttattataaaatgtatttgctacaggcaagagaaaaaacagccgctatttaa

SEQ ID NO: 4517 - protein, 594 aa, Bacillus clausii KSM-K16
MKHTDGVMTGREQRAVFWRLLRYAGPHKKRFMLALAIMMVAAGAELLQPILIARFIDDYLTPQLFELKPLLTLAVLYVGLLIAAVIGQYVQSVLFWRIALSIVQALRLDVFAHVQKLGLSFFDRMPGGALISRITNDTEAIKELYVSVLAVFVQNGVFMIGTFLAMFYLNATLAFYCLAFLPLLLAVVGLYRKISSRFYEQVSAKLSEINAKLSESIQGMAIIQAFRQEKRLQKEFADTNEAHYRAGFRAMKADGLLLRPIVDVLSHLAIAIILLYFGFGSFAGPVEIGVLYAFVNYLDRFFEPVNQIMQRLSLFQQAIVSAGRVFRLMDQQEFAPGKQGDDKPQMADGEIEFDNVTFSYDGKTDVLKNISFTVKKGETLAIVGHTGSGKSSIIHLLLRFYPLKQGSIRIDRNELSAYPEEELRQKVGLVLQDPFMYSGTIASNITLFRDGYTQADVEAAAAFVGADAFINKLPDGYQTEVTERGGTFSSGERQLLSFARTMIADPPILILDEATAMVDTETEEAIQKALVAMEQNRTTIAIAHRLSTIKHADQILVLHQGEIAEQGSHEELLSKKGLYYKMYLLQAREKTAAI

SEQ ID NO: 4518 - DNA, 1896 bp, Thermobifida fusca YX
  CDS (1)..(1896): transl_table=11
atgagcatggagatgacggcgtggcacgcgctgtaccacaccacccaggcccctgaggagcggcgcccgctgtccttggccaccctgcggaggatcgggggattcgcccgcccgcacgcggcgctgctgggctcttttctggtgtgcagcgtgcttggctcggtgctggcggtggcgaccccggtggtcgcaggccaggcagtcgacggcatcgtcgggggtgcccccatcggcgttgtcgggggatgggcgctgctcatcgccggtatcgccctggccgaggcgggggtggggctggtcgcgcggtggctgtcggcgcggatcggtgaagggctcatcctgcggttgcggaccgcagtcttcgaccacgtacagcgcatgccgatcgctttcttcacccgcacccacacgggtgctctggtcagccggttgaacaacgacgtcatcggcgcacagcgggcgttcagcgacaccctgtccggtgtggtgggcaacgtggtgacgctggcgttgaccctggtagtgatggtggggctgtcgtggcaggtcacggtggcggcactggtcctgctgcccgtgttcgtgctgcccgcgcgccgcgtgggtttccgccttgcccggctggagcgggaggcggccgaacacaattcggcgatgagcacgcggatggccgaacgcttctccgctcccggggcagccctggtcaagctgttcggggacccagggcgggagtcggcggagtttgctgcccgagccacgcgcgtccacgacatcggagtgcgccaagccatgctggagcacgtgttcttcaccgcgctgaccctcgtctccgcgctggcgttggcgctggtctacgggctgggtggcttttttgcgctgcgcggccacctggatgccggggcggtggtggcgctcgccctcctgctgacccgcttgtacgctccgctgacggccctggcgcatgcgcgagtggagatgatgggggcgcttgtcagctttgagcgggttttcgaggtcctggacctggaaccgctcattcaagagcgtgcggctgcccgaacggtgccggaggggccggtgtccgtggagtttgaccgggtacggtttgcctatccggccccggacgaggtttcgctggcctccttggaggaggtggcgcagctggaggcgcgcggcggagcggacgtgctgcacggtgtgtcgttccgtgtggaaccggggcagctggtagccctggtcgggtcctcgggggcgggaaaatcgacgattgcgcacctgttggctcggttctacgacgtggacgagggcgcggtccggctgtccggggtcgatgtgcgggacctgtcgtttgcgtccctgcgtgccaccgtgggcatggtgccccaagacgggcacctgttccacgacaccatccgcgctaacctgctgctggctcggccgcaggcgagtgaggaggagctgtgggaggcgctacgtcgggcacgggctgctgaccttgtcgcggcgctgcccgacggtctcgacacggtggtgggtgagcgtggttaccgcttttccggcggggaacgccaacggctcgcccttgcccggctgctgctggctcggccccgcgtagtgatcttggacgaagccaccgcgcacctggacgccgactcggaagcacaggtccaggaggcgctcgccgaagcactggcgggacgcaccgcgctggtgatcgcccaccggttggccacggtccagaccgctgacctcatcgtggtggtggaggacgggcggatcgtggaacgaggcacccacgtcgaactgctcgccgcgcgcggccgctacgcgcagctctactggacccagttcgcgcagcccgcaggggggcaggccgccgacggctcgtatgcgtga

SEQ ID NO: 4519 - protein, 631 aa, Thermobifida fusca YX
MSMEMTAWHALYHTTQAPEERRPLSLATLRRIGGFARPHAALLGSFLVCSVLGSVLAVATPVVAGQAVDGIVGGAPIGVVGGWALLIAGIALAEAGVGLVARWLSARIGEGLILRLRTAVFDHVQRMPIAFFTRTHTGALVSRLNNDVIGAQRAFSDTLSGVVGNVVTLALTLVVMVGLSWQVTVAALVLLPVFVLPARRVGFRLARLEREAAEHNSAMSTRMAERFSAPGAALVKLFGDPGRESAEFAARATRVHDIGVRQAMLEHVFFTALTLVSALALALVYGLGGFFALRGHLDAGAVVALALLLTRLYAPLTALAHARVEMMGALVSFERVFEVLDLEPLIQERAAARTVPEGPVSVEFDRVRFAYPAPDEVSLASLEEVAQLEARGGADVLHGVSFRVEPGQLVALVGSSGAGKSTIAHLLARFYDVDEGAVRLSGVDVRDLSFASLRATVGMVPQDGHLFHDTIRANLLLARPQASEEELWEALRRARAADLVAALPDGLDTVVGERGYRFSGGERQRLALARLLLARPRVVILDEATAHLDADSEAQVQEALAEALAGRTALVIAHRLATVQTADLIVVVEDGRIVERGTHVELLAARGRYAQLYWTQFAQPAGGQAADGSYA

SEQ ID NO: 4520 - DNA, 1848 bp, Methanosarcina barkeri str. Fusaro
  CDS (1)..(1848): transl_table=11
atgccacagaataacgtgatgcctcataatatgcctcataatattacaggccgcccggcaggaggaccaagcgcttttcttcaaagggaaaaaacggaaatcaaggacgttaagggaacattcatacgcattattatgtaccttggcaaatggtggcgcacattgctcatcatttttttctgtgctcttgttacaacagtgatcaccattatcggcattcaactaaacgggtacgcagtcgacgagttcatctctaaaaaggatattgccggacttgctcgcatctgtattatcatgattcttatttaccttgttgcggttttttctacttacatgcagaattccctgatgatccgtgttgctcagaaaacttcggctagtatccggaacgatcttttcagcagcctgcaaaagctgcccctcaagtattttgatacccactcaagcggggacctcatgagccgcctgacaaacgatgttgacaacatcaaccttacactttcacagagtgtcgtgcagcttttttccggcgtcatcagcgtggtcggtatgttgatagcgatgctgctgctcagcccgctgcttacgctgatcgggctgctgacaacgcctctgatgttctttacgtcaaaagtccttgcagtaaagtctcagaagttttttaaggaacagcaatatgagcttggacggcttaacggatatatcgaggaaatggtctccggccaaaaagttattaaggtcttttcccgagaaaaggaggtggagggtcacttcaaagaaatcaatgaaaagcttgtttccagttctatgaaagcacaggcaataagcagcgtcatgggacctgtgaataacactatcaataatctgacctatttgattatcacggtctgcggtggcgttttaatcataaagggatttgcgggaatcactgttggcgtaatattttctttcctgctctatatgcgcaattttacccagccaatcaacaatattctcaaccttttcagcactatccagtcagcccttgcaggcgcagagcgagtgtttgaggtaatggacgaggaaaaagaaaaagatgccgataatgccagagacattcaaaacattgaaggcaacgtgaaaattgaatctgttaatttttcatacatacctggtaagcctgtacttaaagaggcaacaatttctgcgaaaaaaggtcagacaattgccatcgtgggccctacgggtgctgggaaaacaaccattatcaatctgctcaccaagttttatggcattgatgacggagcaatctatattgatggaaagaatataaatgccattactcgaaagagtctgcggcagtccatttcaatggtactccaggatacttttcttttctcggacaccatacgcgagaatatccgctatggcaggctgacagcaacggatgaagaagttgaacaggcagcaaagctggcacatgcccatgactttattatgcaactgccacagggttatgatacaattctttctgacaatggcggcaacctttcacagggacagcggcaattgcttagtattgcgagagcgatgatcgcacaatcttctgtgttgatacttgatgaagcgacttcttcaatcgatacacggacagagctgattattcagagtgctctgctcaaactaatgcacggaaaaacgagttttgttatcgcacaccgcctttccaccatcaaaaacgcagataaaatcatcgttttagacggcggtcgagtagtagaaacaggtacgcatagcgaactgcttgtttcgggcggtttctatgccaacctttacaaaagtcagttcaaaaaaggcatggcaatataa

SEQ ID NO: 4521 - protein, 615 aa, Methanosarcina barkeri str. Fusaro
MPQNNVMPHNMPHNITGRPAGGPSAFLQREKTEIKDVKGTFIRIIMYLGKWWRTLLIIFFCALVTTVITIIGIQLNGYAVDEFISKKDIAGLARICIIMILIYLVAVFSTYMQNSLMIRVAQKTSASIRNDLFSSLQKLPLKYFDTHSSGDLMSRLTNDVDNINLTLSQSVVQLFSGVISVVGMLIAMLLLSPLLTLIGLLTTPLMFFTSKVLAVKSQKFFKEQQYELGRLNGYIEEMVSGQKVIKVFSREKEVEGHFKEINEKLVSSSMKAQAISSVMGPVNNTINNLTYLIITVCGGVLIIKGFAGITVGVIFSFLLYMRNFTQPINNILNLFSTIQSALAGAERVFEVMDEEKEKDADNARDIQNIEGNVKIESVNFSYIPGKPVLKEATISAKKGQTIAIVGPTGAGKTTIINLLTKFYGIDDGAIYIDGKNINAITRKSLRQSISMVLQDTFLFSDTIRENIRYGRLTATDEEVEQAAKLAHAHDFIMQLPQGYDTILSDNGGNLSQGQRQLLSIARAMIAQSSVLILDEATSSIDTRTELIIQSALLKLMHGKTSFVIAHRLSTIKNADKIIVLDGGRVVETGTHSELLVSGGFYANLYKSQFKKGMAI

SEQ ID NO: 4522 - DNA, 1785 bp, Anabaena variabilis ATCC 29413
  CDS (1)..(1785): transl_table=11
atgagaactccagccccagttattgcctccgaacaacaagcaactaagcaactttcaaccttacggcgttttttacaatacttgcgtccctttcgcaaagaagttcccattgctttgagtttagtattaatcggtgctgtcacccaggcgatcgggccgtttttactaggttggtcagtagataacctcatagccaaaggcaatttaccaggattgctactgttattagtgttattaggcctaaattatagttttggtatctgggcaattcgggggcaaattatccgcgtcggctggattatgcagcgattactggctcagttgaggcaagatatttttaccaaaattcaaagtttgccactcagcttttttgaccgcagtgaagccggtgatttaatgagtcgtctgctaaacgatgtcaacactgttaatcaagcctttgggcaaacggtggcacaaatgctaggtaataccttcagtttggtaggtattgtcattgctatgctttcaattaacttacaacttgggttgttaagtaacttagttgtccctctgatgatttttaccaccagcttatttgcgcgttgggctaggactaaatttcgcgtcaccagacaaacaattggggaactttccgccaagttagaagaagatattggcagtgtgcgagaagcccaagcctttaaccgggtacatctcaacatcgcagaatttgacgttctcaacgccgctaatcgtgatgccaacgttgaagccgtagcaattacggcggcatttttaccatcaattgattttctcaacaccttagctacagcaggtgtccttgcctatggtggttatcttgccgtgacaggagccgcaactgtgggtgtggtaacatcatttttactttacgtccagcaattcttccgccccatccaaatcctcagtcagttttacacccaagctcagtcagcctttgccggattagagcgtattttcctcttactagatgaaccatcccaactcaatgacgcacccaacgccacccaaatgcctcctattcaaggtgaggtgacatttgaggatgttaagtttgggtataatccagagcaactagtcctcaaaggagttaatttacacgctgatgcaggacagatggtggcattagtaggggcgactggttcaggcaaaacaacaattattaacctcatattgcgtttttatgatgtgtctgacggtgcggtaaaaattgatggcgttgatgtgcgtagtgtgactcaagccagcctccgccatcagattggcattgtcctgcaagataatattttgtttagcggtactgttgccgaaaatattgcttttggcgcgccttatgccactcaagccgaaattgaagcggcggcacaaatggcaaacgtccatgagtttatcacttcactaccgcaaggttacacaaccaaattaggcgaacggggcgcacctctcagccaaggacaaagacaactgattagtattgctcgtgcagtattaattaatccccgcatcttgattcttgacgaagcaaccagtagtatagatacccgaacagaagctctagtacaggatgcgatcgcccgtttattacagggtcgcaccagttttgtcattgcccaccgcctcagcaccgttacccaagctaatcaagtattggttattcagcaagggcaaatcgtagaacgaggtactcacgcagaacttgtcaggcagcaaggtatttacgctaatctgtatgcactccaactgggggcagcgacagcacaataa

SEQ ID NO: 4523 - protein, 594 aa, Anabaena variabilis ATCC 29413
MRTPAPVIASEQQATKQLSTLRRFLQYLRPFRKEVPIALSLVLIGAVTQAIGPFLLGWSVDNLIAKGNLPGLLLLLVLLGLNYSFGIWAIRGQIIRVGWIMQRLLAQLRQDIFTKIQSLPLSFFDRSEAGDLMSRLLNDVNTVNQAFGQTVAQMLGNTFSLVGIVIAMLSINLQLGLLSNLVVPLMIFTTSLFARWARTKFRVTRQTIGELSAKLEEDIGSVREAQAFNRVHLNIAEFDVLNAANRDANVEAVAITAAFLPSIDFLNTLATAGVLAYGGYLAVTGAATVGVVTSFLLYVQQFFRPIQILSQFYTQAQSAFAGLERIFLLLDEPSQLNDAPNATQMPPIQGEVTFEDVKFGYNPEQLVLKGVNLHADAGQMVALVGATGSGKTTIINLILRFYDVSDGAVKIDGVDVRSVTQASLRHQIGIVLQDNILFSGTVAENIAFGAPYATQAEIEAAAQMANVHEFITSLPQGYTTKLGERGAPLSQGQRQLISIARAVLINPRILILDEATSSIDTRTEALVQDAIARLLQGRTSFVIAHRLSTVTQANQVLVIQQGQIVERGTHAELVRQQGIYANLYALQLGAATAQ

SEQ ID NO: 4524 - DNA, 1881 bp, Anabaena variabilis ATCC 29413
  CDS (1)..(1881): transl_table=11
atgagcatctaccaactttcccaaaaatcttataaacaaaaccgttggcgtaacaacgactggcggctgttttcacgtttggttccttacgcccggcgtaatactaaactactgattctggcaatggtattgctattaccacttgctttggctaatgccgtacagcccttgttaattggacaagctgtatccttaattcgtaatgaatctagcgcatacgagtttttgagaagtcgtccattgtctcaagggctacatattattgaaggaatattactctttacaattgttatccgtttagcgttgacgggttaccaaggctatttgttacagaaattaggacaaaaaatcacagccgctattcgccaagacttatttcatcatgtaacatctctggcggtacgtttcttcgaccgtacacccgttggtaaactcattacccggctcaccagcgatgtggaagtattgggagacgtattttccactggcgctattggcattgtctctgacgtagttttgatggtggtaattactggtttaatgttttctatccagtggcaacttgcttccttgctcctggtgatgttgttaccagttacttggttaattatttacttccaacaagagtaccgcaaagctaattacaaagctagggaagagctatctttactgaattcccaactacaagagaatgttctggggattaacgtagtccagttattccggcgggaaagctttaatgctgagttatttcgcactacaaaccaacgctataccaaacaggtggatcaaactatcttttttgattcggctgtttccgcaactctggaatggattggcttaattgcgatcgctggtgtattgtgggtgggtggctggttgctttcagaaaatcaacttgattttgggactttatcgacctttattttatacgcccagcgcttattcgaccctttacgagattttgcggaaaaattcacagtcattcaatctggatttacggctattgaacgggttagcgatattttagatgaaccgatagaaataagcgatcgctccaactctcgattttccgtctttgatgctaaattcggttacattgatgaaattgtcgctgatttagaatctcaaaatatcagcgacactccaaacatgggagaaatccgttttgaacacgtttggtttgcctataaagacgacgattacgtcattaaagacttagactttatcattcgtcctggcgaaaaagttgcattagtagggcctactggcgcaggtaaaagttctatcatccgtcttttatgtcgtctttacgaacccacccaaggacgcatcttagtagatggaattgatatccgtgagttacctcaagcagaattacgccgttatatggcggttattctacaagagggttttttgtttgctggtaatgtcaaaagtaacattactttaggtgattactatacttttgaggaaattcaagcagctgcacagcaaacaaatattgctgaatttattgaagaactacccttaggttacgatactaaattgcgagaacggggtacaaacctttccagtggacaaaagcaactgttagcttttgctcgtgctgcaattcgcaatcctcaaattttagttttagatgaagccaccgcgagtctcgatgttggcacagaagcgttagtccaggaagcattaaacgaattattaatcggacgaactgcaatcattattgctcaccgcctgtctacaattcgcaacgtagatagaatttttgtgttgaagcgtggtgaattagtggaacaaggtagccatgaggaactgttaaattcaggagggctttattctactctgcataatctacaaatgctgggaacctag

SEQ ID NO: 4525 - protein, 626 aa, Anabaena variabilis ATCC 29413
MSIYQLSQKSYKQNRWRNNDWRLFSRLVPYARRNTKLLILAMVLLLPLALANAVQPLLIGQAVSLIRNESSAYEFLRSRPLSQGLHIIEGILLFTIVIRLALTGYQGYLLQKLGQKITAAIRQDLFHHVTSLAVRFFDRTPVGKLITRLTSDVEVLGDVFSTGAIGIVSDVVLMVVITGLMFSIQWQLASLLLVMLLPVTWLIIYFQQEYRKANYKAREELSLLNSQLQENVLGINVVQLFRRESFNAELFRTTNQRYTKQVDQTIFFDSAVSATLEWIGLIAIAGVLWVGGWLLSENQLDFGTLSTFILYAQRLFDPLRDFAEKFTVIQSGFTAIERVSDILDEPIEISDRSNSRFSVFDAKFGYIDEIVADLESQNISDTPNMGEIRFEHVWFAYKDDDYVIKDLDFIIRPGEKVALVGPTGAGKSSIIRLLCRLYEPTQGRILVDGIDIRELPQAELRRYMAVILQEGFLFAGNVKSNITLGDYYTFEEIQAAAQQTNIAEFIEELPLGYDTKLRERGTNLSSGQKQLLAFARAAIRNPQILVLDEATASLDVGTEALVQEALNELLIGRTAIIIAHRLSTIRNVDRIFVLKRGELVEQGSHEELLNSGGLYSTLHNLQMLGT

SEQ ID NO: 4526 - DNA, 1740 bp, Streptococcus agalactiae A909
  CDS (1)..(1740): transl_table=11
atgaagtctaatcaatggcaagtctttaagagattaatctcctatttacgcccttataaatggtttacagtattagctctatctctcttattgttgacgactgttgttaaaaatattattcctttaattgcttcacattttattgatcactatctgacaaatgttaatcaaacagcagttcttattttagtgggatattattcaatgtatgtcttgcagaccttaattcaatattttgggaatctcttttttgcgcgtgtttcttatagtattgttagagatattcgtagagatgcttttgctaatatggaaaggcttggcatgtcttattttgataggacaccggcaggatctatagtgtcacgtattactaatgatactgaagcaatatctgatatgttttcgggtattttatcgagttttatctcggcgatatttatttttacagttactctgtacactatgttgatgctagacattaaactaacaggacttgtcgctcttttattacctgttatctttatattagtgaatgtctatcggaaaaaatcagtcactgtcattgctaaaacgagaagtttacttagtgatatcaacagtaaattatcagaaagtattgaaggaattcgcattgtacaggcttttggtcaagaagagcgcttgaagactgaatttgaggaaattaacaaagagcatgttgtgtatgccaatcgttctatggctcttgatagtctcttcttaagaccggcgatgtctcttttaaaactcctagcatatgctgttcttatggcttattttggatttacaggagttaaaggaggtcttacggcaggattgatgtatgcttttattcagtacgttaatcgtctctttgaccctttaattgaagtaacgcaaaatttttcaaccttacaaacatcaatggtatcagcagggcgtgtgtttgatttgattgatgaaacaggttttgaaccaagccaaaaaaatacagaagcttttgtgagagaaggaaatatcgaatttaaaaatgtatcattctcatatgatggaaaaaaacaaatccttgataatgtttcttttagtgttaaaaaaggtgaaacgattgcttttgtaggagcgacaggttctggaaaatcatctattattaatgtctttatgaggttttacgaatttcaatctggacaagttttattagatgggaaggatattagggattactcacaagaacaattgcgaaagaatattggactcgtcttacaagacccctttttatatcatggcactattaaatctaatatcaaaatgtaccaagacatcaccgatcaagaggtacaggacgcagcagagtttgttgatgctgatcaatttattcagaagttgccagataagtacgatgcagctgtttcagaacgtgggtcaagtttttcgactggacaacgccaactattggcgtttgccagaactgtggctagtaaacctaaaattttaatcttagatgaagcgacagcaaatattgattcggaaacagagcagattgtacaagattcgttagcaaaaatgcgtcaaggtcgaacaacaattgccattgctcaccgcttatcaaccattcaagatgctaattgtatctatgttcttgatagaggaaagataattgaaagtgggaatcacgagtctttattagacctaaaagggacttattatcgtatgtaccaattacaagctggcatgatggaggtctag

SEQ ID NO: 4527 - protein, 579 aa, Streptococcus agalactiae A909
MKSNQWQVFKRLISYLRPYKWFTVLALSLLLLTTVVKNIIPLIASHFIDHYLTNVNQTAVLILVGYYSMYVLQTLIQYFGNLFFARVSYSIVRDIRRDAFANMERLGMSYFDRTPAGSIVSRITNDTEAISDMFSGILSSFISAIFIFTVTLYTMLMLDIKLTGLVALLLPVIFILVNVYRKKSVTVIAKTRSLLSDINSKLSESIEGIRIVQAFGQEERLKTEFEEINKEHVVYANRSMALDSLFLRPAMSLLKLLAYAVLMAYFGFTGVKGGLTAGLMYAFIQYVNRLFDPLIEVTQNFSTLQTSMVSAGRVFDLIDETGFEPSQKNTEAFVREGNIEFKNVSFSYDGKKQILDNVSFSVKKGETIAFVGATGSGKSSIINVFMRFYEFQSGQVLLDGKDIRDYSQEQLRKNIGLVLQDPFLYHGTIKSNIKMYQDITDQEVQDAAEFVDADQFIQKLPDKYDAAVSERGSSFSTGQRQLLAFARTVASKPKILILDEATANIDSETEQIVQDSLAKMRQGRTTIAIAHRLSTIQDANCIYVLDRGKIIESGNHESLLDLKGTYYRMYQLQAGMMEV

SEQ ID NO: 4528 - DNA, 1818 bp, Pseudomonas fluorescens PfO-1
  CDS (1)..(1818): transl_table=11
gtgtctgacccggccgatgacacgccagccgtcaagcgtgtcgaccggctgagctgggctgaagtccggcgactggcacttcatcacaaaaaatccctgtggatcgccaacggcgtggccgtactggcgacgctgtgcagcgtgccgattccgctgctgttgccgttgctggtggacgaagtcttgctcggccatggcgacgccgcgctgaaagtcatgaaccacctgctgccctcgatgtggcagcaggcggcgggctatatcggcctgatgctggtggtgacgctgaccctgcgttgcagcgccctgtgttttggcgtgttgcaggcgcgattgtttgcgcgactggccaaggacatcgtgtaccgcatccgcgtgcggctgatcgagcgtctgaaacggatctcgctgggtgaatacgaaagcctgggcagcggcaccgttaccacgcacctggtcaccgacctcgacaccctcgacaagtttgtcggcgaaaccctcagccgttttctggtggcgatgctgacgctggtcggcactgccagcatcctgatgtggatgcactggaaactggcgctgctgatcctgctgttcaaccccttggtgatttacgccacggtgcagttgggcaaacgggtcaaacacctgaagaaactggagaacgacagcacctcgcgtttcacccaggcgctgagcgaaaccctcgatgcgatccaggaagtgcgtgccggcaaccgtcagggcttcttcctggggcgccttggcctgcgggctcaggaagtgcgcaactacgcggtcaactcacagtggaagaccgacgcttcgaaccgcgccagcggcctgttgtttcagttcggcatcgatatctttcgcgcggcagccatgttgacggtgttgttctctgacctgtcgattggccagatgctcgcggtgttcagctacctgtggttcatgatcggcccggtcgaacaactgctgaacctgcaatacgcctactacgcggcaggcggggcgctgtcgcggatcaacgaactgctggcccgcgccgacgagccgcaataccccggcggcgtcgacccgttcaagggccgcgatacggtcgggattcaagtgcagggtctgagcttcggttacggcgacgaactggtgctggatcagttgaacctgtccatcgcccccggtgaaaaagtggcgattgtcggcgccagcggtggcggcaaaagtaccctcgtgcaattgctgctgggcctgtacacgccactggcggggacgatccgtttcggcggctcgagccagcaggaaatcggcctggaaacggttcgggaaaacgtcgctgtggtgttgcaacatccggcgctgttcaacgacaccgtgcgcgccaacctgaccatgggtcgtacccgcagcgatgaagcctgctggcaggcactggaaatcgcccagctcgaacccaccatccgcgccttgccggacggcctcgacagcatcgtcggccgctccggcgtgcgtctgtccggggggcagcggcaacggctggctatcgcccggatgatcctcgccgaacccaaagtggtgatcctcgacgaagcgacgtcagccctcgatgccgcgaccgagtacaacctgcaccaggccatggcgcgcttcctccatggccgcacaacgctgatcatcgcccaccgcttgtcggcggtgaaacaggcagaccgggtgctggtgttcgacggcgggcaagtggccgaagatggcgaccatcagcaactgattgccgatggtgggttgtacgccaagctttatgggcatttgcagcggttgtag

SEQ ID NO: 4529 - protein, 605 aa, Pseudomonas fluorescens PfO-1
MSDPADDTPAVKRVDRLSWAEVRRLALHHKKSLWIANGVAVLATLCSVPIPLLLPLLVDEVLLGHGDAALKVMNHLLPSMWQQAAGYIGLMLVVTLTLRCSALCFGVLQARLFARLAKDIVYRIRVRLIERLKRISLGEYESLGSGTVTTHLVTDLDTLDKFVGETLSRFLVAMLTLVGTASILMWMHWKLALLILLFNPLVIYATVQLGKRVKHLKKLENDSTSRFTQALSETLDAIQEVRAGNRQGFFLGRLGLRAQEVRNYAVNSQWKTDASNRASGLLFQFGIDIFRAAAMLTVLFSDLSIGQMLAVFSYLWFMIGPVEQLLNLQYAYYAAGGALSRINELLARADEPQYPGGVDPFKGRDTVGIQVQGLSFGYGDELVLDQLNLSIAPGEKVAIVGASGGGKSTLVQLLLGLYTPLAGTIRFGGSSQQEIGLETVRENVAVVLQHPALFNDTVRANLTMGRTRSDEACWQALEIAQLEPTIRALPDGLDSIVGRSGVRLSGGQRQRLAIARMILAEPKVVILDEATSALDAATEYNLHQAMARFLHGRTTLIIAHRLSAVKQADRVLVFDGGQVAEDGDHQQLIADGGLYAKLYGHLQRL

SEQ ID NO: 4530 - DNA, 1839 bp, Rhodobacter sphaeroides 2.4.1
  CDS (1)..(1839): transl_table=11
atgagcgaagcgagacagaggccgggcccgacgcccgttgatccgccggaaatgagcggctgggcgaccatgaagcgcatggcgccctacctttggccgaagggccagacctgggtgaagcggcgcgtcgtcatcgccatggcgatgctggtgctggccaaggtgatctctgtctcgacccccttcttctacaaggccgcggtggatgcgctcgcgggcgatgcgcccacgcccgccttcatgctgggcctcggcgcggtcgggatgacggtggcctacgggctggcgcggctcggcgccgtggccttcggggaactgcgcgacgcgatcttcgtgcgcgtgggccagcgtgccctgcgccagctcgcgctcgagaccttcacccacatccaccggctctcgctgcgctaccacatcagccgcaagaccggcggtctcagccgcatcatcgagcgcggcgtgaagggcgtcgatttcctgctgcgcttcatgctcttctcgatcgggcccctcttcatcgagctgacgctggtcgcgatcatcttcgcggttgtgttcggctggcaatatatggtcgtggtggtggccaccgtcgcgctctatgtggccttcaccttcaaggtcaccgagtggcgggtgcagatccgccgccagatgaacgagcaggacaccgacgcgaaccagaaggccatcgactcgctcctgaatttcgagacggtgaaatatttcggcgccgagctgcgcgaggccgaacgctacgatgcggccatggcgggctacgagaaggcggcggtcaagaccggccagtcgctcgccgtcctgaacgcggggcagagccttctcatcaccgcggggctcgtggcggtcatggtcatggcggcctacggcgtgcaggcgggtcggctcacggtcggggatttcgtgatggtcaatgcctacatgatccagatcaccctgccgctcggcttcctcggcaccgtctaccgcgagatccggcaggcgctcgtggacatggggcagatgttcggtctgctcgcccagccggccgaagtcagcgacgcgcccggggcgcggccgctcgcggtggcgggcggcacggttgagctcgagaatgtccgcttcggctatgacgcgggccgcacgatcctcaagggcatctcgctccgggtcgaggcgggcgagacggtggcgctggtcggtccctcggggtcgggcaagtccacgatcggccggctcctcttccggttctacgacgtgaacgagggcgccatccgcatcgacgggcaggatctgcgcgcggtcacgcaggactcgctccatgcgcagatcggcgtggtgccgcaggacacggtgctcttcaacgacacgatcttctacaacatcgcctacggccgccccggtgccacgcccgaacaggtcgaggccgcggcgcgggccgcgaagatccacgacttcattctgcgcctgcccgagggctaccgcacgatggtgggcgaacgcggcctgaagctctcggggggcgagaagcagcgggtgggcatcgcgcgcaccctgctcaagaacccgccgatcctgcttctcgacgaggcgacctcggcgctcgacacccagaccgagcgcgacatccaggattccctgcgcgagatgggcgaggggcgaaccgtcatcaccatcgcgcaccggctttccaccatcgccgatgccgaccggatcgtggtgctggaagaggggcggatcgtcgaggaggggcggcacgaacagcttctcgcccgcagcgggcgctatgcctcgatgtgggcgcggcaatcggccgaggaagaggacgaggcggcggcctga

SEQ ID NO: 4531 - protein, 612 aa, Rhodobacter sphaeroides 2.4.1
MSEARQRPGPTPVDPPEMSGWATMKRMAPYLWPKGQTWVKRRVVIAMAMLVLAKVISVSTPFFYKAAVDALAGDAPTPAFMLGLGAVGMTVAYGLARLGAVAFGELRDAIFVRVGQRALRQLALETFTHIHRLSLRYHISRKTGGLSRIIERGVKGVDFLLRFMLFSIGPLFIELTLVAIIFAVVFGWQYMVVVVATVALYVAFTFKVTEWRVQIRRQMNEQDTDANQKAIDSLLNFETVKYFGAELREAERYDAAMAGYEKAAVKTGQSLAVLNAGQSLLITAGLVAVMVMAAYGVQAGRLTVGDFVMVNAYMIQITLPLGFLGTVYREIRQALVDMGQMFGLLAQPAEVSDAPGARPLAVAGGTVELENVRFGYDAGRTILKGISLRVEAGETVALVGPSGSGKSTIGRLLFRFYDVNEGAIRIDGQDLRAVTQDSLHAQIGVVPQDTVLFNDTIFYNIAYGRPGATPEQVEAAARAAKIHDFILRLPEGYRTMVGERGLKLSGGEKQRVGIARTLLKNPPILLLDEATSALDTQTERDIQDSLREMGEGRTVITIAHRLSTIADADRIVVLEEGRIVEEGRHEQLLARSGRYASMWARQSAEEEDEAAA

SEQ ID NO: 4532 - DNA, 1779 bp, Synechococcus sp. CC9605
  CDS (1)..(1779): transl_table=11
atgggagccgtcgccgactggcgccgggtccgtcgtctcggccgttacctcgtgcgggatcgccggcggcttttggtcgccctgctgctcttgcttcctttggcctttgcgggagcactccagcccgttctattggggcaggctgtcagcgttctgcgcggagagcccagtcttccctggttgtcggggttgagcctgtccgcttcgatccgcgtgatcatctggctctacttcggctcggtgttgctgcggttcgccctgcagggcgtgcagcaattcagcatcctcgccgtcggacaacggctcaccgcccgcatccgcgacgacctgtttgaacatgcgttgtcgctgtccctgcgtttccacgaccgcatgccggtgggcaagttgctcacacggctcaccagcgatgtggatgccctggctgaggtgtttggcagtggtgccgtgggggtgctcaatgatctggtgagcctgctggtgctggcctcaacgatgctgttcattgagtggaggctggggctgctgctgttgttcacacaggtgcccgtcaccttggccgtgctttggctgcagcgccgttaccggaagtccaactaccgcgtacgggaagagctctcccagctcaatgctgatttccaggagaacctccaaggccttgaggtggtgcagatgtacggccgtgaaacggtcaacagcgcccgtttcctgcgtacgggcagggactaccgcagcgctgtgaatggcaccatcttttacgacagcagcatttcagccttcttggaatgggtggccctggccgccattgccctggttctggcccttggcggcttgatggtgaccaatggtgcgatgggcttgggcaccctcaccaccttcatcctggcctcccagcgtctgttcgaccctttgcgtcagttggccgagcgtttcacccagattcagggtgggctgacggccgtcgaacgcattggcgaattgatggaggagcccctcgagattgccgaggccaagaacgtccttcctcacctgagcggcggaggcggcgaggtgatcttcgagaacgtgagctttgcgtaccggccggatgacccgatcctccgcaacctgtccttccgtatcgcccccggcgagcatgtcgccctggtgggccccacgggttccggcaaaagcacgatcatccgtctgctctgccgcctctatgaaccacagcagggacgcattcttctcgatggacgggacatccgaacgatccccatggcggatctccggcgtgagctgggcgtcgtgcttcaggacacgtttctgttcagcggcaatgtggccgacaatctccggctcagtgcttcggtgagcgacggtgagttggctcaggtctgtgctgagctcggcctcaacgagctgctctcgaagcttcccaagggtctggagacgaagctgcgcgagcggggaggcaacctctcctcaggtgaacgccaactgctggcggtggccagggtggcgatccgccagccaacggtgttggtgatggatgaagccaccgccttcatggacccttcaacggaggcgacgctccaagccgatctcgaccgggtcctgcaaaagcgcaccgccattgtcatcgcccaccgcctggccacggtggaggcctcggatcgcatccttgtgctgggccgcggcgaactgattgaacagggcacccatcaagagctcagggcccgcggtgggctttatgcccagctcgctgagctgcaggaacgggggttggcgcgtctgtga

SEQ ID NO: 4533 - protein, 592 aa, Synechococcus sp. CC9605
MGAVADWRRVRRLGRYLVRDRRRLLVALLLLLPLAFAGALQPVLLGQAVSVLRGEPSLPWLSGLSLSASIRVIIWLYFGSVLLRFALQGVQQFSILAVGQRLTARIRDDLFEHALSLSLRFHDRMPVGKLLTRLTSDVDALAEVFGSGAVGVLNDLVSLLVLASTMLFIEWRLGLLLLFTQVPVTLAVLWLQRRYRKSNYRVREELSQLNADFQENLQGLEVVQMYGRETVNSARFLRTGRDYRSAVNGTIFYDSSISAFLEWVALAAIALVLALGGLMVTNGAMGLGTLTTFILASQRLFDPLRQLAERFTQIQGGLTAVERIGELMEEPLEIAEAKNVLPHLSGGGGEVIFENVSFAYRPDDPILRNLSFRIAPGEHVALVGPTGSGKSTIIRLLCRLYEPQQGRILLDGRDIRTIPMADLRRELGVVLQDTFLFSGNVADNLRLSASVSDGELAQVCAELGLNELLSKLPKGLETKLRERGGNLSSGERQLLAVARVAIRQPTVLVMDEATAFMDPSTEATLQADLDRVLQKRTAIVIAHRLATVEASDRILVLGRGELIEQGTHQELRARGGLYAQLAELQERGLARL

SEQ ID NO: 4534 - DNA, 1809 bp, Geobacter metallireducens GS-15
  CDS (1)..(1809): transl_table=11
atgcatttcggtggtgcctacgaagacgagatagttggcaaggcctatgacgggaggctcatggcgcggtttatccgctacgtgctcccctaccggtggctcgccgtggcagccctctgcctccttcccctctcggcggcggcccggctggcccagccgtggatcatgaaggtggccatcgatgagcacattatcaccggccggatggagggtctgccgctggtggcggccggatttctcgccctgatccttgccgagtcgctcctgacgttctttgaggtctggctcctccagtacctggggcagagggtgatgttcgatctccgcatggagctcttcagccacgtccagcggcttccggtcgcctttttcgaccggactcccaccgggagcctcgtgacaaggctcaccagcgacgtggaagtcctcggcgagatgttcgccgcagggatcattacggtggtgggggacatcctcttcctggccgggatcgtcggggtgatgctctggatgaacctgaagctctccctagtcaccttcgcagtcctgccggtgctcatctgggtcgcctttacgtttcgggtcaggatgcgcaaggccttccgggaggtacgtgcccggctggcgaacctcaacacctttctggccgagaccatcggcggcatggcggtggttcagcttttcaaccggcaagaaaccgagcggcgggagttttcgcggctcaacgccgcttaccgggacgccaacctcccggtcatcacctgggacgcctccctctatgccttggtggagaccctttcctccatcgccgtggggctcatcatctggtacggcgggggggagatcgtcagcggcgcccttaccttcggggcactggtggccttcatccagtacaccgaaaaatttttcggccccatccgggatctttcggccaagtactccatcatgcagggagccatggcggccctagagcggattttcaacctgctggacaccgagaaggatggatacccctcacccggccttcggccaccctctccctccaggcggggggccggggatgagggggcagtcaacaccatcgccttcaaggatgtctggttcgcttacaaggacgaggagtacgtcctccgggggatagacctcaccatccggcggggggagaaggtggcgttggtgggggagacgggcggcggcaagacgacggtgacccggctcctctcccgcttctacgacgtgagcagggggagcatcctctttgacggcgccgacatccgggagctgccccttcccgacctccggcgccggatcggcgtggtcctccaggaaccgtatcttttcaccggcaccatcgggttcaatatctccctgggggacgagggggctgctgccaggatggaggaggcggcacggcttgtgggggccgcccggttcatcgaggcgcttcccaaaaagtacgacgaggaggtgcgggagcggggggtgaacctctccgccggcgagcggcagctcatttcctttgcccgtgccgtggctttcgacccggagatcctcgtcctcgacgaggccacctccagcgtcgacagcgagtctgagcggctcatccaggaggggctccgggcgctcatggcgggccgtacgtctctggtggtggctcaccgcctctccacggttcaggatgccgaccggatcgtcgtcatccaccggggtgaaaaggtggaggaggggacccaccgcgaactcctggccgccggaggagtctacgcacggctctatcagcttcagttcagggagcaggacaatccatga

SEQ ID NO: 4535 - protein, 602 aa, Geobacter metallireducens GS-15
MHFGGAYEDEIVGKAYDGRLMARFIRYVLPYRWLAVAALCLLPLSAAARLAQPWIMKVAIDEHIITGRMEGLPLVAAGFLALILAESLLTFFEVWLLQYLGQRVMFDLRMELFSHVQRLPVAFFDRTPTGSLVTRLTSDVEVLGEMFAAGIITVVGDILFLAGIVGVMLWMNLKLSLVTFAVLPVLIWVAFTFRVRMRKAFREVRARLANLNTFLAETIGGMAVVQLFNRQETERREFSRLNAAYRDANLPVITWDASLYALVETLSSIAVGLIIWYGGGEIVSGALTFGALVAFIQYTEKFFGPIRDLSAKYSIMQGAMAALERIFNLLDTEKDGYPSPGLRPPSPSRRGAGDEGAVNTIAFKDVWFAYKDEEYVLRGIDLTIRRGEKVALVGETGGGKTTVTRLLSRFYDVSRGSILFDGADIRELPLPDLRRRIGVVLQEPYLFTGTIGFNISLGDEGAAARMEEAARLVGAARFIEALPKKYDEEVRERGVNLSAGERQLISFARAVAFDPEILVLDEATSSVDSESERLIQEGLRALMAGRTSLVVAHRLSTVQDADRIVVIHRGEKVEEGTHRELLAAGGVYARLYQLQFREQDNP

SEQ ID NO: 4536 - DNA, 1926 bp, Frankia sp. CcI3
  CDS (1)..(1926): transl_table=11
atgcgaccgggaacggacggttggtccacgatgcgtaccttccaacaggaccgttcggtcacccggacctcgctgcggcctggcaccctgcgcaggatcgtcgccttcgcccgcccccatcggcggcagctcgcctactttctcgcgctcatcgtgctcagctcggctgtcggtgcggttgttccgatgatcttcaagacgatcatcgacgacggcatcgtgcgccaccgggtggggttcgtgcaggcgctcgccgcggtcgtcgcgggcctggcgttcctggacgccggtctgtcgctcgcgcagcgctggttctcggcccggatcggcgagggtctgatctacgagatgcgcagccaggtgttccggcacgtgcagtgccagccgctcgccttcttcacccggacccagaccggggcgctcatcagccggttgaacaacgacgtgctcggcgcgcagtcggcgttcaccaacacgctgtcgtcggtgctgtcgaatatcctgtccgccggattcgtgctcgccgcgatgctggtgctgtcctggcggatcacgctcgtgtcgctcgtgttgctgccggtatttattattccggcccgcttgttggcgccccgcctggccaggctgacccgggagagctacgggttgaacgccgagatgaacacgacgatgacggaacgattcaacgtgtccggagcgatgctcgcgcaactgtatggttcggcggaacgggaggacgagaacttccgtgttcgggccgggcgggtgcgtgacatcggggtgacccaggccatgtacggccgcatattcttcgtctcgctcaccctggtcgcctcgctcgcgaccgcgatcgtctacgggataggcggtcggttcgctgcccagggcagcttggaggtcggtaccctggtcgcgctcacggcctacctcgggcggctctacgggccgctcactcagctctccaacgtgcacgtcgacgtcatgacggcgctggtgtccttcgagcgggtcttcgaggtgctcgatttggagccggcgatcgccgaccggccgggcgctgtcgatctgccggcaggcgcggcgaccatcgagttcgatcatgtcggtttccgttatccggccgccgacgaggtctccctggcgtcgctggagtcggtcgccgtactcgacccgcgggtgcccacgccggtgctgcacgatgtcaccttccgggtcgagccggggcaggtgatcgcgttggtcggcccgtccggagcgggcaagacgacgatcagccagctcgttccgcgcatgtacgacgtgcggtcggggtcggtacgcatcggcgggcacgacgtccgcgatctcacccttcggtccctgcggtccgccgtcggtgtggtcacccaggacgcgcatctgttccacgacaccatccgcgcgaacctggccttcgcccgggcggacgcctcggacgagcagatgtggaccgctctggacgcggcgcggatcgggccgctcgtgcgctccctgccggacggcctggacacggtcgtcggtgaccggggctaccgcctgtccggcggggagaagcagcggctggccatcgcccggctgctgctgcgcgaaccgggcatcgtcgtgctggacgaggccaccgcgcacctcgacagcgagtccgaggccggcgtgcagcaggcgctgaccgccgcgctggtgggacggacatccctggtcatcgcgcaccggctgtccacggtgcgcgacgccgaccgcattctggtggtcgacgacgggcggatcgtgcagagcgggacccatgaggagctgctggcccgcggcgggctctatgccgagttgtaccggacccagttcgccccggtcacgcccgtcggtgctgatgcggggtgggccgaaggggccagtgccccaccggtcggggtctga

SEQ ID NO: 4537 - protein, 641 aa, Frankia sp. CcI3
MRPGTDGWSTMRTFQQDRSVTRTSLRPGTLRRIVAFARPHRRQLAYFLALIVLSSAVGAVVPMIFKTIIDDGIVRHRVGFVQALAAVVAGLAFLDAGLSLAQRWFSARIGEGLIYEMRSQVFRHVQCQPLAFFTRTQTGALISRLNNDVLGAQSAFTNTLSSVLSNILSAGFVLAAMLVLSWRITLVSLVLLPVFIIPARLLAPRLARLTRESYGLNAEMNTTMTERFNVSGAMLAQLYGSAEREDENFRVRAGRVRDIGVTQAMYGRIFFVSLTLVASLATAIVYGIGGRFAAQGSLEVGTLVALTAYLGRLYGPLTQLSNVHVDVMTALVSFERVFEVLDLEPAIADRPGAVDLPAGAATIEFDHVGFRYPAADEVSLASLESVAVLDPRVPTPVLHDVTFRVEPGQVIALVGPSGAGKTTISQLVPRMYDVRSGSVRIGGHDVRDLTLRSLRSAVGVVTQDAHLFHDTIRANLAFARADASDEQMWTALDAARIGPLVRSLPDGLDTVVGDRGYRLSGGEKQRLAIARLLLREPGIVVLDEATAHLDSESEAGVQQALTAALVGRTSLVIAHRLSTVRDADRILVVDDGRIVQSGTHEELLARGGLYAELYRTQFAPVTPVGADAGWAEGASAPPVGV

SEQ ID NO: 4538 - DNA, 1821 bp, Desulfitobacterium hafniense Y51
  CDS (1)..(1821): transl_table=11
atgagcacccttatctccgaagagttggaacataaagccggtctcagcggacagggcgggaccatcctcaggctccttgcctatttaaaaccccatcttaaacccctggcttttgcctttgccttgctcgttgcgggtaccgcggccgatgtagccggacctgtactgatcaagatctttttggatgattacctgacccctggacgtctggaacctctggctttaacaatcctgggcggcgggtatctgctgctggtcatcttagcttctttccttcaatatcaccaattggttcgtttcaataaaatcgccttgctggttattcaacaaatcagggtggatattttcactaaggttcagtatttggccatgagtgtctttgaccggactccggcgggagctttagtctccagggtcaccaatgatacggaggcgattaaggaactttatatcggcgtgctctcaacctatgttcagaacattgtctttctgctgggcatatttattgccatgttcagcctggatgtgcggttagcggccttctgcctggtgctgctccccgtcatcgttgttttgatgcaaatctaccgcaggatcagctccaagatatacaggatctcccgggcggagctgggcaggttgaatgctatactcaatgagtccatccaaggcatgaatatcatccaaatcatgagacaggaagaaacctttcaaaagaaatttgccggtattaacgagaagtattacggtgcggccattgccaatattaaactggaaagcaccctgatgcgcccggccgtggatctgctctataccctggcgctgattttggttctgggtttctttggtctggaatccatcattggtccggtggaagtgggagtgctctatgcctttatcaattatctggatcgttttatcgacccggtgaatatgatcttaatgcgcctttctcagcttcagcaggcgattatcgccgcggaaagggtctttgaagtgctggatgacgggcgaaccaccacagcccttggcctgaatgctgttcaggaagccggtgatcctcctgctcctggtatcgaaaaaggtgagattgaatttcgcaatgtcagtttttcctatgatggtgtcactgaagtcttaaaaaacatctcctttacggttcaccctggggagacggtagctttagtcggccataccggcagcgggaaaagcacgatttccaatctcttaatgaaattttacccggttaatcaaggggaaatcttgattgatggtatatccttgcatgacttttcccaggaagagctgcgcactcaggttgggctggttgcccaggatcctttcctctttgtcggggatattgccggtaatattgctctcaaccggccccaggttaaggaaggagaggtggaggcagcggcagaatttgtggaggctgatcaattcattaccaagctggggcagggatatcaggaacctgtcagtgaaaggggctccacactctccagtggtcaacggcagcttatctgctttgcccgcaccattgccggagaacctaaaattcttattctcgatgaagccaccgccagtgtggatacagagacagaggaggctattcaaaccgccttaaacaaaatgcgccaagggcgcagtaccatcgctattgctcatcggctttccaccatacaggatgccgatcttatccttgttttgcatcagggacaaatagtcgagcgaggcaatcataacgaactcctcgctcaaaaaggcctgtattacaaaatgtttctgcttcaacaaggggcaggcaaaggttattga

SEQ ID NO: 4539 - protein, 606 aa, Desulfitobacterium hafniense Y51
MSTLISEELEHKAGLSGQGGTILRLLAYLKPHLKPLAFAFALLVAGTAADVAGPVLIKIFLDDYLTPGRLEPLALTILGGGYLLLVILASFLQYHQLVRFNKIALLVIQQIRVDIFTKVQYLAMSVFDRTPAGALVSRVTNDTEAIKELYIGVLSTYVQNIVFLLGIFIAMFSLDVRLAAFCLVLLPVIVVLMQIYRRISSKIYRISRAELGRLNAILNESIQGMNIIQIMRQEETFQKKFAGINEKYYGAAIANIKLESTLMRPAVDLLYTLALILVLGFFGLESIIGPVEVGVLYAFINYLDRFIDPVNMILMRLSQLQQAIIAAERVFEVLDDGRTTTALGLNAVQEAGDPPAPGIEKGEIEFRNVSFSYDGVTEVLKNISFTVHPGETVALVGHTGSGKSTISNLLMKFYPVNQGEILIDGISLHDFSQEELRTQVGLVAQDPFLFVGDIAGNIALNRPQVKEGEVEAAAEFVEADQFITKLGQGYQEPVSERGSTLSSGQRQLICFARTIAGEPKILILDEATASVDTETEEAIQTALNKMRQGRSTIAIAHRLSTIQDADLILVLHQGQIVERGNHNELLAQKGLYYKMFLLQQGAGKGY

SEQ ID NO: 4540 - DNA, 1761 bp, Methylobacillus flagellatus KT
  CDS (1)..(1761): transl_table=11
ttgttcagtgatttatggccgttattgcggccatatcgctggcaaatcctgctcgcattctgtttgctcagcctggcttccgccattctgctgctcgtgccctgggcgttccgcgacctgatcgaccaagggttcggcacaggcaccgctgccgcgcagaacgctcaggacattaaccgtcatttcgtctttatctgcggcctggtgattgtctgggccttgatcgtggcatgccgctattacatcgtgtcctggataggcgaacgcgtcaccgcagacctgcgctccctggtgtatgagcgagtgcttacccagtcgccgcaattcttcgaaaccctgcagacgggagaggtgctgtcccgcctgaccgcggacaccaccttgatccagaccgttgtcggcagctcaatctccctcggcctgcgcagcctgttccaattcattggcggcatgatcatgctcgcggtcacgagttggtatttattcagcctcaatctcggactcatgctgttgctgacactgccgatcatgctgattggccgctcggtgaagacattgtcacgggaatcccaggatcgcattgccgacagctcggccatggcgggtgaaatcctcaatgccatgccgacagtgcaatccttcacccaggagccccgcgaacaacagcgtttccgccacagcgtggaaaccagcttcaaggctgccgtccgccgtatccgcgtgcgtgccttcctggctgcattcgtcattgccggcatcagtgcggccatcatcttcgtgttgtggctgggggcgcaccaggtcacgcaaggcgagttgtcgggcggcgagctcgcctccttcattctctatgcggcgctggttgccggcagcgtcagcaccatcgccgaggtatggggcgacatcatgcgcgccgcgggagcggccgaacgcctgctggagctgctgaacagcaagcctgcgatccgcgacccgtcaacgccggtactccccagcagcaccgacatggcaagcatcaagttcgacaacgtgagtttttactatccggcaaaacctgatcagccagcgcttgaccatatttctctcgagatcaatgcgggcgaaaccgttgccctggtcggaccatcgggcgcaggcaagactaccctgttccaactcctgttgcgcttttacgacatcttcgaaggatccatcagtatcaacggcctggacatccgcaacctgtccctcgacacattgaggggcatgattgccatcgtgccacaggacccggtgatcttttccgcgaatgcgcttgagaatattcgttatggcaggcccgatgccagcgatgaagagatcaagcacgcagcccaggcggcgcaagcccatgcattcatcgaacgcctgccgcaggggtatgacaccttcctgggagagcgcggcacccggctttcgggcggccagcgccagcgcatcgccatcgcccgtgccatgctcaagaatgcgcccatcctcttgcttgatgaagcaaccagcgccctggatgcggaatcggaaaccttggtacagcagggcctggcttcggccatgcacggcaggaccacactggtgatcgcccatcgccttgctaccatccagaatgccgaccgcgtcgtggtactggagcatggccgcatcgtcgaaaccgggacgccgaatgaattacgccggcaatccgggctgtacagccgcctcgccaagcttcaactggatatccatcccgatcacgcaccgcaataa

SEQ ID NO: 4541 - protein, 586 aa, Methylobacillus flagellatus KT
MFSDLWPLLRPYRWQILLAFCLLSLASAILLLVPWAFRDLIDQGFGTGTAAAQNAQDINRHFVFICGLVIVWALIVACRYYIVSWIGERVTADLRSLVYERVLTQSPQFFETLQTGEVLSRLTADTTLIQTVVGSSISLGLRSLFQFIGGMIMLAVTSWYLFSLNLGLMLLLTLPIMLIGRSVKTLSRESQDRIADSSAMAGEILNAMPTVQSFTQEPREQQRFRHSVETSFKAAVRRIRVRAFLAAFVIAGISAAIIFVLWLGAHQVTQGELSGGELASFILYAALVAGSVSTIAEVWGDIMRAAGAAERLLELLNSKPAIRDPSTPVLPSSTDMASIKFDNVSFYYPAKPDQPALDHISLEINAGETVALVGPSGAGKTTLFQLLLRFYDIFEGSISINGLDIRNLSLDTLRGMIAIVPQDPVIFSANALENIRYGRPDASDEEIKHAAQAAQAHAFIERLPQGYDTFLGERGTRLSGGQRQRIAIARAMLKNAPILLLDEATSALDAESETLVQQGLASAMHGRTTLVIAHRLATIQNADRVVVLEHGRIVETGTPNELRRQSGLYSRLAKLQLDIHPDHAPQ

SEQ ID NO: 4542 - DNA, 1869 bp, Acidobacteria bacterium Ellin345
  CDS (1)..(1869): transl_table=11
atggcccaacacgaggaagaacaactaggcaaggcgtacgacagtcgcttaatgaagcgcctgctcggctatttgcgtccatatcagtggcaggtctatgtcgcgatcgcggccatcattctaaaggccggtgcggacgtagtcgggcctgtcctgacccaagtcgcgattgataaatacctcgccaagaggtccgtctctcatctgttcgaccgcttcctgagcgtgaacccgctcaccggtatcggacagattgccggcctctacgtcattctgctcctcctgagtttcgccttcgaatacgcgcaaacatatctcatgcagtgggtcggacagaaagccatgttcgacatgcgggccgagatcttccgccatctccagcgcctgcacattggcttcttcgacaagaaccccgtcggccgcctcgtgacccgcgtcaccagcgacgttgatgctctgaacgagatgttcacttcgggagtggtctcgatcgttgaggacgtcttcgtgctctccgggatcatgtacgtcatgctccggatgaactggcgcctggccttgttggtcttcgccgtgctgccaatcatcacatgggcgaccggtatattccggcgggcggtgcgcgatgcctatcgcaagattcgcgtagccatcgcgcgtattaattcgtacctccaggaacacataaccggcatcgtcgtcctccagctcttcaaccgtgagaagcgttcgtacgacaagttcgaagaagtaaaccgcgcacacatggacgccttcaaagacgcgatcatggcgcacgccgtctattaccccatcgtcgagttcctgtcggcagtggcaattgcaagcgtcatctggttcggtggcggacaatttctccgcaatgcacccggaatcagcatcggcatcctggtcgcgtttattcagtactcgcagcgcttctttcgtcctatccaggatttcagcgaaaagtacaacatcgtgcagcaggccatggccgcttgcgagcgcatcttcaagctcctggacaccccggttgagatcgacgagttggcccagccgaaatccgctaccggttcgggccgcatagagtttgaccatgtgtggttcgcctatcgcaaggacccgaataagaacgacgaatgggattgggttctgcgcgacgtgagcttcacgctagaacccggggaaaccgtggctgtcgtcggccacaccggggctggcaagacaacgctcatttccctgctcctgcgcttttacgacgtgcagcaaggcgcgatcaagattgacggcatcgacattcgcgaaatgtcgttagccgaccttcgccgccgttacggtgtggtcctgcaggatccgttcctcttcacgggcaccatcggcgagaatattcgcctgggtaccgagtggatcaccgacgagcaaatgatgaaggccgccgaagaagtgaacgtcgccgagttcatccgctcgcaaccggcgggattcgagcagggtgtgcatgaacgcggcagcacgctatccacgggacaaaagcagctcatctccttcgcgcgagcgttggcgcacaatccgaagatcctcatcctcgacgaagccacgtcgagcgtagacaccgagacagagtttcgcgtgcgcgctgcactgtctaagctcgtcgaaggacgcacttcgctcatcatcgcgcaccgactttcgactattcagcgcgccgacaagatcatcgtgatgcacaagggcaaggtccgcgagatgggcagccatcagcaactcctcgcacaacgaggcatctattacaagctctaccagttgcagtacaaggaccaggaattgccgctggcgcccacgcttagccctgctaccgactag

SEQ ID NO: 4543 - protein, 622 aa, Acidobacteria bacterium Ellin345
MAQHEEEQLGKAYDSRLMKRLLGYLRPYQWQVYVAIAAIILKAGADVVGPVLTQVAIDKYLAKRSVSHLFDRFLSVNPLTGIGQIAGLYVILLLLSFAFEYAQTYLMQWVGQKAMFDMRAEIFRHLQRLHIGFFDKNPVGRLVTRVTSDVDALNEMFTSGVVSIVEDVFVLSGIMYVMLRMNWRLALLVFAVLPIITWATGIFRRAVRDAYRKIRVAIARINSYLQEHITGIVVLQLFNREKRSYDKFEEVNRAHMDAFKDAIMAHAVYYPIVEFLSAVAIASVIWFGGGQFLRNAPGISIGILVAFIQYSQRFFRPIQDFSEKYNIVQQAMAACERIFKLLDTPVEIDELAQPKSATGSGRIEFDHVWFAYRKDPNKNDEWDWVLRDVSFTLEPGETVAVVGHTGAGKTTLISLLLRFYDVQQGAIKIDGIDIREMSLADLRRRYGVVLQDPFLFTGTIGENIRLGTEWITDEQMMKAAEEVNVAEFIRSQPAGFEQGVHERGSTLSTGQKQLISFARALAHNPKILILDEATSSVDTETEFRVRAALSKLVEGRTSLIIAHRLSTIQRADKIIVMHKGKVREMGSHQQLLAQRGIYYKLYQLQYKDQELPLAPTLSPATD

SEQ ID NO: 4544 - DNA, 1767 bp, Myxococcus xanthus DK 1622
  CDS (1)..(1767): transl_table=11
gtgtcttcccccgcgaacgattcgaaaagcagtgcctcccctggcgtcaccgtccggcgactgctgaagctggcgcgccccgaactgctgcccctggccgcgggcaccctcttcctcctcatcagcagcggagccacgctggcctatccccgcgccattggcgacctggtggaccaggccctcaccgcgcgcgaccggtatgtggtggaccggctcgcgatgctgatgctcgccgtgttcacggtgcagggcatcgccatggcgctgcgcatctacctcttcaccaacgccggcgaacgcgtggtgtcgcggctgcgcaaggacctcttccgcgccctgctgtcccaggaggtgggcttcttcgattcgcgccgcacgggcgagctcaccagccggctctcctcggacaccaccgtcctgcagaccaccgtcacggccaacgtgtccatgatgctgcgctacgtcgtcacggccctgggcggcgtgggcctgctgctctacacgtccgtccagctcacgctggtgatgctggccgtcatcccgcccgtggccattggcggcgtgttctacgggcgccgggtccgggtgatttcccgtcaggcccaggacgcgctcgccgccagcggcgaggtggccgaggaagacctgtccggcatccgcaccgtgcgctccttcgccgcggagcggcacgaggtggagcgctacagcgtcgccgtggagcgctccttcacgctggcgaagaagcgcgcgctccagacctccgtcttcatgggcgtggcctccatcgcggggtatggctccatcgccgcggtgctctggtacggaggccggctggtggtggaaggcggcctctccgtgggcgagctcacctcgttcctcatctacaccatgctggtggccttctcgttcagcggcatcgcggagctgtgggcggacttcatgcgcgccagtggcgccgccgagcgcgtcttcgaactgctggaccgcaagcccgccatcggcgctggcggcgagcagctgaccgacctgcgcgggcacgtgcagttccgcggcgtgcacttcgcctaccccagccgtcccgacgtgccggtgctccagggcctggacctggagctgcggccgggcgaggtggtggcggtggtgggcccctccggcgcgggcaagtccacgctggcctccctgctgtcgcgcttctacgacccgcagaacggcgaggtgctgctggacggccatccgctcaccgccctggagccggagtggctgcgccgcaacatcggcatggtggcgcaggagccccagctcttctcctgctccatcgcggacaacatccgctacggccggcccggcgccaccgacgcccaggtggaggaggccgcccgcgccgccaacgcccacgcgtacatcgagcgcttcccggaaggctacggcacccaggtgggcgagcgcggcgtgcagctctccggtggccagaagcagcgcgtggccatcgcccgggcggtgctgaaggaccctcgcctgctcatcctggacgaggccaccagcgccctggacgcggagagcgagcacctggtgaaggacgcgctggagcgcctgatgaagggccgcaccacgctcatcatcgcccaccgcctgtccaccgtggccaacgcggaccgggtgctggtgctcgacggcggcgtcgtcatccagagcggcacccacgcctccctcatgagccaggagggcctgtaccggcgcctggtggagcggcagtttgtcgcagcttga

SEQ ID NO: 4545 - protein, 588 aa, Myxococcus xanthus DK 1622
MSSPANDSKSSASPGVTVRRLLKLARPELLPLAAGTLFLLISSGATLAYPRAIGDLVDQALTARDRYVVDRLAMLMLAVFTVQGIAMALRIYLFTNAGERVVSRLRKDLFRALLSQEVGFFDSRRTGELTSRLSSDTTVLQTTVTANVSMMLRYVVTALGGVGLLLYTSVQLTLVMLAVIPPVAIGGVFYGRRVRVISRQAQDALAASGEVAEEDLSGIRTVRSFAAERHEVERYSVAVERSFTLAKKRALQTSVFMGVASIAGYGSIAAVLWYGGRLVVEGGLSVGELTSFLIYTMLVAFSFSGIAELWADFMRASGAAERVFELLDRKPAIGAGGEQLTDLRGHVQFRGVHFAYPSRPDVPVLQGLDLELRPGEVVAVVGPSGAGKSTLASLLSRFYDPQNGEVLLDGHPLTALEPEWLRRNIGMVAQEPQLFSCSIADNIRYGRPGATDAQVEEAARAANAHAYIERFPEGYGTQVGERGVQLSGGQKQRVAIARAVLKDPRLLILDEATSALDAESEHLVKDALERLMKGRTTLIIAHRLSTVANADRVLVLDGGVVIQSGTHASLMSQEGLYRRLVERQFVAA

SEQ ID NO: 4546 - DNA, 1980 bp, Rhodococcus sp. RHA1
  CDS (1)..(1980): transl_table=11
atgagcgatcgcgcaaccaccaccactgccgaaaggcccgccggcccgcgtattccaggaccggtcgctccgggtgccccggggtccaagccgaacgacctgtggccgtccaccaagcggctgctgaggcggctgggtccccaccggatcgccgtcggcatcgttatcctggtcgctgccgtgtcggtggtgctcacctcgatcgcgccgcggatgctcggtcagggcacgaacctgatcttcgacggcatcatcggcgcgcagttgcccgccgggatgtcgaaggatcaggccgtagccgcgttgcgggccgacggtcagaacacgttcgccgacatggtgtccggcatggccgtcgtgcccggtgtcggaatcgacttcagtgcgctcggccgggtgctggcgatcgtgctggccctgtacctggggtcggcggtgttcatgtggctgtcgggtttcctgctgaacatcatcgtgcagggtgtcgtgaagaatctgcgcgccgaggtcgaacggaagatccatcgacttccgctgcgctacttcgactcccactcccgcggcgacctgctgagccgggtcaccaacgacatcgacaacgtctcgcagtcgttgcagcagacgatgagtcagctgatcgtgtcggcgatgacggtgatcggcatcctcgtgatgatgatcgtcatctcgccgctgctcgccttgatcgcggtgctgacggtgccgctgtcgatcctggtgaccgcgcagatcgcgaaacggtccaagacccacttcgtgtcgcagtggaagtcgacgggagcgctcaactctcacgtggaggaggcgtacacgggccacgaactggtcaccgtgttcggccgcagccgcgaggtggaggcccggttcgaggagcagaacgaggcgctctaccaggccagttaccgggcccagttcatctcgggcctgatcatgccggcgatcatgttcctcggaaatctcaacttcgtggccatcgccgtgctcggtggcatgcgggtggcgtccggcacgatgagcctcggcgacgtgcaggcgttcatccagtactcgcgccagttcacccagcccctcacccagatcggggccatggtcaacctcatgcagtcgggtgtggcgtccgccgagcgggtgttcgccatcctcgacgaggacgaggaggaacccgacctcgccgaagcgcccacgccggccgagccccgtgatgcgggtcgcgtccatacgttcggccgggtggagttctcggacgtgtcgttcagctactcgccggagaagccgctgatcgagaacctgtcgctggtggcggaacccggtcagatggtcgccatcgtcggacccaccggcgccggcaagaccacactcgtcaacctgatcctgcggttctacgaactcgacggcggcaagatcctcctcgacggcgtcgacaccgccgagatgtcgcgcgacgacctgcggtcccgcatcggcatggtgctgcaggacgcctggttgttcggcggcaccatccgcgacaacatcgcgtacggacgtcccgacgccaccgaggacgagatccaggcggccgcacgaatcagctacgtcgaccggttcgtccactcgctgcccgacggctacgacaccgtcatcgacgaagagggcagcaacatcagcgccggtgagaagcagctgatcaccatcgcccgcgcgttcatctcgcagccgtcgatcctgatcctcgacgaggcaaccagttccgtcgacacccgcaccgagttgctcgtgcagcacgccacggcggtcctgcgcagcgatcgcacgagtttcgtgatcgcacaccgcttgtcgaccatccgcgacgccgacctcatcgtcgtcatggaggacggtcgcatcgtcgagcagggcagccacgacgacctgctcctcacccgcggcgcgtactaccgcctctacaacagccagttcgtcggcgccgaagtctga

SEQ ID NO: 4547 - protein, 659 aa, Rhodococcus sp. RHA1
MSDRATTTTAERPAGPRIPGPVAPGAPGSKPNDLWPSTKRLLRRLGPHRIAVGIVILVAAVSVVLTSIAPRMLGQGTNLIFDGIIGAQLPAGMSKDQAVAALRADGQNTFADMVSGMAVVPGVGIDFSALGRVLAIVLALYLGSAVFMWLSGFLLNIIVQGVVKNLRAEVERKIHRLPLRYFDSHSRGDLLSRVTNDIDNVSQSLQQTMSQLIVSAMTVIGILVMMIVISPLLALIAVLTVPLSILVTAQIAKRSKTHFVSQWKSTGALNSHVEEAYTGHELVTVFGRSREVEARFEEQNEALYQASYRAQFISGLIMPAIMFLGNLNFVAIAVLGGMRVASGTMSLGDVQAFIQYSRQFTQPLTQIGAMVNLMQSGVASAERVFAILDEDEEEPDLAEAPTPAEPRDAGRVHTFGRVEFSDVSFSYSPEKPLIENLSLVAEPGQMVAIVGPTGAGKTTLVNLILRFYELDGGKILLDGVDTAEMSRDDLRSRIGMVLQDAWLFGGTIRDNIAYGRPDATEDEIQAAARISYVDRFVHSLPDGYDTVIDEEGSNISAGEKQLITIARAFISQPSILILDEATSSVDTRTELLVQHATAVLRSDRTSFVIAHRLSTIRDADLIVVMEDGRIVEQGSHDDLLLTRGAYYRLYNSQFVGAEV

SEQ ID NO: 4548 - DNA, 1833 bp, Trichodesmium erythraeum IMS101
  CDS (1)..(1833): transl_table=11
atgagtagaaactcaagcaaaaataataatagcaaatattacactaaaaacattgaaacagactggcaactaattcaacgcttgctaaactacacccgaccttacaaaaccttagtagcaacatcactaatattattattaccactatcaattgcaggtacaattcaaccactattagtcggacaagcaatttctctaattttaagagaaaaaacttggctatttctccaacaaatatcattatctcaaggactaaatactttagcaataatattaaccctaagcatcattgtacaattcctatttcaatctgtacaaggttttttagtagaaaaaatcggacagcaaattaccgctgatattagaaatgatttatttaaacacgttctttccctaggagtaaaattttttgacactgcccctgtaggtaaattaattactcgccttaccagcgatgttgaagctttaggagatgtcttttctacaggtgctattgggataataagggatttattctcaattttaatcattgcagtcaccatatttattcttcaatggcaattggccttaacactcatactaatgatgttaccagtaacagcaattgttatctatttccagcaaaaatatcggcacgctaattacaaagctagagatgaactttccgatttaaattctcagctacaagaaaacttagttggcattgaaatagtgcaattatttcgcagagaaaagttcaactcagaattatttagagccaataatataaattatgtaaaagcattagataaaactatcttttatgactctgctatctctggtattttagaatggatttctttaattgctatcgctacagttttattcttaggaggacaattttttttagcaggaaatctagactttggtactctatcttccttcattttatatgctcaacgtttattcaaccccttacgacaatttgctgaaaaatttacagctattcaagctggattaaccgccattgaacgcattgcaaatattctcaacgaaaaaattgaaattattgacccagaaaaagaaattcaaaagttatcaaaccttcaaattaataattcccaaataggtgaaattagatttgaaaatgtctggtttgcctacaaatcaaatcaatatattctcaaaaacattaactttactattaaaccaggagaaaaaattgccttagtcggaccgactggagccggaaaaagttctataattcgcttactttgtcgtttatatgatgtaaataaaggtaggattttagttgatggaattaatattaaaaacttacctcaagcagaattacggaaacatattggtgtgattctacaagatggatttttatttactggagatgtaaaaagtaatattactctcggagaaaaatattcatttgaagaaattaaagcatcagcaaaaagcacaaatatagataaattcattgccgaattaccccaaggatataatactcaattacgagaacgaggatctaacatttcaggtggtcaaaaacaattattagcatttgcccgtgctgctattcgtaacccgaaaattttagtacttgacgaagcaactgctagtttagatgtcagaacagaagctttaattcaatcagcattagaaaaaattttagcacaacgaacaggtattattattgctcatcgactttccacaattagaaatgttaatcggatatttgtactgaaaacaggagaattaactgagtcaggtacccatcaagaattactacaacaaaacggtacttatgctagtttatataaattgcaaacgttaggaacttga

SEQ ID NO: 4549 - protein, 610 aa, Trichodesmium erythraeum IMS101
MSRNSSKNNNSKYYTKNIETDWQLIQRLLNYTRPYKTLVATSLILLLPLSIAGTIQPLLVGQAISLILREKTWLFLQQISLSQGLNTLAIILTLSIIVQFLFQSVQGFLVEKIGQQITADIRNDLFKHVLSLGVKFFDTAPVGKLITRLTSDVEALGDVFSTGAIGIIRDLFSILIIAVTIFILQWQLALTLILMMLPVTAIVIYFQQKYRHANYKARDELSDLNSQLQENLVGIEIVQLFRREKFNSELFRANNINYVKALDKTIFYDSAISGILEWISLIAIATVLFLGGQFFLAGNLDFGTLSSFILYAQRLFNPLRQFAEKFTAIQAGLTAIERIANILNEKIEIIDPEKEIQKLSNLQINNSQIGEIRFENVWFAYKSNQYILKNINFTIKPGEKIALVGPTGAGKSSIIRLLCRLYDVNKGRILVDGINIKNLPQAELRKHIGVILQDGFLFTGDVKSNITLGEKYSFEEIKASAKSTNIDKFIAELPQGYNTQLRERGSNISGGQKQLLAFARAAIRNPKILVLDEATASLDVRTEALIQSALEKILAQRTGIIIAHRLSTIRNVNRIFVLKTGELTESGTHQELLQQNGTYASLYKLQTLGT

SEQ ID NO: 4550 - DNA, 1839 bp, Synechococcus sp. CC9311
  CDS (1)..(1839): transl_table=11
atggctggttcggattttcagagggtcaagcggctaggtcgttatttgggccgagaccgacgacggctgacgctcacgttggtgctgctcattccggtggcacttgccggcgcgattcagccgctgttggtcggccaggcgattgccgttctacggcgtgttggtggggccgctaacgaatcggtgatccctctctttcaggggctcgacagcacagttgcgatccgactgatcattctgatgttgctgggctccgttctggttcgcttggcacttcagggggtccagacgttcaatattcaagccgtcggccagcgtctcaccgctcgaatccgaaaggacttgtttgcacatgcgatgagtttgtccttgaggtttcatgacagcatgcctgtgggcaagctcctgacccgcctcactagcgatgtggatgcattggctgaagtttttgggagcggtgccgtcggtgtgctcggtgaccttgtcagcctgttggtcattgcggtttcgatgctgctgatcgagtggcgtttgggtttgttgctgttggtgacccaagtgcctgtaacactcgtgattgtttggctgcagaggcgatatcgcagggccaattatcgagtgagagaggagctatctcaactcaatgctgattttcaggaaaacctccagggccttgaggtggtgcagatgtttcgccgtgaagctgtcaacggagaccggtttcagagaactgggttggcatatcggagtgcagtgaatggcacgatcttttttgacagcagcatctctgcttttttggaatgggtgtctttaggcgctgttgccctagtgcttgctcttggcggatggatggtgacagcaggagcgatgggccttggcactctcacaaccttcatcctctattcacagcgtttgtttgatcctctgcgtcaaatggctgagcggtttacacagattcaggggggactgaccgccgtggaacggatcggagagctattggaggaacctctcgagattgttgaccatggcgcaacccgtggttcagcgcttgcttccgcttttggttccacgctgctccagaacgcttcatcctctcaatcccgtggtgaggtgatctttgaagaggtggactttgcctaccgacaagacgagccgatccttcgcaatctgagttttcggattgcgcccggtgagcatgttgcgcttgttggacctaccggatcaggcaagaccacggtgattcggctcctctgcaggttgtacgagccccagcggggacgaatccttcttgatggccaggacattcgcactttgcctttgcaagagctgcgtcgtcagttgggtgtggtgcttcaagacacctttctcttcagtggaacggtggctgacaacttgcgtttggatcgccccctcgatgaccagaaattgcaggaggtttgccgtgatctcggcctggatcccctgttaggtcgattgcccgaaggcttggaaaccgaattgagagagcggggcggaaatctcagctctggagaaagacagctgcttgctgtggccagggtggcgattcgcaacccaacggtcctggtgatggatgaagccactgcgtttatggatccctccacggaagccacccttcagcgggacttagatcgtcttctcaaccgccgcaccgcagtggtaattgcccaccggctcgctactgtcgaggcggctgatcgaattttggtacttcgccgaggaagcctgatcgaacagggcacccatcttcaattgagggccagtggcggtttgtatgccgaacttgcggatcttcaggagcgagggctcgccagactttga

SEQ ID NO: 4551 - protein, 612 aa, Synechococcus sp. CC9311
MAGSDFQRVKRLGRYLGRDRRRLTLTLVLLIPVALAGAIQPLLVGQAIAVLRRVGGAANESVIPLFQGLDSTVAIRLIILMLLGSVLVRLALQGVQTFNIQAVGQRLTARIRKDLFAHAMSLSLRFHDSMPVGKLLTRLTSDVDALAEVFGSGAVGVLGDLVSLLVIAVSMLLIEWRLGLLLLVTQVPVTLVIVWLQRRYRRANYRVREELSQLNADFQENLQGLEVVQMFRREAVNGDRFQRTGLAYRSAVNGTIFFDSSISAFLEWVSLGAVALVLALGGWMVTAGAMGLGTLTTFILYSQRLFDPLRQMAERFTQIQGGLTAVERIGELLEEPLEIVDHGATRGSALASAFGSTLLQNASSSQSRGEVIFEEVDFAYRQDEPILRNLSFRIAPGEHVALVGPTGSGKTTVIRLLCRLYEPQRGRILLDGQDIRTLPLQELRRQLGVVLQDTFLFSGTVADNLRLDRPLDDQKLQEVCRDLGLDPLLGRLPEGLETELRERGGNLSSGERQLLAVARVAIRNPTVLVMDEATAFMDPSTEATLQRDLDRLLNRRTAVVIAHRLATVEAADRILVLRRGSLIEQGTHLQLRASGGLYAELADLQERGLARL

SEQ ID NO: 4552 - DNA, 1821 bp, Solibacter usitatus Ellin6076
  CDS (1)..(1821): transl_table=11
gtggaagaagaggttcttggcaaggcatatgacgggcggctgatgcgccgcctgctcgggtacatgcgtccctaccggttgctggtggcgctatcgctggttttcctgctgctgcaatccgcgttgcaagtgctgggaccgttgctgaccaaaacggcggtggaccgctacatcgcgcccaccggcggacaaatcccggagtttctggcgcgcttcctgccggccgacgcgtgggatgggctgacgcgaataggtctagtatacctaaccgtactggccgcaaatttcgtgtgcgagttcattcagatgtatgtgatgcagtacacgggacagctggcgatgttcgatttgcggcgcgagctgatggagcacctgcagggacttgacctggccttctatgaccgcaatccggtggggcggctggtgacccgggtgacgaccgacgtggacgtgctgaacgaactgttcgcatcagggctggtgacgattctcggcgacattctggtgctggtcttcattctggcgatcatgttcagcttcagtccgacgctgacggcgatcatgttgacggcgatgccgttcgtgattctgacgacggtgatcttccggcgcagcgtgtcgcagagctaccggcggatccgcgtggccatcgccaagatcaactcattcttgcaggagcacattacgggcatcgcagtgctgcagttgttcaatcgcgaagaacgcagctgcaaggaattcgagcaggtgaatcgcgagcacatggaagcgttcaaggatgcgatcacggcttacggatggttctatcctgtggtggaatttctctccatgatggcgctggccgggattctgacgtacggcggattccgggtgcaggcggggcggctttcgttgggagtggtagcggcgtttctgcagtatggactgcggttcttccggccgattcaggatttgagcgagaagtacaacattctgcaatcggcgatggcgagttcggagcgggtgttcaagttgttggatacggaggcggcggtgctgcccccggaatccgcgcagccggcgccggcggggatcgcgccgatcgagttcgaccacgtatggttcgcgtataaggatgaggactgggtgttgcgtgacgtgagctttacgatcgcgccgggagagacgatcgcggtggtggggcacacaggcgcgggcaagactacgctgatcagcctgctgctgcgcttctatgacgtgcagagggggagcatcaaggtcggaggcgtggatgttcgcctatacggtccactggatctgcggcggatgttcggcgtggtgctgcaagatccctacctgttcacggggacgctggaagagaatatccggctcgggacagagaacatccgcgccgaagaggtggaggcggcggcggagcaggtgaacctgatggattttatccgcacgctgcccgagggattcgggcacacgatccgggagcgcgggagcgggctatcgacgggtcagaagcagttgattagcttcgcgcgggcgctggcgcacaatccgcggtacctgattttggatgaggcgacatcgagcgtggacacggagacggaatttcgcgtgcgggaagcgttgaaccggatggtggcgggcaggacgtcgatcgtgattgcgcaccggctttcgacaattcagcgggcggaccggattctggtgatgcataaggggcatctgcgcgagagcgggacgcaccaggagttgctggcgcagcgggggatttactggaagttatatcagctgcaatataaggatcaggagcgcgtggcggctgactga

SEQ ID NO: 4553 - protein, 606 aa, Solibacter usitatus Ellin6076
MEEEVLGKAYDGRLMRRLLGYMRPYRLLVALSLVFLLLQSALQVLGPLLTKTAVDRYIAPTGGQIPEFLARFLPADAWDGLTRIGLVYLTVLAANFVCEFIQMYVMQYTGQLAMFDLRRELMEHLQGLDLAFYDRNPVGRLVTRVTTDVDVLNELFASGLVTILGDILVLVFILAIMFSFSPTLTAIMLTAMPFVILTTVIFRRSVSQSYRRIRVAIAKINSFLQEHITGIAVLQLFNREERSCKEFEQVNREHMEAFKDAITAYGWFYPVVEFLSMMALAGILTYGGFRVQAGRLSLGVVAAFLQYGLRFFRPIQDLSEKYNILQSAMASSERVFKLLDTEAAVLPPESAQPAPAGIAPIEFDHVWFAYKDEDWVLRDVSFTIAPGETIAVVGHTGAGKTTLISLLLRFYDVQRGSIKVGGVDVRLYGPLDLRRMFGVVLQDPYLFTGTLEENIRLGTENIRAEEVEAAAEQVNLMDFIRTLPEGFGHTIRERGSGLSTGQKQLISFARALAHNPRYLILDEATSSVDTETEFRVREALNRMVAGRTSIVIAHRLSTIQRADRILVMHKGHLRESGTHQELLAQRGIYWKLYQLQYKDQERVAAD

SEQ ID NO: 4554 - DNA, 1752 bp, Magnetococcus sp. MC-1
  CDS (1)..(1752): transl_table=11
gtggttcaagatacccaactcatccgccgtctgctgcgcttgatctggccgttccgttggtatgtcattaccgcactgctctgtatgggggtgatggcggctaccaatggggccatcgcctttatggtcaaaccgctggtggatgacgtctttatgcagaaagacgcctccctcgttacccttattcccattgtggttatgggtatttttatcgtgcgggcggtggtcttttttctgcaatcctatctgatgcagagcttgggctttaagattgtgcggctgttgcaggtgcggctctacaaaaagattctgcatttggatatggagcgttttaataccgaatccaccggtagttttatctctcgcatgatctttgatattgatcagctcaagcgggtggtctccaccgccttggccgatattacccgggagctgttgacggtcacttttctgtttggggtggtggtctatcgcgccgcagagctggcctgggtctcggtggttggggtgcctttagcggtctatctgatctacctgttcgggcgaaaaatgcgcaccatcagccgccgccaacaagagctgatggaggatgtcaccagccatctggaggagaccatcgccggggttaaggtggtcaaagcctactgtatggagggctatgaacatggggtgtttcggcgtattagccagcgggtattaaaaaacaacctgcgctcagcctttatcaacgccatctccaagccctccattgatctggtggcgggtattgccatctcgctggtggtgttgacctcggcccatgccattttggatggtaaaaccacccctggtacgctcttttcgttccttaccgcgctcatgatggcttacagtccattgaagcgtattacgatgctctataatgggttacaagcgggattggcggcggcgcaacgggtgtttgagcggctggatcaatatcctgccattcaaaatgtgccggaggccggtaagctgcaaccccttaccaaagcgctgcgttttgaaaatattggctttcgttatcagagcagcgaggggccggtgctgcgaggcatcaacctacacattggggtgggcgaaaaggttgcgctggttggtcaaagcgggtgtggtaaaagcaccctggccaatctggtgccgcgcttttatgagccgcagcagggggcgattctgtttgatggggtcgatattcgcagtgtgaccatgcgctctttacgccagcagattgccatggtgacccaggagaatgtgctgtttaacgataccatccgcaacaatgtggcctatggcaagctcagagccagcgatgaggagatctgggcagccctggaggcggccaatgccaagagctttgtggagcagttacccgaggggctggatgccatgatcggcaataagggggccaagctttcgggtgggcagcggcaacgcattgccattgcccgcgccctgctcaaatcggcctctgtgttgattttggacgaagcaaccagcgccttggatagcgagagtgaacagttggtgcaagaggcgctggatcgtctgatggaccgctacaccacgctggtgattgcccatcgtctatccaccattcgcaatgccgaccgcattgtggtgatgcatgaaggggcggtggcggagatgggcacccatgatagcttgctggcgcaggggggcctctatgccaaactctgtgagattcaatttgatacccaaacggcgaaagagtaa

SEQ ID NO: 4555 - protein, 583 aa, Magnetococcus sp. MC-1
MVQDTQLIRRLLRLIWPFRWYVITALLCMGVMAATNGAIAFMVKPLVDDVFMQKDASLVTLIPIVVMGIFIVRAVVFFLQSYLMQSLGFKIVRLLQVRLYKKILHLDMERFNTESTGSFISRMIFDIDQLKRVVSTALADITRELLTVTFLFGVVVYRAAELAWVSVVGVPLAVYLIYLFGRKMRTISRRQQELMEDVTSHLEETIAGVKVVKAYCMEGYEHGVFRRISQRVLKNNLRSAFINAISKPSIDLVAGIAISLVVLTSAHAILDGKTTPGTLFSFLTALMMAYSPLKRITMLYNGLQAGLAAAQRVFERLDQYPAIQNVPEAGKLQPLTKALRFENIGFRYQSSEGPVLRGINLHIGVGEKVALVGQSGCGKSTLANLVPRFYEPQQGAILFDGVDIRSVTMRSLRQQIAMVTQENVLFNDTIRNNVAYGKLRASDEEIWAALEAANAKSFVEQLPEGLDAMIGNKGAKLSGGQRQRIAIARALLKSASVLILDEATSALDSESEQLVQEALDRLMDRYTTLVIAHRLSTIRNADRIVVMHEGAVAEMGTHDSLLAQGGLYAKLCEIQFDTQTAKE

SEQ ID NO: 4556 - DNA, 1797 bp, Shewanella sp. ANA-3
  CDS (1)..(1797): transl_table=11
atgcgcccaacattgtattttgaaggtcccatcgataagctcaattggcacgtagttaagttgctctggccttatttgctcgaatacaagggccgggtggctctagccatgtcttgccttatcgtcgctaagcttgccagcgtgggcttgccctttattctgaaagacttagtcgatactttggatgccaataaaaccgcgcaggccttgagtgtgcctatcggattagttttagcctacggcgcagtgcggctgttaacagtcatcacgggtgaaatccgtgacaccttatttggccgtgtcacagagcgtgcaattcgccgattgggcctcgcggtgttcgaccacctgcatcgactcgatttggattttcaccttgagcggcgtacgggcggcttatcgcgagatattgaacgcggtaccagtggtgtgagcttcttgatgcgctttatggtgtttaacatagtgccgaccctgctagaaatcgccatggttattggtattttcttttttaattatggcattgcctttgccgctatcacttttacctctgtgatggcctacatttggttttctgtggtggcgactgagtggcgcaccgaatacgtccgggatgcggccaaggccgactccctctccaacacccgcgccatcgacagcctgctcaactatgaaaccgtgaagtattttaataatgagaaatatgaatcggaccgttatgaccaagccttagaccaatgggaagtggctaaacgtaagaatcgtttatcactatttgctctcaacggtggccaggcgctgattatcgcgttggctatgacggcgatgatggcgttagccgcctataaggtgactaataatgagatgaccttaggtgactttgtactgatcaatgcctttatgatgcagctctttatgccgctcaactttttaggatttgtctaccgtgaaatccgcggagccctagccaatattgaacggatgttcagtttgctcgataaacaccctcgcatagtagataaacccgatgcctttgactttgagcctaagcgcggcgagctcagttttgagcatgtgagttttagctacgatgacaggcccatattgcgtaacgttagctttaaggtgacggcggggaaaaaagttgccgtcgttggagatagcggcgccggaaaatcaacactcatcaagttgctgttccgtttttacgatgtggagcaagggcgcattttgattgatggacaagatattcgccaattaacccaagatgcattgcgccgcgccattgccatagtgccgcaggatacagtgttatttaatgattccttagtggagaacattcgttatggtcgtcccgatgcgacggatgaagaagtgcgccatgccatcaaactcgcgcatttagagcattttatcgcgtcgctctcccaaggttgggataccaaagtgggtgagcggggcttaaagctctcgggaggggagaaacagcgcgtggccattgcgcgggcgattttaaaaggctctccggtgttagtgtttgatgaggctacatcctccctcgatagtcgctcggaacaggcgattctgtcggcactgcgcgaggtcgccaaagggcataccagtttagtggtggcgcatcggttatcgaccatagtcgacgccgaccaaatcgtggtcttaagccaaggggaaattgtcgagcaggggaatcatcagtccttactggctcagaatggtctctacgctaagttgtggcgcatacaaaatgagcaacaacagctttcggtagaagtgtaa

SEQ ID NO: 4557 - protein, 598 aa, Shewanella sp. ANA-3
MRPTLYFEGPIDKLNWHVVKLLWPYLLEYKGRVALAMSCLIVAKLASVGLPFILKDLVDTLDANKTAQALSVPIGLVLAYGAVRLLTVITGEIRDTLFGRVTERAIRRLGLAVFDHLHRLDLDFHLERRTGGLSRDIERGTSGVSFLMRFMVFNIVPTLLEIAMVIGIFFFNYGIAFAAITFTSVMAYIWFSVVATEWRTEYVRDAAKADSLSNTRAIDSLLNYETVKYFNNEKYESDRYDQALDQWEVAKRKNRLSLFALNGGQALIIALAMTAMMALAAYKVTNNEMTLGDFVLINAFMMQLFMPLNFLGFVYREIRGALANIERMFSLLDKHPRIVDKPDAFDFEPKRGELSFEHVSFSYDDRPILRNVSFKVTAGKKVAVVGDSGAGKSTLIKLLFRFYDVEQGRILIDGQDIRQLTQDALRRAIAIVPQDTVLFNDSLVENIRYGRPDATDEEVRHAIKLAHLEHFIASLSQGWDTKVGERGLKLSGGEKQRVAIARAILKGSPVLVFDEATSSLDSRSEQAILSALREVAKGHTSLVVAHRLSTIVDADQIVVLSQGEIVEQGNHQSLLAQNGLYAKLWRIQNEQQQLSVEV

SEQ ID NO: 4558 - DNA, 1884 bp, Nocardioides sp. JS614
  CDS (1)..(1884): transl_table=11
gtgtcggggatgcacggaggcggggccgcctggcgactgctgcggtcggaccgcagcatcgtccacaaccggctcgagcgcggcacggtacgccgcgtggtcggcttcgcccgaccgcaccgcaggctgatcggcgtcttcctggtgctgaccgtgatcgacgccggcctcgtcgtggtcagcccgctcctggccaagagcatcatcgacgacgggatcaagcagggcgaccgcaccctgatcacgctgctcgcgctcgcgatggccgcgaccgccctggtcagcgccgtgctcgcggtcggtgtgggctggctctcgtcccgcatcggtgagggcctgatctacgacctgcggacccgcgtgttcgcccacgtgcaacgtcagtcgctcgcgttcttcacccgcacccagaccggggccctggtctcccggctgaacaacgacgtgatcggggcgcagcgcgccttcacctcgacgctctccacgacggtcgccagcaccatctcggtggtggtcgtcggcatcaccatggtcgccctgagctggcaggtgaccctcctctgcctggcgatcttcccgctcctggtgctggtctcgcggtgggtgagcgcccgcctcgccggcctgacccgtgaccagatggacggcaacgccgacatgggcaacgcgatgaccgagcggttcaacgtcggcggcgcgatgttgctcaagctgttcgggcgccgagccgacgaggatgcgctgttcgccgtcaaggccgcccgggtccgcgacctgggggtccggatcacgctgctcacccgcctgttcggggcctcgatgatggccgtcccggcgctggcgaccgcactggtctacgggctcggcggacagctcgtcgtcgacgagacgctcacggtcggcaccctcatcgccctcgccaccctgctcctgcggctcctcgggccgttgcagagcctctcgaacgtccggatcgacgtgatgaccgcgctcgtgagcttcgagcgggtcttcgaggtgctcgacctgccctcgctgatcgaggagcggccggacgcgacgaggctgcctccgggcgccgcccgcctggagttcgaccacgtcgcgttcgcctacccccgcgcggacgagatctcgctcgcctcgctcgaggtggtcgcccgcagcgagtcccgggacaccggccaggtgctcaccgacatcagcttcaccgccgagccgggccagatggtcgcgctcgtgggtccctccggtgccggcaagaccaccgtcacccacctcgtcgcccgcctgtacgacgccggcgccgggtcggtgcgggtcggcggccacgacgtacgtgacgtgaccctgcagtcgctggaggacgccgtcggctacgtcacccaggacgcgcacatgttccacgacacgatccgcgccaacctgctctacgcccgcccgggcgccacggacccggaggtctgggcggcgctggaggccgctcagatcgccaccctggtgcgcgggctgccggacggcctggacacggtcgtcggcgaccgcggctaccggctctccggaggcgagcggcagcggctggcgatcgcgcggctcctcctgaaggccccggcgatcgtcgtgctcgacgaggcgaccgcgcacctggacagcgagtccgaggccgcggtccagcgggcgctggacgcggcgctcgagggccgcacgtcgctggtgatcgcgcaccggttgtccacgatccgcgacgccgaccagatcctcgtgctcgacgacggccggatcgtccagtccggcactcacgcggagctgctcgcccggggcggcctgtacgccgacctgtaccgcacccagttcatcgaggaccagccgtccgcgacggtctga

SEQ ID NO: 4559 - protein, 627 aa, Nocardioides sp. JS614
MSGMHGGGAAWRLLRSDRSIVHNRLERGTVRRVVGFARPHRRLIGVFLVLTVIDAGLVVVSPLLAKSIIDDGIKQGDRTLITLLALAMAATALVSAVLAVGVGWLSSRIGEGLIYDLRTRVFAHVQRQSLAFFTRTQTGALVSRLNNDVIGAQRAFTSTLSTTVASTISVVVVGITMVALSWQVTLLCLAIFPLLVLVSRWVSARLAGLTRDQMDGNADMGNAMTERFNVGGAMLLKLFGRRADEDALFAVKAARVRDLGVRITLLTRLFGASMMAVPALATALVYGLGGQLVVDETLTVGTLIALATLLLRLLGPLQSLSNVRIDVMTALVSFERVFEVLDLPSLIEERPDATRLPPGAARLEFDHVAFAYPRADEISLASLEVVARSESRDTGQVLTDISFTAEPGQMVALVGPSGAGKTTVTHLVARLYDAGAGSVRVGGHDVRDVTLQSLEDAVGYVTQDAHMFHDTIRANLLYARPGATDPEVWAALEAAQIATLVRGLPDGLDTVVGDRGYRLSGGERQRLAIARLLLKAPAIVVLDEATAHLDSESEAAVQRALDAALEGRTSLVIAHRLSTIRDADQILVLDDGRIVQSGTHAELLARGGLYADLYRTQFIEDQPSATV

SEQ ID NO: 4560 - DNA, 1803 bp, Azoarcus sp. BH72
  CDS (1)..(1803): transl_table=11
atgtctcgcgccgatgcgccggctccatccagtctcagaatctactttcgcctgctcggttacgtccgcccctacgtcggacaattcgtcctgagcattgtcggctttctgatctttgcttcatcccagcccatgctcgccggggtgatcaagtatttcgtcgacgggctcaacgacccgggcgcgacgccgttcaccggcgtgccgctgctcgccagcctgccgctgatgtcggcggtgccggtgctgatcatcctgatcgtggtgtggcagggcatcggctcctacctgggcaactactttctcgccaaggtttcgctggggctggtgcacgacttgcggatggcgctgttcgacagcctgctgcggctgcccaaccgctatttcgacaaccacaactccggccatctggtatcgcgcatcaccttcaacgtcacgatggtcaccggcgccgccaccgatgcgatcaaggtggtgatccgcgaagggctgaccgtggtgttcctgttcggctacctgttgtggatgaactggaagctgaccctggtgatggtggccatcctgccggtgatcgggctgatggtgaccagcgcaagccgcaagttccgcaagcagagcaagaagatccaggtggcgatgggcgatgtcacgcacatcgcctcggagaccatccagggctaccgcgtcgtgcgcagcttcggcggcgaggcttacgagtcgcgccgtttccaggccgccagcgaagacaacaccgccaagcagttgcgcatggtgaagaccggcgccacctacacgccgatgctgcaactggttacctatgtggcgatggcggcgttgctgttcctggtgctgttgctgcgtggcgacgcttcgcccggcgacctcgtcgcctacatcaccgccgcaggcctgttgcccaagccgatccgccagttgtccgaagtcagttccacggtacagaagggcgtcgccggcgcggagagcatcttcgagcagctcgacgagccggccgagctggaccgcggcacggtggagcgcgagcgcatcgccggcaggctggaagtgcgcggcctgagcttccgctatccgggtaccgagcgggtggtgctggacgacatcagcttcgtcgtcgaaccgggccagatggtggcgctggtggggcgttccggcagcggcaaatcgacgctggcgagcctggtgccgcgcttctaccaccatgagcagggccagatcctgctcgatggcgtcgaggtcgaggattacacgttgcgcaacctgcgccgccacatcgcgctggtgacccagcaggtgacgctgttcaacgataccgtcgccaacaacatcgcctacggcgatctcgccgaagcgccgcgcgcgcaggtcgaggccgccgccgaagccgcctacgcgcgcgagttcatcgaccgcctgccgcagggcttcgacaccctggtgggcgagaacggcgtgatgctgtcaggggggcagcgccagcgcctcgcgatcgcgcgcgcgctgctgaaggacgcgcccatcctgatcctcgacgaagccacctcggcactcgacaccgagtccgaacgccatatccaggccgcgctcgacagcgcgatgcgcggccgtaccacgctggtgatcgcgcaccggctgtcgaccatcgagaaggccgacgtgatcatggtgatggagcagggccgcatcgtggagcgcggcagccacgccgaactgctggcggccggcggcgcgtatgcgcggctgcatgcgatgcagttccgcgacgaggcggaggccgccgaaagctaa

SEQ ID NO: 4561 - protein, 600 aa, Azoarcus sp. BH72
MSRADAPAPSSLRIYFRLLGYVRPYVGQFVLSIVGFLIFASSQPMLAGVIKYFVDGLNDPGATPFTGVPLLASLPLMSAVPVLIILIVVWQGIGSYLGNYFLAKVSLGLVHDLRMALFDSLLRLPNRYFDNHNSGHLVSRITFNVTMVTGAATDAIKVVIREGLTVVFLFGYLLWMNWKLTLVMVAILPVIGLMVTSASRKFRKQSKKIQVAMGDVTHIASETIQGYRVVRSFGGEAYESRRFQAASEDNTAKQLRMVKTGATYTPMLQLVTYVAMAALLFLVLLLRGDASPGDLVAYITAAGLLPKPIRQLSEVSSTVQKGVAGAESIFEQLDEPAELDRGTVERERIAGRLEVRGLSFRYPGTERVVLDDISFVVEPGQMVALVGRSGSGKSTLASLVPRFYHHEQGQILLDGVEVEDYTLRNLRRHIALVTQQVTLFNDTVANNIAYGDLAEAPRAQVEAAAEAAYAREFIDRLPQGFDTLVGENGVMLSGGQRQRLAIARALLKDAPILILDEATSALDTESERHIQAALDSAMRGRTTLVIAHRLSTIEKADVIMVMEQGRIVERGSHAELLAAGGAYARLHAMQFRDEAEAAES

SEQ ID NO: 4562 - DNA, 1881 bp, Nostoc punctiforme PCC 73102
  CDS (1)..(1881): transl_table=11
atgagcatctatcaatctctcaaaaaatcttatacgcaacctcgtcggcgtgaaaatgactggcggttgtttttgcgtctagtgccttacgcccgtcgtaacggacaactattggcgctgtcgatgtgcctactcatacccatcgccctagctaatgccgtccaacctctgttgattggccaagttatctccctaattcgcaatgaaccaagcgcttacgaatttctcaggaatcgccccttgtccgaaggattaaatatcctggagggattgttgtttgtggcgatcgcaatccgattgatttttacaggctaccagggttatttagtacagaagctagggcaacaaatcaccgccgcaattcgccaagatttatttcagcacgtaacatccctagcagtacgcttttttgaccgcacacccgtaggtaaattaatcaccagaatcaccagcgatgtggaagtcttaggcgatgtcttttctactggggcaattggcatcgtgtccaatttgttttccatgctggtgattttaggtttaatgttttccattgaatggcaactgacttgtttgctgctattgatgctattaccagttacctggttaattgtttacattcagcaacagtaccgcaaagccaattacaaagggcgggaagaactttctatattgaactcacagctacaagaaaatgtccttgggattaacgtagtgcagttattccgtagggaaaaatttaatgccgaactgtttcgtgccaccaacagccgctacacacagcaaatggatcaaaccattttttatgattcatttatttcagcaaccttagaatggattgggctgattgcgatcgcagctgttttgtgtatgggtggttggttactgttaggaaaaagtatagcttttgggactttatcggcatttgtcttgtatgcccagcgattatttgaccctttaagggattttgccgaaaaatttacagtaattcaagctggttttactgccattgaacgcgtaggcgatatattagatgaaccgatagaaatccgcgatcgcgccaatgtgcgcttctcaatatttgatgctaaattcggctacatagacgaaatcgttgcaaatctagaatccccagatactacttccccgcctgaactgggagagatttgctttgatcgtgtctggtttgcttataaaaatgatgattacgtaattaaagacttagatttcaccattcgtcctggtgaaaaagtggcattagtcggtcccacaggtgccggcaaaacttcgatcatccggcttttatgccgcctctatgaacccaccaaaggacgcattctcatcgatggcgtagatattcgagaagtcccacaggcagaactgcggcgctacatggcagtaattttacaagaaggttttttatttgctggcgatgttaaaagcaacatttctttaggagatggttataccattgaacagattcaacaagcagcagagcaaaccaacattgcccaatttatagaagaactaccccagggttatgatactcaacttcgagaacggggcacaaatatttctagtggtcaaaagcaacttttagcctttgcacgggctgctattcgcgatcctcaaattttggtgttagatgaagctactgctagtttagatgttggcacagaagctttagtgcaagaggcattaaaccagctaatgctcagacgtaccgctattattattgctcaccgcctgtctacgattcgcaatgtagaccggatttttgttctcaagcgtggcgaattaatcgaacagggaagtcacgaccaactactggaacagggagggctttatgcaactttgcataacttgcagatgttgggaagttag

SEQ ID NO: 4563 - protein, 626 aa, Nostoc punctiforme PCC 73102
MSIYQSLKKSYTQPRRRENDWRLFLRLVPYARRNGQLLALSMCLLIPIALANAVQPLLIGQVISLIRNEPSAYEFLRNRPLSEGLNILEGLLFVAIAIRLIFTGYQGYLVQKLGQQITAAIRQDLFQHVTSLAVRFFDRTPVGKLITRITSDVEVLGDVFSTGAIGIVSNLFSMLVILGLMFSIEWQLTCLLLLMLLPVTWLIVYIQQQYRKANYKGREELSILNSQLQENVLGINVVQLFRREKFNAELFRATNSRYTQQMDQTIFYDSFISATLEWIGLIAIAAVLCMGGWLLLGKSIAFGTLSAFVLYAQRLFDPLRDFAEKFTVIQAGFTAIERVGDILDEPIEIRDRANVRFSIFDAKFGYIDEIVANLESPDTTSPPELGEICFDRVWFAYKNDDYVIKDLDFTIRPGEKVALVGPTGAGKTSIIRLLCRLYEPTKGRILIDGVDIREVPQAELRRYMAVILQEGFLFAGDVKSNISLGDGYTIEQIQQAAEQTNIAQFIEELPQGYDTQLRERGTNISSGQKQLLAFARAAIRDPQILVLDEATASLDVGTEALVQEALNQLMLRRTAIIIAHRLSTIRNVDRIFVLKRGELIEQGSHDQLLEQGGLYATLHNLQMLGS

SEQ ID NO: 4564 - DNA, 1806 bp, Listeria monocytogenes str. 1/2a F6854
  CDS (1)..(1806): transl_table=11
atggaagcgatgaatgaacaagatgaaatgttagtgatgtccggtaaggaacatcgcgaggttttaaaaagaatgcttagttataccaaatatcatattccgagtttaatttggaccggtgtgcttgttcttctcgtaacgcttgcggatgtgtttgcaccaatcttgattaaaatatttttggatgattatttaacaccgatgaatttggaaatgcaggctttgctaattcttggtgcgggatatttgggacttacgattgggaaatcagttgtttggtatttccaattgctgttcttccaaaaaatcgcgcttgaaattgtgcaacaaatgcggattgatatttttacaaaacttcattcgctaggaatgcgctacttcgacaaaacgcctgcaggaagcattgtgtcgcgcgtgacaaatgataccgaagcggtgaaagatatgtttattaatgtgctttcaacagcgattcaaagtttgtttatgctcgttgggatttatgcagcgatgtttgcgctcaatgttcaattagcgttatatagtttacttttattcccgcttattgtctttattatttttgtttaccggaaatacagttcgcagttttaccgggcacgacgagaaaaattaagtcaattaaatgcaaaaattgctgagtcgatttcaggaatgtcgattgttcaacaatttaatcaagagcgtcggttagtaaaagaatttgagaaaatcaataaagattactatgacgtcggaatgaaaaatatcaaatttaatgcgctattacttggaccggcaattgatttgatttacgcgttggctgtagtgattattcttagtttctttggtgcagagtcattaataggaccggtagcgattgggacgatttatgcctttattagttactttgatcgttttttagaagcgatttataatgtaatggaacggctagcaatgtatcaagaggcgattacagcggcttcccgagtatttcgtattatggatgaaacggaagaagtaccagcccaattaaacgatccagaggcgaaaatcacgcgtgctaaaattgagtttaaagatgtttcgtttgcttatgaaggtgggcgtgacgttcttaaaaatattagctttacggctgaacctggacaaacagtggcacttgttggtcatacaggaagcgggaaaagctcgattatcaatttaatgatgcgtttttatgaatttgaacgtggcgatattttaattgatggtaagtcgattaagtctcatgaaattacagaactgcgtaagaaaactggactagttttacaagatagttttatgttttacggcgatattaatacaaacattcgcttgtatgataaaaacattacagatgaacaaattatagatgctgcgaaatttgttcaagcggacggctttattcaaactttgtccgatcagtacaaacataaagtaatcgagcgaggtgcttcgttttcaagtggacaaagacagctgatttcatttgcaagaacggttgtaaccaatccacaaattctcgttttagacgaagcaacggcaaatattgatacagaaacagaaagcttaattcaaacggggttaaaacgaatgcgagaaggacgcacgacaattgcgattgcgcatcgactttcgacaattaaggatgccgatttaattttagttttatccaaaggaagaattattgagcgtggtacacatgacagtttgattgcagaagaaggggtatatcattcgatgtatcaattacaaaatagtgggatggatttagacgaagcgctttaa

SEQ ID NO: 4565 - protein, 601 aa, Listeria monocytogenes str. 1/2a F6854
MEAMNEQDEMLVMSGKEHREVLKRMLSYTKYHIPSLIWTGVLVLLVTLADVFAPILIKIFLDDYLTPMNLEMQALLILGAGYLGLTIGKSVVWYFQLLFFQKIALEIVQQMRIDIFTKLHSLGMRYFDKTPAGSIVSRVTNDTEAVKDMFINVLSTAIQSLFMLVGIYAAMFALNVQLALYSLLLFPLIVFIIFVYRKYSSQFYRARREKLSQLNAKIAESISGMSIVQQFNQERRLVKEFEKINKDYYDVGMKNIKFNALLLGPAIDLIYALAVVIILSFFGAESLIGPVAIGTIYAFISYFDRFLEAIYNVMERLAMYQEAITAASRVFRIMDETEEVPAQLNDPEAKITRAKIEFKDVSFAYEGGRDVLKNISFTAEPGQTVALVGHTGSGKSSIINLMMRFYEFERGDILIDGKSIKSHEITELRKKTGLVLQDSFMFYGDINTNIRLYDKNITDEQIIDAAKFVQADGFIQTLSDQYKHKVIERGASFSSGQRQLISFARTVVTNPQILVLDEATANIDTETESLIQTGLKRMREGRTTIAIAHRLSTIKDADLILVLSKGRIIERGTHDSLIAEEGVYHSMYQLQNSGMDLDEAL

SEQ ID NO: 4566 - DNA, 1767 bp, Bacillus anthracis str. A2012
  CDS (1)..(1767): transl_table=11
atgatgactgagaaaaaacagagcgatttaagaagattgctttcttatatgaagccatataaaggactattagcattagcatttttatttctagttggtgcaactgtaactgaaatgatgggaccttttttaattaaacaatttcttgatgaacatttagtaccacgtaactttgatcaatcagcacttgttacactatttgtagtgtatattgttgctcacttattaaaagtattatttacttatttagacttgttatattttcaaaatatcgcttttaaaattgttcaagatatgcgtgttgaagtatatgagcatgttcaaaagttatcattaagtttctttgatcgtacgccgattggtacgcttgtatcacgcataacgaatgatacggaagcaattaaagacttttatgtgagtgtattatcaacatttgttaaaaatatcgtatttttaataggtattttagtagcgatgtttttattaaacgtaaaattagcgctattttctctcgtattaattccaataatgtttgcgattatggtgctatatcgccggaaaagtgcagctttttatttagaagtgcgtaatcaattaagcgtgttaaatgcaaagttaaacgaatccattcaagggatgaatattgttcaagtgtttagacaagaaaagcgtatgagaaaagagtttgaagaagtgaacaataaacattatagtgcagggcgacgtacgttaaagttagatgcattgcttttacgtccagctacagatttagtacatattgtagcgattgcattagtacttggtttatttggaattgatgctttgaaaagtcctgttgaagtaggcgttttatatgcgtttgttaactatatacatcgtttcttccagccggtaaatgagatgatgatgaaattatcatttttccagcaggcacttgtttcatcatcacgtgtatttcatttaatggatgagaaagatttagcaccagttcaaaaaggggatggaaatcctcaagtcattaatggagatattgaatttaaaaatgttactttttcttatgatggaaaacgtgatgttttaaaaaatgtatcttttcacgtgaaacaagggcaaacggttgctttcgttgggcacacgggtagcggaaaaagtaccattatgaatttattaatgcgattttataatattaagtctggaaatattgtaatagatggtgtagatttagaaaaatttgaagaacaagaaattagaaagaaaataggacttgtactgcaagatgcatttttatttgcgggaaatgtgaaacaaaatattcgtatgtataatgaagaaattacggatgaagaagtaaaagaagcggcacaatttgtgcaagcgaatacgtttattgaaaaattaccagagcagtatgaaacagaagtagtagaaagaggagctgcattttctagtggtcaacgacaattaattgcttttgctagaacgatagcaacgaatccgaaagtattagtattagatgaagcaacagctaatattgatacagaaactgaagatgcgatccaaacagcgttacagcaaatgcgaaaagggagaacgactatagccattgcgcaccggttatctacaattcaagatgcagaccaaattttcgttatgcatgatggagagatagtagaaagaggaacacaccaagaattactgagtgaacaagggttgtattataatatgtatttactacaaaataaaggaagtttacaaaaggccttgtag

SEQ ID NO: 4567 - protein, 588 aa, Bacillus anthracis str. A2012
MMTEKKQSDLRRLLSYMKPYKGLLALAFLFLVGATVTEMMGPFLIKQFLDEHLVPRNFDQSALVTLFVVYIVAHLLKVLFTYLDLLYFQNIAFKIVQDMRVEVYEHVQKLSLSFFDRTPIGTLVSRITNDTEAIKDFYVSVLSTFVKNIVFLIGILVAMFLLNVKLALFSLVLIPIMFAIMVLYRRKSAAFYLEVRNQLSVLNAKLNESIQGMNIVQVFRQEKRMRKEFEEVNNKHYSAGRRTLKLDALLLRPATDLVHIVAIALVLGLFGIDALKSPVEVGVLYAFVNYIHRFFQPVNEMMMKLSFFQQALVSSSRVFHLMDEKDLAPVQKGDGNPQVINGDIEFKNVTFSYDGKRDVLKNVSFHVKQGQTVAFVGHTGSGKSTIMNLLMRFYNIKSGNIVIDGVDLEKFEEQEIRKKIGLVLQDAFLFAGNVKQNIRMYNEEITDEEVKEAAQFVQANTFIEKLPEQYETEVVERGAAFSSGQRQLIAFARTIATNPKVLVLDEATANIDTETEDAIQTALQQMRKGRTTIAIAHRLSTIQDADQIFVMHDGEIVERGTHQELLSEQGLYYNMYLLQNKGSLQKAL

SEQ ID NO: 4568 - DNA, 2061 bp, Exiguobacterium sibiricum 255-15
  CDS (1)..(2061): transl_table=11
gtgaaggaagaagaattatatctattagatcccgttcgtcggaaaacgacgattcgatcacttgttcgttatgcgatgtatgaaaaacaagcaattttcctcggattatttctcttgattctggcagtcggagcagaattgaccggaccatatattgcgaaagtcatcatcgatgaacatattgttgcgattgaaaaggattgggttgaagtgaaggacggaggaagggtcgagtatgacgggcgccagtttgcgaagaagcaggatgtgccgtcttccgatgtcattcaagcgatttcagttgttcaatcgaagagcggttattattttgtgcccgaacaagtcgtcagcggaggagaacgcaacgtgaccggtggaacgttaaccgtcacgcgtggggaagaaacgtttcgttattcgggcgtcaagaagctgacgcaaggacaggtgtatgatttttatgcctctgacttaaaagcggtcggctggctgtctttgctgtatatcgtcctgctgttaatcgcggccggtttgaactgggtccaacaaatcctgcttcagcggtcggcgcataaaatcgtcaaatggatgcggctcgatgtctttacacatttacaacggttaccggtccgctattttgaccagacaccgatcggaaagattgtcagtcgtgtcacgaacgatacggaaacaatccgcgatttgtacttgggtgtgctcgcacgcgtcttttcgggattgattacgatggccggaattttagtggcgatgtttttcctcgatgtccgtctcggactcgtttcgctgttgattattccgatcgtctacttctggattcagctgttccagaaacttgcaacggaaaataacttcaaggtccggtcgcttgtcgcagatatgaatggtcagttaaacgagaacattcaaacgatgccgatcattcaagcgtatgcgcgggaaaaagaagtgttggcggaatttgaacaaaaaaatgaagagaattatcaaacccgttcgaagttgttgcggcttgatgccttaatgtcgcataacttatcgtatttcctgaaaaacctgacgctggccttattgatctgggtcgtggcgggtaaaagtctgaccgacggaacctttttatcgctcgggattttatatgcctacatcgactatgtctcgcgtctctttgaaccggtcacacaaatcatgaatcagttgtcgccgttgcaacaagcactcgtttcagcagaccggatgttccaactgctcgacgaaaagggagaagacgtcggaaagggacgtttaccccgtttcgccggacgtgtggagttcaagcaggtcggtttcagctatgatccgggtcatcctgtcttacaggacatcgaaattgatgcccgtcccggagcgacaatcgctctcgtcggacatacgggtagcgggaaaagttcaatcatgaatctgctgatgcgtttttatgatccatcgtccggtcaattgctgattgatggacaggatgtcacgtcactgccgaaacaggcggtccgcgatcatatgggcatcgtcctgcaggatccgtttttgttcacgggaacaatccgttcgaacatcacgctcggcaatccgatgatttccgaggaacggattcgggaagcgatcgtcgccgttggggcagaccggttcatcgaccgtcttcctaaaggtcttgatgaacccgtcatcgaaaaaggcgcgaccttatctgccggcgaacggcagttgatcagttttgcccgggctttggcgtttgatccggccattttagttctcgatgaagcgacggcaagcgtcgattcggaaacggaagcgatgattcaggacgccttattgacgttgacgaaagggcgcacgaccttcatcattgcccaccgtttgtcgacgatcaaagacgctgacgaaatcatcgtcctcgaccatggacggatatccgaacgcggaacgcatgaagagttactcgcaaaacaaaaaatctatgccaaaatgtatgcgttgcaaagtaaacgcaatctcgaattgaaatcaagctaa

SEQ ID NO: 4569 - protein, 686 aa, Exiguobacterium sibiricum 255-15
MKEEELYLLDPVRRKTTIRSLVRYAMYEKQAIFLGLFLLILAVGAELTGPYIAKVIIDEHIVAIEKDWVEVKDGGRVEYDGRQFAKKQDVPSSDVIQAISVVQSKSGYYFVPEQVVSGGERNVTGGTLTVTRGEETFRYSGVKKLTQGQVYDFYASDLKAVGWLSLLYIVLLLIAAGLNWVQQILLQRSAHKIVKWMRLDVFTHLQRLPVRYFDQTPIGKIVSRVTNDTETIRDLYLGVLARVFSGLITMAGILVAMFFLDVRLGLVSLLIIPIVYFWIQLFQKLATENNFKVRSLVADMNGQLNENIQTMPIIQAYAREKEVLAEFEQKNEENYQTRSKLLRLDALMSHNLSYFLKNLTLALLIWVVAGKSLTDGTFLSLGILYAYIDYVSRLFEPVTQIMNQLSPLQQALVSADRMFQLLDEKGEDVGKGRLPRFAGRVEFKQVGFSYDPGHPVLQDIEIDARPGATIALVGHTGSGKSSIMNLLMRFYDPSSGQLLIDGQDVTSLPKQAVRDHMGIVLQDPFLFTGTIRSNITLGNPMISEERIREAIVAVGADRFIDRLPKGLDEPVIEKGATLSAGERQLISFARALAFDPAILVLDEATASVDSETEAMIQDALLTLTKGRTTFIIAHRLSTIKDADEIIVLDHGRISERGTHEELLAKQKIYAKMYALQSKRNLELKSS

SEQ ID NO: 4570 - DNA, 1872 bp, Exiguobacterium sibiricum 255-15
  CDS (1)..(1872): transl_table=11
ttgaacggggaacacacgacgaattgcttgcgcggaacggttggtataaagaaacatacgaccgccagcaactggaatcactcgtcgaacagggaggtggaacgcttgaatcatgatattaatgaaaaagcggtcttgcgacgattgcttggcttcgtcaaaccgtttaaaaaacaggtgttagtcgccttcttactgttgctggtgacgaccggagcaaagctcgggggaccttatctcgtcaaaatctttatcgataattatgtggccgtcgggaactatccggtccaggaagttgcgttattgtttggtgtctacttgctgttgcatacgaccggtatcgtcgtcgattatttgcaggcatttgagttccaaaaaattgccctgaaagtcattcaacggctccggattgatgtgttccgtcacgtcatgcatcttcggctcggttacttcgaccggacaccggccggagtgctcgtttcacggattacgaatgatacggaagcaatcaaagagctgtacatcggcgttttgtcgacattcgtccaaagcggggtccaattgattggaacgtatatcttcctgtatctgcttgaaccgcgcctggcgacgattgcgttagtcttattgccgctgttttatttcatcatctggatttaccgtcgttactcgacgaaatactatgcagaagtccgggatttattatcgaagattaacggacaattaaatgagtcgatcaacggaatggccatcatccaacaatttcggcaggaaaaacggctgatggcggagttcgaagaaacgaacatcgcccatcaaaacggccgttacaagaacctgaaacttgacagttggctgttgcgtccgatcattgaactgatgcttgcactgacgattgcgtccctgattacgtacttcggtgtcctgtccttttcgcaaacggtgcaagtcggggtcgtctatgcttttatcagttacatggaacggatttttcaaccggtccagcaaatcatgcaacgcttgtctgaattccaacaggctatcgtttcggcggaccgggtctttaaagtgctcgatacggatgagccggaacccgcgaagacgattgcaggtgatgctgacatcacagaaggacatatcatctttgataacgtccgcttcagttacgacggggaaaaggaagtcttaaaagggatttcgtttgaagcgaaaaaagggcagacggttgccctggtcggtcagaccggcagcggaaaaagttcaatcatcaatattttgatgcgcttttattcctatcagtcgggtcggatcctgattgatggacagccgctcgaacaattgccggaagacgaattgcggcgtcatgtcggactggtcttacaggattcattcctgtttacaggcagtgtcgccgataacatccggttgtttgatccgtccattccattcaaaaaagtggaggaagcggctcgctttgttcaagcagacgggttcatcaatcagctcgacgaacaatatgacagtccggttgcggagcggggagctaccttctctgccggagaacgtcaactcgtttcgtttgcccggacgatggcacgtgacccgaaagtcttgattctcgacgaagcgacaagttcaatcgatacggaaacggaagaaaaagtgcaggtcgccttaaaacggatgcggcagggacgaacaacgattgcgattgcccaccggttgtcgacaatccaggatgcggatctgattttagtcctgcatcaaggggaagtcgtcgaacaagggaaccatcagacactgattgaaaagaacggattatataaaaagatgtatgaactgcaatccggtcacgtttcgtcggtatcataa

SEQ ID NO: 4571 - protein, 623 aa, Exiguobacterium sibiricum 255-15
MNGEHTTNCLRGTVGIKKHTTASNWNHSSNREVERLNHDINEKAVLRRLLGFVKPFKKQVLVAFLLLLVTTGAKLGGPYLVKIFIDNYVAVGNYPVQEVALLFGVYLLLHTTGIVVDYLQAFEFQKIALKVIQRLRIDVFRHVMHLRLGYFDRTPAGVLVSRITNDTEAIKELYIGVLSTFVQSGVQLIGTYIFLYLLEPRLATIALVLLPLFYFIIWIYRRYSTKYYAEVRDLLSKINGQLNESINGMAIIQQFRQEKRLMAEFEETNIAHQNGRYKNLKLDSWLLRPIIELMLALTIASLITYFGVLSFSQTVQVGVVYAFISYMERIFQPVQQIMQRLSEFQQAIVSADRVFKVLDTDEPEPAKTIAGDADITEGHIIFDNVRFSYDGEKEVLKGISFEAKKGQTVALVGQTGSGKSSIINILMRFYSYQSGRILIDGQPLEQLPEDELRRHVGLVLQDSFLFTGSVADNIRLFDPSIPFKKVEEAARFVQADGFINQLDEQYDSPVAERGATFSAGERQLVSFARTMARDPKVLILDEATSSIDTETEEKVQVALKRMRQGRTTIAIAHRLSTIQDADLILVLHQGEVVEQGNHQTLIEKNGLYKKMYELQSGHVSSVS

SEQ ID NO: 4572 - DNA, 1749 bp, Streptococcus suis 89/1591
  CDS (1)..(1749): transl_table=11
atgctctctaaaaccaagcaagccagtgttttttggcgactcttgtcctatctcaaagcctatcgactgctgacagtccttgccttgagctttttattgctgactaccgtagtccgcagtctaattccccttctagcctcttactttatagaccactatatttcctcgatttctgagacagctgcggctattctagcggcctactttgccctctatctgctccaaatggtgcttcaatattttggaaatctctggtttgcaaaagtttcttacagcattgtcagagatattcgccgggatgcttttgggagaatagaaaagctgggaatggcttactttgaccagactcctagtggctccattgtctcgcgaatcaccaatgatacggagagcatttcagagatgttttcagggattttatccagttttatctcagctctctttattatcatcacgactctttcgaccatgtttgctctggattggaaattgacctgtctgatcgtcctctttcttcccttgattttcttattggttgatcaatatcggaagcggtcagctcccattgtggccaaaactagaagtctgttgagtgccatcaacagcaaactggctgaaagtattgaaggaattcggattatccaggcgttttctcaggaagaccgattgaaagaagagttcgaagctatcaaccaggaacatctggactatgccagtcgttccatggccttggacagtctctttctccgccctgccctgtcacttgttaagattttggcctatgccctactcatgacctattttggtttggactggtcacaggctggaatttctgctggtcttatctatgctttcatccagtatgtcaatcgtcttttcgatcccttgctggatgtcacgcagcatttttccaccctccaaacctctatggtatctgccggacgggtctttacgctcatggaccagaccatcgaggagccactacagctggaccgaggggccaagattgacaaggggcatattgtctttgaggatgtttacttttcctatgacggcaagcggcaaattctggacaaggtttcctttgaagtgagacaggggcagaccatcgcctttgtgggtgctacaggatcaggcaaatcttctatcatcaatgtctttatgcgtttctatgaattccaatctggacggattttgattgacggtcaggatattcgtagcttttcgcaggaagaattgcggtccgcgattggcctagtcctgcaagatcccttcctttttcacggaaccattgcgaccaatatccagatgtatcaggatatttcccgagaggagattgaggaagcggctcgatttgtggatgctgctccctttattgagaaacttcctgagaaatacgaccacctggtcactgagcggggcacctctttttcgacaggtcaacggcaacttctggcctttgcacgcaccatggccagtcagcctaagattcttattttagacgaggctaccgccaatatcgattcggagacagagcaaacggtccagacttctcttgagaaaatgcgaaaagggcggacaactattgccatcgcccaccgcctatcgaccattcaagatgctgactgtatctatgtcttggacaaggggaaaatcatcgagtctggaaaccacgaacagctcctatccctcaagggtcactaccaccgcatgtaccagttacaagcaggccagttaacagcaacctag

SEQ ID NO: 4573 - protein, 582 aa, Streptococcus suis 89/1591
MLSKTKQASVFWRLLSYLKAYRLLTVLALSFLLLTTVVRSLIPLLASYFIDHYISSISETAAAILAAYFALYLLQMVLQYFGNLWFAKVSYSIVRDIRRDAFGRIEKLGMAYFDQTPSGSIVSRITNDTESISEMFSGILSSFISALFIIITTLSTMFALDWKLTCLIVLFLPLIFLLVDQYRKRSAPIVAKTRSLLSAINSKLAESIEGIRIIQAFSQEDRLKEEFEAINQEHLDYASRSMALDSLFLRPALSLVKILAYALLMTYFGLDWSQAGISAGLIYAFIQYVNRLFDPLLDVTQHFSTLQTSMVSAGRVFTLMDQTIEEPLQLDRGAKIDKGHIVFEDVYFSYDGKRQILDKVSFEVRQGQTIAFVGATGSGKSSIINVFMRFYEFQSGRILIDGQDIRSFSQEELRSAIGLVLQDPFLFHGTIATNIQMYQDISREEIEEAARFVDAAPFIEKLPEKYDHLVTERGTSFSTGQRQLLAFARTMASQPKILILDEATANIDSETEQTVQTSLEKMRKGRTTIAIAHRLSTIQDADCIYVLDKGKIIESGNHEQLLSLKGHYHRMYQLQAGQLTAT

SEQ ID NO: 4574 - DNA, 1794 bp, Oceanospirillum sp. MED92
  CDS (1)..(1794): transl_table=11
atgactgaaccgacattacctgaaacgggcatgaagatatatcttcgtctcttaacctatgtaagaccctacctaatcgctttttttcttgggattgcagggtttatcctttatgcaagtacccaaacaggttttgccatgttgatggaatacctcgtcgatgccataggcgaggagaagaaagatgcttatatctatggtccacttgccttgatgggaatcgctttagcgcgaggggtgggaacctttacaggtaattattttacttcttatgtggcacgtaatgttgtgcatcaattgcgtttggttatgtttgataagttactcgtccttccaatgcagtattttcatgataattcttctggccacattatttcgaagatttcttataacgttgaacaggttaccgaagcggcaactgattcattaaaaattagtattcgtgaaggagcgacggtcattggcctcttgggctatttgattttcctcaattggaaactgactttgatatttgcagcggtctcaccggtgatcgctgtcgttgttatcgttgcgtcaaagcgttttcggcgcttaggtcaccgaatacaagattcaatgggtgatgtgacccacgtagcatcagaaaacgtagatgctgtccaagtggtacgtgtttttggcggcacagatagcgaaaaatcccggttttctgcagcgagtaaacaaaatttgcgacagagtatgaaaatggcggtaaccgaagccttgagtactcctgttgttcagttaatagtttccggagcattggcattactaattttctttgccttacatcctgttatgaatacaggaatgagtgccggggagttcatcgcttttattactgcagcggggctgattgcaaaaccattacgctcattaactgaggtgaatggggcaatccagagaggcatagcggcggcacaaagtatttttgaattggtcgatcagacgtctgaacctgaagccggagattttaaaaatcaggagtgtaagggccgaatagaaatgaaagacctgcatttctcttatattcaggataagccggttttgaaaggcctggatcttgttgtagagcccggccagacagtggcgctggtcggacggtcaggaagtggtaagtcgaccatggcaaaccttttgcccaggttctatgaaccgagttccggagccattttgcttgatgggaagccgttatcagcgtacgaattaaagaatctgagggacaaaattgcgcttgttacgcagaatgtggtgctttttgccggatcgattcgtgacaatatcgcgtacggagctaccagtggagccagtgatgaagaggtcatcgcggcggctgaagcagcccatgtgatggagtttgtatccaggcttccgcaaggtttagatactgaaattggcgagaaaggcaccaagctttcaggtggtcagaggcagcgtattgctattgccagggcaatcctgaaaaatgcgccagtcctgattttagatgaagcaacatctgcattggacaccgaatcagaaaggcatattcaggcggcgcttgaaaatgtcatgcagggccgaacgactctggttattgcgcataggctgtccactattgagaatgccgatcaaatagttgtgatggatcagggtaagattgtcgaacagggtagccatacacagttgttggcactcaatggagcttattcggccctgcataatatgcaactaagtgaagagaaagagcagccaaacagcgctgtagagagacaggagatttcagaatga

SEQ ID NO: 4575 - protein, 597 aa, Oceanospirillum sp. MED92
MTEPTLPETGMKIYLRLLTYVRPYLIAFFLGIAGFILYASTQTGFAMLMEYLVDAIGEEKKDAYIYGPLALMGIALARGVGTFTGNYFTSYVARNVVHQLRLVMFDKLLVLPMQYFHDNSSGHIISKISYNVEQVTEAATDSLKISIREGATVIGLLGYLIFLNWKLTLIFAAVSPVIAVVVIVASKRFRRLGHRIQDSMGDVTHVASENVDAVQVVRVFGGTDSEKSRFSAASKQNLRQSMKMAVTEALSTPVVQLIVSGALALLIFFALHPVMNTGMSAGEFIAFITAAGLIAKPLRSLTEVNGAIQRGIAAAQSIFELVDQTSEPEAGDFKNQECKGRIEMKDLHFSYIQDKPVLKGLDLVVEPGQTVALVGRSGSGKSTMANLLPRFYEPSSGAILLDGKPLSAYELKNLRDKIALVTQNVVLFAGSIRDNIAYGATSGASDEEVIAAAEAAHVMEFVSRLPQGLDTEIGEKGTKLSGGQRQRIAIARAILKNAPVLILDEATSALDTESERHIQAALENVMQGRTTLVIAHRLSTIENADQIVVMDQGKIVEQGSHTQLLALNGAYSALHNMQLSEEKEQPNSAVERQEISE

SEQ ID NO: 4576 - DNA, 1821 bp, Desulfitobacterium hafniense DCB-2
  CDS (1)..(1821): transl_table=11
atgagcacccttatctccgaagagttggaacataaagccggtctcagcggacagggcgggaccatcctcaggctccttgcctatttaaaaccccatcttaaacccctggcttttgcctttgccttgctcgttgcgggtaccgcggccgatgtagccggacctgtactgatcaagatctttttggatgattacctgacccctggacgtctggaacctctggctttaacaatcctgggcggcgggtatctgctgctggtcatcttagcttctttccttcaatatcaccaattggttcgtttcaataaaatcgccttgctggttattcaacaaatcagggtggatattttcactaaggttcagtatttggccatgagtgtctttgaccggactccggcgggagctttagtctccagggtcaccaatgatacggaggcgattaaggaactttatatcggcgtgctctcaacctatgttcagaacattgtctttctgctgggcatatttattgccatgttcagcctggatgtgcggttagcggccttctgcctggtgctgctccccgtcatcgttgttttgatgcaaatctaccgcaggatcagctccaagatatacaggatctcccgggcggagctgggcaggttgaatgctatactcaatgagtccatccaaggcatgaatatcatccaaatcatgagacaggaagaaacctttcaaaagaaatttgccggtattaacgagaagtattacggtgcggccattgccaatattaaactggaaagcaccctgatgcgcccggccgtggatctgctctataccctggcgctgattttggttctgggtttctttggtctggaatccatcattggtccggtggaagtgggagtgctctatgcctttatcaattatctggatcgttttatcgacccggtgaatatgatcttaatgcgcctttctcagcttcagcaggcgattatcgccgcggaaagggtctttgaagtgctggatgacgggcgaaccaccacagcccttggcctgaatgctgttcaggaagccggtgatcctcctgctcctggtatcgaaaaaggtgagattgaatttcgcaatgtcagtttttcctatgatggtgtcactgaagtcttaaaaaacatctcctttacggttcaccctggggagacggtagctttagtcggccataccggcagcgggaaaagcacgatttccaatctcttaatgaaattttacccggttaatcaaggggaaatcttgattgatggtatatccttgcatgacttttcccaggaggagctgcgtacccagattggtcttgtcgctcaggatcctttcctctttgtcggagatattgccaacaatattgccctgaaccgacctgcggtcggggagagagaggtcaaggcggcggcagaatttgtggaggctgatcaattcattaccaagctggggcagggatatcaggaacctgtcagtgaaaggggctccacactctccagtggtcaacggcagcttatctgctttgcccgcaccattgccggagaacctaaaattcttattctcgatgaagccaccgccagtgtggatacagagacagaggaggctattcaaaccgccttaaacaaaatgcgccaagggcgcagtaccatcgctattgctcatcggctttccaccatacaggatgccgatcttatccttgttttgcatcagggacaaatagtcgagcgaggcaatcataacgaactcctcgctcaaaaaggcctgtattacaaaatgtttctgcttcaacaaggggcaggcaaaggttattga

SEQ ID NO: 4577 - protein, 606 aa, Desulfitobacterium hafniense DCB-2
MSTLISEELEHKAGLSGQGGTILRLLAYLKPHLKPLAFAFALLVAGTAADVAGPVLIKIFLDDYLTPGRLEPLALTILGGGYLLLVILASFLQYHQLVRFNKIALLVIQQIRVDIFTKVQYLAMSVFDRTPAGALVSRVTNDTEAIKELYIGVLSTYVQNIVFLLGIFIAMFSLDVRLAAFCLVLLPVIVVLMQIYRRISSKIYRISRAELGRLNAILNESIQGMNIIQIMRQEETFQKKFAGINEKYYGAAIANIKLESTLMRPAVDLLYTLALILVLGFFGLESIIGPVEVGVLYAFINYLDRFIDPVNMILMRLSQLQQAIIAAERVFEVLDDGRTTTALGLNAVQEAGDPPAPGIEKGEIEFRNVSFSYDGVTEVLKNISFTVHPGETVALVGHTGSGKSTISNLLMKFYPVNQGEILIDGISLHDFSQEELRTQIGLVAQDPFLFVGDIANNIALNRPAVGEREVKAAAEFVEADQFITKLGQGYQEPVSERGSTLSSGQRQLICFARTIAGEPKILILDEATASVDTETEEAIQTALNKMRQGRSTIAIAHRLSTIQDADLILVLHQGQIVERGNHNELLAQKGLYYKMFLLQQGAGKGY

SEQ ID NO: 4578 - DNA, 1818 bp, Synechococcus sp. RS9916
  CDS (1)..(1818): transl_table=11
atggcgggctctgatctcaggcgcgttaagaggctgggccgttatctcggtcgcgatcgtcgccggctctcgctcaccttggtgctgctgatccccgtggctctggccggagccattcagccgttgctggtgggtcaggcgatcgccgtgctccgccgggtcggtggtgagaccaaggaatcggtgcttccgctgcttcaggggcttgagacgcctgtggccttgcgcctgatcgtggctgtgctgttggtctcagtgcttctgcgtctggggcttcagggggtgcaaaccttcaatattcaggcggtgggccaacggctcacggcccgcattcgagaagacctcttcgcccacgcgatcaatctttcggtccgctttcacgaccgcatgccggtgggcaagttgctcacccggctgacgagtgatgtggatgcccttgccgaggtgtttggtagtggggctgttggtgtgttgggtgatctggtgagtcttgtggtgattgcggtcaccatgctgttggtggaatggcgactgggactgctgttgctggctgctcagatcccagtcacctttgtgatcctctggctccaacgccgctatcgcaaagccaactaccgggtgagggaggaactctctcagctcaatgcggatttccaggagaacctgcagggtcttgaggtggtgcagatgttccggcgtgaggccgtgaatggccaacgcttcaacaccaccggtttggcctaccgcagggctgtgaatggcacgatttttttcgacagcagcatttcggccttcattgaatgggtcgctcttggggctgttgccctggtgttggccttgggtggatggatggtgacagcaggggcgatgggattgggcaccctcaccacgttcatcctttattcccagcgtctgttcgatccattgcgccagctggcagagcgcttcacccagatccaaggaggacttaccgccgttgagcgcattggcgagctgctcgaggagcctctcgagatcgtcgacaacgccgaggcggccaaagagggcaccatccgccagctcgcttccgcccgagctccccgcggtgaagtggtgttcgagaacgtgagctttgcctaccgccccgacgaaccgatcctgcgcaatctcaacttccgaattgcagccggagagcacgtggctctggtgggacccaccgggtcgggcaagagcacggtgattcgtctgctctgccgcctgtatgaaccccagaagggtcggatcctgctggacggtcgtgacatccgcagcctgccgatgcaggagttgcgtcgccagctgggtgtcgtgctccaagacacgttcctgtttagcggcaccgtcggtgacaacctgcgtctggatgtcccgatcgacgacgcccgccttcggagcatctgccgcgacctcggtctcgacccgctgttgcaacgactgcccgatgggctggacaccaccctgagggagcggggcggcaacctgtcttcgggggaacggcagttgttggccgtggccagggttgcgatccgtaatcccacggtgttggtgatggatgaagcaacggccttcatggatccctccaccgaagccaccctgcaacgcgacctggatcgtctgctcgaaaagcgcacagcagtggtgatcgcccaccgtttggccacggtggaggcggcggatcgaattttcgtgttgcggcgggggcagttgattgagcagggcacccatcaggagctccgcgccctgggagggctctatgccgaattggcggaattgcaagaacggggtctcgccaggctctag

SEQ ID NO: 4579 - protein, 605 aa, Synechococcus sp. RS9916
MAGSDLRRVKRLGRYLGRDRRRLSLTLVLLIPVALAGAIQPLLVGQAIAVLRRVGGETKESVLPLLQGLETPVALRLIVAVLLVSVLLRLGLQGVQTFNIQAVGQRLTARIREDLFAHAINLSVRFHDRMPVGKLLTRLTSDVDALAEVFGSGAVGVLGDLVSLVVIAVTMLLVEWRLGLLLLAAQIPVTFVILWLQRRYRKANYRVREELSQLNADFQENLQGLEVVQMFRREAVNGQRFNTTGLAYRRAVNGTIFFDSSISAFIEWVALGAVALVLALGGWMVTAGAMGLGTLTTFILYSQRLFDPLRQLAERFTQIQGGLTAVERIGELLEEPLEIVDNAEAAKEGTIRQLASARAPRGEVVFENVSFAYRPDEPILRNLNFRIAAGEHVALVGPTGSGKSTVIRLLCRLYEPQKGRILLDGRDIRSLPMQELRRQLGVVLQDTFLFSGTVGDNLRLDVPIDDARLRSICRDLGLDPLLQRLPDGLDTTLRERGGNLSSGERQLLAVARVAIRNPTVLVMDEATAFMDPSTEATLQRDLDRLLEKRTAVVIAHRLATVEAADRIFVLRRGQLIEQGTHQELRALGGLYAELAELQERGLARL

SEQ ID NO: 4580 - DNA, 1746 bp, Vibrio sp. Ex25
  CDS (1)..(1746): transl_table=11
atgtcttacccattatctcaaccaaagccaatgattaaaggacttgctttgctgtttatcgcagcgttagccagcgctggcggcccttggttgattcaatatttcattgatgagcacatcgctaaaggtgactattcacagaatgttctgatttcgctagcagtaggttatatcgctcttcagattgtatcggcaacatttcagtattttcagtcattgcaatttagcattgtcgcggctaacacgatcaaaacgattcgtaagcaagtattttctggtgtgattaagcagccgttatctgcgtttgattacactcctgctggaaaattggtatcgcgaatcaccaacgatacggaatctctacagcaattttatgagctcttgatcgcgaccgtggtgaaaaacgtggtcatgattgtggtgatgcttggcgttatgtttttcatgagctggaaactcacacttgttgtgcttgtattgctaccgatcgtcatcggctttatgtacttgtttaagcagctaagtacagaaagctaccgaaagatgcgtgacctattgactgatataaatgcgaatctgagtgaatccattcaagggatgagtgtcattcaattaatgcaacaagaagagcgttttaataaacagttcaacgagctaaccgcagagcacttggtggcatctaaacgagtgattcggctaaacggctatctgctaagaccattaatggatttgctcgcaggtcttgcgttgctttgcttggttgcgatctttggttttaatggtattgagttgattggtgtgggggtactgtatgcatttatcagttatcttgcgcgagttactgaaccactaattgagatgactcagcaacttgctctacttcagcaagcgttagtatcaagcgaacgtgtttttgaattgattgatgcgaaagaacaaacttacgggaacgatcatcaaccattaaggtcaggtgctatcgaacttaaagacctcacatttagctacgatggtaaacaggacgtcctaaaagacatttcgttgagggccaaccaccaagactttatcgcgcttgtcgggcatacaggaagcggtaaaagcacattagcgtcactgttaatgggcttttatccaacgcaatatggtgaactgctcatcgatagtcgtccacttaaaacactagggaaagacgtccttcgtaaagatgtggcaatggttcagcaagatccgcacattctccctgcttcagtcagagaaaacatctctcttagtcgagcggttgacgatactcaaatatgggatgcgttagacaaggtaggtttggcagagcaaattcaccgttatcctaatgggctagacacgcagttaggtcaaggtgaaaccaatctatctgctggacaaaaacagctcttagcgttagcacgtgtgcttgtggtaaaacctaaaatattgatattagatgaagcaacggccaatattgactcaggaacagaagctttaatacaaaagagcttggcagtactcagacaagacatgacactagtcgttatcgctcatcgactttcaactattttggatgcggaccaaatcattgttcttcatcatggggagttagtagagaaaggcacacacaaaacactgttgaaacaaaatggtcgttatgcccaaatgtatcagttacagcaagcaaaccgacatttacagcagattgaagaagaaaccaagcaactcgaagaagcggtgtga

SEQ ID NO: 4581 - protein, 581 aa, Vibrio sp. Ex25
MSYPLSQPKPMIKGLALLFIAALASAGGPWLIQYFIDEHIAKGDYSQNVLISLAVGYIALQIVSATFQYFQSLQFSIVAANTIKTIRKQVFSGVIKQPLSAFDYTPAGKLVSRITNDTESLQQFYELLIATVVKNVVMIVVMLGVMFFMSWKLTLVVLVLLPIVIGFMYLFKQLSTESYRKMRDLLTDINANLSESIQGMSVIQLMQQEERFNKQFNELTAEHLVASKRVIRLNGYLLRPLMDLLAGLALLCLVAIFGFNGIELIGVGVLYAFISYLARVTEPLIEMTQQLALLQQALVSSERVFELIDAKEQTYGNDHQPLRSGAIELKDLTFSYDGKQDVLKDISLRANHQDFIALVGHTGSGKSTLASLLMGFYPTQYGELLIDSRPLKTLGKDVLRKDVAMVQQDPHILPASVRENISLSRAVDDTQIWDALDKVGLAEQIHRYPNGLDTQLGQGETNLSAGQKQLLALARVLVVKPKILILDEATANIDSGTEALIQKSLAVLRQDMTLVVIAHRLSTILDADQIIVLHHGELVEKGTHKTLLKQNGRYAQMYQLQQANRHLQQIEEETKQLEEAV

SEQ ID NO: 4582 - DNA, 1824 bp, marine gamma proteobacterium HTCC2080
  CDS (1)..(1824): transl_table=11
atgactgatccaacaagacagaccagcggtgattgggggctatatcgtcgccttttgtcctacgttgtgccttactcggctgcgtttcttttcagcgttgccgggtttttggtgtactccctgggcagtgttctgttggcagatcttactcagtttttattagattcattgggccagagcagtcaagttgaattgggcttagtttccgcggcggcgcattggttttggcctccgggcgacaaagcccctctggattatgctcgagtggctgtgcctgttgctgcggtggtgctttcgctgggtcgggcgctgggatttttcgtaggtaactactacatgaatgtcgtggcgcgaagcgtggttcataccctccgagttgaattgtttgacgtgatgatggcagcgccgcgacgatattacgatgccaataccggcggtaatttgctgagtaagatcacatttaacgttgagcaggtgtcgggtgccgcaagtgacgccctaaaagcgattttgcgtgagggcctgacggttatggctcttgtgacttatatgttgtatctcaattggcgtttgacgctgatattttttgcggtcgcacctgcgattggcttggtcgttgtgattgtgggtcgtcattttcggcgttacagccgtcgtattcaagactccatgggctctgtcactcaagtcagtagcgaatccttgggggcctttgaagcccttcgcgtctttgctgcgacgcgacaacaagtcgccaaattcaccaatgcgagcctgttcaatcgcaaccaaagcttaaaattggcgtttgttcaggctgtttctacacctgtgattcaaacgttattagctctggctttaggcgcgctattttggtttgcgctggacccggcaatactcgctggatttaccgcgggctcattggtggcttttatcaccgcggcggctcaaatgggtaaaccaatacgaactctcagtggcgtgcagagcattattcagcgcgggcttgccgcagcggaggatgtttttgcacaaattgatattccacctgaacccaaccgtggcaccacacccgttaaacgcgcaaagggtgagatcgcgatcgagcatttaagctttcgatacccaggggctaccgaatacgcgctggaaaatatttcacttcagcttcaacccggtgaaacggttgcgcttgtcggacgttcaggcagtggaaagtcgacgttggtgcaactcttgctgcgcttctacgctcctgagcacggtgaaatccgtctcgacgatttagtgattgaagagtacgaattggctgattaccggaagcagttcggggttgtatctcaagaaattagcctgtttagcgatactattgctaacaacattgcttttggtgaaatgagagatgcgtcatacgatgcggtgctgatggcggctcagaaggctcacgcgattgagtttattgaggcacagcctcagggcctagataccctgttgggtgatgacggtgccggtttatctggaggtcaaaagcagcgcttagcgatcgcgagagcactgttaaaagatgcgccaattttgattcttgatgaggcaacctctgcgctagacacagaatctgaaacctatattcaagaggccttagcagctttttgtgaagatcgaacaacgctggtgattgctcaccgtttgtcgacgattgaaaacgcggatagagtcgtggtgatggatcaaggcagaattgtggccttcggtccacaccagcaactgctaacagagagcccactatatgcacgcctgcataagcaggaaatcgtccagtcatga

SEQ ID NO: 4583 - protein, 607 aa, marine gamma proteobacterium HTCC2080
MTDPTRQTSGDWGLYRRLLSYVVPYSAAFLFSVAGFLVYSLGSVLLADLTQFLLDSLGQSSQVELGLVSAAAHWFWPPGDKAPLDYARVAVPVAAVVLSLGRALGFFVGNYYMNVVARSVVHTLRVELFDVMMAAPRRYYDANTGGNLLSKITFNVEQVSGAASDALKAILREGLTVMALVTYMLYLNWRLTLIFFAVAPAIGLVVVIVGRHFRRYSRRIQDSMGSVTQVSSESLGAFEALRVFAATRQQVAKFTNASLFNRNQSLKLAFVQAVSTPVIQTLLALALGALFWFALDPAILAGFTAGSLVAFITAAAQMGKPIRTLSGVQSIIQRGLAAAEDVFAQIDIPPEPNRGTTPVKRAKGEIAIEHLSFRYPGATEYALENISLQLQPGETVALVGRSGSGKSTLVQLLLRFYAPEHGEIRLDDLVIEEYELADYRKQFGVVSQEISLFSDTIANNIAFGEMRDASYDAVLMAAQKAHAIEFIEAQPQGLDTLLGDDGAGLSGGQKQRLAIARALLKDAPILILDEATSALDTESETYIQEALAAFCEDRTTLVIAHRLSTIENADRVVVMDQGRIVAFGPHQQLLTESPLYARLHKQEIVQS

SEQ ID NO: 4584 - DNA, 1803 bp, Pseudomonas putida GB-1
  CDS (1)..(1803): transl_table=11
gtgccgggcaagccatacagtgcggccgatcgactgagctgggcggaaatccgccgcctggccctgcatcacaagaaaaacctctggtctgccaacctcatcgctgtgctggcggcatgctgcagtgtgcccattccgctgctgctgccgttgctggtggatgaggtgctgctcggccatggtgatgccgcgttgaagtggatgaaccacctgctgccgtccagctggcaggtggccgccggctacattggcctgatgctggcactcaccctgtgcctgcgcctggctgcgctggcgttcaacgtgattcaggccaagctgttcgccggcttggccaaggatatcgtctaccgcctgcgcattcgcctgatcgagcggctcaagcgtatttcgctgaaggaatacgaaagcctgggcagcggcacggtgaccacccacctggtcaccgacctggacaccctcgacaagttcgtcggcgaaaccctcagccgcttcctggtggccatgctgaccctgaccggcacggcagccatcctgatctggatgcactggcaactggccttgctgatcttgctgttcaacccgctggtgatctacttcaccgtgcagttgggcaagcgggtaaaacacctgaaaaagctcgaaaacgacagcaccgcacgctttacccaggcactggcggaaaccctcgatgccatccaggaaatccgcgcgggcaaccgccagggctatttccttggccggttgggcttgcgtgcccgtgaggtgcgcgactacgccgtggactctcaatggaaaagcgacgccagtggccgtgccagtggcctgctgttccagttcggcatcgacatcttccgcgccgcggcgatgcttaccgtgttgttttcagacttgtcgatcggccagatgctggcggtgttcagctacctgtggttcatgatcggcccggtggagcaactgctcaacctgcaatatgcctattacgccgccggtggtgcgctgagccgcctcaacgagctactggcgcgtgacgacgagccgcagtaccccgccgccagcgacccgttcgccggtcgccagaccgtgggtatcgaagtgcgcgacctgcgctttgcctatgccgacgagccggtgctggagcatctcgacctgtcgattgccccaggcgagaaggtggcgattgtcggtgccagcggcggcggcaagagcaccctggtgcaactgctgttgggcctttacagcgcccaggccggaaccatccgcttcggcggggccagcttgcaggaaatcggccttgaaaccctgcgcgagaacgtcgcggtggtgttgcagcacccgtcactgttcaacgacagcgtgcgtgccaacctgaccatgggccgtgattgcagtgacgatgcctgctggcaggcgctgcacattgctcaactggatgccaccatcgctgccttgccccagggcctggacagtgtgctggggcgttctggggtgcgcttgtctggcggccagcggcagcgcctggcgattgcccgcatggtgctggccgagcccaaggtggttatcctcgacgaggccacatcggccctggatgccgccaccgagtacaacctgcatcaggccctggcgcgcttcctcagcggccgcaccacgctgatcatcgcccaccggctttcggcggtgaagcaggctgatcgagtactggtgttcgatagtgggcatgtggctgaagatggcgaccaccagcagctgattgccgaaggcgggttgtatgccaagctgtatgggcacctgcagcagagctga

SEQ ID NO: 4585 - protein, 600 aa, Pseudomonas putida GB-1
MPGKPYSAADRLSWAEIRRLALHHKKNLWSANLIAVLAACCSVPIPLLLPLLVDEVLLGHGDAALKWMNHLLPSSWQVAAGYIGLMLALTLCLRLAALAFNVIQAKLFAGLAKDIVYRLRIRLIERLKRISLKEYESLGSGTVTTHLVTDLDTLDKFVGETLSRFLVAMLTLTGTAAILIWMHWQLALLILLFNPLVIYFTVQLGKRVKHLKKLENDSTARFTQALAETLDAIQEIRAGNRQGYFLGRLGLRAREVRDYAVDSQWKSDASGRASGLLFQFGIDIFRAAAMLTVLFSDLSIGQMLAVFSYLWFMIGPVEQLLNLQYAYYAAGGALSRLNELLARDDEPQYPAASDPFAGRQTVGIEVRDLRFAYADEPVLEHLDLSIAPGEKVAIVGASGGGKSTLVQLLLGLYSAQAGTIRFGGASLQEIGLETLRENVAVVLQHPSLFNDSVRANLTMGRDCSDDACWQALHIAQLDATIAALPQGLDSVLGRSGVRLSGGQRQRLAIARMVLAEPKVVILDEATSALDAATEYNLHQALARFLSGRTTLIIAHRLSAVKQADRVLVFDSGHVAEDGDHQQLIAEGGLYAKLYGHLQQS

SEQ ID NO: 4586 - DNA, 1809 bp, Pseudomonas putida GB-1
  CDS (1)..(1809): transl_table=11
atggccgaaaccccgcgaccggcggagcacacctccagcctgaagatctacttccggctgctgagctatgtgaaaccctatgtcggcattttcctgctgagcattgtcggtttcgtgatctttgcctcgacccagccgatgctggccggcattctcaagtatttcgtcgatggcctgagcaaccccgaagcggtgttgttccccaacgtgccctacctgcgtgacctgcaattgctgcaggcggtgccgctgctgatcatcctgatcgccgcctggcagggcctgggctcgttcctcggcaactacttcctggccaaggtgtccctgtgcctggtgcacgacctgcgtgtggagttgttcaacaagctgctggtgctgcctaaccgctacttcgacaaccacaactccggtcacctgatttcgcgcatcaccttcaacgtgaccatggtcaccggcgcggccaccgatgccatcaaggtggtgatccgcgaaggcctgaccgtggtgttcctgtttgcctacctgctgtggatgaactggcacctgaccctggtgatggtcgccatcctgccggtgatcgcggtcatggtcagcatcgccagcaagaaattccgcaagcagagcaagaagatccaggtggcaatgggcgacgttacccacgtggcgtcggaaaccatccagggctaccgcgtggtccgcagcttcggcggcgaggcctacgaggagcagcgtttcggcaaagccagccagagcaacaccgacaagcaactgcgcatgaccaagaccggctcgctgtacacgccgatgctgcaactggtgatctacagcgccatggccgcgctgatgttcctggtgctgttcctgcggggcgagtccaccgccggtgacctggtagcctatatcactgctgctggcctgctgcccaagccgattcgccagctgtcggaagtcagctcgaccatccagaagggcctggcaggtgccgagagcatcttcgagcagttggacgaagagcctgagctggacaccggtactgtcgagaaggagcgtgtggaagggcgcctggaagtgcgcaacctgagcttcacctacccgggtaccgagcgtgaagtgctgagcgacatcagttttgtcgccgaacctgggcagatgatcgccctggtcggccgttccggcagtggcaagtcgaccttggcggcgcttatcccacgcttctatcaccacgaccaggggcagattctgctcgatggcgtggaaatcgaaaactatcgcctgcgcaacctgcgtcgccatgtttcgcaggtaacccagcacgtcaccctgttcaacgacaccgtggccaacaacatcgcctacggtgacttggccggtgccccacgcgcagacatcgaagccgccgcagccgatgcctacgccaaggagttcgtcgaccggctgccgaagggcttcgataccgaagtgggagagaacggtgtactgctgtccggtggccagcgccagcgcctggcaattgcacgggcgctgctgaaaaacgcgccgctgctgatcctcgacgaggctacttctgcgttggataccgagtccgagcggcatatccaggctgccctggatcacgtgatgcaaggccgtaccacgctggtgatcgctcaccgcctgtcgacgatcgagaaggccgaccagatcctggtcatggaccagggccgcctggtcgagcgtggcacgcatgccgagctgcttgcggccaatggccattatgcccgcttgcatgccatgggcctggatgagccggccaaggccgatatcacctga

SEQ ID NO: 4587 - protein, 602 aa, Pseudomonas putida GB-1
MAETPRPAEHTSSLKIYFRLLSYVKPYVGIFLLSIVGFVIFASTQPMLAGILKYFVDGLSNPEAVLFPNVPYLRDLQLLQAVPLLIILIAAWQGLGSFLGNYFLAKVSLCLVHDLRVELFNKLLVLPNRYFDNHNSGHLISRITFNVTMVTGAATDAIKVVIREGLTVVFLFAYLLWMNWHLTLVMVAILPVIAVMVSIASKKFRKQSKKIQVAMGDVTHVASETIQGYRVVRSFGGEAYEEQRFGKASQSNTDKQLRMTKTGSLYTPMLQLVIYSAMAALMFLVLFLRGESTAGDLVAYITAAGLLPKPIRQLSEVSSTIQKGLAGAESIFEQLDEEPELDTGTVEKERVEGRLEVRNLSFTYPGTEREVLSDISFVAEPGQMIALVGRSGSGKSTLAALIPRFYHHDQGQILLDGVEIENYRLRNLRRHVSQVTQHVTLFNDTVANNIAYGDLAGAPRADIEAAAADAYAKEFVDRLPKGFDTEVGENGVLLSGGQRQRLAIARALLKNAPLLILDEATSALDTESERHIQAALDHVMQGRTTLVIAHRLSTIEKADQILVMDQGRLVERGTHAELLAANGHYARLHAMGLDEPAKADIT

SEQ ID NO: 4588 - DNA, 1740 bp, Marinobacter sp. ELB17
  CDS (1)..(1740): transl_table=11
atgccagagggcagttggcacacctacaagcgccttttacgctatgtgaaacctttttggatagcgtttaccctggcgataatcggcaacgttatctacgccgcggcgtcgaccggcatggcggcggccatggaatacgtcatcaaggccattgaaaatccgaccgatcagaatcggctgattttaactctgctgattgtcggggtgtttgcgtttcgtggcctgggcaccttcatgagccaatatttcatcagttacgtgggtcgtaacgtcatcaatgccctgcgcaccgatgtctttgactgcatgctaaccttgccgtcgcgctactttgatgacaacgcggccggccgattggtgtcgaagctgacctttaacgtggaacaagtggctgaagccgctaccgacgctatcaccattactctccgtgagggcctgaccattgtcgggctgatgggctatatgctctacaccaactggaaactcacgctggtatttctggcggtagggccgctgatcggagcggtggtcagctacgccagcaagcgcttccgtaaaatcagcaaacgcattcagggctccatgggcgacattacccacgttgcgtcggaatcgatcagcggttatcgggtggtgcgcacctttggcggtgaagacttcgaacgcaagcgttttcagaaggtcagcgaaagcaatctgaagcaaagcttgaagatgtcatctacccaggccatcagcgtgcctgtgattcaggttctggtggcaattgcgattgcggcgctggtgtggaccatgttgtcgccgacgattcgcggcgaaatgagtaccggtcaattagtcgcctttattaccgcagcaacaaccatggccaagcctattcgccaagtgacttccgtgcattcaaaaatccagaagggccttgcggcagcctacgatgtgtttgaaaccctggacgaacgcccggagccggattccggcatctttgccccgcagcgggttaaaggcgacatcgaatttcgtgacgtgggctttagctatcgcgaccagctcgacaaggtgttaaacaatatttcactgacggttccagcggggcagagcgttgccctggtcggtcgcagtggcagtggcaaatccacgctggtgagcctgttgccgcgattttacgattacaccgacggcgaaatccgtattgatggccatttgttggaagactttacgctgcaggccctgcgcgctcagattgcactggttacgcagagcgtagtcctgttcaacgatacgattgcagcgaacattgcctacggcgcgctgcgcgattgcagccccgaggccatccgtgaagccgccggcaaagcgcacgctctggaatttatcgaccgcatgcccgagggcctgaataccatgattggcgacaacggcgttatgctttccgggggccagcgccagcgtctggccattgcccgggcgctgctaaaagacgcccctattctgattttggacgaagccacatcggcgctggataccgaatctgagcgctacatccagaatgctatggaaacggtgatgaaaggccgcaccaccttggtgattgctcaccgcctgtcgaccattgaaaacgccgatcgcatactggtgatggacaatggccgcatagtggaatccggccgccatcaggagttgctggaccagggcggcgcctatgcccaactgcatcagatgcagttcagcgagcacgcatga

SEQ ID NO: 4589 - protein, 579 aa, Marinobacter sp. ELB17
MPEGSWHTYKRLLRYVKPFWIAFTLAIIGNVIYAAASTGMAAAMEYVIKAIENPTDQNRLILTLLIVGVFAFRGLGTFMSQYFISYVGRNVINALRTDVFDCMLTLPSRYFDDNAAGRLVSKLTFNVEQVAEAATDAITITLREGLTIVGLMGYMLYTNWKLTLVFLAVGPLIGAVVSYASKRFRKISKRIQGSMGDITHVASESISGYRVVRTFGGEDFERKRFQKVSESNLKQSLKMSSTQAISVPVIQVLVAIAIAALVWTMLSPTIRGEMSTGQLVAFITAATTMAKPIRQVTSVHSKIQKGLAAAYDVFETLDERPEPDSGIFAPQRVKGDIEFRDVGFSYRDQLDKVLNNISLTVPAGQSVALVGRSGSGKSTLVSLLPRFYDYTDGEIRIDGHLLEDFTLQALRAQIALVTQSVVLFNDTIAANIAYGALRDCSPEAIREAAGKAHALEFIDRMPEGLNTMIGDNGVMLSGGQRQRLAIARALLKDAPILILDEATSALDTESERYIQNAMETVMKGRTTLVIAHRLSTIENADRILVMDNGRIVESGRHQELLDQGGAYAQLHQMQFSEHA

SEQ ID NO: 4590 - DNA, 1797 bp, Bacillus sp. SG-1
  CDS (1)..(1797): transl_table=11
atggaaaagacaactaccatgtcagcaaaagaacagcgtcacgttttaaaaaggttattgcgttataccataccgcataaaaaatctattttccttgcgttttttctattggcattaacgactatcggcgatgttcttggaccatatctgattaaaatctttattgatgactatcttaccccaaggaactttccgtatgaaccgctagtctggctgggcgcagcttttcttggcatccagatttccaatgtcgtcatttcctattttcaattgttgaagtttcaggaaattgcactgaaaatcatccagcagttgagggtggatgtcttctcaaaagttcaaaacctgggaatgagatactttgacaggacgcctgctggaggaattgtatcaagggtgacaaacgatactgaggccattaaggatatgtttgtcagtgtgcttgtgagcttcatccaagggaatttcctgatcatagggatattcaccgctatgtttattttgaatgtcaagctggcactattctgcctgttcatcctgcctgtattatttttcataatcaaaacgtacaggaagtacagttccattttttatcatgatttgagagagcgcttgagccaattgaatgccaagctgagtgaatctctgcaaggaatggcgattgttcaggtttttcgacaggaaaaaaggttaagaaaagagtttgatgacatcaatgaggatcactataaagcagggatgcggaacataaaaatggatgggctgctccttcgcccggccaccgatttagtttatacggcggctctgattctagtattatcatactttggcatatcctcttttaacagtccagtcgaaattggtgttctatatgctttcatcaactatcttgaccgtttctttgagcccgttaataacgtgatgacgagactgtcgatgtttcagcaggcaatcgttgcctcttctcgagtgtttaccttacttgatgaaaaagaggagtcccctgctcaagacacaaacagcaaagggcagataaaagacgcagagatcgaattccgggacatcactttttcctatgatggccaaaaggatgtactgaaaaacatctcgtttactgctaagcccggcgaaacagtcgctttggtcggacacacagggagcggcaaaagctccattataaatttgttaatgagattttatgagttcagtagaggggaaattctcattgacggcaagtcgataaaagattatccaatggaagagctgagggagaaggttggtctcgtcctgcaagatccattcttgttctatggaaccgtagaagacaacattaagctgcatgcaggcgacatgaccgatgaggaagtgagagcggccgcagaattcgtgcaagctcatacgtttatcgaaaagcttcctgatggttattcccacaaagtagtcgaacgcgggtcgactttctccagcggtcaaaggcagttgatcgcttttgccagaacgattgcgaccaatcctaagattctggtgctggatgaagcgactgccaatatcgatacagaaacggaagacgccattcagcaggctttggccaagatgagaaagggccgtacgaccatagccattgcccaccggttgtctaccatccaggatgcagattgtatcttggtgcttcaccagggtgaaattgtcgaaagaggaaatcaccaggagcttctttcccagaaagggctgtatcataaaatgtatcttctgcaaaatggccttgttgaaggaattgaagatgccgtaagttcataa

SEQ ID NO: 4591 - protein, 598 aa, Bacillus sp. SG-1
MEKTTTMSAKEQRHVLKRLLRYTIPHKKSIFLAFFLLALTTIGDVLGPYLIKIFIDDYLTPRNFPYEPLVWLGAAFLGIQISNVVISYFQLLKFQEIALKIIQQLRVDVFSKVQNLGMRYFDRTPAGGIVSRVTNDTEAIKDMFVSVLVSFIQGNFLIIGIFTAMFILNVKLALFCLFILPVLFFIIKTYRKYSSIFYHDLRERLSQLNAKLSESLQGMAIVQVFRQEKRLRKEFDDINEDHYKAGMRNIKMDGLLLRPATDLVYTAALILVLSYFGISSFNSPVEIGVLYAFINYLDRFFEPVNNVMTRLSMFQQAIVASSRVFTLLDEKEESPAQDTNSKGQIKDAEIEFRDITFSYDGQKDVLKNISFTAKPGETVALVGHTGSGKSSIINLLMRFYEFSRGEILIDGKSIKDYPMEELREKVGLVLQDPFLFYGTVEDNIKLHAGDMTDEEVRAAAEFVQAHTFIEKLPDGYSHKVVERGSTFSSGQRQLIAFARTIATNPKILVLDEATANIDTETEDAIQQALAKMRKGRTTIAIAHRLSTIQDADCILVLHQGEIVERGNHQELLSQKGLYHKMYLLQNGLVEGIEDAVSS

SEQ ID NO: 4592 - DNA, 1761 bp, unidentified eubacterium SCB49
  CDS (1)..(1761): transl_table=11
ttgaaagattctggaaaagcatttgattttaagttatttaagcgactcgtttcatttgcaaacgtgtatcgttttatattttattttgtaggttttgctgctatagccatggcggcactttctattttaagaccttatatattaaaggtagctattgacgaatctattattgggaaagatagtgagggcttgttattctttgttcttttaatggccggagttctattggtagaagtactgtttcaattgtcttttatctattatgcaaactggttaggacagcatgttgttaaagatattcgtgtcaagctttttaagttgatgactagttttaaaatgcaatattttgataacagtgccgtaggaagattaactacacgtgcagtgagtgacttggagactatttcagccatatttagtcaagggctatttgttatagtaagtgatcttcttaaaatgtttgctatcgctggttttatgttggtgttaagttggagactagcgctgatagtatttttaatattacctgtgatacttgttgctacaagactttttcagcgtgctatgaaaactgcttttgaagaagtacgattgcaagtatctaaccttaattcttttgtgcaagaacgaattacggggatgaagatcttacaaatttttaatagagaagatacagagtttagagcctttgaaaagataaattctaaacataaaaaggcgtgggtaaaaactgtttggtataattcaatattcttcccaattgctgaaatgtcaagttctgtagccattggtttggtggtttggtacggaggtcttaatgcagagggaggtatagtaaccttagggattattaccgcttttattgaatattctcaaatgctctttaggcctttaaggcaaatagcagataagtttaacacattacagatgggaatggtggctgcaaaacgcgtttttgaagttcttgatacacattcgcacattgaagataaaggtgttttggctctagaaaatgcacaagggaaaatagactttaaagcagttcattttggctatattccagatgaagaagttattaaagggatatcattttctgtaaatcctggtgaaaccgttgcaattgttggagctaccggagcagggaaatctacaattattaatttgctgaatcgtttttacgagattaatagcggtgtcatttctgtagatggcacacctataaaagaatatgaactagcctctttaagaagccagatagctatagtgttacaagatgtttttctctttgcagatacaattttgaataacattactttaaatgaccctaacatttctgaagaagaagttaggagagctgcaaaagtaattggtgtagatgcctttatcgagacgttgccgggtggatatcactataatgttaaagagagaggtgccatgttatcttctggacaacgacagctcattgcgtttttaagagcctatgtgagtaagccaagtatattaatattagatgaagcaacctcaagtgtagacagctatagtgaagagttgatacagacagctacagaaaaaatcacaaaaggacgaacttctattgtcatcgctcacagactcgctaccattaaaaaagcagacaaaattattgtgatggaagctggtaaaattgttgagatgggaacccacaaagcactccttaaaaaagaagacggacattatcgtaatctttacgaagtccagtttacggtagataaagctatatag

SEQ ID NO: 4593 - protein, 586 aa, unidentified eubacterium SCB49
MKDSGKAFDFKLFKRLVSFANVYRFIFYFVGFAAIAMAALSILRPYILKVAIDESIIGKDSEGLLFFVLLMAGVLLVEVLFQLSFIYYANWLGQHVVKDIRVKLFKLMTSFKMQYFDNSAVGRLTTRAVSDLETISAIFSQGLFVIVSDLLKMFAIAGFMLVLSWRLALIVFLILPVILVATRLFQRAMKTAFEEVRLQVSNLNSFVQERITGMKILQIFNREDTEFRAFEKINSKHKKAWVKTVWYNSIFFPIAEMSSSVAIGLVVWYGGLNAEGGIVTLGIITAFIEYSQMLFRPLRQIADKFNTLQMGMVAAKRVFEVLDTHSHIEDKGVLALENAQGKIDFKAVHFGYIPDEEVIKGISFSVNPGETVAIVGATGAGKSTIINLLNRFYEINSGVISVDGTPIKEYELASLRSQIAIVLQDVFLFADTILNNITLNDPNISEEEVRRAAKVIGVDAFIETLPGGYHYNVKERGAMLSSGQRQLIAFLRAYVSKPSILILDEATSSVDSYSEELIQTATEKITKGRTSIVIAHRLATIKKADKIIVMEAGKIVEMGTHKALLKKEDGHYRNLYEVQFTVDKAI

SEQ ID NO: 4594 - DNA, 4035 bp, Vitis vinifera
  CDS (1)..(4035)
  misc_feature (2646)..(2646): r is g or a
  misc_feature (2662)..(2662): s is g or c
  misc_feature (3254)..(3254): r is g or a
  misc_feature (3649)..(3649): r is g or a
  misc_feature (3930)..(3930): y is t or c
atgcccaaaccctcatggcaaaatgtgcaaaccatcaaggcaaaatgcccaaaccctcaaggcaaaatgcccaaactcaaggcaaaatgctcaaccctcaaggcaaaattcccaaccctcaaggcaaaatgccaaaccttcaaggcaaaatggccaaccctcaaggcaaaatgtctaatcaagggttcagtgactgaaaatgttgtacatagtagcctggatcatggccccactgtgaaggataatgatcagtttaatctacgtgcttccatggaaggactagaacttcgctccattcagatttccgatcagaacccacttccagagaaggatcagcaatccaactcaagtccaaaagacactgtttccttcttcggcctatttgcagctgctgatacattggactgtttttttatgttctttggtagcattggggcttgcatccatggtgctgcacttcctgtgttctttgttttgtttggccgaatgattgattctttgggacgcctatcttcagatccagataaactttcctctcaagtttccaggcatgctctatacttggtctatcttggacttggggttttagcatcagcatggatcggtgttgcattttggatgcaaacaggggaaaggcagacggcccgtttgcgactcaagtatcttcagtcagtcttaagacaggatattaatttctttgacactgaggccagggataaaaatatcactttccacatttcaaatgatgcaattctgttgcaggatgcaattggtgacaagataggccatggtttacgttacctttctcaattctttgttggatttgcaataggattcacatcagtatggcagcttacacttctcaccgtggctgttgttccattgatggctattgctggaggagcctatacagtaatcatgaccaccttgtcagaaaaaggtgaggctgcctatgctgaagctgggaaggttgcagaagaggctatttcacaggttcgtactgtatactcatttgtgggagaggatagagcagttgaaacatattcaaggtcacttcaaaaggcccttaaactggggaaaaagagtgggtttgcaaagggaattggtattggctttacatatgggcttttgttttgtgcttgggcattacttctctggtatgccagcaaactagtcaggcatggggacacaaatggggggaaagcattcactacaattctcaacgtcatattcagtggatttgctcttggtcaagctgcccctaatcttgctgccattgctaaaggccgggctgctgcagccaatatagtaaacatgattgaaacagattctactgcttctaaaaggttagataatggaataatgttgccaaaagtagctggacagcttgaattttgtgaggtctgttttgcttatccctcacgacctagtatggtcttcgaaaatttgagcttttctatttatgctgggaagacctttgctgttgttgggccaagtggttcaggaaagagcaccattatttccatggttcaacgtttctatgagcccacttcaggtaaaatactgttggatggacatgatattaagaatctccgattaaaatggctgagagcacagatggggttggttagtcaagaacctgcattgtttgccacgactatagctgggaacattctgtatggaaaagaagatgctgatatggatcaggtcatagaagctgccaaagctgcaaatgcacattcttttgttcaaggcttacctgatggttatcaaactcaggtaggagagggaggaactcagctttctggagggcagaaacagagaattgcaattgcaagagcagtgctgaggaacccaaagatactgctgttagatgaggccactagtgctcttgatgcagaatcggaactcattgttcagaaggcactagataaaatcatgttgaatcgaacaacaatcgttgttgcacacagattatccacaattcgagacgttaataaaatcattgttttgaagaatggtcaggttgttgaaagtgggactcatttggaattgatttcccagggaggggagtatgcaactttagtgagcttacaagtatcagaacatggtaaaagtccaagtacaaaggtttgtcaagacacttctgggatttctaaaagttttccagaatcccccaacagtcagaaccaccaacaggaggttaagtcaattaccaaaggagagctacagccatatgatcagaacatggcctcatccagctctcctccaattccatcactttggcaactagttaaactaaacgcaccagagtggccctttgctgtgcttggatcagtgggcgcaattctggctgggatggaagctcctctgtttgccctggggatcacacatgtcttgactgcattctattctggcaaagatttccagattaagcgagaggttgaccacatttctctcatatttgttggagcggccattcttactattttcatatatctattgcaacactatttctatacattgatgggcgagcgtctcaccactcgcattcggttattaatgttctcagcaatcctttccaatgagataggctggtttgatttggatgagaacagtactggctctttgacatcaaaattagcrgcagatgcgacattastaagaagcgcacttgccgaccgcctctcaaccattgtgcagaatgttgcactcactgtgacagcatttgttattgccttcacattaagttggcgtatagcatctgttatcattgcctccttccctcttctaattggagcttccataactgagcaactatttctgaagggttttggaggagactacacacgggcctacgctcaagcaactgctgtggcacgagaagcaattgccaatattcgtaccgttgctgcatttggtgctgaagaccgaatctcactccagtttgcttctgaactgaaccaaccaaataaacaagcacttttacgtggccatatatcaggttttggatatggtgtatcacagctctttgcattctgttcctatgcacttggcctttggtatgcatcagttcttatcaaacacaatgactcgaactttggagacatcatcaagtccttcatggttttgataatcaccgcattttcagtagcagagacacttgctctaacacctgacattgtaaagggatcacaagcacttggatcagtcttcagtattctccaaagaaaaacagccattaaccgtgacartcctacatcttcagtggtaactgatatccagggagacatagagttcaggaatgtgagtttcagataccccgcaaggcctgatctcaccatcttcaaggacttaaatttgaaaatctcagcaggaaagagtcttgcaatagtgggccaaagtgggtcagggaagagtactgtgatctcactggttatgagattttacgacccaacttcaggggcagtcatgattgatggatttgatatcaaaggcttaaacttaagatcgttgaggatgaaaataggtttagttcagcaagaaccagcattgttctctaccacaatttacgagaacatcaggtatgggaatgaagaggcatcggaaattgagataatgaaagcagccagggcagcaaatgctcacrgcttcatcagcagaatgcctgaagggtaccaaactcaagtgggtgacagaggagttcagttatcagggggacagaagcagagggtggccatagctagagcaatattgaaagacccatccattctccttttagatgaagcaacaagtgccctggacacagcatccgaaaagctggttcaagaggctcttgatacactaatggaaggccgaacaacaattttgatagcacacaggttgtcaactatacacaatgcagacagcattgcggtactgcaacatggyaaggtagttgaaaccggagaccaccggcagctcatcacccggcctggcagcatctataagcagttagttagcctacaacaggaaaaaggtgaagttcccaattga

SEQ ID NO: 4595 - protein, 1344 aa, Vitis vinifera
  misc_feature (888)..(888): The Xaa at location 888 stands for Leu, or Val.
  misc_feature (1085)..(1085): The Xaa at location 1085 stands for Asn, or Ser.
  misc_feature (1217)..(1217): The Xaa at location 1217 stands for Gly, or Ser.
MPKPSWQNVQTIKAKCPNPQGKMPKLKAKCSTLKAKFPTLKAKCQTFKAKWPTLKAKCLIKGSVTENVVHSSLDHGPTVKDNDQFNLRASMEGLELRSIQISDQNPLPEKDQQSNSSPKDTVSFFGLFAAADTLDCFFMFFGSIGACIHGAALPVFFVLFGRMIDSLGRLSSDPDKLSSQVSRHALYLVYLGLGVLASAWIGVAFWMQTGERQTARLRLKYLQSVLRQDINFFDTEARDKNITFHISNDAILLQDAIGDKIGHGLRYLSQFFVGFAIGFTSVWQLTLLTVAVVPLMAIAGGAYTVIMTTLSEKGEAAYAEAGKVAEEAISQVRTVYSFVGEDRAVETYSRSLQKALKLGKKSGFAKGIGIGFTYGLLFCAWALLLWYASKLVRHGDTNGGKAFTTILNVIFSGFALGQAAPNLAAIAKGRAAAANIVNMIETDSTASKRLDNGIMLPKVAGQLEFCEVCFAYPSRPSMVFENLSFSIYAGKTFAVVGPSGSGKSTIISMVQRFYEPTSGKILLDGHDIKNLRLKWLRAQMGLVSQEPALFATTIAGNILYGKEDADMDQVIEAAKAANAHSFVQGLPDGYQTQVGEGGTQLSGGQKQRIAIARAVLRNPKILLLDEATSALDAESELIVQKALDKIMLNRTTIVVAHRLSTIRDVNKIIVLKNGQVVESGTHLELISQGGEYATLVSLQVSEHGKSPSTKVCQDTSGISKSFPESPNSQNHQQEVKSITKGELQPYDQNMASSSSPPIPSLWQLVKLNAPEWPFAVLGSVGAILAGMEAPLFALGITHVLTAFYSGKDFQIKREVDHISLIFVGAAILTIFIYLLQHYFYTLMGERLTTRIRLLMFSAILSNEIGWFDLDENSTGSLTSKLAADATLXRSALADRLSTIVQNVALTVTAFVIAFTLSWRIASVIIASFPLLIGASITEQLFLKGFGGDYTRAYAQATAVAREAIANIRTVAAFGAEDRISLQFASELNQPNKQALLRGHISGFGYGVSQLFAFCSYALGLWYASVLIKHNDSNFGDIIKSFMVLIITAFSVAETLALTPDIVKGSQALGSVFSILQRKTAINRDXPTSSVVTDIQGDIEFRNVSFRYPARPDLTIFKDLNLKISAGKSLAIVGQSGSGKSTVISLVMRFYDPTSGAVMIDGFDIKGLNLRSLRMKIGLVQQEPALFSTTIYENIRYGNEEASEIEIMKAARAANAHXFISRMPEGYQTQVGDRGVQLSGGQKQRVAIARAILKDPSILLLDEATSALDTASEKLVQEALDTLMEGRTTILIAHRLSTIHNADSIAVLQHGKVVETGDHRQLITRPGSIYKQLVSLQQEKGEVPN

SEQ ID NO: 4596 - DNA, 1953 bp, Amycolatopsis orientalis
  CDS (1)..(1953): transl_table=11
atggatatggtgttgcgcttcgagggggtggacaagagcgagaacgatcccgacccctgggtgaccacggtccgcaaggggacgctgcgccgggtgctcggctacttccgcccgcacgtcggcaaggtggcgctcttcggactcgtcgccgtgctggagtcgcttatcgtcgtcgcaactcccttgctgttgaaggagctcatcgacaacggcatcgaaaagaacgatctcggcctggtgatctggatggccgccctgaccgccgtgctcgccgtgctcgccgcggggctgacgctggtgtccggttacatctccgggaagatcggcgaggggatcacctacgacctccgggttcaggcgctcgaccatgtccggcggctgccgatcgcgttcttcacccgcacccagaccggtgtgctggtcggtcggctgcacaccgaactgatcatggcgcagcagcatttcaccggcttgctgatggcaaccaccagcctggtgatggcgctggtggtgctgatcgagctgttctacctttcgtggcttgtcgccgtcatctcgctggcgctgattccgctcttcctcgtgccctgggttcgcgtggggcgggtgatccagcggctgtccggacggcagatggacgcgaacaccggccttggcggactgctccaggagcggttcaacgtgcagggcgcgatgctctccaagctcttcggccgtccgaacgaggagatggccgagttcgaggaccgtgccagcgggatccgcaagatcggcgtgagcctttcggtatggggccggatggccttcgtcatgatggcgctgatggcctcgctcgccacggcgctcgtctacggcgtcggtggcgggctcgtgctcgccggggcattccaggtcggcacgctggtcgccatcgccaccctgctcgggcggctgttcgggccgatcacccagctgtccgggatgcaggagctcttccagaccgtcgtggtgagcttctcccgggtcttcgagctgctggacctgaagccgttgatccaggaacgccccgacgcggtcaagctcgacaaggacgtggccccggacatcgagttcgagaacgtgtcgttccgctatcccaccgcggacgaggtctcgctggcgtcgctggagcacctgaaggccaagcgggaacgcggggaagtgacaccggatgtcctgcgcgacgtgagcttccacgtgcaggccggaacgctcaccgcgctcgtcggcccctccggcgcgggcaagagcaccatcacccacctggtctcccggctgtacgacccgaactccgggaccgttcgcgtcggcggacacgatctgcgggacctcaccttcgactcgatccgcgaagcggtgggtgtggtcagccaggacgcctacctcttccacgacacgatccgggagaacctgctctacgcccgcccgacggccaccgaggacgagctgatcgaggcgtgcaagggggcccagatctgggatctgatcgaatcccttcccctcgggttggacaccgtcacgggtgaccgcggctaccgcatgtccggcggggagaagcagcggctggccatcgcccggctgctgttgaaggagccgaggatcgtcgtgctcgacgaagccaccgcgcacctggactccgagtcggaggccgccgtccagcgggcactcaagaccgcgctgcgcagccgtacctcgctggtgatcgctcaccggttgtccacgatccgcgaagccgaccagatcctcgtgatcgacggcggcggggtccgtgagcgtggcacccacgacgagttgatggccaagggcggtctctacgcggagctctaccacacacagttcgccgacccacgaatcaatgaagccaagccggaacgcgaagacgagctggacgagccggagccagagccggtggcttacatgggttttggaggatga

SEQ ID NO: 4597 - protein, 650 aa, Amycolatopsis orientalis
MDMVLRFEGVDKSENDPDPWVTTVRKGTLRRVLGYFRPHVGKVALFGLVAVLESLIVVATPLLLKELIDNGIEKNDLGLVIWMAALTAVLAVLAAGLTLVSGYISGKIGEGITYDLRVQALDHVRRLPIAFFTRTQTGVLVGRLHTELIMAQQHFTGLLMATTSLVMALVVLIELFYLSWLVAVISLALIPLFLVPWVRVGRVIQRLSGRQMDANTGLGGLLQERFNVQGAMLSKLFGRPNEEMAEFEDRASGIRKIGVSLSVWGRMAFVMMALMASLATALVYGVGGGLVLAGAFQVGTLVAIATLLGRLFGPITQLSGMQELFQTVVVSFSRVFELLDLKPLIQERPDAVKLDKDVAPDIEFENVSFRYPTADEVSLASLEHLKAKRERGEVTPDVLRDVSFHVQAGTLTALVGPSGAGKSTITHLVSRLYDPNSGTVRVGGHDLRDLTFDSIREAVGVVSQDAYLFHDTIRENLLYARPTATEDELIEACKGAQIWDLIESLPLGLDTVTGDRGYRMSGGEKQRLAIARLLLKEPRIVVLDEATAHLDSESEAAVQRALKTALRSRTSLVIAHRLSTIREADQILVIDGGGVRERGTHDELMAKGGLYAELYHTQFADPRINEAKPEREDELDEPEPEPVAYMGFGG

SEQ ID NO: 4598 - DNA, 1956 bp, Streptomyces fungicidicus
  CDS (1)..(1956): transl_table=11
gtgaccgtgggacacgacccgacgatgggcacgatcggactgcgggtcgaaggactggtggacccgcagccggtcaggtccggcacgttcaagcggatcattccctacgccatgcgctaccgccgggccatggcgatggtcatggtggcgacgatcgtcgactccctgatcacggtgtcgatcccgctgaccctcaaaatgatcatcgatgacggcatcatccccgggaagacgtccgtcgtgttcggcctcgccgggctcgtcgccggactggccctgctgaacgtcgtggcggtctacacgcagacgtggttctccggaagggtcggccagggcctcatcttcgacctgcggaccgcggtgttctcccacatccagcggcagccggtggcgttcttcacccgcacccagaccgggtcgctggtcagccggatcaacaccgacatcgtgggcgcccaacaggccctcacctcgctgctgtcgcagtcgctgtcgacgctgctgacgctggtcctggtgctcgcggcgatgctctacctctcgtggccgatcaccgtggcggcgctgatcatgatcccgctgttcttcatccccgggaagatcatcgcccagcggctggagaagctggcccgcgccggcatgcagaacgacgccaagctgggctcgatgatgaccgagcggttcaacatctccggcgcgatgctcgtcaagctctacggccgtccggaggacgagtccgccgagttctccaagaaggcgggcctcgtccgggacatcgcgatctcgatggacgtgcacgcacggctgctgttcatcctcgtcaccctgctcaccaccgtcaccacggcgatggtgtacggcttcggcggctggttcgtcatcgacggctcgctgcagatcggcacgctggtggccatggtcgccctgctgctgatgctgtacggccccgtcaaccagctgacgaacatccagagcgacgtcatgaccgcgctggtcagcttcgaccgcgtcttcgaggtgctggacctgaagccgctgatcaccgagcgtcccggcgcccgccccctgccggcccgcgcctcggcgaacggcgacggcaccgctccccccgtcgagttcgaccaggtcgccttccgctaccccagcgccgaggaagtgtccctgccctcactggagttgatgccgcagcgcaagagcgagcagggccccggcgcgctggtcctcaacgacgtgagcttccacgccccggccggccggctcacggcgctggtcggcccgtccggcgcgggcaagaccacgatcacccacctggtgccacggctctacgacgccacctcgggaacggtgcggatcggcggccacgacgtccgcgacctgaccctcggctcgctgcagaacacggtcggcgtggtcacccaggacgcgcacctgttccacgacaccatccgggccaacctgctgtacgcccgcccggacgcctccgagcccgagatcgtccaggcgtgcgaggcggcgcggatctggccgacgatctcccagctcccggacggtctcgacacggtcgtcggcgaccgcggctaccggctgtccggcggtgagaagcagcggctggccatcgcccggctcctgctcaagtcgcctccgatcgtcgtcctggacgaggcgacggcgcacctggactccgagtccgagctggccatccagcgggccctcaagaccgccctgaccgggcgcacctcgctcgtcatcgcgcaccggctgtccaccatccaggacgccgaccagatcctcgtcatcgacgacgggcggatccaggagcggggcacccacgaccagctgctggccggcggcggtctctactccgagctgtaccgcacccagttcgcccaccagcagggccgtggccgaccggccgaaagtacggccgccggcaacgggaaccgtgctttggactga

SEQ ID NO: 4599 - protein, 651 aa, Streptomyces fungicidicus
MTVGHDPTMGTIGLRVEGLVDPQPVRSGTFKRIIPYAMRYRRAMAMVMVATIVDSLITVSIPLTLKMIIDDGIIPGKTSVVFGLAGLVAGLALLNVVAVYTQTWFSGRVGQGLIFDLRTAVFSHIQRQPVAFFTRTQTGSLVSRINTDIVGAQQALTSLLSQSLSTLLTLVLVLAAMLYLSWPITVAALIMIPLFFIPGKIIAQRLEKLARAGMQNDAKLGSMMTERFNISGAMLVKLYGRPEDESAEFSKKAGLVRDIAISMDVHARLLFILVTLLTTVTTAMVYGFGGWFVIDGSLQIGTLVAMVALLLMLYGPVNQLTNIQSDVMTALVSFDRVFEVLDLKPLITERPGARPLPARASANGDGTAPPVEFDQVAFRYPSAEEVSLPSLELMPQRKSEQGPGALVLNDVSFHAPAGRLTALVGPSGAGKTTITHLVPRLYDATSGTVRIGGHDVRDLTLGSLQNTVGVVTQDAHLFHDTIRANLLYARPDASEPEIVQACEAARIWPTISQLPDGLDTVVGDRGYRLSGGEKQRLAIARLLLKSPPIVVLDEATAHLDSESELAIQRALKTALTGRTSLVIAHRLSTIQDADQILVIDDGRIQERGTHDQLLAGGGLYSELYRTQFAHQQGRGRPAESTAAGNGNRALD

SEQ ID NO: 4600 - DNA, 3645 bp, Medicago truncatula
  CDS (1)..(3645)
atgggtaaaaatattgttatgaatgaaaataagaacatgaatgggtctattaggtccattttcatgcatgctgatggggaagattggttccttatgattttaggtaccattggagcaattggtgaaggtttcaacgctcctttgattttgtatatttgtagccacatgattaacaatattggaagttcatctaccatggatgtagacactttcatccataacatcaacaagggatattgttggacaaggacaagtggaagacaagctgcaagaatgagatacaagtacttaaaagcagtacttaggcaagaagttgcttattttgatttgcaggttacaagcacctcagaaatcatcactagtgtctctaatgacactattgtaattcaagatgttcttagtgagaaggttccaaatttcttgatgaacatttcattgtttattgggagctacatagtggcatttacaatgttatggagaatggccattgtagcatttccatctgttattcttctggtaatccctggaataatctatggcaaggttttgatgggtttatcctgcaagattagagaagagtataatcaagctggtacaattgcagaacaaacaatatctaccattagaactgtctattcatttgtgggagaaaacaaatccatgtttgctttctctaatgctttgcaagggattgttaatttgggtttaaaacaaggattagctaaaggtttagcaattggaagcaatggtgttgtctttgcaatttggtccttcatgtgctattatggtagcaaattggttatgtatcatggtgctaaaggagggacagtttttgcagttggagcatccataactgttggtggattaggattaggagcaagtttattaaacataaagtatttctcagaagcatgttcagctggtgaaagaataaagagagtaattgaaagagttcccaagatagattccaacaacacaaaaggagagatattaaacaatgtttttggggaagtggaatttgaccatgtagaatttgcatatccaacaagaccagaaaccattatccttaaaaacttgtgtctcaagattccagcagggaaaacaatggcattggttggtgagagtggttcagggaaatcaactgtgatatctttattgcaacggttttatgatccaatcggtggtgagatacgtcttgatggagtagctattcgtaacttgcagattaaatggcttaggtcaatgatggggttggttagtcaagaacctgctttatttgcaacaagcattaaagagaatataatttttggtaaagaagatgctaccgaagatgagattgttgaagctgcgaaaatttgtaatgctcatgatttcatttctttgcttcctcaaggttacaatactcaggtaggagaaagagggattcaattatcaggtggacaaaaacaaagaatagcaattgctcgagcaataattaagaaaccgcgaatctttcttttggatgaagcaactagtgcgttagacactgagtcagaaaaaatggtccaacaagcactcgaaaatgcaacaaacggatgcactgccatcataatcgcccaccgcctctccacaatccaaaatgccgacattgttgccgttgtggacgatggaagagtcaatgagattggctcacaggatgaacttctagaaaatgaaaatggcatctactcgtcccttgtccgccttcaacaaaccaacaaatccaaaacacaatcagatgaaactgttacagctactttcaccaatgtagacacagatatcacgtgtctagtggaccctactagttcagctgaagatcacattagcgtccatcaagctagtactagtaacaacaaaaatgaagaagacgtgaagcaactaaataatccggtgtcattttggagattacttctactgaacgctccagaatggaagcaagcggttttagggtgtttgagtgcaatggtgttcggtgcagttcaacctgtttacgcatttgcaatggggtcgatgatatctgtgtattttcaaacagattacgaggagctaaaaaacaagattaaaatctattctctttgttttctgtgtctatcgttaatatcattggtggttaatgttgggcaacattataacttcgcttacatgggagaatatttgactaaacgtgtgagagagagcatgttttctaaaatgctcacgtttgaagttgggtggttcgatcgtgaagaaaattccagtggtgctatttgttctcgacttgccaatgatgctaatgtggtgaggtcattagttggtgatagaatggctttgttggtacaagctttctcagcagtagcaacagcatacactatgggtctgatcatttcatggaggctcaaccttgttatgatcgccattcaaccgattataatagcttgcttttacacaagaagtgtattactcaaaagcatgtcaagtaagtctatgaaggcccaacaacaaagtagtaagatagctgctgaagctgtttcaaatcatagaaccataactgctttttcttctcaagatagaatactcaaaatgcttgaaacctcccaacaagacccaattcaagagaattttcgacagtcgtggtttgctggtattgggcttgggttttcacaattcctcttatcttgttcttgggccatgaattattggtacggcgccaagcttgttgctgatgggaacataacaaggaaagcattgtttgagagttttatggtggtcgtgagcacgggacgggttataggtgatgctggcagcatgactaaagaccttgccaaaggcgttgatgttgtgagctctatttttgccattcttgatcggtctaccaaaatcaagccagacaaccctaacggatttaagcccgatacattaatgggccatatcgaactctacgacgtgcattttgcttaccccgctaggccaaatgtggctatctttcaaggtttttcaatcaaaattgaagcagggaaatcgacggcattagtggggcaaagcgggtctggcaaatcaaccatcataggattaatagagagattctatgatccaataaaaggaaatgtgacaatagatggtacaaacataaaatcatataacctaaagtcactaagaaaacacatagcacttgtgagccaagaaccaacattgataaatggaaccataagagacaacattgcatatggaacaacaacatgtgacaacatcgatgaaactgagatcatagaggcatcaagagtagccaatgctcatgatttcattgcaagtttgaaagatgggtatgagacatggtgtggggacaaaggagtgcaactttcaggggggcaaaaacaaaggatagcaatagctagagccatgttgaagaatccaaaggtgttgcttctagatgaagcaacaagtgcacttgataataattcagaaaaggtagtgcaagatgcattgaataaggtaatggttggaaggactagtgtggttgtagcacataggttgagtaccatacacaattgtgatgttattgctgttttagaaaaagggaaaatggttgaaattggaactcacaaagcattattggataaaggaccttttggtgcttattactctttgtga

SEQ ID NO: 4601 - protein, 1214 aa, Medicago truncatula
MGKNIVMNENKNMNGSIRSIFMHADGEDWFLMILGTIGAIGEGFNAPLILYICSHMINNIGSSSTMDVDTFIHNINKGYCWTRTSGRQAARMRYKYLKAVLRQEVAYFDLQVTSTSEIITSVSNDTIVIQDVLSEKVPNFLMNISLFIGSYIVAFTMLWRMAIVAFPSVILLVIPGIIYGKVLMGLSCKIREEYNQAGTIAEQTISTIRTVYSFVGENKSMFAFSNALQGIVNLGLKQGLAKGLAIGSNGVVFAIWSFMCYYGSKLVMYHGAKGGTVFAVGASITVGGLGLGASLLNIKYFSEACSAGERIKRVIERVPKIDSNNTKGEILNNVFGEVEFDHVEFAYPTRPETIILKNLCLKIPAGKTMALVGESGSGKSTVISLLQRFYDPIGGEIRLDGVAIRNLQIKWLRSMMGLVSQEPALFATSIKENIIFGKEDATEDEIVEAAKICNAHDFISLLPQGYNTQVGERGIQLSGGQKQRIAIARAIIKKPRIFLLDEATSALDTESEKMVQQALENATNGCTAIIIAHRLSTIQNADIVAVVDDGRVNEIGSQDELLENENGIYSSLVRLQQTNKSKTQSDETVTATFTNVDTDITCLVDPTSSAEDHISVHQASTSNNKNEEDVKQLNNPVSFWRLLLLNAPEWKQAVLGCLSAMVFGAVQPVYAFAMGSMISVYFQTDYEELKNKIKIYSLCFLCLSLISLVVNVGQHYNFAYMGEYLTKRVRESMFSKMLTFEVGWFDREENSSGAICSRLANDANVVRSLVGDRMALLVQAFSAVATAYTMGLIISWRLNLVMIAIQPIIIACFYTRSVLLKSMSSKSMKAQQQSSKIAAEAVSNHRTITAFSSQDRILKMLETSQQDPIQENFRQSWFAGIGLGFSQFLLSCSWAMNYWYGAKLVADGNITRKALFESFMVVVSTGRVIGDAGSMTKDLAKGVDVVSSIFAILDRSTKIKPDNPNGFKPDTLMGHIELYDVHFAYPARPNVAIFQGFSIKIEAGKSTALVGQSGSGKSTIIGLIERFYDPIKGNVTIDGTNIKSYNLKSLRKHIALVSQEPTLINGTIRDNIAYGTTTCDNIDETEIIEASRVANAHDFIASLKDGYETWCGDKGVQLSGGQKQRIAIARAMLKNPKVLLLDEATSALDNNSEKVVQDALNKVMVGRTSVVVAHRLSTIHNCDVIAVLEKGKMVEIGTHKALLDKGPFGAYYSL

SEQ ID NO: 4602 - DNA, 1854 bp, Streptomyces ribosidificus
  CDS (1)..(1854): transl_table=11
atgacgtcgctgcggcgctgcgtcccctatctgcgcccgcaccgctggctgatggcgggcgtgtgcggcgcggccttcgggtcgatgctggcgggtctggccatgccgctggtgctgcagcggctggtggacgggccggttgcggagcgggacagcgccgcgctgccgtggtgcatcggcgggttcaccctcctcggcctggtcgaggcggtgctgctgggcgcgcgccggctgctggtggtgcgcccggcgacccggctggagacgcagatgcgggccgatgtgtcggcgcacatccagcggctgccgctgtcgttccactcccgctggcagtcgggtcagctgctctcgcggaccgtctcggacgtgacagagatcggccggttcgtggcgttctccgccgtctatctaatggtgaacgtcgcggcgctcgccgtcggtctggtcgtactggcatggctcgggccggtgctcgcgctgatcgtgtttctggcgtacgcgccgatggtgggggccaccacggtgttcgagcagcggttccgggcggtggcgcgctccgcgaaggaggtgagcggcgatctgtccacgactgtggaggagtcagtgctcggcgtgcgggtgctgaaggtgttcgggcgcggcccggagacggtgcgccggttcaccgggcaggcgcgccggctgcgcggcctggagctgcggaagctgtcgtacacggcggccctgtggtggatcatcacggcgctgccggacctggcgatcgtggcggtgatcgggtacggcggctacggcgtcgccaccggcgcgctcacgctgggcacgctgatggcggcggtgacggtgaccacgtatctacgctggccggccgactcgctcggctggctgaccaccgacgcgtcgaaggcggccgcggctgccgaccggtactggcaggtgcgggacgagccggtgacggtgggcgagccggagcggccgcagccgttgccgtcgccactgcacggtgagatccgtctggaggacgtgcactacgcgcacccgggcggccgtgccgcggcgctgcggggcgtcggcctgacgatccgggcgggcaccatggtagccctggtcggggcgaccggttccggcaagagcacgctgctgtcgctgctgtcccggctggacgacccgacgtcggggcgcatcacgctcgacggcgtggatctgcgggagctggccctggccgacctgcgatcggtggtgtgctgcgcgttcgacgacccggtgctgttctccggcacggtgcgggccaacgtcacgttgggccttcccgaggcggacggcgggagtgaggacggggacgcggcggtgtgggaggcgctgcggacggtgcgggcggacggattcgtctccgcgctgcccgagcggctgtccacggtgatcggcgaggagggactgggcctctccggcggccagcggcagcggctggcgctcgcccgggccatcctgcccgggccgaaggtgctagtgctggacaatgcgctgtcggcgctggacgtacgaaccgagcgggaggtggaagccgcgctgggcggggtgctgagccgggttaccacggtggtgacggcgcaccggccgggcacgctgcgcctggcggaccaggtggtgttcctcgcgggcgggcgggtcgccgcgacgggcacgcacgaggagctgatggcccgtgagccggagtatcggcggctagtcgccccgtcgctgccgacggtcgccggccccgtggggcgcgacaccgaggaccccgggtacgccgacgacaccgacgaggtcgcggacatcgcggaggacggcatggcgggacgggggcggacacgatga

SEQ ID NO: 4603 - protein, 617 aa, Streptomyces ribosidificus
MTSLRRCVPYLRPHRWLMAGVCGAAFGSMLAGLAMPLVLQRLVDGPVAERDSAALPWCIGGFTLLGLVEAVLLGARRLLVVRPATRLETQMRADVSAHIQRLPLSFHSRWQSGQLLSRTVSDVTEIGRFVAFSAVYLMVNVAALAVGLVVLAWLGPVLALIVFLAYAPMVGATTVFEQRFRAVARSAKEVSGDLSTTVEESVLGVRVLKVFGRGPETVRRFTGQARRLRGLELRKLSYTAALWWIITALPDLAIVAVIGYGGYGVATGALTLGTLMAAVTVTTYLRWPADSLGWLTTDASKAAAAADRYWQVRDEPVTVGEPERPQPLPSPLHGEIRLEDVHYAHPGGRAAALRGVGLTIRAGTMVALVGATGSGKSTLLSLLSRLDDPTSGRITLDGVDLRELALADLRSVVCCAFDDPVLFSGTVRANVTLGLPEADGGSEDGDAAVWEALRTVRADGFVSALPERLSTVIGEEGLGLSGGQRQRLALARAILPGPKVLVLDNALSALDVRTEREVEAALGGVLSRVTTVVTAHRPGTLRLADQVVFLAGGRVAATGTHEELMAREPEYRRLVAPSLPTVAGPVGRDTEDPGYADDTDEVADIAEDGMAGRGRTR

SEQ ID NO: 4604 - DNA, 1785 bp, Streptomyces ribosidificus
  CDS (1)..(1785): transl_table=11
atgaacggcacggaggacgcgggctcccgggcccggcgggtcgccctgctgcgcatgctgctgtggcccgagcggcgacggctggcggccgccacggcactagccttggtggagaacgtgtgcggtctcgtcccgccactgctgatcgccgccggtatcgaccggggcgtccccgcggcaggggacgggcactggacgccgctgatcggcttcacggccgcggcgctggccgccgggctggccaccgcgacgctcaagtactgcttcctccgctactcgggcggcatcgcccaggacttgctgttcgagctacggcaccgggccttcacccatgtgatggatcagccgctggcgttccacgagtcgtacccgtcgggccgagtgatcgcccggctgtccagcgatgtggagtcggtcgaggagatgctggagatgggcctggacgggctgttctccgcgctcttctcgatggtcggcatcctcgccgtgatgctgtggatggaccagccgatggccgcggccatcattgctctgttcgtcccgctgtacgcgctgacgcggtggttccggcaccggtcacggcggtcctaccgctccacccggacggccgtggagggcgtcgtgcagcacacggtcgaggtgtacaacggcatcagggccgtgcaggcgttccgccgcgaggcagccaacgcggcccgtctgcgcggtcttgacgcccggtacgcggtggcgcggagggacgccagctgggtgagcgccgccttcagcggcggcgtgaagctgctcggcaacctgtcgctggcggggctgctgacactgggcgtgttccgcatcgagcagggagcgttggcgatcggtacgctcaccgcgttcctgctgtatgtgtaccggctgtacgatccgatcgacgagctggcaagcttcgccgacgcgttctcggcggcgtcggcggggctggagaagatcagcgcgctgttcatgcgccacccggcggtggccgagccggagcacccggtgtccctgccggccgagccgccgggcggacggggcgccgtacgattcgagggcgtccacttccggtacggcgaggcgggcaggcccgtgctgtccggcgtcgacctggcgctcgaacccggccgtacggtggccctggtgggcacgaccggcgctggcaagtccacgatcgccaagctggtggcacggctctacgaccccacggcgggccgggtcacgctggacggggtggacctgtcggacttggccgacaccgacctgcgcggcgccgtgtcggtgatcacccaggagtcgttcctgttctccgggtcggtcgccgacaacatcgcgctgggccggccggacgcctcgcgcgccgagatccgggcggccgccgaggcggtgggcgcacacgggttcatcagcgcgctgcccgacggctacgacacggatgtgcacaagcgcggtacgggcctgtcggccgggcagcggcagctgatcgccatggcccgcgtgatgctggcatcaccgcgcgtgctgatcctcgacgaggcgacatccagcatggacaccccgtcggagcgggccgtacacgaggcactgacccgtgtcctcacggaccgcaccgcggtgatcatcgcgcaccggctgtccacggtcgccatcgccgaccgcgtcctggtcatcgaggacggtgtggtggtggaggacggcagcccggagcaactgctgcaggcgggcggacggttcgccggcatgcagcggggctggctggccgacaccacggcgtga

SEQ ID NO: 4605 - protein, 594 aa, Streptomyces ribosidificus
MNGTEDAGSRARRVALLRMLLWPERRRLAAATALALVENVCGLVPPLLIAAGIDRGVPAAGDGHWTPLIGFTAAALAAGLATATLKYCFLRYSGGIAQDLLFELRHRAFTHVMDQPLAFHESYPSGRVIARLSSDVESVEEMLEMGLDGLFSALFSMVGILAVMLWMDQPMAAAIIALFVPLYALTRWFRHRSRRSYRSTRTAVEGVVQHTVEVYNGIRAVQAFRREAANAARLRGLDARYAVARRDASWVSAAFSGGVKLLGNLSLAGLLTLGVFRIEQGALAIGTLTAFLLYVYRLYDPIDELASFADAFSAASAGLEKISALFMRHPAVAEPEHPVSLPAEPPGGRGAVRFEGVHFRYGEAGRPVLSGVDLALEPGRTVALVGTTGAGKSTIAKLVARLYDPTAGRVTLDGVDLSDLADTDLRGAVSVITQESFLFSGSVADNIALGRPDASRAEIRAAAEAVGAHGFISALPDGYDTDVHKRGTGLSAGQRQLIAMARVMLASPRVLILDEATSSMDTPSERAVHEALTRVLTDRTAVIIAHRLSTVAIADRVLVIEDGVVVEDGSPEQLLQAGGRFAGMQRGWLADTTA

SEQ ID NO: 4606 - DNA, 1887 bp, Streptomyces rimosus subsp
  CDS (1)..(1887): transl_table=11
atgcccgaggaccggcaggagaacgacacggccgccccccggccctcgggcgcccctgacgtggaccgggctgcggacgaggccgacggcaggccggacgaccggcggctgcgggaacgccgcaaccagctgctgcgcaccctgctggcgcccgagcggcgccggctgacccgcgccgtcggcctggcgctgctggagaacgtctgcgcgctcgtcaccccgctgctgatcgccgccgccatcgaccggggcgtgcccgcggcggcggacggccgctggggtccgctgaccgcctacgcggcgctcgcgctgaccgccgggacggccaccgccaccctgcggtacggcttcctgcgctactccgggaacatcgcgcagaccctgctgttccggctgcgctgccgcaccttcgcgcacgccgtgcgcctgccgctgtcctaccacgaggccgcgccctcgggcagcgtcgtcgcccggctctccagcgacgtggagtccgtcgaggaggtgctggagatgggtctggacggcctgttctccgccctgttctcgatggtgggcacggtggccgtgatgctctggctcgacctgccgatggccgccgtcgtactcgccctgttcatcccgctctacctgctcacccgctggttccgggaccgctcgcggcgcgcctaccggcgcacccggggcgccaccgagcggatcgtgcagcacaccggcgagacgtacaacggcatccgtgccgtgcaggcgttccgcaaggagggcgagaacaccgcgcggctgcgggagatggacgccacctatgccaccgcgcgggccgcctcggggcgggtcagcgccttcttcagcggcggcgtcaagctgatcggcaacctctcgctggctctgctgctggccctgggcgcgttccgtatcgcaagcggccacctcgaagcgggcgcgctgaccgcgttcctgctgtacgtgcaccggctgtacgacccgatcgacgaactcgcctcgttcgccaacgcgttctccgccgcgtcggccggactggaacggatcggcgtcctcttccacgcacccgacacactgcccgagcccgccgaccccaggccgctgccggcggtggccgcccccggccgcgtccgcttcgaggacgtgcgcttccgctacaccgccgcctcaccgcacgtactggccgggctggacctggatctcgcgcccgcggagaccgtggcgctggtcggtacgaccggggcgggcaagtcgacgctggccaagctgctggcgcggctgtacgacccgacgggcggccggatcaccctggacggggccgacctgcgcgaggtggccgacgccgaactgcgctccggtgtctgcatggtcacccaggaaccgttcctcttctccggctccgtggcggacaacatcgccctgggccggccggacgccacccgcgaggacatcgtcgcggcggccgaggccgtcggcgcgcacggtttcatcagcgcgctgcccgaggggtacgacagcgacgtccacaagcgcggcgccggtctgtcggccggccagcgccagctcgtcgcgctggcccgggtgatgctcagcgccccccgcgtcctgatcctcgacgaggccacctccagcatggacgcccccaccgagcgggccgtgcacacggccctgcaccgggtgctcgccggccgtaccgccctgatcatcgcgcacagcctgaccacggccgccatcgccgaccgggtgctggtcctggagaacggcgtggtcgtggaggacgggccgcccgccgtactggcggcgggcgacgggcccttcgccggcctgtaccgcggctggctgtccgcgaccgacgggcgcacccaccaccccgcgcaccactga

SEQ ID NO: 4607 - protein, 628 aa, Streptomyces rimosus subsp
MPEDRQENDTAAPRPSGAPDVDRAADEADGRPDDRRLRERRNQLLRTLLAPERRRLTRAVGLALLENVCALVTPLLIAAAIDRGVPAAADGRWGPLTAYAALALTAGTATATLRYGFLRYSGNIAQTLLFRLRCRTFAHAVRLPLSYHEAAPSGSVVARLSSDVESVEEVLEMGLDGLFSALFSMVGTVAVMLWLDLPMAAVVLALFIPLYLLTRWFRDRSRRAYRRTRGATERIVQHTGETYNGIRAVQAFRKEGENTARLREMDATYATARAASGRVSAFFSGGVKLIGNLSLALLLALGAFRIASGHLEAGALTAFLLYVHRLYDPIDELASFANAFSAASAGLERIGVLFHAPDTLPEPADPRPLPAVAAPGRVRFEDVRFRYTAASPHVLAGLDLDLAPAETVALVGTTGAGKSTLAKLLARLYDPTGGRITLDGADLREVADAELRSGVCMVTQEPFLFSGSVADNIALGRPDATREDIVAAAEAVGAHGFISALPEGYDSDVHKRGAGLSAGQRQLVALARVMLSAPRVLILDEATSSMDAPTERAVHTALHRVLAGRTALIIAHSLTTAAIADRVLVLENGVVVEDGPPAVLAAGDGPFAGLYRGWLSATDGRTHHPAHH

SEQ ID NO: 4608 - DNA, 1815 bp, Streptomyces hygroscopicus subsp
  CDS (1)..(1815): transl_table=11
atggaattgagcgcgccgctcgcggaaccggccgggccgcgtccctcctgggccgccctacggcggctcggcccctatctgcgcccggtccggctgccggtgggcgccgccgccgccgcgacgctcggcgcgctgctgtgcggactggccattccgctggtcacccagcggatcgtggacgggccgctgagcaccggcgacgcgggcgcggcggtgcggccgatcctgctggtcggagtgcttggcgcggccgaggcggcgctgttctacgcccgccgcaagctgatcgcccgtcccaccgcgctggtggagtcgcacatgcgggccgatctgctggcccatctgctccggctgccggtctccttccacgaccgctggccctcggggcagttgctctcccgggcggtaggcgatctggtcgtgctgcggaagttcctcgcgttcgccgcgctgttcctggtggtcaactcggtcaccgtgctggtgggtctcggggtgctgttcctgatcgacccgtggctggcgctggtggggctggcgggcgcggcgccgctgctgctggtctcctacttctacgagacccggtacaaggtcgctgcccgggccacccaggacgagggcggccatctcgccacgctggtcgaggagaccatgctcggcatccgggtcgtgcgcgcgtacgggcagggccggggcaggctggcgctcttccgcacccaggcggagcggctgcgcaccgcggagctgcgggtggtgcgcatcatggcggccctgtccaccgcgctgctggtcctgcccgagctgggtatcgcgggccaactgggcctcggcgcggtgggggtggccaactccaccctgaccctgggtgatctggtggcggccgtcacggtcagcacctatctgcgctggccgaccgagtgcatcggctgggccctggccgagaccagcacggccgccgccgcctgcgaccggtactgggaggtgcgcgacaccccgccgggcctcaccgacccggcgcatcccaagccgctggtgcggccggcccgaggccatctccggctggaacacgtggagttttgccacccgggagccgaccggccggtgctgcgggaggtgtccctggagctgcggccgggcgagacggtggcgctggtgggcgccaccgggtcgggcaagaccacgctggccgcgctggtgccgcgcctcgccgatgtgacctccggccgggtcaccgtcgacggcgtggacgtccgggagctgcggctggcggacctgcggtccgtggtggggtgtgccttcgacgatccgctgctctcctcgctgaccgtgcgcgagaacgtgaccctgggcgccccggaggcgaccgacgaagccgtgtgggaggcgctgcgggtggcgggcgccgcggacttcgtggccgcgctcgggccggacgggctcgccgtgcgcatcggcgagcagggcatgtcgctctccggcggacagcggcagcggatcgccctggcccgcgcgatcgtgggccggcccgcgctgctggtgctggacgacccgctctccgcgctcgacctgcacaccgaggcggaggtggagcaggcactgcgccgggtgctgcgccgctccaccgccctggtggtggcgcaccggcccaacaccgcccggatggccgaccgggtggtgctgttggaggacggccggatcaccgcccggggcacccaccgggagctgctcacctcctcggccgtctaccgggcgctgatggcggtggagccgcgcccggccggggacacccgcgacgacggggtggtggtccggtga

SEQ ID NO: 4609 - protein, 604 aa, Streptomyces hygroscopicus subsp
MELSAPLAEPAGPRPSWAALRRLGPYLRPVRLPVGAAAAATLGALLCGLAIPLVTQRIVDGPLSTGDAGAAVRPILLVGVLGAAEAALFYARRKLIARPTALVESHMRADLLAHLLRLPVSFHDRWPSGQLLSRAVGDLVVLRKFLAFAALFLVVNSVTVLVGLGVLFLIDPWLALVGLAGAAPLLLVSYFYETRYKVAARATQDEGGHLATLVEETMLGIRVVRAYGQGRGRLALFRTQAERLRTAELRVVRIMAALSTALLVLPELGIAGQLGLGAVGVANSTLTLGDLVAAVTVSTYLRWPTECIGWALAETSTAAAACDRYWEVRDTPPGLTDPAHPKPLVRPARGHLRLEHVEFCHPGADRPVLREVSLELRPGETVALVGATGSGKTTLAALVPRLADVTSGRVTVDGVDVRELRLADLRSVVGCAFDDPLLSSLTVRENVTLGAPEATDEAVWEALRVAGAADFVAALGPDGLAVRIGEQGMSLSGGQRQRIALARAIVGRPALLVLDDPLSALDLHTEAEVEQALRRVLRRSTALVVAHRPNTARMADRVVLLEDGRITARGTHRELLTSSAVYRALMAVEPRPAGDTRDDGVVVR

SEQ ID NO: 4610 - DNA, 1851 bp, Streptomyces hygroscopicus subsp
  CDS (1)..(1851): transl_table=11
gtgagcgcggacaccacctccccggccgccggcccgatggcggaccgcccggccgggcccgccgggcgaccgccggaacaccgggagtcccgccgggtgcggcgcgcgtcccggcagctgctgtacgcgctgctccggccccaccggtggccctccggcgcggccctggccgccctggtgctggagaacgccttccagctggtcggcccgctgctggtggcgcgcgccatcgatctcggcattccccgggcgtcggcgggcgactggggcccgctgaccgggtgcgtggccgggttcaccgcctgcgggctgctggccgccgggacacggtacgcgttcttccggatctccggttcggtgggccaggccgtgctgctggagctgcgcacccggatcttcgaccgggcccggcaactgccggtcgccttccacgagtcgtacacctcgggcgccgtcatctcccggctcaccgccgatgtggatgccgtacgcgatctgatcgaggccagtctggacgggctgctcacctcggtgctgacggtgacgggcatctcggtgctgctgctctggctggacgccccgctggcgctggtggtgctggggtccatcgtgccgctggtcgcgatgacgcgctggttccggcgccgttcccggatcgcctaccggcgcgcccgcgacacggtggcggagatcatcgtgcggttcggggagagcatgaacgccgtgcgggccgtgcaggcgttccgcgccgagcagcgcaagcacgcggcgatgaaccggctcaacgacactttccgggacgcccacaccgacgccctggaggtggtcgcccggtacaccgcgggagtccggctgaccggcaacatcgccctggcggtggtgctggccctgggcgcctggcgggtgtcgtccggcgcgctgccgctgggcgtgctcaccgccttcctgctctatctccggcgcttctacgacccgttggacgagctggcgaccttcaacaacctctacgcctcggcggcggcggcgctggagaagatcgccgacttcctcgccgtcccctcctcggtgccagagcccgccgccccggtgccgctgccgcgcgaccggccggtgcggggagcgctcgccttccagggggtcggcttccgttaccggccggacaccccgccggtgctgcgcggtctcgacctcgacgtgccggccgggcagaccctggcggtggtcggcgcgaccggggccggcaagtccaccgtcgccaaactggcggcccggttctacgatccgaccaccggcaccgtgctgctggacggcgtggacctgcgccggctccccgaccgcgaactgcgccgcgagatcaccctggtgacgcaggagaacttcctgttcgacggcagcatcatggagaacatcgcgctggcccgcccggacacgggaccggaggagatccgggccgccgcacgggccgtcggcgccgacgcgttcatctccgcgctgcccgagggctacgccaccgaggtacgcaagcggggcagccgtctgtctgcgggccagcgccagttggtcgccctcgcccgggccttcctggccgatccggcggtgctgctgctggacgaggcgacctccagcctggacatccccaccgaactggccgtccgccgcgctatggacgcgctgctggccggccgcacctccgtgatcatcgcgcaccgtctctccaccgtcctggcggcggaccgggtcctcgtactggcggacggtgccgtggtcgaggacggcccgcccgcccgcctcgcctccggcgacggccccttcgccgccctccacgcccgctggatccatgcgacgggctaa

SEQ ID NO: 4611 - protein, 616 aa, Streptomyces hygroscopicus subsp
MSADTTSPAAGPMADRPAGPAGRPPEHRESRRVRRASRQLLYALLRPHRWPSGAALAALVLENAFQLVGPLLVARAIDLGIPRASAGDWGPLTGCVAGFTACGLLAAGTRYAFFRISGSVGQAVLLELRTRIFDRARQLPVAFHESYTSGAVISRLTADVDAVRDLIEASLDGLLTSVLTVTGISVLLLWLDAPLALVVLGSIVPLVAMTRWFRRRSRIAYRRARDTVAEIIVRFGESMNAVRAVQAFRAEQRKHAAMNRLNDTFRDAHTDALEVVARYTAGVRLTGNIALAVVLALGAWRVSSGALPLGVLTAFLLYLRRFYDPLDELATFNNLYASAAAALEKIADFLAVPSSVPEPAAPVPLPRDRPVRGALAFQGVGFRYRPDTPPVLRGLDLDVPAGQTLAVVGATGAGKSTVAKLAARFYDPTTGTVLLDGVDLRRLPDRELRREITLVTQENFLFDGSIMENIALARPDTGPEEIRAAARAVGADAFISALPEGYATEVRKRGSRLSAGQRQLVALARAFLADPAVLLLDEATSSLDIPTELAVRRAMDALLAGRTSVIIAHRLSTVLAADRVLVLADGAVVEDGPPARLASGDGPFAALHARWIHATG

SEQ ID NO: 4612 - DNA, 3984 bp, Aspergillus oryzae
  CDS (1)..(3984)
atgaagctcggcaaaaagcttgcaggctaccccagcctactgctggccggtaatccttcgaaagtcgacatagggaggcttttgttgggtatggtagcttcagcagcgtccggtgtccccttcccattaatcgctattcttttcggtcaactgttagacgacttcaacgccgtaacgtgtgatgaaaccgaatcgacgggttccgatgccgattatcaacatgacattaacggcaaaatcctgatcattgtgtatctggccattgctcaattcgttgcgatttatattcatctttcctgctggagcttgaacggcgctcggctagcgcagagactgcgggaaacgtatcttcaaaacttgcttcgacaagaaccttcattcttcgatgatctacctccgggagaacttgcatctcggcttaatggcgatatccaggcgattcgatctggcacgtcggagaaagtggggatatgcttatcgaccttatcgtttttcatcacggcatatgtcgttgctttcatcaaagactaccggctggcagcaatgttgatttcattagttcccgcctacttcctgatgtcatttgttggaagccattatattgaaaaatactctggacgtatgtcggattattccgcgactgccgcatcaatcgcttccgaggcgctctccaacaccgtcgtggtgcaggcctttggcgcgagctaccgactggaagataagttttccaaggcgctcaaggcttcagagcaggaaggcttgaagaaggccgccgccgtgggtatacaatctggattcctgtattttatcgcctattctgcgaatggtctggcattctggcaaggtagtagacgtgttgcggatgcagtaggctcggacactgctggtgccaccgttggcgctacatttacagtgattttcgtcctcgttgaagctaccttgcttctgagtcaggttgctccattcctccacctattcacggcagccgttgcctcataccaaaagctgcgtgcagacatcgaccgtcagccgcaaattgatgctactacagagtccggcattcgcctctcacaggcagaaggtggattcgaattcaaaaatgtctctttcacttatccctcacgtcccgagatcacagtgcttgaccagatcagcctttccatcccggccaacaagcatactgcccttgttggtctgtctggaagtgggaagtcaaccatcgccggtttggttacaaggctgtacgatcccacggaggggcaggtcctcttcgacggccatgaccttcgtgaggtcaacacccgtgatttgagaagcttccttagtctggtgcagcaggagccgtcgctgctcgatcggtcgcttttggaaaacatcgcacatggcttgatcaattcgagcaatcccagtcatgctcatctgaggacgacacttcttagcaccggcctcacagatctggcagcagaagtcagggaaggtgtggatctcatggctgcggcagagaaacgaggctcggaagttgttgaaattgtcaacctggtgcgaaaggctgcgacgcttgctgatgcagatggcttcatcagtgcactgcagtatgggtacggtacacttgtcggttcaagtgggcgactgatcagtggtggccagaagcaacgcgtttcccttgctagggccctcatcaaggatcctgcggtacttatattggatgaggccacagcctctctcgattcaaggagtgagcagcgtattcagcgggccatctcaaatattgccactggtagaactatgatcacaattgcccatcgtctgtccacaattaccaacgccgacaatattattgttatgcacaagggacatatcgttgaacagggtgatcatgcgacattaatggctaagaacggagcgtacgctgacctagtcaatctgcaaactttgggttccgcccccggcaagaaagaaaagacagctagcgcagacaacgtcagcaagtctgaccaagcctctttatctgacgctggtgttgaggaaagtagtgtctcgaaagatggtctggaaactgccgagaaaaaagaagtcttagcaagtgcagctccagtcaccgagcctgctgaacccgctgaagaggaagaagagcctgaaacccctaagaaatctatgtgggctttgttgcgcgggtatgcgcccacattgagaccccatctgcttttcattttcctcgcacttctaggttctagcattgtcggcggtgccttctctggcgaagccgtgattttcggaaacactgtcggaagtttgaatccctgtcacagtgaaagctatattcggagcgcaggaaacttcttcgggcttatgttcttcgtacttgccattatcgaatttttcgcgaacctggttagctggaccgggtttggctgggtatcagagaaaatcgtctttacagtcagagtcttgtcattccgctcactgtttgagcaagatctccagtggcatcaatctaatggtcggtcacctgccttgctcctctcctacattactcgagacggcaatgccttggcgggactgagcggctccgtcattggaacgttgttctctatcaccgtcaaccttattgcagcaatcattttaactcatattattgcctggagaatcgcattggtttgcctggctttagtaccactcctgcttggagccggtcttatggagcttcacgtccttggcaaattcgaggaacgccatgagaacgcatacaccaagtcagttgacattggtgtagaggcagtcacgtcgatcaagacaattgcatccctttctcttgaagaggacactttgagaacttaccgacgatccctaaaaggaccccgcaaggagacatttcaagtcactcttcatgcaagtctctggcaggcaatgacttacttccttggcaactgcgtcaatgcgttggcctattggtggggttcaaagcagatcatcaatggcaactacacgcaaacacagttcctgattgtagtattctcgctcctggtcagcgcactgctctggagtcagatgtttgcccttgcaccggagctttccgccgcccgagcggcgatggcaaggatcttgggtctgattgagattgggtcggacaagatgcaaggacgcgtaccatctcgttcacccactatctcttcttctgaggagaaagacgttgagacagctgaaacaaaatcggtgtacgtgtctggtaacaaccgggcctcgagcgtacagcttcgcaatatccatttcgcatacccggctcggccggacataaaggtactaaagggcttagacgtcgatattcatcctgggcaattctgcgcccttgtcggaccaagcggtgctggtaaatcaaccatcatttcgctggttgaacggttgtacacgcccgaaaccggatccatcgtgatcgatggcgtcgacgttaccaggcaccgaggcgttgacttccgcgactctatcgctcttgtgccacaagaaagcgtgctttttgagggcagtattgagttcaacattggccttggtgctagaccaggacatgaagcgactatcgaggaaatcaaagaggcatgcaagcttgccaacatccacgacgttatagaggcgctgccagagggctacaagactctttgcggacctaatggtagccagttctcgggaggtcagaagcagaggttgtctattgctcgggcccttgttcggaagcctaagcttctgattctcgatgaatcgaccagcgctttggacgctgaatcggagaagctactgcaagacggactcgaaaaggccgcaaagggcattactgtcattgctatcgcccatcgtcttcacacaattagagcagcagatgtcatcttcttgattgaagggggtaaatgcattgatcgcggatcgcacgaggagttgctcgaaagatcggacagctacagagcaaacgtcatgcatcaaacagtggccacgtga

SEQ ID NO: 4613 - protein, 1327 aa, Aspergillus oryzae
MKLGKKLAGYPSLLLAGNPSKVDIGRLLLGMVASAASGVPFPLIAILFGQLLDDFNAVTCDETESTGSDADYQHDINGKILIIVYLAIAQFVAIYIHLSCWSLNGARLAQRLRETYLQNLLRQEPSFFDDLPPGELASRLNGDIQAIRSGTSEKVGICLSTLSFFITAYVVAFIKDYRLAAMLISLVPAYFLMSFVGSHYIEKYSGRMSDYSATAASIASEALSNTVVVQAFGASYRLEDKFSKALKASEQEGLKKAAAVGIQSGFLYFIAYSANGLAFWQGSRRVADAVGSDTAGATVGATFTVIFVLVEATLLLSQVAPFLHLFTAAVASYQKLRADIDRQPQIDATTESGIRLSQAEGGFEFKNVSFTYPSRPEITVLDQISLSIPANKHTALVGLSGSGKSTIAGLVTRLYDPTEGQVLFDGHDLREVNTRDLRSFLSLVQQEPSLLDRSLLENIAHGLINSSNPSHAHLRTTLLSTGLTDLAAEVREGVDLMAAAEKRGSEVVEIVNLVRKAATLADADGFISALQYGYGTLVGSSGRLISGGQKQRVSLARALIKDPAVLILDEATASLDSRSEQRIQRAISNIATGRTMITIAHRLSTITNADNIIVMHKGHIVEQGDHATLMAKNGAYADLVNLQTLGSAPGKKEKTASADNVSKSDQASLSDAGVEESSVSKDGLETAEKKEVLASAAPVTEPAEPAEEEEEPETPKKSMWALLRGYAPTLRPHLLFIFLALLGSSIVGGAFSGEAVIFGNTVGSLNPCHSESYIRSAGNFFGLMFFVLAIIEFFANLVSWTGFGWVSEKIVFTVRVLSFRSLFEQDLQWHQSNGRSPALLLSYITRDGNALAGLSGSVIGTLFSITVNLIAAIILTHIIAWRIALVCLALVPLLLGAGLMELHVLGKFEERHENAYTKSVDIGVEAVTSIKTIASLSLEEDTLRTYRRSLKGPRKETFQVTLHASLWQAMTYFLGNCVNALAYWWGSKQIINGNYTQTQFLIVVFSLLVSALLWSQMFALAPELSAARAAMARILGLIEIGSDKMQGRVPSRSPTISSSEEKDVETAETKSVYVSGNNRASSVQLRNIHFAYPARPDIKVLKGLDVDIHPGQFCALVGPSGAGKSTIISLVERLYTPETGSIVIDGVDVTRHRGVDFRDSIALVPQESVLFEGSIEFNIGLGARPGHEATIEEIKEACKLANIHDVIEALPEGYKTLCGPNGSQFSGGQKQRLSIARALVRKPKLLILDESTSALDAESEKLLQDGLEKAAKGITVIAIAHRLHTIRAADVIFLIEGGKCIDRGSHEELLERSDSYRANVMHQTVAT

SEQ ID NO: 4614 - DNA, 3912 bp, Aspergillus oryzae
  CDS (1)..(3912)
atgcgtcgtgccacctcgttcggtcgtttgctggtctacggcaacccctcgtcgtccgacctagccctcctcctcgtcggctttatcacttcaattgcctctgggattccctttcctattatgtcgattgtttttggacagctagtggatggactcaactcgtcaacgtgcaacgtcaccccctccaacgccgactcctaccaagcgggcatcaatgacaaaatcctgttgatcgtatacattggtatcgcctatttcgctctcatctacatctacgtcctctgttggaatctctccggcgagcgcctagcccagcgtctgcgagagaagtatttcagcgccatcctgcgccaggatgccgcgttcttcgacaacctacccgcaggagaggtatcctcgcggatcaccggagaaatcgccgtcatacaacaaggctcatcagagaaagtcggaattgtgataaacagtatcgcattcttcatcaccgcatacatagtagccttcatcaaggaccccaaactggccggcatgctggtctccctcaccccagcgtacctgatcatgtctattggcggaggatacttcgtgcagaagtttttcggacgcgcactggagggtatggcgaaggcctcatcggtcgcgctggaggcattctcaaatacaatggttgtgcaagccttttcggcaaacgcccggttggaggagaaatttgttgaagtcttgcatcctgcattgtcggccggcgtttggaaatcgatcgctgctgccactcaggcgggtcttttatacttcattgccttttcggccaatggtctggctttctggcaagggtcgcgacaaatcgcagacgctgtagagtctggaggcgacggcataacggtggggaacacattcacagttattctcatccttgtggatgcgtctttgattctcagtcaggctgccccgtttttgcaaagcttcgacgccgcggccgtagccttcggcaagctggaagccgacatcgatcacccgactaccatcgacggtaccactgaagataccggtcgtgtgctgccagaggttacgggaaatgtggaattacggaacgtctcattcaagtttccgtcccgaccggacaagcccgtgctccaggacctctctttgagctgcccagccggtcaacagacagctattgtcggactgtcaggcagtggaaagtccaccgtcgccgggttgatcacccgattctacaatgtggatgagggcgcggtactgttagatggccacgatgtcaaggatctcaatgtgagatctgtccgtagccatataagtctcgtacaacaggaaccatgtctcttggaccggtccatccttgaaaacatcgcgctgggcctcatcaactctcctagacacgatcacctgcattcgattctgatgggtagtgttctcgcggatgtcgcggcagcagtgcgagacgggaaagatctagtgttggcttctctggagcatggggatggcgcacgagaaattgtggaattagtcctgcacgctgccctgttggccgatgcgaatggtttcattgagcgtttgaaagaaggctttggaacacaagttgggtctaagggcaatctcatcagcggtggacaaaagcaacgcatctccttggcgcgcgctctggtgaaagatccgcgtatcctgatcctggatgaagccacggcatccctcgactcggcgaccgaggcgcgtatccaagaggctctagataacgtggcgatcggccggactgtgattactattgcccatcgtctgtcgactatcaggaatgccgacaatattatcgttatgcgccaagggaagctggtggagcaaggaacccaccagcaactgctagaagccaacggtgcctatgctgagttggtccgtctccagaacctcaacgttcacggcggccaagatgacgaggagacggaggtgagctccgctcgttctggttccttggtgccaatcgttagtgagaagaccggagctcttgagacttctgtgaccgatgccattgacgaagaaaagactaagcctgcaaagactgcggagccagagagtgcgatcgaggaaaagcgaagctttggatcaaccgtaggctccatgggctcccttttccgaccgtacacattcgtgctgatcctggcgatcgctggggctgtgatcatcggcggcacttattgcggatcgtcggtgatcttcggcaacgtcgtgggcaagcttagtggctgcgaggagcctgactccattcgtcatgctggagagctgtttggacttatgttctttgtgctggccattgtcgaattccttgctaacttccttagctggtcgctctttggctgggtggctgagcaagtcatttacaaagtgcgcatactatcgttgcggtctattctcgagcaggatttggcatggcacgagtcagcaaatcgaaacccatcactactgctgtcgttcattacaaaggatagcagtgccctgggtggtctaacaggctctgtggtctgcactatcctttcggttctggttagtctcgtcgcgactattactatgacacacattattgcttggaagattgctctagtatgtctatccgtgatcccactgttgctgggtgccggctacatgcgagtcaccacgctggctagtttcgaggagcgacacctagaggcctttgcaaactccgtgggtatcaccgttgaggccgtcaactcaatcaaaaccatcatgtcgctgtccctggaacatgaagtgcttggcacataccgtcgatcactctcggccccaatgcgccagatcactcgacaaagcgcttgggcgaatttatggcttgccgtcgggtacggactgagtaactttctatatgcactggcgtactggtggggatcaaagaggattatcgcgggtgaatacactcaaacgcagttcttcatcgtgcagctagcactgctcgtcagctctcaactgtggggacagatgttcgccctcgcacccgatgtctcacgcgcattccaggccacacggagactattgaatctgctcgacttggggtcgacaaagaagctatctgcaccacttcagctactgggggatgtcgaagccacggcacctccccgcgagaagagatcctcttctgagtcccgtgacggcatcagtgttgtattcaagcaagttcgcttctcgtaccctgcacggccggacacccgagtgctacacggtctggacttgagcgttcaaccaggacagttcgccgcactcgtaggacccagcggcgcaggcaagtccacaataatctcactcgtcgagcgactatacggacctgactcaggaaccatcgaagtcgacggccacaacatcgcctacagcgacggctcattccgggatgatattgcctatgttcctcaacagagtgtgctgttcgagggcacgatccgattcaatctgaccctaggcgccagaccaggccaaacagtcagccagtctgaactagaggaggcatgtaaactggccaacatccatgacacgatcatgcagctgccagatggatatgatgcctactgtgggccaaacggcgaccggctttctggaggtcagaaacagcgattggcgattgcgcgcgcgctcatccgcaagcctaagcttctgctgctggatgagtcgaccagtgcgcttgatgcagagtcggagagattgctgcaggatgggcttgagaaggccacgaagcatatgaccgttattgcgattgcacatcgactgtatactatccgcaaggcggatgtgatcttcttgattgaggatggtcggtgtgttgaccgaggaactcatgcacagctgatcgagcgcagcgagagttatcgtgtgaatgctctaaaccaggctgtggatggctga

SEQ ID NO: 4615 - protein, 1303 aa, Aspergillus oryzae
MRRATSFGRLLVYGNPSSSDLALLLVGFITSIASGIPFPIMSIVFGQLVDGLNSSTCNVTPSNADSYQAGINDKILLIVYIGIAYFALIYIYVLCWNLSGERLAQRLREKYFSAILRQDAAFFDNLPAGEVSSRITGEIAVIQQGSSEKVGIVINSIAFFITAYIVAFIKDPKLAGMLVSLTPAYLIMSIGGGYFVQKFFGRALEGMAKASSVALEAFSNTMVVQAFSANARLEEKFVEVLHPALSAGVWKSIAAATQAGLLYFIAFSANGLAFWQGSRQIADAVESGGDGITVGNTFTVILILVDASLILSQAAPFLQSFDAAAVAFGKLEADIDHPTTIDGTTEDTGRVLPEVTGNVELRNVSFKFPSRPDKPVLQDLSLSCPAGQQTAIVGLSGSGKSTVAGLITRFYNVDEGAVLLDGHDVKDLNVRSVRSHISLVQQEPCLLDRSILENIALGLINSPRHDHLHSILMGSVLADVAAAVRDGKDLVLASLEHGDGAREIVELVLHAALLADANGFIERLKEGFGTQVGSKGNLISGGQKQRISLARALVKDPRILILDEATASLDSATEARIQEALDNVAIGRTVITIAHRLSTIRNADNIIVMRQGKLVEQGTHQQLLEANGAYAELVRLQNLNVHGGQDDEETEVSSARSGSLVPIVSEKTGALETSVTDAIDEEKTKPAKTAEPESAIEEKRSFGSTVGSMGSLFRPYTFVLILAIAGAVIIGGTYCGSSVIFGNVVGKLSGCEEPDSIRHAGELFGLMFFVLAIVEFLANFLSWSLFGWVAEQVIYKVRILSLRSILEQDLAWHESANRNPSLLLSFITKDSSALGGLTGSVVCTILSVLVSLVATITMTHIIAWKIALVCLSVIPLLLGAGYMRVTTLASFEERHLEAFANSVGITVEAVNSIKTIMSLSLEHEVLGTYRRSLSAPMRQITRQSAWANLWLAVGYGLSNFLYALAYWWGSKRIIAGEYTQTQFFIVQLALLVSSQLWGQMFALAPDVSRAFQATRRLLNLLDLGSTKKLSAPLQLLGDVEATAPPREKRSSSESRDGISVVFKQVRFSYPARPDTRVLHGLDLSVQPGQFAALVGPSGAGKSTIISLVERLYGPDSGTIEVDGHNIAYSDGSFRDDIAYVPQQSVLFEGTIRFNLTLGARPGQTVSQSELEEACKLANIHDTIMQLPDGYDAYCGPNGDRLSGGQKQRLAIARALIRKPKLLLLDESTSALDAESERLLQDGLEKATKHMTVIAIAHRLYTIRKADVIFLIEDGRCVDRGTHAQLIERSESYRVNALNQAVDG

SEQ ID NO: 4616 - DNA, 3975 bp, Emericella nidulans
  CDS (1)..(3975)
atgggggagaaaacagcagaggccgaggccgagaagcccagtctcctcacacgttgcaccacattcacccgtcttctattctatggcagtccctcccttaaggaagccctcgtgttgctcacgggcctaatctccgccatcgcctcggggatccccttccctataatggcgattgtgttcggtcagctcgtcgatgagatgaactcgtcgacgtgcaatgcaacgcccgaaaacgcagactcataccaatccagcatcaacgccaaggtcctgcagatcgtctatattggcatcgcatatttcgtcctcatatacatctatgtcttttgctggaatatttccggagagtggcttgcgcacgggttacgcgaaagatactttcagagtctcttgcgtcaggacgcaggtttcttcgatactttggcgcctggagaggcttcgtcacgtattactggggatatcagtacgatccagcaggggacaagcgagaaggtgggaattgtacttaacagcattgcgttctttgtgacgagttatgtggtcgcgtttatcaaggatgctcggttggccggaatgcttgtctccctcgcgcctgcgtacctgatcatgtcgttggccggagggtattttgtgcggaagtactttgggcgggctctagagtgcatggcggctgcgtcggccgttgctctggaggcgttcagcaatacgatgctcgtgcatgcgttttcggcgggtgggaggcttgaagagcgcttcattgagcacctggggcctgcccgggtcgcgggtattcgcaagtcaatcgcgacagctacgcaggccggcttgctgtacttcattgcgttctcggcaaatgcgctggctttctggcaggggtcgatgaagattgcgggcgcggttgagggaggtgcggatggggtcactgtggggaatacgtatactgtgatcctggtgttggttgatgcgagtttgatactgagccaggttgcgccgttcctgcagagctttgatgcggcagccgtggcgtttaaaaagttggagaaggatatcgagaggccgagtccgattgatggaaccgctgattctggccttgttccggcagcagcaaagatagagtcggatatcgagtttcgcaacgtctcgtttcggttcccttcaaggcctgataaaccgatcctgcaggatctgaccgtgcgcatcccggcaggcaagcagacggcgcttgtcggactgagtggcagcggcaagtcaactgtcgcgggcttgatcacgcggttctatgatgctgaggaagggcaggtgacgattgggggccatgacgtgcgcgagctgaatgtgcggtttctgcgcagtgctattagtcttgtccagcaggaaccttgtctgctcgatcggtcgatactggagaatattgctcttggactggtgaactcctcagcacatgtgcatttgatggatgtgctgaagagcagtgccttggaggatattgccactgctattcgggaaaaaggcttgagtctcaaccacgccattgacttgcaacccagcaacaaagaccagatccgcgagattgtgtccttggtcgaaacagcagctggcctagcagacgcaagcaacttcatcaacaagctcgaccacggctacgcaacaatggtcggatcaagcgggaacctcatcagtgggggccagaagcagcgtatctcgatcgcccgagccttggtcaaaagcccccaaatccttatccttgatgaagccaccgcatctctggattccgctacggaattacgcgtgcaacgggcgttggaggcggcggctgctggacgcactctagtcactatagcccatcggctctcgaccatcaagaaggcggataacattattgtgatgagacagggaaagctcattgagcagggctctcatgcagaacttcttgcggcagatggagcgtatgcagagctggtaaggttgcagaatctcaatgtcaatgcctcgcaggagagtgcgtcttcgtctgctcggccgtcactggacagtacggcgcttgagaaagaaaggaatgcagaggtaacatcggtacaagacgacgaaagctccactccatcccctaaagagaagccagcagacgaagaaccagttactaccgagcgctctgtcggttctacctctaaggccattgcctctctcttccgtccgtactcgctagccctccttgtagccatcatcggtgccgtcgtcatcggaggcacatactgcggttctgctgtcatattcggtaacgttgtgggcaagctaagctcgtgcgagacagcagaatccatccgccacgcgggagaattctgggggctcatgttcttcgtcctggctctgattgagtttttcgcaaacctcatcagctggtccctcttcggctggatcgcggagcagctcatatataaagtccgcgtgctctctctacgttccattctcgagcagaagctggaatggcatgaagcgcgcacaccctccggcctcctatcactcattgtcaaggacagcaacgcgctcaatggcctcacgggatccgtcatttgcacaatcctcagcatcctcgtcaacctcttcgccgccattattatgacccacatcattgcctggagaattgcactcgtttgtctctccgtcgtgccacttctcttgggcgctgggttcatgcgtgtctcaaccttagcccgctttgaggagcgccacaatgacgccttcgcccgctccctgggcataaccgtcgaagccgtgacatccattaagaccgtccacgcgctggccattgagtccgaagttctttccacctaccgccgctccctgcagggccccatgcgcgagataacagggcaatccgccttcaccaacctctggctcgccgtcggttacggcctcagcaacttcgtctatgcgcttgcatactggtggggtgcgaagcagattatcgctggtcactacacccagacacagttcttcattgttcagctggccctgctcgtctcgtctcagctctggggccagatgtttgctttggctcctgatgtgtctcgcgccgtgcaggccacccgccggctcttgaacttgctggacctaggctcaacgaagagactctccgatcccatcttaccccctcactcggcatcaacagatatcgaagcaacctcgcacccatccgaaaaaccccctccccctgatccatcaggcacgcagtccggcctcagcgtctcctttaagcaagttcaattcacctacccggcccgcccagacacccaggtcctacacgggctagatctcaccatctccgcagggcaattcgccgcgctcgttgggccctccggtgctgggaagtcaaccataatatcccttatcgaacgcctctacacacccagttctggaacaatcgagcttggcaaccgcaacatcgcacacatggacgcctccttccgcgacgaggttgcctatgtcccgcaacactccgtccttttcgacgggtccatcaggttcaatcttgaactcggtgcgcggccgaaccaggccctttcacaaactgagattgaggaagcgtgtaagcttgccaatatccacgatacaattgtgtctctaccagacgggtatgacacagccgttggaccgaacggtgacagactaagcggtggtcagaagcagcgtcttgcgattgcaagggcattgctgagaaggccgagactgttgctgctggatgagtcgacgagtgcgctggatgcggagagcgagcggttactgcaggatggcttggagaaggcggcaaggggaatcactgtcattgcaattgctcatcggctgtatacgattcgcaaggcggatgtgatcttcctcattgaagaggggaggtgtgtggaaagggggtcgcatacagaactgatggagaggagtgagagttatcgggttaatgccctgaatcaggctgtggatggctaa

SEQ ID NO: 4617 - protein, 1324 aa, Emericella nidulans
MGEKTAEAEAEKPSLLTRCTTFTRLLFYGSPSLKEALVLLTGLISAIASGIPFPIMAIVFGQLVDEMNSSTCNATPENADSYQSSINAKVLQIVYIGIAYFVLIYIYVFCWNISGEWLAHGLRERYFQSLLRQDAGFFDTLAPGEASSRITGDISTIQQGTSEKVGIVLNSIAFFVTSYVVAFIKDARLAGMLVSLAPAYLIMSLAGGYFVRKYFGRALECMAAASAVALEAFSNTMLVHAFSAGGRLEERFIEHLGPARVAGIRKSIATATQAGLLYFIAFSANALAFWQGSMKIAGAVEGGADGVTVGNTYTVILVLVDASLILSQVAPFLQSFDAAAVAFKKLEKDIERPSPIDGTADSGLVPAAAKIESDIEFRNVSFRFPSRPDKPILQDLTVRIPAGKQTALVGLSGSGKSTVAGLITRFYDAEEGQVTIGGHDVRELNVRFLRSAISLVQQEPCLLDRSILENIALGLVNSSAHVHLMDVLKSSALEDIATAIREKGLSLNHAIDLQPSNKDQIREIVSLVETAAGLADASNFINKLDHGYATMVGSSGNLISGGQKQRISIARALVKSPQILILDEATASLDSATELRVQRALEAAAAGRTLVTIAHRLSTIKKADNIIVMRQGKLIEQGSHAELLAADGAYAELVRLQNLNVNASQESASSSARPSLDSTALEKERNAEVTSVQDDESSTPSPKEKPADEEPVTTERSVGSTSKAIASLFRPYSLALLVAIIGAVVIGGTYCGSAVIFGNVVGKLSSCETAESIRHAGEFWGLMFFVLALIEFFANLISWSLFGWIAEQLIYKVRVLSLRSILEQKLEWHEARTPSGLLSLIVKDSNALNGLTGSVICTILSILVNLFAAIIMTHIIAWRIALVCLSVVPLLLGAGFMRVSTLARFEERHNDAFARSLGITVEAVTSIKTVHALAIESEVLSTYRRSLQGPMREITGQSAFTNLWLAVGYGLSNFVYALAYWWGAKQIIAGHYTQTQFFIVQLALLVSSQLWGQMFALAPDVSRAVQATRRLLNLLDLGSTKRLSDPILPPHSASTDIEATSHPSEKPPPPDPSGTQSGLSVSFKQVQFTYPARPDTQVLHGLDLTISAGQFAALVGPSGAGKSTIISLIERLYTPSSGTIELGNRNIAHMDASFRDEVAYVPQHSVLFDGSIRFNLELGARPNQALSQTEIEEACKLANIHDTIVSLPDGYDTAVGPNGDRLSGGQKQRLAIARALLRRPRLLLLDESTSALDAESERLLQDGLEKAARGITVIAIAHRLYTIRKADVIFLIEEGRCVERGSHTELMERSESYRVNALNQAVDG

SEQ ID NO: 4618 - DNA, 2001 bp, Streptomyces fradiae
  CDS (1)..(2001): transl_table=11
gtgggcgccgtgacgtcgctgcggcgctgtgcgccgtatctgcgcccgcaccgggcgctgatggcgggggcgtgcggggcggccttcgggtcgatgctcgcgggcctggccatgccgctggtgctccagcggctggtcgacgggccggtcgcggagcgggacttctccgccctgccgtggttcatcggcgccttcgccctgctcggcgtcgccgaggccgtgctgctgggggcccggcggctgctcgtcatccgtccggcgacccgcctggagacggcgatgcgggcggacgtggccgcgcacatccagcgcctcccgctgtcgttccacgcccgctggcagtccggccagctgctgtccaggacggtgtccgacatcacggagatcggccggttcgtcgcgttctccgccatctatctggtggtgaacgtggcggcgctcgccgtcggcctggtcgtcctggcgtggctggcgccggcgctcgcgctggtcgtgttcctcgcgtacacgccgatggtggtcgcgaccaccgtcttcgagcagcggttccgggtggtggcgcgggcggcgcaggaggtggggggcgacctgtccaccacggtggaggagtcggtgctcggcgtacgggtgctgaaggtgttcgggcgggcgccggagacggtgcgccgcttcaccgggcaggcgcgccggctgcgcgtcctggagctgcgcaagctctcgtacacggcggccctgtggtgggtcatcacggcgctgccggacctggcgatcgtggcgatgatcgggtacggcgggtacggcgtcgccaccggggcgctgtcgctgggcacgctgatggcggcggtgacggtggccacccatctgcgctggccggcggacacgctgggctggctgacggcggacgcctcgacggccgccgccgcggccgaccggtactggcaggtgcgggacgagccggtgacggtggcggacccggcccggccgcgccccctgccgtcgccggtgcgcggcgagatccgcctggagggcgtgcactacgcctaccccggtggccgcgcggcggcgctgcggggcgtcgacctgacgatccgggcgggcagcacggtggccgtggccggggcgaccgggtccggcaagagcacgctgctgtcgctgctgtcgcggctggacgacccgacgtccgggcggatcaccctggacggggtggacctgcgcgagacggccctggccgacctgcggtcggcggtgtgcaacgcgttcgacgatccggtgctcttctcgggcacggtccgggacaacgtgacgctgggcgtgcgggacgcggaggcgcccggcgcgcgggacgcgggggcccggccggcggacggcggcggggccgggggctccggcggggcgccgggggcggacgccggggccgggacgggggccgggcgggcgccgggcggcggggtgcccgacggcgccgtctgggaggcgctgcggacggtgcgggcggacgagttcgtcgcggcgctgcccgaggggctgtccaccgtgatcggcgaggagggcctcgggctctcgggcggccagcggcagcggctggcgctggcgcgggccatcctgcccggaccgtcggtgctggtgctggacgacgcgctgtcggcgctggacgtacggaccgaacgggaggtggaggccgccctgcgcggggtgctcggccgggtcaccacggtcgtggccgcgcaccggcccggcacgctgcgcctggccgaccaggtggtgttcctctccggcggccgggtcgccgccacgggcacgcacgaggagctgatggcgcgcgagccggcgtaccggctgctggtccggcccccgctcccggtcgcggcgcgggagacgcgggcgcccggccccggggaggcgccgttgcccggcccggcggaggcgccggcggaggcgcaggtgcccgcggagagggcggtggcggaggacggcatggcgggaagggggcggccgggatga

SEQ ID NO: 4619 - protein, 666 aa, Streptomyces fradiae
MGAVTSLRRCAPYLRPHRALMAGACGAAFGSMLAGLAMPLVLQRLVDGPVAERDFSALPWFIGAFALLGVAEAVLLGARRLLVIRPATRLETAMRADVAAHIQRLPLSFHARWQSGQLLSRTVSDITEIGRFVAFSAIYLVVNVAALAVGLVVLAWLAPALALVVFLAYTPMVVATTVFEQRFRVVARAAQEVGGDLSTTVEESVLGVRVLKVFGRAPETVRRFTGQARRLRVLELRKLSYTAALWWVITALPDLAIVAMIGYGGYGVATGALSLGTLMAAVTVATHLRWPADTLGWLTADASTAAAAADRYWQVRDEPVTVADPARPRPLPSPVRGEIRLEGVHYAYPGGRAAALRGVDLTIRAGSTVAVAGATGSGKSTLLSLLSRLDDPTSGRITLDGVDLRETALADLRSAVCNAFDDPVLFSGTVRDNVTLGVRDAEAPGARDAGARPADGGGAGGSGGAPGADAGAGTGAGRAPGGGVPDGAVWEALRTVRADEFVAALPEGLSTVIGEEGLGLSGGQRQRLALARAILPGPSVLVLDDALSALDVRTEREVEAALRGVLGRVTTVVAAHRPGTLRLADQVVFLSGGRVAATGTHEELMAREPAYRLLVRPPLPVAARETRAPGPGEAPLPGPAEAPAEAQVPAERAVAEDGMAGRGRPG

SEQ ID NO: 4620 - DNA, 1668 bp, Streptomyces ribosidificus
  CDS (1)..(1668): transl_table=11
gtgtgcggtctcgtcccgccactgctgatcgccgccggtatcgaccggggcgtccccgcggcaggggacgggcactggacgccgctgatcggcttcacggccgcggcgctggccgccgggctggccaccgcgacgctcaagtactgcttcctccgctactcgggcggcatcgcccaggacttgctgttcgagctacggcaccgggccttcacccatgtgatggatcagccgctggcgttccacgagtcgtacccgtcgggccgagtgatcgcccggctgtccagcgatgtggagtcggtcgaggagatgctggagatgggcctggacgggctgttctccgcgctcttctcgatggtcggcatcctcgccgtgatgctgtggatggaccagccgatggccgcggccatcattgctctgttcgtcccgctgtacgcgctgacgcggtggttccggcaccggtcacggcggtcctaccgctccacccggacggccgtggagggcgtcgtgcagcacacggtcgaggtgtacaacggcatcagggccgtgcaggcgttccgccgcgaggcagccaacgcggcccgtctgcgcggtcttgacgcccggtacgcggtggcgcggagggacgccagctgggtgagcgccgccttcagcggcggcgtgaagctgctcggcaacctgtcgctggcggggctgctgacactgggcgtgttccgcatcgagcagggagcgttggcgatcggtacgctcaccgcgttcctgctgtatgtgtaccggctgtacgatccgatcgacgagctggcaagcttcgccgacgcgttctcggcggcgtcggcggggctggagaagatcagcgcgctgttcatgcgccacccggcggtggccgagccggagcacccggtgtccctgccggccgagccgccgggcggacggggcgccgtacgattcgagggcgtccacttccggtacggcgaggcgggcaggcccgtgctgtccggcgtcgacctggcgctcgaacccggccgtacggtggccctggtgggcacgaccggcgctggcaagtccacgatcgccaagctggtggcacggctctacgaccccacggcgggccgggtcacgctggacggggtggacctgtcggacttggccgacaccgacctgcgcggcgccgtgtcggtgatcacccaggagtcgttcctgttctccgggtcggtcgccgacaacatcgcgctgggccggccggacgcctcgcgcgccgagatccgggcggccgccgaggcggtgggcgcacacgggttcatcagcgcgctgcccgacggctacgacacggatgtgcacaagcgcggtacgggcctgtcggccgggcagcggcagctgatcgccatggcccgcgtgatgctggcatcaccgcgcgtgctgatcctcgacgaggcgacatccagcatggacaccccgtcggagcgggccgtacacgaggcactgacccgtgtcctcacggaccgcaccgcggtgatcatcgcgcaccggctgtccacggtcgccatcgccgaccgcgtcctggtcatcgaggacggtgtggtggtggaggacggcagcccggagcaactgctgcaggcgggcggacggttcgccggcatgcagcggggctggctggccgacaccacggcgtga

SEQ ID NO: 4621 - protein, 555 aa, Streptomyces ribosidificus
MCGLVPPLLIAAGIDRGVPAAGDGHWTPLIGFTAAALAAGLATATLKYCFLRYSGGIAQDLLFELRHRAFTHVMDQPLAFHESYPSGRVIARLSSDVESVEEMLEMGLDGLFSALFSMVGILAVMLWMDQPMAAAIIALFVPLYALTRWFRHRSRRSYRSTRTAVEGVVQHTVEVYNGIRAVQAFRREAANAARLRGLDARYAVARRDASWVSAAFSGGVKLLGNLSLAGLLTLGVFRIEQGALAIGTLTAFLLYVYRLYDPIDELASFADAFSAASAGLEKISALFMRHPAVAEPEHPVSLPAEPPGGRGAVRFEGVHFRYGEAGRPVLSGVDLALEPGRTVALVGTTGAGKSTIAKLVARLYDPTAGRVTLDGVDLSDLADTDLRGAVSVITQESFLFSGSVADNIALGRPDASRAEIRAAAEAVGAHGFISALPDGYDTDVHKRGTGLSAGQRQLIAMARVMLASPRVLILDEATSSMDTPSERAVHEALTRVLTDRTAVIIAHRLSTVAIADRVLVIEDGVVVEDGSPEQLLQAGGRFAGMQRGWLADTTA

SEQ ID NO: 4622 - DNA, 1992 bp, Streptomyces fradiae
  CDS (1)..(1992): transl_table=11
gtgacgtcgctgcggcgctgtgcgccgtatctgcgcccgcaccgggcgctgatggcgggggcgtgcggggcggccttcgggtcgatgctcgcgggcctggccatgccgctggtgctccagcggctggtcgacgggccggtcgcggagcgggacttctccgccctgccgtggttcatcggcgccttcgccctgctcggcgtcgccgaggccgtgctgctgggggcccggcggctgctcgtcatccgtccggcgacccgcctggagacggcgatgcgggcggacgtggccgcgcacatccagcgcctcccgctgtcgttccacgcccgctggcagtccggccagctgctgtccaggacggtgtccgacatcacggagatcggccggttcgtcgcgttctccgccatctatctggtggtgaacgtggcggcgctcgccgtcggcctggtcgtcctggcgtggctggcgccggcgctcgcgctggtcgtgttcctcgcgtacacgccgatggtggtcgcgaccaccgtcttcgagcagcggttccgggtggtggcgcgggcggcgcaggaggtggggggcgacctgtccaccacggtggaggagtcggtgctcggcgtacgggtgctgaaggtgttcgggcgggcgccggagacggtgcgccgcttcaccgggcaggcgcgccggctgcgcgtcctggagctgcgcaagctctcgtacacggcggccctgtggtgggtcatcacggcgctgccggacctggcgatcgtggcgatgatcgggtacggcgggtacggcgtcgccaccggggcgctgtcgctgggcacgctgatggcggcggtgacggtggccacccatctgcgctggccggcggacacgctgggctggctgacggcggacgcctcgacggccgccgccgcggccgaccggtactggcaggtgcgggacgagccggtgacggtggcggacccggcccggccgcgccccctgccgtcgccggtgcgcggcgagatccgcctggagggcgtgcactacgcctaccccggtggccgcgcggcggcgctgcggggcgtcgacctgacgatccgggcgggcagcacggtggccgtggccggggcgaccgggtccggcaagagcacgctgctgtcgctgctgtcgcggctggacgacccgacgtccgggcggatcaccctggacggggtggacctgcgcgagacggccctggccgacctgcggtcggcggtgtgcaacgcgttcgacgatccggtgctcttctcgggcacggtccgggacaacgtgacgctgggcgtgcgggacgcggaggcgcccggcgcgcgggacgcgggggcccggccggcggacggcggcggggccgggggctccggcggggcgccgggggcggacgccggggccgggacgggggccgggcgggcgccgggcggcggggtgcccgacggcgccgtctgggaggcgctgcggacggtgcgggcggacgagttcgtcgcggcgctgcccgaggggctgtccaccgtgatcggcgaggagggcctcgggctctcgggcggccagcggcagcggctggcgctggcgcgggccatcctgcccggaccgtcggtgctggtgctggacgacgcgctgtcggcgctggacgtacggaccgaacgggaggtggaggccgccctgcgcggggtgctcggccgggtcaccacggtcgtggccgcgcaccggcccggcacgctgcgcctggccgaccaggtggtgttcctctccggcggccgggtcgccgccacgggcacgcacgaggagctgatggcgcgcgagccggcgtaccggctgctggtccggcccccgctcccggtcgcggcgcgggagacgcgggcgcccggccccggggaggcgccgttgcccggcccggcggaggcgccggcggaggcgcaggtgcccgcggagagggcggtggcggaggacggcatggcgggaagggggcggccgggatga

SEQ ID NO: 4623 - protein, 663 aa, Streptomyces fradiae
MTSLRRCAPYLRPHRALMAGACGAAFGSMLAGLAMPLVLQRLVDGPVAERDFSALPWFIGAFALLGVAEAVLLGARRLLVIRPATRLETAMRADVAAHIQRLPLSFHARWQSGQLLSRTVSDITEIGRFVAFSAIYLVVNVAALAVGLVVLAWLAPALALVVFLAYTPMVVATTVFEQRFRVVARAAQEVGGDLSTTVEESVLGVRVLKVFGRAPETVRRFTGQARRLRVLELRKLSYTAALWWVITALPDLAIVAMIGYGGYGVATGALSLGTLMAAVTVATHLRWPADTLGWLTADASTAAAAADRYWQVRDEPVTVADPARPRPLPSPVRGEIRLEGVHYAYPGGRAAALRGVDLTIRAGSTVAVAGATGSGKSTLLSLLSRLDDPTSGRITLDGVDLRETALADLRSAVCNAFDDPVLFSGTVRDNVTLGVRDAEAPGARDAGARPADGGGAGGSGGAPGADAGAGTGAGRAPGGGVPDGAVWEALRTVRADEFVAALPEGLSTVIGEEGLGLSGGQRQRLALARAILPGPSVLVLDDALSALDVRTEREVEAALRGVLGRVTTVVAAHRPGTLRLADQVVFLSGGRVAATGTHEELMAREPAYRLLVRPPLPVAARETRAPGPGEAPLPGPAEAPAEAQVPAERAVAEDGMAGRGRPG

SEQ ID NO: 4624 - DNA, 1785 bp, Streptomyces fradiae
  CDS (1)..(1785): transl_table=11
atgagcggctcggaggacgcgcggtcccgcgcccggcgggacgccctgctgcggatgctgctgtggccgaagcggcggcggctggcggcggccacggcgctggcgctgctggagaacgtgtgcgggctggtgccgccgctgctgatcgccgcggccatcgaccgcggggtgcccgcggcggtggacgggcggtgggcgccgctgatcggctacaccgccgcggcgctggccaccgggctggccacggcgagcgtcaagtactgcttcctgcgctactccgggcggatcgcgcaggacctgctgttcgagctgcggcaccgggcgttcgcccaggtgatggggcagccgctggccttccacgaggcgtacccctcgggccgggtcgtggcccggctgtcgagcgacgtggagtcggtcgaggagatgctggagatgggcctggacggcctgttctccgcgctgttctcgatggtcggcatcctcgccgtgatgctctggctcgaccagccgatggcggcggtggtgatcgcgctgttcgtcccgctgtacgcgctgacgcggtggttccggcaccggtcgcgccgggcctaccggggcacccggacggccgtcgagggcgtcgtgcagcacaccgtcgaggcgtacaacggcgtccgggccgtgcaggccttccgccgcgaggaggcgaacgcgcggcggctggacgggctggacgcccggtacgcggtggcgcgggccgacgccgggctggtgagcgccgtgttcagcggcggtgtgaagctcatcggcaacctgtcgctggtggggctgctgacgctgggggtgctccgcatcgaccaggggcacctggcgctgggcacgctcacggcgttcctgctgtacgtgcaccggctgtacgacccgatcgacgagctggcgagcttcgccaacgcgttctcggcggcctcggccgggctggagaagatcggcgcgctgttcgtgcgccatccggcggtggccgagccggagcgcccggcggcgctgccggccgacccgccgggcggccggggcgccgtgcggttcgagggcgtccacttcggctacggccaggcggcccggccggtcctctcgggcgtcgacctggcgctcgaaccgggccgcacggtcgccctcgtgggtacgaccggcgccgggaagtccaccatcgccaagctggtggcccggctctacgaccccacggcggggcgggtcacgctggacggggtcgacctgcgggagctggccgacgcggagctgcgcggcgccgtctcgatgatcacgcaggaggcgttcctgttctccgggtcggtggccgacaacatcgccctgggccggccggacgcgtcgcgggcggagatccgggccgccgcggaggcggtgggcgcgcacgggttcgtcagcgcgctgccggacggctacgacaccgacgtgcacaagcgcggcacgggcctgtcggccggccagcggcagctgatcgccatggcacgggtgatgctgacctcgccccgcgtgctgatcctcgacgaggcgacgtccagcatggacacctcctcggagcgggccgtgcacgaggcgctgacccgggtcctggccgggcgcaccgcggtgatcatcgcgcaccgcctgtccacggtggccgtcgccgaccgcgtcctggtgatcgaggacggggcggtggtggaggacgggcccccgacgcggctgctggagggcggtgggcgcttcgccggcatgcaccggggctggctggccgccacgacggcgtga

SEQ ID NO: 4625 - protein, 594 aa, Streptomyces fradiae
MSGSEDARSRARRDALLRMLLWPKRRRLAAATALALLENVCGLVPPLLIAAAIDRGVPAAVDGRWAPLIGYTAAALATGLATASVKYCFLRYSGRIAQDLLFELRHRAFAQVMGQPLAFHEAYPSGRVVARLSSDVESVEEMLEMGLDGLFSALFSMVGILAVMLWLDQPMAAVVIALFVPLYALTRWFRHRSRRAYRGTRTAVEGVVQHTVEAYNGVRAVQAFRREEANARRLDGLDARYAVARADAGLVSAVFSGGVKLIGNLSLVGLLTLGVLRIDQGHLALGTLTAFLLYVHRLYDPIDELASFANAFSAASAGLEKIGALFVRHPAVAEPERPAALPADPPGGRGAVRFEGVHFGYGQAARPVLSGVDLALEPGRTVALVGTTGAGKSTIAKLVARLYDPTAGRVTLDGVDLRELADAELRGAVSMITQEAFLFSGSVADNIALGRPDASRAEIRAAAEAVGAHGFVSALPDGYDTDVHKRGTGLSAGQRQLIAMARVMLTSPRVLILDEATSSMDTSSERAVHEALTRVLAGRTAVIIAHRLSTVAVADRVLVIEDGAVVEDGPPTRLLEGGGRFAGMHRGWLAATTA

SEQ ID NO: 4626 - DNA, 1908 bp, Streptoverticillium netropsis
  CDS (1)..(1908): transl_table=11
atggcgcacttgctggatggcatcgacccggacggctacgaccgcgcctacggcgaccgtgagctgacgcgccgcatcgtcccgtacttccgcgggtggggccgtgtcgtggcgttcgtgaccgcggcggtgatcgtggcggcggtcgcgggcagtgccgctcccgttctggtggcccgtaccgtggactcggccgcgggcgacgacggcacggggacggtggcgctgctggtggcggtcatcgtcctcaccggttccgtcgcctggctgttcaccttcctccaacagcgcctcaccggaacactggtcggtgacgtggtgctgaagctgcgcgagcacgccttccacgccgccacgcggcaggacatggcgttctacgacagccaccccaccggcgcgctcgtcagccgggtcaccaacgacacccagtcgttcgccaccctcatcaccatggtcctcggcctgctcggccaggtgctgatgatcctgctgctgatggtggccctgttcgtgatcaacgtgccgctgggtctgctgaccgctgccgtggccggggtcatcgtcgccgtcagcctcggcttccggcgcgtggcacgcagtgcctcacaacaacaacagcgagccctggccgaggtccacggctatgtgcaggagaccctgcggggcatcgccgtggcgcggaactaccggggcgaggaggccgccgcggcgggactgcgggaggtcaacggacagtggttcagggcgagtgtgcggttgaaccggctcttcagcggcgtcttccccctgctgatctccctgaccgggctgggtaccgtcgcggtggtcctggtgggcgggcacgccgtggaggcgggcggcgtctcggccggtgaatgggtgctgttcctggaggcgttggctctcttctggtccccgctgaccagcatcgcctccttctggaaccagttgcagcagggcctcgcggcgggagagcgcatcttcgcgctgatcgaccgcgagccggcggtgcggcagctccagcagctgcccgtgccccggctgcggggcgacctggaactgcgcgacgtcaccttcggctacagcgcggaccggcccgtgctgaaggaagtcagcctgaagatcgccgcgggtgagaccgtcgctctggtcgggcacaccggcgcgggcaagtccagcgtcgtacgcctgctcatgcgcgcctacgaattccaagggggacgtgtgctggccgacggccaggacgtgcggaccctcgacctcgcgcagtaccggcggtgtctcggggtcgtcacccagacaccgttcctcttctccggcaccgtcgcggacaacatcggcctcggccggccgggcgcggaccgcgcggagatcgaagccgcggcgcacgcggtggcgggcggcgattggctggagcaactgcccgcggggctggacacccccaccgacgaaggcggccgcaacctctccacgggacagcggcagatcatcgcgctggcccgggtcttcctgcagaacgcctcggtgctcatcctcgacgaggccaccgccagcatcgacccgctgaccgaggcacagatccaggagggtctggacgtgctcgccgccgaccgcaccaccatcgtcgtcgcacaccggctgccgaccgtccgcaaggccgaccggatcgtcgtcgtcgacgacgggcgggtgatcgaacagggcgaccacaccaccctgctgcggcggaacggcgcctacagccgcctgtacgaccggtacttccgctaccagcaaccggacgtcgacccggccgacaccccggtcggcggcaacctggatccggcggaggcgaaggagtcccgggcggggacgacacggacggccgacgacgaagagacgggtgcggtcgatgcgtatcaccactga

SEQ ID NO: 4627 - protein, 635 aa, Streptoverticillium netropsis
MAHLLDGIDPDGYDRAYGDRELTRRIVPYFRGWGRVVAFVTAAVIVAAVAGSAAPVLVARTVDSAAGDDGTGTVALLVAVIVLTGSVAWLFTFLQQRLTGTLVGDVVLKLREHAFHAATRQDMAFYDSHPTGALVSRVTNDTQSFATLITMVLGLLGQVLMILLLMVALFVINVPLGLLTAAVAGVIVAVSLGFRRVARSASQQQQRALAEVHGYVQETLRGIAVARNYRGEEAAAAGLREVNGQWFRASVRLNRLFSGVFPLLISLTGLGTVAVVLVGGHAVEAGGVSAGEWVLFLEALALFWSPLTSIASFWNQLQQGLAAGERIFALIDREPAVRQLQQLPVPRLRGDLELRDVTFGYSADRPVLKEVSLKIAAGETVALVGHTGAGKSSVVRLLMRAYEFQGGRVLADGQDVRTLDLAQYRRCLGVVTQTPFLFSGTVADNIGLGRPGADRAEIEAAAHAVAGGDWLEQLPAGLDTPTDEGGRNLSTGQRQIIALARVFLQNASVLILDEATASIDPLTEAQIQEGLDVLAADRTTIVVAHRLPTVRKADRIVVVDDGRVIEQGDHTTLLRRNGAYSRLYDRYFRYQQPDVDPADTPVGGNLDPAEAKESRAGTTRTADDEETGAVDAYHH

SEQ ID NO: 4628 - DNA, 3858 bp, Oryza sativa subsp
  CDS (1)..(3858)
atggccggaggagggggaggcggcggcgatgggggtgggggagcgggtgcgggcggcggcggcggcggcggcgcgaagagggtgccgatgcggcggctgttcacgttcgcggaccggctggacgcggcgctgatggcggtggggggagtggcggccgtggcgaacggggtggcgatgccgttcctcgcgttcctcatcggcgagctcgtcgacgcgttcggcgccgccgaccgcgcccacgtcgtgcacgtcgtctccaagatttctctcagatttacatatgtggcaattggctctggaatagcaggatttcttcaggtgtcatgctggatggtgactggtgaaaggcaagctgcacgcatccgtgggctgtaccttgaggcgatacttagacaagatattacattctttgatttggagacatcaaccggagaagttactgaaaggatgtctagcgacacagtgttgatccaagatgccattggagaaaaagtgggtaagtttctccaactgctatcaacatttcttggtggattcataatagcatttgcaagaggctggcttctgtccctagttatgttgtcaagtatccctcctgttgcacttgctgctgcagccatgtcaattgccatatcaaagctagcaaaccgttcccagctggcctatgctgaagcagggaagctggttgagcagacaataggatcaattagaactgtggtatctttcactggtgagaggagagcaactgacaaatacaatgaattcttaaaaatatcatatagatcagctgttcaccagggcgcggctatgggactcggaattggttcagttatgtttattgttttctgtagctatgggttagcggtatggtacggtgcaaagctgattattgaaaagggttatactgggggatatatcattaatgtattgatggccatcatgagtggtgcaatggcacttggtcagagttctccatgcttaaatgcttttgcatctggacagattgcggcttacaaaatgtttgcaacaatcaatagggaacctgagattgatgccagtgataggagtggccttgtattggagaattttgttggagatgttgagttcaaagatgtccatttcagttaccctgcaaggcctgagcaactgatcttcactggcttctcaattagcattccaagtggcatgacaatggcattggttggtgaaagtggaagcgggaaatctactgtgattagtttggtcgaaaggttctatgacccacaatcaggtgaagttcttttggatggtgttaatatgaaattgctaaatcttagcaggataagacagaaaatagggcttgtcagccaagagcctattcttttcacaactaccatcagagaaaatatagagtatggaaagaaagatgcatcagaggaagaaatcaggagagcaattgtccttgccaatgctgcgaagttcatcgataagctaccaaatggactagatacaatggttggtgagcatggcacacagctatctggtggacagaaacaaagaattgcaattgcaagagcaattttgaaggaccctaggatactacttcttgatgaagctacaagcgcccttgatgctgaatctgagcatgtagttcaggatgcactcaataatatcatggttaacaggaccaccataattgtagcccatcgcctgagcacagtgagaaatgctgatacaatatctgtgctacatcgtggacaacttgtggaacaaggacctcatgctgagttgataaaatattccaatggagcatactatcaacttttacagcttcaagaggtaaacgcgagaaggaatggaacttatgaacttgaccccaataggctatctgatgttgcaaacagactatctgatgttgcaaacagactatctgatgctgcgaacagactatctgatgctggaaattttgtaagtcgacatagcattagaaagctatcctttgagagatctatgagcagacattcgtcactgggtggaagcagaaggaattcacagacatatgcattgactgaagatgaaatcgaagggtgtgatgacacgaagtctggcaagaatgtacttaggcgcttactacaccttcataagcctgaaactgcaatccttctgttaggatgcattgccgcctccgccaatggagctatacttccagtgtttggcctgttgctttcaagtgccatcaacgcattctatgaaccaccacacaaactgcgaaaagattcagtgttctgggcagaaatatacgtgatcttgggtgttgtatccatctttatcataccagtgcaacacactttgttcaacatggcaggtgggaagcttatcgagcgtatacgtgccttatcatttagtcgggttgtttaccaggatattggatggtttgatgaccctctgaacagcagtggcgcaataggtgctaggctatccgcagatgccgcatccgtcaaaagcattgctggagatgttttatcattgatcgttcaaagtataagcactgctcttgtcggcattgtaatagctatgattgcaaactggaagctagcattcatagtcttgtgcttcgttccctgtgtatttgcgcagagttatgctcaatcaaggttaatgaggggatttggtgctgatgcaaaggaaatgtatgaacaagcgagcacaattgctagtgatgccatcagtaacattagaactgtcacttcattctgtgtaggagagaagataattgaaagctaccgaaataaatgcaaaggtcctgtgaagaaaggagtccgtcagggagctataagtggtgtgggttatggattctcatttgccttgctcttctgcttttatgctgtatcgttttatgtcggagcacgctttgtacacaatggaacagctgacgttggggaagtttttaaggtcttctttgctttaacaatgatggctgttggagtttcacaatcgagttctcttgctcgggattttagcaaagtgcaagatgcggcagcctccatttttaagattatagataggaaatccaagatagatgcaagctcagatgatggaatggctccagagaaaattgaggggaatatagagtttcagcatgtgagcttcaagtatccagctcgaactgacgtgcagatcttcacaaatttgtgcttgaggatcccatctggcaaggtacatgtggttctcatgactgttgcgcttgttggtgaaagcggaagcggtaaatcaacagtggtagccttgctagagaggttctatgaccctgactctggcgccatctttctagacggcatggaccttaagaccctcaagctcacctggctcaggcagcagatagggctagtgggccaagaaccggttctcttcaacggcaccatcagagcaaacatcgcctacggcaagcaggatcaggtgtccgaggaggagatcgtcgctgtcgccgaggccgccaacgcccaccgcttcatctcctcgctcccgcacgggtacgacaccagcgtcggcgagcgtggcgtgcagctctccggcgggcagaagcagcggatcgccatcgcgcgggcgatcctcaaggaccccaaggtgttgctcctggacgaggcgacgagcgcgctggactctgagtcggagcgcatcgtgcaggaggctctggacagggtgatggtcgggcggacaacggtgatcgtggcgcaccggctgtcgaccatcaccggcgccgacaagatcgccgtcatcaagaacggcgtcgttgccgaggaaggccggcacgggcggctgctgcgcttgcccggtggagcttatgcgtcccttgttgccttgcagtctagcagttcgtga

SEQ ID NO: 4629 - protein, 1285 aa, Oryza sativa subsp
MAGGGGGGGDGGGGAGAGGGGGGGAKRVPMRRLFTFADRLDAALMAVGGVAAVANGVAMPFLAFLIGELVDAFGAADRAHVVHVVSKISLRFTYVAIGSGIAGFLQVSCWMVTGERQAARIRGLYLEAILRQDITFFDLETSTGEVTERMSSDTVLIQDAIGEKVGKFLQLLSTFLGGFIIAFARGWLLSLVMLSSIPPVALAAAAMSIAISKLANRSQLAYAEAGKLVEQTIGSIRTVVSFTGERRATDKYNEFLKISYRSAVHQGAAMGLGIGSVMFIVFCSYGLAVWYGAKLIIEKGYTGGYIINVLMAIMSGAMALGQSSPCLNAFASGQIAAYKMFATINREPEIDASDRSGLVLENFVGDVEFKDVHFSYPARPEQLIFTGFSISIPSGMTMALVGESGSGKSTVISLVERFYDPQSGEVLLDGVNMKLLNLSRIRQKIGLVSQEPILFTTTIRENIEYGKKDASEEEIRRAIVLANAAKFIDKLPNGLDTMVGEHGTQLSGGQKQRIAIARAILKDPRILLLDEATSALDAESEHVVQDALNNIMVNRTTIIVAHRLSTVRNADTISVLHRGQLVEQGPHAELIKYSNGAYYQLLQLQEVNARRNGTYELDPNRLSDVANRLSDVANRLSDAANRLSDAGNFVSRHSIRKLSFERSMSRHSSLGGSRRNSQTYALTEDEIEGCDDTKSGKNVLRRLLHLHKPETAILLLGCIAASANGAILPVFGLLLSSAINAFYEPPHKLRKDSVFWAEIYVILGVVSIFIIPVQHTLFNMAGGKLIERIRALSFSRVVYQDIGWFDDPLNSSGAIGARLSADAASVKSIAGDVLSLIVQSISTALVGIVIAMIANWKLAFIVLCFVPCVFAQSYAQSRLMRGFGADAKEMYEQASTIASDAISNIRTVTSFCVGEKIIESYRNKCKGPVKKGVRQGAISGVGYGFSFALLFCFYAVSFYVGARFVHNGTADVGEVFKVFFALTMMAVGVSQSSSLARDFSKVQDAAASIFKIIDRKSKIDASSDDGMAPEKIEGNIEFQHVSFKYPARTDVQIFTNLCLRIPSGKVHVVLMTVALVGESGSGKSTVVALLERFYDPDSGAIFLDGMDLKTLKLTWLRQQIGLVGQEPVLFNGTIRANIAYGKQDQVSEEEIVAVAEAANAHRFISSLPHGYDTSVGERGVQLSGGQKQRIAIARAILKDPKVLLLDEATSALDSESERIVQEALDRVMVGRTTVIVAHRLSTITGADKIAVIKNGVVAEEGRHGRLLRLPGGAYASLVALQSSSS

SEQ ID NO: 4630 - DNA, 1947 bp, Actinoplanes teichomyceticus
  CDS (1)..(1947): transl_table=11
gtggacgtggtgttgcgcttcgggggggtgtcgaagaacgatgacgaccccgatccctggcagaccctgatcgggccggggacgctgcgcagagtgctcgcctacttccgcccgcacatcggcaaggtggcgctcttcgttctcgtcgccgcgctggagtcgcttgtcgtcgtcgtagttccgttgttgctgatggaactggtcaacggcggcatcctcaaggacgacgccggggtcgtggcatcgatggccggcctggccgccggcctcgccctggtgggcgcgctgttgcagctggtgtcagcctatatttccgggcagatcgggcagggggtcagctacgacctccgggttcaggcgctgcgtcacgttcagcagctgccgatcgcgttcttcacccgtacccagaccggggtgctggtgggccggctgcacacggaactgatcatggcgcagcaggcgttcagccagctcctgatggcagccaccagcgccgtcacggtgatcctggtgatggccgagctgttctacctgtcatggcttgtcgccgtggtcaccctggtgctgattccgctgttcctcgtgccctggatctacgtgggccgggtgatccggcggcgcaccggacggctgatggacgcgaataccggccttggtggactcctccaggagcggttcaacgttcagggggcgatgctctccaaactcttcggccgtccccgcgaggagatggccgagtacgccgatcgtgccgagcgcatccgccgcatcggcgtgagtctctcggtgtacgggcggctcgccttcgtcatgatggcgctgatggcctcgctcgccacggcgctcgtctacggcatcggtggcgggctcgtgctcgccggggcgttccagctcggcacgctcgtcgccctcgccactctgctcgggcggttgttcgggccgatcacgcagctgtccgggatgcaggaaaccgcgcagaccgtcgtggtgagcttctcccggatcttcgaggtgctcgatctgaaggggctgatcgaggagcgtcccggtgcggtcgcgctcgccaaggacacggcgccggagatcgagttcgacgacgtggcgttccgctatccgaccgccgacgaggtctcgctgcgctcgctggagtacgtacgcgccgaacgggagcgcggggagacgacgccggaggtgctgcgcggtgtcagcctgcacgtgccggccggcaccctcaccgcgctcgtcggcccgtccggcgccggcaagagcacgctcacccacctggtgtcacggctgtacgacccgaccggcggggtcattcgcgtcggtgggcacgatctgcgcgacctcaccttcgactcgctgcgcgaagcggtgggcgtggtcagccaggacgcctacttcttccacgacacgatccggcagaacctgctctacgcccgccccaccgccaccgaggacgaactgatcgaggcatgtcgaggggcccagatctgggacctgatcgcctcgctcccgggcgggttcgacaccgtcaccggcgatcgtggctaccgcctgtcgggcggcgagaagcaacgcctggccatcgcccggctgctgctgaaggcgccgacgatcgtcgtgctcgacgaagccaccgctcacctggactccgagtccgaggccgccgtgcagcgggcactcaagaccgccctgcacaaccgcacctcgttggtgatcgcccaccggttgtccacgattcgcgaggccgaccagatcctcgtgatcgacgacggacgggtccgggagcgcggaacgcacgacgagctgctggccgaggggggtctgtacgcggagctttaccacacgcagttcgccaaggccggaagcgacgcagccgaaccggcgagcgacgcagccgagctgcaccacagggagcccgagccggtgcacggcggaggatga

SEQ ID NO: 4631 - protein, 648 aa, Actinoplanes teichomyceticus
MDVVLRFGGVSKNDDDPDPWQTLIGPGTLRRVLAYFRPHIGKVALFVLVAALESLVVVVVPLLLMELVNGGILKDDAGVVASMAGLAAGLALVGALLQLVSAYISGQIGQGVSYDLRVQALRHVQQLPIAFFTRTQTGVLVGRLHTELIMAQQAFSQLLMAATSAVTVILVMAELFYLSWLVAVVTLVLIPLFLVPWIYVGRVIRRRTGRLMDANTGLGGLLQERFNVQGAMLSKLFGRPREEMAEYADRAERIRRIGVSLSVYGRLAFVMMALMASLATALVYGIGGGLVLAGAFQLGTLVALATLLGRLFGPITQLSGMQETAQTVVVSFSRIFEVLDLKGLIEERPGAVALAKDTAPEIEFDDVAFRYPTADEVSLRSLEYVRAERERGETTPEVLRGVSLHVPAGTLTALVGPSGAGKSTLTHLVSRLYDPTGGVIRVGGHDLRDLTFDSLREAVGVVSQDAYFFHDTIRQNLLYARPTATEDELIEACRGAQIWDLIASLPGGFDTVTGDRGYRLSGGEKQRLAIARLLLKAPTIVVLDEATAHLDSESEAAVQRALKTALHNRTSLVIAHRLSTIREADQILVIDDGRVRERGTHDELLAEGGLYAELYHTQFAKAGSDAAEPASDAAELHHREPEPVHGGG

SEQ ID NO: 4632 - DNA, 1788 bp, Melittangium lichenicola
  CDS (1)..(1788): transl_table=11
atggaatcgaaacgaggacccggaaggacgccgggcgcgggcaaggcggtgtggcgggcgctcgggtatctgcggcgctatcggttcgacacgatgggggcgttgctgtcgctgctgatggcctcggcggccaacctcgcggcgccccagttcgtgcgtcaggtggtggatgaggggatcgcccacggctcgatgccggcggtgcgcgcggcggtggcggggctggtgggcgtcgccctggtgcgaggggtgtgcaacttcttgcagggctacctcgcggagcgggcctcgcaaggggtggcgttcgacctgcgggactcgctcttcgagcggctgcagcggctgagtttcagctaccacgatcaagcgcagacggggcagctcctcacgcggctgacgaacgacgtggagcaggtgcgcaccttcgtgggcggcggggcggtgcaggtggtggcgtcgctgctcatgctggtgggctgtacggcgctgttgttcatgacgaaccccgtgctcgcgctggcggcgctggccaccatcgcgccggtgctctgggtgctgcggcacttcatgatgaagatggggccgctgttcggccaggtgcaggggaccctgggccggctcaattccatcctgcaggagagtctgcggggcgcgcgcgtggtccgggccttctccggagaggcgcgcgagtcggcgcgctacggccgcgtcaacgaggagtacctgggcctcaacctccagctcatcaccatcatcttcacccacttcccctgggtgttcttcttcgccagcctgggcacgctcgtggtggtgggcgtgggcgggtggttgatcttccatcagtggctgagcatcggggaactgctcgcgttcaacagctacctgggcttcctgctcctgccgctcatcaccctggggttcctggccaatcagatgtcgcgcgcgggcgtgtccgcggtgcgcatcttcgaattgctcgacacctccgtggaggtggtggatcggcccggcgcccaggtgctgccgcccctggagggacgggtggagctgcgggacgtgcgcttccgctacgccgggggcgagcgggacatcctcaagggggtcagcttcgtggtcgagccgggccagttcgtggccatcatcggcaccacgggctcgggcaagagcaccgtcatcaacctgattccccgcttctatgaggtcacgggcggcgcggtgctcatcgatggccgggacgtgcgcgatgtgacgctcgccagcctgcgctcacaggtgggcatcgtgctccaggaggcgacgctcttcgccggcacgttgcgcgagaacatcgcctatggccgtcccagcgccagcctggaggaggtccaggccgcggcggaggcggcccaggcggcggagttcatcgcggcgctgccccagggctatgacacgccggtgggtgaacggggcgtgggactgtcgggagggcagcgccaacgtgtggcgatcgcccgtgcgttgctcacccaaccgcgtctgctcatcctcgacgacagcacctcggcggtggacgcccgcaccgaggcggagatccaacacgcgttggatcggctcatgcggggctcgcagcgcaccgcgatcgtcatcgcccagcggctgagcacggtgcgtgacgccgatcaggtcatcgtgctcgacgagggccgggtggtggcccaggggcggcacgaggaattgctcgcctccagtccgctctacaacgagatcctgggatcgcagctccggccggagcagggggaggcggtatga

SEQ ID NO: 4633 - protein, 595 aa, Melittangium lichenicola
MESKRGPGRTPGAGKAVWRALGYLRRYRFDTMGALLSLLMASAANLAAPQFVRQVVDEGIAHGSMPAVRAAVAGLVGVALVRGVCNFLQGYLAERASQGVAFDLRDSLFERLQRLSFSYHDQAQTGQLLTRLTNDVEQVRTFVGGGAVQVVASLLMLVGCTALLFMTNPVLALAALATIAPVLWVLRHFMMKMGPLFGQVQGTLGRLNSILQESLRGARVVRAFSGEARESARYGRVNEEYLGLNLQLITIIFTHFPWVFFFASLGTLVVVGVGGWLIFHQWLSIGELLAFNSYLGFLLLPLITLGFLANQMSRAGVSAVRIFELLDTSVEVVDRPGAQVLPPLEGRVELRDVRFRYAGGERDILKGVSFVVEPGQFVAIIGTTGSGKSTVINLIPRFYEVTGGAVLIDGRDVRDVTLASLRSQVGIVLQEATLFAGTLRENIAYGRPSASLEEVQAAAEAAQAAEFIAALPQGYDTPVGERGVGLSGGQRQRVAIARALLTQPRLLILDDSTSAVDARTEAEIQHALDRLMRGSQRTAIVIAQRLSTVRDADQVIVLDEGRVVAQGRHEELLASSPLYNEILGSQLRPEQGEAV

SEQ ID NO: 4634 - DNA, 3981 bp, Aspergillus oryzae
  CDS (1)..(3981)
atgaagctcggcaaaaagcttgcaggctaccccagcctactgctggccggtaatccttcgaaagtcgacatagggaggcttttgttgggtatggtagcttcagcagcgtccggtgtccccttcccattaatcgctattcttttcggtcaactgttagacgacttcaacgccgtaacgtgtgatgaaaccgaatcgacgggttccgatgccgattatcaacatgacattaacggcaaaatcctgatcattgtgtatctggccattgctcaattcgttgcgatttatattcatctttcctgctggagcttgaacggcgctcggctagcgcagagactgcgggaaacgtatcttcaaaacttgcttcgacaagaaccttcattcttcgatgatctacctccgggagaacttgcatctcggcttaatggcgatatccaggcgattcgatctggcacgtcggagaaagtggggatatgcttatcgaccttatcgtttttcatcacggcatatgtcgttgctttcatcaaagactaccggctggcagcaatgttgatttcattagttcccgcctacttcctgatgtcatctgttggaagccattatattgaagaatactctggacgtatgtcggattattccgcaactgccgcatcaatcgcttccgaggcgctctccaacaccgtcgtggtgcaggcctttggcgcgagctaccgactggaagataagttttccaaggcgctcaaggcttcagagcaggaaggcttgaagaaggccgccgccgtgggtatacaatctggattcctgtattttatcgcctattctgcgaatggtctggcattctggcaaggtagtagacgtgttgcggatgcagtaggctcggacactgctggtgccaccgttggcgctacatttacagtgattttcgtcctcgttgaagctaccttgcttctgagtcaggttgctccattcctccacctattcacggcagccgttgcctcataccaaaagctgcgtgcagacatcgaccgtcagccgcaaattgatgctactacagagtccggcattcgcctctcacaggcagaaggtggattcgaattcaaaaatgtctctttcacttatccctcacgtcccgagatcacagtgcttgaccagatcagcctttccatcccggccaacaagcatactgcccttgttggtctgtctggaagtgggaagtcaaccatcgccggtttggttacaaggctgtacgatcccacggaggggcaggtcctcttcgacggccatgaccttcgtgaggtcaacacccgtgatttgagaagcttccttagtctggtgcagcaggagccgtcgctgctcgatcggtcgcttttggaaaacatcgcacatggcttgatcaattcgagcaatcccagtcatgctcatctgaggacgacacttcttagcaccggcctcacagatctggcagcagaagtcagggaaggtgtggatctcatggctgcggcagagaaacgaggctcggaagttgttgaaattgtcaacctggtgcgaaaggctgcgacgcttgctgatgcagatggcttcatcagtgcactgcagtatgggtacggtacacttgtcggttcaagtgggcgactgatcagtggtggccagaagcaacgcgtttcccttgctagggccctcatcaaggatcctgcggtacttatattggatgaggccacagcctctctcgattcaaggagtgagcagcgtattcagcgggccatctcaaatattgccactggtagaactatgatcacaattgcccatcgtctgtccacaattaccaacgccgacaatattattgttatgcacaagggacatatcgttgaacagggtgatcatgcgacattaatggctaagaacggagcgtacgctgacctagtcaatctgcaaactttgggttccgcccccggcaagaaagaaaagacagctagcgcagacaacgtcagccagtctgaccaagcctctttatctgacgctggtgttgaggaaagtagtgtctcgaaagatggtctggaaactgccgagaaaaaagaagtcttagcaagtgcagctccagtcaccgagcctgctgaacccgctgaagaggaagaagagcctgaaacccctaagaaatctatgtgggctttgttgcgcgggtatgcgcccacattgagaccccatctgcttttcattttcctcgcacttctaggttctagcattgtcggcggtgccttctctggcgaagtgattttcggaaacactgtcggaagtttgaatccctgtcacagtgaaagctatattcggagcgcaggaaacttcttcgggcttatgttcttcgtactcgccattatcgaatttttcgcgaacctggttagctggaccgggtttggctgggtatcagagaaaatcgtctttacagtcagagtcttgtcattccgctcactgtttgagcaagatctccagtggcatcaatctaatggtcggtcacctgccttgctcctctcctacattactcgagacggcaatgccttggcgggactgagcggctccgtcattggaacgttgttctctatcaccgtcaaccttattgcagcaatcattttaactcatattattgcctggagaatcgcattggtttgcctggctttagtaccactcctgcttggagccggtcttatggagcttcacgtccttggcaaattcgaggaacgccatgagaacgcatacaccaagtcagttgacattggtgtagaggaagtcacgtcgatcaagacaattgcatccctttctcttgaagaggacactttgagaacttaccgacgatccctaaaaggaccccgcaaggagacatttcaagtcactcttcatgcaagtctctggcaggcaatgacttacttccttggcaactgcgtcaatgcgttggcctattggtggggttcaaagcagatcatcaatggcaactacacgcaaacacagttcctgattgtagtattctcgctcctggtcagcgcactgctctggagtcagatgtttgcccttgcaccggagctttccgccgcccgagcggcgatggcaaggatcttgggtctgattgagattgggtcggacaagatgcaaggacgcgtaccatctcgttcacccactatctcttcttctgaggagaaagacgttgagacagctgaaacaaaatcggtgtacgtgtctggtaacaaccgggcctcgagcgtacagcttcgcaatatccatttcgcatacccggctcgaccggacataaaggtactaaagggcttagacgtcgatattcatcctgggcaattcggcgcccttgtcggaccaagcggtgctggtaaatcaaccatcatttcgctggttgaacggttgtacacgcccgaaaccggatccatcgtgatcgatggcgtcgacgttaccaggcaccgaggcgttgacttccgcgactctatcgctcttgtgccacaagaaagcgtgctttttgagggcagtattgagttcaacattggccttggtgctagaccaggacatgaagcgactatcgaggaaatcaaagaggcatgcaagcttgccaacatccacgacgttatagaggcgctgccagagggctacaagactctttgcggacctaatggtagccagttctcgggaggtcagaagcagaggttgtctattgctcgggcccttgttcggaagcctaagcttctgattctcgatgaatcgaccagcgctttggacgctgaatcggagaagctactgcaagacggactcgaaaaggccgcaaagggcattactgtcattgctatcgcccatcgtcttcacacaattagagcagcagatgtcatcttcttgattgaagggggtaaatgcattgatcgcggatcgcacgaggagttgctcgaaagatcggacagctacagagcaaacgtcatgcatcaaacagtggccacgtga

SEQ ID NO: 4635 - protein, 1326 aa, Aspergillus oryzae
MKLGKKLAGYPSLLLAGNPSKVDIGRLLLGMVASAASGVPFPLIAILFGQLLDDFNAVTCDETESTGSDADYQHDINGKILIIVYLAIAQFVAIYIHLSCWSLNGARLAQRLRETYLQNLLRQEPSFFDDLPPGELASRLNGDIQAIRSGTSEKVGICLSTLSFFITAYVVAFIKDYRLAAMLISLVPAYFLMSSVGSHYIEEYSGRMSDYSATAASIASEALSNTVVVQAFGASYRLEDKFSKALKASEQEGLKKAAAVGIQSGFLYFIAYSANGLAFWQGSRRVADAVGSDTAGATVGATFTVIFVLVEATLLLSQVAPFLHLFTAAVASYQKLRADIDRQPQIDATTESGIRLSQAEGGFEFKNVSFTYPSRPEITVLDQISLSIPANKHTALVGLSGSGKSTIAGLVTRLYDPTEGQVLFDGHDLREVNTRDLRSFLSLVQQEPSLLDRSLLENIAHGLINSSNPSHAHLRTTLLSTGLTDLAAEVREGVDLMAAAEKRGSEVVEIVNLVRKAATLADADGFISALQYGYGTLVGSSGRLISGGQKQRVSLARALIKDPAVLILDEATASLDSRSEQRIQRAISNIATGRTMITIAHRLSTITNADNIIVMHKGHIVEQGDHATLMAKNGAYADLVNLQTLGSAPGKKEKTASADNVSQSDQASLSDAGVEESSVSKDGLETAEKKEVLASAAPVTEPAEPAEEEEEPETPKKSMWALLRGYAPTLRPHLLFIFLALLGSSIVGGAFSGEVIFGNTVGSLNPCHSESYIRSAGNFFGLMFFVLAIIEFFANLVSWTGFGWVSEKIVFTVRVLSFRSLFEQDLQWHQSNGRSPALLLSYITRDGNALAGLSGSVIGTLFSITVNLIAAIILTHIIAWRIALVCLALVPLLLGAGLMELHVLGKFEERHENAYTKSVDIGVEEVTSIKTIASLSLEEDTLRTYRRSLKGPRKETFQVTLHASLWQAMTYFLGNCVNALAYWWGSKQIINGNYTQTQFLIVVFSLLVSALLWSQMFALAPELSAARAAMARILGLIEIGSDKMQGRVPSRSPTISSSEEKDVETAETKSVYVSGNNRASSVQLRNIHFAYPARPDIKVLKGLDVDIHPGQFGALVGPSGAGKSTIISLVERLYTPETGSIVIDGVDVTRHRGVDFRDSIALVPQESVLFEGSIEFNIGLGARPGHEATIEEIKEACKLANIHDVIEALPEGYKTLCGPNGSQFSGGQKQRLSIARALVRKPKLLILDESTSALDAESEKLLQDGLEKAAKGITVIAIAHRLHTIRAADVIFLIEGGKCIDRGSHEELLERSDSYRANVMHQTVAT

SEQ ID NO: 4636 - DNA, 3831 bp, Oryza sativa subsp
  CDS (1)..(3831)
atgtcggagtcgagcagggcgttcggagtgaatgcgtcgtcgtcgtcgtccggcggcggcggcggcggcgaggcggtggctggaacgacggggaagaatggtggcggggggagcgtggcgttccaccggctgttcgcgttcgcggacggcacggacgcggcgctgatgctgctcgggacgctgggcgcggtggcgaacggcgccgcgctgccgttcatgaccgtgctgttcggcggcctcatcgacgccttcggcggcgccgcgggcggcgacgtcgtggcgcgcgtctccgaggtgtcgctccagttcatctacctcgccgtcgcctcggccgccgcgtcgttcatccaggtggcgtgctggatgatcaccggcgagcggcaggcggcgcggatacggagtctgtacctgaggacgatactccggcaggaggtcgccttcttcgacaagcacaccaacaccggcgaggtggtgggcaggatgtccggcgacacggtgctgatccaggacgccatgggggagaaggtgggcaagttcgtccagctcctcgtcacgttcctgggcggcttcggcgtggcgttcgcgcaggggtggctcctcaccctcgtcatgctcgccaccatcccgccgctcgtcctctccggcgccgtcatgtccaatgtcgtcgccaggatggcgtcgctcggccaggccgcctacgccgacgcctccgtcgtcgtcgagcagaccatcggctccatcagaacagttgcgtcgttcaccggcgagaagcaggcggtggcgaagtacagtaggtcactgaagagagcgtacagctccggcgtcagggaggggctcgccgccggcgtgggcatgggcacggtgatggtgctcctcttctgtggctactcattggggatttggtacggtgccaagctgattctggagaagggatacaccggagctcaggtcatgaatgtcatcttcgccgtgctcaccggctcgctagctctaggtcaggcatcaccaagcatgaaagcattcgcgggagggcaggctgcggcatacaagatgtttgagacaatcaacagggagccagagatcgatgcgtacagcgccacaggtaggaagctagatgacattcagggggatatcgagttcagaaacgtttacttttcgtacccgacaaggcccgatgagcaaatattcagagggttctcgcttgccatacagagtggaacaactgttgcattggttggacagagtgggagtggaaaatcaacagtcatcagcttaatcgagcggttttacgaccctcagctcggtgaagttctaattgatggagtgaatctcaaggagttgcagctaaggtggatcagaagtaaaattggccttgtgagccaggagccaatcttgtttgctgctagcattatagataacatagcttatggcagggataatgctacaaatcaggaaattagagctgcagctgagcttgctaatgcctccaaattcattgataaaatgccccagggttttgctactttggttggtgaacatggaacacaattatctggtgggcagaagcaaagaattgccattgccagagcaattctgaaagatccaaggattctactactggatgaagcaaccagcgctttggacaccgaatccgaaaggattgtgcaggaggctcttgacagggtcatgtcaaaccggaccaccgtcatagtcgctcaccgtttgaccactgtcaggaatgctgatactattgctgtcatccatcaaggatcaatagttgaaaaaggttcacaccatgagctcataagtgatccagatggagcgtatagccaattgatacgcttacaggaaaacagtcatgattctgaggatgcaaattaccagaacaagtcaggcaagaagagtgattctgggattcgctcgggcaaacaatcgttttcgtaccagtcgactcctcagagatcatctagggacaacagtaacaatcactcattctcagtatctgctactcctctagaaattgatgtccagggtggttcaccaaagaagatagctgaagaaacaccacaggaagtgcctctcagtcgcctcgcagcgcttaacaaaccagagatcccagtgcttctgcttggttctgttgcttctgctgtcagtggagttatcttcccaatctttgcgatacttttatccaatgtgatcaaagcattttatgagcccccacaagtgctaaagaaggatgctgagttttggtcatcgatgttcttagtgtttggggcagtgtacttcttgtcacttcctattggctcataccttttttcagtggctgggtgtaggttgatcagaaggatcagactgatgacttttgagaaggttgtaaatatggagattgaatggtttgatcatccagaaaactcaagtggatcaatcggagcaaggctatcggccgatgcagcaaaaattagggggcttgtgggtgatgcacttcaactggttgtgcagaatttagcaacattagttgctggtttgttgattgcttttatatcaaactgggagctatctctgatcatcttggcgttgataccactcatcggcgtcaacggatggatccagatgaagtttattcagggattcagtgcagatgcaaagatgatgtatgaagaggcaagccaagtggcaaatgatgcagtgagcagcataaggacagtagcctcattttcagctgaagagaaggtaatggatttgtacaagatgaaatgtgaaggaccactaagaacaggaatcaggacggcgataataagtggtatcggtttcggtgtttctatcttcctgctgtttggagtctatgcagccagcttctatgccggtgctcggcttgtcgaggacaggaaaacaacatttcctaacgttttcagggtgtttcttgctctcacaatggcagcaattggggtgtcacacactagcaacctcacatcagattcttccaaggcaaaatcagctgtatcttctatattcgccatcgtagaccgtaaatctaggattgatccaagtgatgatgctggagtgagcttagaaccactaagaggcgatatcgagttccagcatgtgagcttcagatatcctacacgaccagatgttcagatctttgaagacctgtgcttaacaattcaatctggaaagactgttgctcttgtcggagagagcggtagcgggaaatcgacagcgatatcattgcttcagaggttctatgatccggatgcaggccatatacttctagatggagtggacattcaaaagtttcagctaaggtggctaaggcaacagatgggtctagtgagtcaagaaccagctctgttcaatgacacgattcgcgcaaacatcgcgtatgggaaggaaggggatgcgacagaatcagacatcgtatcctccgcgcaattggcgaatgcgcacaagttcatcagctcattgcatcagggatatgaaaccatggtcggggagcgtggagctcagctatccggagggcagaagcaacgcatcgcgatcgcccgcgccattgtcaaggatcccaagatcctccttctcgatgaagccacgagtgcgctcgacgcagaatcggagcgcgtcgtccaagatgcgctggaccgggtgatgatgaacaggaccacggtgatcgtggcacaccggctgtccacaattcagggcgcagacatgatcgcggtggtgaagaacgggatgatcatcgagaaggggaagcatgatgcattgatcggcatcaaggatggagcttacgcctccctcgtcgccctccatgtttctgctgctgccatttcgtag

SEQ ID NO: 4637 - protein, 1276 aa, Oryza sativa subsp
MSESSRAFGVNASSSSSGGGGGGEAVAGTTGKNGGGGSVAFHRLFAFADGTDAALMLLGTLGAVANGAALPFMTVLFGGLIDAFGGAAGGDVVARVSEVSLQFIYLAVASAAASFIQVACWMITGERQAARIRSLYLRTILRQEVAFFDKHTNTGEVVGRMSGDTVLIQDAMGEKVGKFVQLLVTFLGGFGVAFAQGWLLTLVMLATIPPLVLSGAVMSNVVARMASLGQAAYADASVVVEQTIGSIRTVASFTGEKQAVAKYSRSLKRAYSSGVREGLAAGVGMGTVMVLLFCGYSLGIWYGAKLILEKGYTGAQVMNVIFAVLTGSLALGQASPSMKAFAGGQAAAYKMFETINREPEIDAYSATGRKLDDIQGDIEFRNVYFSYPTRPDEQIFRGFSLAIQSGTTVALVGQSGSGKSTVISLIERFYDPQLGEVLIDGVNLKELQLRWIRSKIGLVSQEPILFAASIIDNIAYGRDNATNQEIRAAAELANASKFIDKMPQGFATLVGEHGTQLSGGQKQRIAIARAILKDPRILLLDEATSALDTESERIVQEALDRVMSNRTTVIVAHRLTTVRNADTIAVIHQGSIVEKGSHHELISDPDGAYSQLIRLQENSHDSEDANYQNKSGKKSDSGIRSGKQSFSYQSTPQRSSRDNSNNHSFSVSATPLEIDVQGGSPKKIAEETPQEVPLSRLAALNKPEIPVLLLGSVASAVSGVIFPIFAILLSNVIKAFYEPPQVLKKDAEFWSSMFLVFGAVYFLSLPIGSYLFSVAGCRLIRRIRLMTFEKVVNMEIEWFDHPENSSGSIGARLSADAAKIRGLVGDALQLVVQNLATLVAGLLIAFISNWELSLIILALIPLIGVNGWIQMKFIQGFSADAKMMYEEASQVANDAVSSIRTVASFSAEEKVMDLYKMKCEGPLRTGIRTAIISGIGFGVSIFLLFGVYAASFYAGARLVEDRKTTFPNVFRVFLALTMAAIGVSHTSNLTSDSSKAKSAVSSIFAIVDRKSRIDPSDDAGVSLEPLRGDIEFQHVSFRYPTRPDVQIFEDLCLTIQSGKTVALVGESGSGKSTAISLLQRFYDPDAGHILLDGVDIQKFQLRWLRQQMGLVSQEPALFNDTIRANIAYGKEGDATESDIVSSAQLANAHKFISSLHQGYETMVGERGAQLSGGQKQRIAIARAIVKDPKILLLDEATSALDAESERVVQDALDRVMMNRTTVIVAHRLSTIQGADMIAVVKNGMIIEKGKHDALIGIKDGAYASLVALHVSAAAIS

SEQ ID NO: 4638 - DNA, 1944 bp, Streptomyces toyocaensis
  CDS (1)..(1944): transl_table=11
atggtcatgatgccgtccatcgggggggcgctgagggccggcggaggtgctgatcccgagccgtccaggatcagccccggcacgtcccgcagagtgatcgcctaccttcgcccgcacagcggaaagatcgcggtcttcgtcgtcgtcgccgtcctggagtcgctcatcgtggtggcgactccgctgttgctcaagcagatcgtcgacgaggggatcctcaagcacgactccaaaaccgtcaccctgctggcctgcctcaccgccgggctcgccgtcctcgacgcgttactgcagctggcgctcgcctacatcgccggtgcgatcgggcagggggtcagctacgacctccggatccgggcgatcggtcacgtccagcggctgccggtcgcgttcttcacccgcacccagaccggggtcctggtcggacggctccacacggacctgatcatgacgcagcaggccttcagccagctgctgatggcggtcaccggcgcggtctcggtcgtcctggtgatggccgagctgttctacctgtcgtggctcgtcgccctcatcacgctggtgctgatcccgctgttcctcattccctgggtgtacgtgggccgagtgatacagcggcacaccaggcagtcgatggaggtgaacgccggcctggccggcctgctgcaggagcggttcaacgtgcagggggcgatgctctccaagctcttcggccgtccgcacgaggagatggccgagtacgaggaccggtcgcgcaagctccgccggatcggggtgaacgtcgtcgtcttcagccggatggccttcatcatcatggcgctgatggcctcgctcgccacggcgctcacctacggggtcggcggcggcctcgtgctctccgggaccttccagctcggcacgctggtcgctctcgccaccctgctggggcggctgttcgggccgatcacccagctctccgggatgcaggcgaacgcggtgatcgtcctggtgagcttcgaccggatcttcgagctcctcgacctgaagccgctgatcgaggaacgctccgacgccgtcgtgctcaggagcgacacagccccggagatcgagttcgaggacgtgtcgttccgctatccgggtgcggacgaggtctcgctgccgtcgctggagcagaacgtgcgtggcggacgggagccgggggaggcgacgccggaggtcctgcgccacgtgagcctgcatgcgccggccggaaccctcaccgcactcgtcggcccgtccggcgcggggaagagcactctcacccacctggtgtcccggctgtacgacccgacctccggcaccgtccgtgtcggcggactcgatctgcgggatctctccttcgcctcgctgcacgagacggtgggcgtggtcagccaggacacctacctcttccacgacaccattcgggagaaccttcgctacgcccgtccgagcgccatggaggacgaggtgatcgaggcgtgcaagggggcccagatctgggacctgatcgaatccctcccgagagggctcgacaccgtcgtgggagaccgcggctaccggctgtcgggcggggagaagcagcgactggccatcgcgaggctgctgctgaaggcgccctcggtcgtcgtgctcgacgaggccaccgctcacctggactccgagtcggaggccgccgtccagcgggccctcaggaccgcgctgcgcgaccgcacctctctggtgatcgcccaccggttgtccacgatccgcgaggccgatcagatcgtcgtgatcgacgacggaggcgtccgtgagcgcgggacgcacgaggagctgctggccgagggcggcctctacgcggagctgtaccacacgcagttcgccaattcgggtggcgacggagccgcgcccgaaggcgacggggccgggccggtcccccagatggctgctgaagggggacgatga

SEQ ID NO: 4639 - protein, 647 aa, Streptomyces toyocaensis
MVMMPSIGGALRAGGGADPEPSRISPGTSRRVIAYLRPHSGKIAVFVVVAVLESLIVVATPLLLKQIVDEGILKHDSKTVTLLACLTAGLAVLDALLQLALAYIAGAIGQGVSYDLRIRAIGHVQRLPVAFFTRTQTGVLVGRLHTDLIMTQQAFSQLLMAVTGAVSVVLVMAELFYLSWLVALITLVLIPLFLIPWVYVGRVIQRHTRQSMEVNAGLAGLLQERFNVQGAMLSKLFGRPHEEMAEYEDRSRKLRRIGVNVVVFSRMAFIIMALMASLATALTYGVGGGLVLSGTFQLGTLVALATLLGRLFGPITQLSGMQANAVIVLVSFDRIFELLDLKPLIEERSDAVVLRSDTAPEIEFEDVSFRYPGADEVSLPSLEQNVRGGREPGEATPEVLRHVSLHAPAGTLTALVGPSGAGKSTLTHLVSRLYDPTSGTVRVGGLDLRDLSFASLHETVGVVSQDTYLFHDTIRENLRYARPSAMEDEVIEACKGAQIWDLIESLPRGLDTVVGDRGYRLSGGEKQRLAIARLLLKAPSVVVLDEATAHLDSESEAAVQRALRTALRDRTSLVIAHRLSTIREADQIVVIDDGGVRERGTHEELLAEGGLYAELYHTQFANSGGDGAAPEGDGAGPVPQMAAEGGR

SEQ ID NO: 4640 - DNA, 3942 bp, Venturia inaequalis
  CDS (1)..(3942)
  misc_feature (1674)..(1674): y is t or c
atgttctttggaaagcttgctggctaccccaagctgcttgtggctggggatgcctcaaagatcgacattggcactctcgtactgggtacaatctgctccatagcgtctggggtgcctttccctttgattgggattctgttcggccagctcctcgacgacttcaatgcagctacttgcaaaaccccggacacgacgactggatccggggaccaatccgatatcaatggcaagatcctgataatcgtgtacctggcaatcgctcaatttgtcctgatatacgtccacctttcttgctggactttgacaggggcacggctcgcccaaagactgcgggaaagatatttgcagaacctgctccgacaagaaccatcatttttcgacaagttacctcctggagaagttgcatctcgactcaatggcgatatccaggcaatccgctcagggacttctgagaaagtcggaatatgcatctcaagtttgtccttctttgttacggcctacgtcgtggccttcatcaaggactacagacttgccgcgatgcttgtctccctggttccagcatacttcttgatgtctttcgtcggaagtcattacattgagaaatatgcagggctcatgtccgatcatgctgcttctgcggcgtcaattgcttcagaggcactttccaacatcgtcgtggtgcaagcttttggcgcgaacgctcggctggagaagaaattctctgaatcactcgaagcatcgaaaaaacaaggattgaagaaagccccggctgttggaatacaatctggattcttgtatttcatttcctactcggcgaacggtctcgcgttctggcaaggcagcaaacggattgcggatgcaattcaagacagctctcaaggagctaccgtgggttcgacttttactgcagctaccttgcttctcagtcaagtagctccctttttacacctgttcacgggtgctgttgcttcgtacgaaaagcttcgaggagacattgaccgcgagtccttgattgatgggacttccttgactggtgttcgtctgcccaacgtggaagccggattcgagttcgaggacgtttccttcacgtatccttcccgacctgaaatcaccgttttggaccatttcaacctctccattcctgccaacaagcatactgccattgttggtctctctgggagcggcaaatcgactatcgccggcttggctactagattttacgaccccactggtgggaaaatactgtttggtggtcatgacctctgtcatttgaacgctcgcgatctcagaagcttcatcagcttggtacagcaggagccatctcttctcgaccgatctctgctcgaaaacatagcgcatggcctcatcagttcaagcaatcctgatcacgcccatctcaaaccaataatactaggctcccaacttgcagatctggcacaagatcttcgcgaaggcgaggatctgatgttggcagcggcgaaattgggagcggatgtgcttgaagtcgtcaacttggtgcaaaaggctgcatccctcgctgatgcagatgcttttattgttgcgttacagcacggatacggcacgactgtcggctcaagcgggcgcctcatcagcggcggacagaaacagagagtggcactggcgcgtgctcttgtcaaggaccctgctgtgctyatcttggacgaagccaccgcatcgttggattcaagaagcgaacagaggattcagcgagctatcgcgaatattgcaagtggtagaacggtgatcactattgcccatcgactttcaacgataacgaccgccgaaaacatcgtcgtcatgaacaaaggagtaattttggaacaaggaacacactcggaattgatggccagaaatggtgcgtatgcagacctgattggactgcagacactcaggtctgctggaggcaaaaacgcgtcgacactcagcatcgagagcgccggcaaatctgatctggcatcctcaacagacttgagcatcgagggtagtagtctttcagacgaaactctccacggcaatgagaagattgaggtttcgatatctcatagtcctgtcgctgccccgtccgaaggagaagagccggaacccgagaccccatccaagtcgctttggactttaatcaagggctacgcaccagcaacgaggccacacttgctgatcatcctcgttgccctcctcgcttcaagtattgttggtggagcattttcagccgaggccgtgatcttcggaaacaccgtcggaagcctcaacccatgcaagtctgttgccagtatcctctctcggggcagcttcttcggtctcatgttcttcgtgctcgccctcgtcgagttctttgcgaatctcgtcagctggacagggtttggatgggcatctgagaagattgtgtatacagtgagggtgctgtctttccgatcactgttcgaacaggatctccactggcatcaatctgctggtcggacgcctgctatgctcctgtcttatattactagagatggtgatgctttggccggcttgagtggatccatcatcggcactctcttctccatcacaatcaaccttatcgcggcgatcattctcactcacatcattgcctggcgcattgctctggtctgcttggctttggtaccactcctactcggagctggactgatggaacttcgggccctcggcaagttcgaggaaagacatgagactgcctactccaagtatattgatatcggtgtagaggctgtcacatctatcaagacgattgctgctctttctctggaagaacagactttgcagacttatcgccgatcgttgaaagggcctcgagacgagacgttcaaagtcactttgcaagcaagtctctggcaggccacgacatacttcctcggtaatcttgtcaacgcgctagcttactggtggggtgccaaacaaatccttgctggcaattacacccagacgcaattcttgatcgtggtattctcgctccttgtgagcgcacttctctggagtcaaatgttcgcgctcgccccagagctttcgaatgcacgcgcagccatggcgagactactgggcttgattgagctcggttccagcaagatgcaaggtcacgttcatccaccaagcctctccgattcatccaccgagagcggtctcgaggccccaagtgagaagctgccaacaaacaactcagcatcaagtatccagctcaacaacgtccacttctcctacccagcacgcccagacatcaaagttctcaacggtctatccatggacctccgccccggaaaattccacgccatcgtcggcccctcgggcgccggaaaatcaacaatcatctccctaatcgaaagactatacacgccccaatccggcaccatcctcatcgacggcctcaacatcaccacatcccgctccgtcaccttccgcgactccatcgccctagtcccccaagaaagcgtcctcttcgaaggcacaatctccttcaacatcagcctcggcgcccgcccaacccacgccgtaacccaacacgaaatagaagaggcgtgcaaactagccaacatccacgacaccatcgccgccctcccaaacggctacgacaccctctgcggccccaacggcaatcaattctcgggcggccagagacagcgtctcgcgatcgcgggggcgctcgtgcggaaaccgcaggtgctgattttggacgagagtacgagtgcgctggatgcggagagtgagaggttgttgcaggaggggcttgataaggcggcgaggggggtgacggttgtggcgattgcgcatcggttgcatacgattcggagggcggatgttatatttttgattgagggtggggtttgtgtggggagggggtcgcatgaggagttgtttgtttcttcggagagttatagggcgaatgttttgtgtcagactgttgctgagtag

SEQ ID NO: 4641 - protein, 1313 aa, Venturia inaequalis
MFFGKLAGYPKLLVAGDASKIDIGTLVLGTICSIASGVPFPLIGILFGQLLDDFNAATCKTPDTTTGSGDQSDINGKILIIVYLAIAQFVLIYVHLSCWTLTGARLAQRLRERYLQNLLRQEPSFFDKLPPGEVASRLNGDIQAIRSGTSEKVGICISSLSFFVTAYVVAFIKDYRLAAMLVSLVPAYFLMSFVGSHYIEKYAGLMSDHAASAASIASEALSNIVVVQAFGANARLEKKFSESLEASKKQGLKKAPAVGIQSGFLYFISYSANGLAFWQGSKRIADAIQDSSQGATVGSTFTAATLLLSQVAPFLHLFTGAVASYEKLRGDIDRESLIDGTSLTGVRLPNVEAGFEFEDVSFTYPSRPEITVLDHFNLSIPANKHTAIVGLSGSGKSTIAGLATRFYDPTGGKILFGGHDLCHLNARDLRSFISLVQQEPSLLDRSLLENIAHGLISSSNPDHAHLKPIILGSQLADLAQDLREGEDLMLAAAKLGADVLEVVNLVQKAASLADADAFIVALQHGYGTTVGSSGRLISGGQKQRVALARALVKDPAVLILDEATASLDSRSEQRIQRAIANIASGRTVITIAHRLSTITTAENIVVMNKGVILEQGTHSELMARNGAYADLIGLQTLRSAGGKNASTLSIESAGKSDLASSTDLSIEGSSLSDETLHGNEKIEVSISHSPVAAPSEGEEPEPETPSKSLWTLIKGYAPATRPHLLIILVALLASSIVGGAFSAEAVIFGNTVGSLNPCKSVASILSRGSFFGLMFFVLALVEFFANLVSWTGFGWASEKIVYTVRVLSFRSLFEQDLHWHQSAGRTPAMLLSYITRDGDALAGLSGSIIGTLFSITINLIAAIILTHIIAWRIALVCLALVPLLLGAGLMELRALGKFEERHETAYSKYIDIGVEAVTSIKTIAALSLEEQTLQTYRRSLKGPRDETFKVTLQASLWQATTYFLGNLVNALAYWWGAKQILAGNYTQTQFLIVVFSLLVSALLWSQMFALAPELSNARAAMARLLGLIELGSSKMQGHVHPPSLSDSSTESGLEAPSEKLPTNNSASSIQLNNVHFSYPARPDIKVLNGLSMDLRPGKFHAIVGPSGAGKSTIISLIERLYTPQSGTILIDGLNITTSRSVTFRDSIALVPQESVLFEGTISFNISLGARPTHAVTQHEIEEACKLANIHDTIAALPNGYDTLCGPNGNQFSGGQRQRLAIAGALVRKPQVLILDESTSALDAESERLLQEGLDKAARGVTVVAIAHRLHTIRRADVIFLIEGGVCVGRGSHEELFVSSESYRANVLCQTVAE

SEQ ID NO: 4642 - DNA, 2127 bp, Streptomyces lavendulae
  CDS (1)..(2127): transl_table=11
atgctggtcactcagacccccggtggggtgatgatgaagggcggcgatgattcggagccctccaagatcaggccgggaacatcgcggcgggtactcgcctttgtcaggccccatcggaaaatcgcgatcgccctcattttcgtgaccctcgtcgattccctcgtcatcgtcacgactcccctcctgctcaaggagatcgtcgacagcgggatcatgaaggacgacgcccggctcgtcgtcgtcctggcactgctcgtcgccgcgctcgccctcgccggctccgtcacccagctcgcgcagagcgccctgtccggccgtatcggccagggagtcagctacgacctgcgggtccaggcgttccgccatgtgcagcgcatgccactcgcgttcttcacccgcacccagaccggcgccctctccagccggctcagcaccgacgtggtcatggcccagcaggccctcaccaccctgctgctgtcggcgaccggcgccgtcaccgtcgtactggtcctcgccgagatgttctatctctcctggctcgtcagcctcatcgcgctcgtgctgctgccgctgttcttctttccctggctctacatcggccgccgactccaggcgcattccaggaagcagatggaactgcacgccaacctgagcggaacgattcacgagcgcttcaatgtgcaaggcgccatgctggccaagctgttcggccgtccggccgaggaactggccgactaccaaggcgaagcggagcgcgtacgagaggtcggcgtacgcctcaccatcttcagccgcctcgccttcatcctcatggccctgctcaccgcgctcaccaccgccctggtgtacggcgtcggcggcggactggtactcgacggcgtcatcggactgggcaccctggtggccctggccaccctgctgggccggctgttcggccccatcacccagctctccagcatgcaggccaacgcactgacggtgctgatcagtttcgaccggatcttcgaactgctcgacatcaaaccgctcatcgaggaacgcccggacgccgtcgctctccccgcacccagcagcgcctcggcccccgagatccgcttcgaccaggtgtccttcgcctacccccgccccgaggaggtctcactggcctccctggaaacccactcggccgccggtgaccagcgcagcaagcccgtgccggaggtcctgcacggactggacttcagcgtcgcccccggcacgctcaccgcgctcgtcggcccctccggcgccggcaagaccaccatcacccacctggtgtcccggctgtacgacgtgacctcgggagccgttcgcatcgacggcaaggacgtacgcgacctcaccttcgactccctgcgcgccactgtcggagtcgtcgcccaggacgcgtacctcttccacgacaccatccgggcgaacctcgcctacgcccgccccgaggccaccgaggaggagctgatcgaggcctgcgagcaggcacgcatcctggacctgatccgctccctgcccgacggactcgacacggtcgtcggcgaccgcggcttccggctcttcggcggcgagaagcagcgactggccgtcgcccggctcctgttgaaggcaccggcgatcgtcgttctcgacgaggccaccgcccacctggactccgagtcggaggccgcagtccaacgcgccctcaagacggccctgagcaaccgcacctcgttggtgatcgctcaccggctctccaccgtccgcgaggccgaccagatcctcgtgatcgacgacggccgagtccgcgagaagggcacccacgacgaactcatcgccgccggcggtctctacacccacctccacaacacccagttcagcaagtccgagacgctgcccccgccccgcagcaacggccaccgcgagcaggccgcgccccagggcccgacgggcccgaggatccggacacgcggcggtgccatgggcggcggaatgggtcccggcggcggcttgggaggtggcatgcccggcggcgggatgcccggaggcggcatgggtggtggcggaatgggcggccctggcatgggtggcggccccggtacgcggggcccacgggtacggggcgacggctccccctga

SEQ ID NO: 4643 - protein, 708 aa, Streptomyces lavendulae
MLVTQTPGGVMMKGGDDSEPSKIRPGTSRRVLAFVRPHRKIAIALIFVTLVDSLVIVTTPLLLKEIVDSGIMKDDARLVVVLALLVAALALAGSVTQLAQSALSGRIGQGVSYDLRVQAFRHVQRMPLAFFTRTQTGALSSRLSTDVVMAQQALTTLLLSATGAVTVVLVLAEMFYLSWLVSLIALVLLPLFFFPWLYIGRRLQAHSRKQMELHANLSGTIHERFNVQGAMLAKLFGRPAEELADYQGEAERVREVGVRLTIFSRLAFILMALLTALTTALVYGVGGGLVLDGVIGLGTLVALATLLGRLFGPITQLSSMQANALTVLISFDRIFELLDIKPLIEERPDAVALPAPSSASAPEIRFDQVSFAYPRPEEVSLASLETHSAAGDQRSKPVPEVLHGLDFSVAPGTLTALVGPSGAGKTTITHLVSRLYDVTSGAVRIDGKDVRDLTFDSLRATVGVVAQDAYLFHDTIRANLAYARPEATEEELIEACEQARILDLIRSLPDGLDTVVGDRGFRLFGGEKQRLAVARLLLKAPAIVVLDEATAHLDSESEAAVQRALKTALSNRTSLVIAHRLSTVREADQILVIDDGRVREKGTHDELIAAGGLYTHLHNTQFSKSETLPPPRSNGHREQAAPQGPTGPRIRTRGGAMGGGMGPGGGLGGGMPGGGMPGGGMGGGGMGGPGMGGGPGTRGPRVRGDGSP

SEQ ID NO: 4644 - DNA, 1881 bp, Streptomyces natalensis
  CDS (1)..(1881): transl_table=11
atggtctcgacggacagctctagccacgagtggcgcggcccggcccgccgcacgctggaactgctgcgcccgcaccgtgccccggtgaccgtggcggtcgccctcggcatcggcggcgtcgtcctcaacgcgtcgggtccgatgctcctcggcagggccacggacctcatcttcgacggcatccggcacacccacggatccagaggcatcgacttcgacgcgatcgcccgtgtgctgctgacggcgctcgcgctcttcgccgccgcctccctcctcaccctcctccaggggcggctggtcacggccgtcgtccagcgtgtggtcttcgcactgcgccgttccgtggaggccaagctcgcccgcctgccgctgcggtacttcgaccgccacccggcgggggaggtgctcagccgggtgaccaatgacgtcgacaacctccagcagaccctccagcagaccctcagccagctgatcacggcggcgttctccgtgctgaccatggtggtgctgatgttcgccctctcgccgccgctggccctgatcatgctggcctgcgtaccggtgtcggccgtgatcgcggcccggatcagccggcgcgcacagccgcggttcacccagcagtggtccgcgaccggagcgctcagcgcccatgtcgaggaggtctacaccggacatgcgctggtcaagggcttcgggcggcgcgagcaggccgagcgggtcttcgacgagcacaacgacgccctgtaccgcgccggtgcgagggcccagtgcgtctccggcgccatcgaaccgtcgatgatgttcgtctccaacctcggctatgtcgtcgtggcggtcgtcggcgcgctgcgcgtggtctccggggccctgaccatcggcgacgtccaggcgttcatcctctactcccggcagttcagtcagccgatcgtcgaggtcgccggcatcgccgcccgcctccagtccgccctcgcctccgcgaagcgggtccacgacctcctggacgccgacgaacaaggccccgaccccgagcggcccgcacgcctcccacaggcccgtggacacgtccggttcgacaaggtcggtttccgctactcccccgacctccccctcatcgaggacctctgcctcaccgtcgaacccggacagaccgtggcggtcgtcggtccgaccggcgcgggcaagaccacgctgggcaacctcctcatgcggttctacgaaaccgacgcggggcgcatcctcctggacggcaccgacatcaccaccctgacccgcgaggacctgcgctcccatatcggcctggtgctccaggacgcctggctgttctccggcaccatcgccgagaacatcgcctacgggcgccccgacgcgacgcgcgaggagatcgtggccgccgcccgcgccacctgcgccgaccgcttcatccgcaccctgccggacggctacgacaccgtcctggacgaggagtcggccaacgtcagcgcgggcgagaagcagctcatcaccattgcccgggccttcctggcccggccctcgatcctgctcctggacgaggcgaccagctccgtcgacacccgcacggaagtcctcatccaacgcgcgatgcactcgctgcgcgcgggccgcaccagcttcgtcatagcccaccggctgtccaccatccgcgatgcggacctcatcctcgtcatggaagacggccgcatcgtcgagcgcggcacccacgaccagctcctggccgccgagggggcctacgcccggctgcatgcgaccgcggggcccgatgcgacggcggggcccgatgcgacggcggggcccgatgcgacggcggggcccgatgcgacggcggcgccgcgtacctctggcatttcccccagtctttcctga

SEQ ID NO: 4645 - protein, 626 aa, Streptomyces natalensis
MVSTDSSSHEWRGPARRTLELLRPHRAPVTVAVALGIGGVVLNASGPMLLGRATDLIFDGIRHTHGSRGIDFDAIARVLLTALALFAAASLLTLLQGRLVTAVVQRVVFALRRSVEAKLARLPLRYFDRHPAGEVLSRVTNDVDNLQQTLQQTLSQLITAAFSVLTMVVLMFALSPPLALIMLACVPVSAVIAARISRRAQPRFTQQWSATGALSAHVEEVYTGHALVKGFGRREQAERVFDEHNDALYRAGARAQCVSGAIEPSMMFVSNLGYVVVAVVGALRVVSGALTIGDVQAFILYSRQFSQPIVEVAGIAARLQSALASAKRVHDLLDADEQGPDPERPARLPQARGHVRFDKVGFRYSPDLPLIEDLCLTVEPGQTVAVVGPTGAGKTTLGNLLMRFYETDAGRILLDGTDITTLTREDLRSHIGLVLQDAWLFSGTIAENIAYGRPDATREEIVAAARATCADRFIRTLPDGYDTVLDEESANVSAGEKQLITIARAFLARPSILLLDEATSSVDTRTEVLIQRAMHSLRAGRTSFVIAHRLSTIRDADLILVMEDGRIVERGTHDQLLAAEGAYARLHATAGPDATAGPDATAGPDATAGPDATAAPRTSGISPSLS

SEQ ID NO: 4646 - DNA, 3996 bp, Trichophyton rubrum
  CDS (1)..(3996)
atggttgaagtgagcgagaaaccgaatacccaggatgacggcgtcagcaagcaggaaaatcgaaacccggcttcgtcgtcttcttcaacttccgataaggaaaaggttgctaagaagggaaactcggatgccacaaagagctcgaccccagaggatctagatgctcaacttgcccacctgccggagcatgagcgagagatactcaagcagcaattgttcatcccagatgccaaggctacatacggcacattatttcgatatgcaaccaggaatgatatgatattcctcgccatcgtttctttagcttctattgcagccggtgctgccctaccactatttacagtcctcttcggttccctcgcaggtacatttcgagatattgctctccatagaatcacctatgatgagttcaatagtatattaacgagaaattccctctacttcgtctatcttggaatcgcccaatttattctcctctatgtatccactgtgggtttcatctacgtcggtgagcacatcacccagaagatacgtgcgaaatatctccatgccattctacgccagaacatcggtttcttcgataaacttggggctggagaagttaccactcgcatcaccgcagacacgaatctcatccaagatggaatatcagaaaaggtcggcttgactctaactgccctatcgaccttcttcagcgcctttattatcggatacgtcagatactggaagcttgcactgatctgcagctcgaccattgttgcgatgattctagttatgggtggtatatctaggttcgtggtcaagtctgggaggatgacgttggtaagctatggtgaaggaggcactgttgcagaagaagtcatcagctctatcagaaatgccactgcctttggaacccaagagaaactcgcaaggcagtacgaagtgcatttaaaggaagcgagaaaatggggtcgcaggcttcaaatgatgttgggcatcatgtttggctccatgatggctatcatgtactcaaactacggtctcggattttggatgggatcacgtttccttgtcgggggtgaaacagacctgtctgccatcgtcaacatcctccttgcgattgttatcggatcctttagcattggaaacgttgctcctaatacccaggcttttgcatctgctatttctgccggtgctaagatctttagcaccatcgaccgtgtttccgcaattgacccaggttctgatgagggagataccatcgaaaacgtggagggaaccatcgaattccgtggtattaagcatatctacccatcccgtcctgaagttgttgtcatggaagatatcaaccttgttgttcccaagggcaaaaccactgctcttgttggcccctcaggttccggaaagagtaccgttgttgggttgttggagcgattctataacccagtttctggttccgttcttctggatggccgtgatatcaagaccctcaacctccgatggctccgtcaacaaatttcccttgtcagccaagagcctacgttgttcggaaccactatttttgaaaacatccgattagggttgattgggtccccaatggaaaatgaatccgaggagcaaatcaaggaacggatcgtcagtgcggccaaggaggccaatgctcatgacttcattatggggctgccggatgggtatgcaacggacgtcggtcagcgtggcttccttttatccggtggccagaagcagcgtattgctattgcccgtgccattgtaagcgaccctaagatattattgcttgatgaagccacgtctgctctcgataccaagtctgagggtgtagtacaagccgctcttgatgctgcctcccgaggaagaaccactattgtcatcgcccaccgtttatccaccattaaatctgccgataatattgttgtgattgtcggtggtcgcatcgctgaacaaggtactcatgatgagctcgttgataagaaaggcacataccttcagctcgttgaggctcaaaagatcaatgaggagcgcggtgaagagtctgaggatgaggctgtgctcgaaaaggagaaggaaatctcgcgccagatttctgttcctgcaaagagtgtcaactctggaaaataccctgacgaagatgttgaagccaatcttggacgaattgataccaagaagtccctttcgagcgttatattgtcccaaaaacgtagccaagagaaagaaaccgaatactcgcttggcactttgatacgattcatcgctggattcaacaagcccgagagattgataatgctctgtggattcttctttgccgttctttctggtgctggccagcccgttcaatccgtcttctttgccaagggtatcacaacactttcgctcccgccatcattgtacggtaaactgcgcgaagatgccaatttctggtcccttatgtttttaatgttgggtcttgtccaactggttacccaatccgcgcaaggtgttatctttgctatatgttctgagagtttgatttaccgagcacgcagcaagtccttccgtgcaatgcttcgacaagatattgccttcttcgacctccctgagaacagcactggtgcattaacgtcattcctctcaactgaaaccaagcatctttctggcgtgagtggtgccactctcggaacaatcctgatggttagcaccactcttatcgtggctctgacggttgctctcgcttttggatggaaacttgcccttgtctgcatttctactgtccctgtccttcttctctgcgggttttatcgattctggattctcgcacaattccagacaagagcaaagaaggcatacgagtcttctgcaagctacgcttgtgaagccacttcttctatccgcactgtcgcttctctcactagagaacaaggtgtcatggaaatttacgaaggtcaacttaatgatcaggcaaagaagagtttgagatctgttgcgaaatcctcacttctatatgctgcttcgcaatctttctcattcttctgtcttgctcttggcttctggtatggtggcggccttcttggaaagggagaatataacgcattccaatttttcttgtgtatctcctgcgtcatcttcggctctcagtcagctggaattgtcttttcattctcgcctgatatgggcaaggcaaagagtgcagccgctgatttcaagaggttgtttgaccgcgtgccaacgattgacattgagtcgacagatggcgaaaagcttgaaaccgttgaaggtactattgagttccgcgatgtgcatttcagataccccacacgtccagaacagcctgtcctccgtggcctcaatctcactgtcaagcctggccagtatatcgcactggttgggcctagtggatgtggcaagagtactaccattgctcttgtagaaaggttctacgacacattatctggcggtgtatatatcgatggaaaggacatttcaaggcttaatgttaactcttaccgaagccacctagcactcgttagccaggagccaactctctatcaaggaacaattcgggacaacgttctcctcggagtcgacagggatgatgtccctgatgagcaagtctttgctgcatgcaaggctgcaaacatatatgacttcatcatgtcgctgcccgatggctttggtactgttgttggaagcaagggaagcatgctgtcaggtggacaaaagcaacgtattgcgatcgcccgtgctttaatacgagatccaaaggttctcctcctggacgaggctacatccgcactcgactctgaatccgaaaaggttgttcaagctgcccttgatgcagctgcgaagggtcgaacgactattgctgttgctcaccgactcagcactattcaaaaggcagacattatctatgtcttcgatcagggccgcatcgtcgaaagtggcactcatcacgaactccttcaaaataagggccgatactacgagttggttcatatgcagagcctcgagaaaactcaataa

SEQ ID NO: 4647 - protein, 1331 aa, Trichophyton rubrum
MVEVSEKPNTQDDGVSKQENRNPASSSSSTSDKEKVAKKGNSDATKSSTPEDLDAQLAHLPEHEREILKQQLFIPDAKATYGTLFRYATRNDMIFLAIVSLASIAAGAALPLFTVLFGSLAGTFRDIALHRITYDEFNSILTRNSLYFVYLGIAQFILLYVSTVGFIYVGEHITQKIRAKYLHAILRQNIGFFDKLGAGEVTTRITADTNLIQDGISEKVGLTLTALSTFFSAFIIGYVRYWKLALICSSTIVAMILVMGGISRFVVKSGRMTLVSYGEGGTVAEEVISSIRNATAFGTQEKLARQYEVHLKEARKWGRRLQMMLGIMFGSMMAIMYSNYGLGFWMGSRFLVGGETDLSAIVNILLAIVIGSFSIGNVAPNTQAFASAISAGAKIFSTIDRVSAIDPGSDEGDTIENVEGTIEFRGIKHIYPSRPEVVVMEDINLVVPKGKTTALVGPSGSGKSTVVGLLERFYNPVSGSVLLDGRDIKTLNLRWLRQQISLVSQEPTLFGTTIFENIRLGLIGSPMENESEEQIKERIVSAAKEANAHDFIMGLPDGYATDVGQRGFLLSGGQKQRIAIARAIVSDPKILLLDEATSALDTKSEGVVQAALDAASRGRTTIVIAHRLSTIKSADNIVVIVGGRIAEQGTHDELVDKKGTYLQLVEAQKINEERGEESEDEAVLEKEKEISRQISVPAKSVNSGKYPDEDVEANLGRIDTKKSLSSVILSQKRSQEKETEYSLGTLIRFIAGFNKPERLIMLCGFFFAVLSGAGQPVQSVFFAKGITTLSLPPSLYGKLREDANFWSLMFLMLGLVQLVTQSAQGVIFAICSESLIYRARSKSFRAMLRQDIAFFDLPENSTGALTSFLSTETKHLSGVSGATLGTILMVSTTLIVALTVALAFGWKLALVCISTVPVLLLCGFYRFWILAQFQTRAKKAYESSASYACEATSSIRTVASLTREQGVMEIYEGQLNDQAKKSLRSVAKSSLLYAASQSFSFFCLALGFWYGGGLLGKGEYNAFQFFLCISCVIFGSQSAGIVFSFSPDMGKAKSAAADFKRLFDRVPTIDIESTDGEKLETVEGTIEFRDVHFRYPTRPEQPVLRGLNLTVKPGQYIALVGPSGCGKSTTIALVERFYDTLSGGVYIDGKDISRLNVNSYRSHLALVSQEPTLYQGTIRDNVLLGVDRDDVPDEQVFAACKAANIYDFIMSLPDGFGTVVGSKGSMLSGGQKQRIAIARALIRDPKVLLLDEATSALDSESEKVVQAALDAAAKGRTTIAVAHRLSTIQKADIIYVFDQGRIVESGTHHELLQNKGRYYELVHMQSLEKTQ

SEQ ID NO: 4648 - DNA, 1818 bp, Streptomyces noursei
  CDS (1)..(1818): transl_table=11
atggcctcgccggacgaccttgaggaggagcggaccgcgccccggccggcacgtcggctcgtcggcctgctgcgtccgcaccgccgctccgtggcactcgccgtgtcgatgggcgtcggcgggatcgtgctcaacgcgttcggcccgctgctgctcggccgggtcaccgatctgatcgccgacggcgtgctcggcggcgtcccgggcccggcgcccgggatcgacttcgccgcgatcggccggctgctgctggtcctgctggcgctctacgtcgtggcgtcgctgttcatgctggcgcagggccggctggtggcgtccgcggtgtggcgcaccatccacgaactgcgccgcgacgcccgggagaagctgacccggctgccgctgcgccacttcgaccggcagccggccggtgagctgctcagccgcaccaccaacgacatcgacaacctccaacagaccctccagcagaccctcgccgagctgatcacctcgatcttctcgctgttgacgatgctggtgctgatgctggtgatctcgccgtcgctggccgtggtgatgctgctcagcgtgccggtctcggcgttgatcgcggcccggatcagcaagcgcgcgcagccccactacgccgcgcagtggtccgcgaacggcaccctcaacgcccatgtggaggaggtgtgcaccggtcatgcgctgatcaagggcttcgaccggcgcgcggcggccgaggagcgcttcgacgcctgcaacgacgcggtctaccgggctgcggccaaggcgcagttcgcctccggtgccatggaaccggtcatgatgttcgtcgccaacctcggctatgtgctggtggccgtcatcggcgcctggaaggtcataaacggcaccctgaccctcggtgacgtgcaggcgttcatcctctacgcccgccagttcagccagccgatcgtggagatcgcctcggtggcgggccggctccagtccggcatcgcctccgcccagcgcgtcttcaccctgctcgacgcccccgagcaggccccggacccgctccggcccggcacgcccgcccgcgccgagggccgcgtcgagttcaccgacgtgtccttccgctactcccccgacacgcccctcatcgagaacctctcgctgaccgtggaaccgggcagcaccgtggcgatcgtcggccccaccggcgccggcaaaaccaccctcggcaacctcctgatgcgcttctacgaaccggactccggccgcatcctcctggacggcaccgacaccgcgacgatgacccgcgacgacctgcggtcccgcttcgggctggtgctccaggacacctggctgttcggcggcaccatcgcggagaacatcgcgtacggcgcacccggtgcctgccgtgcggacatcgaggaggcggcccgcgcgacctgtgccgaccgcttcatccgcaccctgccgcagggctacgacaccgtgctggacgacgagtcgggcaccgtcagcgccggcgagaagcagctgctgaccgtggcccgggccttcctcgccagaccggccgtcctcgtgctggacgaggccaccagctccgtggacacccggaccgaggtcctgatccaacgcgccatgaactccctgcgggcgggccggaccagcttcgtgatcgcgcaccgcctgtccacgatccgcgacgcggacctgatcgtcgtgatggacgccggccgcatcgtcgagcagggcacccacgatcaactcctgtgcgcgcagggcctgtacgcccggctgcacgcagcccgcacccacactcccaccgcgggcgccgcggccggctga

SEQ ID NO: 4649 - protein, 605 aa, Streptomyces noursei
MASPDDLEEERTAPRPARRLVGLLRPHRRSVALAVSMGVGGIVLNAFGPLLLGRVTDLIADGVLGGVPGPAPGIDFAAIGRLLLVLLALYVVASLFMLAQGRLVASAVWRTIHELRRDAREKLTRLPLRHFDRQPAGELLSRTTNDIDNLQQTLQQTLAELITSIFSLLTMLVLMLVISPSLAVVMLLSVPVSALIAARISKRAQPHYAAQWSANGTLNAHVEEVCTGHALIKGFDRRAAAEERFDACNDAVYRAAAKAQFASGAMEPVMMFVANLGYVLVAVIGAWKVINGTLTLGDVQAFILYARQFSQPIVEIASVAGRLQSGIASAQRVFTLLDAPEQAPDPLRPGTPARAEGRVEFTDVSFRYSPDTPLIENLSLTVEPGSTVAIVGPTGAGKTTLGNLLMRFYEPDSGRILLDGTDTATMTRDDLRSRFGLVLQDTWLFGGTIAENIAYGAPGACRADIEEAARATCADRFIRTLPQGYDTVLDDESGTVSAGEKQLLTVARAFLARPAVLVLDEATSSVDTRTEVLIQRAMNSLRAGRTSFVIAHRLSTIRDADLIVVMDAGRIVEQGTHDQLLCAQGLYARLHAARTHTPTAGAAAG

SEQ ID NO: 4650 - DNA, 1830 bp, Drosophila melanogaster
  CDS (1)..(1830)
atgggcagatcccagtacggccgcctgctcagcctgactaaatcggagaaatgggtgctgacagcgggcattggctgtctggtagtttcttcagctatcaccatgtcggttcctctgttcctgggcaaggtcattgatgtagtctttaataaatcgggcatggatagcgcagccatggccaaattgggcgagtactcggtgctgctcttcgggatcttcgtgctgggcggattcgccaactttgcccgcgtccatctgtttgggaatgcggctctccgaatagtgcgcagtctaagatcccggctatacagatctatgcttatgcaggaggtgggttggttcgataccaagggcactggagaactaataaatcggctgagcaacgataccttaatggtgggcacctcgttgagccagaacgtatcggatggtctgcgatctgtagccatgatcggcgtcggcacaggcatgatgatctacacctccccccagttggctgccgtgagtgccttggtggttcccgcgatggcgggcatggccatcgtgtacggacgctacgtaaggcggatcaccaaagtagaactagacaagtacgccgagattatgaagtttgcggaggagcgatttggtaatgttaaaacggttaagaccttctgccgagaacaacaggaagtagctgccttcgatggcaaactggatgaagctctccagattggctacaaagagacacgtgccagagctattttctttggattggtaagacctaaaggaaaggtacttaggaaaatcatcaaaatctgttatcccttatttcagactggcttctgtggcaacttcatcattatttcagtgctgtattatggaggaaccttggtattacaagactcgctgacgattggagccctcacagccttcatgctgtacgccggttatgtggccatctcaatgaatgggttgtccaacttctatagccaactgaacaaaggcattggagcctcggagcgtatttgggagatcctggacagggagtgttctatacccattgacaaaggtgtcgtgccgttggagaagccggtgggcgaagttggattccagaatgtattctttacgtttccaactagacctgaatcggccgtcctcaccgacttttcgctaaatttgatgccgggaacaaccacagcggtagtgggtcgttcaggatctggaaagacgacgatagctctgctaatgctccgactatatgacccccaagggggaacagtgcatttggatggcatagatttgcgaacagtgaatccacagtggttgcgaaataacattggtgccgtcagtcaggagccggtgctcttctcgtgctccattcgagagaatattctttatggcgctaatcctggcgaaacaccgagcccggagcgactgcagcaggttattgaagatgcaaatgtcagccagttcaccgaccaactgccggatggactagacacgctcgtcggccaacggggaatgatgctcagtggcggacaaaagcaaagagtagccattgccagggctctaattaagaaccccgctatcctgattttggatgaagctaccagtgcgttggacgccgtttcggaaaatctggtgcagaatgccttagacaatcttatccagggacgcaccgtactgacaattgcccatcgactcagtacaattcgaaatgcggatcaaatcgccgtcttaagcgacggaaaaattgtagagcagggcagctacaacgagcttatgggcatccaggagggcgtcttccgggaactggtggccagccaagcgttcggcagccgaaactaa

SEQ ID NO: 4651 - protein, 609 aa, Drosophila melanogaster
MGRSQYGRLLSLTKSEKWVLTAGIGCLVVSSAITMSVPLFLGKVIDVVFNKSGMDSAAMAKLGEYSVLLFGIFVLGGFANFARVHLFGNAALRIVRSLRSRLYRSMLMQEVGWFDTKGTGELINRLSNDTLMVGTSLSQNVSDGLRSVAMIGVGTGMMIYTSPQLAAVSALVVPAMAGMAIVYGRYVRRITKVELDKYAEIMKFAEERFGNVKTVKTFCREQQEVAAFDGKLDEALQIGYKETRARAIFFGLVRPKGKVLRKIIKICYPLFQTGFCGNFIIISVLYYGGTLVLQDSLTIGALTAFMLYAGYVAISMNGLSNFYSQLNKGIGASERIWEILDRECSIPIDKGVVPLEKPVGEVGFQNVFFTFPTRPESAVLTDFSLNLMPGTTTAVVGRSGSGKTTIALLMLRLYDPQGGTVHLDGIDLRTVNPQWLRNNIGAVSQEPVLFSCSIRENILYGANPGETPSPERLQQVIEDANVSQFTDQLPDGLDTLVGQRGMMLSGGQKQRVAIARALIKNPAILILDEATSALDAVSENLVQNALDNLIQGRTVLTIAHRLSTIRNADQIAVLSDGKIVEQGSYNELMGIQEGVFRELVASQAFGSRN

SEQ ID NO: 4652 - DNA, 1752 bp, Streptococcus pneumoniae
  CDS (1)..(1752): transl_table=11
atgcagaataaacaagaacaatggactgtattgaagcgcttgatgtcttatctcaagccttatggactcctgacctttttggcactcagttttctcctagcgacgacggtcattaaaagtgtcatacccctcgtggcttcccactttatcgaccagtatctcagcaatcttaaccaactagccgttaccgttttgctggtctactatggtctctacatcctacaaactgtagttcagtatgtcggcaatcttctctttgcgcgcgtgtcttacagtattgttagggatattcgtcgggatgcctttgccaatatggagaaactgggcatgtcttactttgacaagacgccagcaggttctatcgtttctcgtttgaccaacgataccgagacgattagtgatatgttttctgggattttatccagctttatctcagcagtttttatctttctgacaaccctttataccatgttggtgctggattttcgtttgacggctttagtcttgctctttcttcctttgattttccttttggtcaatctctatcgaaaaaagtcagtgaaaatcatcgagaaaaccagaagtctcttgtcagatatcaatagtaagctggcagagaatatcgagggaatcaggattattcaggcctttaatcaagagaagcgcctgcaggcagaatttgatgaaatcaaccaagaacacttggtctacgccaaccgttctgtagccttggatgccctctttttgagacctgccatgagtttgctgaaacttctaggctatgcagtcttgatggcctactttggctaccgtggtttttctatcgggataacggtcgggaccatgtatgcctttatccagtacatcaaccgcctttttgaccccttgattgaggtgacgcaaaacttttcaactctgcaaacggctatggtttctgcaggtcgtgtctttgccctgatagacgagaggacctatgaacctcttcaagaaaatgggcaagccaaagtccaagaaggcaatatccgttttgaacatgtgtgtttctcatatgacggtaaacatccgattctggatgacatttctttctctgttaataagggtgaaaccattgcctttgtaggtcatacaggttcagggaaatcgtctattatcaatgtcctcatgcgcttttatgaattccagtcagggagagttctcttggatgatgtggatatcagggatttcagtcaagaagagctgagaaaaaacatcggtttggtcttgcaggaacccttcctctatcatggaactattaagtccaatatcgccatgtaccaagaaaccagtgatgagcaggttcaggctgcggcagcctttgtggatgcagattcctttattcaagaacttcctcaggggtacgactcccctgtttccgagcgtggttcgagcttctctactgggcaacgccagcttcttgcctttgctagaacagtcgccagccagcctaaaatcctgattttggatgaagcgacagccaatattgactctgaaacagaaagcttggttcaagcttctctggcgaagatgagacagggccgaacaactattgctatcgctcaccgcctttctactattcaagatgccaactgcatctatgtcttggataagggacgcattatcgagagtggaacccatgaggaactcttggctctgggaggaacctatcacaagatgtatagtttgcaggcaggggccatggccgatactctttga

SEQ ID NO: 4653 - protein, 583 aa, Streptococcus pneumoniae
MQNKQEQWTVLKRLMSYLKPYGLLTFLALSFLLATTVIKSVIPLVASHFIDQYLSNLNQLAVTVLLVYYGLYILQTVVQYVGNLLFARVSYSIVRDIRRDAFANMEKLGMSYFDKTPAGSIVSRLTNDTETISDMFSGILSSFISAVFIFLTTLYTMLVLDFRLTALVLLFLPLIFLLVNLYRKKSVKIIEKTRSLLSDINSKLAENIEGIRIIQAFNQEKRLQAEFDEINQEHLVYANRSVALDALFLRPAMSLLKLLGYAVLMAYFGYRGFSIGITVGTMYAFIQYINRLFDPLIEVTQNFSTLQTAMVSAGRVFALIDERTYEPLQENGQAKVQEGNIRFEHVCFSYDGKHPILDDISFSVNKGETIAFVGHTGSGKSSIINVLMRFYEFQSGRVLLDDVDIRDFSQEELRKNIGLVLQEPFLYHGTIKSNIAMYQETSDEQVQAAAAFVDADSFIQELPQGYDSPVSERGSSFSTGQRQLLAFARTVASQPKILILDEATANIDSETESLVQASLAKMRQGRTTIAIAHRLSTIQDANCIYVLDKGRIIESGTHEELLALGGTYHKMYSLQAGAMADTL

SEQ ID NO: 4654 - DNA, 1743 bp, Buchnera aphidicola subsp
  CDS (1)..(1743): transl_table=11
atggatcatttaatacaattttggcccattttaaaacgtttaataatttatgcaataccatggaaaaaaaaaataatattagcattttttttacttttaagtggagcaacttctgaagttttaggaccaattttaataagttattttattaataatattttgtctcaacatcaattaaattttcaattaatactaattattatagtgatattcataatgctgcaaatattagcagttttttttaattattttcaaagtattttatttaataaaatagctgtagggattgttaataaactccgaaacgacgtcatgaaagcagcactaaatcaacctatcagtgagtttgactcccaacctattggacaaatgatttcaaaagtaactaatgatactgaagttattaaagagctatatgatactgttggtcctactttctttcgaagtataactttgattataattatattatttgcaatgtttactctcgaatggcatatggcaataataactatttttattattcccttagtaattattgtaatgtcaatatatcaatattatagtactcctttgttaagaaatgtacggtattacgtagctaatattaataataaatttaatgaaactattaacggaatgaatgttattcaacaatttagacaacaaacaagatttgaaaacaatattaaagaaagtagtgaattacattatttagctagaatgaaaatattaaaattagatggttttttgttaagaccactattaagtttattatcagctttagtactttgcagttttatgttcttattcagttatttttctattggagtatacgaagtaggcgtattatatgcttttattacgtatcttggtcgtctcaacgaacctttaatttcaattactattcaacaatctatattacagcaagcaatagtagcaggagaaagaattttttctcttatagattcaccaaaacaaaaatatggaaacaatgaagaagaaataaaaagtggaaaaataaatattaaaaatctcagtttcaaatataaagaaagtggagaaaacatacttaataatattaatatatatattccgtctaaaagttttgttgcatttgtaggtcaaactggaagtgggaaaagtactttagctaacttattaatgggatattatcctataaaacatgggaaaatatacttagatgataaatctattaattgcatatctcatgatgttttacgaaaaaatatattaatggtgcaacaagatccaatagttctagcagataccttctcttctaatattacactgggaaaaaaaatatctgaggaaaagatatggaatgtattaaaaactgttcatctctcttcattagttcaatccatgccaaaagggatatactctattttaggagaagaaggaaataatttatctctcggccaaaaacaattattagctattgcaagaatactagtacgcaatcctaaaatacttatattagatgaagctactgctaacattgattcaggaactgaaaaattaattcaaacaactttgtcttctatacgcgcaaaaacaaccttagttgttatagctcatagattgtcgacagttattgaagcagatatgattgtagtattaaaaaaaggaaaaattgttgaattgggaacacataagcaattattagaaaaaaaaggtttttattggaaaatgtataattttcaactttttaattgctaa

SEQ ID NO: 4655 - protein, 580 aa, Buchnera aphidicola subsp
MDHLIQFWPILKRLIIYAIPWKKKIILAFFLLLSGATSEVLGPILISYFINNILSQHQLNFQLILIIIVIFIMLQILAVFFNYFQSILFNKIAVGIVNKLRNDVMKAALNQPISEFDSQPIGQMISKVTNDTEVIKELYDTVGPTFFRSITLIIIILFAMFTLEWHMAIITIFIIPLVIIVMSIYQYYSTPLLRNVRYYVANINNKFNETINGMNVIQQFRQQTRFENNIKESSELHYLARMKILKLDGFLLRPLLSLLSALVLCSFMFLFSYFSIGVYEVGVLYAFITYLGRLNEPLISITIQQSILQQAIVAGERIFSLIDSPKQKYGNNEEEIKSGKINIKNLSFKYKESGENILNNINIYIPSKSFVAFVGQTGSGKSTLANLLMGYYPIKHGKIYLDDKSINCISHDVLRKNILMVQQDPIVLADTFSSNITLGKKISEEKIWNVLKTVHLSSLVQSMPKGIYSILGEEGNNLSLGQKQLLAIARILVRNPKILILDEATANIDSGTEKLIQTTLSSIRAKTTLVVIAHRLSTVIEADMIVVLKKGKIVELGTHKQLLEKKGFYWKMYNFQLFNC

SEQ ID NO: 4656 - DNA, 1737 bp, Buchnera aphidicola subsp
  CDS (1)..(1737): transl_table=11
atgaataatgttatagatttttggcctacgttaaaacgtctattatattatggcacaaatgtcaaaaaatatctaatactcggatttactttgttgttattttcatctatttttgaagttttaaatccaatacttattagttgttttattaaacattacttcattaacaatacagttaattattcattaaaaattattacatattatttaattctacaaatattagcagctatattaaattatcatcaaaacataatctttaataagatatcccttactgtcattcaaaaattacgttatgatgtaatgtcttctacacttcaacttccaattaaaatgtttgatcaaagaccaataggtcaatttatctctcgaatcacaaacgatactgaaactattaaagaattatatgatactgtaataaaatcattattccaaaatattatattaatattaattaccttaataacgatgtttatactagaatggagaatggcatgcatagcttctattatttttccaatcgcgctaataataatgttattataccaatattttagtaaacctatactcagaaaaataaaagtttatattgctaatatttacaatatatttaacgaaataattaacggaatagatgttattcaacaatttcatcaagaacaaaaatttagaaaatccattaaaaaaattagtatatctcactattactttcgaatgaaaattttaaaattagacagttttttgctacgaccactattaaatttttgttctacactaatattatgtggactaatattaatttttggcatttatccaattggattttttgaaattggaacactatatgcattcattacatatttaaatagattaaatgaacccctaattactataacctcacaacaatctatttttcagcaagctattgtagccggggaaagaatatttgaaataatacatacgcccaaacaacaatatggagatgattcattacattttcgagaaggaaatataaaagtaaaaaatttatatttcagttataccaataataacgtttacgtattaaaaaatattaatatttttattccttctaaacaatttatagcttttgttggaagaactggaagtggaaaaagtacgctatcaaaattattaataggacattatcctgcaacacttggtaaaatttgtttagacgaaagaaacattcaaacatttactcataatgtccttaaaaaaaatatttctattgtgcaacaagatcctataatacttaatgatacaattttagaaaatattactcttggaagaaatatatcaacaaaaaaagttttaaaaattttaaaaacaataaaactaatacaatttgtaaattctttgccaaaaggactaaaaacattattaggcgaaaacggaaatattttatcaattggtcaaaaacaattattatctatcgctagaactttaatttcttgtcctaaaattttaatattagatgaagctacatcaaacgttgatttagatacggaaaacaatataaaaaaaatactatcttctgttaaacatctcacaacaatcatagccataacacatagattatctacaatcaaacacgcagataacattttcgtattcaataatggggaaattgtagaatcaggtactcattacaatttaataagaaaaaaaagctactataagaatatgtattattctcaagcaataaaaaattaa

SEQ ID NO: 4657 - protein, 578 aa, Buchnera aphidicola subsp
MNNVIDFWPTLKRLLYYGTNVKKYLILGFTLLLFSSIFEVLNPILISCFIKHYFINNTVNYSLKIITYYLILQILAAILNYHQNIIFNKISLTVIQKLRYDVMSSTLQLPIKMFDQRPIGQFISRITNDTETIKELYDTVIKSLFQNIILILITLITMFILEWRMACIASIIFPIALIIMLLYQYFSKPILRKIKVYIANIYNIFNEIINGIDVIQQFHQEQKFRKSIKKISISHYYFRMKILKLDSFLLRPLLNFCSTLILCGLILIFGIYPIGFFEIGTLYAFITYLNRLNEPLITITSQQSIFQQAIVAGERIFEIIHTPKQQYGDDSLHFREGNIKVKNLYFSYTNNNVYVLKNINIFIPSKQFIAFVGRTGSGKSTLSKLLIGHYPATLGKICLDERNIQTFTHNVLKKNISIVQQDPIILNDTILENITLGRNISTKKVLKILKTIKLIQFVNSLPKGLKTLLGENGNILSIGQKQLLSIARTLISCPKILILDEATSNVDLDTENNIKKILSSVKHLTTIIAITHRLSTIKHADNIFVFNNGEIVESGTHYNLIRKKSYYKNMYYSQAIKN

SEQ ID NO: 4658 - DNA, 3891 bp, Arabidopsis thaliana
  CDS (1)..(3723)
atgggtaaagaagaggagaaagagagtgggaggaacaagatgaattgttttggaagtgttagatcgatattcatgcacgcggacggtgtagattggttgttgatgggattagggttaatcggagccgtcggtgatggtttcacaactcctcttgttcttctcatcaccagcaagcttatgaacaacatcggtggttcctctttcaacactgataccttcatgcaaagcatctccaagaattctgtagctttgctttatgtggcttgtggatcttgggttgtttgtttccttgagggatattgttggacaagaacaggggagagacaaacagcaagaatgagagaaaagtacttaagggcagttttaagacaagatgtgggttactttgatcttcatgttacaagcacttctgatgttatcactagtgtttctagtgacagttttgtcatccaagacgtcctcagtgaaaaattaccgaattttttgatgagcgcatcaacgttcgttggaagctatatagtcggatttatcttgctatggagactcgccatagttggtttacctttcattgtccttctagtgatcccgggccttatgtatggacgagccctcataagcatttcgaggaagatacgtgaagagtacaatgaggctggtttcgtagctgagcaggcaatctcttcggtccgaaccgtctatgcgttctctggggagaggaagacaatatcaaagttctcaaccgcgcttcaagggtcggtgaagctaggtattaaacaagggcttgctaagggaatcactattggaagcaatggaatcacttttgccatgtgggggttcatgtcttggtatggaagccggatggtcatgtaccatggtgctcagggtggtactgtctttgcagttgctgctgctattgctatcggtggcgtatcacttggtggtggtttgtctaatctcaagtacttctttgaggcggcttcagttggggagcgaatcatggaagtgataaacagagttcccaagattgattcagacaatccagatggccacaagttggagaaaattagaggagaagtagagttcaagaacgtaaagtttgtgtatccatcaaggcttgaaacatcgatctttgatgacttttgtctgagagttccttccgggaaaactgtagctttggttggaggaagcgggtcaggaaaatcgactgttatatctcttttgcaaaggttttatgacccgcttgcaggagagattctcattgatggtgtatccattgataagttacaagtgaagtggttgagatcacaaatgggtctagttagccaagaacctgcccttttcgccacaacgataaaagaaaatatattgtttggtaaagaagatgcatccatggatgatgttgtggaagctgccaaagcctctaatgctcataatttcatttctcagttacctaatggctacgaaactcaggttggagagagaggagtgcaaatgtcaggaggacaaaagcaaaggattgcaatcgcgcgtgcaataatcaaatcaccaactattcttcttctagacgaggcaacaagcgcattggactcggagtcggaaagagtagtccaagaggccttagaaaatgcatcgattggtcgtacaactatccttatcgctcaccgtctctctaccattcgtaatgctgatgttatctccgtggttaagaacggtcacattgtggaaactggatcacacgatgagctaatggaaaacatagacggtcaatactctacacttgttcacttacaacagattgaaaaacaagacatcaacgttagtgtgaaaataggtccaatctcggatccgagcaaagatataagaaatagttctagagtgtcgactcttagccgttcaagctctgctaactcggttacaggtccaagcactataaagaatctttccgaagacaacaagccgcaattaccgtcgtttaagagactattggcaatgaatttaccggaatggaaacaagcattgtatggttgcataagcgcaactttatttggagccatacagccagcttacgcatattctttagggtcgatggtctcggtttattttctaacgagccacgacgagatcaaggagaaaacaaggatctatgcattatcttttgttggcctagccgttctttctttcttgatcaacatcagtcaacactacaattttgcatacatgggtgagtatttgactaaacgtatccgagaacggatgctttctaaggtgttaacgtttgaggtcggttggttcgatagagatgagaactcaagcggcgccatttgctctagactcgcaaaagatgctaatgtggtgagatcgttagtgggtgatcgaatggcattagtggtgcaaaccgtatcggctgttaccatagctttcacgatgggcttggtcatcgcttggaggttagcacttgtgatgattgcggtgcaaccggtgattattgtttgcttctacactcgtcgggttctactcaagagcatgtcgaaaaaagcaatcaaggctcaagatgaaagtagcaaactagcggcagaggcagtttccaacgtccgaaccatcactgcattttcatcacaagaacgtatcatgaaaatgctcgaaaaggcccaagaaagtccgcggagagaaagcattcgccagtcgtggtttgcaggctttgggcttgctatgtcgcagagcctcacgtcgtgtacgtgggctttagatttctggtacggtggtagactgatacaagatgggtacatcacggctaaagctttgttcgagacgtttatgatcttagttagtactggtcgagtcattgccgatgctggaagcatgaccacggatctagctaaaggttcggatgcggtagggtcagttttcgctgtgttggatcggtacacgtcgattgatccggaggatccagatggatatgaaacagaaagaataacgggtcaggttgaatttcttgacgtagatttctcgtacccgactagaccggatgtgattatattcaagaacttctccatcaagatcgaagaggggaagtccacagccattgttggtccaagcgggtcaggtaaatccactataattggcttgatagagcggttctacgacccgttaaagggtatagtgaaaatcgatggtcgcgatataaggtcgtatcatctgagatcacttcgtcgacacatagctttggttagccaagagccaacattgtttgctgggacaatccgagagaacatcatatatggaggagtgtcagataaaatagacgaagcagagatcatcgaggcggcgaaagcagcgaatgctcatgatttcatcacgtcattaacggaagggtatgacacatactgtggagacagaggagtacagttgtctggtggtcaaaaacagaggatcgcgatagctagagcggttttgaaaaacccgtcagtgttgcttctagacgaagcgacaagcgctttggacagccagtcggaacgtgtggtgcaagatgctctcgagcgtgttatggtagggaggacgagtgtggtgatcgcacataggctgagcacaattcagaattgtgatgcaattgctgttttagacaaaggcaaactcgtggaacgtgggactcactcttcattgttgtcaaaaggtcctacaggtatttatttctcattggtgagtcttcagacaacttctggttaacttaaaccatgtcgtttcatcgctaatgaaattatttgtaatcaaataaatgtcaagaagtttaatttttaaagcgggctacgatttaaacactatatatataacaatggaatgtaaaaaagaaaacaaagcttgttaattgaatagaaataaaataaacgttttccc

SEQ ID NO: 4659 - protein, 1240 aa, Arabidopsis thaliana
MGKEEEKESGRNKMNCFGSVRSIFMHADGVDWLLMGLGLIGAVGDGFTTPLVLLITSKLMNNIGGSSFNTDTFMQSISKNSVALLYVACGSWVVCFLEGYCWTRTGERQTARMREKYLRAVLRQDVGYFDLHVTSTSDVITSVSSDSFVIQDVLSEKLPNFLMSASTFVGSYIVGFILLWRLAIVGLPFIVLLVIPGLMYGRALISISRKIREEYNEAGFVAEQAISSVRTVYAFSGERKTISKFSTALQGSVKLGIKQGLAKGITIGSNGITFAMWGFMSWYGSRMVMYHGAQGGTVFAVAAAIAIGGVSLGGGLSNLKYFFEAASVGERIMEVINRVPKIDSDNPDGHKLEKIRGEVEFKNVKFVYPSRLETSIFDDFCLRVPSGKTVALVGGSGSGKSTVISLLQRFYDPLAGEILIDGVSIDKLQVKWLRSQMGLVSQEPALFATTIKENILFGKEDASMDDVVEAAKASNAHNFISQLPNGYETQVGERGVQMSGGQKQRIAIARAIIKSPTILLLDEATSALDSESERVVQEALENASIGRTTILIAHRLSTIRNADVISVVKNGHIVETGSHDELMENIDGQYSTLVHLQQIEKQDINVSVKIGPISDPSKDIRNSSRVSTLSRSSSANSVTGPSTIKNLSEDNKPQLPSFKRLLAMNLPEWKQALYGCISATLFGAIQPAYAYSLGSMVSVYFLTSHDEIKEKTRIYALSFVGLAVLSFLINISQHYNFAYMGEYLTKRIRERMLSKVLTFEVGWFDRDENSSGAICSRLAKDANVVRSLVGDRMALVVQTVSAVTIAFTMGLVIAWRLALVMIAVQPVIIVCFYTRRVLLKSMSKKAIKAQDESSKLAAEAVSNVRTITAFSSQERIMKMLEKAQESPRRESIRQSWFAGFGLAMSQSLTSCTWALDFWYGGRLIQDGYITAKALFETFMILVSTGRVIADAGSMTTDLAKGSDAVGSVFAVLDRYTSIDPEDPDGYETERITGQVEFLDVDFSYPTRPDVIIFKNFSIKIEEGKSTAIVGPSGSGKSTIIGLIERFYDPLKGIVKIDGRDIRSYHLRSLRRHIALVSQEPTLFAGTIRENIIYGGVSDKIDEAEIIEAAKAANAHDFITSLTEGYDTYCGDRGVQLSGGQKQRIAIARAVLKNPSVLLLDEATSALDSQSERVVQDALERVMVGRTSVVIAHRLSTIQNCDAIAVLDKGKLVERGTHSSLLSKGPTGIYFSLVSLQTTSG

SEQ ID NO: 4660 - DNA, 4227 bp, Arabidopsis thaliana
  CDS (1)..(4227)
atgatgatctctagaggtttattcggatggtctccgcctcatatgcaaccattaactccagtctctgaagtctccgagccacctgagtctccttctccttatctcgaccctggtgctgagtctggtggtggcacgggcacggcggcggcgctagcggaggctgatgaagagatggatgatcaagatgagcttgaaccacctcctgctgctgttcctttctctcagctcttcgcttgcgctgaccgctttgattgggtgcttatgattgttggctctgttgctgctgctgctcatggtactgcgcttattgtctacttgcattacttcgccaagattgttgatgttcttgctttctctaatgattctagtcagcagagatctgaacaccagtttgaccgactcgtccagctttcgttgacgatcgtgtacattgctggaggtgttttcatttctggttggattgaggtgtcttgctggatactgactggagaaaggcagactgctgtgatcaggtccaagtatgtccaagtattattgaatcaagatatgagtttctttgatacatatggtaataatggagatattgtgagccaagtgctgagcgatgtcttactcattcagtcagctttaagcgagaaagttggaaattatattcataacatggctacgtttatcagtggacttgttattggatttgtcaactgctgggaaattgcattgattacactagccactggtcctttcatcgttgctgctggaggcatatcaaatatttttctacacagacttgctgagaacatacaggatgcatatgctgaagcagccggcattgctgaacaggcgatctcttacattaggactttatatgcctttacaaatgaaactctagcaaaatattcatatgcaacctcccttcaagcaaccctgagatacggcatattaattagtcttgtgcaaggccttggacttggatttacttatgggcttgctatatgctcgtgtgcgctgcaactttggattggacgattctttgttcacaatggaagggcaaatggtggagaaatcatagcagctctttttgctgttattttaagtggcctggggttaaatcaagctgctacgaacttctactcttttgatcaaggaaggattgctgcgtatagactttttgagatgataactcgttcatcttctgtggctaaccaagaaggagctgtgctggcttctgttcaaggaaatattgagttccggaatgtatatttcagttatttgtcacgacctgaaattccaatcttgagcggattttacctcacggttcctgctaaaaaagcagttgcacttgttggtagaaatggttctggaaaaagcagcatcattcctttaatggaacggttttatgatccgacattaggagaagttcttcttgatggagaaaatattaaaaatctaaaactggagtggctgagaagccaaatagggttggttacccaggagcctgctctgcttagcttgagcataagagagaatattgcatatggtcgtgatgctactcttgatcagatagaggaggcagctaaaaatgcgcatgcgcacacatttatcagctcacttgaaaaaggatatgaaacacaggtcgggagagccggtttagcaatgacagaggagcagaaaattaaactttcgattgctagagctgtgcttttgaatccaacaattcttctgcttgatgaagtaactggaggactagacttcgaagctgaaagaattgtgcaggaagctcttgatcttctgatgttgggacggtcaaccataataatagcccgacgattaagtttgataaaaaatgctgactatattgctgtgatggaggagggtcagctcgttgaaatgggtacacacgatgaattgataaatcttggtgggctgtatgctgagcttctgaagtgtgaagaagcaacaaagcttccaagaaggatgccagttaggaactacaaggagtctgcggtgtttgaggtcgagagagactcttcagctggctgtggcgtccaagaaccatcatcacccaaaatgattaagtctccatctcttcaaagaggtagtggtgtgttccgtccccaggaactgtgttttgatactgaagaatcacctaaagctcatagccctgcatctgagaaaacaggggaagatggcatgtctctggattgtgctgataaagagccaactatcaaaaggcaagatagtttcgagatgaggttgccacaccttcctaaagttgacgttcagtgtccccaacaaaaatcaaacggctcagagccagagtcccctgtttcaccccttttgacatcagatcctaaaaacgagcgttcccattcgcagacgtttagtcgtcctcttagttctcctgatgacactaaagcaaatggtaaggcgtctaaggatgctcaacacaaggagtcaccttcgttttggaggttggcacagcttagtttcccagagtggctttatgctgtattagggagtcttggtgctgccatctttggttctttcaatcctcttctggcttatgtcattgcgttggtagttacggaatattataaaagcaaaggaggccacctgcgcgaggaggttgacaaatggtgtttgatcattgcctgcatggggattgtgacagttgttgccaatttcttgcagcatttctattttggcataatgggagagaaaatgacggagagagttaggaggatgatgttctcagcaatgctgcgtaacgaagttggatggttcgatgatgaagagaacagtccagatacattatccatgcgtttagcaaatgatgctacttttgtccgagctgccttcagcaacaggctttcaatatttattcaagatagttttgctgttattgttgctcttctgattgggttgctgcttggttggcgtttggcccttgttgcattggcaactctgccaattctcactctttctgccattgctcagaaactgtggcttgccggattctcaaaaggcatacaggagatgcacagaaaagcatctttagttctcgaggatgctgttagaaacatctacactgttgttgctttctgtgctggtaacaaagtgatggaactgtacaggatgcaactccagcggatactcagacagagctatctccatgggatggctattggttttgcgtttggtttttcacagtttcttcttttcgcctgcaacgcgctcctcctatggtgcactgcgttatctgttaaccgtggatatatgaaattatcgacagctataacggagtacatggttttctcatttgctacattcgcccttgtggagccatttggattagcaccgtatatcctcaagcgacgtaagtctctgatatcagtgtttgaaatagtcgatcgagtccctacgattgaaccagatgataactctgctctcaaacctcctaatgtctacggaagtattgaattgaaaaacgtagacttctgctacccaactcgacccgagatactagtgctgagcaactttagtctcaaaatcagtggcggacagactgtagctgttgttggcgtttcaggttctggaaagagcacgataatctcactagtagagagatactacgacccagttgctggccaagtcctactagatgggagagacttaaagttatataacttgagatggttgagaagccacatgggtttggttcagcaagaacccataatcttttccacaacaatcagagagaatatcatatatgcaaggcataatgcaagtgaagctgagatgaaggaagcagcaagaattgcaaatgctcaccatttcatcagcagcttacctcacggttacgacacacatattgggatgagaggcgtagaacttacccctggacagaaacagagaatagcaatagcacgcgtagtactgaagaatgctcccatcatcttaatagatgaagccagctcgtctatcgaatctgaatcgagtcgggttgtgcaggaggctcttgatacattgataatggggaacaaaacaacaattctgatagcacatagagcggctatgatgagacatgtggataacattgtggtacttaatggagggaggatagtagaggaaggtacacatgattctttagcagcaaaaaatgggttgtatgtacgtttgatgcaaccacactttggtaaaggtctacgccaacatcgactgatatag

SEQ ID NO: 4661 - protein, 1408 aa, Arabidopsis thaliana
MMISRGLFGWSPPHMQPLTPVSEVSEPPESPSPYLDPGAESGGGTGTAAALAEADEEMDDQDELEPPPAAVPFSQLFACADRFDWVLMIVGSVAAAAHGTALIVYLHYFAKIVDVLAFSNDSSQQRSEHQFDRLVQLSLTIVYIAGGVFISGWIEVSCWILTGERQTAVIRSKYVQVLLNQDMSFFDTYGNNGDIVSQVLSDVLLIQSALSEKVGNYIHNMATFISGLVIGFVNCWEIALITLATGPFIVAAGGISNIFLHRLAENIQDAYAEAAGIAEQAISYIRTLYAFTNETLAKYSYATSLQATLRYGILISLVQGLGLGFTYGLAICSCALQLWIGRFFVHNGRANGGEIIAALFAVILSGLGLNQAATNFYSFDQGRIAAYRLFEMITRSSSVANQEGAVLASVQGNIEFRNVYFSYLSRPEIPILSGFYLTVPAKKAVALVGRNGSGKSSIIPLMERFYDPTLGEVLLDGENIKNLKLEWLRSQIGLVTQEPALLSLSIRENIAYGRDATLDQIEEAAKNAHAHTFISSLEKGYETQVGRAGLAMTEEQKIKLSIARAVLLNPTILLLDEVTGGLDFEAERIVQEALDLLMLGRSTIIIARRLSLIKNADYIAVMEEGQLVEMGTHDELINLGGLYAELLKCEEATKLPRRMPVRNYKESAVFEVERDSSAGCGVQEPSSPKMIKSPSLQRGSGVFRPQELCFDTEESPKAHSPASEKTGEDGMSLDCADKEPTIKRQDSFEMRLPHLPKVDVQCPQQKSNGSEPESPVSPLLTSDPKNERSHSQTFSRPLSSPDDTKANGKASKDAQHKESPSFWRLAQLSFPEWLYAVLGSLGAAIFGSFNPLLAYVIALVVTEYYKSKGGHLREEVDKWCLIIACMGIVTVVANFLQHFYFGIMGEKMTERVRRMMFSAMLRNEVGWFDDEENSPDTLSMRLANDATFVRAAFSNRLSIFIQDSFAVIVALLIGLLLGWRLALVALATLPILTLSAIAQKLWLAGFSKGIQEMHRKASLVLEDAVRNIYTVVAFCAGNKVMELYRMQLQRILRQSYLHGMAIGFAFGFSQFLLFACNALLLWCTALSVNRGYMKLSTAITEYMVFSFATFALVEPFGLAPYILKRRKSLISVFEIVDRVPTIEPDDNSALKPPNVYGSIELKNVDFCYPTRPEILVLSNFSLKISGGQTVAVVGVSGSGKSTIISLVERYYDPVAGQVLLDGRDLKLYNLRWLRSHMGLVQQEPIIFSTTIRENIIYARHNASEAEMKEAARIANAHHFISSLPHGYDTHIGMRGVELTPGQKQRIAIARVVLKNAPIILIDEASSSIESESSRVVQEALDTLIMGNKTTILIAHRAAMMRHVDNIVVLNGGRIVEEGTHDSLAAKNGLYVRLMQPHFGKGLRQHRLI

SEQ ID NO: 4662 - DNA, 3687 bp, Arabidopsis thaliana
  CDS (1)..(3687)
atgaagacatggggaagcatgagatcaatattcatgcatgccgacggtgtagattggatgttgatgggattagggttaatcggagccgtcggtgatggcttcatcactcctattctttttttcatcacagccatgctattgaacgacttcggtagtttctctttcaacgatgaaaccttcatgcaacccatttccaagaatgctctagccatgctttatgtggcttgtgcatcttgggtgatatgtttccttgaaggatattgttggacaagaacaggggagagacaagcagcaaaaatgagagaaaggtacttaagagcagtgttaagacaagatgtgggttactttgatcttcatgtcacaagcacttctgatattattaccagtgtctctagtgacagccttgtcattcaagacttcctcagtgaaaagttaccaaacattttgatgaatgcatctgcgtttgtcggaagctacatagtgggtttcatgttgctgtggagactcacaatcgtaggcttcccattcatcattctcctcttgatccctggactaatgtacggacgagccctcattggcatctcgaggaaaatacgtgaggagtacaatgaagctggttctatcgccgaacaagccatctcttcggttagaaccgtctatgcatttgttagtgagaagaagatgatagaaaagttctcagatgcgcttcaagggtcggtgaagctagggttgagacaagggctagctaaaggaattgctattgggagcaatggtatagtttatgctatatgggggttcttgacttggtatggaagtcggatggttatgaactatggctacaaaggtggtactgtctccacagtcacagtttgcgtcacctttggtggcacagcacttggtcaagcattgtcgaatcttaaatatttctccgaggcgtttgtggcaggggaacggattcaaaaaatgataaaaagagtccctgatatagattcagacaacttgaatggtcatattttggagactataagaggagaagttgaattcaacaacgtgaagtgcaagtacccgtctagacccgaaaccctaatctttgatgatttatgtctgaaaattccatcagggaaaactgtagctctggttggcggaagtggatcgggaaaatcaacagtgatatcgcttttacaaaggttctatgacccgaacgaaggcgatattctcattgatagtgtgtccattaataatatgcaagtgaaatggttgagatcgcaaatgggtatggttagccaagagccatcgctctttgccacatcgataaaggagaacatattatttggtaaagaggacgcatcctttgatgaagtagtggaagcagccaaggcctcaaatgctcataattttatttcgcaatttcctcatggttaccaaactcaggttggggagagaggagtgcatatgtcgggaggccagaagcagagaatcgcaattgcacgagcgttaatcaaatcaccgataattcttctcctagacgaggcaacaagcgcattggatttagaatctgaaagggtggtccaagaagccttagacaatgcatcagttggtcgtacaactattgttattgcccaccgtctctctaccattcgtaatgctgatattatatgtgttctacataatggttgcattgtagaaactggatcgcacgacaaactcatggagatagatggtaaatacacttctctagttcgcttacaacaaatgaagaatgaagaatcatgtgataacactagcgtaggtgtgaaagagggccgagtctcgagtttaagaaacgatttggattataatccaagagacttggctcatagcatgagttcaagcattgttacgaatctttctgactcgattcctcaagataagaagccgcttgtgccatcgtttaagagattgatggcaatgaatagaccagagtggaaacatgcattatgtggttgcttaagtgcatccttaggtggggccgtacaaccaatttacgcatattcgtccgggttaatgatatcggtatttttcctaaccaaccatgagcagatcaaagagaatacaagaatttacgtgttattattttttggtctagctctattcactttttttactagtatcagtcaacaatatagtttttcctacatgggagaatacctgactaaacgtatccgagaacagatgctctcgaagatactaacgtttgaagtcaattggttcgatgaggaagagaactcaagtggtgcaatttgctccagactagcgaaagatgctaacgtggtaaggtcgctcgttggtgaaagaatgtcattgctggtacaaaccatatcaacagttatggtagcttgcacaattggtttggtcatcgcttggagattcaccattgtgatgatttcagtacaaccagtaattattgtctgctattatattcaacgtgttctgctcaagaacatgtcgaaaaaagccatcattgcccaagatgaaagcagtaaactagctgcagaggctgtctccaacatccgaaccatcacaaccttctcatcacaagaacggatcatgaaattactcgagagagttcaagaaggtccacgaagagaaagtgcccgccaatcatggttagctgggattatgttggggactacgcaaagccttataacgtgcacctcagctttgaatttttggtatggtggtaaattaatcgctgatgggaagatggtatcaaaagcattctttgagttatttttgatctttaagactacaggccgggctattgccgaagctgggacaatgacgacagatctagccaagggctcaaattcagttgactcagtattcacagtgttagatcgtcgaaccaccattgagccggagaatccggatgggtatatcttagaaaaaataaagggccaaatcacatttctcaatgtggacttcgcttacccaacgcgacctaatatggttatattcaacaacttctccatagagatccacgagggaaagtcgacagcgatcgtaggtccaagtcggtcgggtaagtcaactgtaatcgggttaatcgaacggttctatgacccgttacaaggtattgtgaaaatcgatggccgtgatataaggtcgtatcatctaagatcacttcgtcaacacatgtctttggttagtcaagaaccaacattattcgcggggacaatccgagaaaacataatgtatggacgagcatctaacaagatcgacgagtcggagattatcgaggcaggaaagacggcaaacgctcacgagttcattacatcactatcagacggctatgatacgtactgcggagacagaggagtacaattgtctggtggtcaaaaacagaggatagctatcgcccgaacgattttaaagaatccatcaattttgctcctcgatgaagctacaagcgctttggacagccaatcagagcgtgtagtgcaagacgccctcgaacatgtgatggtagggaaaacaagcgttgtgatcgcacataggcttagcacgatccagaactgcgacacgattgctgttttagacaaaggaaaagttgtagaaagtgggacacacgcttccttgttagcaaaaggtcccacaggctcttatttctcattggtcagtcttcagagaaaggtcagatatgtataa

SEQ ID NO: 4663 - protein, 1228 aa, Arabidopsis thaliana
MKTWGSMRSIFMHADGVDWMLMGLGLIGAVGDGFITPILFFITAMLLNDFGSFSFNDETFMQPISKNALAMLYVACASWVICFLEGYCWTRTGERQAAKMRERYLRAVLRQDVGYFDLHVTSTSDIITSVSSDSLVIQDFLSEKLPNILMNASAFVGSYIVGFMLLWRLTIVGFPFIILLLIPGLMYGRALIGISRKIREEYNEAGSIAEQAISSVRTVYAFVSEKKMIEKFSDALQGSVKLGLRQGLAKGIAIGSNGIVYAIWGFLTWYGSRMVMNYGYKGGTVSTVTVCVTFGGTALGQALSNLKYFSEAFVAGERIQKMIKRVPDIDSDNLNGHILETIRGEVEFNNVKCKYPSRPETLIFDDLCLKIPSGKTVALVGGSGSGKSTVISLLQRFYDPNEGDILIDSVSINNMQVKWLRSQMGMVSQEPSLFATSIKENILFGKEDASFDEVVEAAKASNAHNFISQFPHGYQTQVGERGVHMSGGQKQRIAIARALIKSPIILLLDEATSALDLESERVVQEALDNASVGRTTIVIAHRLSTIRNADIICVLHNGCIVETGSHDKLMEIDGKYTSLVRLQQMKNEESCDNTSVGVKEGRVSSLRNDLDYNPRDLAHSMSSSIVTNLSDSIPQDKKPLVPSFKRLMAMNRPEWKHALCGCLSASLGGAVQPIYAYSSGLMISVFFLTNHEQIKENTRIYVLLFFGLALFTFFTSISQQYSFSYMGEYLTKRIREQMLSKILTFEVNWFDEEENSSGAICSRLAKDANVVRSLVGERMSLLVQTISTVMVACTIGLVIAWRFTIVMISVQPVIIVCYYIQRVLLKNMSKKAIIAQDESSKLAAEAVSNIRTITTFSSQERIMKLLERVQEGPRRESARQSWLAGIMLGTTQSLITCTSALNFWYGGKLIADGKMVSKAFFELFLIFKTTGRAIAEAGTMTTDLAKGSNSVDSVFTVLDRRTTIEPENPDGYILEKIKGQITFLNVDFAYPTRPNMVIFNNFSIEIHEGKSTAIVGPSRSGKSTVIGLIERFYDPLQGIVKIDGRDIRSYHLRSLRQHMSLVSQEPTLFAGTIRENIMYGRASNKIDESEIIEAGKTANAHEFITSLSDGYDTYCGDRGVQLSGGQKQRIAIARTILKNPSILLLDEATSALDSQSERVVQDALEHVMVGKTSVVIAHRLSTIQNCDTIAVLDKGKVVESGTHASLLAKGPTGSYFSLVSLQRKVRYV

SEQ ID NO: 4664 - DNA, 3789 bp, Arabidopsis thaliana
  CDS (1)..(3789)
atgaggactttgtatgttgtcgtttccccaaggtcaatgtgtcgtttagtatttcttttttcgaaacccaaagtaagcaaaaggagaaggaagaagatcatgaagagttttggaagcgtaagatcaatattcatgcatgcgaacagtgtggatttagtgctgatgggattaggtttaatcggagccgtcggtgatggcttcatcactcctataatatttttcatcaccgggctgctactcaacgacatcggtgattcctcattcggtgataaaaccttcatgcatgccatcatgaagaatgccgtagctttgctttatgtcgctggtgcatctttggtgatatgtttcgttgaaggatattgctggactaggacaggggagagacaagcatcaagaatgagagagaagtacttaagagcagtgttaagacaagatgtgggttactttgatcttcatgttacaagcacttctgatgttatcaccagtgtctctagtgacaccctcgtgatccaagacgtccttagtgaaaagttaccaaattttttgatgagtgcatcggcgtttgtcgcaagctacatcgtgggtttcatcatgctgtggagactaacaatagtaggtttcccgttctttatcctcctcttgatccctggactgatgtgcggacgagccctcatcaacatctcgagaaaaatacgtgaagagtataatgaggctggttctattgccgagcaagccatctcgttggtgcgaaccgtctacgcatttggtagtgagaggaagatgatatcgaaattctcagctgcgcttgaaggctcagtgaagctagggttgagacaaggaatagctaaaggaatcgccattgggagcaatggtgtcacttacgccatttgggggttcatgacttggtacggaagtcggatggttatgtaccatggagctaaaggcggtactatcttcgcagtcatcatatgcatcacctatggtggcacatcacttggtcgaggtttgtcgaatctcaaatatttctccgaggcggttgtagcaggggaaaggattattgaagtgataaaaagagttcccgatattgattcggacaacccgagaggtcaagttcttgagaatattaaaggagaagtccagtttaagcatgtgaagttcatgtactcatcaagacccgagacaccaatctttgatgatttatgtctaagaatcccatctggtaaatctgttgctctggtgggtggaagcggatcaggaaaatcaactgtgatatcgcttttacaaagattttatgaccccatcgtaggagagattcttatcgatggtgtgtctattaaaaagttgcaagtgaaatggttgagatcacaaatgggtctagttagccaagagccagcactcttcgccacatcgatagaggagaacatattatttggtaaagaggacgcatcctttgatgaagtagtggaagctgcaaagtcctcaaatgctcatgatttcatttctcagttccctcttggttacaaaactcaggttggggagagaggagtgcaaatgtcagggggtcagaagcaaaggatttcaattgcacgtgcgataatcaaatcaccgacacttctactgctagacgaggcaacaagcgcattagattcagaatccgaaagagtagtccaagaagccttagacaatgccactattggtcgtacaactattgttattgctcaccgcctctctactattcgtaatgttgatgttatatgtgtattcaaaaatggtcagattgtagaaactggatcacacgaagagctcatggagaatgtagatggtcaatacacttctctagtccgcttacaaatcatggaaaatgaagaatcaaatgataacgttagcgtaagtatgcgagagggtcaattctcaaatttcaacaaagacgtgaagtatagttcaagactttctattcaaagtcggtcttcccttttcgcaacttcaagcattgatacaaatcttgctggttcaattccaaaggataagaagccatcttttaagagattgatggcgatgaataaaccagagtggaaacatgcattgtatggttgcttaagtgcagtcttgtatggagccttacacccaatttatgcatatgcttcaggatcaatggtgtcagtgtattttctaacgagtcatgatgagatgaaggagaaaacaaggatctatgtgttgcttttcgttggtctagctgttttatgtttcttgatcagtatcattcaacaatatagttttgcttacatgggtgaatacctaacgaaacgtatacgagaaaatattctctcaaagctattgacctttgaggtaagctggttcgatgaagacgagaactcgagcggatcaatttgctctagactagccaaagacgcaaacgtggtgagatcgcttgttggtgaacgagtgtcgttgttggtacaaactatatcagcagtgagtgtagcttgcacacttggtttggccatttcttggaaattatccattgtgatgattgcaatacaaccagtggttgttggatgcttctacactcaacgcattgtactcaaaagcatatcgaaaaaagccattaaagcacaagatgagagcagcaaactagcggcagaagctgtatccaacatccgaaccataacagcattttcgtcacaagaacggatcctaaaattactcaaaatggttcaagaaggaccacaaagagaaaatatccgtcaatcgtggttagcagggattgtgctagcaacttctagaagtctcatgacatgcacttcagctttgaattactggtacggtgctagacttattattgatgggaagatcacgtcaaaagcattctttgagttgtttatactctttgtgagtacgggtcgggttattgcggacgcgggagcaatgacgatggatctagccaagggctcggatgcggtcggatcagtatttgcggtgttagatcgttacacaaacattgaaccggagaaaccggatggtttcgtcccacaaaacataaagggacaaataaagtttgtcaatgtggactttgcgtacccaacacgccctgatgtgattatatttaagaacttctccattgatattgacgagggaaagtcgacagcgatagtgggtccaagcgggtcaggtaaatcaactataatcgggttaatcgaacggttttatgacccgttaaagggtattgtaaagatcgatggtcgtgatataaggtcttatcatttgagatcacttcgtcaacacataggtttggttagccaagagccaatattatttgctgggacaatccgagagaacatcatgtatggaggagcatctgacaagattgacgagtcagagattatcgaggcggccaaggcagccaacgctcatgatttcatcgtaacattatcggacggctatgatacgtactgtggagacagaggagtacaactatctggtggtcaaaaacagaggatcgcgattgctcgtgcggttttgaagaacccatcagtgttgcttcttgatgaagctacgagcgctcttgacaaccaatcagagcgcatggtgcaggatgcactcgggcgtttgatggttggaaggacaagtgttgtgatcgctcataggcttagcaccattcaaaactgtgacacgataactgttttagacaaagggaaagttgtcgaatgtggaacacactcttccttgttagctaaaggtcctacgggtgtatatttctctctggtcagtctccaaagaactcgttactga

SEQ ID NO: 4665 - protein, 1262 aa, Arabidopsis thaliana
MRTLYVVVSPRSMCRLVFLFSKPKVSKRRRKKIMKSFGSVRSIFMHANSVDLVLMGLGLIGAVGDGFITPIIFFITGLLLNDIGDSSFGDKTFMHAIMKNAVALLYVAGASLVICFVEGYCWTRTGERQASRMREKYLRAVLRQDVGYFDLHVTSTSDVITSVSSDTLVIQDVLSEKLPNFLMSASAFVASYIVGFIMLWRLTIVGFPFFILLLIPGLMCGRALINISRKIREEYNEAGSIAEQAISLVRTVYAFGSERKMISKFSAALEGSVKLGLRQGIAKGIAIGSNGVTYAIWGFMTWYGSRMVMYHGAKGGTIFAVIICITYGGTSLGRGLSNLKYFSEAVVAGERIIEVIKRVPDIDSDNPRGQVLENIKGEVQFKHVKFMYSSRPETPIFDDLCLRIPSGKSVALVGGSGSGKSTVISLLQRFYDPIVGEILIDGVSIKKLQVKWLRSQMGLVSQEPALFATSIEENILFGKEDASFDEVVEAAKSSNAHDFISQFPLGYKTQVGERGVQMSGGQKQRISIARAIIKSPTLLLLDEATSALDSESERVVQEALDNATIGRTTIVIAHRLSTIRNVDVICVFKNGQIVETGSHEELMENVDGQYTSLVRLQIMENEESNDNVSVSMREGQFSNFNKDVKYSSRLSIQSRSSLFATSSIDTNLAGSIPKDKKPSFKRLMAMNKPEWKHALYGCLSAVLYGALHPIYAYASGSMVSVYFLTSHDEMKEKTRIYVLLFVGLAVLCFLISIIQQYSFAYMGEYLTKRIRENILSKLLTFEVSWFDEDENSSGSICSRLAKDANVVRSLVGERVSLLVQTISAVSVACTLGLAISWKLSIVMIAIQPVVVGCFYTQRIVLKSISKKAIKAQDESSKLAAEAVSNIRTITAFSSQERILKLLKMVQEGPQRENIRQSWLAGIVLATSRSLMTCTSALNYWYGARLIIDGKITSKAFFELFILFVSTGRVIADAGAMTMDLAKGSDAVGSVFAVLDRYTNIEPEKPDGFVPQNIKGQIKFVNVDFAYPTRPDVIIFKNFSIDIDEGKSTAIVGPSGSGKSTIIGLIERFYDPLKGIVKIDGRDIRSYHLRSLRQHIGLVSQEPILFAGTIRENIMYGGASDKIDESEIIEAAKAANAHDFIVTLSDGYDTYCGDRGVQLSGGQKQRIAIARAVLKNPSVLLLDEATSALDNQSERMVQDALGRLMVGRTSVVIAHRLSTIQNCDTITVLDKGKVVECGTHSSLLAKGPTGVYFSLVSLQRTRY

SEQ ID NO: 4666 - DNA, 1725 bp, Acinetobacter sp
  CDS (1)..(1725): transl_table=11
gtgaagcaagattttaaggtttatgttcgtcttttatcctacttaaagccctattggggaattgctttattggtgttggtaggctttgggattaatgctgcaactgaagtttctgttgctaaactcttaaaatacattattgatgccattcaggaaggaagtcgtgcagatctggactggtttcctttattgattgtacttttggtgttctttcgtggtttgggcctgttcatggggggctattatactgcggtcatctcgcgtaggctgatttttagtatccgtcaggaaatctatgcaaaattgatccgtttgccttcacagtactatctggataactcatctgggcatatatctgccaagattatgtataacgtcgaacaattgacagccgcttcctctgaatccttaaaaattatggtgaaagatggcctgattactttaggcttgcttggatatttgctttataccaactggcgattgacgctgtgtatcttcatttttatgccaattattggtgtattggtacgtaaagcctctaaacgaatgcgaaaactttccatacaggttcaaaataccatgggtgatgtcaatcacgtggttcaggaaagtataggtggacaagctgttgtaaaaagttttgtaggtgaggaatttgagcagaaacgtttttataagtcatcagaagacaacttaaaacgtggtctcaaaatggtaattgtacaaaacctaaatagtcctttggttcagttggtcatggcaatggctatgagtttgattgtatggcttgcattacgtcctcaaattttaggagaaaccacagcgggtgagtttgttgcttatattaccgctgcgggcttacttgcaaagccgattaaaaatctaacggatgtaaatgaaaaactccagcgtggtattgcagcagcctattctgtatttgaactgcttgatttgccttcagaggaaaatcacggtactcagacacctaagttgcaaggggatgtccgttttgatcacgtgacacttgaatatgcgggacaagtcaaagcaatcaaagattttaatctcacaatcgaaccaggtgaaaccgtcgcaattgttgggcgttctggtgcaggtaaaacatcattggttaatctgttggtgcggtttcaggaagtgaccagtggttcactctatcttgatcatatccccattcaagatatcgagctgtcttgtttacgccaacaggtcgcaatggtgaatcaacaagtggttttatttaaccgttcagtccgagaaaatattgcgtatggtcagctcgaaggcgcggcagaggctgatattgtcgcagcagcaaaagcggcctatgctcatgattttattatgaacttgcctcagggttatgacactatacttggcgcccaaggcttaaatttatcaggtggtcaacgtcaacgtatagcaattgcccgtgcgattttgaagaatgcccctattttgattctggatgaagcgaccagcgcactggataatgagtcagaacatttcattcaaaaggcttttgatgaagcaatgcagaatagaacgacgatagtcattgcgcatcgcttgtctaccattgaaaatgcagaccgtattgtagtcatggacaaggggcaaattattgagcagggtactcatcaagagctgcttttaaagcagggtgcgtattttcagctccatcagcgtaattttgaggaataa

SEQ ID NO: 4667 - protein, 574 aa, Acinetobacter sp
MKQDFKVYVRLLSYLKPYWGIALLVLVGFGINAATEVSVAKLLKYIIDAIQEGSRADLDWFPLLIVLLVFFRGLGLFMGGYYTAVISRRLIFSIRQEIYAKLIRLPSQYYLDNSSGHISAKIMYNVEQLTAASSESLKIMVKDGLITLGLLGYLLYTNWRLTLCIFIFMPIIGVLVRKASKRMRKLSIQVQNTMGDVNHVVQESIGGQAVVKSFVGEEFEQKRFYKSSEDNLKRGLKMVIVQNLNSPLVQLVMAMAMSLIVWLALRPQILGETTAGEFVAYITAAGLLAKPIKNLTDVNEKLQRGIAAAYSVFELLDLPSEENHGTQTPKLQGDVRFDHVTLEYAGQVKAIKDFNLTIEPGETVAIVGRSGAGKTSLVNLLVRFQEVTSGSLYLDHIPIQDIELSCLRQQVAMVNQQVVLFNRSVRENIAYGQLEGAAEADIVAAAKAAYAHDFIMNLPQGYDTILGAQGLNLSGGQRQRIAIARAILKNAPILILDEATSALDNESEHFIQKAFDEAMQNRTTIVIAHRLSTIENADRIVVMDKGQIIEQGTHQELLLKQGAYFQLHQRNFEE

SEQ ID NO: 4668 - DNA, 1770 bp, Alkalilimnicola ehrlichei
  CDS (1)..(1770): transl_table=11
atgagcaaagggcacagcgaccatcccagcgccggcgagtcctggcacctgtataagcgcattttcggctttatcaagccctactggcggctgggcgtgctggccatcgtctgtatggtgctggcggcggccggtcaggcggcctttgcctggatcatccagccgctggtggacggcaccttcatcgagcaggacccaggcgcccggctctgggtaccggcgaccctggtcggcatcttcctcttccacggcgtcaccaccttcgcctccgactataccgtggcctgggtcggccggcgggtggtcaaggacgtgcgccaggcggtcttcgagcagtaccttcggctgcccaccagctatttcgacaagaactcccccggcaccctgctggccaaactgacctataacgtcaatcagatcagtgcggcggcctccaaggcggtggtcgtactggtgcgcgacaccttcacggtgatcttcctgctggcctatatgacctacctcagcggctggctggtgatgatcgtcttcggtttgggcccgctggtggccgtggtggtgaccgcagccaacaagcgcttccgcaagctgagccggcgcatgcaggcctcggtgggggagtacgcccagatcgccgaggacgggatccgcggacaggctgaggtcaagatcttcggtggccagcgttacgaggcggagcgcttcgaccggaccaacacccgccaccaccggcagctcatgcgctacaaggcggtgcaggcggccagccagccgctggcgcaactgggcgcagtgatcgccctggccattatcctctacctggcgaccatggacgtgatcctggagaccatcagccccgggggcatgatctcgttcatcgccgccatgctgctgatgctgccgccgctgaaacgggtgatcggggtgaacgccgagatccagaaagcgttggccgccggggagagcgtcttcgaggtgctggacgccccgccggaacccgaccacgggcagcgcccgctggagcgggcccggggcctgatcgagttcgaccgggtggccttccgctacccggaatccgaggactgggtgcttcgggacatcaacctgtccatccagcccggcgagacggtggccctggtgggccgctcgggcagcggtaagaccaccctggccagcctgctgccgcgcttttacgacccgcagcggggcgagatccgactggacggccacccgctggcggaataccggctgcaggcgctgcgctcgcagatgtctctggtcaaccagcaggtggtgctgttcaacgactccctggccaacaacatcgcctacggcctgagcgagcggccgacagcggcgcaactgcaggccgcggcccgtgccgccaatgccctggagttcatcgaggagctgccggagggcttcgacaccgtcattggcgagaacggcgtcatgctctccggggggcagcgccagcgcatcgccatcgcccgggccctgctcaaggatgcgcccattctgatcctcgacgaggcgacctccgccctggactcggaatcggaaaagcgcatccaggaggcgctggagaaactgatgcgcggccggaccaccctggtcatcgcccaccggctgtccaccatcgaggacgccgaccgaatcgtggtgctcgatgccggccgggtggtggagaccgggacccaccgggagctgctggaccacaacgggcactacgcctcgttgcaccgtgtccagttcaacggtccgtcctga

SEQ ID NO: 4669 - protein, 589 aa, Alkalilimnicola ehrlichei
MSKGHSDHPSAGESWHLYKRIFGFIKPYWRLGVLAIVCMVLAAAGQAAFAWIIQPLVDGTFIEQDPGARLWVPATLVGIFLFHGVTTFASDYTVAWVGRRVVKDVRQAVFEQYLRLPTSYFDKNSPGTLLAKLTYNVNQISAAASKAVVVLVRDTFTVIFLLAYMTYLSGWLVMIVFGLGPLVAVVVTAANKRFRKLSRRMQASVGEYAQIAEDGIRGQAEVKIFGGQRYEAERFDRTNTRHHRQLMRYKAVQAASQPLAQLGAVIALAIILYLATMDVILETISPGGMISFIAAMLLMLPPLKRVIGVNAEIQKALAAGESVFEVLDAPPEPDHGQRPLERARGLIEFDRVAFRYPESEDWVLRDINLSIQPGETVALVGRSGSGKTTLASLLPRFYDPQRGEIRLDGHPLAEYRLQALRSQMSLVNQQVVLFNDSLANNIAYGLSERPTAAQLQAAARAANALEFIEELPEGFDTVIGENGVMLSGGQRQRIAIARALLKDAPILILDEATSALDSESEKRIQEALEKLMRGRTTLVIAHRLSTIEDADRIVVLDAGRVVETGTHRELLDHNGHYASLHRVQFNGPS

SEQ ID NO: 4670 - DNA, 1806 bp, Azoarcus sp
  CDS (1)..(1806): transl_table=11
atgcaccgttccgatgcggctcctgcctccagcatcaggatctacttccgtctgctgagctacgtccggccctatgtcgggctgttcgcagtcagcatcctgggctacgtcatcttcgcttcgtctcagccgatgctcgccggcgtgctgaagtattttgtcgatggcctgacgcatcccgacgcggcgctggttaccggcgtgccgctgctcgacggcatggagctgatgcacggcgtgccgctgatgatcgtgctaatcgccgcttggcaggggttgggcggctatctcggcaattatttccttgcgagagtttcgctgggactcgtgcacgacctgcgccagacgctgttcgacagcctgttgcgcctgccgaacacctatttcgaccagcacagctccggacacctgatatcgcgcatcactttcaacgtgacgatggtcaccggcgcggcgaccgatgcgatcaagatcgtgatccgcgaggggcttaccgtggtgttcctcttcgcgtacctgctgtggatgaactggcggctcacgctggtgatggtcgcgatcctgccgttgatcagcctgatggtccggaacgcaagcggcaagttccgcaagcagagcaggaagatccaggtcgcaatgggggacgtgacccacgtcgcgtccgaaacgattcagggttaccgggttgtgcgcagcttcggcggcgagcactacgagcgggagcgttttcgcgctgcgagcgaggacaacacacgcaagcagctgaaaatggtcaagacttcggcggtctatacgccgacgttgcagctcgtcacgtacagcgcgatggccgtggtgctgtttctcgtactgcggctgcgcggcgaggcgtcggtgggtgatctcgtcgcctacattaccgccgccgggctgctgcccaaaccgatccgccagctctccgaagtcagctcgacgatccagcgcggggtggcgggcgccgagagcattttcgaacagctcgacgacaagccggaagtggaccacgggcgcatcgaacgcgagcgtgtcagcggtcgcatcgaggtgcgcgacctgtcgttccgctatccaggctccgaccgcgaagtgctcgacagcgtgagcttcacggtcgagccggggcagatgatcgcactcgttggccgttccggcagcgggaagtcgacgctcgcgaacctgattccgcgtttctatcaccacgaccgcggccagatcctcatcgacggtgtcgatgtcgaggactacacgctgaagaacctgcgtcgccacatcgcgctggtaacgcagcaggtgaccctgttcaatgacacggtggcgaacaacatcgcctacggtgacctggccggcctcccgcgcgccgctgtcgaggccgcggcggaagccgggtatgcgaaggagttcatcgaccggctcccgcagggtttcgacacgctgatcggcgaaaacggcgtgaccctgtcgggcggccagcgccagcgcctcgcaatcgcccgcgcgctgctcaaaaacgccccgatcctgatcctcgacgaggcgacgagcgcgctcgacaccgaatcggaacgacatatccaggcggcgctccaccgcgtgatgcaggcgcgcacgacgctcgtgatcgcgcaccggttgtccaccatcgaacaggcggacgtcatcatggtgatggatcatggacgcatcgtcgaacgcggcagccatgccgaactcctcgccgccggcgggcactacgccaggctgcacgcgatgcagtttcgcgaggaacccgcggtcgcagagggtcgctag

SEQ ID NO: 4671 - protein, 601 aa, Azoarcus sp
MHRSDAAPASSIRIYFRLLSYVRPYVGLFAVSILGYVIFASSQPMLAGVLKYFVDGLTHPDAALVTGVPLLDGMELMHGVPLMIVLIAAWQGLGGYLGNYFLARVSLGLVHDLRQTLFDSLLRLPNTYFDQHSSGHLISRITFNVTMVTGAATDAIKIVIREGLTVVFLFAYLLWMNWRLTLVMVAILPLISLMVRNASGKFRKQSRKIQVAMGDVTHVASETIQGYRVVRSFGGEHYERERFRAASEDNTRKQLKMVKTSAVYTPTLQLVTYSAMAVVLFLVLRLRGEASVGDLVAYITAAGLLPKPIRQLSEVSSTIQRGVAGAESIFEQLDDKPEVDHGRIERERVSGRIEVRDLSFRYPGSDREVLDSVSFTVEPGQMIALVGRSGSGKSTLANLIPRFYHHDRGQILIDGVDVEDYTLKNLRRHIALVTQQVTLFNDTVANNIAYGDLAGLPRAAVEAAAEAGYAKEFIDRLPQGFDTLIGENGVTLSGGQRQRLAIARALLKNAPILILDEATSALDTESERHIQAALHRVMQARTTLVIAHRLSTIEQADVIMVMDHGRIVERGSHAELLAAGGHYARLHAMQFREEPAVAEGR

SEQ ID NO: 4672 - DNA, 1758 bp, Dechloromonas aromatica
  CDS (1)..(1758): transl_table=11
atgtctcatgacatgaccagccgtgagctgtacctccggctgctgacttatgtccgcccatactggaaggcctttctcgccgcgctggcgtgcatgggggtggcctcgctggcggagccggtctttccggcgatcatgaaatcgctgctcgacgacggattttccaaggcaaatggcccatgggactggttgttctatccgctggccatcatgggcatcttcctggtccgcgccatttttggcttccttggcgattacctgatgagctgggtgtcgaacaacgtcgtggctgaattgcgccaggccatgtttgcccgcatggtccgcctgccgacccgctactacagcgacaacctgtccggtcgtctgatgtcgcgcattgcctacgacgtgaccggcgtggccggtgcggcgaccaatgcgctgacctcgctgatcaaggattcgctatccattgtcggcctgctcgtctggctgctctggctgaattggcagctgacgctgatcaccctgagcgtcgtgccattcatcgccatcgtcgtgcgtgtcttcagcaagcgcctgcgcagcgtggcccgggggcagcaggagtcgatgggcaagattacccaggtgctgcaggaggccattgagggccacaaggtcgtcaagattttcggcggtcagtcctacgaagaagatcgtttctatgaatcgatccgcgagcagcgccgcttggccatgcgcgcgacgctggcttctgccgcacaaagcccgctggtccagttctttgccgcttccggtgtggcgatcatcatgggcgttgcgctcaagcaggcctccagcgaccagacgacggtcggcagtttcgtttccttcgttaccgccatgctgatgctgatggcgccgctgaagcgggtcactgacgtcaacgcgccgatccagcgtggtctggccgcagcggaaagcgtcttttcgctggtcgatgaagagaccgagccggatagcggcaaggaagagctgggtcgcgcccaggggctggtcgaattcgacggggtgaccttcacctatccggggtcagaacgtccggcgctcgacagtgtgtcgctgaccgtgcggcccggcgagtgcgtggcgctggtcggcccctcaggcagtggcaagacgacggcggccaatctgttgccccgtttctacgccctcgacgccggcgaaatccgggtcgacggccatgcgctgccgaacatccgcctgaacagcctgcgcgacaacatcgcgctggtcagccaggatgtcgtgctgttcaacgacactattggcgccaacatcgcctacggtggcaagcgcgacgcgaccctcgacgaaatccgcgcggcggccaaggcagcgcatgcgctggaattcatcgatgccctgccagagggtttgaacaccatgatcggcgaaaatggcgtcaagctttccggcggccagcgccagcgtctggctattgcccgtgccattctgaaggacgcgccgatcctgattctcgacgaagcaacctcggccctcgataccgaatccgaacgccatgtccaggccgctctcgacgaactgatgcgtggccgcagcaccttggtcattgcgcaccggttgtcgaccatcgaacgcgccgaccgcattatcgccttggcccacggccacaagcaggaagagggctcgcatgccgaactgctcgcccacgatggcctgtacgcccgcctgtaccgcatgcagaaggcggaagaggtcgcggtctga

SEQ ID NO: 4673 - protein, 585 aa, Dechloromonas aromatica
MSHDMTSRELYLRLLTYVRPYWKAFLAALACMGVASLAEPVFPAIMKSLLDDGFSKANGPWDWLFYPLAIMGIFLVRAIFGFLGDYLMSWVSNNVVAELRQAMFARMVRLPTRYYSDNLSGRLMSRIAYDVTGVAGAATNALTSLIKDSLSIVGLLVWLLWLNWQLTLITLSVVPFIAIVVRVFSKRLRSVARGQQESMGKITQVLQEAIEGHKVVKIFGGQSYEEDRFYESIREQRRLAMRATLASAAQSPLVQFFAASGVAIIMGVALKQASSDQTTVGSFVSFVTAMLMLMAPLKRVTDVNAPIQRGLAAAESVFSLVDEETEPDSGKEELGRAQGLVEFDGVTFTYPGSERPALDSVSLTVRPGECVALVGPSGSGKTTAANLLPRFYALDAGEIRVDGHALPNIRLNSLRDNIALVSQDVVLFNDTIGANIAYGGKRDATLDEIRAAAKAAHALEFIDALPEGLNTMIGENGVKLSGGQRQRLAIARAILKDAPILILDEATSALDTESERHVQAALDELMRGRSTLVIAHRLSTIERADRIIALAHGHKQEEGSHAELLAHDGLYARLYRMQKAEEVAV

SEQ ID NO: 4674 - DNA, 1749 bp, Escherichia coli O157
  CDS (1)..(1749): transl_table=11
atgcataacgacaaagatctctctacgtggcagacattccgccgactgtggccaaccattgcgccttttaaagcgggtctgatcgtggcgggcgtagcgttaatcctcaacgcagccagcgataccttcatgttatcgctccttaagccacttcttgatgatggctttggtaaaacagatcgctccgtgctggtgtggatgccgctggtggtgatcgggctgatgattttgcgtggtatcaccagctatgtctccagctactgtatctcctgggtatcaggaaaggtggtaatgaccatgcgtcgccgcctgtttggtcacatgatgggaatgccggtttcattctttgacaaacagtcaacgggtacgctgttgtcacgtatcacctacgattccgaacaggttgcttcttcctcttccggcgcactgattactgttgtgcgtgaaggtgcgtcgatcatcggcctgttcatcatgatgttctattacagttggcaattgtcgatcattttgattgtgctggcaccgattgtttcgattgcgattcgcgtagtatcgaagcgttttcgcaacatcagtaaaaacatgcagaacaccatggggcaggtgaccaccagcgctgaacaaatgctgaaaggccataaagaagtattgattttcggtggtcaggaagtggaaacgaaacgcttcgataaagtcagcaaccgaatgcgtcttcaggggatgaaaatggtttcagcctcttccatctctgatccgatcattcagctgatcgcctctttggcgctggcgtttgttctgtatgcggcgagcttcccaagtgtcatggatagcctgactgccggtacgattaccgttgttttctcttcaatgattgcactgatgcgtccgctgaaatcgctgactaacgttaacgcccagttccagcgcggtatggcggcttgtcagacactgtttaccattctggacagtgagcaggagaaagacgaaggtaagcgcgtgatcgagcgtgcgactggcgacgtggaattccgcaacgtcacctttacttatccgggacgtgacgtacccgcattgcgtaacatcaacctgaaaattccggcagggaaaacggtcgctctggttggacgctctggttcaggtaaatcaaccatcgccagcctgatcacgcgtttttacgatattgatgaaggcgaaatcctgatggatggtcacgatctgcgcgagtataccctggcgtcgttgcgtaaccaggttgctctggtgtcgcagaatgtccatctgtttaacgatacggttgctaacaacattgcttacgcacgaactgaacagtacagccgtgagcaaattgaagaagcggcgcgtatggcctacgccatggacttcatcaataagatggataacggtctcgatacagtgattggtgaaaacggcgtactgctctctggcggtcagcgtcagcgtattgctatcgctcgagccttgttgcgtgatagcccgattctgattctggatgaagctacctcggctctggataccgaatccgaacgtgcgattcaggcggcactggatgagttgcagaaaaaccgtacctctctggtgattgcccaccgcttgtctaccattgaaaaggcagacgaaatcgtggtcgtcgaggatggtgtcattgtggaacgcggtacgcataacgatttgcttgagcaccgcggcgtttacgcgcaacttcacaaaatgcagtttggccaatga

SEQ ID NO: 4675 - protein, 582 aa, Escherichia coli O157
MHNDKDLSTWQTFRRLWPTIAPFKAGLIVAGVALILNAASDTFMLSLLKPLLDDGFGKTDRSVLVWMPLVVIGLMILRGITSYVSSYCISWVSGKVVMTMRRRLFGHMMGMPVSFFDKQSTGTLLSRITYDSEQVASSSSGALITVVREGASIIGLFIMMFYYSWQLSIILIVLAPIVSIAIRVVSKRFRNISKNMQNTMGQVTTSAEQMLKGHKEVLIFGGQEVETKRFDKVSNRMRLQGMKMVSASSISDPIIQLIASLALAFVLYAASFPSVMDSLTAGTITVVFSSMIALMRPLKSLTNVNAQFQRGMAACQTLFTILDSEQEKDEGKRVIERATGDVEFRNVTFTYPGRDVPALRNINLKIPAGKTVALVGRSGSGKSTIASLITRFYDIDEGEILMDGHDLREYTLASLRNQVALVSQNVHLFNDTVANNIAYARTEQYSREQIEEAARMAYAMDFINKMDNGLDTVIGENGVLLSGGQRQRIAIARALLRDSPILILDEATSALDTESERAIQAALDELQKNRTSLVIAHRLSTIEKADEIVVVEDGVIVERGTHNDLLEHRGVYAQLHKMQFGQ

SEQ ID NO: 4676 - DNA, 1749 bp, Idiomarina loihiensis
  CDS (1)..(1749): transl_table=11
atggattctcagcttaaaaagaagacgacctttaaacgcttattaggttatatcaaaccttataaggcagcttttatcgctgctatcctgtgtatgattggttactctgccattgatacattgttcttatcccaaattgaaacgttaatagatgatgggttaacagagcaagactctaatatattgctttacggtgccctctttgttccttttattttcatccttcgtggttctttgaatgttgcttccagctatttcctgcattgggtgggttttaaagtcgttactaaaatgcggcagcagctttttgaccatatgatgaaactgccggtgggtttccatgaccagcattcaaccggtgacttgatttcaaaaataacttatgacactcagcaggtggcggaagcgagtagccgggccgttttggtcttggtgaaagaaggcgcgttcgtcgccggtttattgggtttgatgttttatcaaagctggcaattatcattggtatttttggtgataggccccttggttgcaaaagttgtcggggttgtttcacgtcgtttccgcaaagtaagtagtcgtattcagaccgctatgggtaatgtaaccacaactgcagagcagatgatcaacggccataaggttgtgatcatgcatcaggggcaaaaaggtgagtcgacacgtttttcggaaataaataatattactcgtaaccagaatatgaagctggtgaatacccgggctattagcacttcagttattcagtttatagcttcgttaagcctttctatggttctggttattgccagttttccagaaatgctgggtgagctttcggccggtgcttttactacgttacttaccgctatgatcatgttgctgcgcccgttaaagcagctgactaacgtaaacagtgatttccagcgcggtattgcggcggcaaccagcgtgtttgcaattctggacgagccgattgaagttgataaaggttcgcgagtggttgatcgtgcagcaggtgatattgtttttgatgatgtgaccttttcttatcaaaaagatgatgaacctgcgttagagcacattaattttaaagttgatcagggcaaaactgtggcgctggtgggccgttcaggtagtggtaagtcgacaatatcgaacttgcttacgcggttctacgatgtagagcagggcagcattttgcttgatggccacaatattaacgattataaactgaaatgcctaaggcgtcagtttgcgctggtgtctcagcatgtaaccttgtttaacgacaccatagcaaacaacattgcttacggcgcttcaaaagatgtatcacgtgaaaatattattaaagccgctgaacaagcatacgttactgaattcaccgacagcatgccgaaaggcctggatactatggtgggcgagaatggggtgatgttatccggtggtcagcgtcagcgtatagccatagcccgtgcgctattacaagacgcgcctattctgatactggatgaagcgacatcggcgttggatactgagtccgagcgtcatattcaggatgccctgggaaccttacgtaaaaaccgtacagctattgtcattgcacaccgtttatcaaccattgaaaatgctgatgaaattttagttatggacaacggtgagattattgagcgcggtacacaccagcaattgcttgatcaggaaggcgcatattttcagctgcataacttgcagtttagcgggagcgcctaa

SEQ ID NO: 4677 - protein, 582 aa, Idiomarina loihiensis
MDSQLKKKTTFKRLLGYIKPYKAAFIAAILCMIGYSAIDTLFLSQIETLIDDGLTEQDSNILLYGALFVPFIFILRGSLNVASSYFLHWVGFKVVTKMRQQLFDHMMKLPVGFHDQHSTGDLISKITYDTQQVAEASSRAVLVLVKEGAFVAGLLGLMFYQSWQLSLVFLVIGPLVAKVVGVVSRRFRKVSSRIQTAMGNVTTTAEQMINGHKVVIMHQGQKGESTRFSEINNITRNQNMKLVNTRAISTSVIQFIASLSLSMVLVIASFPEMLGELSAGAFTTLLTAMIMLLRPLKQLTNVNSDFQRGIAAATSVFAILDEPIEVDKGSRVVDRAAGDIVFDDVTFSYQKDDEPALEHINFKVDQGKTVALVGRSGSGKSTISNLLTRFYDVEQGSILLDGHNINDYKLKCLRRQFALVSQHVTLFNDTIANNIAYGASKDVSRENIIKAAEQAYVTEFTDSMPKGLDTMVGENGVMLSGGQRQRIAIARALLQDAPILILDEATSALDTESERHIQDALGTLRKNRTAIVIAHRLSTIENADEILVMDNGEIIERGTHQQLLDQEGAYFQLHNLQFSGSA

SEQ ID NO: 4678 - DNA, 1809 bp, Pseudomonas putida
  CDS (1)..(1809): transl_table=11
atggccgaaacaccgcgaccagcggagcacacctccagcctgaagatctacttccggctgttgagctatgtgaaaccctatgtcggcattttcctgctgagcattgtcggtttcgtgatctttgcctcgacccagccaatgctggccggcatcctcaagtacttcgtcgatgggctgagcaaccccgaagcggtattgttccccaacgtcccctacctgcgcgacctgcaactgctgcaggcggtgccgctgctgatcatcctgatcgctgcgtggcagggcctgggctcgttcctcggcaactacttcctggccaaggtctctctgagcctggtgcatgacctgcgggtggcattgttcaacaagctgctggtgttgcccaaccgctacttcgacaaccacaactccgggcacctgatttcgcgcatcaccttcaatgtgaccatggtcaccggcgccgctaccgacgccatcaaggtggtgatccgcgaaggcctgaccgtggtgttcctgtttgcctacctgctttggatgaactggcacctgaccctggtgatggtcgccatcttgccggtgattgcggttatggtcagcatcgccagcaagaaattccgcaagcagagcaagaaaatccaggtagccatgggcgacgtcacccacgttgcctcggaaaccatccagggttaccgcgtggtccgtagcttcggtggcgaggcctacgaacagcagcgattcggccaggccagccagagcaacaccgacaagcaactgcgcatgaccaagaccggctcgctgtacacgccgatgcttcagctggtgatctacagcgccatggctgcgctgatgttcctggtgttgttcctgcgcggggactctactgctggtgacctggtggcgtatatcaccgctgccggcctgctgcccaagccgattcgccagttgtcggaagtcagctcgaccatccagaagggcctggcaggtgccgagagcatcttcgagcaactggacgaagcgcctgaagtggacactggtacggtcgagaaggaacgcgtggaagggcgcctggaagtgcgtaacctgagctttacctacccgggtaccgagcgtgaagtgctgagcgatatcagttttgtcgccgagcccgggcagatgatcgccctggtcggccgctccggcagtggcaagtccaccctggcggcgctgatcccgcgcttctatcaccacgacaaggggcagatcctgctcgatggcgtggagatcgagcactatcgcctgcgtaacctgcgtcgccatgtttcgcaagtcacccagcatgtcaccctgttcaacgacaccgtggccaacaacatcgcttatggcgatctggccggcgcgccgcgcgcagacatcgaagccgccgcggccgatgcctatgccaaggaattcgtcgaccggctgccaaagggcttcgataccgaagtgggtgagaacggtgtactgctttccggtggccagcgccagcgcctggcaattgcccgtgcgctgcttaaaaacgcgccgttgctgatcctcgacgaagcgacttcggcgttggataccgagtccgagcggcatatccaggccgccctggaccacgtgatgcaaggccgtaccacgctggtgattgcccatcgcctgtcgaccatcgagaaggctgaccagatccttgtcatggaccagggccgcctggtcgagcgcggtactcacaccgagctgcttgcggctaatggccattatgcccgtttgcatgccatggggctggatgagccggccaaggccgatatcacctga

SEQ ID NO: 4679 - protein, 602 aa, Pseudomonas putida
MAETPRPAEHTSSLKIYFRLLSYVKPYVGIFLLSIVGFVIFASTQPMLAGILKYFVDGLSNPEAVLFPNVPYLRDLQLLQAVPLLIILIAAWQGLGSFLGNYFLAKVSLSLVHDLRVALFNKLLVLPNRYFDNHNSGHLISRITFNVTMVTGAATDAIKVVIREGLTVVFLFAYLLWMNWHLTLVMVAILPVIAVMVSIASKKFRKQSKKIQVAMGDVTHVASETIQGYRVVRSFGGEAYEQQRFGQASQSNTDKQLRMTKTGSLYTPMLQLVIYSAMAALMFLVLFLRGDSTAGDLVAYITAAGLLPKPIRQLSEVSSTIQKGLAGAESIFEQLDEAPEVDTGTVEKERVEGRLEVRNLSFTYPGTEREVLSDISFVAEPGQMIALVGRSGSGKSTLAALIPRFYHHDKGQILLDGVEIEHYRLRNLRRHVSQVTQHVTLFNDTVANNIAYGDLAGAPRADIEAAAADAYAKEFVDRLPKGFDTEVGENGVLLSGGQRQRLAIARALLKNAPLLILDEATSALDTESERHIQAALDHVMQGRTTLVIAHRLSTIEKADQILVMDQGRLVERGTHTELLAANGHYARLHAMGLDEPAKADIT

SEQ ID NO: 4680 - DNA, 1779 bp, Ralstonia solanacearum
  CDS (1)..(1779): transl_table=11
atggcagtgacttcttcttcgtcttcccagccgcccgcggccagccagccgggccacttcaagcgcctgtgggcctacctgcgtcccgaactcagcagcttcatcctcgccatggtcgccatgggcgtggtggcggccaccgaggggatcatccccaaggtggtgaaggacctgctggaccagggcttcggcggcgaatacgccggcaagctgtggcgggtgccggccatgctggtcggcatcgcggtggtgcgcggcgtcgcccagttcggggccacgtacttcctgagcctggtgtcgaacaaggtgctgctgaacctgcgcatgaagatgttcgagcgcctgctgcaggcgccggcggcgttctaccagcgcaatacggcggcctcgctcatcaacgccgtcatcttcgaggtcaaccaggtgctgcaggtgctgaccggcgtgttcatcacgctggtgcgcgattcgatgacggtgctggcgctgctgatcttcctcttctataccaactggcgcctgacgctggtggtggccgtgatcctgccggtcatcgggttcctgatgtcgcgcatcaaccgccgcctgcgttcgctcaatcgcgagcaccagaacctgaccaacgaagccgcgtacgtggtggaggaggcggccggcggctacaaggtcgtcaagctgcacggcggcgaggcctacgagtcacgccgcttcaatgccatgaccaaccgcctgcgcggctacgccatgcgcatggccgtggccggcggcctgaaccagccggtgacgcagttcctggcggcgctggcgctgtccgtcatcctggcgatcgcgatggtgcaggcgcaagccaaccagaccaccgtcggcggcttcaccggcttcgtgatggcgatgctgctgctgatctcgccgctcaagcacctgaccgacgtcaaccagccgatgcaacgcggcctgactgccgccgagttcatcttcggcctgatcgacacgccgatcgagccccaggacggcggcaagcacatcgaccgcgcgcgcggcgacctgcgcttcgagcacgtcaccttccgctacggcccggacggccgggcggcgctcgacagcatcgacctgcacgtcaaggcgggcgagatcgtcgcgctggtgggcccgtcgggcagcggcaagaccacgctggtcaacctgctgccgcgcttcttcgagccgacctcgggccgcatcgtgctcgacggcgacgcgctggccgacctgtcgctgcaggatctgcgccgccagatcgccttcgtgagccaggacgtggtgctgttcaacgataccattgccgccaacgtggcgtatggcgcgcgcgatgcctccgagatcgatatggcgcgcgtgcgtcgtgcgctggaagccgcctacctgaccgatgtggtcgacaacctgcctgatggcgtcgacaccaacatcggtgacaacggctccaagctgtccggcggccagcgccagcgcctggcgatcgcccgcgccgtctacaaggacgcgccgatcctgatcctggacgaagccacctccgcgctcgattccgagtccgagcgccaggtgcaggccgcgctggaagccctgatgcagggccgcacgacgctggtgatcgcgcaccgcctgtcgaccatcgagaatgccgaccgcatcgtcgtgctcgaacacggccagatcgtcgaggccggcacgcatcgcgagctgctcgatcgcgatgggttgtatgctggattgcatcgcatccagttcgccacgcaatag

SEQ ID NO: 4681 - protein, 592 aa, Ralstonia solanacearum
MAVTSSSSSQPPAASQPGHFKRLWAYLRPELSSFILAMVAMGVVAATEGIIPKVVKDLLDQGFGGEYAGKLWRVPAMLVGIAVVRGVAQFGATYFLSLVSNKVLLNLRMKMFERLLQAPAAFYQRNTAASLINAVIFEVNQVLQVLTGVFITLVRDSMTVLALLIFLFYTNWRLTLVVAVILPVIGFLMSRINRRLRSLNREHQNLTNEAAYVVEEAAGGYKVVKLHGGEAYESRRFNAMTNRLRGYAMRMAVAGGLNQPVTQFLAALALSVILAIAMVQAQANQTTVGGFTGFVMAMLLLISPLKHLTDVNQPMQRGLTAAEFIFGLIDTPIEPQDGGKHIDRARGDLRFEHVTFRYGPDGRAALDSIDLHVKAGEIVALVGPSGSGKTTLVNLLPRFFEPTSGRIVLDGDALADLSLQDLRRQIAFVSQDVVLFNDTIAANVAYGARDASEIDMARVRRALEAAYLTDVVDNLPDGVDTNIGDNGSKLSGGQRQRLAIARAVYKDAPILILDEATSALDSESERQVQAALEALMQGRTTLVIAHRLSTIENADRIVVLEHGQIVEAGTHRELLDRDGLYAGLHRIQFATQ

SEQ ID NO: 4682 - DNA, 1806 bp, Syntrophus aciditrophicus
  CDS (1)..(1806): transl_table=11
ttggcgggaaatcgcggctgcaagccgagaagatttgaaggaaatcaacgaatggatatctttaaacgccttttaaaactggccagacctcatgcccctcgattcgcggtggccatggtctgcatgctgatcgcgggggctttaacgtcatccctggcctttcttgtcaagccggccctggatgacatttttctcgacaggaatgcggaaatgctcaaatggattcccctggcgattatcctgatctatctggtcaaggggggatgcagttatttccaggccatactgatgagtttcatcggccagcggatcgttgccgatctgcggaaccggctctatgaacagatccagaagcagtctctgtcgttcttttcgaaaaatcccacgggcgttctcatgtcgcggatcaccaatgacgtgaattccattcagggcaccgtatccgacgcggtgacgagtctcatgaaagattcatttaccctgatctgtctggtgttcgtcatcttctaccgggactggcagctggctattatcgccatgatcgttttccccctgacgatttatcccattgccaaattcggtcagaaaatgagaagcgtcgccacccggacccaggtgaccatgggcagtctcaccaccctccttcaggagaccatttccgggacgcgcattgtcagggccttctgcatggaagcccatgaaaatcagcgctttgccagggaaaacgagaagctgatgcatctggccctgaaatctgtttcgatcaacgccctttccagtcccttcatggaatttctgggtggaatcggcattgccgccatcattttttatggaggctaccaggtcatcaaggggtcttccaccccgggtacctttttttccttcctgacggcgctgatcatgctttacgaaccggtcaagcggctgacgaacgtcaacaacacgattcagcaggggattgccggcgcccagcgggttttcagcatcatcgatcttgttcccgatattgtcgaccgggatgaagccgtggagcttccccggatatccgaaaaaatcgaaatccgcaatatctcctttgcctatgatgatacaccggtgttgcggaacatcaatctgaccatccgtgcaggcgaagtggtggcttttgtcggaatgagcggcggcggaaaaacgacgctggtcaatctgatccctcgtttttacgatgtgactgccgggcagatcctcatcgacgggcatgacatccgtgatgtctcgctgatatcgctgcgccgtcagatcgggatcgtcacgcagcagacgatcctgttcaacgatacggtgagaaacaatatcgcttacggcagccagggctgttcggaaaaggagatcatcgaggcggccagagcggccaatgcccacgatttcattgtgaatcttcctgaaggatacgatacggtcatcggcgaactgggcacaaagctttcgggaggagaacgtcaacggatttccattgcccgggcgctgctgaagaatgcccctatcctgatcctggatgaagccacctcgtctctggatacggaggcggagatggaagttcaagaggccctggaacgtctcatgaaggggaggacgaccctggtgatcgcccatcgtctgtccacgatccgcaatgccgaccggatcgtcgtgctggtcaagggcgaaattgtggaagaaggcgcccatgaaacgctgctggcccggagaggggaatattacaaactccatcagttgcaattcaaggaagacaaggtcggggaagaggttgggcggaacgattcctga

SEQ ID NO: 4683 - protein, 601 aa, Syntrophus aciditrophicus
MAGNRGCKPRRFEGNQRMDIFKRLLKLARPHAPRFAVAMVCMLIAGALTSSLAFLVKPALDDIFLDRNAEMLKWIPLAIILIYLVKGGCSYFQAILMSFIGQRIVADLRNRLYEQIQKQSLSFFSKNPTGVLMSRITNDVNSIQGTVSDAVTSLMKDSFTLICLVFVIFYRDWQLAIIAMIVFPLTIYPIAKFGQKMRSVATRTQVTMGSLTTLLQETISGTRIVRAFCMEAHENQRFARENEKLMHLALKSVSINALSSPFMEFLGGIGIAAIIFYGGYQVIKGSSTPGTFFSFLTALIMLYEPVKRLTNVNNTIQQGIAGAQRVFSIIDLVPDIVDRDEAVELPRISEKIEIRNISFAYDDTPVLRNINLTIRAGEVVAFVGMSGGGKTTLVNLIPRFYDVTAGQILIDGHDIRDVSLISLRRQIGIVTQQTILFNDTVRNNIAYGSQGCSEKEIIEAARAANAHDFIVNLPEGYDTVIGELGTKLSGGERQRISIARALLKNAPILILDEATSSLDTEAEMEVQEALERLMKGRTTLVIAHRLSTIRNADRIVVLVKGEIVEEGAHETLLARRGEYYKLHQLQFKEDKVGEEVGRNDS

SEQ ID NO: 4684 - DNA, 1737 bp, Staphylococcus aureus
  CDS (1)..(1737): transl_table=11
atgattaaacgatatttgcaatttgttaagccatataaatatcgtatttttgcaacgattattgttgggataattaagtttggtataccaatgcttataccacttttaattaaatatgcaatagatggcgtgattaataaccacgcactaacgactgatgaaaaagttcatcatttaactattgccattggtatcgcattatttatttttgtaatagtgagaccaccaattgaatttatacgtcaatatttggcgcaatggacaagtaataaaatattgtatgatatacgtaaaaagttatataaccatttacaagctttaagtgcgagattttatgctaataatcaagtaggtcaagtaatatctagagtgattaatgatgttgaacaaacaaaagatttcattttaaccgggttaatgaatatttggttagattgtataacaattattattgcactatccataatgttctttttagatgtgaaattgactttagcagcactgtttatcttcccattttacattttaacggtgtacgttttctttggaagattaagaaaattgacgcgtgagagatcgcaagcattagctgaggttcaaggattcttgcatgaacgtgttcaaggtatttcagtcgttaaaagttttgcgattgaagacaatgaagcgaaaaactttgataaaaagaatactaatttcttaacacgtgcgttgaaacatacaagatggaatgcctattcctttgccgcaattaatacagttacagatattggaccaattattgtcatcggtgttggtgcatatcttgctatttctggatcaatcacagtaggtacacttgcagcatttgttggatacttagagttattgttcgggcctttacgtcgtttagtcgcatcatttacaactttaacgcaaagttttgcttcaatggaccgtgtattccaattaattgacgaagattatgacattaaaaatggtgttggtgctcaacctattgaaattaaacaaggtcgtattgatattgatcatgttagttttcaatataacgataacgaagctccaattttaaaagatattaatttgagtattgaaaaaggagaaacagttgctttcgtaggtatgagtggtggtggtaaatcaacattaattaacttaataccgagattttacgatgtaacttctgggcaaattttaatagatggtcacaatattaaagattttttaacgggaagtttaagaaatcaaataggattggtgcaacaggataatattttattctctgatacagttaaggaaaatattttacttggtcgtccaacagcaacagatgaagaagtagttgaagcggcgaaaatggctaatgcacatgactttattatgaacttgccacagggatatgacactgaagtaggtgaacgaggtgttaaattatcaggtggtcaaaaacaaagattatcgattgctagaatatttttaaataatccgccaattcttatcttggatgaagcaacaagtgcacttgatttagaaagtgaatccattattcaagaagcattagatgtgttgagtaaagatcgaacgacacttatcgtagcgcatcgcttgtccactattacacatgctgacaaaattgtcgtaattgaaaatggacatattgttgaaacaggtacgcatcgtgaattgattgcaaaacaaggtgcttacgagcatttatatagcattcaaaacttataa

SEQ ID NO: 4685 - protein, 578 aa, Staphylococcus aureus
MIKRYLQFVKPYKYRIFATIIVGIIKFGIPMLIPLLIKYAIDGVINNHALTTDEKVHHLTIAIGIALFIFVIVRPPIEFIRQYLAQWTSNKILYDIRKKLYNHLQALSARFYANNQVGQVISRVINDVEQTKDFILTGLMNIWLDCITIIIALSIMFFLDVKLTLAALFIFPFYILTVYVFFGRLRKLTRERSQALAEVQGFLHERVQGISVVKSFAIEDNEAKNFDKKNTNFLTRALKHTRWNAYSFAAINTVTDIGPIIVIGVGAYLAISGSITVGTLAAFVGYLELLFGPLRRLVASFTTLTQSFASMDRVFQLIDEDYDIKNGVGAQPIEIKQGRIDIDHVSFQYNDNEAPILKDINLSIEKGETVAFVGMSGGGKSTLINLIPRFYDVTSGQILIDGHNIKDFLTGSLRNQIGLVQQDNILFSDTVKENILLGRPTATDEEVVEAAKMANAHDFIMNLPQGYDTEVGERGVKLSGGQKQRLSIARIFLNNPPILILDEATSALDLESESIIQEALDVLSKDRTTLIVAHRLSTITHADKIVVIENGHIVETGTHRELIAKQGAYEHLYSIQNL

SEQ ID NO: 4686 - DNA, 1815 bp, Bacillus subtilis
  CDS (1)..(1815): transl_table=11
atgctaaaagacatccgcaagcctttccaatatcccaaactgccaattgacaaaaaagaaggcgcgaaaaagcgggcgaaagcaaaggatacaaagggcacactgagacgaatctggtcttacttggctgaaagaaaaggactgctcatacttgtcatgctaatggttgtcatcagcgccatattcggactccttggtccctttgtgatcggaaaggccatcgaccattttatcgtcgggaaaacggtcagcggcttgattcctgttttgcttcttctgctcgctatctatatcattcagtccctgtcgctttggtttcaaaactattggatgattacgatctcgcagggcacggttttcagaatgagaagcgaattgttcacccatctgcatgagctgccgattccattttttgataaacagcggcacggcgagctgatgagccgggtgacgaatgacatcgaaaatgtcagttctaccttaaacacgtcagtcattcaaattttgtcaagtgtgatcacctttgtcgggacgattgcggtgatgctgtacatgagcccgctccttactttgattacgctgaccattattccggtgatggcagcgagcctgaaatggatcaccaaccgaacgggaaagctgtttaaagaacagcagaaaaaccttggtgatctgaatgggtatattgaggaatctgtttcaggcgcaaaggtcatcaaagcatattcacgtgagaagcagattactgctgaattcctcgaaaaaaacgctgcactcaagacgtcgggcttttgggcgcagacgatttccgggtttattccgaaggtcatgaactctttgaataacttaagctttacaatgattgcggcaatcggcggtttgtttgcgctgaaaggctggatctcgatcggctccatcgttgtctttgccgagtattcaagacaatttacacgccctttaaacgatctggccaaccagtttaatacgatgctgtccgcaatcgccggcgctgaacgggtgtttgacgtgcttgatgaaaaagaagagcgcgaggatgaaaagaacgccgtgcatcagcccatccaaacaggcagcattgaattccgggatgtgtccttcggttacgataaagggcagcagacactgaagcatttacagtttaccgtgcctgcggggcagtccatcgcgtttgtaggaccgacgggggcggggaagacaaccgtcactaaccttctcgcccgtttttacgagcctaacgatggaaaaattttaatcgatggtacagatattaaaacccttactagagcaagcctaagaaaaaacatggggtttgttcttcaggattctttcttatttcagggaacgatcagagaaaacattcgctacggcaggcttgatgcttctgatcaggaagtcgaagccgctgcaaaaacagcgaatgcccatagttttattgaaaggctgccaaaagggtatgacaccgtactgacgcaaaacggttcgggcatcagtcaagggcagaagcagttgatttctatagcgagggcggtgcttgccgatccggttcttctcattttggatgaagcgacaagcaacattgataccgttacagaagtcaacattcaagaagcgctcgcccgtttaatggaaggaagaacaagcgtcatcattgcccacaggctgaacaccattcaaagagcggaccagattgtggtgctaaaaaacggtgaaatgattgaaaaaggcagccatgacgagctgattcggcaaaaaggattttacagtgacttatatgaaagccaatttgagaaatag

SEQ ID NO: 4687 - protein, 604 aa, Bacillus subtilis
MLKDIRKPFQYPKLPIDKKEGAKKRAKAKDTKGTLRRIWSYLAERKGLLILVMLMVVISAIFGLLGPFVIGKAIDHFIVGKTVSGLIPVLLLLLAIYIIQSLSLWFQNYWMITISQGTVFRMRSELFTHLHELPIPFFDKQRHGELMSRVTNDIENVSSTLNTSVIQILSSVITFVGTIAVMLYMSPLLTLITLTIIPVMAASLKWITNRTGKLFKEQQKNLGDLNGYIEESVSGAKVIKAYSREKQITAEFLEKNAALKTSGFWAQTISGFIPKVMNSLNNLSFTMIAAIGGLFALKGWISIGSIVVFAEYSRQFTRPLNDLANQFNTMLSAIAGAERVFDVLDEKEEREDEKNAVHQPIQTGSIEFRDVSFGYDKGQQTLKHLQFTVPAGQSIAFVGPTGAGKTTVTNLLARFYEPNDGKILIDGTDIKTLTRASLRKNMGFVLQDSFLFQGTIRENIRYGRLDASDQEVEAAAKTANAHSFIERLPKGYDTVLTQNGSGISQGQKQLISIARAVLADPVLLILDEATSNIDTVTEVNIQEALARLMEGRTSVIIAHRLNTIQRADQIVVLKNGEMIEKGSHDELIRQKGFYSDLYESQFEK

SEQ ID NO: 4688 - DNA, 1728 bp, Bacillus subtilis
  CDS (1)..(1728): transl_table=11
gtgctgcggcaatttttttcatattataaaccatataaaacgttgttctttctcgactttttctcagcgatcgcgggaggtttaatggagctgagttttcctttgatcgtcaattattttattgataccttgctgccgggcagggactggggactgatcatcgcgacctcaatcgggttatttgcggtgtacgcgctcagctcggctcttcagtatatcgtgacctactggggacacatgcttggtatcaatattgagactgatatgagaaagtcgctttttgaccatttgcaaaagctctcgttcaaattttacgacaacaacaagacgggaacgctgatgtcgaagctcacgaacgatttaatgtatatcggtgaagtcgcccatcacggaccggaagacttattcattgcggtcatgaccattctcggggcgttcggagtgatgctgtttattaactggcagcttgctttattaacgtttatcattatgccgatcgtcatttggctagcgctttatttcaacaaaaaaatgaccaaagcatttaccacgctgaacaaggatatcggagacttcagcgcgcgtgtagaaaataacatcggcggcatccggcttgtgcaggcgttcggaaatgaagcatttgaaaaagaacgcttcgccgtcaacaaccagcgttttcgtgtcacaaagctttcttcctacaaaatcatggcgaaaaacggttcaatcagctatatgctgacccggtttgtcacgctgtttgtccttttgtgcgggacgtggtttgtcattcgcggctccttatcgtacggggaatttgtggcgtttgtactcttgacgaatgtgctgttcaggcctattgacaaaattaatgccattatcgaaatgtatccgagggggatcgcgggtttcaaaagctatatggagctcatggagacagagccggatattcaggactcacctgattcgaaagatgtttccggcctgaagggcaatatccgctataaacatgtttcgtttggctatgatgaccatcacaatgtcctcaatgacatcaacctatccattcaagcgggggaaacggtggcgttcgtcggtccgtcaggtgctgggaaatcaacgctttgcagtctgcttccgcgtttttatgaagcatcggagggcgacattacgattgacggcatcagtataaaagacatgacgctttcttcgttgcgcgggcagattggcgtcgtgcagcaggacgttttcttattctcgggcacgcttagagaaaatatcgcctacggccgactaggcgcatcagaagaagacatttggcaagctgtgaagcaggcgcatctggaagagctcgtccataacatgcccgatgggttggatactatgattggcgaacgcggcgtgaagctttccggcgggcaaaaacagcgtctgtcaattgcaaggatgttcttgaaaaatccgtcgatcttgattctcgacgaagccacctcagcccttgatacagagacggaagcggcgatccaaaaggcgcttcaagagttgtctgaggggcgcacgacgcttgtcatcgcccacaggctggcaacaatcaaagacgcggacagaattgtagtcgtcacaaacaacggtattgaagaacaaggccgtcatcaagacctgatcgaagccggaggcctatacagcaggctgcatcaagcgcaattcgggcaaatggtgcatcgatag

SEQ ID NO: 4689 - protein, 575 aa, Bacillus subtilis
MLRQFFSYYKPYKTLFFLDFFSAIAGGLMELSFPLIVNYFIDTLLPGRDWGLIIATSIGLFAVYALSSALQYIVTYWGHMLGINIETDMRKSLFDHLQKLSFKFYDNNKTGTLMSKLTNDLMYIGEVAHHGPEDLFIAVMTILGAFGVMLFINWQLALLTFIIMPIVIWLALYFNKKMTKAFTTLNKDIGDFSARVENNIGGIRLVQAFGNEAFEKERFAVNNQRFRVTKLSSYKIMAKNGSISYMLTRFVTLFVLLCGTWFVIRGSLSYGEFVAFVLLTNVLFRPIDKINAIIEMYPRGIAGFKSYMELMETEPDIQDSPDSKDVSGLKGNIRYKHVSFGYDDHHNVLNDINLSIQAGETVAFVGPSGAGKSTLCSLLPRFYEASEGDITIDGISIKDMTLSSLRGQIGVVQQDVFLFSGTLRENIAYGRLGASEEDIWQAVKQAHLEELVHNMPDGLDTMIGERGVKLSGGQKQRLSIARMFLKNPSILILDEATSALDTETEAAIQKALQELSEGRTTLVIAHRLATIKDADRIVVVTNNGIEEQGRHQDLIEAGGLYSRLHQAQFGQMVHR

SEQ ID NO: 4690 - DNA, 3738 bp, Oryza sativa
  CDS (1)..(3738)
atgggaggcggcgacggcggcgccggcaaggcgaaggcgaggccggtgttctcgtcgttcatgacagtgttcatgcacgcggacgcggcggacgtggcgctgatggtgcttgggcttctgggcgccatgggcgacggcatctcgacgccggtgatgctgctcatcaccagccgcatcttcaacgacctcggcagtggcgccgacatcgtcaaggagttcagctccaaggtcaacgtgaacgccaggaacctcgtcttcttggccgccgcctcttgggtgatggcgttcctagaggggtattgctgggcgaggacggcggagcggcaggcatcgcggatgcgggcacggtaccttcgggcggtgctccggcaagacgtggagtacttcgacctgaagaaggggtcgacggcggaggtgatcaccagcgtgtccaacgacagcctcgtggtgcaggacgtgctgagcgagaaggtgcccaacttcgtcatgaacgccgccatgttcgccggcagctacgccgtcgggttcgcgctgctgtggcggctgacgctggtggcgctgccgtcggtggtgctgctcatcatcccggggttcatgtacggccgcatcctcgtcggcctcgcccgccggatcagggagcagtacacccgccccggcgccatcgccgagcaggccgtgtcgtcggcgcgcacggtgtactcgttcgtggcggagcggaccaccatggctcagttctcggcagcgctcgaggagtcggcgcggctcgggctcaagcaggggctcgccaagggcatcgccgtcggcagcaacggcatcaccttcgccatctgggccttcaacgtctggtacggcagccgcctcgtcatgtaccatggataccagggcggcaccgtcttcgccgtctccgccgccattgtcgtcggtggcctagcgctggggtcggggctgtccaacgtgaagtacttctcggaggcgagctcggcggcggagaggatcctggaggtgatccggcgggtgccgaagatcgactccgagagcgacaccggtgaggagctggccaacgtcaccggcgaggtggagttccggaacgtggagttctgctacccgtcgcggccagagagccccatcttcgtcagcttcaacctccgcgtgccggcggggcgcaccgtggcgctggtcggcggtagcgggtccggcaagtcgacggtgatcgcgctgctggagcggttctacgacccgtcggccggcgaggtgatggtcgacggcgtggacatccggaggctccggctaaagtggctgcgagcgcagatggggctggtgagccaggagccggcgctgttcgccaccagcatcagggagaacatcctgttcggaaaggaggaggccacggcggaggaggtggtcgccgccgccaaggcggccaacgcacacaacttcatctcccagctgcctcagggctacgacacacaggtgggcgagcgtggtgtccaaatgtctggggggcagaagcagagaattgctattgcgagagcaatcctgaaatcacccaagatcctcctccttgatgaagccactagtgcattggacactgagtcagagcgcgttgtacaggaggcccttgacctggcatctatgggccggactactattgtgattgcacatcgcctatccactatccgcaatgctgacataattgctgtcatgcagtccggtgaggttaaggagctgggaccccatgatgagctcattgccaatgataatggcctctattcatctcttgtgcgccttcaacagaccagagattcaaatgagattgatgagattggtgtaactggtagtacatccgctgtagggcagtccagcagccacagcatgagcaggaggttctctgcagctagcaggtcaagctcagcaaggtcattgggtgatgcaagagatgatgacaacactgagaagccaaagcttccagtgccatccttcagaaggctacttatgcttaatgcaccagagtggaagcaagcactaatggggagttttagcgcagttgtgtttggaggcatccagccagcatatgcatatgccatgggaagcatgatctcagtctacttcttgacagatcatgcggagatcaaggacaaaacaaggacctacgcactcatcttcgtaggtctagcagtgctctcatttttgataaatattggtcagcattacaactttggtgcaatgggggaatacctcaccaagagaatcagggagcagatgcttgcaaagatcctcaccttcgaaattgggtggtttgaccgtgacgagaactccagtggtgccatatgctcacagctagctaaggacgccaacgttgtgaggtctctcgtgggtgatcgaatggctctggtgatccagactatttcagcagtgcttattgcatgcaccatgggtctggtcattgcctggcgtttggcccttgttatgatagcagtgcagcctctgatcattgtttgcttttatgctcgccgtgtcttactcaagagcatgtccaagaaatcaatacatgcacaagctgaaagtagcaagctagctgctgaggcagtctccaatcttcgtacaattacagccttctcatcccaagagcgcatcttacgcctttttgaacaatcacaagatggaccacgcaaggaaagcatccggcaatcatggtttgcagggctcggactcggcacctccatgagccttatgacatgcacatgggcccttgacttttggtatggtggcaggcttatggctgagcaccacattagtgctaaggagctcttccaaaccttcatgattctagtaagcacaggtcgtgtgattgcagatgcaggaagcatgacaacagacctagctaagggtgcagatgcagttgcttcagtatttgctgttcttgaccgggaaacagaaattgatcctgacaaccctcagggatacaagccagagaagctcaaaggcgaggtggacatcagaggagtcgattttgcatacccatcaaggccagatgttataatcttcaaagggttcacattgagcatccaaccaggcaagtcaacagccctggttgggcaaagtggctctggcaagtcaaccatcattgggctcatagagaggttctacgacccaattagggggtcggtgaagatagatggaagggatatcaaagcatataatcttcgagccctgcggcggcacattggactggtcagccaagagccaacactatttgcaggtacaatcagagaaaacattgtgtatggcacagaaacggctagtgaggcggaaattgaggatgcagcaagatctgctaatgcacatgacttcatcagcaacctgaaggatggatatgacacgtggtgtggtgagagaggagttcagttatcaggagggcagaaacaacgcattgcaattgcccgtgccatcctgaagaacccagctatcctacttctggatgaggctacaagtgcgctagacagccagtctgagaaagtggtacaagaggcactggatcgggtgatgattggcagaacaagtgtggtggtcgcacacaggctcagcactatacaaaactgcgaccttatcactgtgctcgaaaaagggacagttgtggagaagggcacacacgcatccctcatggccaagggcctctctggaacatattttagcttggttaatttgcaacaaggaggcaatcagcaggtccagcactga

SEQ ID NO: 4691 - protein, 1245 aa, Oryza sativa
MGGGDGGAGKAKARPVFSSFMTVFMHADAADVALMVLGLLGAMGDGISTPVMLLITSRIFNDLGSGADIVKEFSSKVNVNARNLVFLAAASWVMAFLEGYCWARTAERQASRMRARYLRAVLRQDVEYFDLKKGSTAEVITSVSNDSLVVQDVLSEKVPNFVMNAAMFAGSYAVGFALLWRLTLVALPSVVLLIIPGFMYGRILVGLARRIREQYTRPGAIAEQAVSSARTVYSFVAERTTMAQFSAALEESARLGLKQGLAKGIAVGSNGITFAIWAFNVWYGSRLVMYHGYQGGTVFAVSAAIVVGGLALGSGLSNVKYFSEASSAAERILEVIRRVPKIDSESDTGEELANVTGEVEFRNVEFCYPSRPESPIFVSFNLRVPAGRTVALVGGSGSGKSTVIALLERFYDPSAGEVMVDGVDIRRLRLKWLRAQMGLVSQEPALFATSIRENILFGKEEATAEEVVAAAKAANAHNFISQLPQGYDTQVGERGVQMSGGQKQRIAIARAILKSPKILLLDEATSALDTESERVVQEALDLASMGRTTIVIAHRLSTIRNADIIAVMQSGEVKELGPHDELIANDNGLYSSLVRLQQTRDSNEIDEIGVTGSTSAVGQSSSHSMSRRFSAASRSSSARSLGDARDDDNTEKPKLPVPSFRRLLMLNAPEWKQALMGSFSAVVFGGIQPAYAYAMGSMISVYFLTDHAEIKDKTRTYALIFVGLAVLSFLINIGQHYNFGAMGEYLTKRIREQMLAKILTFEIGWFDRDENSSGAICSQLAKDANVVRSLVGDRMALVIQTISAVLIACTMGLVIAWRLALVMIAVQPLIIVCFYARRVLLKSMSKKSIHAQAESSKLAAEAVSNLRTITAFSSQERILRLFEQSQDGPRKESIRQSWFAGLGLGTSMSLMTCTWALDFWYGGRLMAEHHISAKELFQTFMILVSTGRVIADAGSMTTDLAKGADAVASVFAVLDRETEIDPDNPQGYKPEKLKGEVDIRGVDFAYPSRPDVIIFKGFTLSIQPGKSTALVGQSGSGKSTIIGLIERFYDPIRGSVKIDGRDIKAYNLRALRRHIGLVSQEPTLFAGTIRENIVYGTETASEAEIEDAARSANAHDFISNLKDGYDTWCGERGVQLSGGQKQRIAIARAILKNPAILLLDEATSALDSQSEKVVQEALDRVMIGRTSVVVAHRLSTIQNCDLITVLEKGTVVEKGTHASLMAKGLSGTYFSLVNLQQGGNQQVQH

SEQ ID NO: 4692 - DNA, 2367 bp, Oryza sativa
  CDS (1)..(2367)
atggttggtgagcatggcacacagctatctggtggacagaaacaaagaattgcaattgcaagagcaattttgaaggaccctaggatactacttcttgatgaagctacaagcgcccttgatgctgaatctgagcatgtagttcaggatgcactcaataatatcatggttaacaggaccaccataattgtagcccatcgcctgagcacagtgagaaatgctgatacaatatctgtgctacatcgtggacaacttgtggaacaaggacctcatgctgagttgataaaatattccaatggagcatactatcaacttttacagcttcaagaggtaaacgcgagaaggaatggaacttatgaacttgaccccaataggctatctgatgttgcaaacagactatctgatgttgcaaacagactatctgatgctgcgaacagactatctgatgctggaaattttgtaagtcgacatagcattagaaagctatcctttgagagatctatgagcagacattcgtcactgggtggaagcagaaggaattcacagacatatgcattgactgaagatgaaatcgaagggtgtgatgacacgaagtctggcaagaatgtacttaggcgcttactacaccttcataagcctgaaactgcaatccttctgttaggatgcattgccgcctccgccaatggagctatacttccagtgtttggcctgttgctttcaagtgccatcaacgcattctatgaaccaccacacaaactgcgaaaagattcagtgttctgggcagaaatatacgtgatcttgggtgttgtatccatctttatcataccagtgcaacacactttgttcaacatggcaggtgggaagcttatcgagcgtatacgtgccttatcatttagtcgggttgtttaccaggatattggatggtttgatgaccctctgaacagcagtggcgcaataggtgctaggctatccgcagatgccgcatccgtcaaaagcattgctggagatgttttatcattgatcgttcaaagtataagcactgctcttgtcggcattgtaatagctatgattgcaaactggaagctagcattcatagtcttgtgcttcgttccctgtgtatttgcgcagagttatgctcaatcaaggttaatgaggggatttggtgctgatgcaaaggaaatgtatgaacaagcgagcacaattgctagtgatgccatcagtaacattagaactgtcacttcattctgtgtaggagagaagataattgaaagctaccgaaataaatgcaaaggtcctgtgaagaaaggagtccgtcagggagctataagtggtgtgggttatggattctcatttgccttgctcttctgcttttatgctgtatcgttttatgtcggagcacgctttgtacacaatggaacagctgacgttggggaagtttttaaggtcttctttgctttaacaatgatggctgttggagtttcacaatcgagttctcttgctcgggattttagcaaagtgcaagatgcggcagcctccatttttaagattatagataggaaatccaagatagatgcaagctcagatgatggaatggctccagagaaaattgaggggaatatagagtttcagcatgtgagcttcaagtatccagctcgaactgacgtgcagatcttcacaaatttgtgcttgaggatcccatctggcaaggtacatgtggttctcatgactgttgcgcttgttggtgaaagcggaagcggtaaatcaacagtggtagccttgctagagaggttctatgaccctgactctggcgccatctttctagacggcatggaccttaagaccctcaagctcacctggctcaggcagcagatagggctagtgggccaagaaccggttctcttcaacggcaccatcagagcaaacatcgcctacggcaagcaggatcaggtgtccgaggaggagatcgtcgctgtcgccgaggccgccaacgcccaccgcttcatctcctcgctcccgcacgggtacgacaccagcgtcggcgagcgtggcgtgcagctctccggcgggcagaagcagcggatcgccatcgcgcgggcgatcctcaaggaccccaaggtgttgctcctggacgaggcgacgagcgcgctggactctgagtcggagcgcatcgtgcaggaggctctggacagggtgatggtcgggcggacaacggtgatcgtggcgcaccggctgtcgaccatcaccggcgccgacaagatcgccgtcatcaagaacggcgtcgttgccgaggaaggccggcacgggcggctgctgcgcttgcccggtggagcttatgcgtcccttgttgccttgcagtctagcagttcgtga

SEQ ID NO: 4693 - protein, 788 aa, Oryza sativa
MVGEHGTQLSGGQKQRIAIARAILKDPRILLLDEATSALDAESEHVVQDALNNIMVNRTTIIVAHRLSTVRNADTISVLHRGQLVEQGPHAELIKYSNGAYYQLLQLQEVNARRNGTYELDPNRLSDVANRLSDVANRLSDAANRLSDAGNFVSRHSIRKLSFERSMSRHSSLGGSRRNSQTYALTEDEIEGCDDTKSGKNVLRRLLHLHKPETAILLLGCIAASANGAILPVFGLLLSSAINAFYEPPHKLRKDSVFWAEIYVILGVVSIFIIPVQHTLFNMAGGKLIERIRALSFSRVVYQDIGWFDDPLNSSGAIGARLSADAASVKSIAGDVLSLIVQSISTALVGIVIAMIANWKLAFIVLCFVPCVFAQSYAQSRLMRGFGADAKEMYEQASTIASDAISNIRTVTSFCVGEKIIESYRNKCKGPVKKGVRQGAISGVGYGFSFALLFCFYAVSFYVGARFVHNGTADVGEVFKVFFALTMMAVGVSQSSSLARDFSKVQDAAASIFKIIDRKSKIDASSDDGMAPEKIEGNIEFQHVSFKYPARTDVQIFTNLCLRIPSGKVHVVLMTVALVGESGSGKSTVVALLERFYDPDSGAIFLDGMDLKTLKLTWLRQQIGLVGQEPVLFNGTIRANIAYGKQDQVSEEEIVAVAEAANAHRFISSLPHGYDTSVGERGVQLSGGQKQRIAIARAILKDPKVLLLDEATSALDSESERIVQEALDRVMVGRTTVIVAHRLSTITGADKIAVIKNGVVAEEGRHGRLLRLPGGAYASLVALQSSSS

SEQ ID NO: 4694 - DNA, 3909 bp, Oryza sativa
  CDS (1)..(3909)
atggccgcgcgaggcagcgagggaggggaggaggcggaggtggaggggaaggcggggctgcaccggctgttcaggtacgcggacggggtggacgcgctgctcatggcggccggcgcggcaggggcggccgcgagcggcgctgcgcagccgctcatgaacctcgtcttcggcgaggtcgtcgacgccttcggctccggctcccgcgacgacgtcctccaccgcgtctccaaggcaccagcagaagtttggtttctacgacgcgcggccacgtcgcggccgattgatgcgtggaagtgctggaattcggccttagctaatctgacagtgttgtttcaggtgtgcctgaagttcttctatttggctattggatcatggtttgcttgcttcctccaggttgcatgttggatgattactggtgaaagacaagctgcccgcatacgagggctatatcttgaagctgtattgaggcaagatattgcattttttgaaaaggagatgacaactggacaagtagttgagaggatgtctggagatacaatactcatccaggatgcaattggtgaaaaggttgggaagtttatacaactcactgctacatttgtggggggtttcgtagtttctttcgctaaaggatggcttttatcatgtgtcatgctctcaagtattcctcctataataatcgctggagcaactatgtcatggactatatcaaagctgtcaactcatggtcaatccaagtataatgaagcagggaatgttgttgaacagacgattggagctatcagaacggttgcttcattcaatggtgagaaccgagccattgcactatacaacaaatacattcacagtgcatatgtctctgctgttcaagaaagcactgcaactggcctgggctttggttttattatgtttatgctgttttgcacgtatggtctagcagcatggtatggggcgaaattgattatcgataaaggatatgaaggagggcaagttgtcactgtctggatggcattcatgactggtgcaatgtcactgggtgaggcaacgccgtgtatgtctgcttttgcttctgggcaggctgctggttatagaatgatgcaaacaatcgaacgaatgccaacaattaattctagtggaacagatggtgccgtattagagaacatcaaaggtgacatagagctgaggaatgtgtacttcagctatccatccaggcctgaccagttgatatttgatgggttttcgttacatgtcttgaatggcataactatggctatagtaggggagagtggcagcggaaagtcaacggtgattaatcttgtcgagagattctatgatccacaggctggtgaagttttgattgatggtgttaacataaagactctgaggcttaggtggattagggaaaagatcggccttgtcagtcaggaaccactgctgtttgccactagtatccgagagaacattgtctacggaagagaagatgcaacgactgaggagataatggctgcaacagagcttgctaatgcagcgaagttcattgagaatctacctaatggcctggacacaatggttggtgaacatggagctcagctatctggagggcaaaagcaaagaattgctatcgcaagagcgatccttaaaaatcccaaaatcttgctgcttgatgaagcaactagtgcactagacatggaatctgagcgagtggttcaagaggcccttaatagaattatgcaagacaagaccacgattgtagtagctcatcggctgagcaccataaaagatgctgacattatatcagtcgtgcagcatggaagagtagttgaacaaggcacgcatactgaactactcaaggacccaagtggtgcatattctcaacttatacaactgcagggtgcaactgaagaactgcataaatctggtgtcggttatcaaaggtctatttcaactgtccgaagtgtcatgtccattagcaaatctagaggccgcaatgcatcatttaagagatcattaagtcgaggaacttcatttgggagtactagtgtgcatttaaccacagcagctggtatgatagtccctgagagcatgcatactgaggtaccatccaaggtattagatgacaatgaagagcacaagaaggtgcccctctgtcgacttatatctcttaacaaaccagagataccagttcttctattaggtacagctgctgcagttgtagcaggtgttctcttcccaatgttaggtttgctgatctccagttccataaaatcgttctatgagccaccacatcaacttaagaaagatgcacggttctggacattgatgtatgtagcagctggaattgtttcccttgtttccttgccaatggaaaatttcctatttggagtggctggtgggaaattggtggagcgcattcgttctttatcttttaaaagaattgttcatcaagaagtcagttggtttgataatccctcaaatgcaagtggaacaattggtgcgaggctatctgttgatgcttcaaatattcggcgtcttgtaggagactcgttagcgttgattgttcgaagctctgttacaattattgctggatttatcattgcaatggttgcaaactggaggcttgcccttgttgccacggttgtgcttcctttgggaggtctccaggggttcttccagataaagtttttggagggattcagtgcagatgctaaggtaaagtatgaagaagcaactcaagtagcacatgatgctgtcagtagcatacggactgtcgcttcgttctgtgcggagaataggataatgaaggcttactacaaaaaatgtgaagctccggtgcgacaggggatacgtcaagggattgtcagtggcttgggtttcggcatatcattctttgtgctctattctacatatgccctttgtttctatgtaggagccaagttcatgcttgatggcaaggccacattcactgaaatattcagggtgttctttgctttgctcatggcaaccataggagtttcccagacaagtgcgatgggttcagattctgccaaggccaaggcgtcggcatcctcaatatttgccatgattgaccgtgaatcgaagatcgactcgagcagtgatgacggcatggtcttagctaatgtggctggtgagctcgaactccaccacgtctgtttctcatacccatcacgcccagacatacaaatattcagaaatctgtcactgagaataccatcaggaaagatggttgcccttgtcggagagagcggctgtggcaaatcaaccgtgatagcactactggaaagattttacgaccctgattcaggaacagtgacactagacggcgtcgacatcaagaacctcaaagtcgggtttctgcggcagcagatggggctggtgagccaagagcccgtcctgttcaacgacacggtccgcgccaacatcgcctacggcaaggaaggcgacgccacggaggaggagatcgtcgccgccgcgagggccgcgaacgcgcaccagttcatctcggcgctgcccgggggctacgacacctgcgccggcgagaggggcgtccagctctccggcgggcagaagcagcgcgtggccatcgcgagggccatcctcaaggaccccaggatcctcctcctcgacgaggcgacgagcgcgctggacgccgagtcggagcgcgccgtccaggcggcgctggagtcggtgatggtcggccggacgacggtcgtggtggctcaccggctgtcgacgatcaggggcgccgacgtgatcgccgtcctcagggacggcgaggtcgtggccacggggaggcacgtggagctgatggcgaagaaggatggcgtgtacgcttcgttggtggagctccgcatgagctccgaacgcgccggtgactccaagccctcgtga

SEQ ID NO: 4695 - protein, 1302 aa, Oryza sativa
MAARGSEGGEEAEVEGKAGLHRLFRYADGVDALLMAAGAAGAAASGAAQPLMNLVFGEVVDAFGSGSRDDVLHRVSKAPAEVWFLRRAATSRPIDAWKCWNSALANLTVLFQVCLKFFYLAIGSWFACFLQVACWMITGERQAARIRGLYLEAVLRQDIAFFEKEMTTGQVVERMSGDTILIQDAIGEKVGKFIQLTATFVGGFVVSFAKGWLLSCVMLSSIPPIIIAGATMSWTISKLSTHGQSKYNEAGNVVEQTIGAIRTVASFNGENRAIALYNKYIHSAYVSAVQESTATGLGFGFIMFMLFCTYGLAAWYGAKLIIDKGYEGGQVVTVWMAFMTGAMSLGEATPCMSAFASGQAAGYRMMQTIERMPTINSSGTDGAVLENIKGDIELRNVYFSYPSRPDQLIFDGFSLHVLNGITMAIVGESGSGKSTVINLVERFYDPQAGEVLIDGVNIKTLRLRWIREKIGLVSQEPLLFATSIRENIVYGREDATTEEIMAATELANAAKFIENLPNGLDTMVGEHGAQLSGGQKQRIAIARAILKNPKILLLDEATSALDMESERVVQEALNRIMQDKTTIVVAHRLSTIKDADIISVVQHGRVVEQGTHTELLKDPSGAYSQLIQLQGATEELHKSGVGYQRSISTVRSVMSISKSRGRNASFKRSLSRGTSFGSTSVHLTTAAGMIVPESMHTEVPSKVLDDNEEHKKVPLCRLISLNKPEIPVLLLGTAAAVVAGVLFPMLGLLISSSIKSFYEPPHQLKKDARFWTLMYVAAGIVSLVSLPMENFLFGVAGGKLVERIRSLSFKRIVHQEVSWFDNPSNASGTIGARLSVDASNIRRLVGDSLALIVRSSVTIIAGFIIAMVANWRLALVATVVLPLGGLQGFFQIKFLEGFSADAKVKYEEATQVAHDAVSSIRTVASFCAENRIMKAYYKKCEAPVRQGIRQGIVSGLGFGISFFVLYSTYALCFYVGAKFMLDGKATFTEIFRVFFALLMATIGVSQTSAMGSDSAKAKASASSIFAMIDRESKIDSSSDDGMVLANVAGELELHHVCFSYPSRPDIQIFRNLSLRIPSGKMVALVGESGCGKSTVIALLERFYDPDSGTVTLDGVDIKNLKVGFLRQQMGLVSQEPVLFNDTVRANIAYGKEGDATEEEIVAAARAANAHQFISALPGGYDTCAGERGVQLSGGQKQRVAIARAILKDPRILLLDEATSALDAESERAVQAALESVMVGRTTVVVAHRLSTIRGADVIAVLRDGEVVATGRHVELMAKKDGVYASLVELRMSSERAGDSKPS

SEQ ID NO: 4696 - DNA, 1902 bp, Glycine max
  CDS (1)..(1902)
atgaacggcttaagaagtgaaagagcccctctcttggaggctgagcgtgctggaagaggaaagagggatggtgcctcggaaggtcaagcctcagaccttgaacatggtgatgcagtgccggcggaaaatgtgggattctgtagagtgctttcacttgcaaaacctgaggctggaaaattaatgatcggtacagtggctctgttgattgcagccacatcaagtatattagttcaaaaatttggtgggaagataattgacattgtctcaagggaaatgaaaactccagaggagaaagatgaagctttgaatgctgttaagaacaccatactagaaatctttctgatcgttgtcttcggttcaatttgcactgcacttcgagcttggcttttttatactgctagtgaaagggttgttgcacgactgagaaagaatttgttcagtcatcttgtaaaccaggagatagccttctttgatgttactcgaactggggagcttttaagtaggctatctgaagatacacagatcataaagaatgctgcaactaccaatctttctgaggccctgagaaacttttcaactgcattaattggtctgagcttcatgtttgcaacatcatggaagttaacattgttggctttggctgttgtacctgttctttctgttgctgttcgcaagtttggccgttacctgcgtgaactttctcataaaactcaagctgcagctgcagttgcttcatcaatagctgaggaatcctttggtgcaataagaacagtaagatcatttgcccaagaagattatgaagtaacacgctactcagagaaagttaatgaaacacttaatcttggtcttaaacaagctaaaattgttggactcttttctggaggccttaatgctgcatctacactttcagtcattatagttgatatatatggagctaatttgacaataaagggttacatgtcctcgggtgatcttacatctttcattctttatagtctctcagtgggttcttctatatccggtctgtcaggattgtatacagtagttatgaaagctgcaggtgctagcagaagggtatttcaacttttggatcgtacctcatccatgcctaagtcaggagataaatgtccacttggtgatcaagatggggaagtagaactagatgatgtgtggtttgcctatccatcacgccctagtcatccggtgctcaagggcattacattgaagctgcatccaggatcaaaggttgctcttgtcggtccaagtggtggtggaaagagtacaattgcaaacttaattgaaagattttatgacccaaccaaggggaagattctactgaatggggttcctttggtagaaatatcacacaagcatttacacagaaagatcagtatagtgagtcaggagcctacactcttcaactgttccatagaggagaacatagcttatggatttgatggcaaagtgaacgatgttgatatagaaaatgctgctaaaatggccaatgcacatgaatttatatcaaaattcccagaaaaataccagacctttgttggagagcgtggggtaaggctttcaggagggcagaaacagagaatagcaattgctagagccctgcttatggacccaaaaattctcctcttggatgaagccaccagtgccctagatgctgaaagcgaatacctagtgcaggatgccatggagtctctcatgaaaggaagaacagttctagtcattgctcacaggttatccacagttaaaactgctgatactgttgcagttatatctgatggccaagtagttgagagaggcaaccatgaagagcttctcagcaagaacggtgtctatactgcattggtcaagagacaactgcaaacaacaaaagccgaaatctcggtttag

SEQ ID NO: 4697 - protein, 633 aa, Glycine max
MNGLRSERAPLLEAERAGRGKRDGASEGQASDLEHGDAVPAENVGFCRVLSLAKPEAGKLMIGTVALLIAATSSILVQKFGGKIIDIVSREMKTPEEKDEALNAVKNTILEIFLIVVFGSICTALRAWLFYTASERVVARLRKNLFSHLVNQEIAFFDVTRTGELLSRLSEDTQIIKNAATTNLSEALRNFSTALIGLSFMFATSWKLTLLALAVVPVLSVAVRKFGRYLRELSHKTQAAAAVASSIAEESFGAIRTVRSFAQEDYEVTRYSEKVNETLNLGLKQAKIVGLFSGGLNAASTLSVIIVDIYGANLTIKGYMSSGDLTSFILYSLSVGSSISGLSGLYTVVMKAAGASRRVFQLLDRTSSMPKSGDKCPLGDQDGEVELDDVWFAYPSRPSHPVLKGITLKLHPGSKVALVGPSGGGKSTIANLIERFYDPTKGKILLNGVPLVEISHKHLHRKISIVSQEPTLFNCSIEENIAYGFDGKVNDVDIENAAKMANAHEFISKFPEKYQTFVGERGVRLSGGQKQRIAIARALLMDPKILLLDEATSALDAESEYLVQDAMESLMKGRTVLVIAHRLSTVKTADTVAVISDGQVVERGNHEELLSKNGVYTALVKRQLQTTKAEISV

SEQ ID NO: 4698 - DNA, 3867 bp, Glycine max
  CDS (1)..(3867)
atggcacctgtggcttccaccaccgggaaggagatggagacggtggaggggaattgttctaatggcgagaaggaactatggaacaaggtgttcaagaggtcgagaattttgaggcatagaaatcccacctgggatatgggaagcaaagatggatttttccgttatgcagatggctttgacaaattgctattactctttgggactttgggttgcattggaggtggcctacaaacccctatgacaatgcttgttcttggcagtttgatagatgattatgctggtggatctggacatgctgtgtccaaccatgttattgacaagtacgctctaaggctgctgggtgttgctattggggttgctctatcctcctttatagaaggggtatgttggacaagaacagcagaaagacaaacttcccgcatgagaactgaatatcttaaatcagtcctaaggcaagaagttggtttcttcgacaagcaaactgactcttcctcaacttttcaagttattgccaccataacttctgatgctcaaacaatacaagataccatggctgataaggtgcccaattgtcttggtcacctctcagcatttttctctagctttgtagtggcactcttcctttcatggagacttgcactagctgcttttccattttcaatcataatgatcatgccagctatcatatttgggaagaccatgaaagagctgggaaataaaatgaaggatgcatatggagttgctggtagcatagctgaacaaacaatctcatcaattcgaactgtttattcatatgtaggtgagaagcagacactagaagcgttcaactcaggtcttcagaaaagtatggagattggcataaaactaggtcaaaccaagggagtgattattggtagctttgggttgctatatgctacttgggcattccaatcttgggttggtagtgttctggtcaggacaaaaggagaaagtggtggccctgtgttttgtgctgaaatatgcatcatttggggaggactgtctctgatgagtgcactcccaaatcttggtttcatattagaggcaacaacagctactacccgaatttttgagatgattgaccgagtgccaaccataaattcttataaagaaaaaggaaagctcttaacacatacaagaggagagatcacatttaacgaggttgagtttagttacccatcaaggccagatgcaccggttctccaaggactcaatctgaaagtacaggcaggtaaaacagtaggcctagttggagggagtggttctggcaaatctactatcatctctttgcttgaaagattttatgatcctgtatatggtgagatattgcttgatggatatgatatacagacactccacattaagtggttaaggtcccagatgggactggtaaatcaggaaccaattctctttgcaacatccataagggagaacattctatttggcaaggaaggagcttcaatggaagctgttataagcgcagcaaaggcagcaaatgcacatgatttcattgttaaacttcctaatggatatgaaactcaagtaggacaattcggagctcaattgtctggagggcaaaaacaaaggattgccattgcaagggctttaataagagagccaaaaattctcctactagatgaagccacaagtgcattggattcacaatccgaaagactagtgcaagatgcccttgataaggcttccagaggcagaacaacaatcatcatagcgcatcggctatccacaattcgtaaagctgattcaatagtagttattcaatctggaagagtggttgaatctggttcccatgatgaactactccaactgaacaatgggcaaggagggacttacagcaaaatgctacaactgcaacaggcaataagtcaagacgaaaatgcattgcatcaaataaacaagagccctttagctatggtaaatcaaacaagtccaatttttagcaggcaaagtagcccaattcatcatgcatttagctcaacgcaaccgtttagtcccatatattcaatcagtattccagggtccagctttgatgactacagcagcgaaaactgggagaaatcttcaaatgcaagcttctctcaatggcgtttacttaaaatgaatgccccagagtggaaacatgcattgcttgggtgtttaggggccattggctctggaatatgtcagccaatttactcctattgcttgggaattgttgcatctgtctactttataaaggacaactctctcatcaaatcagaaatcaggttgtactcgtccatcttctgctgcatagctgttgtcaacttcctttcaggcctcattcaacattacaatttcaccattatggcagaacgcttgctaaaaagggtgcgagaaaacttgctagagaaggtgctgacttttgagatgggatggtttgaccaagaggataacagcagtgcggcaatttgtgctcgtttggcaactgaagccaacttggttagatcccttgttgcagaacgaatgtcattgttagttaacgtttctgttatggctttcttggcttttgtactaagtttaattgtcacatggagggtggctcttgttatgaccgcaatgcagccgttgatcattgtatgcttctactcaaaaaacattctcatgaaaagtatggcaggcaaagcaagaaaggctcaaagagagggtagtcaattagcaatggaagctactaccaatcataggactattgctgcattctcatctgagaaaaggattttaaatttgttcagaatggcgatggaaggccccaagaaagaaagcatcaagcaatcatggatttcaggttccatattgtcagcctcatattttgtaacaacagcatctataactttgactttttggtatggaggccggttattgaatcaagggctggtggaatcaaaacctcttttgcaagctttcctcattttgatgggcactggtagacaaattgcagagacagcaagcacaacttctgacatagctaaaagtggaagagccattagttcagtatttgcgatactggataggaaaagtgagattgaaccagaagatcctagacatagaaagttcaaaaatactatgaagggccatataaaactgagagatgtctttttctcataccccgcaaggccagatcaaatgattctcaagggcctcagtcttgatattgaagctggcaaaacagttgcattagtgggacaaagtggctcgggaaaatccaccatcattggcttaattgaaagattttatgaccccatgaagggatctatatccatagacaattgtgacatcagggaatttaacttgagaagtttgagatcacatattgccttggtgagtcaggagccaaccctttttgcaggaactatacgtgacaatattgtgtatgggaaaaaggatgcatcagaagatgaaataagaaaggcagcacgtctttcaaatgctcatgagtttataagttcaatgaaagatggttatgacacttactgtggagaaagaggagtgcagctctcaggaggacagaagcagaggatagcaattgctcgagcagtgcttaaggacccttcagtccttctgttagatgaagcaacaagtgctctagacagtgtatcagagaatcgggttcaggaggcacttgagaaaatgatggttggaagaacgtgtatagttatagctcaccgtttgtcaacaatacaaagtgtagattccatagctgtgataaaaaatgggaaggtggtggaacaagggtcacactcagagttattgagcatgggatcaaatgaagcttattactccttgattaggctacaacatggccactcaacttga

SEQ ID NO: 4699 - protein, 1288 aa, Glycine max
MAPVASTTGKEMETVEGNCSNGEKELWNKVFKRSRILRHRNPTWDMGSKDGFFRYADGFDKLLLLFGTLGCIGGGLQTPMTMLVLGSLIDDYAGGSGHAVSNHVIDKYALRLLGVAIGVALSSFIEGVCWTRTAERQTSRMRTEYLKSVLRQEVGFFDKQTDSSSTFQVIATITSDAQTIQDTMADKVPNCLGHLSAFFSSFVVALFLSWRLALAAFPFSIIMIMPAIIFGKTMKELGNKMKDAYGVAGSIAEQTISSIRTVYSYVGEKQTLEAFNSGLQKSMEIGIKLGQTKGVIIGSFGLLYATWAFQSWVGSVLVRTKGESGGPVFCAEICIIWGGLSLMSALPNLGFILEATTATTRIFEMIDRVPTINSYKEKGKLLTHTRGEITFNEVEFSYPSRPDAPVLQGLNLKVQAGKTVGLVGGSGSGKSTIISLLERFYDPVYGEILLDGYDIQTLHIKWLRSQMGLVNQEPILFATSIRENILFGKEGASMEAVISAAKAANAHDFIVKLPNGYETQVGQFGAQLSGGQKQRIAIARALIREPKILLLDEATSALDSQSERLVQDALDKASRGRTTIIIAHRLSTIRKADSIVVIQSGRVVESGSHDELLQLNNGQGGTYSKMLQLQQAISQDENALHQINKSPLAMVNQTSPIFSRQSSPIHHAFSSTQPFSPIYSISIPGSSFDDYSSENWEKSSNASFSQWRLLKMNAPEWKHALLGCLGAIGSGICQPIYSYCLGIVASVYFIKDNSLIKSEIRLYSSIFCCIAVVNFLSGLIQHYNFTIMAERLLKRVRENLLEKVLTFEMGWFDQEDNSSAAICARLATEANLVRSLVAERMSLLVNVSVMAFLAFVLSLIVTWRVALVMTAMQPLIIVCFYSKNILMKSMAGKARKAQREGSQLAMEATTNHRTIAAFSSEKRILNLFRMAMEGPKKESIKQSWISGSILSASYFVTTASITLTFWYGGRLLNQGLVESKPLLQAFLILMGTGRQIAETASTTSDIAKSGRAISSVFAILDRKSEIEPEDPRHRKFKNTMKGHIKLRDVFFSYPARPDQMILKGLSLDIEAGKTVALVGQSGSGKSTIIGLIERFYDPMKGSISIDNCDIREFNLRSLRSHIALVSQEPTLFAGTIRDNIVYGKKDASEDEIRKAARLSNAHEFISSMKDGYDTYCGERGVQLSGGQKQRIAIARAVLKDPSVLLLDEATSALDSVSENRVQEALEKMMVGRTCIVIAHRLSTIQSVDSIAVIKNGKVVEQGSHSELLSMGSNEAYYSLIRLQHGHST

SEQ ID NO: 4700 - DNA, 4140 bp, Zea mays
  CDS (1)..(4140)
atgtctagcagcgacccggaggagatcagggcgcgcgtcgtcgttctcggttcgccccatgccgacggcggcgacgagtgggcccggcccgagctcgaggccttccatctgccgtctcccgcccaccagcctcctggcttcctagccgggcaaccggaagcagcagagcaacccacgctccctgctcctgctggccgcagcagcagcagcagcaacacgcctactacatctgccggtggcggcgctgctcctcctcctccttcttcgcctccccctccgccggcttctctggagaccgagcagccgcccaatgccaggccagcctccgccggcgccaatgacagcaagaagcccaccccgcccgccgccctgcgcgacctcttccgcttcgccgacggcctcgactgcgcgctcatgctcatcggcaccctcggcgcgctcgtccacgggtgctcgctccccgtcttcctccgcttcttcgccgacctcgtcgactccttcggctcccacgccgacgacccggacaccatggtccgcctcgtcgtcaagtacgccttctacttcctcgtcgtcggagcggcaatctgggcatcctcgtgggcagagatctcttgctggatgtggaccggcgagcggcagtcgacgcggatgcggatccggtacctggacgcggcgctgcggcaggacgtgtccttcttcgacaccgacgtgcgggcctcggacgtgatctacgccatcaacgcggacgccgtggtggtgcaggacgccatcagcgagaagctgggcaacctcatccactacatggccaccttcgtggccggcttcgtcgtggggttcacggccgcgtggcagctggcgctggtcacgctggccgtggtgccgctcatcgccgtcatcggcgggctgagcgccgccgcgctcgccaagctctcgtcccgcagccaggacgcgctctcgggcgccagcggcatcgcggagcaggcgctcgcgcagatacggatcgtgcaggcgttcgttggcgaggagcgcgagatgcgggcctactcggcggcgctggccgtggcgcagaggatcggctaccgcagcggcttcgccaaggggctcggcctcggcggcacctacttcaccgtcttctgctgctacgggctcctgctctggtacggcggccacctcgtgcgcgcccagcacaccaacggcgggctcgccatcgccaccatgttctccgtcatgatcggcggactggccctcgggcagtcggcgccgagcatggccgcgttcgccaaggcgcgtgtggcggctgccaagatcttccgcatcatcgaccacaggccgggcatctcctcgcgcgacggcgcggagccagagtcggtgacggggcgggtggagatgcggggcgtggacttcgcgtacccgtcgcggccggacgtccccatcctgcgcggcttctcgctgagcgtgcccgccgggaagaccatcgcgctggtgggcagctccggctccgggaagagcacggtggtgtcgctcatcgagagattctacgaccccagcgcagggcaaatcctgctggacgggcacgacctcaggtcgctggagctgcggtggctgcggcggcagatcgggctggtgagccaggagccggcgctgttcgcgacgagcatcagggagaacctgctgctggggcgggacagccagagcgcgacgctggcggagatggaggaggcggccagggtggccaacgcccactccttcatcatcaaactccccgacggctacgacacgcaggttggggagcgcggcctgcagctctccggtgggcagaagcagcgcatcgccatcgcccgcgccatgctcaagaaccccgccatcctgctgctggacgaggccaccagcgcgctggactccgagtctgagaagctcgtgcaggaggcgctggaccgcttcatgatcgggcgcaccaccctggtgatcgcgcacaggctgtccaccatccgcaaggccgacgtggtggccgtgctgcagggcggcgccgtctccgagatgggcgcgcacgacgagctgatggccaagggcgagaacggcacctacgccaagctcatccgcatgcaggagcaggcgcacgaggcggcgctcgtcaacgcccgccgcagcagcgccaggccctccagcgcccgcaactccgtcagctcgcccatcatgacgcgcaactcctcctacggccgctccccctactcccgccgcctctccgacttctccacctccgacttcaccctctccatccacgacccgcaccaccaccaccggaccatggcggacaagcagccggcgttccgcgccggcgccagctccttcctgcgcctcgccaggatgaactcgcccgagtgggcctacgcgctcgccggctccatcggctccatggtctgcggctccttcagcgccatcttcgcctacatcctcagcgccgtgctcagcgtctactacgcgccggacccgcggtacatgaagcgcgagatcgcaaaatactgctacctgctcatcggcatgtcctccgcggcgctgctgttcaacacggtgcagcacgtgttctgggacacggtgggcgagaacctgaccaagcgggtgcgcgagaagatgttcgccgccgtgctccgcaacgagatcgcctggttcgacgcggacgagaacgccagcgcgcgcgtggccgccaggctagcgctggacgcccagaacgtgcgctccgccatcggggaccgcatctccgtcatcgtccagaactcggcgctgatgctggtggcctgcaccgcggggttcgtcctccagtggcgcctcgcgctcgtgctcctcgccgtgttcccgctcgtcgtgggcgccaccgtgctgcagaagatgttcatgaagggcttctcgggggacctggaggccgcgcacgccagggccacgcagatcgcgggcgaggccgtggccaacctgcgcaccgtggccgcgttcaacgcggagcgcaagatcacggggctgttcgaggccaacctgcgcggcccgctccggcgctgcttctggaaggggcagatcgccggcagcggctacggcgtggcgcagttcctgctgtacgcgtcctacgcgctggggctgtggtacgcggcgtggctggtgaagcacggcgtgtccgacttctcgcgcaccatccgcgtgttcatggtgctgatggtgtccgcgaacggcgccgccgagacgctgacgctggcgccggacttcatcaagggcgggcgcgcgatgcggtcggtgttcgagacgatcgaccgcaagacggaggtggagcccgacgacgtggacgcggcgccggtgccggagcggccgaggggcgaggtggagctgaagcacgtggacttctcgtacccgtcgcggccggacatccaggtgttccgcgacctgagcctccgtgcgcgcgccgggaagacgctggcgctggtggggccgagcgggtgcggcaagagctcggtgctggctctggtgcagcggttctacgagcccacgtccgggcgcgtgctcctggacggcaaggacgtgcgcaagtacaacctgcgggcgctgcggcgcgtggtggcggtggtaccgcaggagccgttcctgttcgcggcgagcatccacgagaacatcgcgtacgggcgcgagggcgcgacggaggcggaggtggtggaggcggcggcgcaggcgaacgcgcaccggttcatcgcggcgctgccggaggggtaccggacgcaggtgggcgagcgcggggtgcagctgtcgggggggcagcggcagcggatcgcgatcgcgcgcgcgctggtgaagcaggcggccatcgtgctgctggacgaggcgaccagcgcgctggacgccgagtcggagcggtgcgtgcaggaggcgctggagcgcgcggggtccgggcgcaccaccatcgtggtggcgcaccggctggccacggtgcgcggcgcgcacaccatcgcggtcatcgacgacggcaaggtggcggagcaggggtcgcactcgcacctgctcaagcaccatcccgacgggtgctacgcgcggatgctgcagctgcagcggctgacgggcgcggcggccgggcccgggccgtcgtcctcgtgcaacggggccgcgtag

SEQ ID NO: 4701 - protein, 1379 aa, Zea mays
MSSSDPEEIRARVVVLGSPHADGGDEWARPELEAFHLPSPAHQPPGFLAGQPEAAEQPTLPAPAGRSSSSSNTPTTSAGGGAAPPPPSSPPPPPASLETEQPPNARPASAGANDSKKPTPPAALRDLFRFADGLDCALMLIGTLGALVHGCSLPVFLRFFADLVDSFGSHADDPDTMVRLVVKYAFYFLVVGAAIWASSWAEISCWMWTGERQSTRMRIRYLDAALRQDVSFFDTDVRASDVIYAINADAVVVQDAISEKLGNLIHYMATFVAGFVVGFTAAWQLALVTLAVVPLIAVIGGLSAAALAKLSSRSQDALSGASGIAEQALAQIRIVQAFVGEEREMRAYSAALAVAQRIGYRSGFAKGLGLGGTYFTVFCCYGLLLWYGGHLVRAQHTNGGLAIATMFSVMIGGLALGQSAPSMAAFAKARVAAAKIFRIIDHRPGISSRDGAEPESVTGRVEMRGVDFAYPSRPDVPILRGFSLSVPAGKTIALVGSSGSGKSTVVSLIERFYDPSAGQILLDGHDLRSLELRWLRRQIGLVSQEPALFATSIRENLLLGRDSQSATLAEMEEAARVANAHSFIIKLPDGYDTQVGERGLQLSGGQKQRIAIARAMLKNPAILLLDEATSALDSESEKLVQEALDRFMIGRTTLVIAHRLSTIRKADVVAVLQGGAVSEMGAHDELMAKGENGTYAKLIRMQEQAHEAALVNARRSSARPSSARNSVSSPIMTRNSSYGRSPYSRRLSDFSTSDFTLSIHDPHHHHRTMADKQPAFRAGASSFLRLARMNSPEWAYALAGSIGSMVCGSFSAIFAYILSAVLSVYYAPDPRYMKREIAKYCYLLIGMSSAALLFNTVQHVFWDTVGENLTKRVREKMFAAVLRNEIAWFDADENASARVAARLALDAQNVRSAIGDRISVIVQNSALMLVACTAGFVLQWRLALVLLAVFPLVVGATVLQKMFMKGFSGDLEAAHARATQIAGEAVANLRTVAAFNAERKITGLFEANLRGPLRRCFWKGQIAGSGYGVAQFLLYASYALGLWYAAWLVKHGVSDFSRTIRVFMVLMVSANGAAETLTLAPDFIKGGRAMRSVFETIDRKTEVEPDDVDAAPVPERPRGEVELKHVDFSYPSRPDIQVFRDLSLRARAGKTLALVGPSGCGKSSVLALVQRFYEPTSGRVLLDGKDVRKYNLRALRRVVAVVPQEPFLFAASIHENIAYGREGATEAEVVEAAAQANAHRFIAALPEGYRTQVGERGVQLSGGQRQRIAIARALVKQAAIVLLDEATSALDAESERCVQEALERAGSGRTTIVVAHRLATVRGAHTIAVIDDGKVAEQGSHSHLLKHHPDGCYARMLQLQRLTGAAAGPGPSSSCNGAA

SEQ ID NO: 4702 - DNA, 4329 bp, Zea mays
  CDS (1)..(4329)
atgtggtcctgttcatcgcgtacgtctgcacgctggctgccgcctgcgtcaggcggcggcagcgctctgcagatgcgagcagcgggaggagcggcgctcctagtaggtgggtgctgctcgtcgtctccacgtgctgcgtggcagctgccgtggcctactgtgtcacggctctccaagacgcctacgacatcaagacggcggttccttacttcgtcaggggcctggtctggatcgcgctggcggcctcgctgcacgcccagccgacgaggccggcgaggggtcgtggccgtgctctggtgggtgctcttgtcgctgctggccaccgcgtacaattcggagatccttgccggggggcacagcctggacctcgcggagatgattgcgtggccggtgagcctcctcctgctgctctgcgccctcggctccctgctgccgcggggcgacgggcaccactaccgggacgcctccaacggcagcagcggcttgtcggagcctctgatcggcaatgacagaaccgtgccaacctcggagttgtaccgcgctggcctgttcggccagcttgccttctcgtggttgaaccctctgctccgtgtcggccgctccaaggcgctggacctcggcgacatcccgctcatcgccaccgacgacaccgcgcaccacacgtcgcagcagttcacggaggcctggagccgccacgtgagcgacaaagccaggagccgccggggcgtgggcagcaacagcctcgccctcgtcttgggcaagtgcttcctcagcgagatcctgctcaccggcttctacgccttcctgagaatgctgtccatagcagttgcccccctgctgctcttcgggttcgtgtggtacagcaaccaggaggaacgagacctccgggtcggcctgtcccttgtcggctgcctgctgctcgccaagctcgtggagtcgctgtcgcagcggcattggttcttcagctcgaggaggaccgggatgcgtatccggtcagcgctgatggcggtcatcttccagaagcagctcaggctgtccattcaggggaggaacaaccactccactggcgagattgtcaactacattgcggttgatgcgtaccggcttggcgacgccatcagctggctgcacatggggtggacctcgccacttcagctcgtctttgcagttgccacgctcttctgggcactcaagcttggggctcttcctggtctagtcccgctagtcatctttggtttcctcaacgtgccattcgcgaaaatgctgcaggggtaccaggccaagttcatggttgcacaggacgagaggctccggtccacgtcggagatactcaacagcatgaagatcatcaagctgcagtcgtgggaagacaagttccgcagcacgatcgagtcgctcagggacggcgagttcaaatggctgaggcagacccagatgaagaaggcctatggtgcagtcatgtactggatgtccccgacggtcgtctctgctgtcatgtacacagcaacggccatcatggggagtgctcccctgaatgctagcacgctcttcacggtcttggccaccctgagggtaatgtctgagccagtgaggatgcttccggaggtcctcacaatgatgatccagtacaaggtggcattagatcgaattgagaagttccttctcgaagacgagatcagagaggacgatgtgaaaagggtaccttcagatgactctggtgtcagagttcgagtccaagccggaaatttcagctggaaggcaagcggagctgatctgtcactgaggaatgttaaccttcgcgtgaaccgaggagagaaggtggccgtatgcggcccagttggctcagggaaatcttcactcctgtatgcattacttggggagataccaagattatcaggatcagttgaagtttttggttcagtagcatacgtttcacagagctcgtggatacagagtgggactgttcgtgacaacatactctttgggaagcctttcaacaaggaactgtatgataaggcgatcaaatcttgtgctctggacaaggatatcgaaaattttgaccatggagacctcacagagatcggtcagagaggactgaacatgagtggaggccagaagcaaaggattcagctggctcgagccgtctacagtgatgcagatgtttatctactggatgacccattcagtgcagttgatgcgcataccgctgcagtccttttctatgaatgtgtgatgacagcacttgcagagaagactgtcgtccttgtgacccaccaggttgaatttctgactgaaaccgataggattctggtaatggaaggtggtcaagttagtcaacaagggaaatattcagaactcctgggatctgggacagcatttgagaaactggtgtctgctcaccagtcttcgatcacagcattggataccagtgctagccaacagaaccaagttcaagggcaacaagagtctgatgaatacatagtgccaagtgcgcttcaggttataaggcaggccagcgacatcgacgtgaccgcaaagggcccttcagcagcaatacagcttacagaagaggaagagaagggcattggcgacctgggatggaagccatacaaagaatacataaatgtatccaagggggctttccaattctctggcatgtgtattgctcaagtgctcttcacgtgcttccagatcgcatccacatattggttggcagtggctgttcagatgggtaacgtcagtgctgcacttcttgttggggcatattctggactctctatcttcagctgcttctttgcctactttagaagctgttttgcggctattctgggtctcaaggcctccaaagcattctttggcgggctaatggactccgtattcaaggctcccatgtcattttttgactcaacaccagtgggaagaattttaacgagggcatcttcagatttgagcattctagacttcgacataccttactccatggcttttgtggcgacgggcggcattgaggttgttaccacagtactggtcatgggtactgtaacttggcaagtcctggttgtagcgatcccagttgctgtcaccatgatatatgttcagaggcactacgtttcctcagctagggagctagtaagactcaacggaacaacaaaggcacctgtaatgaactatgcatcagaatcaattctcggtgtggtgacgatcagggcatttgcagcaactgagaggtttatctacagcaacatgcagctcatcgacactgatgccacactgttcttccataccattgccgcacaagagtgggtactcataagagtagaggcactgcagtccttgacaataatcacagcagcattgttccttgttctggttcctccaggagcaatttctccgggctttgcaggactttgtctctcctatgctttgactttaacttcagcacaaatattcttgacaaggttctattcgtacttggaaaactacatcatctcggttgaacgaatcaagcagtatatgcacctcccagtggagccacctgccattataccagatagtagacctccaacttcgtggccgcaggagggaaggatagacctgcaagatttgaagataagataccgtccaaatgcgccgcttgtcctcaaaggaatcacttgcacttttgctgctgggaacaagattggggttgtagggaggacaggaagtggaaaatcaacacttatcagctcattgttccgtctcgttgatccggcgggtgggaggatacttattgacaagttggatatttgctccattggccttaaggatctaagaactaaactaagtattatccctcaagaacctacacttttcaggggaaccgtgcgcaacaatttggatccccttggccagcattctgatgaagagatatgggaggccttggagaagtgtcaactgaagacagcaatcagcaccacctctgctcttctggatacagttgtgagtgatgatggcgataactggagtgctggacagcgtcagctcttctgtcttggcagagttctcctacgcaggaacaaaattctagttctagacgaggcaacagcatccatcgactctgcaacagatgcaatcctgcagaaagtaatcaggcagcagttctcaagttgcacggttataaccatagctcacagggtaccaactgtgacagacagtgacaaggtcatggtcctgtcctacgggaagcttctagaatatgaaacaccagccaagctgttggaagacaaacaatcagcatttgctaaacttgtggctgagtattgggctaataccaagagaaattcaacatga

SEQ ID NO: 4703 - protein, 1442 aa, Zea mays
MWSCSSRTSARWLPPASGGGSALQMRAAGGAALLVGGCCSSSPRAAWQLPWPTVSRLSKTPTTSRRRFLTSSGAWSGSRWRPRCTPSRRGRRGVVAVLWWVLLSLLATAYNSEILAGGHSLDLAEMIAWPVSLLLLLCALGSLLPRGDGHHYRDASNGSSGLSEPLIGNDRTVPTSELYRAGLFGQLAFSWLNPLLRVGRSKALDLGDIPLIATDDTAHHTSQQFTEAWSRHVSDKARSRRGVGSNSLALVLGKCFLSEILLTGFYAFLRMLSIAVAPLLLFGFVWYSNQEERDLRVGLSLVGCLLLAKLVESLSQRHWFFSSRRTGMRIRSALMAVIFQKQLRLSIQGRNNHSTGEIVNYIAVDAYRLGDAISWLHMGWTSPLQLVFAVATLFWALKLGALPGLVPLVIFGFLNVPFAKMLQGYQAKFMVAQDERLRSTSEILNSMKIIKLQSWEDKFRSTIESLRDGEFKWLRQTQMKKAYGAVMYWMSPTVVSAVMYTATAIMGSAPLNASTLFTVLATLRVMSEPVRMLPEVLTMMIQYKVALDRIEKFLLEDEIREDDVKRVPSDDSGVRVRVQAGNFSWKASGADLSLRNVNLRVNRGEKVAVCGPVGSGKSSLLYALLGEIPRLSGSVEVFGSVAYVSQSSWIQSGTVRDNILFGKPFNKELYDKAIKSCALDKDIENFDHGDLTEIGQRGLNMSGGQKQRIQLARAVYSDADVYLLDDPFSAVDAHTAAVLFYECVMTALAEKTVVLVTHQVEFLTETDRILVMEGGQVSQQGKYSELLGSGTAFEKLVSAHQSSITALDTSASQQNQVQGQQESDEYIVPSALQVIRQASDIDVTAKGPSAAIQLTEEEEKGIGDLGWKPYKEYINVSKGAFQFSGMCIAQVLFTCFQIASTYWLAVAVQMGNVSAALLVGAYSGLSIFSCFFAYFRSCFAAILGLKASKAFFGGLMDSVFKAPMSFFDSTPVGRILTRASSDLSILDFDIPYSMAFVATGGIEVVTTVLVMGTVTWQVLVVAIPVAVTMIYVQRHYVSSARELVRLNGTTKAPVMNYASESILGVVTIRAFAATERFIYSNMQLIDTDATLFFHTIAAQEWVLIRVEALQSLTIITAALFLVLVPPGAISPGFAGLCLSYALTLTSAQIFLTRFYSYLENYIISVERIKQYMHLPVEPPAIIPDSRPPTSWPQEGRIDLQDLKIRYRPNAPLVLKGITCTFAAGNKIGVVGRTGSGKSTLISSLFRLVDPAGGRILIDKLDICSIGLKDLRTKLSIIPQEPTLFRGTVRNNLDPLGQHSDEEIWEALEKCQLKTAISTTSALLDTVVSDDGDNWSAGQRQLFCLGRVLLRRNKILVLDEATASIDSATDAILQKVIRQQFSSCTVITIAHRVPTVTDSDKVMVLSYGKLLEYETPAKLLEDKQSAFAKLVAEYWANTKRNST

SEQ ID NO: 4704 - DNA, 1947 bp, Zea mays
  CDS (1)..(1947)
atggggaagaatatgcgcatcaagacggcgcccaaggcgaaccgtgtccccctcctcggcgacggggagacgtcaagggcgctctcggacctggaagagggcagcgacgtccagccagcgaacgtcgggttctgtcgggtcatcaaacttgcgaagcatgacgccggaaagctggtcctcgccaccgcggcgctgctcgtcgcctccctcagtaaccttctcgttcccaaatatggtggcaagataattgacattgtgtcaagagatgttcggcgcccagaagataaggcgcaagccctggaggatgtcaagggcacaattttgtacattgtgacaatcgtcttagtcggttcagtttgcacggctcttcgggcatggctattcaattctgctagtgagagagtagtcgctcgactaaggaaagacttgttcagccatctcataaaccaggaaatagcgttttttgatgtgactagaacaggagagctcttaagcaggctttctgaagatacacaaataataaagaatgctgctacaaccaacctatcagaggcactgcgcaatgtaactactacagctattggtcttggtttcatgttttcaacttcatggaagttaacattgctggcacttgtaattgtcccggttatatcagttgctgtgcgtagatttggacgttttcttcgtgagctttcacatcaaacacaagctgctgcagctgtagcttcatccatagctgaggaatctttcggtgccatccgcacagtaagatcctttgctcaggaatatcatgagatttcacgctatggtgaaaaagtagaggagacacttaaacttggtctcaaacaagctaaagttgttggcttgttttctggagggcttaatgctgcatcaaccatgtctgtggttattgttgttatttatggcgccaacttaaccatcaatggttacatgacaactggctctcttacatcattcatcttatacagccttacagttggttcgtcagtatctgccttgtcaggactatacacaactgtaatgaaagcctctggtgcaagccgtagggtttttcaacttttggaccgtgtttcgtcaatgacaaactctggggacaaatgtccaataaatgaaaaggatggggaagttgagcttgatgatgtctggtttgcatatccttctcgcccatctcatatgattcttaagggaataactctgaagctagcaccaggttcaaaggttgcacttgttgggccaagtggtggtggtaaaaccacaatagcaaatttgattgagcggttttatgaccctctaaagggaaggatcttgcttaatggagtaccgctggcagaaatttcacatcaatatcttcacagcaaggtaagcattgtcagccaggagcctacgctcttcaactgcaccatcgaagagaatattgcttatggactagagggcacaacgaactttgctgacgttgagagtgcagctaaaatggcgaatgcacacaacttcatatgcggctttcccgaccaatataagactgtcgtcggcgagcgggggatcaggttatccggcgggcagaagcagaggatcgccattgcgagagctttgcttatgaacccacgagtgcttctcctggacgaagccaccagtgccctggatgctgaaagcgaatatcttgtacaggatgcaatggactccttgatgaaagggaggactgtccttgtgatagcccaccggctctcgaccgtcaagagcgccgacaccgtcgccgtcatctccgacggcctaatcgtggagagcggcacgcacgacgaactcctggaccgcgacggcatatacacggccttggtgaagaggcagctgcaggggccgaagtttgaggccaccagcagcatcagcgaggcctccgaaattgaagcggaacccagcagtaatgggcaatag

SEQ ID NO: 4705 - protein, 648 aa, Zea mays
MGKNMRIKTAPKANRVPLLGDGETSRALSDLEEGSDVQPANVGFCRVIKLAKHDAGKLVLATAALLVASLSNLLVPKYGGKIIDIVSRDVRRPEDKAQALEDVKGTILYIVTIVLVGSVCTALRAWLFNSASERVVARLRKDLFSHLINQEIAFFDVTRTGELLSRLSEDTQIIKNAATTNLSEALRNVTTTAIGLGFMFSTSWKLTLLALVIVPVISVAVRRFGRFLRELSHQTQAAAAVASSIAEESFGAIRTVRSFAQEYHEISRYGEKVEETLKLGLKQAKVVGLFSGGLNAASTMSVVIVVIYGANLTINGYMTTGSLTSFILYSLTVGSSVSALSGLYTTVMKASGASRRVFQLLDRVSSMTNSGDKCPINEKDGEVELDDVWFAYPSRPSHMILKGITLKLAPGSKVALVGPSGGGKTTIANLIERFYDPLKGRILLNGVPLAEISHQYLHSKVSIVSQEPTLFNCTIEENIAYGLEGTTNFADVESAAKMANAHNFICGFPDQYKTVVGERGIRLSGGQKQRIAIARALLMNPRVLLLDEATSALDAESEYLVQDAMDSLMKGRTVLVIAHRLSTVKSADTVAVISDGLIVESGTHDELLDRDGIYTALVKRQLQGPKFEATSSISEASEIEAEPSSNGQ

SEQ ID NO: 4706 - DNA, 2214 bp, Zea mays
  CDS (1)..(2214)
atgcggccttgctaccgcatactcacggcgcgtcacttcgtccgcggctcccggttcgatccctcccagactacctcccccgctgccggatttcgtcggctgaccagagccaacaggccgttcgtgccgaaacccctctttggcactctcctcggaggcttcagatcgaactgtggcgtactgcctgggaaaggggcccccttgggcagcctcggcagcttttggccggactctgcctaccagctgcacggcgcgcggcttcaacgagatacgagaggtaatgcattctccacatccgccaatgctgtgacagttaagaagccagttggtgacaaggtccagaaagatgcatcaaaaaaggatattgatgaagagattgctgattctcagatattgaaaaaccttgggaagtacttattgttgaatgacagccctgacttccgctttagggttgccttgtcgttggtcctgttagttggtgcaaaggttataaatgttcaagtgcctttcttgtttaagctagctatcgactggcttgcatcccttggtggtgctgaagcttccctggcatcattcactgaaactaatgccaccctattggctctatttgcaagcccagcagctgttctgataggatatggaatcgcacgatcaggagtatcagcctgtacagaactgcgaaacgctgtattttctaaagtgactttgagagcaatccgttcagtatccagaaaggtgtcttctcacttgcatgagcttgatcttcgatatcatctaagccggcaaactggtgctataaatcgcgtaattgatcgaggaagccgtgcaataaattacatcctcacagtcatggtgtttaatgtcgtgcccacgatactagagattggtatggtgtcaagcatacttgcctacaaatttggttcaacttttgcttggatcacttcagtttcagttgctacttatattgctttcactttggctgtcacacagtggcggactaagttcaggatggccatgaataaagctgataatgcttctagtacggtggcagttgactctcttctcaattatgagactgtgaaatacttcaacaatgaacaatttgaagttgagaagtacgacaaatatttaaggaattatgaggatgctgcattgaagacccaaagtagtcttgcctacctgaactttggccaaaatgttatctttagctcggctttatctacggcaatggttttgagctcatatggaataatgagtggtgctctgactgtgggtgatttggtcatggttaatggacttttattccagctttcattacctctgaacttccttgggagtgtgtatcgagaatctagacaaagcctcattgacatgaagtcgatgtttcagttgcttgaggaaaaacctgcaataaaggatgagcctcacgcacaacctttgcagttcaagggagggtgcattgaattccagaatgttcattttgggtatgtaccagaaaggaagattcttgatggtgccactttcaccgtacctgcaggaaagagtgtggccattgttggaactagcggaagcgggaaatcaactattcttagacttcttttcagattctttgattcgacttcaggatctatactaattgacgggcaagatatccgaggagtgacactggagagccttcgaaaatgtctaggtgtggtacctcaggacacagtactttttaatgacacgattaagcataatatacagtatgggcggttatcagcaaaagatgaggaggtctttgatgctgcccgacgtgctgctattcatgatacaattatgaacttcccagacaagtatgacaccatagtaggagaacgaggattgaagttaagcggcggggagaaacaacgagtgtcaatagcccgtgtattcttgaaggagccttccattctgttatgtgatgaagcaactagtgctcttgacagcactactgaagcatcaattttgaattctctgaaatccttatcttccgatcgaacatcaatctttattgctcatcgactcacaactgcaatgcagtgtgatcagataattgttttggaggatgggaaggtagtagaacaaggaccacatgattttcttctgtcacagggtgggcgatacgcagaattgtggtatcagcagaacagcactgacgccatggattctgctgcagctagcgtagaggtttga

SEQ ID NO: 4707 - protein, 737 aa, Zea mays
MRPCYRILTARHFVRGSRFDPSQTTSPAAGFRRLTRANRPFVPKPLFGTLLGGFRSNCGVLPGKGAPLGSLGSFWPDSAYQLHGARLQRDTRGNAFSTSANAVTVKKPVGDKVQKDASKKDIDEEIADSQILKNLGKYLLLNDSPDFRFRVALSLVLLVGAKVINVQVPFLFKLAIDWLASLGGAEASLASFTETNATLLALFASPAAVLIGYGIARSGVSACTELRNAVFSKVTLRAIRSVSRKVSSHLHELDLRYHLSRQTGAINRVIDRGSRAINYILTVMVFNVVPTILEIGMVSSILAYKFGSTFAWITSVSVATYIAFTLAVTQWRTKFRMAMNKADNASSTVAVDSLLNYETVKYFNNEQFEVEKYDKYLRNYEDAALKTQSSLAYLNFGQNVIFSSALSTAMVLSSYGIMSGALTVGDLVMVNGLLFQLSLPLNFLGSVYRESRQSLIDMKSMFQLLEEKPAIKDEPHAQPLQFKGGCIEFQNVHFGYVPERKILDGATFTVPAGKSVAIVGTSGSGKSTILRLLFRFFDSTSGSILIDGQDIRGVTLESLRKCLGVVPQDTVLFNDTIKHNIQYGRLSAKDEEVFDAARRAAIHDTIMNFPDKYDTIVGERGLKLSGGEKQRVSIARVFLKEPSILLCDEATSALDSTTEASILNSLKSLSSDRTSIFIAHRLTTAMQCDQIIVLEDGKVVEQGPHDFLLSQGGRYAELWYQQNSTDAMDSAAASVEV

SEQ ID NO: 4708 - DNA, 1947 bp, Zea mays
  CDS (1)..(1947)
atggggaagaatatgcgcatcaagacggcgcccaaggcgaaccgtgtccccctcctcggcgacggggagacgtcaagggcgctctcggacctggaagagggcagcgacgtccagccagcgaacgtcggcttctgtcgggtcatcaaacttgcgaaacatgacgccggaaagctggtcctcgccacagcggctctgctcgtcgcctccctcagtaaccttctcgttcccaaatatggtggcaagataattgacattgtgtcaagagatgttcggcgcccagaagataaggcgcaagccctggaggatgtgaagggcacaattttgtacattgtgacaatcgtcttagtcggttcagtttgcacggctcttcgggcatggttattcaattctgctagtgagagagtagtcgctcgactaaggaaagacttgttcagccatctcataaaccaggaaatagcgttttttgatgtgactagaacaggagagctcttaagcaggctttctgaagatacacaaataataaagaatgctgctacaaccaacctatcagaggcactgcgcaatgttactactacagctattggtcttggtttcatgttttcaacttcatggaagttaacattgctggcacttgtaattgtcccggttatatcagttgctgtgcgtagatttggacgttttcttcgtgagctttcacatcaaacacaagctgctgctgctgtagcttcatccatagctgaggaatctttcggtgccatccgcacagtaagatcctttgctcaggaatatcatgagatttcacgctatggtgaaaaagtagaggagacacttaaacttggtctcaaacaagctaaagttgttggcttgttttctggagggcttaacgctgcatcaaccatgtctgtggttattgttgttatttatggcgccaacttaaccatcaatggttacatgacaactggctctcttacatcattcatcttatacagccttacagttggttcgtcagtatctgccttgtcaggactatacacaactgtaatgaaagcctctggtgcaagccgtagggtttttcaacttttggaccgtgtttcgtcaatgacaaactctggggacaaatgtccaataaatgaaaaggatggggaagttgagcttgatgatgtctggtttgcatatccttctcgcccatctcatatgattcttaagggaataactctgaagctagcaccaggttcaaaggttgcacttgttgggccaagtggtggtggtaaaaccacaatagcaaatttgattgagcggttttatgaccctctaaagggaaggatcttgcttaatggagtaccgctggtagaaatttcacatcaatatcttcacagcaaggtaagcattgtcagccaggagcctacgctcttcaactgcaccatcgaagagaatattgcttatggactagagggcacaacgaactttgctgacgttgagagtgcagctaaaatggcgaatgcacacaacttcatatgcggctttcccgaccaatataagactgtcgtcggcgagcgggggatcaggttatccggcgggcagaagcagaggatcgccattgcgagagctttgcttatgaacccacgagtgcttctcctggacgaagccaccagtgccctggatgctgaaagcgaatatcttgtacaggatgcaatggactccttgatgaaagggaggactgtccttgtgatagcccaccggctctcgaccgtcaagagcgccgacaccgtcgccgtcatctccgacggcctaatcgtggagagcggcacgcacgacgaactcctggaccgcgacggcatatacacggccttggtgaagaggcagctgcaggggccgaagtttgaggccaccagcagcatcagcgaggcctccgaaattgaagcggaacccagcagtaatgggcaatag

SEQ ID NO: 4709 - protein, 648 aa, Zea mays
MGKNMRIKTAPKANRVPLLGDGETSRALSDLEEGSDVQPANVGFCRVIKLAKHDAGKLVLATAALLVASLSNLLVPKYGGKIIDIVSRDVRRPEDKAQALEDVKGTILYIVTIVLVGSVCTALRAWLFNSASERVVARLRKDLFSHLINQEIAFFDVTRTGELLSRLSEDTQIIKNAATTNLSEALRNVTTTAIGLGFMFSTSWKLTLLALVIVPVISVAVRRFGRFLRELSHQTQAAAAVASSIAEESFGAIRTVRSFAQEYHEISRYGEKVEETLKLGLKQAKVVGLFSGGLNAASTMSVVIVVIYGANLTINGYMTTGSLTSFILYSLTVGSSVSALSGLYTTVMKASGASRRVFQLLDRVSSMTNSGDKCPINEKDGEVELDDVWFAYPSRPSHMILKGITLKLAPGSKVALVGPSGGGKTTIANLIERFYDPLKGRILLNGVPLVEISHQYLHSKVSIVSQEPTLFNCTIEENIAYGLEGTTNFADVESAAKMANAHNFICGFPDQYKTVVGERGIRLSGGQKQRIAIARALLMNPRVLLLDEATSALDAESEYLVQDAMDSLMKGRTVLVIAHRLSTVKSADTVAVISDGLIVESGTHDELLDRDGIYTALVKRQLQGPKFEATSSISEASEIEAEPSSNGQ

SEQ ID NO: 4710 - DNA, 24 bp, Artificial sequence
  primer
atgcgtagttttagccaactgtgg

SEQ ID NO: 4711 - DNA, 25 bp, Artificial sequence
  primer
ttaggcgctcaatgattcctcttca

SEQ ID NO: 4712 - protein, 621 aa, Artificial sequence
  consensus sequence
  Variant (2)..(21): Xaa in position 2 to 21 is any amino acid
  Variant (22)..(23): Xaa in position 22 to 23 is any or no amino acid
  Variant (25)..(28): Xaa in position 25 to 28 is any amino acid
  Variant (30)..(32): Xaa in position 30 to 32 is any amino acid
  Variant (34)..(108): Xaa in position 34 to 108 is any amino acid
  Variant (109)..(111): Xaa in position 109 to 111 is any or no amino acid
  Variant (113)..(122): Xaa in position 113 to 122 is any amino acid
  Variant (123)..(124): Xaa in position 123 to 124 is any or no amino acid
  Variant (126)..(184): Xaa in position 126 to 184 is any amino acid
  Variant (185)..(206): Xaa in position 185 to 206 is any or no amino acid
  Variant (208)..(270): Xaa in position 208 to 270 is any amino acid
  Variant (271)..(319): Xaa in position 271 to 319 is any or no amino acid
  Variant (321)..(321): Xaa in position 321 is any amino acid
  Variant (323)..(323): Xaa in position 323 is any amino acid
  Variant (325)..(329): Xaa in position 325 to 329 is any amino acid
  Variant (330)..(340): Xaa in position 330 to 340 is any or no amino acid
  Variant (342)..(350): Xaa in position 342 to 350 is any amino acid
  Variant (352)..(354): Xaa in position 352 to 354 is any amino acid
  Variant (355)..(360): Xaa in position 355 to 360 is any or no amino acid
  Variant (362)..(362): Xaa in position 362 is any amino acid
  Variant (365)..(366): Xaa in position 365 to 366 is any amino acid
  Variant (368)..(368): Xaa in position 368 is any amino acid
  Variant (371)..(371): Xaa in position 371 is any amino acid
  Variant (373)..(375): Xaa in position 373 to 375 is any amino acid
  Variant (377)..(378): Xaa in position 377 to 378 is any amino acid
  Variant (380)..(380): Xaa in position 380 is any amino acid
  Variant (382)..(385): Xaa in position 382 to 385 is any amino acid
  Variant (387)..(390): Xaa in position 387 to 390 is any amino acid
  Variant (391)..(395): Xaa in position 391 to 395 is any or no amino acid
  Variant (398)..(406): Xaa in position 398 to 406 is any amino acid
  Variant (407)..(407): Xaa in position 407 is any or no amino acid
  Variant (410)..(414): Xaa in position 410 to 414 is any amino acid
  Variant (415)..(415): Xaa in position 415 is any or no amino acid
  Variant (417)..(417): Xaa in position 417 is any amino acid
  Variant (419)..(421): Xaa in position 419 to 421 is any amino acid
  Variant (424)..(429): Xaa in position 424 to 429 is any amino acid
  Variant (431)..(444): Xaa in position 431 to 444 is any amino acid
  Variant (445)..(488): Xaa in position 445 to 488 is any or no amino acid
  Variant (490)..(498): Xaa in position 490 to 498 is any amino acid
  Variant (499)..(503): Xaa in position 499 to 503 is any or no amino acid
  Variant (505)..(505): Xaa in position 505 is any amino acid
  Variant (507)..(514): Xaa in position 507 to 514 is any amino acid
  Variant (516)..(518): Xaa in position 516 to 518 is any amino acid
  Variant (520)..(520): Xaa in position 520 is any amino acid
  Variant (522)..(523): Xaa in position 522 to 523 is any amino acid
  Variant (525)..(528): Xaa in position 525 to 528 is any amino acid
  Variant (531)..(535): Xaa in position 531 to 535 is any amino acid
  Variant (537)..(538): Xaa in position 537 to 538 is any amino acid
  Variant (539)..(539): Xaa in position 539 is any or no amino acid
  Variant (541)..(541): Xaa in position 541 is any amino acid
  Variant (547)..(549): Xaa in position 547 to 549 is any amino acid
  Variant (551)..(553): Xaa in position 551 to 553 is any amino acid
  Variant (555)..(557): Xaa in position 555 to 557 is any amino acid
  Variant (559)..(560): Xaa in position 559 to 560 is any amino acid
  Variant (562)..(568): Xaa in position 562 to 568 is any amino acid
  Variant (569)..(570): Xaa in position 569 to 570 is any or no amino acid
  Variant (572)..(574): Xaa in position 572 to 574 is any amino acid
  Variant (582)..(584): Xaa in position 582 to 584 is any amino acid
  Variant (587)..(587): Xaa in position 587 is any amino acid
  Variant (589)..(589): Xaa in position 589 is any amino acid
  Variant (591)..(593): Xaa in position 591 to 593 is any amino acid
  Variant (595)..(597): Xaa in position 595 to 597 is any amino acid
  Variant (599)..(599): Xaa in position 599 is any amino acid
  Variant (601)..(601): Xaa in position 601 is any amino acid
  Variant (603)..(604): Xaa in position 603 to 604 is any amino acid
  Variant (606)..(609): Xaa in position 606 to 609 is any amino acid
  Variant (610)..(611): Xaa in position 610 to 611 is any or no amino acid
  Variant (613)..(613): Xaa in position 613 is any amino acid
  Variant (615)..(620): Xaa in position 615 to 620 is any amino acid
RXXXXXXXXXXXXXXXXXXXXXXGXXXXRXXXDXXXXXXXXXXXXXXXXXXXXXXXXXXXXXXXXXXXXXXXXXXXXXXXXXXXXXXXXXXXXXXXXXXXXXXXXXXXXXXEXXXXXXXXXXXXFXXXXXXXXXXXXXXXXXXXXXXXXXXXXXXXXXXXXXXXXXXXXXXXXXXXXXXXXXXXXXXXXXXXXXXXXXXXXXXXXXGXXXXXXXXXXXXXXXXXXXXXXXXXXXXXXXXXXXXXXXXXXXXXXXXXXXXXXXXXXXXXXXXXXXXXXXXXXXXXXXXXXXXXXXXXXXXXXXXXXXXXXXXXXXXXXXXVXFXYXXXXXXXXXXXXXXXXLXXXXXXXXXGXXXXXXXXXAXVGXXGXGKXTXXXLXXRXYXXXXGXXXXXXXXXDGXXXXXXXXXXLRXXXXXXVXQXXXLFXXXXXXNXXXXXXXXXXXXXXXXXXXXXXXXXXXXXXXXXXXXXXXXXXXXXXXXXXXXXXXXXXAXXXXXXXXXXXXXXPXGXXXXXXXXGXXXSXGXXQXXXXARXXXXXPXXXLXLDEATXXXDXXXEXXXQXXLXXXXXXXXXTXXXIAHRLSTXXXADXIXVXXXGXXXEXGXHXXLXXXXXXGXYXXXXXXQ

SEQ ID NO: 4713 - protein, 27 aa, Artificial sequence
  protein pattern
  Variant (2)..(4): Xaa in position 2 to 4 is any amino acid
  Variant (5)..(5): Xaa in position 5 is any or no amino acid
  Variant (7)..(7): Xaa in position 7 is any or no amino acid
  Variant (9)..(9): Xaa in position 9 is Glu or Gln
  Variant (10)..(10): Xaa in position 10 is Lys or Arg
  Variant (12)..(12): Xaa in position 12 is any amino acid
  Variant (13)..(13): Xaa in position 13 is Ile, Leu or Val
  Variant (14)..(14): Xaa in position 14 is Ala or Ser
  Variant (15)..(15): Xaa in position 15 is Phe, Ile, Leu or Met
  Variant (18)..(22): Xaa in position 18 to 22 is any amino acid
  Variant (23)..(23): Xaa in position 23 is any or no amino acid
  Variant (25)..(25): Xaa in position 25 is any amino acid
  Variant (26)..(27): Xaa in position 26 to 27 is Ile, Leu or Val
GXXXXSXGXXQXXXXARXXXXXXPXXX

SEQ ID NO: 4714 - protein, 36 aa, Artificial sequence
  protein pattern
  Variant (2)..(3): Xaa in position 2 to 3 is any amino acid
  Variant (4)..(4): Xaa in position 4 is any or no amino acid
  Variant (6)..(6): Xaa in position 6 is any or no amino acid
  Variant (12)..(12): Xaa in position 12 is Ala or Thr
  Variant (13)..(13): Xaa in position 13 is Ile or Val
  Variant (14)..(15): Xaa in position 14 to 15 is any amino acid
  Variant (16)..(16): Xaa in position 16 is Ala, Cys, Ser or Val
  Variant (17)..(18): Xaa in position 17 to 18 is any amino acid
  Variant (19)..(19): Xaa in position 19 is Ile or Val
  Variant (20)..(20): Xaa in position 20 is any amino acid
  Variant (22)..(22): Xaa in position 22 is Phe, Ile, Leu, Met or Val
  Variant (23)..(24): Xaa in position 23 to 24 is any amino acid
  Variant (26)..(28): Xaa in position 26 to 28 is any amino acid
  Variant (29)..(29): Xaa in position 29 is Ala, Glu or Gln
  Variant (30)..(30): Xaa in position 30 is any amino acid
  Variant (32)..(35): Xaa in position 32 to 35 is any amino acid
TXXXIXAHRLSXXXXXXXXXVXXXGXXXXXGXXXXL

SEQ ID NO: 4715 - protein, 24 aa, Artificial sequence
  protein pattern
  Variant (2)..(2): Xaa in position 2 is any amino acid
  Variant (3)..(5): Xaa in position 3 to 5 is any or no amino acid
  Variant (8)..(8): Xaa in position 8 is any amino acid
  Variant (9)..(9): Xaa in position 9 is Ser or Thr
  Variant (11)..(11): Xaa in position 11 is Ala, Gly or Ser
  Variant (14)..(15): Xaa in position 14 to 15 is Ser or Thr
  Variant (16)..(18): Xaa in position 16 to 18 is any amino acid
  Variant (20)..(20): Xaa in position 20 is Ile, Leu, Met or Val
  Variant (21)..(23): Xaa in position 21 to 23 is any amino acid
AXXXXVGXXGXGKXXXXXLXXXXY

SEQ ID NO: 4716 - protein, 17 aa, Artificial sequence
  protein pattern
  Variant (6)..(6): Xaa in position 6 is Ala or Ser
  Variant (7)..(7): Xaa in position 7 is any amino acid
  Variant (8)..(8): Xaa in position 8 is Ile, Leu or Val
  Variant (10)..(11): Xaa in position 10 to 11 is any amino acid
  Variant (12)..(12): Xaa in position 12 is Ala, Gly, Ser or Thr
  Variant (14)..(16): Xaa in position 14 to 16 is any or no amino acid
LDEATXXXDXXXEXXXQ

SEQ ID NO: 4717 - DNA, 1176 bp, Escherichia coli
  CDS (1)..(1176): transl_table=11
atggatacgtcactggctgaggaagtacagcagaccatggcaacacttgcgcccaatcgctttttctttatgtcgccgtaccgcagttttacgacgtcaggatgtttcgcccgcttcgatgaaccggctgtgaacggggattcgcccgacagtcccttccagcaaaaactcgccgcgctgtttgccgatgccaaagcgcagggcatcaaaaatccggtgatggtcggggcgattcccttcgatccacgtcagccttcgtcgctgtatattcctgaatcctggcagtcgttctcccgtcaggaaaaacaagcttccgcacgccgtttcacccgcagccagtcgctgaatgtggtggaacgccaggcaattccggagcaaaccacgtttgaacagatggttgcccgcgccgccgcacttaccgccacgccgcaggtcgacaaagtggtgttgtcacggttgattgatatcaccactgacgccgccattgatagtggcgtattgctggaacggttgattgcgcaaaacccggttagttacaacttccatgttccgctggctgatggtggcgtcctgctgggggccagcccggaactgctgctacgtaaagacggcgagcgttttagctccattccgttagccggttccgcgcgtcgtcagccggatgaagtgctcgatcgcgaagcaggtaatcgtctgctggcgtcagaaaaagatcgccatgaacatgaactggtgactcaggcgatgaaagaggtactgcgcgaacgcagtagtgagttacacgttccttcttctccacagctgatcaccacgccgacgctgtggcatctcgcaactccctttgaaggtaaagcgaattcgcaagaaaacgcactgactctggcctgtctgctgcatccgacccccgcgctgagcggtttcccgcatcaggccgcgacccaggttattgctgaactggaaccgttcgaccgcgaactgtttggcggcattgtgggttggtgtgacagcgaaggtaacggcgaatgggtggtgaccatccgctgcgcgaagctgcgggaaaatcaggtgcgtctgtttgccggagcggggattgtgcctgcgtcgtcaccgttgggtgagtggcgcgaaacaggcgtcaaactttctaccatgttgaacgtttttggattgcattaa

SEQ ID NO: 4718 - protein, 391 aa, Escherichia coli
MDTSLAEEVQQTMATLAPNRFFFMSPYRSFTTSGCFARFDEPAVNGDSPDSPFQQKLAALFADAKAQGIKNPVMVGAIPFDPRQPSSLYIPESWQSFSRQEKQASARRFTRSQSLNVVERQAIPEQTTFEQMVARAAALTATPQVDKVVLSRLIDITTDAAIDSGVLLERLIAQNPVSYNFHVPLADGGVLLGASPELLLRKDGERFSSIPLAGSARRQPDEVLDREAGNRLLASEKDRHEHELVTQAMKEVLRERSSELHVPSSPQLITTPTLWHLATPFEGKANSQENALTLACLLHPTPALSGFPHQAATQVIAELEPFDRELFGGIVGWCDSEGNGEWVVTIRCAKLRENQVRLFAGAGIVPASSPLGEWRETGVKLSTMLNVFGLH

SEQ ID NO: 4719 - DNA, 5057 bp, Pseudomonas fluorescens
  CDS (207)..(1382): transl_table=11
gaattcggcatacagatgagctgaaactttccctaaaaacgcatgagcagtccgcccgatccaacaggcggcttgcattgaagttaactctctcatggctcactcatgtgattgacaaatcgtaatgattagcatcacatattagaaacgataatgattctatttcaagtttctttttatccctaggccacggaggcttcccccaaatgagaacgggcaccctaagaacgaccgagatggaagaggtgcaactcgcagaggtacaacgtagtttttcgttcacatccggcgatcgcgagttagcggtcaccgggatgctgcagagaattgaaacacctgccattggcggcgatgacgccaatagcctgttccagcagacaattgcgcaagcgcttgatcgggcgcgcgaagctggccagagcaacccaatcatcgttggcgccatccctttcgaccctgctgaaccttcctgcctctacattcccgaacacgcgcaatggcggacccgagacatccacgcgaaaacgggtatgtcgacgctgcctgagttgatcgaacagaaaaacattccggacgaacaggccttcaaacgggcggtggaacacgccgtcgtcaacttccgccacagcgacgtacgcaaggctgtgctctcggttcaacgcgagctgatatttgcaaacgatgtggatgtgagtgccctgcagcacaacctgaaagcccagaacccgagcggctaccacttccgtgtgccaatgcctgatggcaccacgctgatcggtgtcagtcccgaacttctggtccgcaaggaaggcctgagctctctgtccaacccgctggcagggtcagccaagcgcatggccgatccagaagccgaccggcgcaatgcagactggttgctgacatcggaaaaagatcactacgaacacgggttcgtgacccaggacatcgtcagccaactggggaaactgtgcacgcagctgaatgtgccgcaacgcccctccctcatcagcacgcccgcgctctggcacctctcgacccgcatcgaaggtacgctggcagacccggctgtatcggccttgcagcttgcctgccgcttgcaccccacaccggctgtgtgcggcttccccaccgagcgcgcccggcgcctgattcgcttcgtcgaacccttcgagcgcggcctgttcaccggcatggtgggttggtgcgatgcccagggcaatggcgaatgggtcgtaacgattcgttgcggcacggtcaggcgaaacaaggtccgcctgttcgccggcgcaggcatcgttgaagcctcaagccccgactccgaatgggcagaagtccagaccaaacttggcaccatcgtgcgcgcctgcggattggcccactaactcgaattttttcacacgtgaatactatgactattgaatttaaccactggcctctggaaagcgcacagcgttatcgggacaaaggctattggctcgacaaaccgctcacccacctccttcaggaacgcagccagtcgcaacccgacgcccccgcgattatttgcggcgatcgccacttcagctatgccgagttggaccaattgtcttccaacctggcctcgcgactggccgccagcgggcttggcaacggtgacactgcactggtgcagttgcccaatatcgcggagttttacattgtcctttttgccctgctcaagtcaggaatcgcacccctcaacgcgctctacagccatcgcaaacttgaactcaagagttacgccaaacaaatcgcgccaacgttgttgattgcctcccgcgaacatgaagtcttccgtgacgacagctatatcgccgacttcaaggaggtgggttcaagtccagacatcatcttgctgttgggcgagcaacgtcacgaaaacaacctcgccgactggatcaatacgccgagcgagagcaacgtgaacgtctccccctcggggcccggcgaggtcgcattgttccaactgtcaggcggcagcacgggcacccccaaactcatcccccgcactcacaacgactattactacaacgccagggcaagcgcgcaagtatgcgaacttacgccacgcacgcgctttctatgcgcgctacctgccgcccataacttcttgctcagctcccccggcgccctcggtgttctacatgctggcggctgcatcatcatggcgcccagcccggagcccttgacctgtttttcgatcatccagcgccaagaagtcaatactgtggccttggtgccaagtgcagtcgccttgtggctgcaggcagcgccggagcataaagaacaactgcaatcgcttgagttcctccaggtcggtggcgcctgttttgccgactcgctggcacgccaggtgcccggcgtgctcggttgtaagctgcaacaggtattcgggatggccgaaggcctgatcaactacacccggctaaatgactccgacgaacagatttttactacccagggccgtccgatcagccccgacgatgaaatcaaaatcgttgacgaacaaggcctccccgtcccggacggagaacctggcatgctcgccacacgtggcccttacactttttgcgggtactaccaaagccccgaacaaaatgcccaggcgttcgataacgaggggtactactactccggcgacctcgtccaactcatgcccagcggcgatttgcgcgtggtcggcagggtcaaggaccagatcaaccgtggcggtgaaaaagtcgcctcggaggaaatcgaaaacctcatcgtcctccatcctgatgtgactcacgcgggcttggtggccatgcccgatgacaggctgggagaaaaaagctgcgcgttcgtcgtctcacgcaacccgagcctgaagccgcccgcgctcagacgtcacctgatggaactcggcatcgccgaatacaaactgcccgaccgcatccggttaatcgaaaccatgccgctgacccccgtgggcaagattgacaagaagcatctgcgtcagcttctggcagcggaaaccacacgcgcctggttgcagactcgcgtgcggcaactcgtcgaggactgtgaagacctggaccccgaggaaaacctgattttctatggcctcgactccttgcaagtgatgagactcgctgccgaactcaaggagcgtggcattgccgtcagcttcgaagaactggcggattcgcccacgctcagcagctggtggtcattggtagacgcgaggcagatagccgcctgaccgggcggcgtcacccagtcgttttaaaaggagttagacatgactttatcccctgccgaccaaagcaagcttgaaggcttctggcagcactgcgtgacacatcagtatttcaacattgggtatcccgaatcagccgattttgattactcccagctgcaccgtttcttgcagttttcaattaacaacttgctggggactgggaatgagtacagcaactacctgttgaactcgttcgactttgaaaaagacgtcatgacgtatttcgccgagctgttcaacattgcccttgaagacagttggggttacgtcaccaatggcgggacggaaggcaatatgtttggctgctacctgggacgcgaactgtttccggacggcaccctgtactactcgaaagacacccactactccgtggcaaagatcgtcaaattattgcggatcaaatgccgtgcggtcgaatcgctgcccaatggcgaaatcgactacgacgacctgatggcaaaaataaccgccgaccaggagcgtcaccccatcatcttcgccaacatcggcaccacgatgcgtggagccctggataatatcgtgaccatccagcaacgcctgcaacaggcaggcattgcccgccacgactactacctgcacgctgatgcggccttgagcgggatgatcctgcccttcgtcgatcacccacaacccttctcgtttgccgacggcatcgactcgatctgcgtctccggccacaagatgatcggctcgcccattccttgcggaattgtcgtggccaaacgcaacaacgtcgcgcgcatttcagtggaagtggactatatccgcgcccatgacaagaccatcagcggctcgcgcaacggccacacacccctgatgatgtgggcggcactgcgcagctactcatgggctgaatggcgccatcgaatcaaacacagcctggacacggcacagtacgccgtcgaccgcttccaggcctcgggcattgatgcctggcgcaacgaaaactccatcaccgtcgtgttcccttgcccatcagaaagaattgcgacgaaatactgcctggccacctccggtaattcggcacacctgatcaccacacctcatcatcacgactgcagcatgatcgacgccttgatcgacgaagtggttgccgaagctcaactgaatacccttcgatccaagcgagcattcactgaacaaacggtcgtcgagcgattgcccgcggcgtcattcaacttgcgtacccattattgaaagagaccagcctcatgctgccgctaaaaccgccacaagcctgcgagaacctcaatgacattcgagcgggcatcgacttttttgaccgccagatccttgactcgctacaaaaacgcctgcgttacgtaaaggctgcggcgcagttcaaagccaacgagcaggacattccagcacctgaacgcgtcgcggccatgcttgaggagcggcgactatgggcggtagaagccgaacttgatgtcgctttcgtcgagaagctctacgagcagattattcactggaatattcaacagcaaatcctgcattggcgggccacccgacaaccaacgtactcggcgcaggccaagtcatgacgatggcgggtggatgcctgacgacttgaggtctgcgattcacgcgggctgtccttgttcgagtggtgtgtgttcacaactatcaccgtagaccaagggcggccttttcttcatttttttgtaatcagatcagcctgttagctgttaattaagtgccattcaaatctgtcccctttttttttcgccataatgctgatatcgaattc

SEQ ID NO: 4720 - protein, 391 aa, Pseudomonas fluorescens
MRTGTLRTTEMEEVQLAEVQRSFSFTSGDRELAVTGMLQRIETPAIGGDDANSLFQQTIAQALDRAREAGQSNPIIVGAIPFDPAEPSCLYIPEHAQWRTRDIHAKTGMSTLPELIEQKNIPDEQAFKRAVEHAVVNFRHSDVRKAVLSVQRELIFANDVDVSALQHNLKAQNPSGYHFRVPMPDGTTLIGVSPELLVRKEGLSSLSNPLAGSAKRMADPEADRRNADWLLTSEKDHYEHGFVTQDIVSQLGKLCTQLNVPQRPSLISTPALWHLSTRIEGTLADPAVSALQLACRLHPTPAVCGFPTERARRLIRFVEPFERGLFTGMVGWCDAQGNGEWVVTIRCGTVRRNKVRLFAGAGIVEASSPDSEWAEVQTKLGTIVRACGLAH

SEQ ID NO: 4721 - DNA, 1539 bp, Arabidopsis thaliana
  CDS (1)..(1539)
atgaacggatgtgaggctgaccacaaagcaccacttggcacggtagaaacaaggactctatcaacggtgccatctccggcagccgcgacggagaggctgataaccgccgtctctgacctcaaatctcaaccgcctccattctcctccggcattgtccgattacaggtaccaattgagcagaaaattggagcaatcgattggcttcatgcacagaacgaaattcttcctcgcagtttcttttcccgtcgtagcgattctggccgtccagatcttcttcaagacttctcaagtgacaatggatcatctgatcataatccagttagtgtcgctggaatcgggtctgctgtctttttccgcgatctcgacccgttttctcatgatgactggagatcaatccgaaggttcttgtcttcaaagtctcctctgattcgtgcctatggaggtcttcgatttgatcctacagggaagatcgctgtggaatgggaacattttggctcgttttactttacagtgccccaggtcgagtttgatgagtttggaggaagctcaatgctggctgcaactgttgcttgggacaatgagctctcatggacgcttgaaaatgctattgaagcacttcaggaaactatgcttcaggtttcttctgttataatgagattacggcgagaatctttaggagttattgttgttagcaagaaccatgttccaagtgaaggagcctattaccctgctgtgaataatgctctagagattatcaaggacaaacattcacccctaagcaaggttgtgcttgcacgcagtagcagaatcattacggataccgacattgatcctatcgcttggttagcacggttgcagtgtgaaggacaagacgcgtaccaattctgtcttcaaccacccggtgcaccagcattcatagggaacacgcctgagagactcttccacagaaaacatctaggtgtctgcagtgaggctttggctgcaacaaggcctagaggtgattcaaaggttcgtgaaatggagatagagcgcgacttactaaccagtcccaaagacgatcttgagttttctattgtccgagagaatataagagaaaaacttaaaaccatatgtgacagggtagtagttaaaccccataaatcagtgagaaagcttgcaagagtacagcatctatattctcaattggcaggacagctaaaaagagaagatgatgagtttaacatcttaactgctttgcatccgacgccagctgtttgcggatgtccagtagaagaagctaggcttttgattaaacaaattgagtcatttgatagaggaatgtatgctggacctattgggttctttggtggtggggagagtgaattttctgtaggcatacgatctgctttagtcgaaaagggtcttggagcattgatctatgcaggaacaggaatcgtttcaggaagcaatccttcctcggagtggaacgagcttgagcttaagatctctcagttcactaagtcacttgaacatgagtcagctttgcaaccaatcaactaa

SEQ ID NO: 4722 - protein, 512 aa, Arabidopsis thaliana
MNGCEADHKAPLGTVETRTLSTVPSPAAATERLITAVSDLKSQPPPFSSGIVRLQVPIEQKIGAIDWLHAQNEILPRSFFSRRSDSGRPDLLQDFSSDNGSSDHNPVSVAGIGSAVFFRDLDPFSHDDWRSIRRFLSSKSPLIRAYGGLRFDPTGKIAVEWEHFGSFYFTVPQVEFDEFGGSSMLAATVAWDNELSWTLENAIEALQETMLQVSSVIMRLRRESLGVIVVSKNHVPSEGAYYPAVNNALEIIKDKHSPLSKVVLARSSRIITDTDIDPIAWLARLQCEGQDAYQFCLQPPGAPAFIGNTPERLFHRKHLGVCSEALAATRPRGDSKVREMEIERDLLTSPKDDLEFSIVRENIREKLKTICDRVVVKPHKSVRKLARVQHLYSQLAGQLKREDDEFNILTALHPTPAVCGCPVEEARLLIKQIESFDRGMYAGPIGFFGGGESEFSVGIRSALVEKGLGALIYAGTGIVSGSNPSSEWNELELKISQFTKSLEHESALQPIN

SEQ ID NO: 4723 - DNA, 1734 bp, Mycobacterium leprae TN
  CDS (1)..(1734): transl_table=11
atggcgatacggcgtggtcgaaatcgggccagcacattcggctgtaccgagctggagttgaccgataccggccgagcacaggccaagctagctgagcgggccctagcggaacagaaactcgttgatccgatgatggccagcaacccacgtcaatgcgacctagttactgccaagttggccggacttaccgtcgacaaagtatctccattactagctgaatgcacctacggctcctacgaagacctcaccaccgcaaagactcgagaagccgaacctgcttggttggcatggacgcacagatacccgaggggtgaaaaacgtctggcaagtcagcgaacatgccgaccaggccgtcgctatggcgttcgagcacttggagtcacggaccatgtagtccgtcagccatggccacctctgctgggcggtgatcacacgctggatcgggctgccatttgtcgagggccggcgcttcggtatgcgcatcagctcgattgggatgtgcgggttcgagtacgggctacggcaactacacacgcttgggtcgcctggctagccacgaccggtcgcacccgggtgaacatcaacaatgacgacgacaaacgccgcccagtggcgcaggagagagccgaacaaatgagaccaagcgaaccaccgttcgcactatgcggaccacgtgggactctagttgccgacggggtgcacacacgctacgacgatgtgtatttagcgcaagctgcactgcgttctggagttacgccaatactgttgggtgcattacctttcgatgcggaaagccccgccgcactgatggcacctagtgctgtgctgcgcaccgatacactgccaaactggcagaccggcccgctacccaccctgcgcatcactgccgccgtcccaacgcgtgccaactaccgcgtctggataagcaacgcacgcgagcaactcaccgcacctggcaactcactacacaaggtagtgcttgcccgcgcattgcagctggtcgcggacgctccactggacggccgcgccatcctgcgccggctagtcacagccgacccgaccgcgtacggatatctcgtcgacttgaccgcagccggcggccagtacgcgggtgttgccctggtgggcgccagcccagaactgttggtctcgcgcttcggcgaccgtgtagtctgccggccgtttgccggttcggccccacgtgctaccaaccccgaagtcgactccgctaacagcgccgcgctggccggctcgatcaagaaccgtcacgaacatcagctggtcatcgacgcgatacgtgctgccctagagccagtgtgcgacaacttgacgatcgcgcccgagccggaattgagccgcaccgcggcagtctggcacctatgcacaccgatcagcggccggctgcgcgacacctcaatcacagcaatagatttagccttgatgctgcatcccactccagcggtcggtggggtaccggcggaagccgcatccgaacttatcgcagcgctggaaggtgaccgcggtttctacgcaggagcagtgggttggtgcgatgccaggggggacggtcactgggtggtatccatccgctgtgctcagctatcggccgaccgccgcatcgccttcgcccatgctggcggaggcatcgttgccgaatccgatcccgatgacgaagttgatgaaaccacagcgaaattcgccacgattctgaacgcgttgggagttaagcaatga

SEQ ID NO: 4724 - protein, 577 aa, Mycobacterium leprae TN
MAIRRGRNRASTFGCTELELTDTGRAQAKLAERALAEQKLVDPMMASNPRQCDLVTAKLAGLTVDKVSPLLAECTYGSYEDLTTAKTREAEPAWLAWTHRYPRGEKRLASQRTCRPGRRYGVRALGVTDHVVRQPWPPLLGGDHTLDRAAICRGPALRYAHQLDWDVRVRVRATATTHAWVAWLATTGRTRVNINNDDDKRRPVAQERAEQMRPSEPPFALCGPRGTLVADGVHTRYDDVYLAQAALRSGVTPILLGALPFDAESPAALMAPSAVLRTDTLPNWQTGPLPTLRITAAVPTRANYRVWISNAREQLTAPGNSLHKVVLARALQLVADAPLDGRAILRRLVTADPTAYGYLVDLTAAGGQYAGVALVGASPELLVSRFGDRVVCRPFAGSAPRATNPEVDSANSAALAGSIKNRHEHQLVIDAIRAALEPVCDNLTIAPEPELSRTAAVWHLCTPISGRLRDTSITAIDLALMLHPTPAVGGVPAEAASELIAALEGDRGFYAGAVGWCDARGDGHWVVSIRCAQLSADRRIAFAHAGGGIVAESDPDDEVDETTAKFATILNALGVKQ

SEQ ID NO: 4725 - DNA, 1119 bp, Mycobacterium tuberculosis CDC1551
  CDS (1)..(1119): transl_table=11
gtgagcgcacacgtggcaaccttgcacccagaaccaccgttcgcactgtgcggaccaagaggcaccctgattgcccgcggggtgcggacacgatactgcgacgtgcgggccgcgcaagcggcacttcgctcaggtacagcaccaatactgttgggcgcgttgcctttcgacgtgagcagacccgccgcattgatggtgccggatggcgtgctgcgggcccggaagctgcctgactggccgaccggcccgctgcccaaggtacgcgtcgccgccgcccttccgccacctgccgactacctgacccggatcggccgcgcacgggatctgctggccgccttcgacggcccgttgcacaaagtggtgctcgcgcgcgccgtgcaactgaccgccgatgctccgctggacgcgcgggtactgttgcgcaggttggtcgtcgccgacccgaccgcttacggctatctcgtcgacctcacctctgcgggcaacgacgacaccggggcagccctggtcggcgccagcccagagcttctggtcgcacgatccggcaatcgcgtcatgtgcaagccatttgccggctcagccccacgcgccgccgaccccaaactcgacgccgccaacgcggccgcactagccagttcggccaagaaccgacacgaacaccaattggtcgtcgacacgatgcgggtagccctagagccactatgcgaggacctgacaatcccagcccagccccagttgaaccgcaccgcagccgtttggcatctgtgcaccgcgatcaccggccggctgcgcaacatctcgacgacggcaatcgatctggctttggcgctacatcccaccccggcggttggtggggtcccgacaaaagctgccaccgagctcatcgccgaactcgagggcgaccgtggcttctacgccggcgcggttggttggtgcgacggccggggcgacggccattgggtggtgtctatccggtgcgcgcaactttcggctgatcgacgcgcagcccttgcgcacgctggcggtggcatcgtcgccgaatcagaccccgatgacgaacttgaagaaaccacaacgaagttcgccacgatattgaccgcactgggagttgagcagtga

SEQ ID NO: 4726 - protein, 372 aa, Mycobacterium tuberculosis CDC1551
MSAHVATLHPEPPFALCGPRGTLIARGVRTRYCDVRAAQAALRSGTAPILLGALPFDVSRPAALMVPDGVLRARKLPDWPTGPLPKVRVAAALPPPADYLTRIGRARDLLAAFDGPLHKVVLARAVQLTADAPLDARVLLRRLVVADPTAYGYLVDLTSAGNDDTGAALVGASPELLVARSGNRVMCKPFAGSAPRAADPKLDAANAAALASSAKNRHEHQLVVDTMRVALEPLCEDLTIPAQPQLNRTAAVWHLCTAITGRLRNISTTAIDLALALHPTPAVGGVPTKAATELIAELEGDRGFYAGAVGWCDGRGDGHWVVSIRCAQLSADRRAALAHAGGGIVAESDPDDELEETTTKFATILTALGVEQ

SEQ ID NO: 4727 - DNA, 1425 bp, Synechocystis sp. PCC 6803
  CDS (1)..(1425): transl_table=11
atgtccgttgcgacacccctcctcgaccgtcatccatgctccctcgataattcctcggttctgcacggttatctggtggaacagcagaggggacttgcttctggccaacggttcctgtggagctttacggagaacttgggcaaggttgatcccctggcggtatttggggcgctcaatgtccaagataaggtgcatttttacggcgaaaatccccagcgaggggaaaccatactggcttttggtatttgccagtccctgaggatttctggcaagtatcgcttcagtttagcccaacaatttgcagaggaatgtttccagcgcttagtgcccattggtaatgtccagggcagaagtcaacgcccctatattttttgtggctttagtttttttgaccgcccctccaaccgcaatccttttgctaattcttttttgtttttaccccaaatccaagtggtgaaaacgtcccagcattgcttattaagctggcaaattagtttagatggcaacaccaatgtcaccgatttggtggattttatcggtcgaatgctcagcgctatccgtcgggcccaacctgctagggatacccatactccctccatggttgtaaaagctccccgattgacgggaatagaggtggccaagctttccaaggcgatcgcctctagcttggaggaaattgcccagcaaagattgagcaaggtagtgctggcaacggcgttggatttggactatggttctcgactcaatgtggcccattgtttgcaacgactgcggcaacagtatggagattgctatttattctcctggggcaatggccagggggattgttttgtgggggctagcccagaaagattacttagtttgcataatcaacagctggtcaccgatgccctagcaggttcggctcctagggatgtcgatgtccagggcgatcgccaattggggcaagagttattgcacaatcccaaggaattgcgggaacatcaagcggtgttggattacctcctccagcgtctccgggcattgggcctaagcccccaggcttcctccttgaagttgcttaaattggccaatattcagcacctctggacccaaattcaagcccctctgccgccccacatccatcccctggccctggtgcaacaactccatcccacccccgctgtggccggtgtccccgtagcgatcgccgaagatttaatccgtcgccatgaaacctttgaccgcaatctctatgctgctcccctgggttggttggacagtgaaggtaatgctgagtttattgtcggtattcgttctgcccttctgtcccgtaatcgagccagactatacgccggggcgggcattgtggccggttccgatcccctcaaagaagtggcagaaattgagctcaaacttcaaactctctggcgttctttgatttaa

SEQ ID NO: 4728 - protein, 474 aa, Synechocystis sp. PCC 6803
MSVATPLLDRHPCSLDNSSVLHGYLVEQQRGLASGQRFLWSFTENLGKVDPLAVFGALNVQDKVHFYGENPQRGETILAFGICQSLRISGKYRFSLAQQFAEECFQRLVPIGNVQGRSQRPYIFCGFSFFDRPSNRNPFANSFLFLPQIQVVKTSQHCLLSWQISLDGNTNVTDLVDFIGRMLSAIRRAQPARDTHTPSMVVKAPRLTGIEVAKLSKAIASSLEEIAQQRLSKVVLATALDLDYGSRLNVAHCLQRLRQQYGDCYLFSWGNGQGDCFVGASPERLLSLHNQQLVTDALAGSAPRDVDVQGDRQLGQELLHNPKELREHQAVLDYLLQRLRALGLSPQASSLKLLKLANIQHLWTQIQAPLPPHIHPLALVQQLHPTPAVAGVPVAIAEDLIRRHETFDRNLYAAPLGWLDSEGNAEFIVGIRSALLSRNRARLYAGAGIVAGSDPLKEVAEIELKLQTLWRSLI

SEQ ID NO: 4729 - DNA, 1176 bp, Salmonella typhimurium LT2
  CDS (1)..(1176): transl_table=11
atggatatgtcactggccgaggacgctcaggagacaatggcaacgcttgctcccgatcgctttttcttcatgtcgccgtatcgcagttttaccacttccgggtgcttcgcccgttataccgagcctgcggttgccggagattcgccggatagccctttccagcagaaattgcgccagcagtttgccgaggccaaatcgcagggcatcgccaaccctatcctggtgggggcgatcccctttgatactcgtcagccgtcgtcgctatttatcccgatggcgtggcagtccttttcccgccagcaaaagcagcgcacggcgcgttattttactgaccatcagtcgctgacggtgacggcgcgaaaggcgattccggagcaggatgcttttgaagcgatggtcgcacgcgcggctatgctgaccgccacgccagacgtcgataaagtggtgctttcccggctgatagatatcaccactgatgtggcggtggatagcggagcattgctggagcggctggttgcgcagaatccagttagttacaacttccatgtgccactggcggatggcggcgttctgctgggcgccagccccgaattgctgctacgcaaagagggcgagcggtttagttcgctgccgttagcaggctcggcacgtcgacagccggatgacgttctggatcgcgaggcgggaaaccgactgctggcttcacaaaaagatcggcatgaacatgagctggtgacgcaggcgatgaagcagatcctgcgcgatcgcagcacggaactgcaattaccttcctctccgcagttgatcaccacgccgacgctatggcatctcggtacgccgtttgagggcaaggccaacgccggagaaaacgcgctgacgctggcctgtctgctgcatccaacgcctgcgttaagcggtttccctcatcaggtcgcgaaaaagctgattgctgaactggaaccgttcgatcgtgaactgtttggcggcattgtcggctggtgcgatgccgaaggaaacggcgagtgggtagtgacgattcgttgtgcgaaattgcacggtaatcaggtgcgcctgttcgctggcgccgggattgtccctgcctcttcgccagtcggcgagtggcgggaaaccggcgtcaagctctctacgatgttgaacgtttttggactgcattaa

SEQ ID NO: 4730 - protein, 391 aa, Salmonella typhimurium LT2
MDMSLAEDAQETMATLAPDRFFFMSPYRSFTTSGCFARYTEPAVAGDSPDSPFQQKLRQQFAEAKSQGIANPILVGAIPFDTRQPSSLFIPMAWQSFSRQQKQRTARYFTDHQSLTVTARKAIPEQDAFEAMVARAAMLTATPDVDKVVLSRLIDITTDVAVDSGALLERLVAQNPVSYNFHVPLADGGVLLGASPELLLRKEGERFSSLPLAGSARRQPDDVLDREAGNRLLASQKDRHEHELVTQAMKQILRDRSTELQLPSSPQLITTPTLWHLGTPFEGKANAGENALTLACLLHPTPALSGFPHQVAKKLIAELEPFDRELFGGIVGWCDAEGNGEWVVTIRCAKLHGNQVRLFAGAGIVPASSPVGEWRETGVKLSTMLNVFGLH

SEQ ID NO: 4731 - DNA, 1257 bp, Brucella melitensis 16M
  CDS (1)..(1257): transl_table=11
ttgggaccaattaaatcaagtataaaacgtgactggttctttcaagtattaatttcggcaacgacgccaaggagactccccgtgagaacgagcgccctgaaatacccaacttcagacgcagaccatcttattgaaaataatactgatttctcgtttgcatccggcaatctgaaactggcggccagcggcatgcgtaaggtgatcgcgacgcctgccattggcggcagcaaccccgacagcaccttccagcgggcaattgcgcaggctttcgagcgcgccgcacgcgctgggcagcgcaatccgatcgtggtgggtgcaatcccgttcgaccccggcgaaccctcctgtctctatgtgcccgaggagatggactggcaggagcgggagccagccagcggggcgagcgccgccgccatgccgcaactggcggggcagagaagcgtaccggacgaagcgggtttcaagcacgcggtagaacatgccatcatcaattttcgccttagcgacgtgcgcaaggcggtgctttcggtgatgcgcgaactcactttcgcggacgatatcgatgtcgacgccatgctggccaatctgcgcgcgcaaaaccatgacggctatcagtttcgcgtgcctttgcccggtggcggcgcattggtcggtgtcagcccggaactcctgatccacaaggacaagggaaagatcgtatccaaccctctggccggatcggcgaagcgcatggccgacccggaggcggacaggaaaaatgccgatcgcctggccaaatccgaaaaggaccattacgaacatcgcctggtgatcgaggatatcagagcacggcttcagcccatctgcacggaactggacataccggaacggccgtcgctcatccacacggcagcactctggcatctttcgacccgcatcgagggccggctgcatgatcccgatatgacagccttgcagcttgcctgcctcatccacccgacgcctgccgtctgcggtttcccgaccgagcgcgcgcgccgcctgatccgctttgtagaacctttcgagcgtggattgtttaccggcatggtcggctggagcgacgcggaaggcaatggcgaatgggtcgtcaccatccgttgcggcacggtgaagggcaatcttgtgcgcctctttgccggggcggggatcgtggaagcctccagcccggattccgaatgggccgaagtacagaccaagcttggcaccatgctgcgtgcctgcggcctttcggcctga

SEQ ID NO: 4732 - protein, 418 aa, Brucella melitensis 16M
MGPIKSSIKRDWFFQVLISATTPRRLPVRTSALKYPTSDADHLIENNTDFSFASGNLKLAASGMRKVIATPAIGGSNPDSTFQRAIAQAFERAARAGQRNPIVVGAIPFDPGEPSCLYVPEEMDWQEREPASGASAAAMPQLAGQRSVPDEAGFKHAVEHAIINFRLSDVRKAVLSVMRELTFADDIDVDAMLANLRAQNHDGYQFRVPLPGGGALVGVSPELLIHKDKGKIVSNPLAGSAKRMADPEADRKNADRLAKSEKDHYEHRLVIEDIRARLQPICTELDIPERPSLIHTAALWHLSTRIEGRLHDPDMTALQLACLIHPTPAVCGFPTERARRLIRFVEPFERGLFTGMVGWSDAEGNGEWVVTIRCGTVKGNLVRLFAGAGIVEASSPDSEWAEVQTKLGTMLRACGLSA

SEQ ID NO: 4733 - DNA, 1131 bp, Corynebacterium glutamicum ATCC 13032
  CDS (1)..(1131): transl_table=11
atgtctgcccaccgcaacccctctgcccccaacaccgccccagatttcctcttatccagaggccacgggtctgtgcgcacccaaggatcaaaagaagtattcaccgatccctgggaggcagtagacgcccttaaacaagggcgcgtagccatggtggtgggtgctttgcccttcgaacgggacaaaccagcagcactgactgtcccagaacacatcatccgcgaagacggccccctagaacctcacgcctactacaggtttggaccaggctcagtactgcacgccagcgtcgcaggaattgatccctcaccgattgagcatttacgacgcgtcaatgcagccatcaataccatcaacaacactgtcctgaacaaagttgtgctcgcgcgcgccgtggacatctccttcgagccacccgttgatcccctgctggtggccgcacgtttgattgataactcccacaacaaggacggtttcatcgccgacctgacccctgcaggcccagactttgcaggccacatgctggttggatcctccccggaggtgttaatcaaacgccaaggttccaccatcaccgcatacccactggccggctccgcaccacggcttgccgatccagtgcgcgatgaagcccaaggacaaaacctcctggccagcgccaaaaacctagaagaacactcctacgtggtcaaccacctgcgcaccatcctggaaccactgtgctcacaattcgacgccccaacagttcctgaactgaccaaaaccaacgaaatgtggcacctcgcaacacccatcgttggcaccctcaagtacccacacatcaccgcactagaactagccatccgcacacaccccacccccgcgatctgtggcacccccaccgacgccgccgaagccctcatcatcgaagcggaatccccccgaaacttctacgccggagcagtcggctggtgtgactccaccggagacggcgaatacatggtagccatccgctgcgccgaagtatccgaagacggaacctgggccagagcatgggcaggcggaggcatcgtcgccgaatcagacgcccaagaagagtttgatgaaaccaccgcgaagctccaaaccatcatgcgctcgcttggtttgtga

SEQ ID NO: 4734 - protein, 376 aa, Corynebacterium glutamicum ATCC 13032
MSAHRNPSAPNTAPDFLLSRGHGSVRTQGSKEVFTDPWEAVDALKQGRVAMVVGALPFERDKPAALTVPEHIIREDGPLEPHAYYRFGPGSVLHASVAGIDPSPIEHLRRVNAAINTINNTVLNKVVLARAVDISFEPPVDPLLVAARLIDNSHNKDGFIADLTPAGPDFAGHMLVGSSPEVLIKRQGSTITAYPLAGSAPRLADPVRDEAQGQNLLASAKNLEEHSYVVNHLRTILEPLCSQFDAPTVPELTKTNEMWHLATPIVGTLKYPHITALELAIRTHPTPAICGTPTDAAEALIIEAESPRNFYAGAVGWCDSTGDGEYMVAIRCAEVSEDGTWARAWAGGGIVAESDAQEEFDETTAKLQTIMRSLGL

SEQ ID NO: 4735 - DNA, 1197 bp, Oceanobacillus iheyensis HTE831
  CDS (1)..(1197): transl_table=11
atgtctgtaaagacgttaaatgaagagcaacaattaattaatcaatatagtcaagaagattacttattgtcttttccaagcaaatgcattttaggtaaagggaaagcagttgaactaactaattcggaacaaaacggattgccatttagcaaaagaatcgaatcccttctacataaaggaacattgaatgggatggaaaatccaattgttattggtgctttgccatttcatcaacaagataaagggacattagttataccagaagaaattcagcaatcagaagtacaacaaattgtagataattcattgtcatcagataatgtctcttcaacacatatacaatcgattccctctggtaaggaatatgcaaaagcagtggagagggttacgaaagaaattcaacaaggaaagttagaaaaagcggttcttggcagggttctacaaatagatgtagacaagcaaccaactatttcacaactcgttcagaacctaattacacataatcatgataagtataattttgccttaaatacatcagaagaaaataaagaaaaaacattaattggtgctagtccagaattattaatttccaaaaaaggaagcatcgttgtttccaaccctttggccggatcgcgtccaaggcaaaaagatccagaaaaagatgtattaatggcgcaggaattacgccattcagaaaaagatttgcatgaacataagcttgttgttcagtctgtagcaaatgcattgcgacctttttgcaaggagttacatgtaccaaaagaaccatctatcattcatacagagacaatgtggcatctttcaacagaaatcattggtcatttagaagatccgtttacacaatcaattgaaatagctgaaaatttgcatccaacaccagcgatatgtggaactccaaacgatattgcattggagaacattaagcagcttgaaccatttaaccgagaatattttaccggtttaattggttggagcgataaaaatggagatggtgaatgggcgattacaattcgctgtgcggagatagaacaaaataggattcgtatgtttgcaggtgcaggagttgtacaagattcagtcccagaagaagaaaaaaacgaaacggctgcgaagttacaaacgatgctacgtgtatttggaatagatttttacgaagaggaagggaatggatcatgctag

SEQ ID NO: 4736 - protein, 398 aa, Oceanobacillus iheyensis HTE831
MSVKTLNEEQQLINQYSQEDYLLSFPSKCILGKGKAVELTNSEQNGLPFSKRIESLLHKGTLNGMENPIVIGALPFHQQDKGTLVIPEEIQQSEVQQIVDNSLSSDNVSSTHIQSIPSGKEYAKAVERVTKEIQQGKLEKAVLGRVLQIDVDKQPTISQLVQNLITHNHDKYNFALNTSEENKEKTLIGASPELLISKKGSIVVSNPLAGSRPRQKDPEKDVLMAQELRHSEKDLHEHKLVVQSVANALRPFCKELHVPKEPSIIHTETMWHLSTEIIGHLEDPFTQSIEIAENLHPTPAICGTPNDIALENIKQLEPFNREYFTGLIGWSDKNGDGEWAITIRCAEIEQNRIRMFAGAGVVQDSVPEEEKNETAAKLQTMLRVFGIDFYEEEGNGSC

SEQ ID NO: 4737 - DNA, 1176 bp, Brucella suis 1330
  CDS (1)..(1176): transl_table=11
gtgagaacgagcgccctgaaatacccaacttcagacgcagaccatcttattaaaaataatactgatttctcgtttgcatccggcaatctgaaactggcggccagcggcatgcgtgaggtgatcgcgacgcctgccattggcggcagcaaccccgacagcaccttccagcgggcaattgcgcaggctttcgagcgcgccgcacgcgctgggcagcgcaatccgatcgtggtgggtgcaatcccgttcgaccccggcgaaccctcctgtctctatgtgcccgaggagatggactggcaggagcgggagccagccagcggggcgagcgccgccgccatgccgcaactggcggggcagagaagcgtaccggacgaagcgggtttcaagcacgcggtagaacatgccatcatcaattttcgccttagcgacgtgcgcaaggcggtgctttcggtgatgcgcgaactcactttcgcggacgatatcgatgtcgacgccatgctggccaatctgcgcgcgcaaaaccatgacggctatcagtttcgcgtgcctttgcccggtggcggcgcattggtcggtgtcagcccggaactcctgatccacaaggacaagggaaagatcgtatccaaccctctggccggatcggcgaagcgcatggccgacccggaggcggacaggaaaaatgccgatcgcctggccaaatccgaaaaggaccattacgaacatcgcctggtgatcgaggatatcagagcacggcttcagcccatctgcacggaactggacataccggaacggccgtcgctcatccacacggcagcactctggcatctttcgacccgcatcgagggccggctgcatgatcccgatatgacagccttgcagcttgcctgcctcatccacccgacgcctgccgtctgcggtttcccgaccgagcgcgcgcgccgcctgatccgctttgtagaacctttcgagcgtggattgtttaccggcatggtcggctggagcgacgcggaaggcaatggcgaatgggtcgtcaccatccgttgcggcacggtgaagggcaatcttgtgcgcctctttgccggggcggggatcgtggaagcctccagcccggattccgaatgggccgaagtacagaccaagcttggcaccatgctgcgtgcctgcggcctttcggcctga

SEQ ID NO: 4738 - protein, 391 aa, Brucella suis 1330
MRTSALKYPTSDADHLIKNNTDFSFASGNLKLAASGMREVIATPAIGGSNPDSTFQRAIAQAFERAARAGQRNPIVVGAIPFDPGEPSCLYVPEEMDWQEREPASGASAAAMPQLAGQRSVPDEAGFKHAVEHAIINFRLSDVRKAVLSVMRELTFADDIDVDAMLANLRAQNHDGYQFRVPLPGGGALVGVSPELLIHKDKGKIVSNPLAGSAKRMADPEADRKNADRLAKSEKDHYEHRLVIEDIRARLQPICTELDIPERPSLIHTAALWHLSTRIEGRLHDPDMTALQLACLIHPTPAVCGFPTERARRLIRFVEPFERGLFTGMVGWSDAEGNGEWVVTIRCGTVKGNLVRLFAGAGIVEASSPDSEWAEVQTKLGTMLRACGLSA

SEQ ID NO: 4739 - DNA, 1131 bp, Corynebacterium efficiens YS-314
  CDS (1)..(1131): transl_table=11
atggctacaccccttgacccccaggccccgcccaccgcgccggatttcctcctctcgcgggcgcacggctcggtgcgcacccagggctcacaggagaccttcacggacccctgggacgccgtggaggcgcttcgaggggggcgggtggagatggtcgtgggtgccctgccgttcgaacgggacaaaccggccgcgctgaccgtgccggagcgcatcatccgtgaggacggccccctcgagccacacgcctactaccgccgcggtcccgggtcggtgctcgccgcccgcgtggtcgggatggatccctcccccgaggagcatttacgacgcgtggatgccgccatccgcaccatccgcaattccgccctgggcaaggtggtgctggcgcgtgccgtcgacatcgccttcgatcccgcggtggacccccgcctggtggcggcccgcctgatcgacaactcctacaaccgggacggtttcatcaccgacctcaccgccgccggccccgggttcaccggccacatgctggtcggttcctcccccgaggtactcatcaaacggcagggttccaccgtcaccgcctatcccctggccgggtccgccccacgttccgaggacgcggccgaggacgcccgccgcgccgacagcctccattccagtgccaagaacctggaggagcacgcctatgtggtggaccacatccgggcggcgctggcaccactgtgctcacgggtggacatccccgcccgcccggaactgacccgcacccatgagatgtggcatctggccaccccgatcgcgggcaccctgaaggatccttccaccacggcgctggaactggcgatccgggtccaccccacaccggcgatctgcggcacccccaccgatgccgccgagggcctgatcatcgaggcggaatccccccgcaacttctacgccggtgccgtgggctggtgtgatgacaccggtgacggggaatacatggtggccatccgctgcgcggaggtctccggggatggaaaaaccgcccgcgcgtgggcgggcggtgggattgtggctgattccgatgctcaggaggagttcgacgagaccacggccaagctgcgcaccatcatgcgctcactgggcctgtag

SEQ ID NO: 4740 - protein, 376 aa, Corynebacterium efficiens YS-314
MATPLDPQAPPTAPDFLLSRAHGSVRTQGSQETFTDPWDAVEALRGGRVEMVVGALPFERDKPAALTVPERIIREDGPLEPHAYYRRGPGSVLAARVVGMDPSPEEHLRRVDAAIRTIRNSALGKVVLARAVDIAFDPAVDPRLVAARLIDNSYNRDGFITDLTAAGPGFTGHMLVGSSPEVLIKRQGSTVTAYPLAGSAPRSEDAAEDARRADSLHSSAKNLEEHAYVVDHIRAALAPLCSRVDIPARPELTRTHEMWHLATPIAGTLKDPSTTALELAIRVHPTPAICGTPTDAAEGLIIEAESPRNFYAGAVGWCDDTGDGEYMVAIRCAEVSGDGKTARAWAGGGIVADSDAQEEFDETTAKLRTIMRSLGL

SEQ ID NO: 4741 - DNA, 1188 bp, Escherichia coli CFT073
  CDS (1)..(1188): transl_table=11
gtggaggatgatatggatacgtcactggctgaggaagtacagcagaccatggcaacacttgcgcccaatcgctttttctttatgtcgccgtaccgcagttttacgacgtcaggatgtttcgcccgcttcgatgaaccggctgtgaacggggattcgcccgacagtcccttccagcaaaaactcgccgcgttgtttgccgatgccaaagcgcagggcatcaaaaatccggtgatggtcggggcgattcccttcgatccacgtcagccttcgtcgctgtatatacctgaatcctggcagtcgttctcccgtcaggaaaaacaagcttccgcacgccgtttcacccgcagccagtcgctgaacgtggtggaacgtcaggccattccggaacaaaccacgtttgaacagatggttgcccgtgctgccgcacttaccgccacgccgcaggtcgacaaagtggtgttgtcacggttgattgatatcactactgacgccgccattgatagtggcgtattgctggaacggttgattgcgcaaaacccggttagttacaacttccatgttccgttggctgatggtggcgttctgctgggggccagcccggaactgctgctacgtaaagacggcgagcgttttagctccattccgttagccggttccgcgcgtcgtcagccggatgaagtgctcgatcgcgaagcgggtaatcgtctgctggcgtcagaaaaagatcgccatgaacatgaactggtgactcaggcgatgaaagaggtactgcgcaaacgcagtagtgagttacacgttacctcctctccacaattgattaccacgccgacgctgtggcatctcgcaactccctttgaaggtaaagcgaattcgcaagaaaacgcactgactttggcttgtctgctgcatccgacccccgcgctgagcggtttcccgcatcaggccgcgactcaggttattgctgaactggagccgttcgaccgcgaactgtttggcggcattgtgggttggtgtgacagcgaaggtaacggtgaatgggtggtgaccatccgctgcgcgaagctgcgggaaaatcaggtgcgtctgtttgccggagcggggattgtgcctgcgtcctcaccgttgggtgagtggcgcgaaacaggcgtcaaactttctaccatgttgaacgtttttggattgcattaa

SEQ ID NO: 4742 - protein, 395 aa, Escherichia coli CFT073
MEDDMDTSLAEEVQQTMATLAPNRFFFMSPYRSFTTSGCFARFDEPAVNGDSPDSPFQQKLAALFADAKAQGIKNPVMVGAIPFDPRQPSSLYIPESWQSFSRQEKQASARRFTRSQSLNVVERQAIPEQTTFEQMVARAAALTATPQVDKVVLSRLIDITTDAAIDSGVLLERLIAQNPVSYNFHVPLADGGVLLGASPELLLRKDGERFSSIPLAGSARRQPDEVLDREAGNRLLASEKDRHEHELVTQAMKEVLRKRSSELHVTSSPQLITTPTLWHLATPFEGKANSQENALTLACLLHPTPALSGFPHQAATQVIAELEPFDRELFGGIVGWCDSEGNGEWVVTIRCAKLRENQVRLFAGAGIVPASSPLGEWRETGVKLSTMLNVFGLH

SEQ ID NO: 4743 - DNA, 1170 bp, Salmonella enterica subsp. enterica serovar Typhi Ty2
  CDS (1)..(1170): transl_table=11
atgtcactggccgaggacgctcaggagacaatggcaacgcttgctcccgatcgctttttcttcatgtcgccgtatcgcagttttaccacttccgggtgcttcgcccgttataccgagcctgcggttgccggagattcgccggatagccctttccagcagaaattgcgccagcagtttgccgaggccaaatcgcagggcatcgccaaccctatcctggtgggggcgatcccctttgatacccgtcagccgtcgtcgctatttatcccgatggcgtggcagtccttttcccgccagcaaaagcagcgcacggcgcgttattttactgaccatcagccgctgacggtgacggcgcgaaaggcgattccggagcaggatgcttttgaagcgatggtcgcacgcgcggctatgctgaccgccacgccagacgtcgataaagtggtgctttcccggctgatagatatcaccactgatgtggcggtggatagcggagcattgctggagcggctggttgcgcagaatccagttagttacaacttccatgtgccactggcggatggcggcgttctgctgggcgccagccccgaattgctgctacgcaaggagggcgagcggtttagttcgctgccgttagcaggctcggcacgccgacagcccgatgacgttctggatcgcgaggcgggaaaccgactgctggcttcacaaaaagatcgccatgaacatgagctggtgacgcaggcgatgaagcagatcctgcgcgatcgcagcacggaactgcaattaccttcctctccgcagttgatcaccacgccgacgctatggcatctcggtacgccgtttgagggcaaggccaacgccggagaaaacgcgcttacgctggcctgtctgctgcatccgacccctgcgttaagcggtttcccccatcaggtcgcgaaaaagctgattgctgaactggagccgttcgatcgtgaactgtttggcggcattgtcggctggtgcgatgccgaaggaaacggcgagtgggtagtgacgattcgttgtgcgaaattgcacggtaatcaggtgcgcctgttcgccggcgccgggattgttcctgcctcttcgccagtcggcgagtggcgggaaaccggcgtcaagctctctacgatgttgaacgtttttggactgcattaa

SEQ ID NO: 4744 - protein, 389 aa, Salmonella enterica subsp. enterica serovar Typhi Ty2
MSLAEDAQETMATLAPDRFFFMSPYRSFTTSGCFARYTEPAVAGDSPDSPFQQKLRQQFAEAKSQGIANPILVGAIPFDTRQPSSLFIPMAWQSFSRQQKQRTARYFTDHQPLTVTARKAIPEQDAFEAMVARAAMLTATPDVDKVVLSRLIDITTDVAVDSGALLERLVAQNPVSYNFHVPLADGGVLLGASPELLLRKEGERFSSLPLAGSARRQPDDVLDREAGNRLLASQKDRHEHELVTQAMKQILRDRSTELQLPSSPQLITTPTLWHLGTPFEGKANAGENALTLACLLHPTPALSGFPHQVAKKLIAELEPFDRELFGGIVGWCDAEGNGEWVVTIRCAKLHGNQVRLFAGAGIVPASSPVGEWRETGVKLSTMLNVFGLH

SEQ ID NO: 4745 - DNA, 1200 bp, Bacillus cereus ATCC 14579
  CDS (1)..(1200): transl_table=11
atgaatgaacatatagctgtaaaggaattgtcagaaaaacttttagaagattataagactgaatcttcattcttttttgcttcaccaactcgaacgatattagcagaaggagagtttactacagtaaagcatcgtgaaattgaaaatttcccagagcttgtgcaagcgacattaagtaatgcgaaacaagctggaaatccaaatcctatcgttgtgggtgctttgccattcgatcgtagaaaagaagtgcaacttatcgtaccagaatatagtaggatttctgagcgtttacaattggatacaacaaatcagcttgaaacaaatgagaacgtaacatttgaaatgacgccaatgccagaccctgaagtttatatgaatggtgtgaagcaaggaattaaaaaaatacaggtcggtgatttaaagaaaatcgttctatctagatcgttagatgttaaatcttcggaaaagattgataagcaaaaacttctgcgagaattagcagagcataataagcatggttatacatttgctgtgaatttaccgaaagatgaaaaagagaacagtaagacgctaattggagcaagtcctgaattgcttgtttcacgtaatggtatgcaagttatttctaatccgttagctggttcaaggccacgtagtgaggacctagtagaagataaaagaagagcagaggaattactttcttctccaaaagatttacatgaacatgcggtagtagttgaagcggttgccgctgcacttcgtccgtattgtcatacattacatgtcccagaaaagccatcagttattcatagtgaagcgatgtggcatttgtctacagaagtgaaaggtgaacttaaggatccaaatacttcttctttacaattagcaattgcccttcatcctacgccagcagtttgcggaactccgatggaaaaagcaagagaggctatacagcatattgagccatttgaccgcgagttctttacaggaatgctaggatggagcgatttaaatggagatggagaatggattgttacaattcgttgtgctgaagtacaagaaaatacacttcgtttatatgcaggagctggagttgttgctgagtcaaaaccagaagatgagttagcagaaacatcggctaagttccaaacaatgttaaaagctttagggttaagagatagttcacttaatgaaaaatag

SEQ ID NO: 4746 - protein, 399 aa, Bacillus cereus ATCC 14579
MNEHIAVKELSEKLLEDYKTESSFFFASPTRTILAEGEFTTVKHREIENFPELVQATLSNAKQAGNPNPIVVGALPFDRRKEVQLIVPEYSRISERLQLDTTNQLETNENVTFEMTPMPDPEVYMNGVKQGIKKIQVGDLKKIVLSRSLDVKSSEKIDKQKLLRELAEHNKHGYTFAVNLPKDEKENSKTLIGASPELLVSRNGMQVISNPLAGSRPRSEDLVEDKRRAEELLSSPKDLHEHAVVVEAVAAALRPYCHTLHVPEKPSVIHSEAMWHLSTEVKGELKDPNTSSLQLAIALHPTPAVCGTPMEKAREAIQHIEPFDREFFTGMLGWSDLNGDGEWIVTIRCAEVQENTLRLYAGAGVVAESKPEDELAETSAKFQTMLKALGLRDSSLNEK

SEQ ID NO: 4747 - DNA, 1200 bp, Bacillus anthracis str. Ames
  CDS (1)..(1200): transl_table=11
atgaatgaatttacggctgtaaaggaactgtcagaaaaattactagaagattataagactgaatcttcattcttttttgcttcaccaacccgaacgatattagcagaaggagaatttactacagtaaagcatcatgaaattgaaagcttcccagagcttgtgcaagcagtattacgtaatgcaaaacaagccggaaatccgaatcctatcgttgtgggggctttgccatttgatcgtagaaaagaagtccaacttatcgtaccagaatatagcagaatttctgagcgtttacaattggatccaacaaatcatcttgaaataaataggaacttaacattcgaaatgacgcctgtgccagatcatgaagtgtatatgaaaggtgtgaagcaaggaattgaaaaaataaaggacggagatttaaagaaaatcgttctatctagatcgttagatgttaaatcttctggaaaaattgataagcaaaaacttcttcgagaattagcagagcataataagcacggttatacatttgcggtgaatttaccgaaagatgaaaacgagaatagtaagacgctaattggagctagtcctgaattacttgtttcacgtcatggtatgcaagtgatttctaatccgttagctggttcaagaccacgtagtgacgatccagtagaagataaaagaagagcggaggaattactttcttctccaaaagatttgcatgaacatgcggtagtagtggaagcagttgctgctgcgcttcgcccatactgtcatacattatatgttccggaaaaaccatctgttattcatagtgaagcgatgtggcatttgtctactgaagtgaaaggtgaactaaagaatccaaatactagttctttagaattagcaattgctcttcatcctacgccagcagtttgcggaacgccgatggaagaagcgagagaagctattcaaaaaattgagccatttgaccgtgagttctttacaggaatgttaggttggagcgatttaaatggagacggtgaatggattgttacaattcgttgtgctgaagtacaagaaaatacactccgtttatatgcaggtgctggagttgttgctgagtcaaaaccagaagatgaattagcagaaacatcagctaagtttcaaacaatgttgaaagctttagggttaaatgatagttcacttaatgaaaagtag

SEQ ID NO: 4748 - protein, 399 aa, Bacillus anthracis str. Ames
MNEFTAVKELSEKLLEDYKTESSFFFASPTRTILAEGEFTTVKHHEIESFPELVQAVLRNAKQAGNPNPIVVGALPFDRRKEVQLIVPEYSRISERLQLDPTNHLEINRNLTFEMTPVPDHEVYMKGVKQGIEKIKDGDLKKIVLSRSLDVKSSGKIDKQKLLRELAEHNKHGYTFAVNLPKDENENSKTLIGASPELLVSRHGMQVISNPLAGSRPRSDDPVEDKRRAEELLSSPKDLHEHAVVVEAVAAALRPYCHTLYVPEKPSVIHSEAMWHLSTEVKGELKNPNTSSLELAIALHPTPAVCGTPMEEAREAIQKIEPFDREFFTGMLGWSDLNGDGEWIVTIRCAEVQENTLRLYAGAGVVAESKPEDELAETSAKFQTMLKALGLNDSSLNEK

SEQ ID NO: 4749 - DNA, 1179 bp, Chromobacterium violaceum ATCC 12472
  CDS (1)..(1179): transl_table=11
atgcacaccgcgtcggccctgaccggcaacgccgaagacggcgagttttatttcatgtcgtcccaccgcagcctgaaggccggcggtgtccattcccggatccgcacgcccgcccgcggcgcgctggatccccgcagcgcttttagcctcgaagtggcggaagccttcgcccgcgcccgcgccggcggcatcgaatccccagtgctgatgggcgccatccccttcgacatcgaccagccttccgaattgttcatccccgcccgccatgccttcttcgaccgcggcgagcgcctgctggcggccgcccagcgcgccggcgacggcggcaaggtggtcagcgcgcgcagcattccggacgagcaaggcttcaaggcggcggtcagccaggccatcgagcaattcggccgcggcgagatccgcaaggcggtgctgtcccgcgtgctggaggtggacttcgagcgcccggtgtcggcggaacgggtgttcgacgcggtatgcgcgcagaatcccaacggctaccagttccagctgccgctggccgacggcggccacctggtgggcgtgagtccggagctgctgctgcaaaaggacggcgcgcgcgtgcgcaccttcccgctggccggctccgccaagcgccagggcgacccggcggctgacgccgccgccagcgccaagctgctggattcggcgaaggaccactacgagcacagcctggtgatagacgatatccgcgacgtgctggcgccctattgctcccggctggacatccccgccgcgccgacgctgctggccacccgcgcgatgtggcatctgggctcgccgatagacggcgtgctctccgacccctcgctgccgattctgcagctggcctgccgcctgcatccgacgccggcgatctgcggcttccccacccaggcttcgcgccaactgatccgagagatcgagccgttcgagcgcggcgtgttcagcggcatcgtcggctggtgcgacgaacacggcaacggcgaatgggcggtgaccatacgctgcgccaccgtcgcccagcgccgcgtgcggctgttcgccggcgccggcatcgtcgccgcttccacgccggaagcggaatgggcggaaacccaggccaagctcggcaccatgctgggtgccttcggcctgtccggccaggaggcggtggcatga

SEQ ID NO: 4750 - protein, 392 aa, Chromobacterium violaceum ATCC 12472
MHTASALTGNAEDGEFYFMSSHRSLKAGGVHSRIRTPARGALDPRSAFSLEVAEAFARARAGGIESPVLMGAIPFDIDQPSELFIPARHAFFDRGERLLAAAQRAGDGGKVVSARSIPDEQGFKAAVSQAIEQFGRGEIRKAVLSRVLEVDFERPVSAERVFDAVCAQNPNGYQFQLPLADGGHLVGVSPELLLQKDGARVRTFPLAGSAKRQGDPAADAAASAKLLDSAKDHYEHSLVIDDIRDVLAPYCSRLDIPAAPTLLATRAMWHLGSPIDGVLSDPSLPILQLACRLHPTPAICGFPTQASRQLIREIEPFERGVFSGIVGWCDEHGNGEWAVTIRCATVAQRRVRLFAGAGIVAASTPEAEWAETQAKLGTMLGAFGLSGQEAVA

SEQ ID NO: 4751 - DNA, 1182 bp, Vibrio vulnificus YJ016
  CDS (1)..(1182): transl_table=11
atgaaacgtgaagtgattggctataccaaaatggcaaacgaactgttggataacgaactatcatcgtcgccatttttcttcgcttctccaaataacactatgatgggcatcggcgttcaagaagagcgtcttcaaaccttgccattttctgaattggctgatgtggcgaataacatgctcaagaatgccaaaactagcgaatcagacaatccggttttgtttggtgttgtgccatttaatcaagaaaacatgactcgatttgttattccaaagacgttgtacatctccagtagcacccgagcttcgcacacgtccgcctcctcagcaccacaagctcgtcttatttcttcgccaagtggccaccactataagcagggggtacatgatctcttagggatgtttgccaatcaggaactctcgaaagtcgtactgtctcgtgctatagaagtggcgacagaaaccgacattcaacagcaagccttactgagaaacttgctctccattaacgctaaaggctacacctttgctgcgcaaattggcgacaaccaaaagttgatgggagccagcccagagctgcttgtagccaaaaaaggcagccacctgatttccaatccgctggccggttcaagaccacgctcagagtctgagcaacaaaatcaggcgtccattcaatcgctgctcaatacgggcaaggatctccatgaacacggcttggtggtagaagaagttgagcgcgtcatgagcaagtattgctgcaatttgtacacgccgatggttccgtcggtgatcgagacccaaacgatgctgcatctttctacacaactcgaaggacaagtgttggatcctgccatcaatgtgttgcaagtggcagcggagctgcatcccaccccagcggtctgtggctaccctcgcgagaaagcctatgaagcgatcaaaagattggaacagtttgatcgcggttattttaccggcatggttggatggtgcgattcacgtggaaatggggagtgggttgtgacgattcgctgcgcagaagtgcagccgcgtcggatgaaggtgtttgctggagcgggcatcgtcaatgagtcgcaacctcaaagtgagcttgatgaaacaggggccaaaatgaacaccatcttaaaagccgcagggattcaactgaacgaaatgttaacggcataa

SEQ ID NO: 4752 - protein, 393 aa, Vibrio vulnificus YJ016
MKREVIGYTKMANELLDNELSSSPFFFASPNNTMMGIGVQEERLQTLPFSELADVANNMLKNAKTSESDNPVLFGVVPFNQENMTRFVIPKTLYISSSTRASHTSASSAPQARLISSPSGHHYKQGVHDLLGMFANQELSKVVLSRAIEVATETDIQQQALLRNLLSINAKGYTFAAQIGDNQKLMGASPELLVAKKGSHLISNPLAGSRPRSESEQQNQASIQSLLNTGKDLHEHGLVVEEVERVMSKYCCNLYTPMVPSVIETQTMLHLSTQLEGQVLDPAINVLQVAAELHPTPAVCGYPREKAYEAIKRLEQFDRGYFTGMVGWCDSRGNGEWVVTIRCAEVQPRRMKVFAGAGIVNESQPQSELDETGAKMNTILKAAGIQLNEMLTA

SEQ ID NO: 4753 - DNA, 1134 bp, Corynebacterium diphtheriae NCTC 13129
  CDS (1)..(1134): transl_table=11
atgtgtgcccatcgccccgctactgcccccgattttttactctcccgtagccatggctctatccgtacccaaggcgcggtagagacgttttccgaccccgggaaagcggtagaagccttacgtagcgggcgcgtagagctcgttgttggcgcccttgcttttcgacgcgaccacgcctgcgcccttacggttccccgctccgtcatacgcgaggagggccccttagagccccacgcatattaccgacaaggacccggcagcattgtgaatgctcaagtagaaaagcttgtcccatcactcgataaacatcatgcccgcgtcgaagcagcgatcaatacaataaagtccacatccttgaaaaaagtcgttttagcacgcgcagtggatatgacgttctcccctgccgtcgatccacgacttatcgctgcacgcctgattgatctttcccgcaaccgcgatggtttcatcgcagacctcacccctgccggcgaagattttgcaggagcaatgcttgtaggctcatcaccagaagtacttatcaagaaacaaggctcaaccgtgacggcgtatcccctcgctggttctgcacccagaagcgcggatgcggtcacagatgccaccaatgccgaacttttacgacgttcccacaaagatctacaagaacactcgtacgttgtagagcatcttcgcaatgttttagagccactatgttcaaagctcagcatccccgcaaaccctgagctcaccaagaccaatgaaatgtggcaccttgccactcctgttgttggaaccttaaaggacgcatcacttactgcacttgaattagcaatgcgcactcatcccacccctgccatctgcggcactccgactgatgcggccgaagagctcatcagcatcgcagaaggcgatcgccggttctatgcaggaaccgtgggctgggcagacaaccacggcgatggtgaattcatggtgtctatccggtgtgccgaggtaagcagtgacggcacctccgcacgagcatgggcaggcggaggaatcgtcgcagaatctgatgcggccgcagaagtcgaagaaacaactgcgaaacttcgcaccatcatgaaagctttaggcattacttctttcgacgcttaa

SEQ ID NO: 4754 - protein, 377 aa, Corynebacterium diphtheriae NCTC 13129
MCAHRPATAPDFLLSRSHGSIRTQGAVETFSDPGKAVEALRSGRVELVVGALAFRRDHACALTVPRSVIREEGPLEPHAYYRQGPGSIVNAQVEKLVPSLDKHHARVEAAINTIKSTSLKKVVLARAVDMTFSPAVDPRLIAARLIDLSRNRDGFIADLTPAGEDFAGAMLVGSSPEVLIKKQGSTVTAYPLAGSAPRSADAVTDATNAELLRRSHKDLQEHSYVVEHLRNVLEPLCSKLSIPANPELTKTNEMWHLATPVVGTLKDASLTALELAMRTHPTPAICGTPTDAAEELISIAEGDRRFYAGTVGWADNHGDGEFMVSIRCAEVSSDGTSARAWAGGGIVAESDAAAEVEETTAKLRTIMKALGITSFDA

SEQ ID NO: 4755 - DNA, 1182 bp, Listonella anguillarum
  CDS (1)..(1182): transl_table=11
atgaaacgagaggttgtcggtttttccaaaatggccaacgagatgtttaacaaagaactgttaaaatcaccgttctttttttcatccccctataattcaatgcttggtgttggcatcaaaacacaatgtagtcattccatacctttctcacaactagcaagcaaagctgaagagctattaaaaaaggctaaaacaaaggatagcgataaccctgtactatttgcgaccgttccatttgacgaaagaacacccactcaattttgtattcctgaaacgctttatgtttccagcagtacacgtagtcaaggtagcagtgattgtacgtctcagaaagccaaggtaatctcgccaccaactggggaagattataaaaatggcgtatcgcatttgctggacctttttgataccactgaactatcaaaagtcgtactttctcgatcggtaaaaattacgaccgatgaaaacatcaaccaatgttcgctattacgtaacttattatcaataaacacaaatggttatactttttgctctcaaatctcggagcgttctaagcttatgggagcgagcccagagctgctcctttccaaaaaaggcagccacgtattatctaatccgctagctggatctcgagctaaatcgtcttgtggtgttgaaaaccaaaatgcgtattcttctttacttgatactcaaaaagatctaaacgaacataacttagtagttgaggaagtcgaaaaggttctcagcaattattgccataacctatatacgccaatggttccctctgtaattgaaacagaaaccatgctgcatttgtctactgtgttacaagggcaagcagatgatccaaatatcaacgccttaaaaattgcagcagatcttcacccaacaccggcagtatgtggtttcccacgacaaccagcctatgctgccataaaagaaattgaaaatttcgatcgcggttactttaccggaatggtgggctggtgtgatgcaagaggcaatggcgaatgggtcgtaaccattcgatgtgcagaagtaagcctacgatctatgtcgatttatgctggtgcagggatcgttcatgaatcctcacctcaaagtgaactcgacgaaaccggagctaaaatgaaaaccattttgcgtgcggctggaatacaagtagatgagttactcactgtataa

SEQ ID NO: 4756 - protein, 393 aa, Listonella anguillarum
MKREVVGFSKMANEMFNKELLKSPFFFSSPYNSMLGVGIKTQCSHSIPFSQLASKAEELLKKAKTKDSDNPVLFATVPFDERTPTQFCIPETLYVSSSTRSQGSSDCTSQKAKVISPPTGEDYKNGVSHLLDLFDTTELSKVVLSRSVKITTDENINQCSLLRNLLSINTNGYTFCSQISERSKLMGASPELLLSKKGSHVLSNPLAGSRAKSSCGVENQNAYSSLLDTQKDLNEHNLVVEEVEKVLSNYCHNLYTPMVPSVIETETMLHLSTVLQGQADDPNINALKIAADLHPTPAVCGFPRQPAYAAIKEIENFDRGYFTGMVGWCDARGNGEWVVTIRCAEVSLRSMSIYAGAGIVHESSPQSELDETGAKMKTILRAAGIQVDELLTV

SEQ ID NO: 4757 - DNA, 1095 bp, Mycobacterium avium subsp. paratuberculosis K-10
  CDS (1)..(1095): transl_table=11
gtgaacgacgaaccgacgttcgcgctgtgcgggccgacgcaaaccctggtcgccgacggcgtacggcgaagctaccgcgacgtggccgccgcgcaggccgcgctgcgctcccaagaagtgtcaattgtgttgggcgcgttgcctttcgacgtgcgccgaccggccgccctgctgaccccggataccgtgagcgtcagcgacggcccaccggactggccggcccggaagctgccgtcggtgcgggttgccgccgccctccccccgccgatcgactaccgggaccggatctgccgggcccgcgagcagctcgccgcaaccgacaacccgctgcacaaggtggtgctggcccgcgccctgcacctggtcgccgacgccccgctggatgcccgcaccatcctgcgccggctgatcgccgccgacccgggcgcgtacggctatctcgtcgacctcagcgccgccggccacgaccatgcgggcgtggcgctggtgggcgccagccccgagcttctggtggcgcgcaccggcgaccgggtcgagtgccggccgttcgccgggtcggccccgcgtgccgccgatccggacaccgacgcggccaacggtgccgcgctggcgtcgtcggccaagaaccgccacgagcatcagctggtgatcgagaccatcagggccgccttggagccgctgtgcgacgacctgtccatcgcggccgaaccgcagctgagccgcaccgccacggtgtggcacctgtgcacgccgatcagcgggcggctgcacgataggtcaaccaccgcaatcgatttggcgctggcgttgcaccccacaccggcggtcggcggggtgccgaccgacgccgccgtcgagctgatcgccgacctggagggcgaccgcggcttctacgccggcgcggtgggatggtgtgacgcccgcggcgacggccgctgggtggtgtccatccgctgcgcgcagttgtcggccgaccggcgcagcgcgctggcgcgggccggcggcggtatcgtcgccgaatccgatcccgacgacgaagtcgcggaaaccacaacgaaattcgccaccatactcaacgccctggacgtccgatga

SEQ ID NO: 4758 - protein, 364 aa, Mycobacterium avium subsp. paratuberculosis K-10
MNDEPTFALCGPTQTLVADGVRRSYRDVAAAQAALRSQEVSIVLGALPFDVRRPAALLTPDTVSVSDGPPDWPARKLPSVRVAAALPPPIDYRDRICRAREQLAATDNPLHKVVLARALHLVADAPLDARTILRRLIAADPGAYGYLVDLSAAGHDHAGVALVGASPELLVARTGDRVECRPFAGSAPRAADPDTDAANGAALASSAKNRHEHQLVIETIRAALEPLCDDLSIAAEPQLSRTATVWHLCTPISGRLHDRSTTAIDLALALHPTPAVGGVPTDAAVELIADLEGDRGFYAGAVGWCDARGDGRWVVSIRCAQLSADRRSALARAGGGIVAESDPDDEVAETTTKFATILNALDVR

SEQ ID NO: 4759 - DNA, 1869 bp, Arabidopsis thaliana
  CDS (1)..(1869)
atggcttcacttcaattttcttctcagtttctgggctcaaacactaaaacacacagctctatcatttccatctctcgtagttactctccaactccattcactagattctcccgcaagaagtatgagtcatgttcgatgtctatgaatggttgtgatggagatttcaagacgccacttggtacagtggagacaaggactatgactgctgttttatctccggcagccgccactgaaaggctaatctccgccgtctctgaactcaaatctcaacctccgtcgttttcctccggcgtcgttcggttacaggttccaattgaccagcaaatcggagcaattgattggcttcaagcccagaatgagattcagcctcgctgtttcttctctcgtcgcagtgacgttggtcgtcccgatcttcttctcgatctagctaacgagaacggaaacggaaacggaaacggaacagtgtcatctgatcgtaatctggttagcgttgctggtatcggctctgcagttttcttccgtgaccttgatcctttctctcatgacgattggagatccatcagaaggtttttgtcttcaacgtcacctctgattcgtgcctatggtggtatgcgttttgatcctaatggcaagatcgctgttgaatgggaaccttttggtgcattttacttttcagtccctcaggttgagtttaatgagtttggtggaagttcaatgttggctgcaactattgcttgggatgatgaactctcttggactctggaaaatgctattgaagcactccaggagactatgcttcaagtttcttctgttgtaatgaagttgagaaacagatctttaggagtatctgttttaagcaagaatcatgttcctaccaaaggagcttatttccctgctgtagagaaggctttagagatgattaaccagaaaagttcaccccttaacaaggttgttcttgctcgtaacagcaggataattacggataccgacattgatcccattgcttggctagcacagttacagcgtgaagggcatgatgcatatcagttctgtcttcaaccacctggtgcaccagcttttatcggaaacacgcctgagagactattccaaaggactcaattaggtgtctgcagtgaagctttggctgcaactaggcctagagctgcttctagtgctcgtgatatggagatagagcgtgacttactaaccagtccgaaagacgacctcgagttctctatcgtacgagagaatataagagaaaagttaaacggtatatgtgacagagttgttgtcaagcctcaaaaaactgtgaggaagcttgcaagagtgcaacatctatattctcaattggcagggagacttacgaaggaagatgatgagtataaaatattggctgctctgcatccaactccagctgtttgtgggcttccagcagaagaagcaaggcttttgattaaggagatagaatcattcgatagaggaatgtatgcgggacctattggattttttggtggcgaggagagtgaatttgcagtcgggatcagatcagctctagtcgaaaagggtcttggggcattgatctatgcggggacagggatagtagctggaagtgacccatcttcagagtggaatgagcttgatcttaagatatctcaggtacgagcttttgtccagaaaatgtttagtgacatcatggttctctgttaccaaaatcctaatttttattctctcttttgttgttgtttttgcagttcaccaagtcaattgaatatgaagcaacaacatctctacaggcgattaattgaagaaagagtaacatttgtatttgattgttttgtttgtatgggggataaggggttctcacaataa

SEQ ID NO: 4760 - protein, 622 aa, Arabidopsis thaliana
MASLQFSSQFLGSNTKTHSSIISISRSYSPTPFTRFSRKKYESCSMSMNGCDGDFKTPLGTVETRTMTAVLSPAAATERLISAVSELKSQPPSFSSGVVRLQVPIDQQIGAIDWLQAQNEIQPRCFFSRRSDVGRPDLLLDLANENGNGNGNGTVSSDRNLVSVAGIGSAVFFRDLDPFSHDDWRSIRRFLSSTSPLIRAYGGMRFDPNGKIAVEWEPFGAFYFSVPQVEFNEFGGSSMLAATIAWDDELSWTLENAIEALQETMLQVSSVVMKLRNRSLGVSVLSKNHVPTKGAYFPAVEKALEMINQKSSPLNKVVLARNSRIITDTDIDPIAWLAQLQREGHDAYQFCLQPPGAPAFIGNTPERLFQRTQLGVCSEALAATRPRAASSARDMEIERDLLTSPKDDLEFSIVRENIREKLNGICDRVVVKPQKTVRKLARVQHLYSQLAGRLTKEDDEYKILAALHPTPAVCGLPAEEARLLIKEIESFDRGMYAGPIGFFGGEESEFAVGIRSALVEKGLGALIYAGTGIVAGSDPSSEWNELDLKISQVRAFVQKMFSDIMVLCYQNPNFYSLFCCCFCSSPSQLNMKQQHLYRRLIEERVTFVFDCFVCMGDKGFSQ

SEQ ID NO: 4761 - DNA, 1200 bp, Bacillus cereus ATCC 10987
  CDS (1)..(1200): transl_table=11
atgaaggaatttacggctgtaaaggaactgtcagaaaaattactagaagattataagactgaatcttcattctttttcacttcaccaactcgaacgatattagcagaaggagagtttactacagtaaagcatcatgaaattgaaagtttcccagagcttgtacaagcagtattatgtaatgcaaaacaagccggaaatccgaatcctatcgttgtcggtgctttgccatttgatcgtagaaaagaagtccaacttatcgtaccagaatatagtaggacttctgagcgattacaattggatacaacaaatcagcttgaaataaatgagaacttaacattcgaaatgacgcctgtaccagcgcctgaagtgtatatgaatggtgtgaagcaaggaattgcaaaaataaagggcggggatttaaaaaaaatcgttctatccagatcgttagatgttaattcttccgaaaagattgataagcaaaaacttcttcgagaattagcagcgcataataagcacggatatacatttgctgtgaatttatcgaaagatgaaaatgagaatagtaagacgttaattggagcgagccctgaattactcgtctcacgtaatggtatgcaagttatttctaatccgttagctggttcaaggccacgtagtgaggattcagttgaagataagagaagagcagaggaattactttcttctccaaaagatttacatgaacatgcggtagtagtagaagcagttgctgcagcgcttcgtccgtactgtcatacattacatgttccggaaaagccatccgttattcatagtgaagcgatgtggcatttatctactgaagtgaaaggtgaattaaaggatccgaatactacttctttggaattagcaattgctcttcatccgacgccagcagtttgcggcacaccgatggaagaatcgagagaggcgattcaaaaaattgagccatttgaccgtgaattctttacaggaatgctagggtggagtgatttaaatggagacggtgaatggattgttacaattcgttgtgctgaagtacaagaaaatacactccgtttatatgcaggagcgggcgttgttgctgagtcaaaaccagaagatgaattagcagaaacatcagctaagtttcaaacaatgttgaaagctttaggattaaatgatagttcacttaatgaaaagtag

SEQ ID NO: 4762 - protein, 399 aa, Bacillus cereus ATCC 10987
MKEFTAVKELSEKLLEDYKTESSFFFTSPTRTILAEGEFTTVKHHEIESFPELVQAVLCNAKQAGNPNPIVVGALPFDRRKEVQLIVPEYSRTSERLQLDTTNQLEINENLTFEMTPVPAPEVYMNGVKQGIAKIKGGDLKKIVLSRSLDVNSSEKIDKQKLLRELAAHNKHGYTFAVNLSKDENENSKTLIGASPELLVSRNGMQVISNPLAGSRPRSEDSVEDKRRAEELLSSPKDLHEHAVVVEAVAAALRPYCHTLHVPEKPSVIHSEAMWHLSTEVKGELKDPNTTSLELAIALHPTPAVCGTPMEESREAIQKIEPFDREFFTGMLGWSDLNGDGEWIVTIRCAEVQENTLRLYAGAGVVAESKPEDELAETSAKFQTMLKALGLNDSSLNEK

SEQ ID NO: 4763 - DNA, 1401 bp, Prochlorococcus marinus str. NATL1A
  CDS (1)..(1401): transl_table=11
atgaatttagaacccgtctttagtgagcttttagttagttctcttcagaaatggagtgtaagaaaagttgatgaatgtatcttgagcatttctgttcctgtaagtcaaacagatcctttaacgacattacctttaattgctgaaaaacatcagtttagatttctttgggatctctctcccggattgtgcctttctgccggaggtcattgtcaatctttggatttatctggaccaaagaggtttgaaaatgcacaaagatttagtgatgagatttttactcgattaatagaaatttctccaagtccagcattttcagcctcaaggattttattttcattttctttctttgatcaaattaaaagtaatgaaaaatcaatagatgataaattttccctacaggctgttttgcctaagtggcaattaaccgcaaaagatggattaacatggttacgtttaaattcagttgcccaaaatccttcagatgttcgtgaagccatagaaagattatggtcaattcgagaaaagataaataaatcaccagtccgaattgtcaatgatgaaaaagaaaatttcttagtcgataatttctcagatgattggaaatcgcaatatcgagatgcgttggctaaagggatcgaattaataaatgcaggtgatttggataaacttgtattggctacgagacaacatctctccctaagaaaaccattagatccactgcatttacttgctcgtttaagagttcagcaaactaatagttgtcgattcctatggcaaaaaaatcatgatgagtcattttttggtgcatcgcctgaaagattgataagtctcaatcaaaatcagttattaatcgatgctttagctggtactgcaaaaaaaggtgatgatgggagagaattgcttgcttcctctaaagatttaagagaacaccattttgtagttaattctattgtcgaacaacttttaaaaagaggtattaaagcaagttatccatctcaaccaaaattaatgactcaagaccatttaattcatttgcatactcttattcaagcctctgttaaagagaaatctcctcttgatttagttgaagcacttcatccaacccctgctgttgcaggattacctctgaataaatctttgagttggttgagagctttagaaccatttgaccgtaaaacatatgcttctccaattgggtggatagataaaaatcaaaattcagaatttagggttgccatacgttatggacagcttaaagctaatgaacttaaattatttgctggcgctggtttagtaaaaggttcaactgttgagggggaaatgcaagaagtagctttgaaatttgaagttttaagaaatcaattaaatttagatagagttaattgttcaaatgatctataa

SEQ ID NO: 4764 - protein, 466 aa, Prochlorococcus marinus str. NATL1A
MNLEPVFSELLVSSLQKWSVRKVDECILSISVPVSQTDPLTTLPLIAEKHQFRFLWDLSPGLCLSAGGHCQSLDLSGPKRFENAQRFSDEIFTRLIEISPSPAFSASRILFSFSFFDQIKSNEKSIDDKFSLQAVLPKWQLTAKDGLTWLRLNSVAQNPSDVREAIERLWSIREKINKSPVRIVNDEKENFLVDNFSDDWKSQYRDALAKGIELINAGDLDKLVLATRQHLSLRKPLDPLHLLARLRVQQTNSCRFLWQKNHDESFFGASPERLISLNQNQLLIDALAGTAKKGDDGRELLASSKDLREHHFVVNSIVEQLLKRGIKASYPSQPKLMTQDHLIHLHTLIQASVKEKSPLDLVEALHPTPAVAGLPLNKSLSWLRALEPFDRKTYASPIGWIDKNQNSEFRVAIRYGQLKANELKLFAGAGLVKGSTVEGEMQEVALKFEVLRNQLNLDRVNCSNDL

SEQ ID NO: 4765 - DNA, 1098 bp, Mycobacterium sp. JLS
  CDS (1)..(1098): transl_table=11
gtgaccgtcgagccgagcttcgtcctcaccggcgacgacggtgtcgtcctggccgacggcgtccacacgccgtaccccgcgctgggcgacgcgcgcaccgcgctgggcgcaggcgatgccccaatgatcctgggcgccttgcctttcgacctgaccgcgccgacggcactgttccgcccgcagcacgtacgcttcctcgatgcgctgccggactggtcggccgtcgacctgccacgtgtacggatcgccgagttccggcccgcaccccaggagcaccgcgcacgcgtcgcgtcggcggtgcgcgcgctgaacgaccccgccaccggactgcacaaagtcgtcctcgcgcgggcgctgcacctgaccgccgacggaccactagacgcgcgaaccgtgctgcggcgcctgctcgccgacgatgcgagcgccaacgcgtatctggccgatctcaccgcagccggagcccactaccgcggtgcggccctgatcggcgccagcccggaactgctggtggcccggcgcggtgaggtggtgacgtgccaacccttcgccggttcggcgccgcggttcgccgaccccgcggcggaccgggccagcggcgccgccctcgccgactccgccaagaaccggcacgaacacgccatcgtgatcgacgaggtgcgcaaggctctcgacccgctgtgcgtggatctgcaaatcgcgccgacaccgcacctcagcgcgacggccgccgtctggcacctgagcactcagatcaccggacggttacgcgaaacaaccactaccgcactggatctcgcggtcgcactgcacccgaccccggccgtcggcggcgttccgaccgacctggccgcggagttgatcaaacgcctcgagggcgaccgcggcttctacgccggcgccgtcggctggtgcgacgcgacgggtgacggccgctgggtggtgtccatccggtgcgcccaactggccgccgatcggctcgccgccaccgcccactccgggggcggcatcgtcgccgaatccgatccggacgacgaagtcgcagagaccacaacgaaattcacgaccatcctgtccgcactgggggtaacgcaatga

SEQ ID NO: 4766 - protein, 365 aa, Mycobacterium sp. JLS
MTVEPSFVLTGDDGVVLADGVHTPYPALGDARTALGAGDAPMILGALPFDLTAPTALFRPQHVRFLDALPDWSAVDLPRVRIAEFRPAPQEHRARVASAVRALNDPATGLHKVVLARALHLTADGPLDARTVLRRLLADDASANAYLADLTAAGAHYRGAALIGASPELLVARRGEVVTCQPFAGSAPRFADPAADRASGAALADSAKNRHEHAIVIDEVRKALDPLCVDLQIAPTPHLSATAAVWHLSTQITGRLRETTTTALDLAVALHPTPAVGGVPTDLAAELIKRLEGDRGFYAGAVGWCDATGDGRWVVSIRCAQLAADRLAATAHSGGGIVAESDPDDEVAETTTKFTTILSALGVTQ

SEQ ID NO: 4767 - DNA, 1200 bp, Bacillus thuringiensis serovar konkukian str. 97-27
  CDS (1)..(1200): transl_table=11
atgaatgaatttacggctgtaaaggaactgtcagaaaaattactagaagattataagactgaatcttcattcttttttgcttcaccaacccgaacgatattagcagaaggagaatttactacagtaaagcatcatgaaattgaaagcttcccagagcttgtgcaagcagtattacgtaatgcaaaacaagccggaaatccgaatcctatcgttgtgggggctttgccatttgatcgtagaaaagaagtccaacttatcgtaccagaatatagcaggatttctgagcgtttacaattggatacaacaaatcatcttgaaataaataggaacttaacattcgaaatgacgcctgtgccagatcatgaagtgtatatgaatggtgtgaagcaaggaattgaaaaaataaaggacggagatttaaagaaaatcgttctatctagatcgttagatgttaaatcttctggaaaaattgataagcaaaaacttcttcgagaattagcagagcataataagcacggttatacatttgcggtgaatttaccgaaagatgaaaacgagaatagtaagacgttaattggagctagtcctgaattactcgtttcacgtcatggtatgcaagtgatttctaatccgttagctggttcaagaccacgtagtgatgatccagtagaagataaaagaagagcggaggaattactttcttctccaaaagatttgcatgaacatgcggtagtagtggaagcagttgctgctgcgcttcgcccatactgtcatacattacatgttccggaaaaaccatctgttattcatagtgaagcgatgtggcatttgtctactgaagtgaaaggtgaactaaagaatccaaatactagttctttagaattagcaattgctcttcatcctacgccagcagtttgcggaacgccgatggaagaagcgagagaagctattcaacaaattgagccatttgaccgtgagttctttacaggaatgttagggtggagcgatttaaatggagacggtgaatggattgttacaattcgttgtgctgaagtacaagaaaatacactccgtttatatgcaggtgctggagttgttgctgagtcaaaaccagaagatgaattagcagaaacatcagctaagtttcaaacaatgttgaaagctttagggttaaatgatagttcacttaatgaaaagtag

SEQ ID NO: 4768 - protein, 399 aa, Bacillus thuringiensis serovar konkukian str. 97-27
MNEFTAVKELSEKLLEDYKTESSFFFASPTRTILAEGEFTTVKHHEIESFPELVQAVLRNAKQAGNPNPIVVGALPFDRRKEVQLIVPEYSRISERLQLDTTNHLEINRNLTFEMTPVPDHEVYMNGVKQGIEKIKDGDLKKIVLSRSLDVKSSGKIDKQKLLRELAEHNKHGYTFAVNLPKDENENSKTLIGASPELLVSRHGMQVISNPLAGSRPRSDDPVEDKRRAEELLSSPKDLHEHAVVVEAVAAALRPYCHTLHVPEKPSVIHSEAMWHLSTEVKGELKNPNTSSLELAIALHPTPAVCGTPMEEAREAIQQIEPFDREFFTGMLGWSDLNGDGEWIVTIRCAEVQENTLRLYAGAGVVAESKPEDELAETSAKFQTMLKALGLNDSSLNEK

SEQ ID NO: 4769 - DNA, 1395 bp, Bacillus thuringiensis serovar konkukian str. 97-27
  CDS (1)..(1395): transl_table=11
gtgattcaaacgaaacaaataggcttgcaagaagttctaagtgcggccattaagcgtgcaactgatgaaaaaatattggtgagcttcgtaaaacaaatagactggatggatccgcttctgttttatgcagcaggaaaaaggatctcattcgaaaatagatgttattttgcagacccagcgcagcatgtaatatttgctggaattggctctgttttcactatagcaactgcttctcacaaacgctttcaaactgctcgtgacgagtgggataaagtaaaagagaaagcatttgtacaaagggaaaaatacgagtttggaacaggtcctcttttatttggtggattttcatttgaccaagaaaaagagaaaacagatttatggaaagaatttgatgatacgacattttcactaccggcatttttattaactgtaaaaaatgaaaaagcatggttaacaatgaatacattcgtttcagcaacagattgtgcagaaactctttataacgaaattgtttctttagaagagaaaatttttgaggagagtaaatgtgcactagaaggatcaaaattaacagttacttctaaagtagaagtggatccgaaaggctggatgaaagccattgagaaagtgcaagatgagatgaagcaggggaacgtacagaaggttgtattagcgagggagctaaaagtagagatggatcatcatattgattctgctcttgttttagaagcacttcgcattggacaaccagattgttacgtattttcttttgattataaaggagcatgcttcttaggagcgacgccagagagattaattcgcaaagaagatgagaagtttacttcaatgtgtcttgctggttcaactggtcatggtcaatctatagaagaaagtaagcgaaatagtaatgcgcttcttcatgatgaaaagaatttagctgaacacggttatgttgtgaacatgattaggtcggtattaaatgagcactgcgaattcgttaatattccagaaagtccaggtctattaacaacgaaaaacttaattcatttatatacgcctgtagaggcaaaaggcgatgcgagtcttttaacgatggtagaagaattacatccaacaccagctcttggcgggacacctcgtttagaagcgatgaaactaattcgtgatgttgaattgttagacagaggattatatggtgcaccgattggctggatagatgatgaaggaaatggtgaatttgcggttgcacttcgctgcggattattaaatggcgagaaagcatccttatttgccggttgcggaattgtaattgattcagtaccacaacttgaatatgaagaaacaagtttgaagtttagaccgatgcttggtgctttggaggaattaatgaaatga

SEQ ID NO: 4770 - protein, 464 aa, Bacillus thuringiensis serovar konkukian str. 97-27
MIQTKQIGLQEVLSAAIKRATDEKILVSFVKQIDWMDPLLFYAAGKRISFENRCYFADPAQHVIFAGIGSVFTIATASHKRFQTARDEWDKVKEKAFVQREKYEFGTGPLLFGGFSFDQEKEKTDLWKEFDDTTFSLPAFLLTVKNEKAWLTMNTFVSATDCAETLYNEIVSLEEKIFEESKCALEGSKLTVTSKVEVDPKGWMKAIEKVQDEMKQGNVQKVVLARELKVEMDHHIDSALVLEALRIGQPDCYVFSFDYKGACFLGATPERLIRKEDEKFTSMCLAGSTGHGQSIEESKRNSNALLHDEKNLAEHGYVVNMIRSVLNEHCEFVNIPESPGLLTTKNLIHLYTPVEAKGDASLLTMVEELHPTPALGGTPRLEAMKLIRDVELLDRGLYGAPIGWIDDEGNGEFAVALRCGLLNGEKASLFAGCGIVIDSVPQLEYEETSLKFRPMLGALEELMK

SEQ ID NO: 4771 - DNA, 1188 bp, Acinetobacter sp. ADP1
  CDS (1)..(1188): transl_table=11
gtgtattacaaggggaatggcttcatgaatgatatgaatctctcaattgatcatgcaattgaactgaatattaacctagaatcttcttgttttttaactaaagattatcgtttattagcatcagatttagctgaagtagtaaaattagctgcttgcgattatgaaaaattaagtcaaaccattacagatagttttcagaaattaaaaaaagatccaaatgcaaatccaattttggttggtgcaattccattcgatacaacacaagcatcgtctctcaatatttatcggaatcatcgtaaacaaagacaattggtgatttcatctaaaataactcattcgccattatctatttcaaatcaaaaacctttgattaaacaaaaagattttgcgcatgccattgatattgcaattgatcagtttaggtgtgatcaattggaaaaagtggttttgtcacaggctgtggattttgaactttcacagtcacaaaatccttttgatttggttgatacattagctaaagaaaatccacatgcatttagttttgctattccagttgaagacaatgcttaccttctgggtgcaagtccagagttactgatttcaaaaaatgatctgactgttcgtagtaatcctttagcaggctctcgtcctttaagtgaggatgaaaatataaatcagtcacgtattcatgaattgtatgcatcagaaaaagatcttaatgagcatcaaattgtggtggacagtgtcttagaaaatttaaagccattttgccaaaaattaaaggttttagagaaacctgaaattttaaaaacggccacgatgcttcatctttcgaccgtatttgatggtcagttgaaaaagcagtctgacaatgcgttgcagttggcattggctttacatcctacacctgcaatctgtggttcacctaccgagcctgcaaaacagtttattttagaacatgagggttacgaccgtcattattttgctggtttggtgggatggatggatgcccaaggtaatggcgaatgggctgtcactattcgttgcggtttactcaatgataaaaaaattcgtttatatgctggtgctggaattgtgatgggatcacaagctgaacttgaatggagtgaaactgaagtcaaaatgcaaactctactaaaaaccctaagcgcaacttttcattcctga

SEQ ID NO: 4772 - protein, 395 aa, Acinetobacter sp. ADP1
MYYKGNGFMNDMNLSIDHAIELNINLESSCFLTKDYRLLASDLAEVVKLAACDYEKLSQTITDSFQKLKKDPNANPILVGAIPFDTTQASSLNIYRNHRKQRQLVISSKITHSPLSISNQKPLIKQKDFAHAIDIAIDQFRCDQLEKVVLSQAVDFELSQSQNPFDLVDTLAKENPHAFSFAIPVEDNAYLLGASPELLISKNDLTVRSNPLAGSRPLSEDENINQSRIHELYASEKDLNEHQIVVDSVLENLKPFCQKLKVLEKPEILKTATMLHLSTVFDGQLKKQSDNALQLALALHPTPAICGSPTEPAKQFILEHEGYDRHYFAGLVGWMDAQGNGEWAVTIRCGLLNDKKIRLYAGAGIVMGSQAELEWSETEVKMQTLLKTLSATFHS

SEQ ID NO: 4773 - DNA, 1197 bp, Erwinia carotovora subsp. atroseptica SCRI1043
  CDS (1)..(1197): transl_table=11
gtggatacactgatttcagaaactgaaacatttagcggactaacctattcggaacagaccgcttttttatatgcatcggaacaccgaagcctttctacttccggcttatttgaacgtatttcgtcccctgtttgtgctccaggctcgcacaatgacgagcttagccttgccatcgcgcaggcattccaacgggcacgtcaggcagggcaatcgctgcctattgttgtgggagcgattccttttgataccacgcaaccatcttgtctctatatccctgatagttataccgttacgacgaaatatgaactcgtcagccgtgctcgtaagcacacggcagtggcgcccactgcgttaacgctaaacagtgtcccaggagaatgtcagttcaagtccatcgtggcagaggccgttgaacgcttccgccgtggtgaactgagcaaagccgtgctgtcacgcattctggacattgaactggcgagccccgttaaggcgcaaacgatcctcaacaatctgatggtgcaaaacgccggtggatatcacttctcactgccattgccggatggctctgtattgctgggtgccagccctgaactgctgctgcgtaagcagggaaacgtgattgtgtctaatccactggcgggatcggcacgacggatgaacgatgaacatctggactatctgaacagccagcgtttgctgaattcaggcaaagacaagcacgagcataagctggtggtggacgacattcgtcaacgcctgatgccgctgtgcgcgtcgttaaccattccatcggctccctcgctgatgagtactgcctcgatgtggcacttgtccactgcgatccgcggtgaactggcgaacccggatatgacagcacttcaggtcgcctgtcagctccatcctacccccgcactgtgcggtttccccacgcaggaagctcgtcagttgatcgccgaactggaaccgcacgatcgtggcgtattcagcgggatcgtcggctggtgtgatgctaacggtgatggcgaatgggtgatagtcattcgctgcggcaccataaaacacaataaagtccgcctgtttgctggtgcgggtattgttgaggcatccgtccccgaggatgaatgggctgaaaccgccgctaaattaaacacgatgctgaatgcgtttgggcttaactctggtgtggatggactatga

SEQ ID NO: 4774 - protein, 398 aa, Erwinia carotovora subsp. atroseptica SCRI1043
MDTLISETETFSGLTYSEQTAFLYASEHRSLSTSGLFERISSPVCAPGSHNDELSLAIAQAFQRARQAGQSLPIVVGAIPFDTTQPSCLYIPDSYTVTTKYELVSRARKHTAVAPTALTLNSVPGECQFKSIVAEAVERFRRGELSKAVLSRILDIELASPVKAQTILNNLMVQNAGGYHFSLPLPDGSVLLGASPELLLRKQGNVIVSNPLAGSARRMNDEHLDYLNSQRLLNSGKDKHEHKLVVDDIRQRLMPLCASLTIPSAPSLMSTASMWHLSTAIRGELANPDMTALQVACQLHPTPALCGFPTQEARQLIAELEPHDRGVFSGIVGWCDANGDGEWVIVIRCGTIKHNKVRLFAGAGIVEASVPEDEWAETAAKLNTMLNAFGLNSGVDGL

SEQ ID NO: 4775 - DNA, 1356 bp, Propionibacterium acnes KPA171202
  CDS (1)..(1356): transl_table=11
ttgacttcttgtcgcggtcggtcgaatttgacgcatcacttcttgggcgttgggtgcgaccacattgtttgcgtgcaacgtcgtggtcgcacccgtagtccgggtctcccgcaaagcattgtgtgggcttcagcaagtaaggtcgagcccgtgctaaacctgctgccctgctctgacaccgtctcggccctgccgggaacggcctggcttgatgaagtgctccactgggtgcccgagggcgtcgacccgtggatctggttggcccccgactccgacgacgcccccgccatggtcggctggggcgtcactcgacgcttcaccgcatccggtcacggagcggtcgagtccgcctggcgccggatggcgtccgaagggcaggacctcttcgccttcggctcgtttcccttctcgcgcacccaggaagggttcctcgtggtcccgcaggtgctcatccgacgtcgtcacctcggggggccgaccgaggtgacgaatcaccagcggctcacccgacgaacgtgggggcccgagccgaagaaacacctgacccgtagaccggccatcgacgaagccacatggacagcgtcggttaccgcggtgacccagcagctagaccacgacgggcagctcgagaaggtggtattggccggggcggtcgacatcacctctgaggtgcccatcgaccgcagtcaggtcgcctcacgactggccgcacggttccccggctgctggacgtacagccacgacgggctggtgggggcaacccccgagctgctcgtcgactgccgcgacgggctcttccgctgtcgggtgctggccggcacccgcaaaccggcctgggcccacgagctgctcgacaaccccaaggaacgccacgaacacgagctggcggtggcctcggtcaccgggcgactggcccaggccgggctgactgatcctgtcatccgcggtcctttccgtttggagctccccaatgtcgtccacttggcgaccgatgtcaccgctagggtgaacggctccaacgcggcgcgcatcgtcgatgcaatgcacccgaccgccgccgtgtgcggcaccccccgcgaggcctcttacaagctcatcgcgcagatagagcacttggaccggggacggttcgccgggccggtgggctggatgagctcggacgggtcgggacagtgggccctagcgctgcgctgtggacaattcagtgaggactcgcgccaggtgagaatgttcgctggagccggaatcttgccaacctctgaccctgctaaggagtggatcgaggttggcgccaagatggaagccttcggcgacgccctgcccaacggtcaggtgagtggtaccgaaacgacctga

SEQ ID NO: 4776 - protein, 451 aa, Propionibacterium acnes KPA171202
MTSCRGRSNLTHHFLGVGCDHIVCVQRRGRTRSPGLPQSIVWASASKVEPVLNLLPCSDTVSALPGTAWLDEVLHWVPEGVDPWIWLAPDSDDAPAMVGWGVTRRFTASGHGAVESAWRRMASEGQDLFAFGSFPFSRTQEGFLVVPQVLIRRRHLGGPTEVTNHQRLTRRTWGPEPKKHLTRRPAIDEATWTASVTAVTQQLDHDGQLEKVVLAGAVDITSEVPIDRSQVASRLAARFPGCWTYSHDGLVGATPELLVDCRDGLFRCRVLAGTRKPAWAHELLDNPKERHEHELAVASVTGRLAQAGLTDPVIRGPFRLELPNVVHLATDVTARVNGSNAARIVDAMHPTAAVCGTPREASYKLIAQIEHLDRGRFAGPVGWMSSDGSGQWALALRCGQFSEDSRQVRMFAGAGILPTSDPAKEWIEVGAKMEAFGDALPNGQVSGTETT

SEQ ID NO: 4777 - DNA, 1425 bp, Bacillus licheniformis ATCC 14580
  CDS (1)..(1425): transl_table=11
atggtgacaacagtgcagcgcactttcctcaaggaagcgcctgaagcattaaacatcgtcaaaaaagtcaaccatgctgttttaataagctattccagaaaaattgagagcatagatgctctttcctttttcataaacgggaaagaacaatttgccggggaacggttcttctggtctgatccggacggcgggctgacgcttgtcgggctgggaaaggaaatatcggtttccacagatctgaaggatgccggacgttatcaggctgtacatgaaaaatgggagcgcttaaaagagaaaacctatcactttcatgaagatcaaagcagaggtcaggcagcggtggggccattgctgtttggcggtttttcatttgatccgctggaagatcgcaagcagcattggaacggctaccaggaaggcgctttttttattcccgccgctatgctgacacaggacggagaggaaacattcataacggtcaatagatggaagactcctgaagaagacgtgcgcaaagtacttgaagaaataaagggcgctgcttcacagctgaccaaggcggacgattcccgttatccggaaaaaggtcatacgcaatataccgccaaggaagagcttgatgttcctgaatggcttgaagcggtccggcgggcgacagacgacattaaaaacgggaagtacgataaagtcgtgctcgccagagagatccttttaacgttcgatcagcctgtcgaacttcacagagtattattcaatctgatgtctgaacaaaaaacgagctatatattcgccattgaagaaaacggcaaaagttttgtgggcgcgtctccggaacgtcttgtcaaaaaagacggagagaacgttctgtcgacctgcctcgccggttcaatcaagagaggcgaaagtgagcaggaagaccggatgctcggtcttgagctgttaaacgatgaaaaaaatctaatcgaacatgacattgtcgtcaatatgattcatcaggcgcttttgtcaaattgcagcaatatcaaaaagccggccaagccgggactttacaaaacaaaaaatgtgcagcatttgtatacgccgattgtcggcaaaatgaatgcggagtcctcgatttttgatttaatcgagaagcttcacccaactcctgcgctcggaggagcaccacagcaaaaagcgattgaggttatcagggagttggaaccgatgtcaaggggctggtatgcggcaccggcgggctggatcgacatgtccggcaatggggaattcgcggtggcgatcaggtcgggacttatcgattcaaatgcggccagaattttcgccggctgcggggttgtggctgattccgatcctcttatggaatacgaagaaacacaaattaagatgaagccgatgctgtctgctcttggaggcgatatccgttga

SEQ ID NO: 4778 - protein, 474 aa, Bacillus licheniformis ATCC 14580
MVTTVQRTFLKEAPEALNIVKKVNHAVLISYSRKIESIDALSFFINGKEQFAGERFFWSDPDGGLTLVGLGKEISVSTDLKDAGRYQAVHEKWERLKEKTYHFHEDQSRGQAAVGPLLFGGFSFDPLEDRKQHWNGYQEGAFFIPAAMLTQDGEETFITVNRWKTPEEDVRKVLEEIKGAASQLTKADDSRYPEKGHTQYTAKEELDVPEWLEAVRRATDDIKNGKYDKVVLAREILLTFDQPVELHRVLFNLMSEQKTSYIFAIEENGKSFVGASPERLVKKDGENVLSTCLAGSIKRGESEQEDRMLGLELLNDEKNLIEHDIVVNMIHQALLSNCSNIKKPAKPGLYKTKNVQHLYTPIVGKMNAESSIFDLIEKLHPTPALGGAPQQKAIEVIRELEPMSRGWYAAPAGWIDMSGNGEFAVAIRSGLIDSNAARIFAGCGVVADSDPLMEYEETQIKMKPMLSALGGDIR

SEQ ID NO: 4779 - DNA, 1191 bp, Bacillus licheniformis ATCC 14580
  CDS (1)..(1191): transl_table=11
atgatagaacgtcatgtcgtgtcagaagcgcttgcagatcagctgttaaaggaatatcaggccggtgcttcattctttttctcttcccctgagcggaccattctggcggaaggtgtttttgcttctgtttctcaaaccgaagagcaaagccttgctcagcggactgcggaagttctgaaaaaagccagggagaacgggcaggaaaatccgattgtagttggagctgtgccatttgacgatgcaaagccggcgcagttaaccgtgccggtcgaagcgtggcatgcggggccgctgacatgtgaagaagacgataaagaggtgcctgaacctgccctgcacccctatgatgtccagcagattccaagcccggaagcgtatatggccggagtcagacaaggattggcaggtatagcagcaggagaatacagcaagatcgtcctttcccggtcattgcagctgacctcgccgatcaaagtcgatatcggtcaattgctgcgaaatcttgcccgccgcaatacaagcgggtacaactttgccgttgatttaaccgggcagtcatctgaagcgcctcgcaccactttgataggcgcgagtcccgaactgcttgtatcacggtccgggttctgcgttacggcaaatcctttagcaggttcaagacctcggagcgatgatcccgaagaagatcgaagacgggcggctgaactgcttgcttcgcctaaagaccgtcacgaacatgcggtcgttgtcgaagcggttgcttccgcgctcaggccgttttgccggaagctggaggtgccggaaccgtcgctcatcagcacgccgacgatgtggcatctttcaacggaattgaagggagagcttacagacctctctgtatcatcattggagcttgccgccgcccttcatccgacgcccgctgtctgcggcacgccgacgaatgcggcgaaagaagcgattaaacagattgagccgtttgaccgcgggtttttcacaggtatggtcggctggtgcgacgcggacggtgacggagaatgggttgtaacgattcgctgtgccgaggcggaggaacacgcgcttcgactgtacgcaggtgccggaattgtcgccgggtcgaagcctgaagacgaacttgccgaaacgtctgcaaagtttcggacaatgcttcttgcgatgggaatgaacagtgagtaa

SEQ ID NO: 4780 - protein, 396 aa, Bacillus licheniformis ATCC 14580
MIERHVVSEALADQLLKEYQAGASFFFSSPERTILAEGVFASVSQTEEQSLAQRTAEVLKKARENGQENPIVVGAVPFDDAKPAQLTVPVEAWHAGPLTCEEDDKEVPEPALHPYDVQQIPSPEAYMAGVRQGLAGIAAGEYSKIVLSRSLQLTSPIKVDIGQLLRNLARRNTSGYNFAVDLTGQSSEAPRTTLIGASPELLVSRSGFCVTANPLAGSRPRSDDPEEDRRRAAELLASPKDRHEHAVVVEAVASALRPFCRKLEVPEPSLISTPTMWHLSTELKGELTDLSVSSLELAAALHPTPAVCGTPTNAAKEAIKQIEPFDRGFFTGMVGWCDADGDGEWVVTIRCAEAEEHALRLYAGAGIVAGSKPEDELAETSAKFRTMLLAMGMNSE

SEQ ID NO: 4781 - DNA, 1200 bp, Bacillus cereus E33L
  CDS (1)..(1200): transl_table=11
atgaatgaatttacggctgtaaaggaactgtcagaaaaattactagaagattataagactgaatcttcattcttttttgcttcaccaacccgaacgatattagcagaaggagaatttactacagtaaagcatcatgaaattgaaagcttcccagagcttgtgcaagcagtattacgtaatgcaaaacaagccggaaatccgaatcctatcgttgtgggggctttgccatttgatcgtagaaaagaagtccaacttatcgtaccagaatatagcagaatttctgagcgtttacaattggatacaacaaatcatcttgaaataaataggaacttaacattcgaaatgacgcctgtgccagatcatgaagtgtatatgaatggtgtgaagcaaggaattgaaaaaataaaggacggagatttaaagaaaatcgttctatctagatcgttagatgttaaatcttctggaaaaattgataagcaaaaacttcttcgagaattagcagagcataataagcacggttatacatttgcggtgaaattaccgaaagatgaaaacgagaatagtaagacgttaattggagctagtcctgaattactcgtttcacgtcatggtatgcaagtgatttctaatccgttagctggttcaagaccacgtagtgatgatccagtagaagataaaagaagagcggaggaattactttcttctccaaaagatttgcatgaacatgcggtagtagtggaagcagttgctgctgcgcttggcccatactgtcatacattacatgttccggaaaaaccatctgttattcatagtgaagcgatgtggcatttgtctactgaagtgaaaggtgaactaaagaatccaaatactagttctttagaattagcaattgctcttcatcctacgccagcagtttgcggaacgccgatggaagaagcgagagaagctattcaacaaattgagccatttgaccgtgagttctttacaggaatgttagggtggagcgatttaaatggagacggtgaatggattgttacaattcgttgtgctgaagtacaagaaaatacactccgtttatatgcaggtgctggagttgttgctgagtcaaaaccagaagatgaattagcagaaacaacagctaagtttcaaacaatgttgaaagctttagggttaaatgatagttcacttaatgaaaagtag

SEQ ID NO: 4782 - protein, 399 aa, Bacillus cereus E33L
MNEFTAVKELSEKLLEDYKTESSFFFASPTRTILAEGEFTTVKHHEIESFPELVQAVLRNAKQAGNPNPIVVGALPFDRRKEVQLIVPEYSRISERLQLDTTNHLEINRNLTFEMTPVPDHEVYMNGVKQGIEKIKDGDLKKIVLSRSLDVKSSGKIDKQKLLRELAEHNKHGYTFAVKLPKDENENSKTLIGASPELLVSRHGMQVISNPLAGSRPRSDDPVEDKRRAEELLSSPKDLHEHAVVVEAVAAALGPYCHTLHVPEKPSVIHSEAMWHLSTEVKGELKNPNTSSLELAIALHPTPAVCGTPMEEAREAIQQIEPFDREFFTGMLGWSDLNGDGEWIVTIRCAEVQENTLRLYAGAGVVAESKPEDELAETTAKFQTMLKALGLNDSSLNEK

SEQ ID NO: 4783 - DNA, 1194 bp, Bacillus licheniformis ATCC 14580
  CDS (1)..(1194): transl_table=11
atgatgatagaacgtcatgtcgtgtcagaagcgcttgcagatcagctgttaaaggaatatcaggccggtgcttcattctttttctcttcccctgagcggaccattctggcggaaggtgtttttgcttctgtttctcaaaccgaagagcaaagccttgctcagcggactgcggaagttctgaaaaaagccagggagaacgggcaggaaaatccgattgtagttggagctgtgccatttgacgatgcaaagccggcgcagttaaccgtgccggtcgaagcgtggcatgcggggccgctgacatgtgaagaagacgataaagaggtgcctgaacctgccctgcacccctatgatgtccagcagattccaagcccggaagcgtatatggccggagtcagacaaggattggcaggtatagcagcaggagaatacagcaagatcgtcctttcccggtcattgcagctgacctcgccgatcaaagtcgatatcggtcaattgctgcgaaatcttgcccgccgcaatacaagcgggtacaactttgccgttgatttaaccgggcagtcatctgaagcgcctcgcaccactttgataggcgcgagtcccgaactgcttgtatcacggtccgggttctgcgttacggcaaatcctttagcaggttcaagacctcggagcgatgatcccgaagaagatcgaagacgggcggctgaactgcttgcttcgcctaaagaccgtcacgaacatgcggtcgttgtcgaagcggttgcttccgcgctcaggccgttttgccggaagctggaggtgccggaaccgtcgctcatcagcacgccgacgatgtggcatctttcaacggaattgaagggagagcttacagacctctctgtatcatcattggagcttgccgccgcccttcatccgacgcccgctgtctgcggcacgccgacgaatgcggcgaaagaagcgattaaacagattgagccgtttgaccgcgggtttttcacaggtatggtcggctggtgcgacgcggacggtgacggagaatgggttgtaacgattcgctgtgccgaggcggaggaacacgcgcttcgactgtacgcaggtgccggaattgtcgccgggtcgaagcctgaagacgaacttgccgaaacgtctgcaaagtttcggacaatgcttcttgcgatgggaatgaacagtgagtaa

SEQ ID NO: 4784 - protein, 397 aa, Bacillus licheniformis ATCC 14580
MMIERHVVSEALADQLLKEYQAGASFFFSSPERTILAEGVFASVSQTEEQSLAQRTAEVLKKARENGQENPIVVGAVPFDDAKPAQLTVPVEAWHAGPLTCEEDDKEVPEPALHPYDVQQIPSPEAYMAGVRQGLAGIAAGEYSKIVLSRSLQLTSPIKVDIGQLLRNLARRNTSGYNFAVDLTGQSSEAPRTTLIGASPELLVSRSGFCVTANPLAGSRPRSDDPEEDRRRAAELLASPKDRHEHAVVVEAVASALRPFCRKLEVPEPSLISTPTMWHLSTELKGELTDLSVSSLELAAALHPTPAVCGTPTNAAKEAIKQIEPFDRGFFTGMVGWCDADGDGEWVVTIRCAEAEEHALRLYAGAGIVAGSKPEDELAETSAKFRTMLLAMGMNSE

SEQ ID NO: 4785 - DNA, 1455 bp, Burkholderia pseudomallei K96243
  CDS (1)..(1455): transl_table=11
atgagcgcccgcctgtccgcgctgctcgatacgttcgcgcgcgccgcgcgccgcgcggccgacacgggcgagcccgtgctcgccgcggcatcgtttccgctgcggccgctgaacctgttcgatctgatcgcgagctgggacgacggcgcaaccccatggtgcttcgtcgaagccggcgacgagccgggcgcgatgcgcgcgccgggcaagccgcccgccctgttcggctgggattgcgcactcgatctgaacgaggcgggcgacgcgcgattcgcccggctcgacgcgcgctggcgcgcgctcgtgcgcgcggcggtcgtcaccggcgcgcagccgccgcgcatcgtcggcggcttccgcttcgatccgctcgggccgcgatacgcgcactggcacgcgttcgccgatgcgagcatgacgcttgcgaaactgctggtcgtccgcgaaggcgaggcgtattgggcggtctgccagcgcgtcgtcgccgcgcacgacgatcccgccgcgctcgcgcgcgaatgcgacgcgcgcatcggcatgctcgcgtcgctcgcgcccgccgccgacgacgaggcgccgcgcctgctgcgcgttcaggcgctgcaggccgccgcatggcagcacgaggtgcggcgcgcggtcgacgcgatccgcggcgaggcgttcagcaaggtcgtgctcgcgcgcgacgtgctgcaacagtacgcgcggcccgtggcgatcgggccgctgctgcgccggctcaggcggcgcgacccgcgcgcgcacctgttcgcgatccgcaggcgcgacggctgcttcgtcggcgcgacgccggaacgcctcgcgcgcgtcgcgcacggccgcgcgcacacgcacgcgctcgccggcacgatcgcgcgcggcaacgatccggctcacgatcgcgcgctcggcgcgcagctgatggcgtcggcgaaagagcgcctcgagcacgcgctcgtggtcgacgcgattcgcgatgcgctcgcgccgctgtcgcgcgcgatcgatgtgcccgcgcagccgtcgctattgcggctgccgcgcctgcaacatctgagcacgccgatcgccgcggcgctgaacgagcgcgcgacgctgctgcaagtcgtcgcggcgctgcatccgacgcccgccgtcgcgggccatccccgcgccgccgcgctcgagcacattcgcgcgcacgaaggcttcgatcgcggctggtatgcgggcccgatcggctggatcgacgcgcacggcaacggcgacttcgtcgtcgcgctgcgctcggcgctgatctcggccggtgcctgccggctgttcgccggctgcgggatcgtcgccgcatcggagccggcgcgcgaatatcgcgaaacgagcctcaagctgtcggggatgcaggcggcgatcgaggcgcgcgacgccgcagcagcagcgcgcacggtcgcgccgattccgtccgccgcgcactga

SEQ ID NO: 4786 - protein, 484 aa, Burkholderia pseudomallei K96243
MSARLSALLDTFARAARRAADTGEPVLAAASFPLRPLNLFDLIASWDDGATPWCFVEAGDEPGAMRAPGKPPALFGWDCALDLNEAGDARFARLDARWRALVRAAVVTGAQPPRIVGGFRFDPLGPRYAHWHAFADASMTLAKLLVVREGEAYWAVCQRVVAAHDDPAALARECDARIGMLASLAPAADDEAPRLLRVQALQAAAWQHEVRRAVDAIRGEAFSKVVLARDVLQQYARPVAIGPLLRRLRRRDPRAHLFAIRRRDGCFVGATPERLARVAHGRAHTHALAGTIARGNDPAHDRALGAQLMASAKERLEHALVVDAIRDALAPLSRAIDVPAQPSLLRLPRLQHLSTPIAAALNERATLLQVVAALHPTPAVAGHPRAAALEHIRAHEGFDRGWYAGPIGWIDAHGNGDFVVALRSALISAGACRLFAGCGIVAASEPAREYRETSLKLSGMQAAIEARDAAAAARTVAPIPSAAH

SEQ ID NO: 4787 - DNA, 1425 bp, Pseudomonas fluorescens Pf-5
  CDS (1)..(1425): transl_table=11
atgagtgaatcctgcctgtccggcttgacccgggccctgcgcaagggcgaatccctggcccggcgcagggggcgggcggtgctggtggtgtacagcctggccgccgagcgcctggagccgctgcggctgtttgccgccaaccgccaggtgttcggccagagcctgttctggtccagcgaccagggcgccctggccctggccgggttcggctgcaccgaagaaatcagcccgccggccgccgagcgttttgccgccagtacccaggcctggcgccagttgctgctgcaggcccatcaggtagggcccaagcgggcctacctgtgcggcggctttgccttcgacccccagggcccgcgcagtgcccagtggcagtcgttcgccgccacgtccctggtgctgccgcggatcctgctgctgcgcgaaggcgagcagcagcactggctgttcagcctgtggatcgagcccggcgccgacgtggcccagtgcgccggtgccctggaggcggagtgggccctgttgcaggcgcgctatacccacgcccccttggcacagatgcccgttggcacccaggccgaggaccacacccaggcagccgaccgctggcaggactgcgtggcccgagccatcgcgcggatccagggcggcgagctgagcaaggtagtactggcccgggaagtctgcctgcgggcgagccgcagcattccttgcgggccgctgctggaaaacctcagggcggcctatccccaggccttcctgttcgccttcagccgtggcgacagctgctttctcggcgccacgccggaacgcctggtgcgcctggcccgcggcaccctcaacaccgtggccctggccggcacctgcgcgcgcggccagcatgagcagcaggacgcggaactgggccaggccctgatggacagcgccaaggaccgccatgaacacgccctggtggtgcagaccctgcgcgaagccctgcagccctactgcgcgatgctggagattcccccgcagccgcaactgcaccgcctggcccacgtccagcacctgctgaccccggtgctggggcggttgcggccccaggtcgatctgctgcaagtggtggatgccctgcacccgaccccggcggtgggcggcctgcctcggggcaaggccctgggctatatccgcgagcatgagcaactggaccgcggctggtacgccgcccccgtgggctggctgaacgccgagggcgatggcgagtttgccgtggccttgcgttccgccctgatccgcggcaaccaggcgcacctgtttgccggttgcggcatcgtcggcgagtcggacccggcgagcgaataccaggaaacctgcctgaagttgcgcaccatcggcgaagccctgcgcccgccaccggccgccacctacgaaaagctcggcctctccctgtag

SEQ ID NO: 4788 - protein, 474 aa, Pseudomonas fluorescens Pf-5
MSESCLSGLTRALRKGESLARRRGRAVLVVYSLAAERLEPLRLFAANRQVFGQSLFWSSDQGALALAGFGCTEEISPPAAERFAASTQAWRQLLLQAHQVGPKRAYLCGGFAFDPQGPRSAQWQSFAATSLVLPRILLLREGEQQHWLFSLWIEPGADVAQCAGALEAEWALLQARYTHAPLAQMPVGTQAEDHTQAADRWQDCVARAIARIQGGELSKVVLAREVCLRASRSIPCGPLLENLRAAYPQAFLFAFSRGDSCFLGATPERLVRLARGTLNTVALAGTCARGQHEQQDAELGQALMDSAKDRHEHALVVQTLREALQPYCAMLEIPPQPQLHRLAHVQHLLTPVLGRLRPQVDLLQVVDALHPTPAVGGLPRGKALGYIREHEQLDRGWYAAPVGWLNAEGDGEFAVALRSALIRGNQAHLFAGCGIVGESDPASEYQETCLKLRTIGEALRPPPAATYEKLGLSL

SEQ ID NO: 4789 - DNA, 1224 bp, Thermobifida fusca YX
  CDS (1)..(1224): transl_table=11
gtgaccgcacgcaccgttgccttgcgtgaccagcgcgctctgctcgacctgctgcctcccgccgcaccgctggcgtgggttcggcggggtgagggactggtggcgtggggagtcgcggcgcgcttggaactgcccgccgagccggagcggtccggcattcaacggttcacggcggcagatgaatggcttgaatcgctgttctcgacgatcgtggtggacgacgacgtgggggtgccgggtagcggacctgtggtgttcggctcgttcacgttcgacggccgcgacgccggatccacgctcatcctgccgcgagtcgtcgtgggacggcgggacgggcagacgtggctcaccgtggtgggtgacgaagccgacccgctgccggccgtgccgccaccccgcccggtgggggcactgcggtggcggccgggcacgctcagcgaagcagagtggtgcgcagtggtgagccaggccgtggaccgcatccacaccaccgggctagcgaaagtggtcctggcgcgcgaccttgtcgcggaagcggaccatcccattgatgtccgcaccccgctgcagcggctggccgccgactatccggactgctacgtctactcggtggtgggactgaccggggctaccccggaactgttgctgcgccgtaccggcacccgcctggagtcgctggtgctggcggggaccgcgccgcggggggccaccgcggacgacgacgctgtgctcgcgaaaacgctgctcacttccgcgaaagatgtcgaagagcacgcctatgcggtggagtcgctgcgcgagtcgctggccccgttctgcacggaactggacgtgccccgccaccccgaactgctgcgtcttgccaacgtgcagcatttggccaccccggtgcgggccgtactccccgcaaagacggcgaccctgccagtgctggcggccctgcatcccactgccgcggtgggcggcaccccgacccgggtagcgatggacgtcatcggcgaattggaaggaatgcgccgcgaccgctacgccgggccggtggggtggattgatgcgcgcggcgacggggagtgggggatcgcgctgcgctgcgctcagatcaccgggccgcgggcccgcctcttcgctggggcagggatcgtcgccgactctgacccgcaggcggagctcgcggaaaccgtggcgaagttccgcgcggtgcgcgccgccctcaccggacggtaa

SEQ ID NO: 4790 - protein, 407 aa, Thermobifida fusca YX
MTARTVALRDQRALLDLLPPAAPLAWVRRGEGLVAWGVAARLELPAEPERSGIQRFTAADEWLESLFSTIVVDDDVGVPGSGPVVFGSFTFDGRDAGSTLILPRVVVGRRDGQTWLTVVGDEADPLPAVPPPRPVGALRWRPGTLSEAEWCAVVSQAVDRIHTTGLAKVVLARDLVAEADHPIDVRTPLQRLAADYPDCYVYSVVGLTGATPELLLRRTGTRLESLVLAGTAPRGATADDDAVLAKTLLTSAKDVEEHAYAVESLRESLAPFCTELDVPRHPELLRLANVQHLATPVRAVLPAKTATLPVLAALHPTAAVGGTPTRVAMDVIGELEGMRRDRYAGPVGWIDARGDGEWGIALRCAQITGPRARLFAGAGIVADSDPQAELAETVAKFRAVRAALTGR

SEQ ID NO: 4791 - DNA, 1182 bp, Thermobifida fusca YX
  CDS (1)..(1182): transl_table=11
atgccccgacagtgcgtcgccaccccggccgcgaccgtcactgaactcctggacgcctaccgtccccgggacttcttcttcacctccccttccgggtcgctgctcgggcaaggcgtcctgaccaccgtgaccggggtcgacgacctgtccgatgcactgcacgccaccgccgccgagccgggacggcacgccgtcgcggtcggagcgctccccttcaaccggaccgcacccgctcgcctcgtcatccccgcaaccgtgcagcgcggccccgcgatcatgcccggcaccggcgccacccgcgcgcggcgcccccggaacggcacctggaccgccacccccgttcccgaccccgccgcacacaccgccgcggtcaaacgcgccgtcgccctcctggccagcccagacagcacccggctgcgcaaagttgtcctggcccgctgcctccgcctgaccagcagccacgacgtggacgtcgccgcggtactcgccaacctcgcgcaagccaaccccggcgggttcaccttcgccgccgacctgcctgcccccgacagccgtccgcgcaccctcgtcggggccagcccggaactgctcgtcgccaaacacggccgcgccgtggtgtcccgcccgctcgcgggctcccgcccccgcgacaccgacccgacccgggaccgggaacgcggcgctgccctgctcgcctccgccaaagaccgcgccgaacacgccgtcgtcgtggaagccgtcgtcgaagcgctccgcccctactgccgctccctggatgtccccgacgaaccccagccggtcaccactcccaccatgtggcacctggccacccaggtcaccggcgaactgcgcgacccgcgcacccccgtccacgtgctggcccaggccctccaccccacccccgcggtctgcggctatcccaccgaccaggcctatgcggccatcgccgaactcgaaccgttcgaccgcggcttctacaccggggctgtcggctacaccgacgccgccggcgacggcgaatgggtggtgaccatccgctgcgccgacatccacggcgccaccgccgaactgtttgcgggcggcggcatcatgcccgactccgaccccgaggccgaactcgcggaaaccaccgccaaattccgcaccctgctgctcgccctcggagccgaccagctccggtaa

SEQ ID NO: 4792 - protein, 393 aa, Thermobifida fusca YX
MPRQCVATPAATVTELLDAYRPRDFFFTSPSGSLLGQGVLTTVTGVDDLSDALHATAAEPGRHAVAVGALPFNRTAPARLVIPATVQRGPAIMPGTGATRARRPRNGTWTATPVPDPAAHTAAVKRAVALLASPDSTRLRKVVLARCLRLTSSHDVDVAAVLANLAQANPGGFTFAADLPAPDSRPRTLVGASPELLVAKHGRAVVSRPLAGSRPRDTDPTRDRERGAALLASAKDRAEHAVVVEAVVEALRPYCRSLDVPDEPQPVTTPTMWHLATQVTGELRDPRTPVHVLAQALHPTPAVCGYPTDQAYAAIAELEPFDRGFYTGAVGYTDAAGDGEWVVTIRCADIHGATAELFAGGGIMPDSDPEAELAETTAKFRTLLLALGADQLR

SEQ ID NO: 4793 - DNA, 1401 bp, Prochlorococcus marinus str. NATL2A
  CDS (1)..(1401): transl_table=11
atgaatttagaacccgtctttagtgagcttttagttagttctcttcagaaatggagtgaaagaaaagttgatgaatgtatcttgagcatttctgttcctgtaagtcaaacagatcctttagcgacattacctttaattgctgaaaaacatcagtttaggtttctttgggatctctctcccagattgtgcctttctgccggaggtcattgtcaatctttggatttatctggaccaaagaggtttgaaaatgcacaaagatttagtgatgagatctttactcgattgatagatatttctccaagtccagtattttcagcatcaagggttttattttcattttctttctttgatcaaattaaaagtaatgaacaatcaatagatgataaattttcccttcaggctgttttgcctaagtggcaattaaccgcaaaagatggattaacatggctacgtttaaattcagttgcccaaaatccttcagatgttcgtgaagctatagaaagattatggtcaactcgagaaaagataaataaatcaccagtccgaattgttaatgatgaaaatgaaaatttcttagtcgataatttttctgatgattggcaatctcaatatcgagatgcgttgactaaagggatcgaattaataaattcaggtgatttggataaacttgtattggctacgagacaacgtctcctcctaagaaaaccattagatccactgcacttacttgctcgtttaagagttcagcaaactaatagttgtcgatttttatggcaaaaaaatcatgatgagtcattttttggtgcatcgcctgagagattaataagtctcaatcaaaatcagttgttaatcgatgctttagctggtactgcaaaaaaaggtgatgatgggagagaattgcttgcttcctctaaagatttaagagaacaccattttgtagttaattctattgtcgaacaactttttagaagaggtattaaagcaagttattcatctcaaccaaaattaatgactcaagaccatttaattcatttgcatactcttattcaagcttctgttgaagagaaatctcctcttgatttagttgaagcacttcatccaacccctgctgttgcgggattacctctgagtaaatctttgagttggttgagagctttggaaccatttgaccgtaaaacatatgcttctccaattgggtggatagataaaaatcaaaattcagaatttagagttgccatacgttatggacaggttagagctaatgaacttaaattatttgctggcgctggtttagtaaaaggttcaactgttgagggagaaatgcaagaagtagctttgaaatttgaagttttaagaaatcaattaaacttagatagagttaattgttcaaatgatctataa

SEQ ID NO: 4794 - protein, 466 aa, Prochlorococcus marinus str. NATL2A
MNLEPVFSELLVSSLQKWSERKVDECILSISVPVSQTDPLATLPLIAEKHQFRFLWDLSPRLCLSAGGHCQSLDLSGPKRFENAQRFSDEIFTRLIDISPSPVFSASRVLFSFSFFDQIKSNEQSIDDKFSLQAVLPKWQLTAKDGLTWLRLNSVAQNPSDVREAIERLWSTREKINKSPVRIVNDENENFLVDNFSDDWQSQYRDALTKGIELINSGDLDKLVLATRQRLLLRKPLDPLHLLARLRVQQTNSCRFLWQKNHDESFFGASPERLISLNQNQLLIDALAGTAKKGDDGRELLASSKDLREHHFVVNSIVEQLFRRGIKASYSSQPKLMTQDHLIHLHTLIQASVEEKSPLDLVEALHPTPAVAGLPLSKSLSWLRALEPFDRKTYASPIGWIDKNQNSEFRVAIRYGQVRANELKLFAGAGLVKGSTVEGEMQEVALKFEVLRNQLNLDRVNCSNDL

SEQ ID NO: 4795 - DNA, 1446 bp, Burkholderia sp. 383
  CDS (1)..(1446): transl_table=11
atgaacgccggcctcccgctgctgcacgacacgttcgcccgcgcggcccgccgcgccgccgataccggaacgccgacgctcgcgtcggtgtcggtgccgctgcgcccgctcgacttcttcgacctgatcgccgcgtgggacgacggcgccacgccgtggttcttccatgaagccggcgatgcgcccgtcacgctgttcggctgggactgcgcgctcgaactgaccgccgccggcgacacgcgcttcgcgcagatcgatgcgcgctggcgcacgctcgttcgcgatgccgtgatggccggcccgcaaccgccgcgcgtcgtcggcggcttccggttcgattcgcatggcgcgcgcagcgcacactgggcgccgtttcccgacgcgagcatgacggtggcgaagctgctgatcgtgcgcgaaagcgatgcgcactgggccgtctgccagcacgtcgtcgccgcgcacgacgatccggccgcgctcgcgcatgcgtgtcttgcgcgcatcgagtcgctcggcacgctcgccgccgcccacgatgacgatgccccgcatctgctgcacacgcaggcgctgcaagccagcgagtggcagcacgaagtgcggcgcgcggtggacgcaatccacggcggtgcgttcggcaaggtcgtgctcgcgcgcgacgtgctcgaacagtacgcgcggcccgttgccgtcgcgccgttgctgcgccggctgcgcaagcgcgacgcgcatgcgcacctgttcgcggtccgccgcgaaggcgcctgcttcgtcggcgccacgccggaacggctcgcgcgtgtcgcggccggcgacgtgcgcacgcatgcgctggccgggacgatccggcgcggcgccacgcccgacgacgaccgcgcgctcggtgcggcgctgatggattccgcgaaggagcgactcgaacacgcgctcgtcgtcgacgcgatccgcgctgcgctcgcgccgctgtcacgcgcgctcgacgtgcccgagcaaccgtcgctgcaccggctgccgaggctgcagcacctgggcacgccgatccgcgcgacgctgaaggcggacgcgacgctgctgcaggtcgtcgcggcgctgcacccgacgccggcggtggccggccatccgcgcgccgaagcgctcgaccacatccgtgcgcatgaaggcttcgatcgcggctggtatgcggcgcccgtcggctggatcgacgcgcacggcaatggcgatttcatcgtcgcgttgcgctccgcgctggtcgatggcggcgcgtgccggctgttcgcgggctgcggcatcgtcgccgattccgagccggtcaacgaatatcaggaaaccgaactgaagttgtcgggcatgcaggcggcgatccgcgtgcgcgatgcaacggcggatgcggatgccgacgcacgcggatcggcaaaggtgtcggcctcgtcgacggtcgagtga

SEQ ID NO: 4796 - protein, 481 aa, Burkholderia sp. 383
MNAGLPLLHDTFARAARRAADTGTPTLASVSVPLRPLDFFDLIAAWDDGATPWFFHEAGDAPVTLFGWDCALELTAAGDTRFAQIDARWRTLVRDAVMAGPQPPRVVGGFRFDSHGARSAHWAPFPDASMTVAKLLIVRESDAHWAVCQHVVAAHDDPAALAHACLARIESLGTLAAAHDDDAPHLLHTQALQASEWQHEVRRAVDAIHGGAFGKVVLARDVLEQYARPVAVAPLLRRLRKRDAHAHLFAVRREGACFVGATPERLARVAAGDVRTHALAGTIRRGATPDDDRALGAALMDSAKERLEHALVVDAIRAALAPLSRALDVPEQPSLHRLPRLQHLGTPIRATLKADATLLQVVAALHPTPAVAGHPRAEALDHIRAHEGFDRGWYAAPVGWIDAHGNGDFIVALRSALVDGGACRLFAGCGIVADSEPVNEYQETELKLSGMQAAIRVRDATADADADARGSAKVSASSTVE

SEQ ID NO: 4797 - DNA, 1404 bp, Synechococcus elongatus PCC 7942
  CDS (1)..(1404): transl_table=11
atggctgccctgtcaactgcctcctctcttcagtcattcagcgagctgctggcttgggttcgtcctgctctagaggcgacgccaacggctcgactcctgagcctatcgctgccgttaccccgtcttgatccgctggctgcatggggtgtgttgggtagtagtcgcgatcgccactactaccaagagcgtcccgccacccaagaggcgatcgtggctgtagggccagcagccctgctggaactgaatggaccccagcgctttcagcaggcccagacctttatcaatgcctgtcttgctcaggggctgcgcttacaggccgaaggtgcaactctagggccgagtttctgttgcagttttagcttttttgaagatgttgcagggacagcgccagcagctccggcgacggtctttttgccacgttggcaggtgcgttgccaagctgatcgcacggtactgacggccagttttgcaatcgccgatcgcgagagctatcgccaacggctggaagaagtctggcaggtctatcaacatctgcgggcgatcgcccagcaaccgtttcagctgccgccgctgcgtcccaatcgctggctagagcaacagagcagtgatccccagtcctttcgagccggtgtagaaacggtcttagctgagattgcggccggtcgtctccataagggcgtcttggcgcgctgtctagaggcgatcgcagaatttgcgatcgtgccggaaggcgtgctcgatcgcctgcggcagcgttttgctgactgcgccatcttcagctgcggcgatggtcggggcagtgttttcctcggggcaacgcccgaacgcttagcggcggtggaagcgggtcaactggtgactgaggcgctggcgggttctgccccacggggtgaaaccattgcggctgatcaagcccttgggcaggcgctgcaagccaaccccaaggaactgcaagaacatcagctggtggcgcaatttatccgccaaaccctgcaggaacttggccttgagcctcacttgagcgatcggccccaactgcgtcgcctgtcgaacattcaacacctgcacaccccgatcgccgctccactgcccgctgctctgcctctactggatgttgtggctcagctccatcccacgccagccgttgcggggttacccaagcaggctgccgaacaggcgattcgtcggctggaaccctttgagcgatcgctctacgctgcaccggttggctgggtggatgaccaaggaaacggggaattcttagtcgggattcgctcggcgtcgattcaagggaatcgggtgcgtctctgtgcgggtgctggcattgtgccggggtctcaacccgatcaggaactcgttgaagtcgatctcaagctccaggccatgctcggcgcgctgatctga

SEQ ID NO: 4798 - protein, 467 aa, Synechococcus elongatus PCC 7942
MAALSTASSLQSFSELLAWVRPALEATPTARLLSLSLPLPRLDPLAAWGVLGSSRDRHYYQERPATQEAIVAVGPAALLELNGPQRFQQAQTFINACLAQGLRLQAEGATLGPSFCCSFSFFEDVAGTAPAAPATVFLPRWQVRCQADRTVLTASFAIADRESYRQRLEEVWQVYQHLRAIAQQPFQLPPLRPNRWLEQQSSDPQSFRAGVETVLAEIAAGRLHKGVLARCLEAIAEFAIVPEGVLDRLRQRFADCAIFSCGDGRGSVFLGATPERLAAVEAGQLVTEALAGSAPRGETIAADQALGQALQANPKELQEHQLVAQFIRQTLQELGLEPHLSDRPQLRRLSNIQHLHTPIAAPLPAALPLLDVVAQLHPTPAVAGLPKQAAEQAIRRLEPFERSLYAAPVGWVDDQGNGEFLVGIRSASIQGNRVRLCAGAGIVPGSQPDQELVEVDLKLQAMLGALI

SEQ ID NO: 4799 - DNA, 1446 bp, Burkholderia thailandensis E264
  CDS (1)..(1446): transl_table=11
atgaacgcccgcttctcggtgctgctcgacaccttcgcacgcgcggcgcgccgcgcggccgacaccggcgagcccgtgctcgccgccgcatcgtttccgctgcggccgctgaaactgttcgacctgatcgcgagctgggacgacggcgcgaccccgtggtgcttcgtcgaagccggcgacgagccgggcgcgccggaccggccggccgcactgttcggctgggactgcgcgctcgatctgaacgagccgggcgatgcgcgattcgcccggctcgacgcgcgctggcgcgcgctcgcccgcgcggcggtcgtcgccgggccacagccgccgcgcatcgtcggcggctttcgcttcgatccgcgcgggccccggcatgcgcactggcaagcgtttcccgatgcgagcctgacgctcgcgaagatgctgatcgttcgagaaggggatgcgtattgggcggtctgccagcgtgtcgtctccgcgcacgacgattgcgccgcgctcgcgcgcgaatgcgacgcgcgaatcggcatgctcgcggcgctcgcgcccgccattgacgacgatgcgccgcgcctgctgcacgtccacgcgctgcaagccgccgaatggcagcacaaggcgcgacgcgcggtcgacgcgattcgccgcgacgcattcagcaaggtcgtgctcgcgcgcgacgtgctgcaacagtacgcgcagcccgtcgcaatcggaccgctgctgcgccggctcaggctgcgcgacgcgcgcgcgcatctgttcgcggtccgccggcgcgagggctgcttcgtcggcgcgacgccggaacgcctcgtgcgcgtcgcgcacggccacgcgcaaacgcacgcgctcgccggcacgatcgcgcgcggcgacgatcgcgatcacgaccgcgcactcggcgcgcagttgatggcgtcggcgaaggagcgcctcgaacacgcgctcgtcgtcgatgcgatccgcgacgcgctcgcgccgctgtcgcgcacgatcgacgtgccggccgagccgtcgctgttgcgcctgccgcgcctgcaacacctgagcacgccgatcgccgcgacgctgaacgcggacgcgacgctgctgcaggccgtcgcggcgctgcatccgacgcccgccgtcgccggctatccgcgcgccgccgcgctcgagcacattcgcgcacacgaaggcttcgatcggggctggtacgccggcccgatcggctggatcgacgcgcacggcaacggcgacttcgtcgtcgcgctgcgctcggcgctgatctcggcaggcgcttgccggctgttcgccggctgcgggatcgtcgccgagtcggagccggcgcgcgagtatcgcgagacgaacctcaagctgtcgggcatgcgggcggcgatcgaggcacgcgacgccgccgccaacctgcgcacggtcgcgccgatgcctgccgccgcacactga

SEQ ID NO: 4800 - protein, 481 aa, Burkholderia thailandensis E264
MNARFSVLLDTFARAARRAADTGEPVLAAASFPLRPLKLFDLIASWDDGATPWCFVEAGDEPGAPDRPAALFGWDCALDLNEPGDARFARLDARWRALARAAVVAGPQPPRIVGGFRFDPRGPRHAHWQAFPDASLTLAKMLIVREGDAYWAVCQRVVSAHDDCAALARECDARIGMLAALAPAIDDDAPRLLHVHALQAAEWQHKARRAVDAIRRDAFSKVVLARDVLQQYAQPVAIGPLLRRLRLRDARAHLFAVRRREGCFVGATPERLVRVAHGHAQTHALAGTIARGDDRDHDRALGAQLMASAKERLEHALVVDAIRDALAPLSRTIDVPAEPSLLRLPRLQHLSTPIAATLNADATLLQAVAALHPTPAVAGYPRAAALEHIRAHEGFDRGWYAGPIGWIDAHGNGDFVVALRSALISAGACRLFAGCGIVAESEPAREYRETNLKLSGMRAAIEARDAAANLRTVAPMPAAAH

SEQ ID NO: 4801 - DNA, 1266 bp, Saccharophagus degradans 2-40
  CDS (1)..(1266): transl_table=11
atggacactacgcaaaatgttgcacagcgctatgatgacctgctcgacctttattcacagtacagcagcctctatttttcgtcaccttcgcacagcctgttagccaagccaccgtttgctcaattggtttctgaacgcgttggtgatattgcccagcgcgcacaagaatcacttagcattgctaagcagttggggtttgccgacccaataataatgggcgcaataggtttcgatggcgaagacgcaagcgcattgcgggtttgtaacaatgtaattcgccaaacaaaaatgccttttgctagtggtgatgctagtggcggcattgcgtttaacccaagccaagccggtgctcaccgtataacgccagtgcccagtgggcaagtatttaaaaatagtgtgaacgaagcgcttactctttttgagcaaacaccgctgcaaaaagtggtgttgtcgcgcgcgctggatgtgcaatttgagtctgcaccaaatattccgcttgcacttaaatcgctggctgtaaaaaacccattgggctatacatttgcggtgccgttaaatgcggctgcgccagcaacagtagtgggcaaccgcgtattaattggtgcaagcccagaattacttttatctaagtcgggtaaagatattcatattcatccgctagcgggttcaatagctcgcagcgaaaaccccagcgaagatgctcaaaaagcagatgggttactgcagtcggcgaaggacttatacgagcatcgagttgttgtagatgcgatagaaaaatccctgcgtccattttgtaaaagcttgcgcgtaccgcgtacgccttcgcttatgtctaccgccaccatgtggcaccttggtactcatattacagccgagcttaatgatgaaacgctctcgtcgctcgcactggcgctcgccttacaccctacgccggcggtgggtggttacccagtggcagacgctaagcaagcgataaaaaaattagagcagtacccgcgagatttttttaccggtattgttggttggtgtaatgcgcagggcgatggcgaatgggcaattaccatacgttgtgccgaagtatttaatcatcgtgtgcgtgtgtatgccggtgcgggtgtggttgcaggttcatgcgcagaaaaagaatatgcagagaccgccgctaaatttaacacggtacttaatgcgtttggggtcaagcctgttaaagagcgggtgcctaagcaaaccaaaagcaaggtaagcgaggaggaagtgcatgtgtaa

SEQ ID NO: 4802 - protein, 421 aa, Saccharophagus degradans 2-40
MDTTQNVAQRYDDLLDLYSQYSSLYFSSPSHSLLAKPPFAQLVSERVGDIAQRAQESLSIAKQLGFADPIIMGAIGFDGEDASALRVCNNVIRQTKMPFASGDASGGIAFNPSQAGAHRITPVPSGQVFKNSVNEALTLFEQTPLQKVVLSRALDVQFESAPNIPLALKSLAVKNPLGYTFAVPLNAAAPATVVGNRVLIGASPELLLSKSGKDIHIHPLAGSIARSENPSEDAQKADGLLQSAKDLYEHRVVVDAIEKSLRPFCKSLRVPRTPSLMSTATMWHLGTHITAELNDETLSSLALALALHPTPAVGGYPVADAKQAIKKLEQYPRDFFTGIVGWCNAQGDGEWAITIRCAEVFNHRVRVYAGAGVVAGSCAEKEYAETAAKFNTVLNAFGVKPVKERVPKQTKSKVSEEEVHV

SEQ ID NO: 4803 - DNA, 1245 bp, Myxococcus xanthus DK 1622
  CDS (1)..(1245): transl_table=11
atgacgcccgctgagccgaaggaacaggaacaccccatgggaccgcagacactcgccgcgcagttgctcgagagctacgaggctggctcttcgttcttcttcgccacgccgcgccgcacgctgctggcgcgcggcacctttgctaccgtgccacaccagggcggcgcggatgccctggcgcggctccccgtgcgcgtgacggcggtgctgaatgacgcgcgccaggccgaccacgacatccccgtggcggtgggcgcggtgcccttcgacggctcggtacccgcacagctcgtggtgccgctgacgctccagcgcgccgggccgctggtgttcgacaaggacgtcccggtgcagcggccgttcagcgccagctacaccgtccagccggtgccggagcccgccgcgtacctgaacggcgtcgcgcaggccctgaagctgatgcagagcgggccgctccagaaggtggtgctgtcacgttcgctgcacctcaacgccgccgcccccatcgacctgcggcagctgctgcgcaacctcgcgcagcgcaacccgtcgggctacaccttcgccgccgacctcccccagcaggatgggacccgcggcgcgggacttcgcacgctcattggcgccagccccgagctgctcgtgtcccgctccgggttccaggtggtcgccaatcccctggccggctccgcggcccgcagcgcggatccgctggaggaccaggagcgcgccgccgcgctgctgaagtcgcccaaggacctgcacgagcacgcggtggtcatcgacgccgtcgcggaggcgctgcggccgtactgcaagacgctgaacgtgcccgccggtccgtcgctcgtgaacaccgccaccatgtggcacctgtccagccgcatcaccggtgagctggccgacccctccatctcctcgctgacgctggcggcggccatgcacccgacgccggcggtgtgcggctatcctacacggctggcgcacgaggcgattggctccatcgagcccttcgagcgcggctactacaccggcacggtgggctggtgcgacgccacgggtgatgggcagtgggcggtgaccatccgttgcgcggaggccagtgagcgcaccctgcgcatcttcgcgggcgcgggcatcgtggtgggctccacgcccgagtccgagctggcggagaccgaggccaagttccgcaccatgctccacgccatgggcctgggccacggtgccggggtgcagtcatga

SEQ ID NO: 4804 - protein, 414 aa, Myxococcus xanthus DK 1622
MTPAEPKEQEHPMGPQTLAAQLLESYEAGSSFFFATPRRTLLARGTFATVPHQGGADALARLPVRVTAVLNDARQADHDIPVAVGAVPFDGSVPAQLVVPLTLQRAGPLVFDKDVPVQRPFSASYTVQPVPEPAAYLNGVAQALKLMQSGPLQKVVLSRSLHLNAAAPIDLRQLLRNLAQRNPSGYTFAADLPQQDGTRGAGLRTLIGASPELLVSRSGFQVVANPLAGSAARSADPLEDQERAAALLKSPKDLHEHAVVIDAVAEALRPYCKTLNVPAGPSLVNTATMWHLSSRITGELADPSISSLTLAAAMHPTPAVCGYPTRLAHEAIGSIEPFERGYYTGTVGWCDATGDGQWAVTIRCAEASERTLRIFAGAGIVVGSTPESELAETEAKFRTMLHAMGLGHGAGVQS

SEQ ID NO: 4805 - DNA, 1098 bp, Mycobacterium sp. MCS
  CDS (1)..(1098): transl_table=11
gtgaccgccgagccgagcttcgtcctcaccggcgacgacggtgtcgtactggccgacggcgtccacacgccgtaccccacgctgggcgacgcgtgcgccgcgctggccgcaggcgataccccgatgatcttgggcgccttgcctttcgacctgaccgcaccgacggcactgttccgcccgcagcgcgtgcgcttcctcgatgcgctgccggactggccggccgtcggcctgccacgtgtacggatcgccgagttccggcccgcaccccaggagcaccgcgcacgcgtcgcgtcggcggtgcgcgcgctcaacgaccccgccaccggactgcacaaagtcgtactcgcgcgggcgctgcacctgaccgccgacggaccactcgacgcgcgaaccgtgctgcggcgcctggtcgccgacgatgcgagcgccaacgcgtatctggccgatctcaccgcagccggagaccactaccgcggtgcggccctgatcggggccagcccggaactgctggtggcccggcgcggtgaggtggtgacgtgccaaccgttcgccggttcggcgccgcggttcgccgaccccgcggccgaccgggccagcggcgccgccctcgccgactcggccaagaaccggcacgaacacgccatcgtgatcgacgaggtgcgcaaggccctcgacccgctgtgcgtggatctgcagatcgcgccgacaccgcacctcagcgcgacggccgccgtctggcacctgagcacccagatcaccggccgactgcgcgaaacaaacaccaccgcactggatctcgcggtcgcgctgcacccgaccccggccgtcggcggcgtcccgaccgacttggccgcggagttgatcaaacgcctcgagggcgaccgcggcttctacgccggcgccgtcggctggtgcgacgcggcgggtgacggccgctgggtggtgtccatccggtgcgcccaactggccgccgatcggctcgccgccaccgcccactccgggggcggcatcgtcgccgaatccgatccggacgacgaagtcgccgagaccacaacgaaattcacgaccatcctgtccgcactgggggtaacgcaatga

SEQ ID NO: 4806 - protein, 365 aa, Mycobacterium sp. MCS
MTAEPSFVLTGDDGVVLADGVHTPYPTLGDACAALAAGDTPMILGALPFDLTAPTALFRPQRVRFLDALPDWPAVGLPRVRIAEFRPAPQEHRARVASAVRALNDPATGLHKVVLARALHLTADGPLDARTVLRRLVADDASANAYLADLTAAGDHYRGAALIGASPELLVARRGEVVTCQPFAGSAPRFADPAADRASGAALADSAKNRHEHAIVIDEVRKALDPLCVDLQIAPTPHLSATAAVWHLSTQITGRLRETNTTALDLAVALHPTPAVGGVPTDLAAELIKRLEGDRGFYAGAVGWCDAAGDGRWVVSIRCAQLAADRLAATAHSGGGIVAESDPDDEVAETTTKFTTILSALGVTQ

SEQ ID NO: 4807 - DNA, 1143 bp, Rhodococcus sp. RHA1
  CDS (1)..(1143): transl_table=11
atgcagtcgacggccattgccgagtccgcagagacttcggcggacctcccgccgggcgcgccgttcgttctctcccgcccgcacggcaccgtgatcgccgacggcatccgcaccggttacgactccgcccgcgacgccgccgccgccctgcggaacggcaccgcgacgtcggtggtcggcgcgctcgccttcgacccgtcacatcccgccgcgctgatcgcaccacaggcgctgcgtcatcacccgggaagctggacccctcgcctgcaggcccttccgcgcgtgcgcgccggtgagtcgattcccccggaggacgagcacatttcccgggtcgccgccgccattcacgtgctgcgggaacccgatgccacactgcacaaggtggtactcgcccgatcggtcgtcctgcacgccgacgaaccgctgcatccgcacgcactgctcgcgcagctcgtggcgaacgacctcggcggcaacggcttcagcgtcgatctgagtgccgcaggcaccggctggtcgggacggcacctcgtcggctcgagtcccgaggtgctcatccgccgccgcggcaacaccgtgacctgccatcctctcgccggatccgctccccggcacaccgatcccgagatcgaccggctgaccgccgaaaaccttgcctcgtcggagaagaacctgcgtgaacatgccctcgtcgtcgaggcgctgcgagcgagcctcgaaccgttctgcactgaactcgacatcccggacaggcccaccctcaccagcacaccgcaactgtggcatctcggcacgcccgtgtcgggacggctgcgggaccgctcggtgaccgcactggacctcgccgtcgccgtgcacccgaccccggccgtgtgcggcacccccaccgacgcggcgcgtgcgctgatcggcgaactcgagggcgaccgcggcttctacgccggcgccgtgggctgggccgacgccgacggagacggcgaatggatggtcaccatccggtgcgcgcagatcgacgccgaccgcaccaccgtcacggcgtacgccggcggcggcatcgtcgccgcatccgaaccggacgacgaactcgccgagaccacaaccaaactgggcaccgtcctcgccgcactggggctcccccgatga

SEQ ID NO: 4808 - protein, 380 aa, Rhodococcus sp. RHA1
MQSTAIAESAETSADLPPGAPFVLSRPHGTVIADGIRTGYDSARDAAAALRNGTATSVVGALAFDPSHPAALIAPQALRHHPGSWTPRLQALPRVRAGESIPPEDEHISRVAAAIHVLREPDATLHKVVLARSVVLHADEPLHPHALLAQLVANDLGGNGFSVDLSAAGTGWSGRHLVGSSPEVLIRRRGNTVTCHPLAGSAPRHTDPEIDRLTAENLASSEKNLREHALVVEALRASLEPFCTELDIPDRPTLTSTPQLWHLGTPVSGRLRDRSVTALDLAVAVHPTPAVCGTPTDAARALIGELEGDRGFYAGAVGWADADGDGEWMVTIRCAQIDADRTTVTAYAGGGIVAASEPDDELAETTTKLGTVLAALGLPR

SEQ ID NO: 4809 - DNA, 1092 bp, Rhodococcus sp. RHA1
  CDS (1)..(1092): transl_table=11
atggacggcttccttctctcccgcgccgaccggacgttgcgtacgtccggtgcgcggcacgggtacgacaccgcggcagccgctgtcgcggccctctcgaacggtgacaccgaactgatcgtcggagcgctgccgttcgatccccagcgtcctgccgcgctgaccgccccggaatcgtgggaattcacggacggcccgtggcggcccggtgccgttcccgacctcccgtccgtacgcctcacgcgggaaattcccgaccccaccgagcacgtggcccgggtgcggtccctcgtcgaccgactgcgcgagggcgctctcggcaaggtcgtcgcagcccgcagcgtcaccctccgtgccgacacccccatctccgcagaagcgttggccgcgagaatgattcaccagaatcccactgccaacgggttcgccgtcgacctctccgcggccggcgaggggttccgcagccacagcctcgtcggcgccagccccgaggtgctgctcagccgacgcgggcgacgcgtcacctgccgtcccctcgccggaacagccccgcggcgcgccgatccggaggccgacgagaaggaaggtcgcggactcctggagtccacgaagaacctggccgagcacgcgttcgtcacggcctggatcagagacgtcctggcgccgctctgcaccgagttgaccgtcccggactccccggttctgacgagcacccacgaggtgtggcatctcgcgacccccatcgaaggcgtgctgcgcgacgcgtcgaccagcgctttgagcctggccacccggttgcacccgacccccgcggtgtgtggcacccccaccgacctcgccctcgcgaccatccgggacgtcgaggaggatcggcggttctacggcggcgccgtcgggtggtgcgacggcgacggcgacggcgactgggtggtggccatccgctgcgccgagatcgccgcggacggactcgaggcactggcgacggcgggcgggggcatcgtcgccgagtccgaccctgagtccgaactcgacgagacgaccaccaaactgcgcacgctgctccgggcgctcggcgtgcagcagggcccgtga

SEQ ID NO: 4810 - protein, 363 aa, Rhodococcus sp. RHA1
MDGFLLSRADRTLRTSGARHGYDTAAAAVAALSNGDTELIVGALPFDPQRPAALTAPESWEFTDGPWRPGAVPDLPSVRLTREIPDPTEHVARVRSLVDRLREGALGKVVAARSVTLRADTPISAEALAARMIHQNPTANGFAVDLSAAGEGFRSHSLVGASPEVLLSRRGRRVTCRPLAGTAPRRADPEADEKEGRGLLESTKNLAEHAFVTAWIRDVLAPLCTELTVPDSPVLTSTHEVWHLATPIEGVLRDASTSALSLATRLHPTPAVCGTPTDLALATIRDVEEDRRFYGGAVGWCDGDGDGDWVVAIRCAEIAADGLEALATAGGGIVAESDPESELDETTTKLRTLLRALGVQQGP

SEQ ID NO: 4811 - DNA, 1095 bp, Mycobacterium avium 104
  CDS (1)..(1095): transl_table=11
gtgaacgacgaaccgacgttcgcgctgtgcgggccgacgcaaaccctggtcgccgacggcgtgcggcgaagctaccgcgacgtggccgccgcgcaggccgcgctgcgctcccaagaagtgtcaattgtgttgggcgcgttgcctttcgacgtgcgccgaccggccgccctgctgaccccggataccgtgagcgtcagcgacggcccaccggactggccggcccggaagctgccgtcgatgcgggttgccgccgccctccccccgccgatcgactaccgggaccggatctgccgggcccgcgagcagctcgccgcaaccgacaacccgctgcacaaggtggtgctggcccgcgccctgcacctggtcgccgacgccccgctggatgcccgcaccatcctgcgccggctgatcgccgcagacccgggcgcgtacggctatctcgtcgacctcagcgccgccggccacgaccatgcgggcgtggcgctggtgggcgccagccccgagcttctggtggcgcgcaccggcgaccgggtcgagtgccggccgttcgccgggtcggccccgcgtgccgccgatccggacaccgacgcggccaacggtgccgcgctggcgtcgtcggccaagaaccgccacgagcatcagctggtgatcgagaccatcagggccgccttggagccgctgtgcgacgacctgtccatcgcggcccaaccgcagctgagccgcaccgccacggtgtggcacctgtgcacgccgatcagcgggcggctgcgcgataagtcaaccaccgcaatcgatttggcgctggcgttgcaccccacaccggcggtcggcggggtgccgaccgacgccgccgtcgagctgatcgccgaactggagggcgaccgcggcttctacgccggcgcggtgggatggtgtgacgcccgcggcgacggccgctgggtggtgtccatccgctgcgcgcagttgtcggccgaccggcgcagcgcgctggcgcgggccggcggcggtatcgtcgccgaatccgatcccgacgacgaagtcgcggaaaccacaacgaaattcgccaccatactcaacgccctggacgtccgatga

SEQ ID NO: 4812 - protein, 364 aa, Mycobacterium avium 104
MNDEPTFALCGPTQTLVADGVRRSYRDVAAAQAALRSQEVSIVLGALPFDVRRPAALLTPDTVSVSDGPPDWPARKLPSMRVAAALPPPIDYRDRICRAREQLAATDNPLHKVVLARALHLVADAPLDARTILRRLIAADPGAYGYLVDLSAAGHDHAGVALVGASPELLVARTGDRVECRPFAGSAPRAADPDTDAANGAALASSAKNRHEHQLVIETIRAALEPLCDDLSIAAQPQLSRTATVWHLCTPISGRLRDKSTTAIDLALALHPTPAVGGVPTDAAVELIAELEGDRGFYAGAVGWCDARGDGRWVVSIRCAQLSADRRSALARAGGGIVAESDPDDEVAETTTKFATILNALDVR

SEQ ID NO: 4813 - DNA, 1092 bp, Mycobacterium smegmatis str. MC2 155
  CDS (1)..(1092): transl_table=11
gtgagcgcgccgtcgttcgtcttcgcgggcccgtctggtgtgctgatcggcgagggcgtgcagacaggcttcgccacgatcgccggcgccagggcggccctgacgtcgggcgcggcggacctcgtcgtcggggcgctgccgttcgacctgaccgggcccgcggcgctgcacgccccggcttctgcgcgggtcgccggcgcgctgcccgactggccgacgggcactccaccggtgctgcgtacgcgcgagacgctgccgtcgggtgatgtgcaccgcgagcgggtggccgaagcggtgcgccggttgcgcgacgcggacacgccgctggacaaggtcgtgctggcccgcgcactgcggttgaccgccgaagccccgtgggatccccgcacggtgctgcgccgactcgccgacgcggacccggcggccacggtgtacctggcggatctgagcccggcaggcgatccgcacaccggtaccgtgctggtgggcgcgagccccgagttgctggtcgcccgcgacggcgacgaggtgatctgccgcccgttcgccggttcggcaccacgatcggccgatttggagaccgaccgggcgaacgccgccgcgctggccgcctccggcaagaaccgccacgagcacgaactggtggtcgacgtcatgcgcaaggcgctcgacccgctctgcgtcgacctgcagatcgccgcgcagcccgaactgcacgcgaccgacgcgctgtggcacctgagcacaccgatccgtggccggttgcgcgacaaggcgatcaccgcaatcgatctcgccgtcgcgctgcatcccacaccggccgtcggcggcgtccccaccgacctggccgcctccctcatcaccgaactcgaaggcgaccgcggcttctacgcgggtgccgtcggctggtgcgacagcgcgggcaacggccgctgggtggtgtcgatccggtgcgccgtactgtccgccgaccgccgcgtcgcgctcgcgaatgccgggggcggcatcgtcgccgaatccgatcccgacgacgaagtcgacgagaccacaaccaaattccgcacgatactgacagggctgggagtgcaatga

SEQ ID NO: 4814 - protein, 363 aa, Mycobacterium smegmatis str. MC2 155
MSAPSFVFAGPSGVLIGEGVQTGFATIAGARAALTSGAADLVVGALPFDLTGPAALHAPASARVAGALPDWPTGTPPVLRTRETLPSGDVHRERVAEAVRRLRDADTPLDKVVLARALRLTAEAPWDPRTVLRRLADADPAATVYLADLSPAGDPHTGTVLVGASPELLVARDGDEVICRPFAGSAPRSADLETDRANAAALAASGKNRHEHELVVDVMRKALDPLCVDLQIAAQPELHATDALWHLSTPIRGRLRDKAITAIDLAVALHPTPAVGGVPTDLAASLITELEGDRGFYAGAVGWCDSAGNGRWVVSIRCAVLSADRRVALANAGGGIVAESDPDDEVDETTTKFRTILTGLGVQ

SEQ ID NO: 4815 - DNA, 1287 bp, Nocardioides sp. JS614
  CDS (1)..(1287): transl_table=11
gtgagtaccctcggcagggtgacgagcagccccacacccggcgatccgccgccggccccggcggacgcgctcgtcgtccgcacggtccgcctcgatctcgaccaggcggcgagcctgctggacctggtcccggccgaccggccggtcacctggttgcggcggggcgacggcctggtcggttggggcgtcgccgcccaggtgcgcaccagcggggccacccggttcgccgacgccgtgaagtggtggagcgagaccatcgctcgggcggacgtgcacgacgacgtcaacgagcctggcaccggcctcgtgtcgttcgggtcgttcgcgttcgccgacgacccgggcgactcgatcctggtcctcccccgcgtggtcgtcggacgccgcggcgacgtcacgtggctcaccacggtcggcgaggtcggacccccgctcgggccggtggagcgtccagcggccccggccgcggtcagcttcgccgacggcgcgctgaacggcgagcagtggatgtccgtggtcgccgacgccgtggcacggatcaacgccggcgacctggagaaggtcgtgctcgctcgggacctggtcgccacggcgagcgacccggtcgacgtacgctggccgttgggccggctcggcgagacctatccgatgtgctggacgttccacgtcgacggcatgttcggggcgaccccggagatgctggtgcgccgcgagcgcggcctggtgacctcgcgggtgctggccggcaccatccgccgcaccggcgaccacgagcgcgacctggccctggccgcgaccctggcccattcctccaaggacctcgaggagcacgagtacgccgtccgctcggtcgccgacgcgctcgagccgcactgctcgtcgatgaacgtgcccgaggctccgttcgtgctgcacctgccgaacgtcatgcacctggcgaccgacgtggccggcgtggtccatgacgcggccaccgtgtcctcgctccagctcgccgaggcgctgcacccgtcggccgccgtcggcggcacgccgaccccggtcgcgaccgcgttgatcgcggacatcgagggcatggaccgcgaccgctacgccgggccggtcgggtggatggacgcctccggcgacggcgagtggggcatcgccctgcgctccgcccgtctcgagggccgcaccgtccggctgttcgccggctgcggcatcgtcgccgactccgacccagccgcggagctcgccgaggcccaggccaagttcgtcccggtccgcgacgcgctcaccgcgtcctga

SEQ ID NO: 4816 - protein, 428 aa, Nocardioides sp. JS614
MSTLGRVTSSPTPGDPPPAPADALVVRTVRLDLDQAASLLDLVPADRPVTWLRRGDGLVGWGVAAQVRTSGATRFADAVKWWSETIARADVHDDVNEPGTGLVSFGSFAFADDPGDSILVLPRVVVGRRGDVTWLTTVGEVGPPLGPVERPAAPAAVSFADGALNGEQWMSVVADAVARINAGDLEKVVLARDLVATASDPVDVRWPLGRLGETYPMCWTFHVDGMFGATPEMLVRRERGLVTSRVLAGTIRRTGDHERDLALAATLAHSSKDLEEHEYAVRSVADALEPHCSSMNVPEAPFVLHLPNVMHLATDVAGVVHDAATVSSLQLAEALHPSAAVGGTPTPVATALIADIEGMDRDRYAGPVGWMDASGDGEWGIALRSARLEGRTVRLFAGCGIVADSDPAAELAEAQAKFVPVRDALTAS

SEQ ID NO: 4817 - DNA, 1200 bp, Bacillus cereus G9241
  CDS (1)..(1200): transl_table=11
atgaatgaatttacggctgtaaaggaattgtcagaaaagtcattagaagattataagactgaatcttctttctttttcgcttcaccaactcgaacgatattgacagaaggaggatttactgcagtaaagcatcgtgaaattgaaagtttcccagagcttgtgcaagcagtgttacgtaatgcaaaacaagcaggaaatccgaatcctatcgttgttggtgccttgccatttgatcgtagaaaagaagttcaacttatcgtaccagaatatagcagaatttctgagcgtttacaattggatacaacaaatcagtttgaaacaaatgagaacgtaacattcgaaatgacgccaatgccagagcctgaagtgtatatgaatggtgtgaagcaaggagttgaaaaaatacaggacgggtatttaaggaaaatcgttctatccagatcgttagatgttaaatcttccgaaaagattgataagcaaaaacttcttcgaaaattagcagagcataataagcacggctatacatttgctgtgaatttaccgaaagatgaaaacgagaatagtaagacgttaattggagcaagccctgaattactcgtttcacgtaatggtatgcaagttacctctaatccgttagctggttcaagaccgagaagcgatgacccagtggaagataagagaagagcaaaggaattactttcttcttcaaaagatttacatgaacatgcagtagtagtggaagcggttgccactgcgcttcgcccatactgtcatacattacatgttccggaaaaaccatccgttattcatagtgaagcgatgtggcatttgtctactgaagtaaaaggtgaactaaaggattccaatactagttctttagaattagcaattgctcttcatcctacgcctgcagtttgcggaacgccgatggaagaagcgagagaggctattcaaaaaattgagccattggatcgtgaattctttacaggaatgctagggtggagtgatttaaatggagacggtgaatggattgttacaatacgttgtgctgaagtacaagaaaatacactccgtttatatgcaggtgctggagttgttgctgagtcaaaaccagaagatgaattagcagaaacatcagctaagttccaaacgatgctgaaagctttaggattaaatgatagttcacttaatgaaaagtag

SEQ ID NO: 4818 - protein, 399 aa, Bacillus cereus G9241
MNEFTAVKELSEKSLEDYKTESSFFFASPTRTILTEGGFTAVKHREIESFPELVQAVLRNAKQAGNPNPIVVGALPFDRRKEVQLIVPEYSRISERLQLDTTNQFETNENVTFEMTPMPEPEVYMNGVKQGVEKIQDGYLRKIVLSRSLDVKSSEKIDKQKLLRKLAEHNKHGYTFAVNLPKDENENSKTLIGASPELLVSRNGMQVTSNPLAGSRPRSDDPVEDKRRAKELLSSSKDLHEHAVVVEAVATALRPYCHTLHVPEKPSVIHSEAMWHLSTEVKGELKDSNTSSLELAIALHPTPAVCGTPMEEAREAIQKIEPLDREFFTGMLGWSDLNGDGEWIVTIRCAEVQENTLRLYAGAGVVAESKPEDELAETSAKFQTMLKALGLNDSSLNEK

SEQ ID NO: 4819 - DNA, 1395 bp, Bacillus cereus G9241
  CDS (1)..(1395): transl_table=11
gtgattcaaacgaaacaaataggcttgcaagaagttctgagtgcagccattaagcatgcaactgatgaaaaaatattggttagttttgtaaaacaaatagactggatggatcctcttctgttttatgcagcaggaaaaaggattgcattcgaaaatagatgttattttgcagacccagctcagcatgtaatatttgctggaattggctctgttttcactatagcaactgcttctcacaaacgctttcaaactgctcgtgacgagtgggataaagtaaaagagaaagcatttgtacaaagagaaagatacgaatttggaacaggtcctcttttatttggtggattttcatttgaccaagaaaaagagaaaacagatttatggaaagaatttgatgatacgacattttcactaccggcatttttattaactgtaaaaaatgaaaaagcatggttaacgatgaatacattcgtttcagcaacagattgtgcagaaactctttataacgaaattgtttctttagaagagaaaatttttggggagagtaaatgtgcactagaaggatcgaaattaacagttacttctaaagtagaagtggatccgaaaggctggatgaaggccattgagaaagtgcaagatgagatgaagcaggggaacgtgcagaaggttgtattagcgagggagctaaaagtagagacggatcatcatattgattctgcgcttgttttagaagcacttcgcattgggcaaccagattgttacgtattttcttttgattataaaggagcatgcttcttaggagcgacgccagagagattaattcgcaaagaaggtgaaaagtttacttcgatgtgtcttgctggttcaactggtcatggtcaatctatagaagaaagtaagcgaaatagtgatgcgcttcttcatgatgaaaagaatttagctgaacacggttatgttgtgaacatgattcgaggagtattaaatgagcactgcgaatccgttaatattccggaaaatccaggtctgttaacaacgaaaaacttaattcatttatatactcctgtagaggcaaaaggcgatgcgagtcttttaacgatggtagaagaattacatccaacaccagctcttggcgggacacctcgtttggaagcgatgaaactgattcgtgatgttgaattgttagacagaggattatatggtgcaccgattggctggatagatgatgaaggaaatggtgaatttgcggttgcacttcgctgcggattattaaatggagagaaagcatccttatttgccggttgcgggattgtaattgattcagtaccgcaacttgaatatgaagaaacaagtttgaagtttagaccgatgcttggtgctttggaggaattaatgaaatga

SEQ ID NO: 4820 - protein, 464 aa, Bacillus cereus G9241
MIQTKQIGLQEVLSAAIKHATDEKILVSFVKQIDWMDPLLFYAAGKRIAFENRCYFADPAQHVIFAGIGSVFTIATASHKRFQTARDEWDKVKEKAFVQRERYEFGTGPLLFGGFSFDQEKEKTDLWKEFDDTTFSLPAFLLTVKNEKAWLTMNTFVSATDCAETLYNEIVSLEEKIFGESKCALEGSKLTVTSKVEVDPKGWMKAIEKVQDEMKQGNVQKVVLARELKVETDHHIDSALVLEALRIGQPDCYVFSFDYKGACFLGATPERLIRKEGEKFTSMCLAGSTGHGQSIEESKRNSDALLHDEKNLAEHGYVVNMIRGVLNEHCESVNIPENPGLLTTKNLIHLYTPVEAKGDASLLTMVEELHPTPALGGTPRLEAMKLIRDVELLDRGLYGAPIGWIDDEGNGEFAVALRCGLLNGEKASLFAGCGIVIDSVPQLEYEETSLKFRPMLGALEELMK

SEQ ID NO: 4821 - DNA, 1134 bp, Kineococcus radiotolerans SRS30216
  CDS (1)..(1134): transl_table=11
gtgtcagaacccgaggcggcagcgctcgcggtgcgggcgggtgccaccgtcttctccaacgagaagtccacgctcgtgcagaccggcccccggcccctggtccccggggccagcgggctggagcagctgcggcgcacgacggcggccctggagggggcgcccgtcgggctgatcgccgccggcgcggtccccttcgacctgcgcggccccggcgccctgcggctggggacctcggcctccacccccggccccctgcacctgcccccggccacgcgccggcgccaggtcaccgtcgcccgcagccgcccccggcccgcgccctccggctacgccgacgccgtgcgcaccgccctggcccgcatcgccgacggcgaggtcgccaaggtcgtcctggcccgcaccctggagctggaggcgctggacgactggtcggtgcccgacctcgtcgccgagctcgtcacccgcaaccccggcgcgacggcgctcgccgtccccctcgacgaccccgacgacccccgggcccgctggctggtcggcgccagccccgagctgctgctgcgccgccgggggcccagcgtcctgctgcgcccgctggccggttccgccccccgctccccggagccggacgaggacatccgccgcgccgacgcgctgctggcctcggacaaggaccgccgcgagcacgccttcgtcgtcgacgccatcgtcgaggccctccagcccttctgccgcaccatcaccaccccggagccggagctcgtcgcgaccccggccgtgtggcacctcgcgacccggatcaccgccctgctcaccgacaccggcaccacctccgtcgacctcgtcgccgccctgcacccgaccccggcggtcggcggctcgccgcggcccgcggccatgcgggtgatcgacgaggtggagggcctggaccgcggctgctacgccggggccgtgggctggcaggacgtgcacggggacggggagtgggtcgtcgccgtgcgctgcgcggaggtcagcggccgccggctgcgcgtcttcgccggcgcgggcatcgtcgccgggtccgaccccgacgccgaggtggccgagaccgcggccaagatgcgcaccgtcctggactccgcgatcccgcgctga

SEQ ID NO: 4822 - protein, 377 aa, Kineococcus radiotolerans SRS30216
MSEPEAAALAVRAGATVFSNEKSTLVQTGPRPLVPGASGLEQLRRTTAALEGAPVGLIAAGAVPFDLRGPGALRLGTSASTPGPLHLPPATRRRQVTVARSRPRPAPSGYADAVRTALARIADGEVAKVVLARTLELEALDDWSVPDLVAELVTRNPGATALAVPLDDPDDPRARWLVGASPELLLRRRGPSVLLRPLAGSAPRSPEPDEDIRRADALLASDKDRREHAFVVDAIVEALQPFCRTITTPEPELVATPAVWHLATRITALLTDTGTTSVDLVAALHPTPAVGGSPRPAAMRVIDEVEGLDRGCYAGAVGWQDVHGDGEWVVAVRCAEVSGRRLRVFAGAGIVAGSDPDAEVAETAAKMRTVLDSAIPR

SEQ ID NO: 4823 - DNA, 1416 bp, Synechococcus sp. RS9917
  CDS (1)..(1416): transl_table=11
atgacggccgcgcccgccaatccccacgctgtgagcagcttcagcgatctgctggatcaggccctgacggcctggcgcgggcgtcagggggaggaaggggtgttcagcctggccctgccgctgcatggggtcgatcccctgctccagctgccgttgctgagcagcgccgatccgttccgcttcctctgggacagcgctcccggcctgagcctggccgcagctgggcgctgccatcacctcgacctggctggcccgcgtcggtttgaactcgcccagcgcttcagcgatacaaccctggcgcggattctggatgcaacgccggaggccccggcgcaggcgcgctcacggatcctgctggccttcgcctttttcgagagcaacagcgagcagcagcccaggcccaccatgccctcggttcaggcggtgctaccccgctggcaactcagtcgccatggccgccagggctggctgcgcctgcatggcagcgtcagccagagcgccgatgtgcgccacctggcggaaacgctctggcagatggcccaacgactggagcagtgtcctcacgcccccttgcccgcatggtcgaccaccatcagtggcaccaccacccctggagcctggcaggagcgctatgcgccggctctgcgccgaggcctggatctggtgaatgggggcgacctgcacaaactggtgttggcggtgcgccagtcgattcagctccgggccccgctcgatcccctgcccctcctgcaacgcctgcggcagcagcaagccggcagctgccgattcctctggcaacgcaacagcgacgacagtttcttcggcgcctcgcccgagcggttgctctgcctgcgcagcgatcagctgcgcagcgatgccctggcagggacggcgggccaaggcgatcgcggtgatgccctgctccgttccgacaaagatcgacgcgagcacgagctggtggtgcaggcgatcaccgaccacctgcgcgcccaggggctcagcccccgcaggccgcgccgcccccagctggcgcgccatggccaactcgtgcatctccacaccccgatcacggccgctgccgctgggcgggcaccgcttgctctcgcggaagcccttcaccccacacccgccgttgccggcctgccgcggcgggaggcgatcagctggctgcgcagcctcgagccttttgaacgcgggggctatgcggctccgatcggctggatcgacaacgccggtgatgccgatctgcgcgtggccatccgctgcggccatgccaatggctgccagctcgatctcaccgcgggggccgggctcgtgcgcggttcggtggcggaacgggagctgcaggaagtgggcctcaaactcaccgtgctggccgatcagctggagcttcaggccgttccgctcgccacctga

SEQ ID NO: 4824 - protein, 471 aa, Synechococcus sp. RS9917
MTAAPANPHAVSSFSDLLDQALTAWRGRQGEEGVFSLALPLHGVDPLLQLPLLSSADPFRFLWDSAPGLSLAAAGRCHHLDLAGPRRFELAQRFSDTTLARILDATPEAPAQARSRILLAFAFFESNSEQQPRPTMPSVQAVLPRWQLSRHGRQGWLRLHGSVSQSADVRHLAETLWQMAQRLEQCPHAPLPAWSTTISGTTTPGAWQERYAPALRRGLDLVNGGDLHKLVLAVRQSIQLRAPLDPLPLLQRLRQQQAGSCRFLWQRNSDDSFFGASPERLLCLRSDQLRSDALAGTAGQGDRGDALLRSDKDRREHELVVQAITDHLRAQGLSPRRPRRPQLARHGQLVHLHTPITAAAAGRAPLALAEALHPTPAVAGLPRREAISWLRSLEPFERGGYAAPIGWIDNAGDADLRVAIRCGHANGCQLDLTAGAGLVRGSVAERELQEVGLKLTVLADQLELQAVPLAT

SEQ ID NO: 4825 - DNA, 1440 bp, Synechococcus sp. WH 7805
  CDS (1)..(1440): transl_table=11
atgtcggccgagtccttccccagctcgatggcgatgcgcttcggcgatcggctccagcaggccctgcaggcctgggagcagcgccagggtgaggactgtgtaatgagtctggccgtccccatcggcggcctcgatcccctgcggcacctgccagacctgcgatcctccgaccccttccgcttcctctgggacggggcaccgggtctgtgcctggccgcgtctggtcgctgccaccacctggatctcgccggtccgaaacgattcgaactagcacagcgtttctgcgatgccaccctttgcagggtcgtggaaggctctccggatgcaccggcgcaggcccgatcccgcatccttctggccttttcgtttttcgagcagccgagcgaacagcagcccaggggaggcatgccctccgtgcaggccgtgctgccccgatggcaactgagtcgtcagggtcgccagtgctggcttcggatccacggggtcgcccacgaaatcgaagacgtccgcctgctgatcgaaacgctttggttgatggccgagcggcttcaagcccagccccagctgtcagaaccgtggccggaaacggtgcggggcagtgtcagccctggcgattgggaatcgcgctacgcgtcggcccttgaacgggggttggagctggtgaaccagggtgaactccacaagctcgtgctggccgttcggcaatcgattcaactcagcgcgcccctcaatcccctgccgctgcttgatcgattgcggcaccagcaggccggcagctgtcgcttcctctggcagcgtgacgcgcaggactccttttttggagcctctcctgaacggttgctcagtctgcgcaatggacaactccgcagcgatgctctggccgggacagccggtcggcttgaaaccggagagtcgcttctgaattccgagaaggaccgcagagaacatgaattagtggtgcaggcgatcactgatcacctgaagagcctcgggctgaccccccgcagaccaaggcgcccccaactcgctcggcacggacggttgatgcatctccacacgccaattacagcggcggccgaggaacagttgccgctgagtctggctggtgccctgcaccccacaccagcggtagcaggtctccccagacgccaggccatgggttggctgcgcagccttgagcccttcgagcgcggaggctatgcggctccaatcggctggattgacagtgccggcgacgccgaactgcgggttgccatccgctgcggccacgcccacggttctcaactcgacctcaccgctggagccggactggtgagggggtcagtggcggaacgggagctgcaggaagttgctctcaaactgaccgtgctggccgatcagttggacctccaatcacaacagggttccaaccctctcgatcctccgttgcctcgcctgtga

SEQ ID NO: 4826 - protein, 479 aa, Synechococcus sp. WH 7805
MSAESFPSSMAMRFGDRLQQALQAWEQRQGEDCVMSLAVPIGGLDPLRHLPDLRSSDPFRFLWDGAPGLCLAASGRCHHLDLAGPKRFELAQRFCDATLCRVVEGSPDAPAQARSRILLAFSFFEQPSEQQPRGGMPSVQAVLPRWQLSRQGRQCWLRIHGVAHEIEDVRLLIETLWLMAERLQAQPQLSEPWPETVRGSVSPGDWESRYASALERGLELVNQGELHKLVLAVRQSIQLSAPLNPLPLLDRLRHQQAGSCRFLWQRDAQDSFFGASPERLLSLRNGQLRSDALAGTAGRLETGESLLNSEKDRREHELVVQAITDHLKSLGLTPRRPRRPQLARHGRLMHLHTPITAAAEEQLPLSLAGALHPTPAVAGLPRRQAMGWLRSLEPFERGGYAAPIGWIDSAGDAELRVAIRCGHAHGSQLDLTAGAGLVRGSVAERELQEVALKLTVLADQLDLQSQQGSNPLDPPLPRL

SEQ ID NO: 4827 - DNA, 1176 bp, Pseudomonas fluorescens
  CDS (1)..(1176): transl_table=11
atgagaacgggcaccctaagaacgaccgagatggaagaggtgcaactcgcagaggtacaacgtagtttttcgttcacatccggcgatcgcgagttagcggtcaccgggatgctgcagagaattgaaacacctgccattggcggcgatgacgccaatagcctgttccagcagacaattgcgcaagcgcttgatcgggcgcgcgaagctggccagagcaacccaatcatcgttggcgccatccctttcgaccctgctgaaccttcctgcctctacattcccgaacacgcgcaatggcggacccgagacatccacgcgaaaacgggtatgtcgacgctgcctgagttgatcgaacagaaaaacattccggacgaacaggccttcaaacgggcggtggaacacgccgtcgtcaacttccgccacagcgacgtacgcaaggctgtgctctcggttcaacgcgagctgatatttgcaaacgatgtggatgtgagtgccctgcagcacaacctgaaagcccagaacccgagcggctaccacttccgtgtgccaatgcctgatggcaccacgctgatcggtgtcagtcccgaacttctggtccgcaaggaaggcctgagctctctgtccaacccgctggcagggtcagccaagcgcatggccgatccagaagccgaccggcgcaatgcagactggttgctgacatcggaaaaagatcactacgaacacgggttcgtgacccaggacatcgtcagccaactggggaaactgtgcacgcagctgaatgtgccgcaacgcccctccctcatcagcacgcccgcgctctggcacctctcgacccgcatcgaaggtacgctggcagacccggctgtatcggccttgcagcttgcctgccgcttgcaccccacaccggctgtgtgcggcttccccaccgagcgcgcccggcgcctgattcgcttcgtcgaacccttcgagcgcggcctgttcaccggcatggtgggttggtgcgatgcccagggcaatggcgaatgggtcgtaacgattcgttgcggcacggtcaggcgaaacaaggtccgcctgttcgccggcgcaggcatcgttgaagcctcaagccccgactccgaatgggcagaagtccagaccaaacttggcaccatgctgcgcgcctgcggattggcccactaa

SEQ ID NO: 4828 - protein, 391 aa, Pseudomonas fluorescens
MRTGTLRTTEMEEVQLAEVQRSFSFTSGDRELAVTGMLQRIETPAIGGDDANSLFQQTIAQALDRAREAGQSNPIIVGAIPFDPAEPSCLYIPEHAQWRTRDIHAKTGMSTLPELIEQKNIPDEQAFKRAVEHAVVNFRHSDVRKAVLSVQRELIFANDVDVSALQHNLKAQNPSGYHFRVPMPDGTTLIGVSPELLVRKEGLSSLSNPLAGSAKRMADPEADRRNADWLLTSEKDHYEHGFVTQDIVSQLGKLCTQLNVPQRPSLISTPALWHLSTRIEGTLADPAVSALQLACRLHPTPAVCGFPTERARRLIRFVEPFERGLFTGMVGWCDAQGNGEWVVTIRCGTVRRNKVRLFAGAGIVEASSPDSEWAEVQTKLGTMLRACGLAH

SEQ ID NO: 4829 - DNA, 1182 bp, Listonella anguillarum serovar O2
  CDS (1)..(1182): transl_table=11
atgaaacgtgaagttattgggttttcaaaaatggctaatcagctattggatgagcacttaaaagaatctcccttcttttttgcttcgcctcacaacaccatgcttggcgtgggaattgctcatcagttcaatcaggcgatcccattccgcgagctggcggatcaagcaaccaagatgctagaagcagcaaaaacagatgagtacgataatcctattttatttgcgacgattccttttaatgaagagacggcgacgcgtttctttattccagaaaagctctatgtttctggtagcccgcgggccagtgaaaaagaggagcagcagagccacaaagcgaccattgtttcaccgccaacaggcaacgactacaaacaaggagtcacaaccttacttgagctgtttaataccaccgaactatcaaaagtggtgctatcacgtttagtgaaactctcgactccgcaacacatcgatcaaactcgtttattgcgtaatctgttgtccatcaatcgcaatggctacactttttctactgaaattggccctaacgccaagttaatgggcgccagtcccgagttgttgttggcgaagaaaggcgggtttatcgtttctaaccccctagcgggctcgcggcctaaatcaaacaatgcggtgcaaaaccaacagcgctccgcttcattacttgatacgcaaaaagatctgaatgaacatgccttcgtcgtcgaggaagtcgagaaagtactcagccgctactgccataacttatttacccctatggttccatcagtgattgaaaccgaaacgatgctgcatttatcaacagtgcttgaagggcaagccgatgatccgatgattaactcgctgcgcattgcagcagagttacacccaacacccgcggtgtgtggttatccaagattatcggcttatcaagcgattaagcagatcgaaaccttcgaccgcggctacttcactggcatgatcggttggtgcgatgctagggggaatggcgagtgggttgtcacgatacgctgcgctgaagtgagccaaaatgagatgagtgtgttcgctggagctggcattgtgaatgaatcctcaccgcagagtgaactcgatgaaacaggggcaaaaatgagcaccattttgaaagccgctggtattgaaattgatgaattacttaccgcctaa

SEQ ID NO: 4830 - protein, 393 aa, Listonella anguillarum serovar O2
MKREVIGFSKMANQLLDEHLKESPFFFASPHNTMLGVGIAHQFNQAIPFRELADQATKMLEAAKTDEYDNPILFATIPFNEETATRFFIPEKLYVSGSPRASEKEEQQSHKATIVSPPTGNDYKQGVTTLLELFNTTELSKVVLSRLVKLSTPQHIDQTRLLRNLLSINRNGYTFSTEIGPNAKLMGASPELLLAKKGGFIVSNPLAGSRPKSNNAVQNQQRSASLLDTQKDLNEHAFVVEEVEKVLSRYCHNLFTPMVPSVIETETMLHLSTVLEGQADDPMINSLRIAAELHPTPAVCGYPRLSAYQAIKQIETFDRGYFTGMIGWCDARGNGEWVVTIRCAEVSQNEMSVFAGAGIVNESSPQSELDETGAKMSTILKAAGIEIDELLTA

SEQ ID NO: 4831 - DNA, 1182 bp, Vibrio anguillarum
  CDS (1)..(1182): transl_table=11
atgaaacgtgaagttattgggttttcaaaaatggctaatcagctattggatgagcacttaaaagaatctcccttcttttttgcttcgcctcacaacaccatgcttggcgtgggaattgctcatcagttcaatcaagcgatcccattctgtaagctggcggatcaagcaacaaagatgctagaagcagcaaaaacagatgagtacgacaatcctattttatttgcgacgattccttttaatgaagagacggcgacgcgtttctttattccagaaaagctttatgtttctggtagcccacgtgccagtgaaaaagaagggcagcagagccacaaagcgaccattgtttcaccgccaacgggcaacgactacaaacaaggagtcacaaccttacttgagctgtttaataccaccgaactatcaaaagtggtgctatcacgtttagtgaaactctcgactccacaacacatcgatcaaactcgtttattgcgtattctgttgtccatcaatcgcaatggctacactttttctactgaaattggccctaacgccaagttaatgggagccagtcccgagttgttgttggcgaagaaaggcgggtttatcgtttctaaccccctagcaggctcgcgtcctaaatcaaacaatgcggtgcaaaaccaacaacgctccgcttcattacttgatacgcaaaaagatctgaatgaacatgccttcgtcgtcgaggaagtcgagaaagtactcagccgctactgccataacttatttacccctatggtcccatcagtgattgaaaccgaaacgatgctgcatttatcaacagtgcttgaaggacaagccgatgatccgatgattaactcgctgcgcattgcagcagagttacaccccacacccgcagtgtgtggttatccaagattatcggcctaccaagcgattaagcagatcgaaaccttcgaccgcggctacttcactggcatgatcggttggtgcgacgctcgggggaatggcgagtgggttgtcacgatacgctgcgcggaagtgagccaaaatgagatgagtgtgttcgctggagctggcattgtgaatgaatcctcaccgcagagtgaactcgatgaaacaggggcaaaaatgagtaccattttgaaagccgctggtattgaaattgatgaattacttaccgcctaa

SEQ ID NO: 4832 - protein, 393 aa, Vibrio anguillarum
MKREVIGFSKMANQLLDEHLKESPFFFASPHNTMLGVGIAHQFNQAIPFCKLADQATKMLEAAKTDEYDNPILFATIPFNEETATRFFIPEKLYVSGSPRASEKEGQQSHKATIVSPPTGNDYKQGVTTLLELFNTTELSKVVLSRLVKLSTPQHIDQTRLLRILLSINRNGYTFSTEIGPNAKLMGASPELLLAKKGGFIVSNPLAGSRPKSNNAVQNQQRSASLLDTQKDLNEHAFVVEEVEKVLSRYCHNLFTPMVPSVIETETMLHLSTVLEGQADDPMINSLRIAAELHPTPAVCGYPRLSAYQAIKQIETFDRGYFTGMIGWCDARGNGEWVVTIRCAEVSQNEMSVFAGAGIVNESSPQSELDETGAKMSTILKAAGIEIDELLTA

SEQ ID NO: 4833 - DNA, 1731 bp, Capsicum annuum
  CDS (1)..(1731)
atggctgtaggtgcaagacactgcaccttaaggttcatggaacaacttgaatcaacatcactcatgaaatgctccctttcctcttcacctctatatcaaaagcaatatgttcacttcttcaactctagccaaagatatagtcagtgttgttcattgtcgatgaatggatgccaaggcgatccaagagctcctattggaaccattgaaactcgaacgttgcctgcagtttctagtcctgcattggccatggaacgtctcaattctgccatatccgacttggttaagtccgagcctccgccttacagctctggcactattcgcctcgaggtgccaattgaagagcagatagaagcacttgaatggcttcatgcgcagaaccatctgctcctccctcgctgcttcttctccggtcgaagaccaccaactgaaatcatgtgtatcaatggaacttcttctcattctaaattggtcagtgttgctggtgttggctctgctgtcttctttactcatttacgtcccttctcatttgacgattggcgtgctattagaaggttcctctccaagaaatgtccactaattcgtgcttacggggcaatccgatttgatgcaacagccaatatagcttctgaatggagtgcttttggctcattttatttcatggttcctcaggttgagtttgatgagcttgaaggaagttcaattattgctgcaacaattgcatgggataatgctgcctcatggacataccagagggcaatagatgaacttcgcgccacaatatggcagctttcctccattcttatgacagtgcagaaaaaaattcctcattcacatatactcgccagaactcatgtgccgggtaaatcatcttgggaccatgcagttaagcgtgctttgcaaataataagcagaaatgactccgtactgatcaaggtagttcttgctcgtagcaccagagttgttacagcagcagatattgatccgttaacatggctggcttgcttaaaggttgaaggagaaaatgcatatcagttctgtttgcaacctccccattcccccgcattcattggaaacactccagagcagctatttcatcgggaccgcctcagcatttgtagtgaggctttagcaggaacacgggctagaggtggatcagagcttctggatgttaagatagaacaggatttactgtccagtgctaaggaccataatgagtttgctatagtacgggagtgcataagaagaagattggaggctgtgtgttcaagcgttttaattgaaccaaagaaagcaataagaaagttttcaagagttcagcatctttatgctcgattgagggggagactccaggctgaagatgatgagtttaagattttgtcatcggtgcacccaactccagcagtttgtgggtatcctacagaagatgcacgggcttttatttcagaaactgaaatgtttgaccgaggaatgtatgctggtcttgttggttggtttggaggggaagagagtgaatttgctgttggaataaggtcagctttggttgaaaagggtcttggtgcattaatttatgcggggactggaatagtggagggaagtgattcatctctagaatgggaagagctagagctgaagacttcacagttcaccaagttgatgaaacttgaggcacctcttgtgactagaggacaacgtaggattatcaatcagaatcagaaagttcaaagagcctga

SEQ ID NO: 4834 - protein, 576 aa, Capsicum annuum
MAVGARHCTLRFMEQLESTSLMKCSLSSSPLYQKQYVHFFNSSQRYSQCCSLSMNGCQGDPRAPIGTIETRTLPAVSSPALAMERLNSAISDLVKSEPPPYSSGTIRLEVPIEEQIEALEWLHAQNHLLLPRCFFSGRRPPTEIMCINGTSSHSKLVSVAGVGSAVFFTHLRPFSFDDWRAIRRFLSKKCPLIRAYGAIRFDATANIASEWSAFGSFYFMVPQVEFDELEGSSIIAATIAWDNAASWTYQRAIDELRATIWQLSSILMTVQKKIPHSHILARTHVPGKSSWDHAVKRALQIISRNDSVLIKVVLARSTRVVTAADIDPLTWLACLKVEGENAYQFCLQPPHSPAFIGNTPEQLFHRDRLSICSEALAGTRARGGSELLDVKIEQDLLSSAKDHNEFAIVRECIRRRLEAVCSSVLIEPKKAIRKFSRVQHLYARLRGRLQAEDDEFKILSSVHPTPAVCGYPTEDARAFISETEMFDRGMYAGLVGWFGGEESEFAVGIRSALVEKGLGALIYAGTGIVEGSDSSLEWEELELKTSQFTKLMKLEAPLVTRGQRRIINQNQKVQRA

SEQ ID NO: 4835 - DNA, 1182 bp, Vibrio anguillarum
  CDS (1)..(1182): transl_table=11
atgaagcgtgaagttgtcgggttttcaaaaatggctaatcagctattggatgagcacttaaaagaatctcccttcttttttgcttcgcctcacaacaccatgcttggcgtgggaattgctcatcagttcaatcaagcgatcccattctgtaagctggcggatcaagcaacaaagatgctagaagcagcaaaaacagatgagtacgacaatcctattttatttgcgacgattccttttaatgaagagacggcgacgcgtttctttattccagaaaagctttatgtttctggtagcccacgtgccagtgaaaaagaagggcagcagagccacaaagcgaccattgtttcaccgccaacgggcaacgactaccaaaaaggagtcacaaccttacttgagctgtttaataccaccgaactatcaaaagtggtgctatcacgtttagtgaaactctcgactccacaacacatcgatcaaactcgtttattgcgtaatctgttgtccatcaatcgcaatggctacactttttctactgaaattggccctaacgccaagttaatgggagccagtcccgagttgttgttggcgaagaaaggcgggtttatcgtttctaaccccctagcaggctcgcgtcctaaatcaaacaatgcggtgcaaaaccaacaacgctccgcttcattacttgatacgcaaaaagatctgaatgaacatgccttcgtcgtcgaggaagtcgagaaagtactcagccgctactgccataacttatttacccctatggtcccatcagtgattgaaaccgaaacgatgctgcatttatcaacagtgcttgaaggacaagccgatgatccgatgattaactcgctgcgcattgcagcagagttacaccccacacccgcagtgtgtggttatccaagattatcggcttaccaagcgattaagcagatcgaaaccttcgaccgcggctacttcactggcatggtcggttggtgcgacgctcgggggaatggcgagtgggttgtcacgatacgctgcgcggaagtgagccaaaatgagatgagtgtgttcgctggagctggcattgtgaatgaatcctcaccgcagagtgaactcgatgaaacaggggcaaaaatgagtaccattttgaaagccgctggtattgaaattgatgaattacttaccgcctaa

SEQ ID NO: 4836 - protein, 393 aa, Vibrio anguillarum
MKREVVGFSKMANQLLDEHLKESPFFFASPHNTMLGVGIAHQFNQAIPFCKLADQATKMLEAAKTDEYDNPILFATIPFNEETATRFFIPEKLYVSGSPRASEKEGQQSHKATIVSPPTGNDYQKGVTTLLELFNTTELSKVVLSRLVKLSTPQHIDQTRLLRNLLSINRNGYTFSTEIGPNAKLMGASPELLLAKKGGFIVSNPLAGSRPKSNNAVQNQQRSASLLDTQKDLNEHAFVVEEVEKVLSRYCHNLFTPMVPSVIETETMLHLSTVLEGQADDPMINSLRIAAELHPTPAVCGYPRLSAYQAIKQIETFDRGYFTGMVGWCDARGNGEWVVTIRCAEVSQNEMSVFAGAGIVNESSPQSELDETGAKMSTILKAAGIEIDELLTA

SEQ ID NO: 4837 - DNA, 1200 bp, Bacillus cereus
  CDS (1)..(1200): transl_table=11
atgaatgaacatatagctgtaaaggaattgtcagaaaaacttttagatgattataagactgaatcttcattcttttttgcttcaccaactcgaacgatattaacagaaggagagtttactacagtaaagcatcgtgaaattgaaagtttcccagagcttgtgcaaacgacattaagtaatgcgaaacaagctggaaatccaaatcctatcgttgtgggtgctttgccatttgatcgtagaaaagaagtccaactcatcgtaccagaatatagcagaatttctgagcggttacaattggatacaacaaatcagcttgaaacaaatgagaacgcaacatttgaaatgatgccaatgccagaccctgaagtttatatgaatggtgtgaagcaaggaattgaaaaaatacaggacggtgatttaaagaaaatcgttctatccagatcgttagatgttaaatcttccgaaaagattgataagcaaaaacttctgcgagaattagcagagcataataagcatggttatacatttgctgtgaatttaccgaaagatgaaaaggagaacggtaaaacgctaattggagcaagccctgaattacttatttcacgtaatggtatgcaagttatttctaacccgttagctggttcaaggccacgtagtgaggacccagtagaagataaaagaagagcagaggaattactttcttctccaaaagatttacatgaacatgcggtagtagtggaagcggttgccgctgcacttcgtccgtattgtcatacattacatgttccagaaaagccatcagttattcatagtgaagcgatgtggcatttgtctacagaagtgaaaggtgaacttaaggatccaaatacttcttctttacaattagcaattgcccttcatcctacgccagcagtttgcggaactccgatggaaaaagcaagagaggctatacagcatattgagccatttgaccgcgagttctttacaggaatgctaggatggagcgatttaaatggagatggagaatggattgttacaattcgttgtgctgaagtacaagaaaatacacttcgtttatatgcaggagctggagttgttgctgagtcaaaaccagaagatgagttagcagaaacatcagctaagttccaaacaatgctaaaagctttagggttaagagatagttcacttaatgaaaaatag

SEQ ID NO: 4838 - protein, 399 aa, Bacillus cereus
MNEHIAVKELSEKLLDDYKTESSFFFASPTRTILTEGEFTTVKHREIESFPELVQTTLSNAKQAGNPNPIVVGALPFDRRKEVQLIVPEYSRISERLQLDTTNQLETNENATFEMMPMPDPEVYMNGVKQGIEKIQDGDLKKIVLSRSLDVKSSEKIDKQKLLRELAEHNKHGYTFAVNLPKDEKENGKTLIGASPELLISRNGMQVISNPLAGSRPRSEDPVEDKRRAEELLSSPKDLHEHAVVVEAVAAALRPYCHTLHVPEKPSVIHSEAMWHLSTEVKGELKDPNTSSLQLAIALHPTPAVCGTPMEKAREAIQHIEPFDREFFTGMLGWSDLNGDGEWIVTIRCAEVQENTLRLYAGAGVVAESKPEDELAETSAKFQTMLKALGLRDSSLNEK

SEQ ID NO: 4839 - DNA, 1170 bp, Acinetobacter baumannii
  CDS (1)..(1170): transl_table=11
atgatgcagactcaaatatcagtagagcaaaatttagatcatatcggtcaaaagaaattttcatgtttttctacgaagaattattatcttgaggtcaacgaattcgttaaaacgttaaatacacctgcagcaaataccgcactattgaatgaagagattgcaaaatgctttgaagaaattaaaaagcaaggccatcaaaatccagttttaattggtgctataccttttgatattacaaagaaaagtagcttaaatttttatgctgatcataaaaaaataacacaagcatcttctacgattaactcattaaaaaatcgtaataacattgagataattaataaatcattactcattcaacgccaaaaatttgaaggtacagtacagttagcattagatgcttttgagaaaaagaaggtagaaaaagttgttctttctcaggctgttgaatatgagttcaaccgtcatcaagagccagaaaacttattggctgctttattaaaacaaaatccaaatgcttataattttgtgattccagtagaacataataattatattctaggcgcaagcccagaactgcttttatcaaaacaaggtcgtattgtaaccagtaatcctttggccggttctagacccaaatctcagatttccgaaaaaaatttcgtcagccaacaagaattaaatcattctgagaaagaccaacatgaacatcgaattgtggttgaaaatattattagaaatttagccactcattgtgtagagcttaaggtttctgaatttccagatattttagaaacatcaacaatgttgcatttatcatcagaattccaaggtgtgcttaagcaacaagctcccgatgccttaaaccttgcattagaattacatccaacaccagcagtttgtggctcaccaactcatgttgctaagcagtttattttagatcatgaaggttatgaccgacattattacacggggttagtcggctggatggatgcggagggtaatggtgagtgggtagtgacaattcgatgtggtctactcagtgaaaataaaatgcgcttatatgctggtgcggggattgttgaagggtcagatgctgaagctgaatggctagaaacagaagctaaaatgcaaaccatgctaaatattctaaatacaaaagttgctgtgtaa

SEQ ID NO: 4840 - protein, 389 aa, Acinetobacter baumannii
MMQTQISVEQNLDHIGQKKFSCFSTKNYYLEVNEFVKTLNTPAANTALLNEEIAKCFEEIKKQGHQNPVLIGAIPFDITKKSSLNFYADHKKITQASSTINSLKNRNNIEIINKSLLIQRQKFEGTVQLALDAFEKKKVEKVVLSQAVEYEFNRHQEPENLLAALLKQNPNAYNFVIPVEHNNYILGASPELLLSKQGRIVTSNPLAGSRPKSQISEKNFVSQQELNHSEKDQHEHRIVVENIIRNLATHCVELKVSEFPDILETSTMLHLSSEFQGVLKQQAPDALNLALELHPTPAVCGSPTHVAKQFILDHEGYDRHYYTGLVGWMDAEGNGEWVVTIRCGLLSENKMRLYAGAGIVEGSDAEAEWLETEAKMQTMLNILNTKVAV

SEQ ID NO: 4841 - DNA, 1224 bp, Acinetobacter baumannii
  CDS (1)..(1224): transl_table=11
atgtcggtacagcatccgtattttatccaacgagaaaattttactgaaagcagaattacactcgcaaaagaagttttaaattgcactgataacgctggttttatatttacgactcctgaatacatcatatcgagtcatcaaaaacttaaagatattgaggttacaaaagacactcagctaaaagagtggctaaacgaagcccgtctacaattacaacaagcaattgcagatggttatagcgatgccaaggttatgggtgggttgccatttagttcatcggcagatgtcaatttaatgctaatgctagatgccaaggtttaccagaaagctttattttcacaaactgatattaatcttgatgacttaatcttaaagcaggccgattatttaccttcaggtgaacactataaacaacaggttgaatatttagtacaacaaatgcgggcacaaaagctagataaagcagtacttgcacgtattttacaacttgaatttgaagagaatcttccagtctcagatgtattttataacttggccaagcataatcctgaaggatataactatgcagtcgcaagacaccctcaaagcgaaggttggtttgttggtgcaagtcctgaactattaattgcaaagcaaaataataaaatctggagtaaacctgttgcgggcacattagcacgcgatgatgacccaattgttgaccaaaataatgcaagagctttactggcttcacaaaaagatcaacatgagcatgctcttgtcatcgaaatgattgccgatgaactcactcctttctgcaagcaactacatgtgcccaaacaaccttcacttattcgcaccaaacgtctttggcacttggcctcacacattacgggcgagcttaagcaagccgatactcatgtttttgacttaattgaacgtctacatccaacacctgcaatttgtggtgagccaagttccgtagcaaaaaatttgattcagcaacttgaaccatttaaccgtgaactattcgccggaaccatgggttgggccgatgccgaaggtaatggtgaatggtctgtgaccgtgcgctgtgctcgtatttatcaaaatattgcccgtttatttgccggtgcaggaattgtggaagcctcacgtccacaagctgaacatgctgaaactgctgcaaagttccgtactgtacttgatggcctgcacatttcaccagaccaattaccacgataa

SEQ ID NO: 4842 - protein, 407 aa, Acinetobacter baumannii
MSVQHPYFIQRENFTESRITLAKEVLNCTDNAGFIFTTPEYIISSHQKLKDIEVTKDTQLKEWLNEARLQLQQAIADGYSDAKVMGGLPFSSSADVNLMLMLDAKVYQKALFSQTDINLDDLILKQADYLPSGEHYKQQVEYLVQQMRAQKLDKAVLARILQLEFEENLPVSDVFYNLAKHNPEGYNYAVARHPQSEGWFVGASPELLIAKQNNKIWSKPVAGTLARDDDPIVDQNNARALLASQKDQHEHALVIEMIADELTPFCKQLHVPKQPSLIRTKRLWHLASHITGELKQADTHVFDLIERLHPTPAICGEPSSVAKNLIQQLEPFNRELFAGTMGWADAEGNGEWSVTVRCARIYQNIARLFAGAGIVEASRPQAEHAETAAKFRTVLDGLHISPDQLPR

SEQ ID NO: 4843 - DNA, 1227 bp, Stigmatella aurantiaca
  CDS (1)..(1227): transl_table=11
atgaccgaacgtcccatgtcgccgcagaagctggccgcgcaattgctcgagagttacgaggccggctcatcattcttctttgccacccccaagcggaccatgttggcacggggcacgttcgccaccgtgccgcacatcggcggcgcggacgcacttcagcgtctgccggagcgagtggccgcagtcctcaacaacgcgcgggaggctgcccacgacattccggtggcagtcggcgcggtgcccttcgacggttcaattcccgcccagatggtggtccccatgacgcttcagcgggcgggccccctggtattcgacaccgacgtgcccgtgcaccagcccctggcggcacgttacacggtccaacccgtgcccgagcccgcggcctacctcgacggcgtcacgcaggcattgaagctgatgcagaccggctctctgcgcaaagtggtgttgtcccgctccctgcacctgagcgccaccacgccgattgatcttccgcagttgctgcgcaacctggcccagcgcaacccctctgggtacaccttcgcggtggatctgccccccggggccacccaggccgcgggcggactcaggcgtacgctcatcggcgccagccccgaattgctggtttcacgctccggtctgcaggtcctcgccaaccccctggcgggctccgcggcacgcagtgccaatcccatcgaggatcaggagcgggcagccacgctgctcaaatcatccaaggatctccacgagcacgccgtggtcatcgaagcggtcgtggaggccatgcggccctactgcaagaagctggatgtgccctcgggcccctcgctggtcagcacgcaaaccatgtggcacctgtcgagccggatctgcggcgagttggcggacccatcgattacctcgctggcgctggcggtcgcgctgcaccccactcccgcggtgtgcggctaccccaccgagttggcccatgaggcgatcaccacgatcgagccattccagcgaggcttctacacgggcacggttggctggtgcgatgcgagtggagacggccagtgggccgtgaccatccgctgcgccgaggccgacgagcgcacgctgagactgttcgcgggggcgggcatcgtggtgggttcgaagcccgagtccgagctggccgagaccgaagccaagttccgcaccatgcttcaagcgatggggctgggccagaacgcagaggtgcagtcgtga

SEQ ID NO: 4844 - protein, 408 aa, Stigmatella aurantiaca
MTERPMSPQKLAAQLLESYEAGSSFFFATPKRTMLARGTFATVPHIGGADALQRLPERVAAVLNNAREAAHDIPVAVGAVPFDGSIPAQMVVPMTLQRAGPLVFDTDVPVHQPLAARYTVQPVPEPAAYLDGVTQALKLMQTGSLRKVVLSRSLHLSATTPIDLPQLLRNLAQRNPSGYTFAVDLPPGATQAAGGLRRTLIGASPELLVSRSGLQVLANPLAGSAARSANPIEDQERAATLLKSSKDLHEHAVVIEAVVEAMRPYCKKLDVPSGPSLVSTQTMWHLSSRICGELADPSITSLALAVALHPTPAVCGYPTELAHEAITTIEPFQRGFYTGTVGWCDASGDGQWAVTIRCAEADERTLRLFAGAGIVVGSKPESELAETEAKFRTMLQAMGLGQNAEVQS

SEQ ID NO: 4845 - DNA, 1197 bp, Bacillus subtilis
  CDS (1)..(1197): transl_table=11
atgttggatcaaaacgttataacagaaacaaaagcggagcatttgcttcatgaatatcagccgggcgcctttttcttagcgtctcctcatcgtgtactgttagcgaaaggcatatgtgaaattgtaccggaggcagacgggcaaaaccaaatggaaaccctttctggccgaattgcagaggcgttacgtcaggcaaaacaatcagggcaaagccggccgcttgttgtcggggccgttccttttgatcaagtaaaagcagcgcggctcgttgtacctgaagaagtgcgctggtcaggaccgcttcaatttgatcatgaggaaaaggaacagcaggctgggcatacataccacataaagcctgttcctgaacctgaggattataaaaatggtgttgaacaagggctggcacgcattgccgatggaacactcagcaaaatcgtcctgtccagatcgctgcatttgacatcgcctgaaccgattcagacggatgaattgcttcgccatctggctcagcataactcgcatggctacacgtttgccgcagacgtgtccagtcaggaggaaacgtctccccgcagaacattgctcggagcaagtccggagcttctcgtttcaaggatgggaacacaggtcgtttccaacccattagccggctcaagaccgcgcagtaatgatcctgttgaagaccagcgccgggcagctgaattgctttctcccgcaaaggatcttcatgagcacgcggttgtcgctgacgcggttgcggcagcgctgagacctttctgccggacgctggaggttccggagaagccttcactgatcaaaacggaaacgatgtggcacctgtccagcgtgattaagggagagctttccgacccgtctgtaaccgcacttgaattggcggcggcgctccacccgacgccagccgtctgcggaacaccgactgatcttgcaagagaagcgattctcagcattgaaccatttgaccgcggtttctttaccggcatggtcggatggtgtgacgatgccggtgacggagaatggatcgtgaccatccgttgtgcagaagcagaagaacgctcactccgcctgtatgctggagctggtgttgtggccggttcaaagcctgaggacgagcttcaggagacgtccgcaaagtttcggacaatgctgcgggcaatgggcgtggatcacatatga

SEQ ID NO: 4846 - protein, 398 aa, Bacillus subtilis
MLDQNVITETKAEHLLHEYQPGAFFLASPHRVLLAKGICEIVPEADGQNQMETLSGRIAEALRQAKQSGQSRPLVVGAVPFDQVKAARLVVPEEVRWSGPLQFDHEEKEQQAGHTYHIKPVPEPEDYKNGVEQGLARIADGTLSKIVLSRSLHLTSPEPIQTDELLRHLAQHNSHGYTFAADVSSQEETSPRRTLLGASPELLVSRMGTQVVSNPLAGSRPRSNDPVEDQRRAAELLSPAKDLHEHAVVADAVAAALRPFCRTLEVPEKPSLIKTETMWHLSSVIKGELSDPSVTALELAAALHPTPAVCGTPTDLAREAILSIEPFDRGFFTGMVGWCDDAGDGEWIVTIRCAEAEERSLRLYAGAGVVAGSKPEDELQETSAKFRTMLRAMGVDHI

SEQ ID NO: 4847 - DNA, 1710 bp, Arabidopsis thaliana
  CDS (1)..(1710)
atggcttcacttcaattttcttctcagtttctgggctcaaacactaaaacacacagctctatcatttccatctctcgtagttactctccaactccattcactagattctcccgcaagaagtatgagtcatgttcgatgtctatgaatggttgtgatggagatttcaagacgccacttggtacagtggagacaaggactatgactgctgttttatctccggcagccgccactgaaaggctaatctccgccgtctctgaactcaaatctcaacctccgtcgttttcctccggcgtcgttcggttacaggttccaattgaccagcaaatcggagcaattgattggcttcaagcccagaatgagattcagcctcgctgtttcttctctcgtcgcagtgacgttggtcgtcccgatcttcttctcgatctagctaacgagaacggaaacggaaacggaaacggaacagtgtcatctgatcgtaatctggttagcgttgctggtatcggctctgcagttttcttccgtgaccttgatcctttctctcatgacgattggagatccatcagaaggtttttgtcttcaacgtcacctctgattcgtgcctatggtggtatgcgttttgatcctaatggcaagatcgctgttgaatgggaaccttttggtgcattttacttttcagtccctcaggttgagtttaatgagtttggtggaagttcaatgttggctgcaactattgcttgggatgatgaactctcttggactctggaaaatgctattgaagcactccaggagactatgcttcaagtttcttctgttgtaatgaagttgagaaacagatctttaggagtatctgttttaagcaagaatcatgttcctaccaaaggagcttatttccctgctgtagagaaggctttagagatgattaaccagaaaagttcaccccttaacaaggttgttcttgctcgtaacagcaggataattacggataccgacattgatcccattgcttggctagcacagttacagcgtgaagggcatgatgcatatcagttctgtcttcaaccacctggtgcaccagcttttatcggaaacacgcctgagagactattccaaaggactcaattaggtgtctgcagtgaagctttggctgcaactaggcctagagctgcttctagtgctcgtgatatggagatagagcgtgacttactaaccagtccgaaagacgacctcgagttctctatcgtacgagagaatataagagaaaagttaaacggtatatgtgacagagttgttgtcaagcctcaaaaaactgtgaggaagcttgcaagagtgcaacatctatattctcaattggcagggagacttacgaaggaagatgatgagtataaaatattggctgctctgcatccaactccagctgtttgtgggcttccagcagaagaagcaaggcttttgattaaggagatagaatcattcgatagaggaatgtatgcgggacctattggattttttggtggcgaggagagtgaatttgcagtcgggatcagatcagctctagtcgaaaagggtcttggggcattgatctatgcggggacagggatagtagctggaagtgacccatcttcagagtggaatgagcttgatcttaagatatctcagttcaccaagtcaattgaatatgaagcaacaacatctctacaggcgattaattga

SEQ ID NO: 4848 - protein, 569 aa, Arabidopsis thaliana
MASLQFSSQFLGSNTKTHSSIISISRSYSPTPFTRFSRKKYESCSMSMNGCDGDFKTPLGTVETRTMTAVLSPAAATERLISAVSELKSQPPSFSSGVVRLQVPIDQQIGAIDWLQAQNEIQPRCFFSRRSDVGRPDLLLDLANENGNGNGNGTVSSDRNLVSVAGIGSAVFFRDLDPFSHDDWRSIRRFLSSTSPLIRAYGGMRFDPNGKIAVEWEPFGAFYFSVPQVEFNEFGGSSMLAATIAWDDELSWTLENAIEALQETMLQVSSVVMKLRNRSLGVSVLSKNHVPTKGAYFPAVEKALEMINQKSSPLNKVVLARNSRIITDTDIDPIAWLAQLQREGHDAYQFCLQPPGAPAFIGNTPERLFQRTQLGVCSEALAATRPRAASSARDMEIERDLLTSPKDDLEFSIVRENIREKLNGICDRVVVKPQKTVRKLARVQHLYSQLAGRLTKEDDEYKILAALHPTPAVCGLPAEEARLLIKEIESFDRGMYAGPIGFFGGEESEFAVGIRSALVEKGLGALIYAGTGIVAGSDPSSEWNELDLKISQFTKSIEYEATTSLQAIN

SEQ ID NO: 4849 - DNA, 1743 bp, Catharanthus roseus
  CDS (1)..(1743)
atggcatctatcacagggcattgtgttgctcatttcacagacctttcaaccaggaaatcttcttttttctctaattctaataataactcttccctttttagaagaaagtctacaaatatagtcaccagaaaaaaatatatattttgttctacatcattgtccatgaatggttgcaatggtgatccaagagctccggttggaactatagaaacgaggacacttccggcggtttcgacgccggcattggccatggaacgtcttagctccgccgtggctaacttgaaatcaactctaccttctgctcaatcagggatcatccgtcttgaggtaccaattgaagaacatatagaagcactagactggcttcattcgcaagaccaaaaaaaccttcttccccgttgctatttctctggtagaagtcaagttaccttctctgatttcacatctaacgaccttacaaatagaaatgggagtgccgccaatggacatcttcaacgaatttctacttcatctgatgataagaatctggtcagtgttgctggtgtcggttctgcagtcctcttccggagcccaaatccattttcttttgatgattggctctcaattaagaggtttttgtccaagaactgcccattaatccgtgcttatggagcaattcgctttgatgcaaggcctcatatagcaccagagtggaaggcttttggctcattttacttcgtggttcctcaggttgagtttgatgagctacatggaagttccatgattgctgcaacagttgcatgggataatgctctctctttgacatatcaacaagcaatagttgcacttcaaacaacaatggagcaggtttcctctaccgtctccaaactaagacaagatgtctctcatacttctttggtgagcaaggctaatattcctgatagaacatcctgggatcttactcttaaccgagttttggaagaaataggcaacaaatattcgccattgacaaaggttgtacttgcacgtcgtagtcaagttatcacaacatcagatattgatcctttggcttggctgagtagtttcaaggctgatgggaaagatgcttaccaattttgccttcagcctcatgaagcaccagcattcattggaaacactccagagcaactatttggccgggaccagctaaccgtttttagtgaggctttggctgcaacccgagccaggggtgaatcagattcgttagatcttcagatggcacatgatctcttttccagtcccaaggataaccacgagtttgccatagtacgagagaacatcagacagaaactagatgccatttgtactagtgtagaaactgaaccaatgaagtcagtaagaaagcttaagagaattcaacatctttatgctcgatttgcaggcagattacgctctgaagatgatgagttcaagattttgtcttcccttcatcctactccagctgtttgtgggtttcctatggaagatgcacggaaatttattgcggaaaatgaaatgtttgaccgaggattatacgctggccctgttggtttctttggaggagctcagagtgatttttctgttggaataagatctgccttgattggaaaggatgccggtgcattaatatatgcggggcttggggttgtagaaggaagtgatccagctctagaatggcaggaactagagctcaaggcatcgcagtttatgaagttgatgaaattagaggcacctgctttgaagtga

SEQ ID NO: 4850 - protein, 580 aa, Catharanthus roseus
MASITGHCVAHFTDLSTRKSSFFSNSNNNSSLFRRKSTNIVTRKKYIFCSTSLSMNGCNGDPRAPVGTIETRTLPAVSTPALAMERLSSAVANLKSTLPSAQSGIIRLEVPIEEHIEALDWLHSQDQKNLLPRCYFSGRSQVTFSDFTSNDLTNRNGSAANGHLQRISTSSDDKNLVSVAGVGSAVLFRSPNPFSFDDWLSIKRFLSKNCPLIRAYGAIRFDARPHIAPEWKAFGSFYFVVPQVEFDELHGSSMIAATVAWDNALSLTYQQAIVALQTTMEQVSSTVSKLRQDVSHTSLVSKANIPDRTSWDLTLNRVLEEIGNKYSPLTKVVLARRSQVITTSDIDPLAWLSSFKADGKDAYQFCLQPHEAPAFIGNTPEQLFGRDQLTVFSEALAATRARGESDSLDLQMAHDLFSSPKDNHEFAIVRENIRQKLDAICTSVETEPMKSVRKLKRIQHLYARFAGRLRSEDDEFKILSSLHPTPAVCGFPMEDARKFIAENEMFDRGLYAGPVGFFGGAQSDFSVGIRSALIGKDAGALIYAGLGVVEGSDPALEWQELELKASQFMKLMKLEAPALK

SEQ ID NO: 4851 - DNA, 1431 bp, Pseudomonas aeruginosa
  CDS (1)..(1431): transl_table=11
atgagccggctggcgcccctgagccagtgcctgcacgccttgcgcggcaccttcgagcgcgccatcggccaggcgcaggcgctcgatcgtccggtgctggtggcggcatcgttcgagatcgacccattggacccgctgcaggtattcggtgcctgggacgaccggcaaacgccctgcctgtactgggaacagcccgagctggcgttcttcgcctggggctgcgccctggagctgcaaggccacggcgaacagcgcttcgcccggatcgaggaaaactggcaattgctctgcgccgacgccgtggtcgagggcccgctggcgccgcgcctgtgcggcggattccgcttcgatccgcgcggcccgcgcgaggaacactggcaagccttcgccgatgccagcctgatgctcgccggcatcaccgtgctgcgcgagggcgaacgctaccgggtactctgccaacacctggccaagcccggcgaagatgccctggccctggccgcctaccactgctcggcgctactgcgcctgaggcagccggccagacgccggccctcggggccgaccgctggcgcgcagggcgacgcttcggcgcaggagcgcaggcaatgggaagccaaggtgagcgacgcggtaagcagtgtccgccagggacgcttcggcaaggtcgtgctggcccgcacccaggcccggcctctcggcgacatcgagccgtggcaggtcatcgaacacctgcgtctgcaacatgccgacgcccagctgttcgcctgtcgccgcggcaacgcctgcttcctcggcgcctccccggaacgcctggtccgcattcgcgccggcgaggcactcacccatgccctggccgggaccatcgcccgcggcggcgatgcccaggaagatgcgcggctcggacaggccctgctggacagcgccaaggacaggcacgaacaccagttggtggtggaggcgatccgtacggccctggaacccttcagcgaggtgctggaaatccccgatgcgcccggcctgaaacgactggcgcgagtccagcacctgaacacgccgatccgcgcccgcctcgctgacgcaggcggcatcctgcggctgctacaagcgctgcatccgacccccgcggtgggcggctacccacgcagcgcggcgctggactacatccgccagcacgaagggatggaccgcggctggtacgccgcgccgctgggctggctcgacggcgaaggcaacggcgatttcctggtggcgctgcgctcggccctgctcacgccgggccggggctacctgttcgccggctgcggtctggtaggcgattcggaaccggcccacgagtatcgcgaaacctgccttaagctcagtgccatgcgggaagctctatccgccataggcggcctggacgaagtgcccttgcagcgcggcgtcgcctga

SEQ ID NO: 4852 - protein, 476 aa, Pseudomonas aeruginosa
MSRLAPLSQCLHALRGTFERAIGQAQALDRPVLVAASFEIDPLDPLQVFGAWDDRQTPCLYWEQPELAFFAWGCALELQGHGEQRFARIEENWQLLCADAVVEGPLAPRLCGGFRFDPRGPREEHWQAFADASLMLAGITVLREGERYRVLCQHLAKPGEDALALAAYHCSALLRLRQPARRRPSGPTAGAQGDASAQERRQWEAKVSDAVSSVRQGRFGKVVLARTQARPLGDIEPWQVIEHLRLQHADAQLFACRRGNACFLGASPERLVRIRAGEALTHALAGTIARGGDAQEDARLGQALLDSAKDRHEHQLVVEAIRTALEPFSEVLEIPDAPGLKRLARVQHLNTPIRARLADAGGILRLLQALHPTPAVGGYPRSAALDYIRQHEGMDRGWYAAPLGWLDGEGNGDFLVALRSALLTPGRGYLFAGCGLVGDSEPAHEYRETCLKLSAMREALSAIGGLDEVPLQRGVA

SEQ ID NO: 4853 - DNA, 1188 bp, Vibrio cholerae
  CDS (1)..(1188): transl_table=11
atggtcatgaagcgtgaagtggtcggatacaccactatgtctgaacatctgatcgacacccaactcactcgctcaccgtttttctttgcctcagcaaaccagtcaatgctcggttgtggggtcgctcatgcttttcagcaagccattccttttgctgaactggctaaccaagccaaacagcttttgcagcaggccaaacgtgatgagtgcgacaatccattactgtttggcatagtgccgtttgaccctaaaacaccgactcgatttatgattccgcgcaccttatacgtgtcgagtagcccgcgcttaaaccgtccagctcacctcacccgccaagtggctaaactcatctcctcgccatcaggagagcaatacaagcaaggtgtaagccatctgctcaacatgtttcatcactctgggctgtctaaagtggtgctgtcgcgcgccattgaaattgccaccgagcaagagatagcactaccgaccttgctgcgtagtctgctcgccattaatcatcacggctatacttttgcggccagcttggacgagcagagaaagctgattggtgcaagccctgaactcttggtcgccaaacgcggaaactatctcatctcaaacccactggctggctcgcgcccgagaagtcaagatgcccaagaaaatgcgcagcgccgtgcctcactgctcaataccgccaaagatttgcatgagcacggtttagtcgtcgaagaagtcgagcggatcatgagccgctactgtcgtaacttgtacacccccatggtgccttctgtgattgaaaccgaaaccatgctgcacctctcaaccctacttgaaggacaagtcagcgatcctgaggtttgtgctttgcaagtcgccgccgatttacaccccactccagccgtatgcggttttccgcgcgaatcggcttatcaagcaataagagagctggaagaatttgatcgtggctacttcactggcatggtcggttggtgtgatgcacgtggcaatggtgagtgggtagtcaccattcgctgtgctgaagtgggatctcaccaaatgaagctttttgctggcgcagggattgtcgatgagtcgttaccacaaagtgaactggaagagacgggcgcgaagatgaaaaccatcttggctgcggcaggtattgagctcaacgatgtgctcaccgcttaa

SEQ ID NO: 4854 - protein, 395 aa, Vibrio cholerae
MVMKREVVGYTTMSEHLIDTQLTRSPFFFASANQSMLGCGVAHAFQQAIPFAELANQAKQLLQQAKRDECDNPLLFGIVPFDPKTPTRFMIPRTLYVSSSPRLNRPAHLTRQVAKLISSPSGEQYKQGVSHLLNMFHHSGLSKVVLSRAIEIATEQEIALPTLLRSLLAINHHGYTFAASLDEQRKLIGASPELLVAKRGNYLISNPLAGSRPRSQDAQENAQRRASLLNTAKDLHEHGLVVEEVERIMSRYCRNLYTPMVPSVIETETMLHLSTLLEGQVSDPEVCALQVAADLHPTPAVCGFPRESAYQAIRELEEFDRGYFTGMVGWCDARGNGEWVVTIRCAEVGSHQMKLFAGAGIVDESLPQSELEETGAKMKTILAAAGIELNDVLTA

SEQ ID NO: 4855 - DNA, 22 bp, Artificial sequence
  primer
atggatacgtcactggctgagg

SEQ ID NO: 4856 - DNA, 26 bp, Artificial sequence
  primer
ttaatgcaatccaaaaacgttcaaca

SEQ ID NO: 4857 - protein, 247 aa, Artificial sequence
  consensus sequence
  Variant (2)..(2): Xaa in position 2 is any amino acid
  Variant (5)..(5): Xaa in position 5 is any amino acid
  Variant (7)..(20): Xaa in position 7 to 20 is any amino acid
  Variant (21)..(21): Xaa in position 21 is any or no amino acid
  Variant (23)..(24): Xaa in position 23 to 24 is any amino acid
  Variant (26)..(34): Xaa in position 26 to 34 is any amino acid
  Variant (36)..(41): Xaa in position 36 to 41 is any amino acid
  Variant (42)..(55): Xaa in position 42 to 55 is any or no amino acid
  Variant (57)..(58): Xaa in position 57 to 58 is any amino acid
  Variant (61)..(61): Xaa in position 61 is any amino acid
  Variant (63)..(74): Xaa in position 63 to 74 is any amino acid
  Variant (78)..(80): Xaa in position 78 to 80 is any amino acid
  Variant (82)..(86): Xaa in position 82 to 86 is any amino acid
  Variant (87)..(94): Xaa in position 87 to 94 is any or no amino acid
  Variant (96)..(97): Xaa in position 96 to 97 is any amino acid
  Variant (99)..(99): Xaa in position 99 is any amino acid
  Variant (101)..(103): Xaa in position 101 to 103 is any amino acid
  Variant (106)..(107): Xaa in position 106 to 107 is any amino acid
  Variant (109)..(115): Xaa in position 109 to 115 is any amino acid
  Variant (117)..(127): Xaa in position 117 to 127 is any amino acid
  Variant (128)..(128): Xaa in position 128 is any or no amino acid
  Variant (130)..(138): Xaa in position 130 to 138 is any amino acid
  Variant (141)..(141): Xaa in position 141 is any amino acid
  Variant (143)..(158): Xaa in position 143 to 158 is any amino acid
  Variant (159)..(162): Xaa in position 159 to 162 is any or no amino acid
  Variant (169)..(170): Xaa in position 169 to 170 is any amino acid
  Variant (172)..(172): Xaa in position 172 is any amino acid
  Variant (174)..(176): Xaa in position 174 to 176 is any amino acid
  Variant (178)..(180): Xaa in position 178 to 180 is any amino acid
  Variant (182)..(184): Xaa in position 182 to 184 is any amino acid
  Variant (186)..(187): Xaa in position 186 to 187 is any amino acid
  Variant (188)..(188): Xaa in position 188 is any or no amino acid
  Variant (190)..(193): Xaa in position 190 to 193 is any amino acid
  Variant (195)..(196): Xaa in position 195 to 196 is any amino acid
  Variant (199)..(199): Xaa in position 199 is any amino acid
  Variant (201)..(202): Xaa in position 201 to 202 is any amino acid
  Variant (204)..(204): Xaa in position 204 is any amino acid
  Variant (206)..(208): Xaa in position 206 to 208 is any amino acid
  Variant (210)..(210): Xaa in position 210 is any amino acid
  Variant (213)..(224): Xaa in position 213 to 224 is any amino acid
  Variant (225)..(226): Xaa in position 225 to 226 is any or no amino acid
  Variant (229)..(229): Xaa in position 229 is any amino acid
  Variant (231)..(231): Xaa in position 231 is any amino acid
  Variant (233)..(234): Xaa in position 233 to 234 is any amino acid
  Variant (236)..(236): Xaa in position 236 is any amino acid
  Variant (238)..(239): Xaa in position 238 to 239 is any amino acid
  Variant (241)..(242): Xaa in position 241 to 242 is any amino acid
  Variant (244)..(246): Xaa in position 244 to 246 is any amino acid
KXVLXRXXXXXXXXXXXXXXXLXXLXXXXXXXXXFXXXXXXXXXXXXXXXXXXXXGXXPEXLXXXXXXXXXXXXLAGXXXRXXXXXXXXXXXXXLXXSXKXXXEHXXVXXXXXXXLXXXXXXXXXXXXPXXXXXXXXXHLXTXXXXXXXXXXXXXXXXXXXXLHPTPAXXGXPXXXAXXXIXXXEXXXRXXXXGXXGWXDXXGXGXXXVXIRXXXXXXXXXXXXXXAGXGXVXXSXPXXEXXEXXXK

SEQ ID NO: 4858 - protein, 26 aa, Artificial sequence
  protein pattern
  Variant (2)..(4): Xaa in position 2 to 4 is any amino acid
  Variant (5)..(6): Xaa in position 5 to 6 is any or no amino acid
  Variant (8)..(8): Xaa in position 8 is any or no amino acid
  Variant (12)..(12): Xaa in position 12 is Ala or Pro
  Variant (14)..(14): Xaa in position 14 is Ile, Leu or Val
  Variant (15)..(15): Xaa in position 15 is Ala, Cys, Gly or Ser
  Variant (17)..(17): Xaa in position 17 is any amino acid
  Variant (19)..(21): Xaa in position 19 to 21 is any amino acid
  Variant (22)..(22): Xaa in position 22 is Ala or Ser
  Variant (23)..(25): Xaa in position 23 to 25 is any amino acid
  Variant (26)..(26): Xaa in position 26 is Ile or Leu
LXXXXXLXHPTXAXXGXPXXXXXXXX

SEQ ID NO: 4859 - protein, 16 aa, Artificial sequence
  protein pattern
  Variant (2)..(4): Xaa in position 2 to 4 is any or no amino acid
  Variant (6)..(7): Xaa in position 6 to 7 is any amino acid
  Variant (8)..(8): Xaa in position 8 is Phe or Tyr
  Variant (9)..(9): Xaa in position 9 is Ala, Gly, Ser or Thr
  Variant (11)..(11): Xaa in position 11 is any amino acid
  Variant (12)..(12): Xaa in position 12 is Ile, Leu or Val
  Variant (14)..(14): Xaa in position 14 is Phe, Trp or Tyr
  Variant (15)..(15): Xaa in position 15 is any amino acid
  Variant (16)..(16): Xaa in position 16 is Asp, Gly, Asn or Ser
EXXXRXXXXGXXGXXX

SEQ ID NO: 4860 - protein, 14 aa, Artificial sequence
  protein pattern
  Variant (2)..(2): Xaa in position 2 is Asp or Asn
  Variant (4)..(4): Xaa in position 4 is Asp, Glu, His or Arg
  Variant (5)..(5): Xaa in position 5 is Phe, Trp or Tyr
  Variant (6)..(6): Xaa in position 6 is any amino acid
  Variant (7)..(7): Xaa in position 7 is Ile or Val
  Variant (8)..(8): Xaa in position 8 is Ala, Gly, Ser, Thr or Val
  Variant (9)..(9): Xaa in position 9 is Ile, Leu or Val
  Variant (11)..(11): Xaa in position 11 is Cys or Ser
  Variant (12)..(12): Xaa in position 12 is Ala or Gly
  Variant (13)..(13): Xaa in position 13 is any amino acid
  Variant (14)..(14): Xaa in position 14 is Ala, Ile, Leu or Val
GXGXXXXXXRXXXX

SEQ ID NO: 4861 - protein, 14 aa, Artificial sequence
  protein pattern
  Variant (3)..(3): Xaa in position 3 is Ala, Cys or Gly
  Variant (5)..(5): Xaa in position 5 is Ile, Leu or Val
  Variant (7)..(7): Xaa in position 7 is any amino acid
  Variant (8)..(8): Xaa in position 8 is Ala, Asp, Glu or Gly
  Variant (10)..(10): Xaa in position 10 is any amino acid
  Variant (11)..(11): Xaa in position 11 is Ala or Pro
  Variant (12)..(13): Xaa in position 12 to 13 is any amino acid
AGXGXVXXSXXXXE

SEQ ID NO: 4862 - protein, 18 aa, Artificial sequence
  protein pattern
  Variant (2)..(3): Xaa in position 2 to 3 is any amino acid
  Variant (4)..(4): Xaa in position 4 is Asp, Asn, Ser or Thr
  Variant (5)..(5): Xaa in position 5 is any amino acid
  Variant (7)..(7): Xaa in position 7 is Asp, Glu or Asn
  Variant (8)..(9): Xaa in position 8 to 9 is any amino acid
  Variant (12)..(13): Xaa in position 12 to 13 is any amino acid
  Variant (15)..(15): Xaa in position 15 is any amino acid
  Variant (16)..(16): Xaa in position 16 is Ala, Asp, Glu, Asn or Gln
  Variant (17)..(17): Xaa in position 17 is any amino acid
  Variant (18)..(18): Xaa in position 18 is Ile, Leu, Met or Val
LXXXXKXXXEHXXVXXXX

SEQ ID NO: 4863 - protein, 18 aa, Artificial sequence
  protein pattern
  Variant (2)..(2): Xaa in position 2 is Asp, Glu, Gly, Gln, Ser or Thr
  Variant (3)..(3): Xaa in position 3 is Ile, Leu, Pro or Val
  Variant (4)..(8): Xaa in position 4 to 8 is any amino acid
  Variant (9)..(9): Xaa in position 9 is Ile, Leu, Met or Val
  Variant (10)..(10): Xaa in position 10 is any amino acid
  Variant (13)..(13): Xaa in position 13 is any amino acid
  Variant (14)..(14): Xaa in position 14 is Ser or Thr
  Variant (15)..(15): Xaa in position 15 is any amino acid
  Variant (16)..(16): Xaa in position 16 is Phe, Ile, Leu or Val
  Variant (17)..(17): Xaa in position 17 is any amino acid
  Variant (18)..(18): Xaa in position 18 is Ala or Gly
PXXXXXXXXXHLXXXXXX

SEQ ID NO: 4864 - DNA, 1149 bp, Escherichia coli
  CDS (1)..(1149): transl_table=11
atgtccacgtatacccagcctgtcatgcttttgctgtctggcctgcttttgttgactctggcgattgcggtgttaaatacactcgtgccgctttggctcgcccaggaacacatgtccacatggcaggtaggcgttgtcagctcatcctattttaccggcaaccttgtcggtacattgctgacagggtatgtcattaagcgcattggctttaaccgcagctattatctggcctccttcatttttgccgctggctgtgccggccttggcctgatgattggattctggagctggttggcttggcgttttgtcgcgggcgtcggctgtgccatgatttgggtggttgttgagagcgcgctgatgtgcagtgggacgtcacgtaaccgtgggcgtttgcttgctgcgtatatgatggtttattacgtgggaacgtttttaggccagttactggtcagcaaagtttcaaccgagctgatgtccgtattgccgtgggttacaggtttgacgttggcagggatcttaccgctgttgtttacgcgtgtgctgaatcagcaggctgaaaaccatgattcgacgtcaattacgtcaatgctaaaactccgtcaggcgcggcttggcgtgaatggctgcattatctcaggaatcgttctgggatctctatatggcctgatgccgctgtacctcaatcacaaaggggtgagcaatgccagcattggtttctggatggcggtactggtcagtgcgggtatccttggacaatggccgattggacgtctggcggataagtttggtcgactgctggtgttgcgtgttcaggtctttgtcgtcattctcggcagtatcgcgatgcttagccaggcggcgatggccccagcgttattcatcctcggtgccgctggctttacgctatatccggtggcgatggcatgggcttgcgagaaagttgaacatcatcaactggtggcgatgaaccaggccttactgttgagctatactgtgggaagtctgcttggcccgtcatttaccgctatgctaatgcagaatttctccgataatttattgtttatcatgatcgccagcgtatcgtttatctatttgctgatgctgctgcgcaacgccggtcatacgccgaaacccgttgctcacgtgtaa

SEQ ID NO: 4865 - protein, 382 aa, Escherichia coli
MSTYTQPVMLLLSGLLLLTLAIAVLNTLVPLWLAQEHMSTWQVGVVSSSYFTGNLVGTLLTGYVIKRIGFNRSYYLASFIFAAGCAGLGLMIGFWSWLAWRFVAGVGCAMIWVVVESALMCSGTSRNRGRLLAAYMMVYYVGTFLGQLLVSKVSTELMSVLPWVTGLTLAGILPLLFTRVLNQQAENHDSTSITSMLKLRQARLGVNGCIISGIVLGSLYGLMPLYLNHKGVSNASIGFWMAVLVSAGILGQWPIGRLADKFGRLLVLRVQVFVVILGSIAMLSQAAMAPALFILGAAGFTLYPVAMAWACEKVEHHQLVAMNQALLLSYTVGSLLGPSFTAMLMQNFSDNLLFIMIASVSFIYLLMLLRNAGHTPKPVAHV

SEQ ID NO: 4866 - DNA, 1149 bp, Klebsiella pneumoniae subsp. pneumoniae MGH 78578
  CDS (1)..(1149): transl_table=11
atgaccatctacacccggccagtgcaaatgctgctctgtggcctgcttttattgaccctggcaatagcggtgctgaatacgctcgtcccgctctggctcgcccatgaaaacatgccaacctggcaggtcggcatggtggggtcatcctattttaccggcaacctggccggtacgttgctggccggctgggtgatcaagcgcctggggtttaaccgtagctattatctcgcatcgttaattttcgccgtcggctgcgtagggctggggatcaccgttggcttctggacatggctgagctggcgttttatcgccggcgtaggttgcgcgatgatctgggtggtggtggaaagcgcgctggtttgcagcggcacttcccgcagtcgcggtcgtctgctggcggcgtacatgatggtctattacgtcggtaccgtactgggccagctgatggtcagtaaattacccaccgatttaatgagcgtcctgccgtgggtgaccggcctggcgctggcggcgatcctgccgttgctgtttacccgcattatggggcaggcagaagaaccgcatgaaacggtacgtatctggccgatgctgaagctgcgccaggcgcgccacggggtcaatggctgtattatttcggggattgtcctcggctcgctgtatggcctgatgccgctgtggctgaaccatcagggcgtcagcgactccggcatcggcttctggatggcggtgatggtgagtgcggggatccttggccagtggccggtagggcgcctggcagaccgctacggtcgcctgctggtgctgcgggtacaggtctttgtggtcattctgggatgtctggcgatgcttagtcaggcggcaatggccccggcgctgtttgtgcttggggcatctggtttcacgctgtatccggtggcgatggcctgggcctgtgaaaaagtggagcaccatcagctggtggcgatgaatcaggcgctgctgatgagctataccatcggcagcctgctgggcccgaccctgacggcgatgctgatgcagaacttctcagacaacctgctgtttatcatgatcgccagcgtgtcgtttatctatctgctgaccctgctgcgcaaagccgggcatcatccgacgccggtggcgcacgcctga

SEQ ID NO: 4867 - protein, 382 aa, Klebsiella pneumoniae subsp. pneumoniae MGH 78578
MTIYTRPVQMLLCGLLLLTLAIAVLNTLVPLWLAHENMPTWQVGMVGSSYFTGNLAGTLLAGWVIKRLGFNRSYYLASLIFAVGCVGLGITVGFWTWLSWRFIAGVGCAMIWVVVESALVCSGTSRSRGRLLAAYMMVYYVGTVLGQLMVSKLPTDLMSVLPWVTGLALAAILPLLFTRIMGQAEEPHETVRIWPMLKLRQARHGVNGCIISGIVLGSLYGLMPLWLNHQGVSDSGIGFWMAVMVSAGILGQWPVGRLADRYGRLLVLRVQVFVVILGCLAMLSQAAMAPALFVLGASGFTLYPVAMAWACEKVEHHQLVAMNQALLMSYTIGSLLGPTLTAMLMQNFSDNLLFIMIASVSFIYLLTLLRKAGHHPTPVAHA

SEQ ID NO: 4868 - DNA, 1155 bp, Pectobacterium atrosepticum SCRI1043
  CDS (1)..(1155): transl_table=11
atgtctgcttattcccgcccagtgctgttattgctctgtggacttctgctgctgacggtttgtattgcggtattaaatacgttggtcccactttggctaagttatcagtctcttcctgtctggcaggttggcctcgttggttcttcctatttcggtggcaatctggttggaacgctattagccggtaaattaattaaactttatggctttaaccgcagctattattttgcggctttattatttggcatcgcgatcgttggcctcggtatttctgcggatatcggcagttggttattctggcgcttcttggcagggataggctgtgcattgatctgggttgtggttgaaagcgccttattatgtagtggaacgtcgacgcagagagggcaactgctggctgcttatatgattgcctattacctcggtagcgtgattggacagctattgcttggtgtgttgcctacgtcattattgagcgtgctgccgtggatggtcgcgttagttactttagctgtattacctctgctgtgtactcatcttcctactccgcccgaacagcacgaaaagcatgtcaatatgtggaaaatgctgaagtatcgcagtgcgcgtctaggaatacacggctgtattatttccggcgcaattttaggatcgctgtatggcctgatgccactgtacctctcccatcagggaatgaatgatgcgcaggttggatactggatggcgctgctgattagctcaggtattgtcgggcaatggcctgttgggcgtatggctgaccgttatggtcggttgttggttcttcgggtgttagtctttgtggtgattattggctgtgttgccatgctaagcattagtcactatgccatggcaccgtcgctatttttattgggatgcgcagggtttacgctatacccggtcgctatgtcgtgggcatgtgagaaggtgcgtcctgaagagttggtggcgatgaatcaggcgttactccttagctacacgcttggcagtctttgcgggccaagcgttgctgcggtgttgatgcagaattattctgatcgattactgttcgtactaattgccgcggtagcgatgatctacctgatgatattgctcagaaaagccgatcaccatccaacgccattagctgctgcctga

SEQ ID NO: 4869 - protein, 384 aa, Pectobacterium atrosepticum SCRI1043
MSAYSRPVLLLLCGLLLLTVCIAVLNTLVPLWLSYQSLPVWQVGLVGSSYFGGNLVGTLLAGKLIKLYGFNRSYYFAALLFGIAIVGLGISADIGSWLFWRFLAGIGCALIWVVVESALLCSGTSTQRGQLLAAYMIAYYLGSVIGQLLLGVLPTSLLSVLPWMVALVTLAVLPLLCTHLPTPPEQHEKHVNMWKMLKYRSARLGIHGCIISGAILGSLYGLMPLYLSHQGMNDAQVGYWMALLISSGIVGQWPVGRMADRYGRLLVLRVLVFVVIIGCVAMLSISHYAMAPSLFLLGCAGFTLYPVAMSWACEKVRPEELVAMNQALLLSYTLGSLCGPSVAAVLMQNYSDRLLFVLIAAVAMIYLMILLRKADHHPTPLAAA

SEQ ID NO: 4870 - DNA, 1311 bp, Pseudomonas fluorescens PfO-1
  CDS (1)..(1311): transl_table=11
atgacaccgcgtttgctggccatggcgctggcgcccctgctcgggctgttcattgttgcgctgggcaacggctttctgtcttctttgaccaccctgcgtttgggcgctgccggcgaatcggcgacgatgatcggcatcgtgtcctcggcctatttcatcggcctgacgctgggcgcgatcttcaacgaccggctgatcctgcgcatcggccacatccgcgcctacagcagcttcgcctcgctgatcgccgcgaccatcctgttgcaagggctgttttatgacacctggggctgggtcgtgctgcgcctgatcaacggttgggccacggtcggtgtatttctggtgatcgagagctggctgctgctggccggtgacgcgaagattcgcggccgcctgctggcgctgtacatgatcgtcctctacggcgccggcgtgctgggtcaggcgtttttggggaaaatcaccgggctgggcgacaccgcgccgttcatggtcgccggcatgctcgcaaccctgtcggtgctgccgatcgtgatcctgccgcgggtttcgccgctgctggaacaggtcgaaccgctcaagcctcgggccttgcttggcgtttcgcccaccgggttggtcggctgcttcggctccggcgtgaccatcgcggcgatctacaccctgctgccgctgtacctgcaacgcatcggcctgaacgtgggcgaagtcggcagcatgatggcgtggacgatcctcggcgcaatgctgctgcaatacccggtcgggcgctggtccgaccgcaaggatcgcctgcaagtgctcaccgtgctctgcgccgcgtgcaccgttctgtcgctggtgatcgtgctggtgccgctgtcctcggccctgctcgcggcgatgctgttcctgttaggtggcggcgtgttcgcgctgtacccggttgcggtcagccatgcggccgaccgtgcgccggtcgaaacgttggtgccgatgattcagggcatgttgctgatcaactcgctgggctcggcgatgagcccgctgctgatctcgccggcgatgaatgcccatggcgaaaccggcctgttctgggccttcgcgctggtcaacctggccatggtgacgttcttcttctggcgtcgcggcaagcgtccggtgccggccaatccggcaccgtttgcggcggcagcgaccttctcgccaaccggcgcagagctgcgagtgaccgaggatctgcgtcaggccgcgcaggaccatccgccgatggtcgatgcgttgagcggcgaagcggcgccggcaacgggatcgcgctacgaagccagttga

SEQ ID NO: 4871 - protein, 436 aa, Pseudomonas fluorescens PfO-1
MTPRLLAMALAPLLGLFIVALGNGFLSSLTTLRLGAAGESATMIGIVSSAYFIGLTLGAIFNDRLILRIGHIRAYSSFASLIAATILLQGLFYDTWGWVVLRLINGWATVGVFLVIESWLLLAGDAKIRGRLLALYMIVLYGAGVLGQAFLGKITGLGDTAPFMVAGMLATLSVLPIVILPRVSPLLEQVEPLKPRALLGVSPTGLVGCFGSGVTIAAIYTLLPLYLQRIGLNVGEVGSMMAWTILGAMLLQYPVGRWSDRKDRLQVLTVLCAACTVLSLVIVLVPLSSALLAAMLFLLGGGVFALYPVAVSHAADRAPVETLVPMIQGMLLINSLGSAMSPLLISPAMNAHGETGLFWAFALVNLAMVTFFFWRRGKRPVPANPAPFAAAATFSPTGAELRVTEDLRQAAQDHPPMVDALSGEAAPATGSRYEAS

SEQ ID NO: 4872 - DNA, 1173 bp, Shewanella sp. MR-7
  CDS (1)..(1173): transl_table=11
gtggaaaatgtagcgttaactcaatcgactcaaaagccaggactttttgtacctgttacgggcttaagcctatttgccctcgcgtcgggctatttgatgagtttgatcccgctgtcgctcagttatttcgaactcagcccagatctcgcgccatggctcgcgagtattttctacctaggcttattactgggcgctccttgcatcgcgccaatcgtggcgcgcatcggccacagcaaagcttttattttatttatcaatatcttattgtgcagcgttgtggttatggttttgctgccacagggcggtatctggctcgcctcgcgactggttgctggtgtcgcggtggcagggatttttgtggtcgtcgaatcttggttgctgatggccgacacccaaaaacagcgggccaaacgcttaggcctgtacatgaccgccctgtacggcggcacggcaataggacaactcgcggtcgattacttaggtaccaggggtaaccttccctatttagtggtgataggtttactggccgccgccagtttacccgcgctcttagtcaaacgcggtcaaccgcaatcgagcgagcaacactcgattgccctctcggatcttaaaaacctgagtaaacccgccgtggtcggttgtttagtctcgggattattgctcggccccatttacggcctattgcctgtttatgtgtcgcaggacatgggatttgcccagcagacggggcaatttatggcgctgatcattatgggcggcatgatagtccagcccttagtcagctatttatctccacgcttccagaagagcgccttaatggccgccttctgcttaattggcgctgcggcactctttttactgacacagaaatccctcgttggactctggttaggctttgtgttgctgggcgcctgtgcctttgccctctaccctatcgccatcagcctggcctgcgatcatctgcctagcagccaaatagtatctgcaactcagattatgttgctcagttattccgtcggttcggttatcggcccagttacagcgagtcgctttaatcatatcgaacatggcttgttactctacttagccgccagttttgtactgacatcttgttatcttggcgcgcgcttactggtgcgaagcaaacctcgcttgccgacggcaaaagcttaa

SEQ ID NO: 4873 - protein, 390 aa, Shewanella sp. MR-7
MENVALTQSTQKPGLFVPVTGLSLFALASGYLMSLIPLSLSYFELSPDLAPWLASIFYLGLLLGAPCIAPIVARIGHSKAFILFINILLCSVVVMVLLPQGGIWLASRLVAGVAVAGIFVVVESWLLMADTQKQRAKRLGLYMTALYGGTAIGQLAVDYLGTRGNLPYLVVIGLLAAASLPALLVKRGQPQSSEQHSIALSDLKNLSKPAVVGCLVSGLLLGPIYGLLPVYVSQDMGFAQQTGQFMALIIMGGMIVQPLVSYLSPRFQKSALMAAFCLIGAAALFLLTQKSLVGLWLGFVLLGACAFALYPIAISLACDHLPSSQIVSATQIMLLSYSVGSVIGPVTASRFNHIEHGLLLYLAASFVLTSCYLGARLLVRSKPRLPTAKA

SEQ ID NO: 4874 - DNA, 1173 bp, Shewanella sp. ANA-3
  CDS (1)..(1173): transl_table=11
gtggaaaatatcgcgttaacgccatcgactcaaaagcctgggctgtttgtgcctgtagcaggcttaagcctatttgccctcgcctcgggctatttgatgagtttgatcccactctccctcagttattttgagctcagtctcgatctcgcaccatggctggcgagtattttctacctaggcttattactgggcgcaccttgtatcgcccccatagtggcgcgcatcggccacagtaaagcctttattctgtttttgaatgtcttattgtgcagcgttgtggtgatggttttgctaccacagagcagcgtttggttagccgcccgtttgatcgcaggcctcgccgtggcggggatttttgtggttgtcgagtcttggttgctaatggccgatacccaaaaacagcgggccaaacgcttaggactttatatgaccgccctctacggtggtacggcaattggacaactcgcggtcgattatttaggtaccacgggcaacctcccctatttagtggtgataggtttactggccgccgccagtttgcccgcgttattagttaagcgtggtcagccgcaatcgagcgagcaacactcgattgctctgtcagatcttaaaaacctgagtaaacccgccgtggtcggttgtttagtctcgggattattactcggccccatctacggcctattgcctgtgtatgtgtcgcaggacatgggatttgcccagcagacggggcaatttatggcgttaatcattatgggcggcatgatagttcagcccttagtgagctatttatctccacgcttccagaagagtgccttaatggccgccttctgcttaattggcgctgcggcactcttcttactgacgcaaaaatcccttgttggactctggctaggctttgtgttgctgggcgcctgcgcctttgccctctaccctatcgccatcagtctggcctgcgatcatctgcccagcagtcaaattgtgtctgcaacccagattatgttgctcagttattccgtcggttcggttatcggcccggttgccgccagtcgctttaatcatatcgaacatggcttgctactctacttagccgcaagctttgtgctgacctttggttatcttggcgcgcacttactgctacggagcaaaccccgcttaccgacggcaaaagcttag

SEQ ID NO: 4875 - protein, 390 aa, Shewanella sp. ANA-3
MENIALTPSTQKPGLFVPVAGLSLFALASGYLMSLIPLSLSYFELSLDLAPWLASIFYLGLLLGAPCIAPIVARIGHSKAFILFLNVLLCSVVVMVLLPQSSVWLAARLIAGLAVAGIFVVVESWLLMADTQKQRAKRLGLYMTALYGGTAIGQLAVDYLGTTGNLPYLVVIGLLAAASLPALLVKRGQPQSSEQHSIALSDLKNLSKPAVVGCLVSGLLLGPIYGLLPVYVSQDMGFAQQTGQFMALIIMGGMIVQPLVSYLSPRFQKSALMAAFCLIGAAALFLLTQKSLVGLWLGFVLLGACAFALYPIAISLACDHLPSSQIVSATQIMLLSYSVGSVIGPVAASRFNHIEHGLLLYLAASFVLTFGYLGAHLLLRSKPRLPTAKA

SEQ ID NO: 4876 - DNA, 1149 bp, Yersinia pestis
  CDS (1)..(1149): transl_table=11
atgtccgcatattctcgccccgtgctactcctgctttgtgggcttttgctgttcacgatctctatcgcggttttaaatacactggttcccttatggttatcacatcaacagttgccgacttggcaagtggggatggtgagctcatcttatttcaccggtaatctggtaggaacgttgattgcaggccgctttattcagcaactcggttttaatcgcagttatcattgctcctgtatattgtttgcactggcaacttgtgggctgatgctaacggttgatttttggagctggttgggttggcgctttttggcgggcattgcctgcgcgctgatttgggtcattgtcgaaagtgctttattacgcagtggtaccttaaccaaccgcggacaactactggcggcctacatgatggtttactatttagggaccgtcatcgggcaattattattgggtatagtctccacacaactgctcagtgttattccttgggtgggggcgctggtgattacggcaatgctgccgctactatttgcccagttctcacatcaaagtcgtcacgagtcaccgcctattgcggtttggcctatgttaaaacgccgcagcgcccgtttaggtattaatggatgtattatctctggtgtactcttggggtcactctatgggttactgccactgtatttatcccataaggggatgagtgacgccagcgtgggggggtggatggcgttgctggtcagttcagggattattgggcaatggcctatgggaagaatggctgaccgctatggccgcttactggtactgcggatccaagtgtttgtcgtcatcctcggtagtgtggcgatcttgggtaattacgcaatggcgccggcgttattcattttaggctgcgcgggtttcactttgtatccggttgctatggcctgggcgtgtgaaaaagccagcgctgatgaattggtcgcgatgaatcaggcgttactgatgagttatacccttgggagcctggccgggccgacgatgacgtcactgctgatgcagcgctattcagataatttattatttatcatgatagcaggtgtcgcattcgtgtatttgatgatgctgttgagaaagccagatcaccaacaaacgccttatgctgcggtataa

SEQ ID NO: 4877 - protein, 382 aa, Yersinia pestis
MSAYSRPVLLLLCGLLLFTISIAVLNTLVPLWLSHQQLPTWQVGMVSSSYFTGNLVGTLIAGRFIQQLGFNRSYHCSCILFALATCGLMLTVDFWSWLGWRFLAGIACALIWVIVESALLRSGTLTNRGQLLAAYMMVYYLGTVIGQLLLGIVSTQLLSVIPWVGALVITAMLPLLFAQFSHQSRHESPPIAVWPMLKRRSARLGINGCIISGVLLGSLYGLLPLYLSHKGMSDASVGGWMALLVSSGIIGQWPMGRMADRYGRLLVLRIQVFVVILGSVAILGNYAMAPALFILGCAGFTLYPVAMAWACEKASADELVAMNQALLMSYTLGSLAGPTMTSLLMQRYSDNLLFIMIAGVAFVYLMMLLRKPDHQQTPYAAV

SEQ ID NO: 4878 - DNA, 1149 bp, Escherichia coli O157
  CDS (1)..(1149): transl_table=11
atgtccacgtatacccggcctgtcatgcttttgctgtctggcctgcttttgttgactctggcgatcgcggtgttaaatacactcgtgccgctttggctcgcccaggaacacatgtccacatggcaggtaggcgttgtcagctcatcctattttaccggcaaccttgtcggtacattgctgacagggtatgtcattaaacgcattggctttaaccgcagctattatctggcctccttcatttttgccgctggctgtgccggccttggcctgatgattggtttctggagctggttggcgtggcgttttgtcgcgggcgtcggctgtgccatgatttgggtagtcgttgagagcgcgctgatgtgcagtgggacgtcacgtaaccgtgggcgtttgcttgctgcgtatatgatggtttattacgtgggaacatttttaggccagttactggtcagcaaagtctcaaccgagctgatgagcgtattgccgtgggttacaggtttgacgttggcagggatcttaccgctgttgtttacgcgtgtcctgaatcagcaggctgaaaaccatgattcgacgtcaattacgtcaatgctaaaactccgtcaggcgcggcttggcgtgaatggctgcattatctcaggaatcgtgctgggatctctatatggcctgatgccgctgtacctcaatcacaaaggggtgagcaatgccagcattggtttctggatggcggtactggtcagtgcgggtatcctcggacaatggccgattggacgtctggcggataagtttggtcgactgctggtgttgcgtgttcaggtctttgtcgtcattctcggcagtatcgcgatgcttagccaggcggcgatggccccagcgttattcatcctcggtgccgctggctttacgctatatccggtggcgatggcctgggcttgtgagaaagttgaacatcatcaactggtggcgatgaaccaggccttactgttgagctataccgtgggaagtctgcttggcccgtcatttaccgctatgctaatgcagaatttctccgataatttattgtttatcatgatcgccagcgtatcgtttatctatttgctgatgctgcttcgcaacgccggtcatacgccgaaacccgttgctcacgtgtaa

SEQ ID NO: 4879 - protein, 382 aa, Escherichia coli O157
MSTYTRPVMLLLSGLLLLTLAIAVLNTLVPLWLAQEHMSTWQVGVVSSSYFTGNLVGTLLTGYVIKRIGFNRSYYLASFIFAAGCAGLGLMIGFWSWLAWRFVAGVGCAMIWVVVESALMCSGTSRNRGRLLAAYMMVYYVGTFLGQLLVSKVSTELMSVLPWVTGLTLAGILPLLFTRVLNQQAENHDSTSITSMLKLRQARLGVNGCIISGIVLGSLYGLMPLYLNHKGVSNASIGFWMAVLVSAGILGQWPIGRLADKFGRLLVLRVQVFVVILGSIAMLSQAAMAPALFILGAAGFTLYPVAMAWACEKVEHHQLVAMNQALLLSYTVGSLLGPSFTAMLMQNFSDNLLFIMIASVSFIYLLMLLRNAGHTPKPVAHV

SEQ ID NO: 4880 - DNA, 1149 bp, Salmonella arizonae
  CDS (1)..(1149): transl_table=11
atgtccacctatacccgtcccgtcaagcttttgctgtgcgggctacttttgttgactctggccattgcggtactgaatacccttgttccgctgtggcttgctcaggcaagccttcctacctggcaggtaggtatggtcagttcatcttattttaccggcaatctggtcgggacgttatttaccgggtatttaattaaacgcattggatttaaccgcagctattatcttgcctcgctgattttcgccgcaggttgtgttggattgggagtaatggtgggattctggagctggatgagctggcgttttattgcaggcatcggctgcgcaatgatttgggttgttgtcgaaagcgcgctgatgtgcagcggaacctcgcataatcgcgggcgcctgcttgcggcatatatgatggtctattacgtggggacctttctcggacagttactggtcagtaaagtgtctggcgaattgctgcacgtcctcccttgggttacgggtatgattctggcgggaattttaccgctactctttacccggattgtcaatcagcaaacggaagcgcgttattccacttctattagcgccatgctgaagctacgccaggcgcgtcttggcgtgaatggttgtattatttccggcattgttctcggttcattatatggcctgatgccgttatatctgaagcatcaggggatggctaacgccagcatcggtttctggatggcggttttggttagtgccggtattttggggcaatggccagtggggcgtctggcggataaatttggtcgcttactggtgttacgcgtacaggtattcgttgtgatacttggcagtattgtcatgttaacccaggcggcgatggcgcctgcgctgtttattcttggggcggcgggttttacgctttatccggtcgcgatggcctgggcctgtgaaaaagtcgaacatcaccagcttgtggctatgaaccaggcgctgttgttaagttatacggtagggagcttgttgggaccgtcttttaccgcgatgttaatgcagaattattcagataatctgctgtttctcatgattgccagcgtatcatttatttatctgctgatgctgttgcgtaacgccggccagacgcccaatcctgtcgcccatatctaa

SEQ ID NO: 4881 - protein, 382 aa, Salmonella arizonae
MSTYTRPVKLLLCGLLLLTLAIAVLNTLVPLWLAQASLPTWQVGMVSSSYFTGNLVGTLFTGYLIKRIGFNRSYYLASLIFAAGCVGLGVMVGFWSWMSWRFIAGIGCAMIWVVVESALMCSGTSHNRGRLLAAYMMVYYVGTFLGQLLVSKVSGELLHVLPWVTGMILAGILPLLFTRIVNQQTEARYSTSISAMLKLRQARLGVNGCIISGIVLGSLYGLMPLYLKHQGMANASIGFWMAVLVSAGILGQWPVGRLADKFGRLLVLRVQVFVVILGSIVMLTQAAMAPALFILGAAGFTLYPVAMAWACEKVEHHQLVAMNQALLLSYTVGSLLGPSFTAMLMQNYSDNLLFLMIASVSFIYLLMLLRNAGQTPNPVAHI

SEQ ID NO: 4882 - DNA, 1149 bp, Salmonella choleraesuis
  CDS (1)..(1149): transl_table=11
atgtccacctatacccgtcccgtcatgcttttgctgtgcgggctacttttgttgactctggccattgcggtactgaatacgcttgtgccgctgtggcttgctcaggcaaaccttccgacctggcaggtggggatggtcagctcgtcttattttaccggcaatctggtcgggacgttatttaccgggtatttaattaaacgcattgggtttaaccgtagctattatcttgcctcgctgatcttcgccgcgggttgtgtcggattgggggtgatggtggggttctggagctggatgagctggcgttttattgccggtatcggctgcgccatgatttgggtggttgtcgaaagcgcgttgatgtgcagcggaacctcgcataatcgcgggcgcctgctggctgcctatatgatggtctattacatggggaccttccttggacaattattggtcagtaaagtatctggtgaattgctacacgtccttccctgggtgaccggaatgattctggcgggaattctgccgctactctttacccgaattgtaaatcagcaaacacagacacgtcattcctcttctattagcgccatgctgaagctacgccaggcgcgtcttggcgtgaatggttgcattatttccggcattgttcttggttcactatatggcctgatgccgttatatctgaagcatcaggggatggctaacgccagcatcggtttctggatggcggtgctggtgagcgccggcattttggggcaatggccaatgggacgtctggcggacaaatttggtcgcttgctggtattacgcgtacaggtattcgttgtcatactcggtagtattgccatgttaacccaggcggcgatggcgccagctctgtttattctgggggcggcgggttttacgctttatcccgtcgcaatggcctgggcctgtgaaaaagtcgaacatcaccagcttgtggcaatgaaccaggcgctgttgttaagttatacggtagggagcctgttggggccgtcttttgctgcgatgttaatgcagaattattcagataatctgctgtttattatgatcgccagcgtatcgtttatttatctgctgatgctgttacgtaacgccggccagacgcctaatcctgtcgcccacatctga

SEQ ID NO: 4883 - protein, 382 aa, Salmonella choleraesuis
MSTYTRPVMLLLCGLLLLTLAIAVLNTLVPLWLAQANLPTWQVGMVSSSYFTGNLVGTLFTGYLIKRIGFNRSYYLASLIFAAGCVGLGVMVGFWSWMSWRFIAGIGCAMIWVVVESALMCSGTSHNRGRLLAAYMMVYYMGTFLGQLLVSKVSGELLHVLPWVTGMILAGILPLLFTRIVNQQTQTRHSSSISAMLKLRQARLGVNGCIISGIVLGSLYGLMPLYLKHQGMANASIGFWMAVLVSAGILGQWPMGRLADKFGRLLVLRVQVFVVILGSIAMLTQAAMAPALFILGAAGFTLYPVAMAWACEKVEHHQLVAMNQALLLSYTVGSLLGPSFAAMLMQNYSDNLLFIMIASVSFIYLLMLLRNAGQTPNPVAHI

SEQ ID NO: 4884 - DNA, 1149 bp, Salmonella paratyphi A
  CDS (1)..(1149): transl_table=11
atgttcacctatacccgtcccgtcatgcttttgctgtgcgggctacttttgttgaccctggccattgcggtactgaatacgcttgtgctgctgtggcttgctcaggcaaaccttccgacctggcaggtggggatggtcagctcgtcttattttaccggcaatctggtcgggacgttatttaccgggtatttaattaaacgcattgggtttaaccgtagctattatcttgcctcgctgatcttcgccgcgggttgtgtcggattgggggtgatggtggggttctggagctggatgagctggcgttttattgctggtatcggctgcgctatgatttgggtggttgtcgaaagcgcgttgatgtgcagcggaacctcgcataatcgcgggcgcctgctggctgcctatatgatggtctattacatggggaccttccttggacaattattggtcagtaaagtatctggtgaattgctgcacgtccttccctgggtgaccggaatgattctggcgggaattctgccgctactctttacccgaattgtaaatcagcaaacgcagacacgtcattcctcttctattagcgccatgctgaagctacgccaggcgcgtcttggcgtgaatggttgtattatttccggcattgttcttggttcattatatggcctgatgccgttatatctgaagcatcaggggatggctaacgccagcatcggtttctggatggcggtgctggtgagtgccggcattttggggcaatggccaatgggacgtctggcggacaaatttggtcgcttgctggtgttacgcgtacaggtattcgttgtcatactcggtagtattgccatgttaacccaggcggcgatggcgccagctctgtttattctgggggcggcgggttttacgctttatcccgttgcaatggcctgggcctgtgaaaaagtcgaacaccaccagcttgtggcaatgaaccaggcgctgttgttaagttatacggtagggagcctgttggggccgtcttttgctgcgatgttaatgcagaattattcagataatctgctgtttattatgatcgccagcgtatcgtttatttatctgctgatgctgttacgtaacgccggccagacgcctaatcctgtcgcccacatctaa

SEQ ID NO: 4885 - protein, 382 aa, Salmonella paratyphi A
MFTYTRPVMLLLCGLLLLTLAIAVLNTLVLLWLAQANLPTWQVGMVSSSYFTGNLVGTLFTGYLIKRIGFNRSYYLASLIFAAGCVGLGVMVGFWSWMSWRFIAGIGCAMIWVVVESALMCSGTSHNRGRLLAAYMMVYYMGTFLGQLLVSKVSGELLHVLPWVTGMILAGILPLLFTRIVNQQTQTRHSSSISAMLKLRQARLGVNGCIISGIVLGSLYGLMPLYLKHQGMANASIGFWMAVLVSAGILGQWPMGRLADKFGRLLVLRVQVFVVILGSIAMLTQAAMAPALFILGAAGFTLYPVAMAWACEKVEHHQLVAMNQALLLSYTVGSLLGPSFAAMLMQNYSDNLLFIMIASVSFIYLLMLLRNAGQTPNPVAHI

SEQ ID NO: 4886 - DNA, 1149 bp, Salmonella paratyphi B
  CDS (1)..(1149): transl_table=11
atgtccacctatacccgtcccgtcatgcttttgctgtgcgggctacttttgttgactctggccattgcggtactgaatacgcttgtgccgctgtggcttgctcaggcaaaccttccgacctggcaggtggggatggtcagctcgtcttattttaccggcaatctggtcgggacgttatttaccgggtatttaattaaacgcattgggtttaaccatagctattatcttgcctcgctgatcttcgccgcgggttgtgtcgggttgggggtgatggtggggttctggagctggatgagctggcgttttattgccggcatcggctgcgccatgatttgggtggttgtcgaaagcgcgttgatgtgcagcggaacctcgcataatcgcgggcgcctgctggctgcctatatgatggtctattacatggggaccttccttggacaattattggtcagtaaagtatctggtgaattgctgcacgtccttccctgggtgaccggaatgattctggcgggaattctgccgctactctttacccgaattgtaaatcagcaaacgcaggcacgtcattcctcttctattagcgccatgctgaagctacgccaggcgcgtcttggcgtgaatggttgcattatttccggcattgttcttggttcactatatggcctgatgccgttatatctgaagcatcaggggatggctaacgccagcatcggtttctggatggcggtgctggtgagcgccggcattttggggcaatggccaatgggacgtctggcggacaaatttggtcgcttgctggtattacgcgtacaggtattcgttgtcatactcggtagtattgccatgttaacccaggcggcgatggcgccagctctgtttattctgggggcggcgggttttacgctttatcccgtcgcaatggcctgggcctgtgaaaaagtcgaacatcaccagcttgtggcaatgaaccaggcgctgttgttaagttatacggtagggagcctgttggggccgtcttttgctgcgatgttaatgcagaattattcagataatctgctgtttattatgatcgccagcgtatcgtttatttatctgctgatgctgttacgtaacgccggccagacgcctaatcctgtcgcccacatctaa

SEQ ID NO: 4887 - protein, 382 aa, Salmonella paratyphi B
MSTYTRPVMLLLCGLLLLTLAIAVLNTLVPLWLAQANLPTWQVGMVSSSYFTGNLVGTLFTGYLIKRIGFNHSYYLASLIFAAGCVGLGVMVGFWSWMSWRFIAGIGCAMIWVVVESALMCSGTSHNRGRLLAAYMMVYYMGTFLGQLLVSKVSGELLHVLPWVTGMILAGILPLLFTRIVNQQTQARHSSSISAMLKLRQARLGVNGCIISGIVLGSLYGLMPLYLKHQGMANASIGFWMAVLVSAGILGQWPMGRLADKFGRLLVLRVQVFVVILGSIAMLTQAAMAPALFILGAAGFTLYPVAMAWACEKVEHHQLVAMNQALLLSYTVGSLLGPSFAAMLMQNYSDNLLFIMIASVSFIYLLMLLRNAGQTPNPVAHI

SEQ ID NO: 4888 - DNA, 1149 bp, Salmonella typhi
  CDS (1)..(1149): transl_table=11
atgtccatctatacccgtcccgtcatgcttttgctgtgcgggctacttttgttgaccctggccattgcggtactgaatacgcttgtgccgctgtggcttgctcaggcaaaccttccgacctggcaggtggggatggtcagctcgtcttattttaccggcaatctggtcgggacgttatttaccgggtatttaattaaacgcattgggtttaaccgtagctattatcttgcctcgctgatcttcgccgcgggttgtgtcgggttgggggtgatggtggggttctggagctggatgagctggcgttttattgccggtatcggctgcgccatgatttgggtggttgtcgaaagcgcgttgatgtgcagcggaacctcgcataatcgcggacgcctgctggctgcctatatgatggtctattacatggggaccttccttggacaattattggtcagtaaagtatctggtgaattgctgcacgtccttccctgggtgaccggaatgattctggcgggaattctgccgctactctttacccgaattgtaaatcagcaaacgcaggcacgtcattcctcttctattagcgccatgctgaagctacgccaggcgcgtcttggcgtgaatggttgtattatttccggcattgttcttggttcattatatggcctgatgccgttatatctgaagcatcaggggatggctaacgccagcatcggtttctggatggcggtgctggtgagcgccggtattttggggcaatggccaatgggacgtctggcggacaaatttggtcgcttgctggtattacgcgtacaggtattcgttgtcatactcggcagtattgccatgttaacccaggcggcgatggcgccagctctgtttattctgggggcggcgggttttacgctttatcccgttgcaatggcctgggcctgtgaaaaagtcgaacaccaccagcttgtggcaatgaaccaggcgctgttgttaagttatacggtagggagcctgttggggccgtcttttgctgcgatgttaatgcagaattattcagataatctgctgtttattatgatcgccagcgtatcgtttatttatctgctgatgctgttacgtaacgtcggccagacgcctaatcctgtcgcccacatctaa

SEQ ID NO: 4889 - protein, 382 aa, Salmonella typhi
MSIYTRPVMLLLCGLLLLTLAIAVLNTLVPLWLAQANLPTWQVGMVSSSYFTGNLVGTLFTGYLIKRIGFNRSYYLASLIFAAGCVGLGVMVGFWSWMSWRFIAGIGCAMIWVVVESALMCSGTSHNRGRLLAAYMMVYYMGTFLGQLLVSKVSGELLHVLPWVTGMILAGILPLLFTRIVNQQTQARHSSSISAMLKLRQARLGVNGCIISGIVLGSLYGLMPLYLKHQGMANASIGFWMAVLVSAGILGQWPMGRLADKFGRLLVLRVQVFVVILGSIAMLTQAAMAPALFILGAAGFTLYPVAMAWACEKVEHHQLVAMNQALLLSYTVGSLLGPSFAAMLMQNYSDNLLFIMIASVSFIYLLMLLRNVGQTPNPVAHI

SEQ ID NO: 4890 - DNA, 1149 bp, Salmonella typhimurium
  CDS (1)..(1149): transl_table=11
atgtccacctatacccgtcccgtcatgcttttgctgtgcgggctacttttgttgactctggccattgcggtactgaatacgcttgtgccgctgtggcttgctcaggcaaaccttccgacctggcaggtggggatggtcagctcgtcttattttaccggcaatctggtcgggacgttatttaccgggtatttaattaaacgcattgggtttaaccgtagctattatcttgcctcgctgatcttcgccgcgggttgtgtcggattgggggtgatggtggggttctggagctggatgagctggcgttttattgccggtatcggctgcgccatgatttgggtggttgtcgagagcgcgttgatgtgcagcggaacctcgcataatcgcgggcgcctgctggctgcctatatgatggtctattatatggggaccttccttggacaattattggtcagtaaagtatctggtgaattgctgcacgttcttccctgggtgaccggaatgattctggcgggaattctgccgctactctttacccgaattgtaaatcagcaaacgcaggcacgtcattcctcttctattagcgccatgctgaagctacgccaggcgcgtcttggcgtgaatggttgtattatttccggcattgttcttggttcattatatggcctgatgccgttatatctgaagcatcaggggatggctaacgccagcatcggtttctggatggcggtgctggtgagtgccggtattttggggcaatggccaatgggacgtctggcggacaaatttggtcgcttgctggtgttacgcgtacaggtattcgttgtcatactcggcagtattgccatgttaacccaggcggcgatggcgccagctctgtttattctgggggcggcgggttttacgctttatcccgttgcaatggcctgggcctgtgaaaaagtcgaacaccaccagcttgtggcaatgaaccaggcgctgttgttaagttatacggtagggagcctgttggggccgtcttttgctgcgatgttaatgcagaattattcagataatctgctgtttattatgatcgccagcgtatcgtttatttatctgctgatgctgttacgtaacgccggccagacgcctaatcctgtcgcccacatctga

SEQ ID NO: 4891 - protein, 382 aa, Salmonella typhimurium
MSTYTRPVMLLLCGLLLLTLAIAVLNTLVPLWLAQANLPTWQVGMVSSSYFTGNLVGTLFTGYLIKRIGFNRSYYLASLIFAAGCVGLGVMVGFWSWMSWRFIAGIGCAMIWVVVESALMCSGTSHNRGRLLAAYMMVYYMGTFLGQLLVSKVSGELLHVLPWVTGMILAGILPLLFTRIVNQQTQARHSSSISAMLKLRQARLGVNGCIISGIVLGSLYGLMPLYLKHQGMANASIGFWMAVLVSAGILGQWPMGRLADKFGRLLVLRVQVFVVILGSIAMLTQAAMAPALFILGAAGFTLYPVAMAWACEKVEHHQLVAMNQALLLSYTVGSLLGPSFAAMLMQNYSDNLLFIMIASVSFIYLLMLLRNAGQTPNPVAHI

SEQ ID NO: 4892 - DNA, 21 bp, Artificial sequence
  primer
atgtccacgtatacccagcct

SEQ ID NO: 4893 - DNA, 23 bp, Artificial sequence
  primer
ttacacgtgagcaacgggtttcg

SEQ ID NO: 4894 - protein, 374 aa, Artificial sequence
  consensus sequence
  Variant (2)..(2): Xaa in position 2 is any amino acid
  Variant (5)..(5): Xaa in position 5 is any amino acid
  Variant (7)..(8): Xaa in position 7 to 8 is any amino acid
  Variant (10)..(13): Xaa in position 10 to 13 is any amino acid
  Variant (15)..(16): Xaa in position 15 to 16 is any amino acid
  Variant (18)..(18): Xaa in position 18 is any amino acid
  Variant (21)..(21): Xaa in position 21 is any amino acid
  Variant (23)..(32): Xaa in position 23 to 32 is any amino acid
  Variant (34)..(34): Xaa in position 34 is any amino acid
  Variant (36)..(36): Xaa in position 36 is any amino acid
  Variant (38)..(38): Xaa in position 38 is any amino acid
  Variant (41)..(41): Xaa in position 41 is any amino acid
  Variant (43)..(43): Xaa in position 43 is any amino acid
  Variant (45)..(45): Xaa in position 45 is any amino acid
  Variant (47)..(53): Xaa in position 47 to 53 is any amino acid
  Variant (55)..(55): Xaa in position 55 is any amino acid
  Variant (57)..(57): Xaa in position 57 is any amino acid
  Variant (59)..(62): Xaa in position 59 to 62 is any amino acid
  Variant (64)..(85): Xaa in position 64 to 85 is any amino acid
  Variant (87)..(89): Xaa in position 87 to 89 is any amino acid
  Variant (91)..(92): Xaa in position 91 to 92 is any amino acid
  Variant (95)..(97): Xaa in position 95 to 97 is any amino acid
  Variant (99)..(99): Xaa in position 99 is any amino acid
  Variant (101)..(101): Xaa in position 101 is any amino acid
  Variant (107)..(107): Xaa in position 107 is any amino acid
  Variant (109)..(111): Xaa in position 109 to 111 is any amino acid
  Variant (114)..(116): Xaa in position 114 to 116 is any amino acid
  Variant (119)..(119): Xaa in position 119 is any amino acid
  Variant (123)..(123): Xaa in position 123 is any amino acid
  Variant (126)..(128): Xaa in position 126 to 128 is any amino acid
  Variant (130)..(130): Xaa in position 130 is any amino acid
  Variant (133)..(134): Xaa in position 133 to 134 is any amino acid
  Variant (138)..(144): Xaa in position 138 to 144 is any amino acid
  Variant (145)..(145): Xaa in position 145 is any or no amino acid
  Variant (147)..(150): Xaa in position 147 to 150 is any amino acid
  Variant (152)..(152): Xaa in position 152 is any amino acid
  Variant (154)..(158): Xaa in position 154 to 158 is any amino acid
  Variant (160)..(161): Xaa in position 160 to 161 is any amino acid
  Variant (166)..(191): Xaa in position 166 to 191 is any amino acid
  Variant (192)..(193): Xaa in position 192 to 193 is any or no amino acid
  Variant (195)..(196): Xaa in position 195 to 196 is any amino acid
  Variant (199)..(200): Xaa in position 199 to 200 is any amino acid
  Variant (203)..(204): Xaa in position 203 to 204 is any amino acid
  Variant (207)..(208): Xaa in position 207 to 208 is any amino acid
  Variant (212)..(212): Xaa in position 212 is any amino acid
  Variant (217)..(219): Xaa in position 217 to 219 is any amino acid
  Variant (221)..(226): Xaa in position 221 to 226 is any amino acid
  Variant (228)..(229): Xaa in position 228 to 229 is any amino acid
  Variant (232)..(236): Xaa in position 232 to 236 is any amino acid
  Variant (238)..(240): Xaa in position 238 to 240 is any amino acid
  Variant (242)..(242): Xaa in position 242 is any amino acid
  Variant (244)..(244): Xaa in position 244 is any amino acid
  Variant (247)..(248): Xaa in position 247 to 248 is any amino acid
  Variant (250)..(252): Xaa in position 250 to 252 is any amino acid
  Variant (255)..(255): Xaa in position 255 is any amino acid
  Variant (258)..(277): Xaa in position 258 to 277 is any amino acid
  Variant (278)..(281): Xaa in position 278 to 281 is any or no amino acid
  Variant (283)..(284): Xaa in position 283 to 284 is any amino acid
  Variant (287)..(287): Xaa in position 287 is any amino acid
  Variant (290)..(292): Xaa in position 290 to 292 is any amino acid
  Variant (294)..(294): Xaa in position 294 is any amino acid
  Variant (300)..(302): Xaa in position 300 to 302 is any amino acid
  Variant (305)..(311): Xaa in position 305 to 311 is any amino acid
  Variant (314)..(314): Xaa in position 314 is any amino acid
  Variant (316)..(316): Xaa in position 316 is any amino acid
  Variant (318)..(319): Xaa in position 318 to 319 is any amino acid
  Variant (324)..(325): Xaa in position 324 to 325 is any amino acid
  Variant (328)..(329): Xaa in position 328 to 329 is any amino acid
  Variant (332)..(337): Xaa in position 332 to 337 is any amino acid
  Variant (339)..(344): Xaa in position 339 to 344 is any amino acid
  Variant (348)..(350): Xaa in position 348 to 350 is any amino acid
  Variant (352)..(352): Xaa in position 352 is any amino acid
  Variant (354)..(356): Xaa in position 354 to 356 is any amino acid
  Variant (357)..(357): Xaa in position 357 is any or no amino acid
  Variant (360)..(362): Xaa in position 360 to 362 is any amino acid
  Variant (364)..(371): Xaa in position 364 to 371 is any amino acid
  Variant (373)..(373): Xaa in position 373 is any amino acid
LXGLXLXXLXXXXLXXLXPLXLXXXXXXXXXXGXVXSXYFXGXLXGXXXXXXXIXRXGXXXXYXXXXXXXXXXXXXXXXXXXXXXWXXXRXXAGXXXAXIXVVVESXLXXXGTXXXRGXLLAXYMXXXYXGTXXGQLXXXXXXXXLXXXXPXVXXXXXAXXLPLLXXXXXXXXXXXXXXXXXXXXXXXXXXXXGXXGCXXSGXXLGXXYGLXPLYLXXXGXXXXXXGXXMAXXXXXGXXXQXPXGRXXDXXXRLXVLXXXXXXXXXXXXXXXXXXXXXXXXAXXLFXLGXXXFXLYPVAXXXACXXXXXXXLVXMXQXXLLSYXXGSXXGPXXXXXXMXXXXXXLLFXXXAXVXXXXYLXXXLXXXXXXXXPXA

SEQ ID NO: 4895 - protein, 61 aa, Artificial sequence
  protein pattern
  Variant (3)..(3): Xaa in position 3 is any or no amino acid
  Variant (5)..(5): Xaa in position 5 is any amino acid
  Variant (6)..(6): Xaa in position 6 is any or no amino acid
  Variant (8)..(8): Xaa in position 8 is Ala or Thr
  Variant (12)..(12): Xaa in position 12 is Ile or Val
  Variant (14)..(14): Xaa in position 14 is Ile or Met
  Variant (15)..(15): Xaa in position 15 is Ala or Ser
  Variant (16)..(16): Xaa in position 16 is any amino acid
  Variant (19)..(19): Xaa in position 19 is Asp or Glu
  Variant (20)..(20): Xaa in position 20 is His or Lys
  Variant (21)..(21): Xaa in position 21 is Leu or Val
  Variant (22)..(24): Xaa in position 22 to 24 is any amino acid
  Variant (25)..(25): Xaa in position 25 is Glu or Gln
  Variant (26)..(26): Xaa in position 26 is Ile or Leu
  Variant (28)..(28): Xaa in position 28 is Ala or Ser
  Variant (29)..(29): Xaa in position 29 is any amino acid
  Variant (30)..(30): Xaa in position 30 is Asn or Thr
  Variant (32)..(32): Xaa in position 32 is Ala or Ile
  Variant (33)..(33): Xaa in position 33 is Leu or Met
  Variant (35)..(35): Xaa in position 35 is Leu or Met
  Variant (38)..(38): Xaa in position 38 is Ser or Thr
  Variant (39)..(39): Xaa in position 39 is Ile, Leu or Val
  Variant (42)..(42): Xaa in position 42 is Leu or Val
  Variant (43)..(43): Xaa in position 43 is any amino acid
  Variant (46)..(46): Xaa in position 46 is Ser, Thr or Val
  Variant (47)..(47): Xaa in position 47 is any amino acid
  Variant (48)..(48): Xaa in position 48 is Ala or Thr
  Variant (49)..(49): Xaa in position 49 is Ala or Ser
  Variant (50)..(50): Xaa in position 50 is any amino acid
  Variant (51)..(51): Xaa in position 51 is Phe or Leu
  Variant (52)..(56): Xaa in position 52 to 56 is any amino acid
  Variant (57)..(57): Xaa in position 57 is Asp or Gly
  Variant (58)..(58): Xaa in position 58 is any amino acid
  Variant (61)..(61): Xaa in position 61 is Phe or Tyr
LGXAXXFXLYPXAXXXACXXXXXXXXVXXXQXXLXSYXXGSXXGPXXXXXXXXXXXXXLLX

SEQ ID NO: 4896 - protein, 58 aa, Artificial sequence
  protein pattern
  Variant (2)..(2): Xaa in position 2 is any amino acid
  Variant (3)..(3): Xaa in position 3 is any or no amino acid
  Variant (5)..(7): Xaa in position 5 to 7 is any or no amino acid
  Variant (9)..(9): Xaa in position 9 is Phe or Leu
  Variant (10)..(10): Xaa in position 10 is Ile, Leu or Val
  Variant (11)..(11): Xaa in position 11 is Ala or Asn
  Variant (13)..(13): Xaa in position 13 is any amino acid
  Variant (14)..(14): Xaa in position 14 is Ala or Gly
  Variant (15)..(15): Xaa in position 15 is Cys or Thr
  Variant (16)..(16): Xaa in position 16 is Ala or Val
  Variant (17)..(17): Xaa in position 17 is any amino acid
  Variant (18)..(18): Xaa in position 18 is Ile or Val
  Variant (19)..(19): Xaa in position 19 is Phe or Trp
  Variant (20)..(20): Xaa in position 20 is Leu or Val
  Variant (21)..(22): Xaa in position 21 to 22 is Ile or Val
  Variant (25)..(25): Xaa in position 25 is any amino acid
  Variant (27)..(27): Xaa in position 27 is Leu, Met or Val
  Variant (28)..(28): Xaa in position 28 is any amino acid
  Variant (29)..(29): Xaa in position 29 is Ala or Ser
  Variant (31)..(31): Xaa in position 31 is Asp or Thr
  Variant (32)..(34): Xaa in position 32 to 34 is any amino acid
  Variant (37)..(37): Xaa in position 37 is Gln or Arg
  Variant (41)..(41): Xaa in position 41 is Ala or Leu
  Variant (44)..(44): Xaa in position 44 is Ile or Met
  Variant (45)..(45): Xaa in position 45 is Ala or Val
  Variant (46)..(46): Xaa in position 46 is any amino acid
  Variant (48)..(48): Xaa in position 48 is any amino acid
  Variant (49)..(49): Xaa in position 49 is Ala or Gly
  Variant (50)..(50): Xaa in position 50 is Gly, Ser or Thr
  Variant (51)..(51): Xaa in position 51 is Phe or Val
  Variant (52)..(52): Xaa in position 52 is Ile or Leu
  Variant (55)..(55): Xaa in position 55 is Ala or Leu
  Variant (56)..(56): Xaa in position 56 is Phe, Leu or Met
  Variant (57)..(57): Xaa in position 57 is Leu or Val
  Variant (58)..(58): Xaa in position 58 is Gly or Ser
WXXWXXXRXXXGXXXXXXXXXXESXLXXXGXXXXRGXLLAXYMXXXYXXXXXGQXXXX

SEQ ID NO: 4897 - protein, 24 aa, Artificial sequence
  protein pattern
  Variant (3)..(4): Xaa in position 3 to 4 is any amino acid
  Variant (5)..(5): Xaa in position 5 is Ile or Val
  Variant (6)..(6): Xaa in position 6 is any amino acid
  Variant (7)..(7): Xaa in position 7 is Ala, Gly or Ser
  Variant (8)..(8): Xaa in position 8 is Ala or Gly
  Variant (9)..(9): Xaa in position 9 is Ile or Met
  Variant (10)..(10): Xaa in position 10 is Ile, Leu or Val
  Variant (11)..(11): Xaa in position 11 is Gly or Leu
  Variant (13)..(13): Xaa in position 13 is Trp or Tyr
  Variant (15)..(15): Xaa in position 15 is Ile, Met or Val
  Variant (18)..(18): Xaa in position 18 is any amino acid
  Variant (19)..(19): Xaa in position 19 is Ala or Ser
  Variant (21)..(21): Xaa in position 21 is Lys or Arg
  Variant (22)..(22): Xaa in position 22 is any amino acid
  Variant (23)..(23): Xaa in position 23 is Asp or Gly
MAXXXXXXXXXQXPXGRXXDXXXR

SEQ ID NO: 4898 - protein, 29 aa, Artificial sequence
  protein pattern
  Variant (3)..(3): Xaa in position 3 is any or no amino acid
  Variant (6)..(6): Xaa in position 6 is any amino acid
  Variant (8)..(8): Xaa in position 8 is any amino acid
  Variant (9)..(9): Xaa in position 9 is any or no amino acid
  Variant (11)..(11): Xaa in position 11 is any or no amino acid
  Variant (13)..(13): Xaa in position 13 is Ala or Thr
  Variant (14)..(14): Xaa in position 14 is Ile or Leu
  Variant (15)..(15): Xaa in position 15 is Phe, Ile or Leu
  Variant (16)..(16): Xaa in position 16 is Ala, Asn or Thr
  Variant (17)..(17): Xaa in position 17 is Asp or Gly
  Variant (18)..(18): Xaa in position 18 is any amino acid
  Variant (19)..(19): Xaa in position 19 is Phe, Leu or Val
  Variant (21)..(23): Xaa in position 21 to 23 is any amino acid
  Variant (25)..(25): Xaa in position 25 is Phe or His
  Variant (26)..(26): Xaa in position 26 is any amino acid
  Variant (27)..(27): Xaa in position 27 is His or Arg
  Variant (28)..(28): Xaa in position 28 is Ala or Ser
SSXYFXGXXLXGXXXXXXXIXXXGXXXXY

SEQ ID NO: 4899 - protein, 27 aa, Artificial sequence
  protein pattern
  Variant (2)..(3): Xaa in position 2 to 3 is any amino acid
  Variant (6)..(6): Xaa in position 6 is Phe or Ile
  Variant (7)..(7): Xaa in position 7 is Gly or Ile
  Variant (10)..(10): Xaa in position 10 is Ala, Ile or Val
  Variant (11)..(11): Xaa in position 11 is any amino acid
  Variant (12)..(12): Xaa in position 12 is Ile or Leu
  Variant (13)..(13): Xaa in position 13 is Ala or Gly
  Variant (14)..(14): Xaa in position 14 is Ala or Ser
  Variant (15)..(15): Xaa in position 15 is Ile or Leu
  Variant (17)..(17): Xaa in position 17 is Gly or Thr
  Variant (19)..(19): Xaa in position 19 is Leu or Met
  Variant (22)..(22): Xaa in position 22 is Trp or Tyr
  Variant (24)..(24): Xaa in position 24 is any amino acid
  Variant (25)..(25): Xaa in position 25 is His or Arg
  Variant (26)..(26): Xaa in position 26 is any amino acid
GXXGCXXSGXXXXXXYXLXPLXLXXXG

SEQ ID NO: 4900 - protein, 20 aa, Artificial sequence
  protein pattern
  Variant (2)..(4): Xaa in position 2 to 4 is any amino acid
  Variant (5)..(6): Xaa in position 5 to 6 is any or no amino acid
  Variant (8)..(8): Xaa in position 8 is any amino acid
  Variant (9)..(10): Xaa in position 9 to 10 is any or no amino acid
  Variant (12)..(12): Xaa in position 12 is any amino acid
  Variant (13)..(13): Xaa in position 13 is Ser or Thr
  Variant (15)..(15): Xaa in position 15 is Ile or Val
  Variant (18)..(18): Xaa in position 18 is any amino acid
  Variant (20)..(20): Xaa in position 20 is Ala or Ser
LXXXXXAXXXLXXLXPLXLX

SEQ ID NO: 4901 - protein, 18 aa, Artificial sequence
  protein pattern
  Variant (2)..(5): Xaa in position 2 to 5 is any amino acid
  Variant (6)..(6): Xaa in position 6 is Ala, Cys or Gly
  Variant (7)..(7): Xaa in position 7 is Leu or Met
  Variant (8)..(9): Xaa in position 8 to 9 is any amino acid
  Variant (10)..(10): Xaa in position 10 is Ala or Leu
  Variant (11)..(11): Xaa in position 11 is Ala or Gly
  Variant (12)..(12): Xaa in position 12 is Ala, Ile or Val
  Variant (14)..(14): Xaa in position 14 is any amino acid
  Variant (17)..(17): Xaa in position 17 is any or no amino acid
LXXXXXXXXXXXLXLLXT

SEQ ID NO: 4902 - protein, 18 aa, Artificial sequence
  protein pattern
  Variant (2)..(2): Xaa in position 2 is any or no amino acid
  Variant (4)..(4): Xaa in position 4 is Ile or Leu
  Variant (5)..(5): Xaa in position 5 is Ile, Leu or Val
  Variant (6)..(6): Xaa in position 6 is Gly or Pro
  Variant (7)..(8): Xaa in position 7 to 8 is any amino acid
  Variant (9)..(9): Xaa in position 9 is Ala, Ser or Val
  Variant (10)..(10): Xaa in position 10 is any amino acid
  Variant (12)..(13): Xaa in position 12 to 13 is any amino acid
  Variant (14)..(16): Xaa in position 14 to 16 is any or no amino acid
VXVXXXXXXXLXXXXXAM

SEQ ID NO: 4903 - DNA, 228 bp, Escherichia coli
  CDS (1)..(228): transl_table=11
atgccaactcaagaagcgaaagctcatcacgtcggtgaatgggcatctctgcgcaatacgtcgccggaaatagccgaggccattttcgaagtcgccgggtacgacgaaaaaatggcggaaaagatttgggaagaaggtagtgatgaagtgttagtcaaagcctttgctaagaccgataaagattcgcttttttggggcgaacagaccatcgaacgtaaaaacgtttaa

SEQ ID NO: 4904 - protein, 75 aa, Escherichia coli
MPTQEAKAHHVGEWASLRNTSPEIAEAIFEVAGYDEKMAEKIWEEGSDEVLVKAFAKTDKDSLFWGEQTIERKNV

SEQ ID NO: 4905 - DNA, 228 bp, Salmonella enterica subsp. enterica serovar Typhi Ty2
  CDS (1)..(228): transl_table=11
atgccaactcaagaagcaaaagcgcaccgcgtcggcgaatgggcaagcctgcgtaatacgtcgccggaaattgccgaagccatttttgaagtcgctcactatgacgagaaactggcagaaaaaatatgggaagaaggtagcgatgaggtgctgatcaaagcctttgagaaaacggacaaagactcgctcttctggggcgaacaagtcatcgaacgtaagaacgtataa

SEQ ID NO: 4906 - protein, 75 aa, Salmonella enterica subsp. enterica serovar Typhi Ty2
MPTQEAKAHRVGEWASLRNTSPEIAEAIFEVAHYDEKLAEKIWEEGSDEVLIKAFEKTDKDSLFWGEQVIERKNV

SEQ ID NO: 4907 - DNA, 22 bp, Artificial sequence
  primer
atgccaactcaagaagcgaaag

SEQ ID NO: 4908 - DNA, 24 bp, Artificial sequence
  primer
ttaaacgtttttacgttcgatggt

SEQ ID NO: 4909 - DNA, 948 bp, Escherichia coli
  CDS (1)..(948): transl_table=11
atgcttgcggactggttcagtgagcaattctcaacgggcgtgttgatcgtgccttgtatgctgacgttggctattcctggagtgctgccgcgctttaaagcagaacagatgatgcccgccatcgcgcttattgtgtcggttattgcctcggtagtcattggcggagcggggagtctggcgttcccgctgcctgcattaatctggtgtgcagtgcgctatacgccgcaggtaacatgtctgttgacctttgtcaccggtgcggtggaaatcgtactggtggcaaattcggtgattgatatctcggtcggttcgccgttctccattccgcaaatgttctccgcacgtctcggtattgccacgatggcgatatgcccaattatggtttcttttagcgtggcagcgatcaattcgctaatgaagcaagttgcgctgcgagccgactttgattttctgactcaggtttactcacggtccggtctttatgaggcgctgaaaagtccatcgctgaaacagacacaacatctgactgtcatgctgcttgatatcgactatttcaaaagcattaacgataactatggacatgaatgtggcgataaagtgttaagcgtgtttgcccggcatattcagaagattgtcggtgataaggggctggtggcgcgaatgggcggcgaagaatttgctgttgcagtgccgtcggtgaatcctgtcgatggtctgctaatggcggaaaaaatccgtaaaggcgttgaactgcaaccattcacctggcaacaaaaaacgctttatctcacggtaagtattggcgtcggtagtggtcgcgcatcgtacctaacgctgaccgatgactttaataaattgatggtcgaagccgatacgtgtctgtatcgctcgaagaaagatgggcgcaaccgtaccagcactatgcgttacggtgaggaagttgtctaa

SEQ ID NO: 4910 - protein, 315 aa, Escherichia coli
MLADWFSEQFSTGVLIVPCMLTLAIPGVLPRFKAEQMMPAIALIVSVIASVVIGGAGSLAFPLPALIWCAVRYTPQVTCLLTFVTGAVEIVLVANSVIDISVGSPFSIPQMFSARLGIATMAICPIMVSFSVAAINSLMKQVALRADFDFLTQVYSRSGLYEALKSPSLKQTQHLTVMLLDIDYFKSINDNYGHECGDKVLSVFARHIQKIVGDKGLVARMGGEEFAVAVPSVNPVDGLLMAEKIRKGVELQPFTWQQKTLYLTVSIGVGSGRASYLTLTDDFNKLMVEADTCLYRSKKDGRNRTSTMRYGEEVV

SEQ ID NO: 4911 - DNA, 1425 bp, Klebsiella pneumoniae subsp. pneumoniae MGH 78578
  CDS (1)..(1425): transl_table=11
atgtcttcactgtcgattcggtcatttacgctgtttcgtgaagaacaacccgtgcgcgatgcattggtcttatttacgttaacgctactgctgcattttcttggcgctatgctgcgtctggtgcaggagctctctttcttctggccgctcaatgcagtgatggccgggatttttgcacgctatgtatggcttaaccgcagctatttttatgccgtctgttttgcggcaatgctggtctatgacggattaacctcgcgctggggaatgggctttgcctcattgctgattaacttttccaatattgtctttattgtgacgctggcgcagctggtgctgtgggataaacgtcgcgccgactccatgccgggcccgataaacgcgcttaatttattctgtttctgcctgttagccgccttactgtgcgcagcggtcggcgcgctggggtcggtggatgttgaacgcgccaccttcgttccccagctggcggactggtttagcgaacagttctcaacggcggtattaatcctgccctttattctgaccctgacgctgccttcggcattaagcggttttcgctttcgccagctgctgccggtgctggcgctggtcctgtcaattgcgcttggcgtggcggtaggcggcgcgggcagcattaccttcccgttaccggctttgatctggtgcgctgtacgctatccgctgccgctgacctgtctgctgacttttctcactggcatcggcgaaatactgctggtcgctaattcgttaattcacttttcgccagatgcgcgaatgcagccgtggcagctgttctccacccgcctcggaattgccgccatgctgattagcccggtgattgtcgcatccagtgtcgaagcgattaacacgctggtgaagcagctggccctgcgcgccgattttgactttcagacccgcgtctattctcgttccggactgagcgaagcgttgaagcgtcagacgctgccggcggataagctgctgacggtgatggtgctggatatcgatggcttcaaacgggtgaatgatgctctgggccatgaaggcggcgattgcgtgctgacccagtttgcccagcaggttcgacagctggtgggtgagcaggggatggtggcccgtatcggcggcgaagagtttgcggtggccgccgtcgtcgacagcgcccagcagggctatttgctggcggaaaagatccgtcacggggtggagtcgcagcctttcggcctgggccagaacccgatccacctgaccatcagtctgggactggagacgcgcgaggtaggccacgcccgcatcaccgagctgtttaaccagctgctgttggcggcggacgatgagatggtgaaagccaaacagagcggtcgtaaccaaatttgtatgccgacgctgaccgaaagcgcgccataa

SEQ ID NO: 4912 - protein, 474 aa, Klebsiella pneumoniae subsp. pneumoniae MGH 78578
MSSLSIRSFTLFREEQPVRDALVLFTLTLLLHFLGAMLRLVQELSFFWPLNAVMAGIFARYVWLNRSYFYAVCFAAMLVYDGLTSRWGMGFASLLINFSNIVFIVTLAQLVLWDKRRADSMPGPINALNLFCFCLLAALLCAAVGALGSVDVERATFVPQLADWFSEQFSTAVLILPFILTLTLPSALSGFRFRQLLPVLALVLSIALGVAVGGAGSITFPLPALIWCAVRYPLPLTCLLTFLTGIGEILLVANSLIHFSPDARMQPWQLFSTRLGIAAMLISPVIVASSVEAINTLVKQLALRADFDFQTRVYSRSGLSEALKRQTLPADKLLTVMVLDIDGFKRVNDALGHEGGDCVLTQFAQQVRQLVGEQGMVARIGGEEFAVAAVVDSAQQGYLLAEKIRHGVESQPFGLGQNPIHLTISLGLETREVGHARITELFNQLLLAADDEMVKAKQSGRNQICMPTLTESAP

SEQ ID NO: 4913 - DNA, 1203 bp, Agrobacterium tumefaciens str. C58
  CDS (1)..(1203): transl_table=11
ttgaaaatttatctccatattataataggttctctcaaaatttatttaccgtatgggcatattatgctgggtgaactcgaccttgcaacagtcatactgatgcaaaaatgttcttacatcgttgggctgttgagttttatctacctgaagatgagtaatcgcggtttgcccggccccgttcatcttgcggcgggtttcgcggcgatgacggtcggctctacgcttgccggttacggcgaatggaagatactttcgccggcgctgtgggagcttggcagcgttttgttcggtattgccggatatgcgctgatctggcttgggctgaagacgttgagcgacggacgctttgtcaatcgcaaaaccatcttgtttacctgtcttgtcgccctgctggcgattggcgttgcgctgcaggtggccggcaacaatacgtttcgcgcggcgctttttaatggctgtgcggctctggcctatcttggcggggcgggcgtgctttttgcccggtggcggaaagagccgcttctttcccggctggctctcggtgcgattacaggcgtttccggtctgatatcgctggcggtgatgaaaagcgtgcttttccctggttacgccagcatcaatctggtcactgcgtttttcttcattatcatgctcaacttcgccatctcgctctttgtgatgatgctggtagcggagcggtccgaacggaaattgctggttctggcgaataccgatccactgacgggcgtcaagaaccggcgtttcttcttccagaccatgcccgcagcccccgatcccgctgatgcggccatgttgcttgacattgaccacttcaagtcgatcaatgaccgtttcggccacgctgtcggcgacagcgtgctgcaggaagtggcaaggcgcatcagcggcagcatccgtggcggcgatgtgctggcgcgttacggcggcgaggaattcatcattttcctgccgggtgccggtgtggacaaggcttgcatgatcggcgagcgcattcgcgacgcggttgcgataaatgaggtcgattgcggcggtctgcgtgtcggggtgaccatcagcatcggcgttgccaccacaggcgatatgcgctgcgatctccagatgctcgccgaaaaggcggatcgagcgctttaccgggcaaagaccgaagggcgcaattgcgttcgcgaggcgctggccgcgtaa

SEQ ID NO: 4914 - protein, 400 aa, Agrobacterium tumefaciens str. C58
MKIYLHIIIGSLKIYLPYGHIMLGELDLATVILMQKCSYIVGLLSFIYLKMSNRGLPGPVHLAAGFAAMTVGSTLAGYGEWKILSPALWELGSVLFGIAGYALIWLGLKTLSDGRFVNRKTILFTCLVALLAIGVALQVAGNNTFRAALFNGCAALAYLGGAGVLFARWRKEPLLSRLALGAITGVSGLISLAVMKSVLFPGYASINLVTAFFFIIMLNFAISLFVMMLVAERSERKLLVLANTDPLTGVKNRRFFFQTMPAAPDPADAAMLLDIDHFKSINDRFGHAVGDSVLQEVARRISGSIRGGDVLARYGGEEFIIFLPGAGVDKACMIGERIRDAVAINEVDCGGLRVGVTISIGVATTGDMRCDLQMLAEKADRALYRAKTEGRNCVREALAA

SEQ ID NO: 4915 - DNA, 1281 bp, Sinorhizobium meliloti 1021
  CDS (1)..(1281): transl_table=11
atggctgaaacgcaagccgcactttattttagcacgacaggccgtttcgaaatgagctttctctccgccataccggtcatcgcacttcttgccatgctacccgttctcctttctctgcggccggttgccggtgttcgggagttctccgccagttgcgcactctcggcagcgtcggcaggcgccttgacggttgcggcggcgttgcaggcgccggtcgccgcaatgttcggctatgcgggtctcgccgtttccctgtttttcgtcctccagggcctccgccggttcctcgcattgtcgattccggcctcgctttgtctggtgctcgcgttctcgagcggcgtgctcggcttcatcatcgctctcggcggccacgacagcccggccgccggcatgatcgtcgttgcgggcgttgtcgcagctctacttctcgtccttggtctggccgcagccgaccgctggccgggcgaaaagccggcgatccaggtcgttgtcgtcggctccgccgccgtggttttcaccgcccttgcccatgccctcggcccatcggcgcacgtcttgccgggaccggcgggctcgcccgcttcgagcctgttcgatttcctgctcgtcaccatgcgggtgctgtgccttcccctcctcttcctggccatgatcctcacgatgcaggcccgggtcatcgccggattgagggccatgatcgcacgcgacggcttgaccggtgcgctgtcacgcgggacgctcatggaagagggcgagcggatcttcgccgagtgcgtggcacgccaggagccggctgccttcctgctgctcgacctcgatttcttcaaacaaatcaacgatcagtatgggcacgcctgcggcgacatggcgctcgcgcattttgccgataccgtctcggctttcctcgccggacggggcgtcctcggacggatcggtggcgaggaattcggcatcgtcctgccggaccacacggaagagcaggcaagggcgcttgcggaggatatctgccgcgtggtgcgtgagacgccggccggccgctcgcatcagcgcatccgtctgaccgtgagcatcgggatcgccgccgccattgcgggcgagacgattaccgacgtgatgatacgcgccgaccttgctctctacgactcaaaggcggatggtcgcgaccgttgctcggtagcaagggatcgccgcatcgacgccagcgcccgcgcccttgcggcagccgccgcgcaattgcgcgaagcccgtgccgcccggtcggaactgcgccactcggcgtga

SEQ ID NO: 4916 - protein, 426 aa, Sinorhizobium meliloti 1021
MAETQAALYFSTTGRFEMSFLSAIPVIALLAMLPVLLSLRPVAGVREFSASCALSAASAGALTVAAALQAPVAAMFGYAGLAVSLFFVLQGLRRFLALSIPASLCLVLAFSSGVLGFIIALGGHDSPAAGMIVVAGVVAALLLVLGLAAADRWPGEKPAIQVVVVGSAAVVFTALAHALGPSAHVLPGPAGSPASSLFDFLLVTMRVLCLPLLFLAMILTMQARVIAGLRAMIARDGLTGALSRGTLMEEGERIFAECVARQEPAAFLLLDLDFFKQINDQYGHACGDMALAHFADTVSAFLAGRGVLGRIGGEEFGIVLPDHTEEQARALAEDICRVVRETPAGRSHQRIRLTVSIGIAAAIAGETITDVMIRADLALYDSKADGRDRCSVARDRRIDASARALAAAAAQLREARAARSELRHSA

SEQ ID NO: 4917 - DNA, 1140 bp, Agrobacterium tumefaciens str. C58
  CDS (1)..(1140): transl_table=11
atgctgggtgaactcgaccttgcaacagtcatactgatgcaaaaatgttcttacatcgttgggctgttgagttttatctacctgaagatgagtaatcgcggtttgcccggccccgttcatcttgcggcgggtttcgcggcgatgacggtcggctctacgcttgccggttacggcgaatggaagatactttcgccggcgctgtgggagcttggcagcgttttgttcggtattgccggatatgcgctgatctggcttgggctgaagacgttgagcgacggacgctttgtcaatcgcaaaaccatcttgtttacctgtcttgtcgccctgctggcgattggcgttgcgctgcaggtggccggcaacaatacgtttcgcgcggcgctttttaatggctgtgcggctctggcctatcttggcggggcgggcgtgctttttgcccggtggcggaaagagccgcttctttcccggctggctctcggtgcgattacaggcgtttccggtctgatatcgctggcggtgatgaaaagcgtgcttttccctggttacgccagcatcaatctggtcactgcgtttttcttcattatcatgctcaacttcgccatctcgctctttgtgatgatgctggtagcggagcggtccgaacggaaattgctggttctggcgaataccgatccactgacgggcgtcaagaaccggcgtttcttcttccagaccatgcccgcagcccccgatcccgctgatgcggccatgttgcttgacattgaccacttcaagtcgatcaatgaccgtttcggccacgctgtcggcgacagcgtgctgcaggaagtggcaaggcgcatcagcggcagcatccgtggcggcgatgtgctggcgcgttacggcggcgaggaattcatcattttcctgccgggtgccggtgtggacaaggcttgcatgatcggcgagcgcattcgcgacgcggttgcgataaatgaggtcgattgcggcggtctgcgtgtcggggtgaccatcagcatcggcgttgccaccacaggcgatatgcgctgcgatctccagatgctcgccgaaaaggcggatcgagcgctttaccgggcaaagaccgaagggcgcaattgcgttcgcgaggcgctggccgcgtaa

SEQ ID NO: 4918 - protein, 379 aa, Agrobacterium tumefaciens str. C58
MLGELDLATVILMQKCSYIVGLLSFIYLKMSNRGLPGPVHLAAGFAAMTVGSTLAGYGEWKILSPALWELGSVLFGIAGYALIWLGLKTLSDGRFVNRKTILFTCLVALLAIGVALQVAGNNTFRAALFNGCAALAYLGGAGVLFARWRKEPLLSRLALGAITGVSGLISLAVMKSVLFPGYASINLVTAFFFIIMLNFAISLFVMMLVAERSERKLLVLANTDPLTGVKNRRFFFQTMPAAPDPADAAMLLDIDHFKSINDRFGHAVGDSVLQEVARRISGSIRGGDVLARYGGEEFIIFLPGAGVDKACMIGERIRDAVAINEVDCGGLRVGVTISIGVATTGDMRCDLQMLAEKADRALYRAKTEGRNCVREALAA

SEQ ID NO: 4919 - DNA, 948 bp, Shigella flexneri 2a str. 301
  CDS (1)..(948): transl_table=11
ttgcttgcggactggttcagtgagcaattctcaacgggcgtgttgatcgtgccttgtatgctgacgttggctattcctggagtgctgccgcgctttaaagcagaacagatgatgcccgccatcgcgtttattgtgtcggttattgcctcggtagtcattggcggagcggggagtctggcgttcccgctgcctgcattaatctggtgtgcagtgcgctatacgccgcaggtaacatgtctgttgacctttgtcaccggtgcggtggaaatcgtactggtggcaaattcggtgattgatatctcggtcggttcgccgttctccattccggaaatgttctccgcacgtctcggtattgccacgatggcgatatgcccaattatggtttcttttagcgtggcagcgatcaatttgctaatgaagcaagttgcgctgcgagccgactttgattttctgactcaggtttactcacggtccggtctttatgaggcgctgaaaagtccatcgctgaaacagacacaacatctgacggtcatgctgcttgatatcgactatttcaaaagcattaacgataactatggacatgaatgtggcgataaagtgttaagcgtgtttgcccggcatattcagaagattgtcggtgataaggggctggtggcgcgcatgggcggcgaagaatttgctgttgcagtgccgtcggtgaatcctgtcgatggtctgctaatggcggaaaaaatccgtaaaggcgttgaactgcaaccattcacctggcaacaaaaaacgctttatctcacggtaagtattggcgtcggtagtggtcgcgcatcgtaccgaacgctgaccgatgattttaataaattgatggtcgaagccgatacgtgtctgtatcgctcgaagaaagatgggcgcaaccgtaccagcactatgcgttacggtgaggaagttgtctga

SEQ ID NO: 4920 - protein, 315 aa, Shigella flexneri 2a str. 301
MLADWFSEQFSTGVLIVPCMLTLAIPGVLPRFKAEQMMPAIAFIVSVIASVVIGGAGSLAFPLPALIWCAVRYTPQVTCLLTFVTGAVEIVLVANSVIDISVGSPFSIPEMFSARLGIATMAICPIMVSFSVAAINLLMKQVALRADFDFLTQVYSRSGLYEALKSPSLKQTQHLTVMLLDIDYFKSINDNYGHECGDKVLSVFARHIQKIVGDKGLVARMGGEEFAVAVPSVNPVDGLLMAEKIRKGVELQPFTWQQKTLYLTVSIGVGSGRASYRTLTDDFNKLMVEADTCLYRSKKDGRNRTSTMRYGEEVV

SEQ ID NO: 4921 - DNA, 1209 bp, Pseudomonas putida KT2440
  CDS (1)..(1209): transl_table=11
atggtcggggccgacctgctgtgtggcagcgcctgggtaccggctctgtggttaaacctgtgcaatcttggcgtggtggtcaccctctggcagctgctgtcgcgcttgccacgcatgcaccggcgcatgcgcagcccgcacggcgtactcagcgtgttcgccgcctgcgccgccgctgccatggtggcggcgagcatggcagcggtaatggccgcaccctggttcgaacagtcgttgcgcgccacctggctagcctggttcagcgaacagttctcgaccggcgtgctggtgctgccggtgctgcttacagcgccctcggtgcgggccttggtgcgcggcggcgcgcagcccatccgcctggcgccgttgctggtactgctggcctcgctggcattcagcatcgcattcggtggccctggggccattgccttcccgattgccgcgttactgtggtgtgcctggacctattcaccgtttctggtttcattgctgacgctcacggccggcagtacgctgatcgtggctgtggcgcaaaacctcatgcacttcagcgtgccgcagagcgagcctggggttaccacgctgatgtcggcgcgcctgggcatcgccatgctggtgctcgggccgctggtggtggcctgcgtcagccaggccaaccgtagcctcatggcccgcctggcgcaccaggccaccgtcgaccacctcaccggtgtgctcacccgcagcgccttcacacgccgcgccaacgcgctgctggagagccgtcaacagcacgcccaggcgctgccgctgaccctgatgatgctggacatcgaccacttcaagtcgatcaacgatgcccacggccatgccgtcggtgaccaggtgctgcgccaattcgccagcaccctccaggaccagctgcacaacgatgagctgatcgcacgcctgggtggcgaagaattcgttgtcatcctgcccggacttgcgccagagcgggccaacttcaccgccgaacgcctgcgccgcgccatacaggacctgcacgtgacacaggccgaccagcgcctgcagattaccgtgagtatcggtgtggcaggctgcgacgcagacatgccggcccccagcctcgacgaactgctggccagtgccgaccaggcgctgtaccgggccaaggcccggggccgcaaccgcgtcgaacaggccgaagcacagcgcctggtgatctga

SEQ ID NO: 4922 - protein, 402 aa, Pseudomonas putida KT2440
MVGADLLCGSAWVPALWLNLCNLGVVVTLWQLLSRLPRMHRRMRSPHGVLSVFAACAAAAMVAASMAAVMAAPWFEQSLRATWLAWFSEQFSTGVLVLPVLLTAPSVRALVRGGAQPIRLAPLLVLLASLAFSIAFGGPGAIAFPIAALLWCAWTYSPFLVSLLTLTAGSTLIVAVAQNLMHFSVPQSEPGVTTLMSARLGIAMLVLGPLVVACVSQANRSLMARLAHQATVDHLTGVLTRSAFTRRANALLESRQQHAQALPLTLMMLDIDHFKSINDAHGHAVGDQVLRQFASTLQDQLHNDELIARLGGEEFVVILPGLAPERANFTAERLRRAIQDLHVTQADQRLQITVSIGVAGCDADMPAPSLDELLASADQALYRAKARGRNRVEQAEAQRLVI

SEQ ID NO: 4923 - DNA, 1419 bp, Escherichia coli CFT073
  CDS (1)..(1419): transl_table=11
atgcatgtacagcccatttcaactttccgtttgttccaggaaggtcatctgctacgtaatagcatcgctatttttgtgctaaccacgctgttctattttattggtgcagagttacggctggttcacgaactttctcttttctggccgctgaatggcgtaatggcgggggtgtttgcccgctatgtctggcttaatcgactgcattactatgcgatcagttatgtggcgatgctggtttatgatgccataaccaccgaatgggggctggtttcactggctatcaatttctccaatatgatgtttattgttaccgtcgccttactggtcgcgcgggataagcgtctgggaaaaaataagtatgagccagtaagtgccttacggctatttaattactgtctgcttgccgcattattatgcgctattgtcggggcgattggttcggtcagtattgatagtctggatttctggcctttgcttgccgactggtttagtgagcaattctcaacgggcgtgttgatcgtgccttgtatgctgacgttggcaattcctggagtactgccgcgctttaaagcagagcagatgatgcctgctatcgcgcttattgtgtcggttattgcctcggtagtcattggcggagcggggagtctggcgtttccgctccctgcattaatctggtgtgcagtgcgctatacgccgcaggtaacatgtctgttgacctttgtcaccggtgcggtggaagtcgtactggtggcaaattcggtgattgatatctcggtcggttcgccgttctctattccgcaaatgttctccgcacgtctcggtattgccacgatggcgatatgcccaattatggtttcctttagcgtggcagcgatcaattcgctaatgaagcaagttgcgctgcgagccgactttgattttctgactcaggtttactcacggtctggtctttatgaggcgctgaaaagtccatcgctgaaacagacacaacatctgacggtcatgctgcttgatatcgactatttcaaaagcattaacgataactatggacatgaatgtggcgataaagtgttaagcgtgtttgcccagcatattcagaagattgtcggtgataaggggctggtggcgcgaatgggcggcgaagaatttgctgttgcagtgccgtcggtgaatcctgtcgatggcctgctaatggcggaaaaaatccgtaaaggcgtagaacttcaaccgttcacctggcaacaaaaaacgctttatctcacggtaagtattggcgtcggtagtggttgcgcatcgtaccgaacgctgaccgatgactttaataaattgatggtcgaagccgatacgtgtctgtatcgctcgaagaaagatgggcgcaaccgtaccagcactatgcgttacggtgaggaagttgtctga

SEQ ID NO: 4924 - protein, 472 aa, Escherichia coli CFT073
MHVQPISTFRLFQEGHLLRNSIAIFVLTTLFYFIGAELRLVHELSLFWPLNGVMAGVFARYVWLNRLHYYAISYVAMLVYDAITTEWGLVSLAINFSNMMFIVTVALLVARDKRLGKNKYEPVSALRLFNYCLLAALLCAIVGAIGSVSIDSLDFWPLLADWFSEQFSTGVLIVPCMLTLAIPGVLPRFKAEQMMPAIALIVSVIASVVIGGAGSLAFPLPALIWCAVRYTPQVTCLLTFVTGAVEVVLVANSVIDISVGSPFSIPQMFSARLGIATMAICPIMVSFSVAAINSLMKQVALRADFDFLTQVYSRSGLYEALKSPSLKQTQHLTVMLLDIDYFKSINDNYGHECGDKVLSVFAQHIQKIVGDKGLVARMGGEEFAVAVPSVNPVDGLLMAEKIRKGVELQPFTWQQKTLYLTVSIGVGSGCASYRTLTDDFNKLMVEADTCLYRSKKDGRNRTSTMRYGEEVV

SEQ ID NO: 4925 - DNA, 1290 bp, Rhodopseudomonas palustris CGA009
  CDS (1)..(1290): transl_table=11
gtggctgtccgggaaatcccgcgagaatgccgctggaatcaatctactagcggcctctatcaacccttgcgagcaaatggcagataccaaaacgaaaggcttttcctagtaggttccccaagagcaaaatcgaccgggcggacgatgggaccaactgccgcgctgtcgggcaccctgcccgatcctcaaaccagggccgaagacgcgcgcacccttgccgtccgcggccggcggatgcgtcagcgccggcacatgctggacctgatcgccgccagcttcatgatcgatgccgcgatcctgctgatctacgtccaagccgggacaatcccgtcgatggtggtggtggcgttcgccgtctccggcgccctggtcggtggcatcctgttcgctctgtcggaatccggattcaacgatcgcttctccgatcactatctgacggtgccgatcgcgatcacgacgctggcattgatcatcgccttcacggtgtgggcgccgcagatcggggcgttcttcctgttcgaactgttcgtcgtgttcggcttcgcgtcgctgcgcgccgaccgccggcaggcgctgatcctatggtccgcgctgctgtgcgcgctggtgccgctgttcctgctcaccgatctgccgatcgggatgccgcacgacaattcgctcgaacgcctcgccaccctgctggcgctggtgctgacggtcggacgctgcaccttcatcggggtgttttcgaaagccttgcgcgactcgctttacaagcgcggcgtccagctgcgcgaagcctatcagcggatcgaggagctggccgaactcgacgaactgaccggggcctataaccgccgctgtatcatgcggcacctggacaatgagatcgaacgcgcggcgcggcactgcgagtcgctgtcgctggcgttgatcgacctcgactggttcaagcgcatcaatgatacctttggccatccgatcggtgacgaggtgctgcgcaccttcgccatcaccatcttcgccaacatccgcagcttcgaccggttcggccgctacggcggcgaagaattcctgctgctgctgccgaacacatccgacgacgaagcccgcctgatcctcgaccggcttcgcatgatcgtcgccgatctcgactggagcgcgttctcgcccagcatgatggtgacgttgtccgccggcgtcaccaccatgacgctccaagaatccaccgaagccgtgctggcacgggccgatcgcgcgctctacgaggccaagcacggcggacgaaaccgaatttcctgcgcctga

SEQ ID NO: 4926 - protein, 429 aa, Rhodopseudomonas palustris CGA009
MAVREIPRECRWNQSTSGLYQPLRANGRYQNERLFLVGSPRAKSTGRTMGPTAALSGTLPDPQTRAEDARTLAVRGRRMRQRRHMLDLIAASFMIDAAILLIYVQAGTIPSMVVVAFAVSGALVGGILFALSESGFNDRFSDHYLTVPIAITTLALIIAFTVWAPQIGAFFLFELFVVFGFASLRADRRQALILWSALLCALVPLFLLTDLPIGMPHDNSLERLATLLALVLTVGRCTFIGVFSKALRDSLYKRGVQLREAYQRIEELAELDELTGAYNRRCIMRHLDNEIERAARHCESLSLALIDLDWFKRINDTFGHPIGDEVLRTFAITIFANIRSFDRFGRYGGEEFLLLLPNTSDDEARLILDRLRMIVADLDWSAFSPSMMVTLSAGVTTMTLQESTEAVLARADRALYEAKHGGRNRISCA

SEQ ID NO: 4927 - DNA, 1470 bp, Erwinia carotovora subsp. atroseptica SCRI1043
  CDS (1)..(1470): transl_table=11
atgaataacgatttgacgttgaaaactataaaattcatgccgcttctgtttctgaccaccctaatagtgagctgtctgggatttcggtttcgagtgctggatgaactgtcgctgttttggcccgctaatatgctggttttttgtctcatgattagtttcagggccagaaaagggacgataaaaggtaaaacattctcgatcggtatgggttttttagtgggctatgcggcgatgctgtcggcagcgttactgatggataataactcgccattaaaaaccaaggtactgttatgtttgtgcaatattatctttgtggtggcggcctggtgcgccttttgcctgatgtgccggtttaccggaaagtggtcgacatttgaaaaattcagcaagtattacgtctacattattttcgcttcgacgtttgtaggcgcgttctcatcaggtgtggcttatggattctatgcgtatgtctacgatgttgggaatcactatgatgaatttatggactggttcagtgaacaactgggaactggcattattctcgcgttctttttcctgcggggtaaagacatcctacgggcgttacggaatattccgctctgccctaagcacatcaaagaaaatgtttttccctttctggtcttcattattttcttattggttagcctgttttttctggacgccagtcttattacactgtccgttattccacttacgctgtgcgcgttcaattactctttcccgattatgtcgctactctgtgcaattacgggcgtaatactgaattatctctatattaatcaggtcggtatactcatagattcaaattccgaagcgtacattaattcgtttctcaccacggcacgactgaatattgcgatgctcattatggcgatgttaagcgtctcgcattttgtttcgatgaatcggcgactgattaaaatcatcgaaagtaacagcctgaaggatgcacttacgaataccttcaatcgtcgcgcttttctcagtatgttgaacgtgagacagggcgtgctgatgaataagagaaagcgtcaaataacgctgctatttctggatatcgattattttaagcaggtcaacgatacctacggccatgcctgcggtgatgaattgatcgccagctttgcccgtatgctgagcgccaatattcgaccgagcgacattctttgccgctggggcggggaagagttcattattgcggcttacgacctgacggatgagcagtctgaagccatggctgaagcgctgcggcgtcttacggaatccaccccgcttatgctgtccgatggtcgggaaatttactttactgtcagcattggcgttgccattttttcccagtatgaaggcggcaatatttacgatctcatcgggctggcggacgagcaactctataaagcgaaggctcagggacgtaattgcgtttgcatgcgcttggccgagggcgtctga

SEQ ID NO: 4928 - protein, 489 aa, Erwinia carotovora subsp. atroseptica SCRI1043
MNNDLTLKTIKFMPLLFLTTLIVSCLGFRFRVLDELSLFWPANMLVFCLMISFRARKGTIKGKTFSIGMGFLVGYAAMLSAALLMDNNSPLKTKVLLCLCNIIFVVAAWCAFCLMCRFTGKWSTFEKFSKYYVYIIFASTFVGAFSSGVAYGFYAYVYDVGNHYDEFMDWFSEQLGTGIILAFFFLRGKDILRALRNIPLCPKHIKENVFPFLVFIIFLLVSLFFLDASLITLSVIPLTLCAFNYSFPIMSLLCAITGVILNYLYINQVGILIDSNSEAYINSFLTTARLNIAMLIMAMLSVSHFVSMNRRLIKIIESNSLKDALTNTFNRRAFLSMLNVRQGVLMNKRKRQITLLFLDIDYFKQVNDTYGHACGDELIASFARMLSANIRPSDILCRWGGEEFIIAAYDLTDEQSEAMAEALRRLTESTPLMLSDGREIYFTVSIGVAIFSQYEGGNIYDLIGLADEQLYKAKAQGRNCVCMRLAEGV

SEQ ID NO: 4929 - DNA, 1083 bp, Rhodospirillum rubrum ATCC 11170
  CDS (1)..(1083): transl_table=11
gtgagccctcctcggctcgaggatcccatcacgaaatcagaggccggcgtttcccccatgctttccccccatgaggccagggaccgccatcgccacgatgtcatcactcgcagcctccttgtcggcgccttgctctgcgcgatcttcgcgcctttcgatttctttctcaccggctattgggtcgacgcgacggtcgaggcgctgggagcggcgacgctgcttgcgctgggggtctttctgcgccggggcggcgatcggctggtcgccgccctgatcggccatatcatcggcggggcggtgattctgaccgtggtgttgggggggaaggcccaagacgcggttttttcctgggccgtgctgtttccggtgcttcccttcttcgttctcggccaacggctggggctgttggtctccatcgtgttcgcgaccacggcgacggtcggcgtcaccatcctggccgtccttgacggagcgcaaggcttctcgtggatcgcgcccttcaatctggccggtgccctggccggctgcacggtgctggcttatttctatgaaggaacccgcgccaaagcggcgcggcagcttgaaaccctggcgaaatccgatccgctgaccggtcttgccaaccgccggggcctgcttgacgccttcggcggcgccgttctgacgcgctcccgggcgccgcaccggctttcgctgctggtccttgatctcgatcatttcaaaagcatcaatgaccgctacggccacgaggccggcgatggggtgctttgtcatgtggcgcatgtgatcaaggggatgatacgcgccaacgacctgatcgcacgcatcggcggcgaggaattcgcccttttgctgcccgatacggatttggccggggcccgcgaggtggccgaaaagatccgcaaggccatcgaaagcaccgccctgatcggccctggcggctccttgtccgtcaccgttagcatcggcgtcgccgaactcgatccccaatacccggacttcgccgcgcttttctcttccgccgaccaccggctgtatcaggccaagaaggccggccgcaatcgggtgagcgccgccacctga

SEQ ID NO: 4930 - protein, 360 aa, Rhodospirillum rubrum ATCC 11170
MSPPRLEDPITKSEAGVSPMLSPHEARDRHRHDVITRSLLVGALLCAIFAPFDFFLTGYWVDATVEALGAATLLALGVFLRRGGDRLVAALIGHIIGGAVILTVVLGGKAQDAVFSWAVLFPVLPFFVLGQRLGLLVSIVFATTATVGVTILAVLDGAQGFSWIAPFNLAGALAGCTVLAYFYEGTRAKAARQLETLAKSDPLTGLANRRGLLDAFGGAVLTRSRAPHRLSLLVLDLDHFKSINDRYGHEAGDGVLCHVAHVIKGMIRANDLIARIGGEEFALLLPDTDLAGAREVAEKIRKAIESTALIGPGGSLSVTVSIGVAELDPQYPDFAALFSSADHRLYQAKKAGRNRVSAAT

SEQ ID NO: 4931 - DNA, 1812 bp, Saccharophagus degradans 2-40
  CDS (1)..(1812): transl_table=11
atggctaaaatacccactcgtaccgcgtctactctattgctagtggtgctcgcgattataatctcatttgaagtacacgctcagccgacagcaacagcaagcagccttcgcacagaatctattaaagttgacctaaaccaagaatttgagttcctcgagctagataacaatttcaagctgtacgaagatgtttctgccagcgccacgatagacgatgtagcgcaagtgtttgaagatgaagccaccactcagttttcggttggcgacaccaacatagggtattcgagctctgcttggtgggtaaaactaagctttcacaacccgcagtcggcacctaaagaaattattctacgacaagcttacccccttattgataaccttcaactctggacaagaagctacgagagccattggagcgtaaagcaatatggcgataaatttccttttagccacagagaaatttaccaccgcgaattcctgtttccactaatcatccccgcaaggtccacaaaagaatactttttacgctacgaatcagaaggctcactcgacatagcgttaagcatacacgagccgcaacacttacttagttttgtgggcactcagcaacttatttacgggttgtattacggtggctttatggtgcttgtgctctataacctgtttatttttatagcagtgcgagataaagcctttttgtactaccttctatatatattcttttacgggctctatatgggcgcacataatggcctaacgtttcaatatttctggcctaatcacccacaaataggtaacgagggcctgcttgttaccctctcgctgtcgctggtgtttgcgctgcaattctcaacagatattttaaatattaaagaattttctaagctgcttaaccgaatagccaaatgcctaatgatagcttgcgttgtagcaatacccgccgtacttacaatgccctatgcttttatggcacctgttatgacagtgctaaccctaaccataatgccgctattttttgttatgggcgtattacgattagcatcgggctaccgccctgctcgctattttatgctcgcatggaccgcactcatctttagcgtaattgtttatgtacttaaagtgtttggcgtattaccaagaacattctttaccgaaaacggtttccaaataggctcaattattgaaatggtgttgctatcactcgcattgggtagccgtatgacagaacttaaacaacaaagccacaccgacgccctaacagaaataggtaatcgacgccgattcgacgatgtattcccagttgaatttgagcgagcgcagcgcaacaaacaaccgctggcactgcttatgatagatatagattacttcaaaaagcttaatgacacatttggccacgatgctggtgaccaagcattgcgtgcagtagctacaaccattaaaacccttactcgcaaaccaatgttaccctgccgttttggcggtgaagaatttgctgtaattttgccgcgcaccgatagcgcggctgcaaaaatagtcgcagaacgcataaggcaaaccatcgccgaaaaacctatggctaaacgagaagttactgtgagtgtgggtgtggcatcaacggacatggggtatttcacatcatcacgagccattatgaacgccgccgatgaatgcctttaccttgcgaaagaaatgggtagaaatagagtgtgtttgtttagcgaggcaccacaaaagcaggcgccaatcgctgcatctaaaacaccgctgctggaaaacactacggagggcaacgagcctaacgccgctgtttaa

SEQ ID NO: 4932 - protein, 603 aa, Saccharophagus degradans 2-40
MAKIPTRTASTLLLVVLAIIISFEVHAQPTATASSLRTESIKVDLNQEFEFLELDNNFKLYEDVSASATIDDVAQVFEDEATTQFSVGDTNIGYSSSAWWVKLSFHNPQSAPKEIILRQAYPLIDNLQLWTRSYESHWSVKQYGDKFPFSHREIYHREFLFPLIIPARSTKEYFLRYESEGSLDIALSIHEPQHLLSFVGTQQLIYGLYYGGFMVLVLYNLFIFIAVRDKAFLYYLLYIFFYGLYMGAHNGLTFQYFWPNHPQIGNEGLLVTLSLSLVFALQFSTDILNIKEFSKLLNRIAKCLMIACVVAIPAVLTMPYAFMAPVMTVLTLTIMPLFFVMGVLRLASGYRPARYFMLAWTALIFSVIVYVLKVFGVLPRTFFTENGFQIGSIIEMVLLSLALGSRMTELKQQSHTDALTEIGNRRRFDDVFPVEFERAQRNKQPLALLMIDIDYFKKLNDTFGHDAGDQALRAVATTIKTLTRKPMLPCRFGGEEFAVILPRTDSAAAKIVAERIRQTIAEKPMAKREVTVSVGVASTDMGYFTSSRAIMNAADECLYLAKEMGRNRVCLFSEAPQKQAPIAASKTPLLENTTEGNEPNAAV

SEQ ID NO: 4933 - DNA, 1143 bp, Shewanella sp. ANA-3
  CDS (1)..(1143): transl_table=11
atgatgataaatagtgacaattcaactttattaacatttattgaaatcataaaatttgaggcaagtgaaaaatatttgataaaaaaatattttgattatcgtatttgtactacagcgatactgttattactaatacccttaggatttgcagaaggcttatttgaccatataaccacacctgaattgaatggtgagctactagaacttagattatatatgttttttttgattatccctgcgattttaacatttaaggcaaagagtgttaaaatcgcaacagcaactattattgtgactgtgatcttcatatcttttctttcaataaaaatggctgagattttaggtgaagaggctatttatacagttactaccgtggctatttaccctttccttatattcttcattttaattggactttcaatatacatccaaattactgccctattttctgcttttttgtttgttatacattacaagttagatgcagctacgaatatggatctgcaaaacatttatttccaaatagcatttctttatagtcttgccgcattgttagtaatgctaattttctcttggagttattacaatcgttattgccttgaactggctctagaaaaggggtcaagaactgatccattaacaggtgtagctaatcgaagacattttgatagtttgcttaaatccgaggtgaatcgaaactctagatttggaagcgcttgtgctctcattatactagatatagatttttttaagcgcattaatgatacatacggacacccaactggagatagtgttatttgttcccttgcgaatttctgcgtaaccctctcccgggaaacagatctggtggctcgactaggtggagaagaatttgcaataattctccccgatacaaacattagtagtgcaaagaatctaggagaacgaatcaggttacatgttgagaaccaatctttaataagtgaaacaggagagaaagtaatatggacaattagcttggggatctccgccttacaagaacacaaaattactaaaaataataatgagtttattgctgagcaattaattcagcatgcagatacagctctttacgaggctaaaaaaggcggacgtaatagaactgttttatatgacagtgaataa

SEQ ID NO: 4934 - protein, 380 aa, Shewanella sp. ANA-3
MMINSDNSTLLTFIEIIKFEASEKYLIKKYFDYRICTTAILLLLIPLGFAEGLFDHITTPELNGELLELRLYMFFLIIPAILTFKAKSVKIATATIIVTVIFISFLSIKMAEILGEEAIYTVTTVAIYPFLIFFILIGLSIYIQITALFSAFLFVIHYKLDAATNMDLQNIYFQIAFLYSLAALLVMLIFSWSYYNRYCLELALEKGSRTDPLTGVANRRHFDSLLKSEVNRNSRFGSACALIILDIDFFKRINDTYGHPTGDSVICSLANFCVTLSRETDLVARLGGEEFAIILPDTNISSAKNLGERIRLHVENQSLISETGEKVIWTISLGISALQEHKITKNNNEFIAEQLIQHADTALYEAKKGGRNRTVLYDSE

SEQ ID NO: 4935 - DNA, 1074 bp, Candidatus Desulfococcus oleovorans Hxd3
  CDS (1)..(1074): transl_table=11
atgatcagcgttttccaaaaaggtgataccaggcaggcattgcgaatacgccggacgttgatggctgttgccagttatctgttcatcggtgcgggatgttacctgggtgttcatttaggatatgcccgggatctggaactcagcgttattttgatcatcacgacgggggtgtcgggtatctacctcatcatactgacgatgatgtataaaggcattaatgaacggttccgtgaccccagcctcacactgttccagattttatgcggcattatgtttatcacacttattgcctactacatggtcgaccggatacgcgggaccgcctcggttctttatatcctggcattcatgttcggcaccttccggctccggctgaaggatttgctggtacttacgggcataaccggcgggctttatgccggggccatggcgttgctgcattcttcggatcccggggcggttgatccccagctggaggtcatgcggtgggtcatattgatgatggccctggtctgggtttcctatatggccaactacatctccaagctccggcggcacatcacccgtcttgccactcatgacgccctgaccggggtgttgagcagaagagagattttcgaggtgctgggcagggaaaaagccttttcagaccgggcgggtaccccgttttcgctgtgcatgcttgacctggacgattttaagcagatgaatgacacttacggtcatcaggccggcgatgcggtgctccagtcctttgcccgggccttgaaagacaatacacgggccacggattatgtgggacggtatggtggggaggagtttatggtggtgttttccaacttccagtgcctggacagcagggcaagtggtgtccaacggctgctggccgccacacggaatatttgcctgccggatatttccccggatttgagaatcaccacatcaatcggtattgccgcctaccagccgggcgaatccccggatgcgctgcttgcaagggcggatgccgcgctttatgaagccaaggaaaacggcaaggaccgggccgttttcaaagagccggggaccgattaa

SEQ ID NO: 4936 - protein, 357 aa, Candidatus Desulfococcus oleovorans Hxd3
MISVFQKGDTRQALRIRRTLMAVASYLFIGAGCYLGVHLGYARDLELSVILIITTGVSGIYLIILTMMYKGINERFRDPSLTLFQILCGIMFITLIAYYMVDRIRGTASVLYILAFMFGTFRLRLKDLLVLTGITGGLYAGAMALLHSSDPGAVDPQLEVMRWVILMMALVWVSYMANYISKLRRHITRLATHDALTGVLSRREIFEVLGREKAFSDRAGTPFSLCMLDLDDFKQMNDTYGHQAGDAVLQSFARALKDNTRATDYVGRYGGEEFMVVFSNFQCLDSRASGVQRLLAATRNICLPDISPDLRITTSIGIAAYQPGESPDALLARADAALYEAKENGKDRAVFKEPGTD

SEQ ID NO: 4937 - DNA, 948 bp, Escherichia coli B
  CDS (1)..(948): transl_table=11
ttgcttgcggactggttcagtgagcaattctcaacgggcgtgttgatcgtgccttgtatgctgacgttggctattcctggagtgctgccgcgctttaaagcagaacagatgatgcccgccatcgcgcttattgtgtcggttattgcctcggtagtcattggcggagcggggagtctggcgttcccgctgcctgcattaatctggtgtgcagtgcgctatacgccgcaggtaacatgtctgttgacctttgtcaccggtgcggtggaaatcgtactggtggcaaattcggtgattgatatctcggtcggttcgccgttctccattccgcaaatgttctccgcacgtctcggtattgccacgatggcgatatgcccaattatggtttcttttagcgtggcagcgatcaattcgctaatgaagcaagttgcgctgcgagccgactttgattttctgactcaggtttactcacggtccggtctttatgaggcgctgaaaagtccatcgctgaaacagacacaacatctgactgtcatgctgcttgatatcgactatttcaaaagcattaacgataactatggacatgaatgtggcgataaagtgttaagcgtgtttgcccggcatattcagaagattgtcggtgataaggggctggtggcgcgaatgggcggcgaagaatttgctgttgcagtgccgtcggtgaatcatgtcgatggtctgctaatggcggaaaaaatccgtaaaggcgttgaactgcaaccattcacctggcaacaaaaaacgctttatctcacggtaagtattggcgtcggtagtggtcgcgcatcgtaccgaacgctgaccgatgactttaataaattgatggtcgaagccgatacgtgtctgtatcgctcgaagaaagatgggcgcaaccgtaccagcactatgcgttacggtgaggaagttgtctga

SEQ ID NO: 4938 - protein, 315 aa, Escherichia coli B
MLADWFSEQFSTGVLIVPCMLTLAIPGVLPRFKAEQMMPAIALIVSVIASVVIGGAGSLAFPLPALIWCAVRYTPQVTCLLTFVTGAVEIVLVANSVIDISVGSPFSIPQMFSARLGIATMAICPIMVSFSVAAINSLMKQVALRADFDFLTQVYSRSGLYEALKSPSLKQTQHLTVMLLDIDYFKSINDNYGHECGDKVLSVFARHIQKIVGDKGLVARMGGEEFAVAVPSVNHVDGLLMAEKIRKGVELQPFTWQQKTLYLTVSIGVGSGRASYRTLTDDFNKLMVEADTCLYRSKKDGRNRTSTMRYGEEVV

SEQ ID NO: 4939 - DNA, 1167 bp, Pseudomonas putida GB-1
  CDS (1)..(1167): transl_table=11
atggcgctagatccacccacgatgttgaccatttcggttgccttggctgctgccgctgccttgtacctggcaattgaatggcgcagtgtccgcgaaacctctctgctgttctggagcgccggtttcgccaccattactgtcggttgcatcctggctttgctgcgcgggatcggtttgttgttcatcggcatctggttcgccaatggcttgctggtggtcgcgcacggtttttttctgatgggcgtgctgcgatttacccaggagcgcttgtcgcgtgcctggctgatgatcgtggtggtctggttcgccttgctgctgttgcctgtggggccgcagtggtcgaaggtgatgctgatggtcaactcgttgctggtggcggcgttgacgctcaaggccagtttcctgttgcggccgcatggcagatcgctgagtgttggcgcggtgcagttgcgctatgtgctgctgattcatggggcattctatgtagccaaggcgatcattgcgattacgccgggtacgttgattgacctggccacctttggcgggctgatcattcaggtttccctggtcgagggggcgatggcgatcatgctgattgccttgtcgatgacgggaaccgtgcgttaccggcgtgaggaacggattgcccggctggcggcccgtgatccgctgaccgcgctgtacaaccggcgagcgctggaggtgcgggctgggcatttcttcaaggacgtgagccctgcgcaacctggggcgttactgctgatcgacatcgacaatttcaagctggtcaacgacctgcacgggcatatagccggggaccgcttgctgattgccttgagcgagatgattcgcacggcgctgcccgagcgctcgctggcggcgcggttggggggcgatgagtttgtcatcttgctgagtggggcgagtagtgaacgggtcatggagctgggtgggatgctgcgtgagcagttccagcagtacgcctgcaagaccgtgccaacgccgcaggcggttaccttgagcatcggtgccaacctgttcgaccagccaccggcgagcctggcggcgttgatcgagcagggggatgtggcgctgtaccagtccaagcgtggagggcgcgacagcattcggtttgtcgagcggcccatggcagacattagccactag

SEQ ID NO: 4940 - protein, 388 aa, Pseudomonas putida GB-1
MALDPPTMLTISVALAAAAALYLAIEWRSVRETSLLFWSAGFATITVGCILALLRGIGLLFIGIWFANGLLVVAHGFFLMGVLRFTQERLSRAWLMIVVVWFALLLLPVGPQWSKVMLMVNSLLVAALTLKASFLLRPHGRSLSVGAVQLRYVLLIHGAFYVAKAIIAITPGTLIDLATFGGLIIQVSLVEGAMAIMLIALSMTGTVRYRREERIARLAARDPLTALYNRRALEVRAGHFFKDVSPAQPGALLLIDIDNFKLVNDLHGHIAGDRLLIALSEMIRTALPERSLAARLGGDEFVILLSGASSERVMELGGMLREQFQQYACKTVPTPQAVTLSIGANLFDQPPASLAALIEQGDVALYQSKRGGRDSIRFVERPMADISH

SEQ ID NO: 4941 - DNA, 1410 bp, Pseudomonas putida GB-1
  CDS (1)..(1410): transl_table=11
atggtttttccagcccaatcgcgcttgatgccttatgtctttctgctttgcctgacctttgcccttaccctgggcggcatcctggcacgcccgatcgaatcgctgtcgctgttctggccggtgaatgcggtactggccggcgtactgctgcgctacccccgccaagccacgtttaccggcttcagcctggtgtggctggccatggtcggcgccgacttgctgtgcggcagtgcctgggtgccggccctgtggttcaacttgtgcaatcttggcgtggtggtcaccctctggcagttgctttctcgcttgccacggctgcatcggcgcatgcgcaccccacacggcgtgctcagcgtgttcgccgcctgcgccgccgccgccatggtggcagccagcatggcagcggtaatggctgccccctggttcgaacagtcgttgcgtgccacctggctcgcctggttcagcgaacaattctcgaccagcgtgctggtgctgccggtaatgcttacagcgccctcgctgcgtgccctggtgcgtggcggtgcacagcccatccgtctggcaccgttgctggtgctgttggcctcgctggcgttcagcatcgcgtttggcgggcctggggccattgccttcccgattgccgcgttgctgtggtgtgcctggacctattcaccgttcctggtttcactactgacgctcacggccgggagcacactgatcgtagcggtggcacaaaacctcatgcacttcagcgtgccgcagagcgaaccgggggtcaccacgctgatgtcggctcgccttggcatcgccatgctggtgctagggccgctggtggtggcctgcgtcagccaggccaaccgcagcctcatggcccgcctggcgcgccaggccaccatcgatcacctcaccggcgtgctcacccgcagcgctttcacccgtcgtgccaacgcgctgctcgacagccgccagcagcacgcccaggcgctcccgctgaccctgatgatgctggacatcgaccatttcaagtcggtcaacgatgctcatggccatgcggtcggtgaccaggtgctgcgccagttcgccggcaccctgcaggatcagttgcacaacgacgaactgttcgcgcgcctgggcggtgaggaattcgcggtcatcatccccggccttgcgccagagcgggccaagttcaccgccgaacgcctgcgccgcgccgtgcaggacctgcatgtaatgcaggccgaccaacgcttgcagattaccgtgagtatcggcctggctggctgcgatgccgacatgccagcccctagcctggacgaactgctggcgagtgccgatcaggcgctgtaccgggccaaggcccacggccgcaaccgcgtcgaacaggccgaagcacagcgccaggtggtctga

SEQ ID NO: 4942 - protein, 469 aa, Pseudomonas putida GB-1
MVFPAQSRLMPYVFLLCLTFALTLGGILARPIESLSLFWPVNAVLAGVLLRYPRQATFTGFSLVWLAMVGADLLCGSAWVPALWFNLCNLGVVVTLWQLLSRLPRLHRRMRTPHGVLSVFAACAAAAMVAASMAAVMAAPWFEQSLRATWLAWFSEQFSTSVLVLPVMLTAPSLRALVRGGAQPIRLAPLLVLLASLAFSIAFGGPGAIAFPIAALLWCAWTYSPFLVSLLTLTAGSTLIVAVAQNLMHFSVPQSEPGVTTLMSARLGIAMLVLGPLVVACVSQANRSLMARLARQATIDHLTGVLTRSAFTRRANALLDSRQQHAQALPLTLMMLDIDHFKSVNDAHGHAVGDQVLRQFAGTLQDQLHNDELFARLGGEEFAVIIPGLAPERAKFTAERLRRAVQDLHVMQADQRLQITVSIGLAGCDADMPAPSLDELLASADQALYRAKAHGRNRVEQAEAQRQVV

SEQ ID NO: 4943 - DNA, 1161 bp, Pseudomonas putida GB-1
  CDS (1)..(1161): transl_table=11
atgatcgcccacacccccacgttgttcgccgccgttgccctggtggcaaccatcctggccttctgcttgctgctggtcgggcgcagcaaccgccgcgacaacctgatgctgactggctgcgggctgctggtgcatgccttggcttatgtctgctacaccgtctatgcccaagcccctttgtggctcagctatggcgtgggcaacagcctgctgtcgctggccctggcgttctacacggccagcttgttccgggtgcgtgagcaggtagtgccctggcgtgtcatcttcgtcataccggcctgcatgctggtggggctgatgctgctgctcgatacgctggaaccgcgcatgctgctggcgaccctggtgctgatgctgcagtgcgcgatgatcttgtattgggcgtggcgttatgccgagcggccgggcagggcccatctgttgctggagattggcgcgttgatcagcctggtgggcctgggtatgcgtgtggtggcggtggccaatggcacggcggtggaaatgcgctatgacaccagcaacctcaaacagagcatttctgtggccatcggcaccgccacggtgatgatgtactcgatcggcttggtgctcctggccaaggagcgtagcgaatcgcgcctgcagcacctcgctctgcgtgatgtgctgaccggtacctacaatcgccgggcgatcctcgaacgcttcggcgtcgaactggaccgtgcacgcgatcagcagggcagtctggcggtggcgatgatcgacattgaccatttcaaacgcatcaatgacctgtatgggcatctggctggcgatgaggtgttatgccactgcgtgcgccagttgcagcagcgcctgcgccagggtgacagccttggtcgttacggcggcgaagagtttctgttgctgttgcccggcaccgaccgcaccggtgcaatggccgccctgcaagggctgcgcgaggccattgcgcgcagcccggcgcgttttgccggtgaccagatcgaactgcgtttcagcgtaggcctgtggtgcggcgtgccgtgcccaggggacagtactgccagcttgctggcccaggccgatgcggcgctgtaccaggccaaggccgctgggcgcaacacggtgcacatggcggcattggtcgaggcgagttga

SEQ ID NO: 4944 - protein, 386 aa, Pseudomonas putida GB-1
MIAHTPTLFAAVALVATILAFCLLLVGRSNRRDNLMLTGCGLLVHALAYVCYTVYAQAPLWLSYGVGNSLLSLALAFYTASLFRVREQVVPWRVIFVIPACMLVGLMLLLDTLEPRMLLATLVLMLQCAMILYWAWRYAERPGRAHLLLEIGALISLVGLGMRVVAVANGTAVEMRYDTSNLKQSISVAIGTATVMMYSIGLVLLAKERSESRLQHLALRDVLTGTYNRRAILERFGVELDRARDQQGSLAVAMIDIDHFKRINDLYGHLAGDEVLCHCVRQLQQRLRQGDSLGRYGGEEFLLLLPGTDRTGAMAALQGLREAIARSPARFAGDQIELRFSVGLWCGVPCPGDSTASLLAQADAALYQAKAAGRNTVHMAALVEAS

SEQ ID NO: 4945 - DNA, 984 bp, Bacillus sp. SG-1
  CDS (1)..(984): transl_table=11
atggggatttcaggcgggttattcagcaatatcctgatgcagtacagtatgcaaatcggaaacaccattatagatctaaggcatgtgcctgtaatattagttgcctattatggcgggagcatcccagctttgattgccatggtaatggtcatcatcgggcgtttcatcattggcattaatacttcttcctatcttgcggtgattctgatttgtaccattacggctgcagccatctatatttcaaaaagaaaactaccaaaaaagacaaagatcctactgatcctgactttttcaaacgttatcttttctgtgctggtttcttatttgttaaaagacccaagcacacttttgttccttcttccgacctattggatcatctcctatagtgcaggctttatctctttttatattgttgagtacctgcgccggagccaggccttatttgaccgttacaagtctgagtctgcaacagatggacttacggggctgaataacgtaaggaagtttgatgaaatctttaatgaccttctaagaacaattccaaataataacgagaagctctcacttttatatctggatattgattttttcaaaaaggttaatgatacatacggacatcaaaatggagatattattttgaaagatttaggaaagatcttgcaagaatctgttcgctcctttgatattgtcagccgcaatggcggagaggaattcaccgtcatcttactggattgccctgtcgatcgggcgaaagaaatcagtgaaaagatcagaaaagcagtagaagatcatgaattcacgttaacagacggacaaatcatccacattaccatctcaatcggcattgcatgttttaacgatacaactgatgatgtaacctcattgattgaagatgcagacagtgctttatacatggctaaaaaaaccggcagaaacagagtctgtgtctctgagaatataaaagcagtaaagataacatattaa

SEQ ID NO: 4946 - protein, 327 aa, Bacillus sp. SG-1
MGISGGLFSNILMQYSMQIGNTIIDLRHVPVILVAYYGGSIPALIAMVMVIIGRFIIGINTSSYLAVILICTITAAAIYISKRKLPKKTKILLILTFSNVIFSVLVSYLLKDPSTLLFLLPTYWIISYSAGFISFYIVEYLRRSQALFDRYKSESATDGLTGLNNVRKFDEIFNDLLRTIPNNNEKLSLLYLDIDFFKKVNDTYGHQNGDIILKDLGKILQESVRSFDIVSRNGGEEFTVILLDCPVDRAKEISEKIRKAVEDHEFTLTDGQIIHITISIGIACFNDTTDDVTSLIEDADSALYMAKKTGRNRVCVSENIKAVKITY

SEQ ID NO: 4947 - DNA, 948 bp, Escherichia coli O157
  CDS (1)..(948): transl_table=11
ttgcttgcggactggttcagtgagcaattctcaacgggcgtgttgatcgtgccttgtatgctgacgttggctattcctggagtgctgccgcgctttaaagcagaacagatgatgcccgccatcgcgcttattgtgtcggttattgcctcggtagtcattggcggagcggggagtctggcgttcccgctgcctgcattaatctggtgtgcagtgcgctatacgccgcaggtaacatgtctgttgacctttgtcaccggtgcggtggaaatcgtactggtggctaattcggtgattgatatctcggtcggttcgccgttctccattccgcaaatgttctccgcacgtctcggtattgccacgatggcgatatgcccaattatggtttcttttagcgtggcagcgatcaattcgctaatgaagcaagttgcgctgcgagccgactttgattttctgactcaggtttactcacggtccggtctttatgaggcgctgaaaagtccatcgctgaaacagacacaacatctgactgtcatgctacttgatatcgactatttcaaaagtattaacgataactatggacatgaatgtggcgataaagtgttaagcgtgtttgcccggcatattcagaagattgtcggtgataaggggctggtggcgcgcatgggcggcgaagaatttgctgttgcagtgccgtcagtgaatcctgtcgatggtctgctaatggcggaaaaaatccgtaaaggcgttgaactgcaaccattcacctggcaacaaaaaacgctttatctcacggtaagtattggcgtcggtagtggtcgcgcatcgtaccgaacgctgaccgatgactttaataaattgatggtcgaagccgatacctgtctgtatcgctcgaagaaagatgggcgcaaccgtaccagcactatgcgttacggtgaggaagttgtctga

SEQ ID NO: 4948 - protein, 315 aa, Escherichia coli O157
MLADWFSEQFSTGVLIVPCMLTLAIPGVLPRFKAEQMMPAIALIVSVIASVVIGGAGSLAFPLPALIWCAVRYTPQVTCLLTFVTGAVEIVLVANSVIDISVGSPFSIPQMFSARLGIATMAICPIMVSFSVAAINSLMKQVALRADFDFLTQVYSRSGLYEALKSPSLKQTQHLTVMLLDIDYFKSINDNYGHECGDKVLSVFARHIQKIVGDKGLVARMGGEEFAVAVPSVNPVDGLLMAEKIRKGVELQPFTWQQKTLYLTVSIGVGSGRASYRTLTDDFNKLMVEADTCLYRSKKDGRNRTSTMRYGEEVV

SEQ ID NO: 4949 - DNA, 23 bp, Artificial sequence
  primer
atgcttgcggactggttcagtga

SEQ ID NO: 4950 - DNA, 25 bp, Artificial sequence
  primer
ttagacaacttcctcaccgtaacgc

SEQ ID NO: 4951 - protein, 164 aa, Artificial sequence
  consensus sequence
  Variant (2)..(2): Xaa in position 2 is any amino acid
  Variant (5)..(8): Xaa in position 5 to 8 is any amino acid
  Variant (10)..(28): Xaa in position 10 to 28 is any amino acid
  Variant (29)..(36): Xaa in position 29 to 36 is any or no amino acid
  Variant (41)..(41): Xaa in position 41 is any amino acid
  Variant (44)..(45): Xaa in position 44 to 45 is any amino acid
  Variant (48)..(49): Xaa in position 48 to 49 is any amino acid
  Variant (52)..(53): Xaa in position 52 to 53 is any amino acid
  Variant (56)..(57): Xaa in position 56 to 57 is any amino acid
  Variant (59)..(61): Xaa in position 59 to 61 is any amino acid
  Variant (63)..(76): Xaa in position 63 to 76 is any amino acid
  Variant (78)..(78): Xaa in position 78 is any amino acid
  Variant (84)..(99): Xaa in position 84 to 99 is any amino acid
  Variant (101)..(102): Xaa in position 101 to 102 is any amino acid
  Variant (104)..(116): Xaa in position 104 to 116 is any amino acid
  Variant (117)..(121): Xaa in position 117 to 121 is any or no amino acid
  Variant (123)..(123): Xaa in position 123 is any amino acid
  Variant (125)..(125): Xaa in position 125 is any amino acid
  Variant (127)..(138): Xaa in position 127 to 138 is any amino acid
  Variant (139)..(146): Xaa in position 139 to 146 is any or no amino acid
  Variant (148)..(150): Xaa in position 148 to 150 is any amino acid
  Variant (153)..(154): Xaa in position 153 to 154 is any amino acid
  Variant (157)..(158): Xaa in position 157 to 158 is any amino acid
  Variant (160)..(161): Xaa in position 160 to 161 is any amino acid
DXLTXXXXRXXXXXXXXXXXXXXXXXXXXXXXXXXXLDIDXFKXXNDXXGHXXGDXXLXXXAXXXXXXXXXXXXXXRXGGEEFXXXXXXXXXXXXXXXXEXXRXXXXXXXXXXXXXXXXXXTXSXGXXXXXXXXXXXXXXXXXXXXLXXXADXXLYXXKXXGRN

SEQ ID NO: 4952 - protein, 56 aa, Artificial sequence
  protein pattern
  Variant (2)..(2): Xaa in position 2 is any or no amino acid
  Variant (4)..(6): Xaa in position 4 to 6 is any or no amino acid
  Variant (8)..(8): Xaa in position 8 is Ile or Leu
  Variant (10)..(10): Xaa in position 10 is any amino acid
  Variant (13)..(13): Xaa in position 13 is any amino acid
  Variant (14)..(14): Xaa in position 14 is Ile, Leu or Val
  Variant (17)..(17): Xaa in position 17 is any amino acid
  Variant (18)..(18): Xaa in position 18 is Phe, His or Tyr
  Variant (21)..(22): Xaa in position 21 to 22 is any amino acid
  Variant (25)..(25): Xaa in position 25 is any amino acid
  Variant (26)..(26): Xaa in position 26 is Ala, Ile, Leu or Val
  Variant (27)..(27): Xaa in position 27 is Ile or Leu
  Variant (28)..(29): Xaa in position 28 to 29 is any amino acid
  Variant (30)..(30): Xaa in position 30 is Phe, Leu or Val
  Variant (31)..(31): Xaa in position 31 is Ala, Gly or Ser
  Variant (32)..(33): Xaa in position 32 to 33 is any amino acid
  Variant (34)..(34): Xaa in position 34 is Ile, Leu or Val
  Variant (35)..(44): Xaa in position 35 to 44 is any amino acid
  Variant (45)..(45): Xaa in position 45 is Ala, Cys, Gly or Ser
  Variant (47)..(47): Xaa in position 47 is any amino acid
  Variant (50)..(50): Xaa in position 50 is Asp or Glu
  Variant (53)..(53): Xaa in position 53 is any amino acid
  Variant (54)..(54): Xaa in position 54 is Ile, Leu or Val
  Variant (55)..(55): Xaa in position 55 is any amino acid
  Variant (56)..(56): Xaa in position 56 is Ala, Ile, Leu or Val
LXLXXXDXDXFKXXNDXXGHXXGDXXXXXXXXXXXXXXXXXXXXXRXGGXEFXXXX

SEQ ID NO: 4953 - protein, 15 aa, Artificial sequence
  protein pattern
  Variant (2)..(2): Xaa in position 2 is any or no amino acid
  Variant (4)..(5): Xaa in position 4 to 5 is any amino acid
  Variant (8)..(8): Xaa in position 8 is any amino acid
  Variant (9)..(9): Xaa in position 9 is Ala or Ser
  Variant (11)..(12): Xaa in position 11 to 12 is any amino acid
AXDXXLYXXKXXGRN

SEQ ID NO: 4954 - DNA, 777 bp, Escherichia coli
  CDS (1)..(777): transl_table=11
atgcctcgttttgcagctaatttatccatgatgttcaccgaagtgccttttattgaacgcttcgccgcagcgcgaaaagccgggttcgatgctgtggaatttctgtttccctataactactccaccctgcaaatccaaaagcaactggagcaaaaccatctgacactggcgctgttcaataccgctcccggagatattaatgcgggggaatggggattatccgcccttcccggacgtgagcacgaagcacacgcagacatcgacctggcactggaatatgcattggcgctcaattgtgaacaagtccatgtgatggcaggcgtcgtgcccgctggcgaagatgctgaacggtaccgggcagtatttatcgataatatccgctacgctgccgaccgctttgcgccacacggcaagcgaatattagttgaagcactcagccccggcgttaagcctcattatctcttctccagccagtatcaggcactggctattgttgaagaggttgcgcgagataacgtgtttattcaactagatacttttcatgcgcaaaaagtagatggcaacctgacgcatttaatccgcgactacgccgggaaatatgcgcacgtacaaattgccggactacctgatcgacatgaaccggacgatggagaaatcaactatccgtggctgttccgcctgttcgatgaggtgggatatcagggctggatcggttgtgaatataaacctcgtggcctcaccgaagaagggcttggctggtttgacgcctggcgctaa

SEQ ID NO: 4955 - protein, 258 aa, Escherichia coli
MPRFAANLSMMFTEVPFIERFAAARKAGFDAVEFLFPYNYSTLQIQKQLEQNHLTLALFNTAPGDINAGEWGLSALPGREHEAHADIDLALEYALALNCEQVHVMAGVVPAGEDAERYRAVFIDNIRYAADRFAPHGKRILVEALSPGVKPHYLFSSQYQALAIVEEVARDNVFIQLDTFHAQKVDGNLTHLIRDYAGKYAHVQIAGLPDRHEPDDGEINYPWLFRLFDEVGYQGWIGCEYKPRGLTEEGLGWFDAWR

SEQ ID NO: 4956 - DNA, 783 bp, Bombyx mori
  CDS (1)..(783)
atgaaattctgtgctaatctgtcttttatgtttgctgaagcttcttccatttgggaacgatatgctttggctaaagacgctggatttaaggctgtagaatcgggtttccctttgggttttagcttagaacaagtaagaaatgcaaaacaaagcgccggcttacaacaaatcgcgattaacttaaaaacaggagacacgaccaaaggtgaagttggcgtaacttctgttccgggtaaagaagacgaatttaaaacaaatttgaatacgacaatcgaatatgcgaaggccttggacgcgaaaaaaattcacataatggctggtaaagtggaaaatccaactccgaaacattgggagacgtttgagaaaaatttgctatatgctgttgacgtcctaaaaggagagaatatccaaggactaatcgaaccaatcaaccagtattctatgcccaaatatttcttgagtgattatggaagagctgtggacattattaaacgtattgacagtccaaatttgagattgatgttggacatttttcatcttcagcaaatcgctggcgacattactcataatattacgaaattattgccatacattggacatgtgcaaatagctcaggttccgaatcgtaacgagccggacacgcccggagagataaactacaaatatgttctagaacacttggctaagagcggatacgatgaatgggttggactcgaatataaagccatcggaaacacgaaggatggtttgacttggatcaacaattatggttacagtctttga

SEQ ID NO: 4957 - protein, 260 aa, Bombyx mori
MKFCANLSFMFAEASSIWERYALAKDAGFKAVESGFPLGFSLEQVRNAKQSAGLQQIAINLKTGDTTKGEVGVTSVPGKEDEFKTNLNTTIEYAKALDAKKIHIMAGKVENPTPKHWETFEKNLLYAVDVLKGENIQGLIEPINQYSMPKYFLSDYGRAVDIIKRIDSPNLRLMLDIFHLQQIAGDITHNITKLLPYIGHVQIAQVPNRNEPDTPGEINYKYVLEHLAKSGYDEWVGLEYKAIGNTKDGLTWINNYGYSL

SEQ ID NO: 4958 - DNA, 798 bp, Mesorhizobium loti MAFF303099
  CDS (1)..(798): transl_table=11
atgccgcgtttttccgccaatctgtccatgctctttgccgagcatgatttcctcgaccgctttgatgcagccgcccgcgcggggttcaagggcgtcgaatatatcggcccttacgatcatgcgccggaggtggtggccgcgaggctgaagaagaacggcctgacacaggtgctgttcaacctgccggccggcgactggggcaagggcgagcgcggcattgccgtgctgccggaccgcgtgccggaattccgccagggcatcgccaaggccatcacctacgcacaggcgctcggctgccagcaggtcaattgcctggccggcatcgcgcccgccggcgtcgaccgcaaggtgctcgaggatgttttcgccgaaaacctcgccttcgcggcggagaagctggaacgggtcggaatccggctgctgatcgagccgatcaacacgcgcgacattccaggcttcttcctgaactactcggaccaggcactggcgctgatcgaccgcgtcggctcgaaaaacctgttcctgcaatacgacatctatcacatgcagatcatggagggggatctcgcccgtaaaatcgaggccaacctcggccgcatcgcgcatatccagcttgcggacaatcccggccgtcacgagccggggacgggcgagatcaactatcccttcctctacgatcacatcgaccgcatcggctatgccggctggatcggggccgaatacaagccgaaagccggcaccgaggcagggctgggctggttcagggacctgactgggcaagggagcgctgcggcttag

SEQ ID NO: 4959 - protein, 265 aa, Mesorhizobium loti MAFF303099
MPRFSANLSMLFAEHDFLDRFDAAARAGFKGVEYIGPYDHAPEVVAARLKKNGLTQVLFNLPAGDWGKGERGIAVLPDRVPEFRQGIAKAITYAQALGCQQVNCLAGIAPAGVDRKVLEDVFAENLAFAAEKLERVGIRLLIEPINTRDIPGFFLNYSDQALALIDRVGSKNLFLQYDIYHMQIMEGDLARKIEANLGRIAHIQLADNPGRHEPGTGEINYPFLYDHIDRIGYAGWIGAEYKPKAGTEAGLGWFRDLTGQGSAAA

SEQ ID NO: 4960 - DNA, 783 bp, Pasteurella multocida subsp. multocida str. Pm70
  CDS (1)..(783): transl_table=11
atgccaaaatttgctgcaaatttaaccatgatgtttactgaagtgccttttttagatcgttttgaagcggcgtcgaaagcgggctttaaatatgtggaatatttatggccttatgactatcccgcctcagtgttaaaagaaaaactggtgcaatatgggctgaagcaagtgttatttaatacggctgcgggaaatattgatcaaggggagtggggcgtgtcagcgattccgggacgcgaacaagacagtcatcgtgatattgatttagccctggaatatgcgttagcactcgattgcccgaatgttcatattatggcagcggttgtaccagaaggtgcggatcgcgagctgtataaacgtacctttgtgcagaatcttcgttacgcggcagaaaaattcaaaccgcatggtattaagattctactcgaagccttaagtccacaagtgaaaccaaattatttgctaaaaagtcaatttgatacattagacattgtgaatttagttgatcgggataatgtctttatccagcttgattattttcatgcccaaaatgtcgatggcaagttgtcacagctgacagatttgttgaaagacaaagtggcacatattcaaattgcctcggtaccagatcgtcatgagccgaatgaaggagaaattaactacacttatttatttgataagttagatcaaatgggctatcgcggctttattggctgtgaatataagccaaaaatcgaaactgtcgtcggattagattggtttgcgccttataaagacgcgtaa

SEQ ID NO: 4961 - protein, 260 aa, Pasteurella multocida subsp. multocida str. Pm70
MPKFAANLTMMFTEVPFLDRFEAASKAGFKYVEYLWPYDYPASVLKEKLVQYGLKQVLFNTAAGNIDQGEWGVSAIPGREQDSHRDIDLALEYALALDCPNVHIMAAVVPEGADRELYKRTFVQNLRYAAEKFKPHGIKILLEALSPQVKPNYLLKSQFDTLDIVNLVDRDNVFIQLDYFHAQNVDGKLSQLTDLLKDKVAHIQIASVPDRHEPNEGEINYTYLFDKLDQMGYRGFIGCEYKPKIETVVGLDWFAPYKDA

SEQ ID NO: 4962 - DNA, 798 bp, Pseudomonas aeruginosa PAO1
  CDS (1)..(798): transl_table=11
atgccccgcttcgccgccaacctcagcatgctctacccccgccacgacttcctcgaacgcttcgccgccgccgcggcggacggcttcgagggcgtggagtacctgttcccctatgcctaccctgcggccgaactgaaggcccggctggacgaccacggcctgcgccaggtgctgttcaatgccgcacccggcgactgggacaagggcgagcgcggcctggccagcctgccggggcgcgaggccgaattccgccgcgccatcgcccaggccatcgactatgcccaggtcctcggcaaccgccacatccatgtcatggccggactgctgccggccggcgccgaccgcatccgccaccgcgagacctacctcgacaacctcgcccatgccgcccgcgaggccgccggcgccgggctgacggtgctcatagagccgatcaacaaccgcgacatgccgggcttcttcctcacccgccaggacgacgcccaggccatctgccgcgaggtcggcgcggacaacctgcaggtacagttcgactgctaccactgccagatcgtcgagggcgacctggccaccaccctgcgtcgcgacatcggcaatatcggccacgtccagatcgccggggtacccgaccgccacgagccggatgacgacaacgaagtgaactacccctacctgttcgagctactcgaccggctcggctaccagggctggatcggctgcgagtaccgtccgcgcggcgacacctcggcaggcctggaatggctgcggcgctggcgcgctactcgacgcgacggatga

SEQ ID NO: 4963 - protein, 265 aa, Pseudomonas aeruginosa PAO1
MPRFAANLSMLYPRHDFLERFAAAAADGFEGVEYLFPYAYPAAELKARLDDHGLRQVLFNAAPGDWDKGERGLASLPGREAEFRRAIAQAIDYAQVLGNRHIHVMAGLLPAGADRIRHRETYLDNLAHAAREAAGAGLTVLIEPINNRDMPGFFLTRQDDAQAICREVGADNLQVQFDCYHCQIVEGDLATTLRRDIGNIGHVQIAGVPDRHEPDDDNEVNYPYLFELLDRLGYQGWIGCEYRPRGDTSAGLEWLRRWRATRRDG

SEQ ID NO: 4964 - DNA, 777 bp, Escherichia coli O157:H7 EDL933
  CDS (1)..(777): transl_table=11
atgttacgtttctctgctaatttatcgatgttatttggtgaatatgattttctcgcccgttttgagaaagctgcgcagtgtggttttcgcggcgttgaatttatgtttccttatgactacgacattgaagaattaaaacaggtgctggcgagtaataaactcgaacatacgctgcacaatttaccggcgggtgactgggcggcgggggagcgcggtattgcctgtattcctggccgtgaagaagagtttcgggatggcgtagcagcagcgattcgttatgcccgtgcgctgggtaataaaaatattaactgtctggtcggtaaaacgccggctggtttcagcagtgaacagattcacgcaacgcttgtagaaaacctgcgttatgccgcgaatatgctgatgaaagaagatattttattactgattgaacctattaaccattttgatattcctggtttccatctcaccggaactcggcaggcgctgaaattgattgatgatgttggttgctgcaatttgaaaattcagtatgacatttatcacatgcagcggatggaaggtgaattaaccaacactatgacgcaatgggctgataaaattggtcacctgcaaattgccgataatccgcatcgcggcgaaccggggaccggagaaattaattatgattatctctttaaggtaatcgaaaattctgactacaacggttgggttgggtgtgaatataaaccccaaaccaccacggaagccggtttacgctggatggatccgtaccgttaa

SEQ ID NO: 4965 - protein, 258 aa, Escherichia coli O157:H7 EDL933
MLRFSANLSMLFGEYDFLARFEKAAQCGFRGVEFMFPYDYDIEELKQVLASNKLEHTLHNLPAGDWAAGERGIACIPGREEEFRDGVAAAIRYARALGNKNINCLVGKTPAGFSSEQIHATLVENLRYAANMLMKEDILLLIEPINHFDIPGFHLTGTRQALKLIDDVGCCNLKIQYDIYHMQRMEGELTNTMTQWADKIGHLQIADNPHRGEPGTGEINYDYLFKVIENSDYNGWVGCEYKPQTTTEAGLRWMDPYR

SEQ ID NO: 4966 - DNA, 777 bp, Sinorhizobium meliloti 1021
  CDS (1)..(777): transl_table=11
atgcccgtttttgccgccaatctgacgatgatgttcaccgagttgccgttcctcgaccgcttcgacgcggccgccgacgccgggttcgcagccgtcgagtatctttttccctacgaggtgccgccggaagcgatcgccgaacggcttgcccgcaacagtctcgagcaggcactgttcaacctgccgccgggcgattgggcagccggcgaacgcggcatcgccgccctgcccggccgcttcgatgcgttgaaatcggatgtcgacaaggcgctcgactacgcggccgcgaccggcgccaagcgcctgcacctgatggcaggtcttgctgatccgcgcgaccgcgaggccgcatcctgctaccgccgctcggtcgcctgtaccgccgagcgcctggccgacgagggcatcgatctcctcatcgaaccgatcaacggccgcaacatgccgggatatttcctcaacgatttcgggaccgccgagcggctcatcgccgagctcgcgctccccaacctcaagctgcaattcgacatctatcaccggcagatcctgcacggcgacgtcgcaatggcactccgccaccttatgccggtcaccggccatatccagatcgccagcgtgccctcgcggcacgagccggatggcgaggagttgaactatcactacctctttgaagaaatcgaccggctcggctatggcggcttcgtcggctgcgaatacaacccgcgcggccagacgctcgacggcctcggctggttcaaaccctttcgacggagctga

SEQ ID NO: 4967 - protein, 258 aa, Sinorhizobium meliloti 1021
MPVFAANLTMMFTELPFLDRFDAAADAGFAAVEYLFPYEVPPEAIAERLARNSLEQALFNLPPGDWAAGERGIAALPGRFDALKSDVDKALDYAAATGAKRLHLMAGLADPRDREAASCYRRSVACTAERLADEGIDLLIEPINGRNMPGYFLNDFGTAERLIAELALPNLKLQFDIYHRQILHGDVAMALRHLMPVTGHIQIASVPSRHEPDGEELNYHYLFEEIDRLGYGGFVGCEYNPRGQTLDGLGWFKPFRRS

SEQ ID NO: 4968 - DNA, 816 bp, Sinorhizobium meliloti 1021
  CDS (1)..(816): transl_table=11
atgccgagatttgctgcgaacctgacgatgctgttcaacgaggcgccgtttctcgaccgtttcgcactggccgccagggcgggtttcgaaggcgttgaatatctctttccctacgagttcgataagacggcgctgcgcggcgaactcgaccgccacggcctgacgcaagtgctgcacaacctgccggccggcgactgggccggcggcgaacggggcatcgcgatcctgccggatcggatcgacgaattccgcaagggggtcgcaacggccatcgactatgcgactgcgctcggctgccgccaggtcaattgcctcgtggggattgccccggacggtgtacccgacagcgtgctgcgcacgaccctcgtcgccaatctgaagcttgcggcggccgaactcggcaagtgcggcatccgccttctgatcgaaccgatcaaccgcttcgatatccccggcttttatctcaacacggtcgggcaggcgtcgtcgatcatcgaggaggtcgggagcgataacctcttcatccagtacgacctctaccaccagcagcgcaccgagggcgaactcgtcggcacctacaggcgctaccgcgaaaagatcgcgcacatacagcttgccgacaatcccggacgcaacgagccggggaccggcgagatcaactaccccttcgtcttcgacgcattggaagccggcggctacgacggctggatcgggtgcgaatacaagccgctgacgaccacggcggagggacttgggtggctcggcaccgagcgccagcgcaaacaatccgcagacatcatccaaatcaggagctaa

SEQ ID NO: 4969 - protein, 271 aa, Sinorhizobium meliloti 1021
MPRFAANLTMLFNEAPFLDRFALAARAGFEGVEYLFPYEFDKTALRGELDRHGLTQVLHNLPAGDWAGGERGIAILPDRIDEFRKGVATAIDYATALGCRQVNCLVGIAPDGVPDSVLRTTLVANLKLAAAELGKCGIRLLIEPINRFDIPGFYLNTVGQASSIIEEVGSDNLFIQYDLYHQQRTEGELVGTYRRYREKIAHIQLADNPGRNEPGTGEINYPFVFDALEAGGYDGWIGCEYKPLTTTAEGLGWLGTERQRKQSADIIQIRS

SEQ ID NO: 4970 - DNA, 777 bp, Salmonella typhimurium LT2
  CDS (1)..(777): transl_table=11
atgccgcgttttgccgccaatttgtcgatgatgtttaccgaagcgccgtttatcgagcgttttgccgccgctgctgaagccggttttcaggccgttgagtttctgttcccctatgactttgccgccagcgagattaaagcccagctatcgcgtcataatctgacgctggcgctgtttaatacttcggcgggcgataccgcggcgggcgaatggggacgtgccgcgctaccggggcgcgaacacgacgcgcgcgccgatatcgatctggctctggaatacgctctggcgctggaatgcgagcaggttcacatcatggcgggcgtcgtgccggatggcgctgatggcgcacgttatcgcgccacgtttatcgataatttgcgttatgccgccgaccggtttgccgcccacgataaacgtattttgatcgaagcgctgagtcccggcgttaaacccggctacctcttttccagccaatatcaggcgctgggcatcgcagaagaggttgaccgcccgaatgtgttcatccagctcgacactttccacgcgcaaaaagtggatggcaatttgagtcacctgattcgcgagtatgcgggccgctatgcccatgtacaaatcgcctcgctaccggacagacatgaaccggatgatggcgagatcaactacccatggctgttccggctgttcgatgacgtaggttatcgcggctggataggctgcgaataccaaccacggaataccactcaggacgggcttggctggtttaacgcctggcgctaa

SEQ ID NO: 4971 - protein, 258 aa, Salmonella typhimurium LT2
MPRFAANLSMMFTEAPFIERFAAAAEAGFQAVEFLFPYDFAASEIKAQLSRHNLTLALFNTSAGDTAAGEWGRAALPGREHDARADIDLALEYALALECEQVHIMAGVVPDGADGARYRATFIDNLRYAADRFAAHDKRILIEALSPGVKPGYLFSSQYQALGIAEEVDRPNVFIQLDTFHAQKVDGNLSHLIREYAGRYAHVQIASLPDRHEPDDGEINYPWLFRLFDDVGYRGWIGCEYQPRNTTQDGLGWFNAWR

SEQ ID NO: 4972 - DNA, 789 bp, Ralstonia solanacearum GMI1000
  CDS (1)..(789): transl_table=11
atgccacgctttgccgccaacctgacgatgatgtacccggaacatgcgttcctcgaccgcttcaccgccgccgcgcgcgatgggttcgaaggcgtggaattcctgttcccttacgactacgacaagaccgagctgcgaacgcggctggacgacaacggcctcgcacaggcgctgttcaacgcaccgccgggcgactgggcgggcggcgagcgcggcatcgcctcgctgcccggccgcgaagacgaattcaagcgcggcatcgccaccgcgctcgactacgcacaggcgctcggcaatacgcgcgtgcacgtcgtggccggcctgatcggcccgcacgacgatcgtgcccgccaccacgccacctacgtgcagaacctcgcccatgcggcgcgcgaggcggccagcgccggcatcaccatcgtgctggagccgatcaacacgcgcgacatgccgggcttcttcctcacgcaccaggcccaggcgcacgcggtctgccgggaagtcggcgcgcccaacctgaaggtgcagttcgacctgtatcacgcgcagatcatggagggcgacctgtcggtcaagctgcgcgagtacctcgacggcatcggccacgtgcagatcgcgggcgtccccgatcgccacgagccggacgagggcgagctgaactatccgcacctcttcgcgctgatggatgcgctcggctaccgcggctgggtcggctgcgaataccggccgcgcgccggcaccagcgaagggctgggatggttcaagcgctggcgcgcgcaccagcgctga

SEQ ID NO: 4973 - protein, 262 aa, Ralstonia solanacearum GMI1000
MPRFAANLTMMYPEHAFLDRFTAAARDGFEGVEFLFPYDYDKTELRTRLDDNGLAQALFNAPPGDWAGGERGIASLPGREDEFKRGIATALDYAQALGNTRVHVVAGLIGPHDDRARHHATYVQNLAHAAREAASAGITIVLEPINTRDMPGFFLTHQAQAHAVCREVGAPNLKVQFDLYHAQIMEGDLSVKLREYLDGIGHVQIAGVPDRHEPDEGELNYPHLFALMDALGYRGWVGCEYRPRAGTSEGLGWFKRWRAHQR

SEQ ID NO: 4974 - DNA, 777 bp, Corynebacterium glutamicum ATCC 13032
  CDS (1)..(777): transl_table=11
atgacttttaaactcgcagcatgcgcagagatgatctaccaggacctgcctttcgaggagagggtcaagacgatctctgatcagggattcctcgtggaaatttgggactggtccacaaaagacatcgatgcgctcgtggcaacaggcgcggaattttcctccatgacgggctacctgcgcggggatctgattactgaacagggccgcgcggagctcttggcaaccgcttcggagtccttggcggtggcggaaaagctcaactgcccccggctgaatctgcatggaactggccttggaccgcagggactacctgttactcccattgaagtggttaccccagaaatgtggctctacgctgctgaaacgctccgccagatcgctgagctgggggagcgcgcaggcaaggttttcgtgctggaaaacctcaacctcgcagtcgatcaccccggcactccttttgccaaggccactgacactttggcgctggtcaaggctgtcaatcacccgaatctgcgcctcaacctggatttgtaccacgcccagattggcgaaggaaacctcattgagctgctccgtgaggcgcagccattcatcggcgaaatccaggttgccgatgtccccggccgcatggaacccggcaccggcgagatcaactaccagggcgtcgcgaaagctctcgccgcgatgggctacgacggcgtcatcggcatggaggcgtgggcatcgggcgactccagcgacgcgctgcaggcgttgaagtcagcgttcacggtctaa

SEQ ID NO: 4975 - protein, 258 aa, Corynebacterium glutamicum ATCC 13032
MTFKLAACAEMIYQDLPFEERVKTISDQGFLVEIWDWSTKDIDALVATGAEFSSMTGYLRGDLITEQGRAELLATASESLAVAEKLNCPRLNLHGTGLGPQGLPVTPIEVVTPEMWLYAAETLRQIAELGERAGKVFVLENLNLAVDHPGTPFAKATDTLALVKAVNHPNLRLNLDLYHAQIGEGNLIELLREAQPFIGEIQVADVPGRMEPGTGEINYQGVAKALAAMGYDGVIGMEAWASGDSSDALQALKSAFTV

SEQ ID NO: 4976 - DNA, 753 bp, Corynebacterium glutamicum ATCC 13032
  CDS (1)..(753): transl_table=11
ttgtctcgatttgctgccaacctgtcattgacttttactgagctagatttcctggatcgttttgatgccgcttcgaagcatgctttcagtgccgtggagtttcagtacccttacgatttcgatgttcaagagattaaacagcgtgctgattccgcaggtctgcccattgaactgttcaatgccccacctggggatacttttggtcttgcggcactggcttcccctgaagactttcaacaatccatcgagcaggccatcacgtacgccacagtgttgaagccaaagaagatgcatgtcatggctggcatcgcggacgtaacctcagaaaccacggcgcgctatgtggagaatattcgctgggctgcgcagcaactagacaagctcgacgttgtcgttgttattgaaccaattaatcactattcggttcccggttatttcctgcacactttagagcaggcgtattggcttatcgacagcattgcccaccccaatgtgaagatcttattcgatactttccaccttcagcagattcatggcaatctcacccgccgcctgcgcgaggttcatggcgcaggtcttttgggacacgtgcaagtggcctcagttcctgatcgacacgaacctggcactggcgaagtcaatgcggcgtatatcttccaactcctaagcgaactgggatatgacggtgtcatcgctggcgaataccaccctgctggtgaaactacagccggtttgggctggttggagctctag

SEQ ID NO: 4977 - protein, 250 aa, Corynebacterium glutamicum ATCC 13032
MSRFAANLSLTFTELDFLDRFDAASKHAFSAVEFQYPYDFDVQEIKQRADSAGLPIELFNAPPGDTFGLAALASPEDFQQSIEQAITYATVLKPKKMHVMAGIADVTSETTARYVENIRWAAQQLDKLDVVVVIEPINHYSVPGYFLHTLEQAYWLIDSIAHPNVKILFDTFHLQQIHGNLTRRLREVHGAGLLGHVQVASVPDRHEPGTGEVNAAYIFQLLSELGYDGVIAGEYHPAGETTAGLGWLEL

SEQ ID NO: 4978 - DNA, 786 bp, Brucella suis 1330
  CDS (1)..(786): transl_table=11
atgccgcgttttgctgccaatctgtcgacgatgtttaacgaggtgccattcctcgaacgttttagactggctgccgaagcaggttttggcggcgtcgagtttctgtttccttatgacttcgacgctgatgtcattgccagggaattgaagcagcacaatctcacgcaggttcttttcaacatgcctcccggcgattgggctgcgggcgaacgcggcatggcagctattccgggtcgcgaacaggaattccgcgacaatgtcgatatcgccctgcattatgcattggcgctggattgcaggacgcttcacgccatgtccggcatcacggaagggctggaccggaaagcctgcgaggaaacctttatcgaaaacttccgctatgcggcagacaagcttgctccgcacggcatcacggtgctggtcgagcccctcaatacgcgcaatatgcccggctatttcatcgtgcatcaactggaagccgttggcctcgtaaagagggtcaaccgccccaatgtcgccgtgcagctcgatctctatcatgcccagatcatggatggcgacctgacccgcctgatcgagaaaatgaacggtgcattcagccatgttcaaattgcatccgttcccgaccggcatgagccggatgaaggcgaattgaactatccatatcttttctcggtcctggagagtgtcggctatcggggatgggtgggatgcgaatataatccgcggggcaaaacggaaagcggcctcgcctggtttgccccataccgggatcaaagcgcatga

SEQ ID NO: 4979 - protein, 261 aa, Brucella suis 1330
MPRFAANLSTMFNEVPFLERFRLAAEAGFGGVEFLFPYDFDADVIARELKQHNLTQVLFNMPPGDWAAGERGMAAIPGREQEFRDNVDIALHYALALDCRTLHAMSGITEGLDRKACEETFIENFRYAADKLAPHGITVLVEPLNTRNMPGYFIVHQLEAVGLVKRVNRPNVAVQLDLYHAQIMDGDLTRLIEKMNGAFSHVQIASVPDRHEPDEGELNYPYLFSVLESVGYRGWVGCEYNPRGKTESGLAWFAPYRDQSA

SEQ ID NO: 4980 - DNA, 768 bp, Corynebacterium efficiens YS-314
  CDS (1)..(768): transl_table=11
ttgcccatgccgaaattcgccgcgaatctctccctgctcttcacggagctgcccttccccgagcggttcgccgctgcggccaacaccgggctcttcgaggccgtggagttccagttcccctacgaccatgacctgaaaacgctcacccagaccgcacaacaggccggtctgcccgtcgcactcatcaacgccccgccgggtgacaccttcggccaggcggccctgaactccaccgatttcgagtcatccatcaccgaggctctccgctacgccaccgcactcggcgccgagaagctacacgtcatggcaggcatcacggaaccatcccccgacgccaccgccctgtaccgccgcaacatcaccaccgctgcccgcatggccgcagaacgtggcgtgctcatcgtggtcgaacccatcaaccaccacacggttcccggctacttcctgcacgacctggatcaggcccttggactcatccagaacatccccaatgtgaagatcctcttcgacatcttccacatccagcagatccacggcgatctcacccgccggctcaccgcgctgcaccagcaggatctcctgggccacctccaggtggccgcggtgccctcccgccacgaacccggcaccggcgaggtggatgacgcccgcctctttgagcttatcgacgccctcccctggcccggtttcgtcggcgccgaataccatcccgcggacaccaccgttgagggactcggctggctacagccatgggtgacgtaccattag

SEQ ID NO: 4981 - protein, 255 aa, Corynebacterium efficiens YS-314
MPMPKFAANLSLLFTELPFPERFAAAANTGLFEAVEFQFPYDHDLKTLTQTAQQAGLPVALINAPPGDTFGQAALNSTDFESSITEALRYATALGAEKLHVMAGITEPSPDATALYRRNITTAARMAAERGVLIVVEPINHHTVPGYFLHDLDQALGLIQNIPNVKILFDIFHIQQIHGDLTRRLTALHQQDLLGHLQVAAVPSRHEPGTGEVDDARLFELIDALPWPGFVGAEYHPADTTVEGLGWLQPWVTYH

SEQ ID NO: 4982 - DNA, 783 bp, Pseudomonas putida KT2440
  CDS (1)..(783): transl_table=11
atgcctcgcttcgctgccaacctgtccatgctgttcaccgaacaggacttcctggcccgcttcaaggctgccgccgatgctggtttcagcggcgtcgaatacctgttcccgtacgacttcagcgctgccgacatcaagcagcagctggaggccaacggcctgacccaggtgctgttcaacctgccggccggcgactgggccaaaggtgagcgcggtatcacctgccaccccgaccgcatcgaagagttccgtgccggtgtcgacaaggccatcgagtacgccaaggtgctgggcaatactcaggtcaacgccctggccggcatccgcccacaaggcccggactgcgccaccgtgcgtaagaccttcgtcgagaacctgcgctacgccgctgacaagctcaagggcgccgggatccgcctggtcatggaaatgatcaacacccgcgacatccccggcttctacctgaacaccacccagcaggccctggaaatccaggccgaagtgggcagcgacaacctgttcctgcaatacgacatctaccacatgcagatcatggaaggtgacctggctcgcaccatggaagccaacctgaagctgatcaaccacatccagctggccgacaacccaggccgcaatgaaccaggcaccggcgagatcaactaccgcttcctgttcgaacacctggaccgcattggctaccagggctgggtgggcgcggagtacaagccgctgaccaccaccgaagcgggcctgggctggctgaaaacccacaacgcaatctga

SEQ ID NO: 4983 - protein, 260 aa, Pseudomonas putida KT2440
MPRFAANLSMLFTEQDFLARFKAAADAGFSGVEYLFPYDFSAADIKQQLEANGLTQVLFNLPAGDWAKGERGITCHPDRIEEFRAGVDKAIEYAKVLGNTQVNALAGIRPQGPDCATVRKTFVENLRYAADKLKGAGIRLVMEMINTRDIPGFYLNTTQQALEIQAEVGSDNLFLQYDIYHMQIMEGDLARTMEANLKLINHIQLADNPGRNEPGTGEINYRFLFEHLDRIGYQGWVGAEYKPLTTTEAGLGWLKTHNAI

SEQ ID NO: 4984 - DNA, 777 bp, Escherichia coli CFT073
  CDS (1)..(777): transl_table=11
atgcctcgttttgcagctaatttatccatgatgttcaccgaagtgccttttattgaacgcttcgccgcagcgcgaaaagccgggttcgatgctgtggagtttctgtttccctatgactactccccccagcaaatccagcagcaactggtgcaaaaccacctgacgctggcgctgttcaataccgctcccggagatattaatgcgggagaatggggattatccgcccttcccggacgtgagcacgaagcacgcgcagacatcgacctggcactggaatatgcattggcgctcaattgtgaacaagtccatgtgatgtcaggcgtcgtgcccgctggcgaagatgctgaacggtaccgggcagtatttattgataatctccgctacgctgccgaccgctttgcgccacacggcaagcgaatattggttgaagcactcagccccggcgttaagcctcattatctcttctccagccagtatcaggcactggctattgttgaagaggttgcgcgagataacgtgtttattcaactagatactttccatgcacaaaaagtagatggcaacctgacacatttaatccgcgactacgccgggaaatatgcgcacgtacaaattgccggactacctgatcgacatgaaccggacgatggagaaatcaactatccgtggctgttccgcctgttcgatgaagtgggatatcagggctggatcggttgtgaatacaaacctcgtggcctcaccgaagaagggcttggctggtttgacgcctggcgctaa

SEQ ID NO: 4985 - protein, 258 aa, Escherichia coli CFT073
MPRFAANLSMMFTEVPFIERFAAARKAGFDAVEFLFPYDYSPQQIQQQLVQNHLTLALFNTAPGDINAGEWGLSALPGREHEARADIDLALEYALALNCEQVHVMSGVVPAGEDAERYRAVFIDNLRYAADRFAPHGKRILVEALSPGVKPHYLFSSQYQALAIVEEVARDNVFIQLDTFHAQKVDGNLTHLIRDYAGKYAHVQIAGLPDRHEPDDGEINYPWLFRLFDEVGYQGWIGCEYKPRGLTEEGLGWFDAWR

SEQ ID NO: 4986 - DNA, 783 bp, Bradyrhizobium japonicum USDA 110
  CDS (1)..(783): transl_table=11
atgccccgtttcgccgccaatctctcgatgatgttcaccgacgtgccgttcctcgatcgcttcgaggccgccgcccaggtcggcttcacggccgtcgagtttctctttccttatgagcatccggccgaggcggtcggcgagcggctcaagcgcaacggtctgacccaggcgctgttcaacctgccgcccggcgactggaatgcgggcgagaagggttttgctgcgctcccggcgcgcttcgccgatctcaaggcgagcctcgagaccgcgctgccttacgccaaggccaccggcgtcaagcgcctgcacctgatggccggccttgccaaccgcggcgagcgcgtcgcgatcgaggcgttctacaagtcggtggcgtgggcggcggagttcttcgcgccgcatggcatcgacatcgtgctcgagccgatcaatgcccgcaacgtgcccggctacttcctcaacgatttcggcttcgcgcgcgacctgatccaggagttgcggctcccgaacctcaagctccagttcgacatctatcactgccagatcatccatggcgacgtcaccatgcgcttgcgcgagatgatgccgatcatcggccacatccagatcgccagcattccatcgcgcaacgagcccgacggcgaggagctgaactatcccttcctgttcgaagagctcgaccggctcggctatgccggcttcgtcggctgcgaatacaatccgcgcggcaagaccaccgacgggctcgcctggttcaagccctatgcgggagtgaagccgtga

SEQ ID NO: 4987 - protein, 260 aa, Bradyrhizobium japonicum USDA 110
MPRFAANLSMMFTDVPFLDRFEAAAQVGFTAVEFLFPYEHPAEAVGERLKRNGLTQALFNLPPGDWNAGEKGFAALPARFADLKASLETALPYAKATGVKRLHLMAGLANRGERVAIEAFYKSVAWAAEFFAPHGIDIVLEPINARNVPGYFLNDFGFARDLIQELRLPNLKLQFDIYHCQIIHGDVTMRLREMMPIIGHIQIASIPSRNEPDGEELNYPFLFEELDRLGYAGFVGCEYNPRGKTTDGLAWFKPYAGVKP

SEQ ID NO: 4988 - DNA, 786 bp, Bradyrhizobium japonicum USDA 110
  CDS (1)..(786): transl_table=11
atgccgaagtttgccgccaacctcaccatgctcttcaacgagatgccgttcctcgaccgcttcgccgcggcgaaagcggcgggctttgccggggtcgaatatctcttcccctatgatttcgacaaggcgcagctccgagagcagctcgaggcccacgggctgacgcaggtgctgcacaatctaccggccggcaattgggccgggggcgagcgcggcatcgcgatcctgccggatcgcaccgccgaattccgcgacggcgtgttccgcgccatcgattatgccaaggcgctcgattgcgaccagctcaactgcctcgtcggcatcgcgcccgccgatgccgatccgcgcgagctcaacgagaccctggtcggcaatctacgctttgccgcctcgacgctggcgcgggagaacatcaggctgctggtcgagccgatcaacacgctcgacattcccggcttccatctcaacggcaccgagcaggcggtgcagctcatctctgaggtgcggtcgaacaatttgttcatccagtacgacgtctaccacatgcagatcatggagggcgatctcgcccgcaccatgcaggaatatctcccgcagatcgcccacatccagctcgccgacaatcccggccgtcacgagccgggcaccggcgagatcaactaccccttcctgttccgccacctcgacgcgatcggctatcgcggctggatcggctgcgaatacaagccgcgcaccacgacgctggaaggcctgtcctggcacgcggcgcagacattcgagacctga

SEQ ID NO: 4989 - protein, 261 aa, Bradyrhizobium japonicum USDA 110
MPKFAANLTMLFNEMPFLDRFAAAKAAGFAGVEYLFPYDFDKAQLREQLEAHGLTQVLHNLPAGNWAGGERGIAILPDRTAEFRDGVFRAIDYAKALDCDQLNCLVGIAPADADPRELNETLVGNLRFAASTLARENIRLLVEPINTLDIPGFHLNGTEQAVQLISEVRSNNLFIQYDVYHMQIMEGDLARTMQEYLPQIAHIQLADNPGRHEPGTGEINYPFLFRHLDAIGYRGWIGCEYKPRTTTLEGLSWHAAQTFET

SEQ ID NO: 4990 - DNA, 789 bp, Pseudomonas syringae pv. tomato str. DC3000
  CDS (1)..(789): transl_table=11
atgagcttcacgccgttcaaactggccgtcagtgccgaaatggtctttctcgatctgccattcactgagcgcgtcaaacgcatccatgcgctgggtttcagcgccgagatctggggctggacgagcaaggacattgccgcactcgctgcaaccggcgcggacttcacctcaatgaccggctacatccggggcaacttgaccgaccccgaagacagccggcaactactcgacagtgcgcgggaatcactggccatcgccgcacaactcaattgcccaagcctcaacctgcatggcactggcctggacgatcagggcttgccggtcaaacccgtggcccacgctaacgggcgcatgtggttgagtgcctgcaagaccctggaaaaaatcgctcgcctgggcgaagacgccggtcgtgtgtttctgctggaaaacctcaatactgaagtggaccatcctggaacgccattcgctcgcgccgacgataccctggcgctgatcgaggccgtcgacagcccttatctgaagatgaatctggacctttaccatgcgcagattggcgaaggaaacctgatcgaactgatccagcgtgcgggcagttccatcggcgaaatccaggtcgctgacgttcccgggcgcatggaaccgggcaccggtgaaatccattacccggccattgccaaagcgctgtttggcttgggatacagcggtgtcgtcgggctcgaaggctgggccagcggagatagcgaagcagcactcgaacgctttcggcaagccttcacgctggattga

SEQ ID NO: 4991 - protein, 262 aa, Pseudomonas syringae pv. tomato str. DC3000
MSFTPFKLAVSAEMVFLDLPFTERVKRIHALGFSAEIWGWTSKDIAALAATGADFTSMTGYIRGNLTDPEDSRQLLDSARESLAIAAQLNCPSLNLHGTGLDDQGLPVKPVAHANGRMWLSACKTLEKIARLGEDAGRVFLLENLNTEVDHPGTPFARADDTLALIEAVDSPYLKMNLDLYHAQIGEGNLIELIQRAGSSIGEIQVADVPGRMEPGTGEIHYPAIAKALFGLGYSGVVGLEGWASGDSEAALERFRQAFTLD

SEQ ID NO: 4992 - DNA, 786 bp, Pseudomonas syringae pv. tomato str. DC3000
  CDS (1)..(786): transl_table=11
atgcctcgttttgccgccaacctcagcatgctatacccgcagcatgattttcttgagcgctttgccgcagccgccgccgatggtttcggcgcggtcgagtacctgtttccttacgcctacacgccgcaggaactcaaacaacgcctgagcgacaacggtctggtgcaggcgctgttcaacgccccgccgggcgactgggataactgcgagcgcgggatcgccacgctgccgggccgcgaagcggactttcgcagcggcatcgaacgtgcgctggaatatgcgcaggtgctgggcaacgaccgtgtgcacgtgatggccggtctgctgcccagcgaagctttgcgtgagcgccatcaagcggtttatctggaaaacctggcgtttgcggccgagcaggcgaagtcagctggcgtcacgattctgatcgaaccgatcaacacccgcgacatgccgggcttctttctcaaccgtcaggatcaggcgcaggccatctgcaagcaggtgggtgcagataacctgaaggtgcaatttgactgctatcactgtcagatcgtcgaaggcgacctgaccagcaaactgcgccgcgactttgcgggtattggccacattcagattgcaggggtaccggatcgccatgaaccgaacctgggcgagctgaattacgaacacctgttcaacgttatcgacgagctgggctataccggctggataggctgtgaataccgccccaaaggcgacaccagcgaagggttgtcgtggttgcgggcgttgcaggcgaagggctga

SEQ ID NO: 4993 - protein, 261 aa, Pseudomonas syringae pv. tomato str. DC3000
MPRFAANLSMLYPQHDFLERFAAAAADGFGAVEYLFPYAYTPQELKQRLSDNGLVQALFNAPPGDWDNCERGIATLPGREADFRSGIERALEYAQVLGNDRVHVMAGLLPSEALRERHQAVYLENLAFAAEQAKSAGVTILIEPINTRDMPGFFLNRQDQAQAICKQVGADNLKVQFDCYHCQIVEGDLTSKLRRDFAGIGHIQIAGVPDRHEPNLGELNYEHLFNVIDELGYTGWIGCEYRPKGDTSEGLSWLRALQAKG

SEQ ID NO: 4994 - DNA, 777 bp, Salmonella enterica subsp. enterica serovar Typhi Ty2
  CDS (1)..(777): transl_table=11
atgccgcgttttgccgccgatttgtcgatgatgtttaccgaagtgccgtttatcgagcgttttgccgctgctgccgaagccggttttcaggccgttgagtttctgttcccctacggctttgccgccagcgagattaaagcccagctatcgcgtcatgatctgacgctggcgctgtttaatacttcggcgggtgataccgcggcgggcgagtggggacgtgccgcgctaccggggcgcgaacacgacgcgcgcgccgatattgatctggctctggaatacgctctggcgctggaatgcgagcaggttcacatcatggcgggcgtcgtgccggatggcgctgatggcgcacgttatcgcgccacgtttatcgataatttgcgttatgccgccggccggtttgccgcccacgataaacgtattttgatcgaagcgctgagtcccggcgttaaacccggctacctcttttccagccaatatcaggcgctgggcatcgcagaagaggttgaccgcccaaatgtattcatccagctcgacactttccacgcgcaaaaagtggatggcaatttgagtcacctgattcgcgagtacgcgggccgctatgcccatgtacaaatcgcctcgctaccggacagacatgaaccggatgatggcgagatcaactacccgtggctgttccggctgttcgatgacgtaggttattgcggctggataggctgcgaataccaaccacggaataccactcaggaggggcttggctggtttaacgcctggcgctaa

SEQ ID NO: 4995 - protein, 258 aa, Salmonella enterica subsp. enterica serovar Typhi Ty2
MPRFAADLSMMFTEVPFIERFAAAAEAGFQAVEFLFPYGFAASEIKAQLSRHDLTLALFNTSAGDTAAGEWGRAALPGREHDARADIDLALEYALALECEQVHIMAGVVPDGADGARYRATFIDNLRYAAGRFAAHDKRILIEALSPGVKPGYLFSSQYQALGIAEEVDRPNVFIQLDTFHAQKVDGNLSHLIREYAGRYAHVQIASLPDRHEPDDGEINYPWLFRLFDDVGYCGWIGCEYQPRNTTQEGLGWFNAWR

SEQ ID NO: 4996 - DNA, 858 bp, Streptomyces avermitilis MA-4680
  CDS (1)..(858): transl_table=11
atgccgggtcttgaacggggcaccgccgcggagcagcgcttcaacgtcaatctgtcgatcctcttcacggaactcccgctcctggagcgccccgcggccgccgccgcggcgggcttcaccgcggtcgagctgtggtggccctgggtcgactcccccacccccgaccagtccgagctcgacgccctgaagaaggcgatcgaggaggcgggcgtccagctgacgggcctgaacttctacgcgggccggctgccgggcccggaccgcggcgccctgtcgatccccggcgaggagtcggagcggttccgcgccaacatcgacgtggccgccgacttcgcccgctcgctcggctgcacggcgctcaacgccctgtacggcaaccgggtggagggcgtggacccggccgagcaggacgcgctcgccctggagaacctggtcctcgcggcccgggccgccgaccggatcggcgcgatcctgctgatcgagaccctcaaccagccggagtcgccgcgctatccgttggtgagcgccccggccggcatcgggatcgtcgaccaggtcaacgaggcgaccggtctcggcaacgccaggttcctgatggacctgtaccacctgtccatgaacggcgaggacctgccgcgggtgatcgccgcgtacgcggcgaagaccggccatgtgcagatcgccgacaaccccggccgcggcgccccgggcacgggcacgctgccgctgaaggagctgctcgggcaactccgcaaggccgggtacgagggctgggtcggcctggagtacaagccgggcgaccgtccgagcgccgaggccttcgactggctgccggccgaggcccgcgccgcccgctga

SEQ ID NO: 4997 - protein, 285 aa, Streptomyces avermitilis MA-4680
MPGLERGTAAEQRFNVNLSILFTELPLLERPAAAAAAGFTAVELWWPWVDSPTPDQSELDALKKAIEEAGVQLTGLNFYAGRLPGPDRGALSIPGEESERFRANIDVAADFARSLGCTALNALYGNRVEGVDPAEQDALALENLVLAARAADRIGAILLIETLNQPESPRYPLVSAPAGIGIVDQVNEATGLGNARFLMDLYHLSMNGEDLPRVIAAYAAKTGHVQIADNPGRGAPGTGTLPLKELLGQLRKAGYEGWVGLEYKPGDRPSAEAFDWLPAEARAAR

SEQ ID NO: 4998 - DNA, 762 bp, Escherichia coli
  CDS (1)..(762): transl_table=11
atgccaaaattcgctgcaaatttatccatgctgtttaccgaactgccgttcctggaacgctttgccgccgctgcccgggcgggatttgaagccgttgagtttctgtttccctatgagtatgccgccggggaaatcagacagcgcctgcaggagaaccagctgcagctggtgctgttcaataccccacccggcgacgtcaacgccggagaatgggggctcgccgccatccccgggagaagcgcggaggcccgacgcgatattgagctggcgctggagtatgcctgccagctcggttgcccgcaggtgcatatcatggccggcgtggtgccgccgggagcggatcgcgcagcctgcgaggccgtgcttatcgataatctgcgctacgcggcggagtgctttgcccgccacgacaagcggatactcatcgaagcgctgaatccgcagaccaaaccgggctatctctaccacagtcaatatcagacgctggcgatggtgaaacgggtcgacaggccgaacctggcggtgcagttagatctgtttcacgcgcagaaggtggacggcaatttaagccatcttattaccgaatatgccggccagtatcgccatattcagattgcctccctgcccgaccgtcatgaaccggatgagggcgaaaggcactgttgcaaagttagcgatgaggcagccttttgtcttattcaaaggccttacatttcaaaaactctgcttaccaggcgcatttcgcccaggggatcaccataa

SEQ ID NO: 4999 - protein, 253 aa, Escherichia coli
MPKFAANLSMLFTELPFLERFAAAARAGFEAVEFLFPYEYAAGEIRQRLQENQLQLVLFNTPPGDVNAGEWGLAAIPGRSAEARRDIELALEYACQLGCPQVHIMAGVVPPGADRAACEAVLIDNLRYAAECFARHDKRILIEALNPQTKPGYLYHSQYQTLAMVKRVDRPNLAVQLDLFHAQKVDGNLSHLITEYAGQYRHIQIASLPDRHEPDEGERHCCKVSDEAAFCLIQRPYISKTLLTRRISPRGSP

SEQ ID NO: 5000 - DNA, 807 bp, Bordetella parapertussis 12822
  CDS (1)..(807): transl_table=11
atgaaactggccgccaacctgacactgctgtaccccggcctgccgctggccgcgcgcatggccgccgcgcgcgaagacggcttcgcgggagtggagatcctgtttccgtacgaccagccgcccgcgcaattggcggcgcagctgcgcgagcacggcctggccctggcgctggtcaacacgccgctgggcgcggccggcgaaaaaggcctggcctgcgtgcccgggcgcgaagccgatttcggggccgcgctggaccaggcgctggcgctgtgccgcgccaccggctgccgcatcgtgcacgccatggcgggcatgccgccggcgcccgccggcatggacgaatgccgcgccacgctgatcggcaacctgcagcgagccgcgccgcgcgccgcccaggccggcgtcacgctgaccctggagccgctcaaccgcgccgacatgccgggctatttctattacctgcccgagcaggccgccgacatcatccgcgcggtcgaccatccgaacgtcggcctgcagttcgacatctatcacaacctgcgcgaagggctggacccgcacgccgagctgcgccgcgtgctgccgctggtgcgccacgtgcagttcgccggccccgacgggcgccacgaacccgatccggccagcccgccggtggccgccaccctgcgcctgctggcgcaaagcggctatggcggctggatgggctgcgagtacacgccgcgcggcctggccagcgccggcctgaaggcctggcgcggcgcctacgacgccgcctgcggcagcggaggtgcggcatgcgcgtcctga

SEQ ID NO: 5001 - protein, 268 aa, Bordetella parapertussis 12822
MKLAANLTLLYPGLPLAARMAAAREDGFAGVEILFPYDQPPAQLAAQLREHGLALALVNTPLGAAGEKGLACVPGREADFGAALDQALALCRATGCRIVHAMAGMPPAPAGMDECRATLIGNLQRAAPRAAQAGVTLTLEPLNRADMPGYFYYLPEQAADIIRAVDHPNVGLQFDIYHNLREGLDPHAELRRVLPLVRHVQFAGPDGRHEPDPASPPVAATLRLLAQSGYGGWMGCEYTPRGLASAGLKAWRGAYDAACGSGGAACAS

SEQ ID NO: 5002 - DNA, 807 bp, Bordetella bronchiseptica RB50
  CDS (1)..(807): transl_table=11
atgaaactggccgccaacctgacactgctgtaccccggcctgccgctggccgcgcgcatggccgccgcgcgcgaagacggcttcgcgggagtggagatcctgtttccgtacgaccagccgcccgcgcaattggcggcgcagctgcgcgagcacggcctggccctggcgctggtcaacacgccgctgggcgcggccggcgaaaaaggcctggcctgcgtgcccgggcgcgaagccgatttcggggccgcgctggaccaggcgctggcgctgtgccgcgccaccggctgccgcatcgtgcacgccatggcgggcatgccgccggcgcccgccggcatggacgaatgccgcgccacgctgatcggcaacctgcagcgagccgcgccgcgcgccgcccaggccggcgtcacgctgaccctggagccgctcaaccgcgccgacatgccgggctatttctattacctgcccgagcaggccgccgacatcatccgcgcggtcgaccatccgaacgtcggcctgcagttcgacatctatcacaacctgcgcgaagggctggacccgcacgccgagctgcgccgcgtgctgccgctggtgcgccacgtgcagttcgccggccccgacgggcgccacgaacccgatccggccagcccgccggtggccgccaccctacgcctgctggcgcaaagcggctatggcggctgggtgggctgcgagtacacgccgcgcggcctggccagcgccggcctgaaggcctggcgcggcgcctacgacgccgcctgcggcagcggaggtgcggcatgcgcgtcctga

SEQ ID NO: 5003 - protein, 268 aa, Bordetella bronchiseptica RB50
MKLAANLTLLYPGLPLAARMAAAREDGFAGVEILFPYDQPPAQLAAQLREHGLALALVNTPLGAAGEKGLACVPGREADFGAALDQALALCRATGCRIVHAMAGMPPAPAGMDECRATLIGNLQRAAPRAAQAGVTLTLEPLNRADMPGYFYYLPEQAADIIRAVDHPNVGLQFDIYHNLREGLDPHAELRRVLPLVRHVQFAGPDGRHEPDPASPPVAATLRLLAQSGYGGWVGCEYTPRGLASAGLKAWRGAYDAACGSGGAACAS

SEQ ID NO: 5004 - DNA, 780 bp, Rhodopseudomonas palustris CGA009
  CDS (1)..(780): transl_table=11
atgccgcgcttcgcagccaatctcagcctgatgttcaccgagcacgcctttctcgaccgctttgatgcggcgcggggggcgggatttgatgcggtcgagtttctgtttccctacgaggtcgagcccagcgccatcgccgaacggttgcagcgcaaccgcctgacccaggtgctgtttaacctgccgccgggcgattgggccgccggcgagaagggatttgcggcgttgccggacaagttcgacgagttgcagcgcagcctgcactcggcgctgccttatgcgctcgcgaccggggtgaagcggctacatctgctggcgggcaatgccgaccgccgcgacgcggcggcggcgctggcgtttcggcggtccttggcggttgccgcgcatttcttcgcgccgcacggcatcgacgtgctgatcgagccactaaaccggcgcgacgcgcccggctatttcctcgacgatgtcgattacgctcacgctctcgttcgcgagatggccattgccaatctgaagctgcaattcgacgtctatcactgccagatcctgcatggcgacgtcaccacccggctgcgcgagatgctgccgatgatcggccatgttcagatcgccagcgtgccgtcccggcacgaaccggacggcgaggagctcaactatccgtttctattcgacgagctcgaccggctcggttacgccggctttgtcggcgccgagtatcgtccgcgcggcaagaccgaggacggcctcggctggttcaaaccgtaccgcgccggaacctga

SEQ ID NO: 5005 - protein, 259 aa, Rhodopseudomonas palustris CGA009
MPRFAANLSLMFTEHAFLDRFDAARGAGFDAVEFLFPYEVEPSAIAERLQRNRLTQVLFNLPPGDWAAGEKGFAALPDKFDELQRSLHSALPYALATGVKRLHLLAGNADRRDAAAALAFRRSLAVAAHFFAPHGIDVLIEPLNRRDAPGYFLDDVDYAHALVREMAIANLKLQFDVYHCQILHGDVTTRLREMLPMIGHVQIASVPSRHEPDGEELNYPFLFDELDRLGYAGFVGAEYRPRGKTEDGLGWFKPYRAGT

SEQ ID NO: 5006 - DNA, 795 bp, Nasonia vitripennis
  CDS (1)..(795)
atggcctacaaattctgctgtaatttgtcctttatgtttcaaagagaagcgacatcgatactcgatcggtatcaattggccaaagatgcaggcttcaaggctgtggaaagtggatttcctcttggattcagcgtgcaacaggttgcagaagccaggaagaccgccggcatccagcaagtcctcataaacgtgtatacaggggatacgagtaaaggagaactgggatttgctgctctcccagggaaagaggaagagttcagaagaagcatcgaaaccaccatagaatatgccaaagctttggattgcaaaatgattcacgttatggctggcaaagtggtggatgcaacgtcagtcaacgatgccacatatgagaagaatctgaggtacgctgtagatagatttgcatccgagcagatagttgccctcatagaaccaattaattccatcaccgtcccaaattactacatgaacgatttcagtaaagccttagccctcgtacaaaagatcaacagtccaaacttgaagttgctcgtcgatattttccacctacagcagactcagggaaggataacaaactccatcgaaagctactatcccttcataggccacattcaaattgcacaagtgccaaacagaaacgagccagactctgctggagaaatagattatcggtatgtgcttgctgtactggaaaaagctggctacaataagtacattggcctggaatataagccacaagctgctaccggggaaggtctgtccaagtggttgaaccgctttggatgcactctgtga

SEQ ID NO: 5007 - protein, 264 aa, Nasonia vitripennis
MAYKFCCNLSFMFQREATSILDRYQLAKDAGFKAVESGFPLGFSVQQVAEARKTAGIQQVLINVYTGDTSKGELGFAALPGKEEEFRRSIETTIEYAKALDCKMIHVMAGKVVDATSVNDATYEKNLRYAVDRFASEQIVALIEPINSITVPNYYMNDFSKALALVQKINSPNLKLLVDIFHLQQTQGRITNSIESYYPFIGHIQIAQVPNRNEPDSAGEIDYRYVLAVLEKAGYNKYIGLEYKPQAATGEGLSKWLNRFGCTL

SEQ ID NO: 5008 - DNA, 804 bp, Anopheles gambiae str. PEST
  CDS (1)..(804)
atgactgcgcttaagttttgtgcgaatttgaattttatgttcctggaagcgagttccttcctgggtcgctaccgtgctgcaaaggcggcgggcttccagggcgttgaaggaccatttccacccgccgaaatcaatccggaatcgctaaaaaccgtcctggaggagacaggattgaggcaaatcctactgaacattgcgctgggagacgcgcagggtggtcagtttgggtgtgccgccctgcctggatgggagtcggagtttctcgccaatgtcgaacgcaccgtcgaatacgccaaggctgtcggttgcgggaaaatacacataatggcaggtaagctggagggtccggcaacggaagcacacgatcgtacctatcttgccaatcttcgactcgctgctccgatcttggaacggaacaatattatcggtgttattgaacccattaacaagtatgcggtgcctgggtactatctttcctgttacgataaggctgttcagaccatcacctccgtcggcagtccgaatttgaagctgatgttcgatatctaccacgcccagcatatacgcgggaacatcacgaacagcatccgtgagctggcgtcccacatcggacacgtgcagttggcacaggtaccgggccgaaacgaaccggacagtgatggtgaattgaactttcgccacgtgctacaagtgctggacagcgagggccagtacgcggacggctgggttgggtgtgagtatcgcccgctgaccagtacggtcgaaggactccgctggttgcgtgactttggctattggcagtga

SEQ ID NO: 5009 - protein, 267 aa, Anopheles gambiae str. PEST
MTALKFCANLNFMFLEASSFLGRYRAAKAAGFQGVEGPFPPAEINPESLKTVLEETGLRQILLNIALGDAQGGQFGCAALPGWESEFLANVERTVEYAKAVGCGKIHIMAGKLEGPATEAHDRTYLANLRLAAPILERNNIIGVIEPINKYAVPGYYLSCYDKAVQTITSVGSPNLKLMFDIYHAQHIRGNITNSIRELASHIGHVQLAQVPGRNEPDSDGELNFRHVLQVLDSEGQYADGWVGCEYRPLTSTVEGLRWLRDFGYWQ

SEQ ID NO: 5010 - DNA, 798 bp, Acinetobacter sp. ADP1
  CDS (1)..(798): transl_table=11
atgatgagtcagcttgcagtcaatctgtccatgatatttacagagtcacctttaattgaacgctttgcattagcgcatcagtatggatttcagcatgttgaaatccagtttccgtatgagctctctattgaggagatccagactcaattggctcaatacaatttgagtttatgtctgatcaatgttcccgcaggcgacctgatgcaaggtggtgatggtctggctggcataccaggtcaagaacaggcttttgcacaagcattacaacaagccgttgagtatgccactgcgttaaatgttccacgggtgaatattctcgctggcaaacaaccggttgatacagacctgctgccttgcttgaatacactagccagtaatctcaaatttgcatgtgagcgtttgactgaacacggtattgagcccgtttttgagatgatcaatggtacagatatgccacgcttcttggttcagaacattgctcaggcgcaagaaatgctagaagctgtaaggcaccctgctctcaagatgcaatatgattgttaccatatggccatgatgggcgaagatgtgctcgcaggcttaaaagaaaatatcggtcagatcggacatattcaatttgcagactgtcctggacgtcacgaaccagatactgcgcaaatccactttaatgaaatttttcaatggatacagcaaagcacttatcaaggttatattgcggctgaatatcgacctcaatccagctcagcgcaatcttttgcgtggaaaaacaaatatttcgcaaatgatgtaaatagctag

SEQ ID NO: 5011 - protein, 265 aa, Acinetobacter sp. ADP1
MMSQLAVNLSMIFTESPLIERFALAHQYGFQHVEIQFPYELSIEEIQTQLAQYNLSLCLINVPAGDLMQGGDGLAGIPGQEQAFAQALQQAVEYATALNVPRVNILAGKQPVDTDLLPCLNTLASNLKFACERLTEHGIEPVFEMINGTDMPRFLVQNIAQAQEMLEAVRHPALKMQYDCYHMAMMGEDVLAGLKENIGQIGHIQFADCPGRHEPDTAQIHFNEIFQWIQQSTYQGYIAAEYRPQSSSAQSFAWKNKYFANDVNS

SEQ ID NO: 5012 - DNA, 789 bp, Erwinia carotovora subsp. atroseptica SCRI1043
  CDS (1)..(789): transl_table=11
atgcctaagtttgctgccaatctttctatgctgtttacagacgttccgtttctcgatcgctttaaagccgctgccgatgcgggttttacctcggtcgagtacctgtttccttatgaatatccggcaccgctgctggcggaaaagctgagggagaatggcctgaagcaggtgttgttcaatactgcgcccggcaacatcgccgcgggtgaatggggcgtgtctgccctgcccgaccgcattgaagatgctcgtcgggacatcgataacgccttggaatatgcactggcgctgaattgtccttcagtactggtgatgggaggcgtcgttccgcccggtgaagaccgtgacgcctatcagcaaaccttcatcgataacctgcgctacgcggctgataaattcgcgccgcatggcatcaatatcatgattgaagcactgagtgcgaaggtgaaaccgaattacctgttcgccagtcagtatcaggcgctggaattagccaatctgatcgaccggccgaatatctatattcaggtggacttctttcacgcacaaattgtcgatggcaacctgacgcaaattattcacgatttagatggccgcatcggacatattcaaattgcttcggttccggcacggcatgaacccgatgaaggagaaattaattatccattcatctttgccgaattggatcgcgtgaattattccggctggattggctgtgaatataacccgcgtggtaaaaccgaagacggattgggctgggctgaaccctggctggagaaaaaacactaa

SEQ ID NO: 5013 - protein, 262 aa, Erwinia carotovora subsp. atroseptica SCRI1043
MPKFAANLSMLFTDVPFLDRFKAAADAGFTSVEYLFPYEYPAPLLAEKLRENGLKQVLFNTAPGNIAAGEWGVSALPDRIEDARRDIDNALEYALALNCPSVLVMGGVVPPGEDRDAYQQTFIDNLRYAADKFAPHGINIMIEALSAKVKPNYLFASQYQALELANLIDRPNIYIQVDFFHAQIVDGNLTQIIHDLDGRIGHIQIASVPARHEPDEGEINYPFIFAELDRVNYSGWIGCEYNPRGKTEDGLGWAEPWLEKKH

SEQ ID NO: 5014 - DNA, 795 bp, Yersinia pseudotuberculosis IP 32953
  CDS (1)..(795): transl_table=11
atgctcaaattcgcagccaatctaacgtggttatttaccgaggtgccatttttacagcgctttgctttggccgctaaggctgggttcccggcagtagagtgccttttcccctatcaggaacagatcgccgatgtgcaacaagcacaaaaagcgagcggcattccggtagttttgatcaatgcccctgcgggagaatgggaaaatggccagcggggactcgcctcactgcccgatgctggcgagccgtttcgccacagtgtgcggctggcgcgtgaatatgccgtggcattgggatgtaaacagattcatatcatggctggcaatagagaagagagtatcactttcgatgagcaatatgcgttactgattgaacgattacgttatgctgcagactatttaatggctgacaatatcagggtgcttattgaacctttaaataatgacaatatgccgggttattttatttcatcatttccgctggcggaaaaaataattcaccagtgtgagagaaagaatatttttttacagtttgatgtttaccattgccaaaaaatacacggcaacctatgggccaacctacaacattactggccgttaatttcacatatacagatagcctcggtacctgaacggcatgaaccgaataaaggcgaggtcaactacccttggttattccaacaactggtaataaaaaattatccaggctggattggatgtgaatatcaacccgaaaatgaaacattctcagggttggggtggttgggaaaaaataaaaatatcaaggcgttttcatag

SEQ ID NO: 5015 - protein, 264 aa, Yersinia pseudotuberculosis IP 32953
MLKFAANLTWLFTEVPFLQRFALAAKAGFPAVECLFPYQEQIADVQQAQKASGIPVVLINAPAGEWENGQRGLASLPDAGEPFRHSVRLAREYAVALGCKQIHIMAGNREESITFDEQYALLIERLRYAADYLMADNIRVLIEPLNNDNMPGYFISSFPLAEKIIHQCERKNIFLQFDVYHCQKIHGNLWANLQHYWPLISHIQIASVPERHEPNKGEVNYPWLFQQLVIKNYPGWIGCEYQPENETFSGLGWLGKNKNIKAFS

SEQ ID NO: 5016 - DNA, 798 bp, Mannheimia succiniciproducens MBEL55E
  CDS (1)..(798): transl_table=11
ttgaaaacagaggaaaataaaatgcctaaatttgcagcaaacttaaccatgatgtttaacgaggtaccttttttagatcgttttgaagcggcggctaaagcgggatttaaatatatcgaatttctttggccttatgattatccggccgaacagattaaagccaaactggatcaatacggtttaaaacaaattctgtttaactcattacccggcgatattgctgccggcgaatggggtgtgtccgccattcccggcagagaagccgaaagccatcaacatattgatttggctttggaatatgccttggtattgcaatgtccgaccgtattaattatgggcggcgttgtcccgccgggtcagagccgcgccaaatacaaacagacttttattgataatctgcgttatgcgtcggaaaaatttaaaccgcataatatcaatattgtactggaagcgttaagcccgcaagtaaaagaaaattatctaatgaaaacccaggacgacgccctagaaattattgagctggtcaatcgggacaatgtgttcctacagcttgattattaccacgctcaaaatgtggaaggcaatcttgcgcgtttaaccgatcgggtagcgcctgtgatgaaacatattcaaatcgcatccgttccggatcgtcacgaacccgatgaaggagaaatcaactatcaatatatctttgataagcttgatgctatcggctatgacggttatgtaggatgcgaatataaaccgcgaaccgaaaccacagccggtttagcctggtttgaaaaatacaaataa

SEQ ID NO: 5017 - protein, 265 aa, Mannheimia succiniciproducens MBEL55E
MKTEENKMPKFAANLTMMFNEVPFLDRFEAAAKAGFKYIEFLWPYDYPAEQIKAKLDQYGLKQILFNSLPGDIAAGEWGVSAIPGREAESHQHIDLALEYALVLQCPTVLIMGGVVPPGQSRAKYKQTFIDNLRYASEKFKPHNINIVLEALSPQVKENYLMKTQDDALEIIELVNRDNVFLQLDYYHAQNVEGNLARLTDRVAPVMKHIQIASVPDRHEPDEGEINYQYIFDKLDAIGYDGYVGCEYKPRTETTAGLAWFEKYK

SEQ ID NO: 5018 - DNA, 777 bp, Burkholderia mallei ATCC 23344
  CDS (1)..(777): transl_table=11
atgccgcgcttcgccgccaatctcacgatgatgtacaacgagcacgcgttcctcgagcgcttcgccgccgcggcacgcgacggcttcaaggcggtcgagtacctgttcccgtacgagttccccgccgccgagctcaaggcgcgcctcgacgcgcacgacctcgtgcaggcgctgttcaacgcgccgcccggcgactgggcggcgggcgagcgcggaatcgcgtcgctgccgggccgcgaggacgagttcaggcgcgcgatcgacaccgcgctcgactacgcgcgcgtgatcggcaacgacacgctccacgtgatggcgggcctgatcgcgccgacgcaggatcgcgcgcggcatcgcgacgtgtatctgcgcaacctcgcgcacgcggccgaagcggcgcgcgcgcagaacgtgacgatcgtgatcgagccgatcaacccgcgcgacatgccgggcttcttcctgaaccgccaggacgacgcgcaggcgatctgccgcgaagtcggcgcgccgaacctgctggtgcagttcgactgctatcactgccagatcgtcgaaggcgatctggcgatgaaattgaagcgcgacatcgcgggcatcggccacatccagatcgcgggcgtgccgcagcgtcacgagccggacgtcggcgaaatccactatccgtacctgttcgagctgatcgacgtgctcggctacgacggctggatcggctgcgagtatcggccgaaggccggcacctccgagggcctcggctggctcgcaccgtatctgtaa

SEQ ID NO: 5019 - protein, 258 aa, Burkholderia mallei ATCC 23344
MPRFAANLTMMYNEHAFLERFAAAARDGFKAVEYLFPYEFPAAELKARLDAHDLVQALFNAPPGDWAAGERGIASLPGREDEFRRAIDTALDYARVIGNDTLHVMAGLIAPTQDRARHRDVYLRNLAHAAEAARAQNVTIVIEPINPRDMPGFFLNRQDDAQAICREVGAPNLLVQFDCYHCQIVEGDLAMKLKRDIAGIGHIQIAGVPQRHEPDVGEIHYPYLFELIDVLGYDGWIGCEYRPKAGTSEGLGWLAPYL

SEQ ID NO: 5020 - DNA, 789 bp, Burkholderia pseudomallei K96243
  CDS (1)..(789): transl_table=11
atgccgaaattcgccgccaacctgacgatgctgttcaacgaagtcccgtttctcgaccgtttcgccgcagcggccgaagcgggcttcagcgccgtcgagttcctgtttccctatccgtacgcgaaggacgagctcgccgagcggctcgacgcgaatcgcctgcgcctcgtgctgcacaacctgcccgcgggccactgggatcagggcgagcgcggaatcgcgtgcctgcccgatcgcatcggcgaattccaggacggcgtcggccgcgcgatcgactatgcgcgcgcgctgaaggtgccgcagctgaattgcctcgtcggcatcgcgcccgcgagcgtcgggcgcgacacggcgctcgcgacgatcgtcgagaacctgcgcttcgccgccgccgagctgaagaaggcgggcctgcgcctgctcgtcgagccatgcaacgcgtacgacatccccggcttcgcgctgaaccgctccgccgaggcgctcgacgtgatccgcgcggtcggcgccgacaacctcttcctgcagtacgacatctatcacatgcagcgcatggagggcgagctcgcggcgacgatccgccggcacatcggcgcgatcgcgcatgtccagatcgcggacaacccgggccggcacgaaccgggcacgggcgagatccattacgcgttcctgttcgatctgctcgacgagctcggctacgacggctatgtcggctgcgaatacaagccgcgcacgacgacggccgagggcctcggctggctgcggcggatcgcgcgcgtcgccgcgtga

SEQ ID NO: 5021 - protein, 262 aa, Burkholderia pseudomallei K96243
MPKFAANLTMLFNEVPFLDRFAAAAEAGFSAVEFLFPYPYAKDELAERLDANRLRLVLHNLPAGHWDQGERGIACLPDRIGEFQDGVGRAIDYARALKVPQLNCLVGIAPASVGRDTALATIVENLRFAAAELKKAGLRLLVEPCNAYDIPGFALNRSAEALDVIRAVGADNLFLQYDIYHMQRMEGELAATIRRHIGAIAHVQIADNPGRHEPGTGEIHYAFLFDLLDELGYDGYVGCEYKPRTTTAEGLGWLRRIARVAA

SEQ ID NO: 5022 - DNA, 843 bp, Azoarcus sp. EbN1
  CDS (1)..(843): transl_table=11
atgccccgattcgctgcgaacctgacgatgctgttcgacgagctcgacttcctcgaccgcttcggcgcggcggcgcaggctggcttcaggggcgtcgagttccaatttccgtatgcgctgccgaaggaggcgatcgccgagcggctcgaccgcgccggtctcgtgcaagtgctgcacaacctgcctgcgggcgactgggagcacggcgagcgcggcatcgcgtgtcaccccgagcgcatcggcgagttccaggacggagtcggatgcgcgatcgagtacgcgcaggcgctcggttccaagcagctcaactgcctcgccgggatcgcgccgcacggagtcgatcccgacacgctgcacaagactttcgtcgccaacctgcgctttgccgcaggcaagctgggcgaagccggcatccgcctgctgatcgagccggtcaacacctgggacatcccgggcttctatctgaaccgtaccgcgcaggcggctgaactcatcgaagcggtcgactcggacaacctcttcatccagtacgacatctaccacgcgcaacgcatggaaggcgagctcggcaacacgatcgcgcgctttctgccgaagatcgcgcacatgcagctcgcggatacgccggggcgcaacgagcccggcacgggcgaaatcaatttcgcctggctgttcgcccacatcgaccgcctcggctacgacggctggatcggttgcgaataccgccccgccgcgggcaccacgaacggactcggctggatcgacgcgttggtgggccgcgaacgtccaagaccgatgaagacgacaaccggcctctcccgaccggcaaggaaagcacgatga

SEQ ID NO: 5023 - protein, 280 aa, Azoarcus sp. EbN1
MPRFAANLTMLFDELDFLDRFGAAAQAGFRGVEFQFPYALPKEAIAERLDRAGLVQVLHNLPAGDWEHGERGIACHPERIGEFQDGVGCAIEYAQALGSKQLNCLAGIAPHGVDPDTLHKTFVANLRFAAGKLGEAGIRLLIEPVNTWDIPGFYLNRTAQAAELIEAVDSDNLFIQYDIYHAQRMEGELGNTIARFLPKIAHMQLADTPGRNEPGTGEINFAWLFAHIDRLGYDGWIGCEYRPAAGTTNGLGWIDALVGRERPRPMKTTTGLSRPARKAR

SEQ ID NO: 5024 - DNA, 756 bp, Silicibacter pomeroyi DSS-3
  CDS (1)..(756): transl_table=11
atgaccgccttttctgccaatcttggatttctttgggtcgaccggcccctaccggacgcgatccgtgcagcgaaggcggccgggttcgatgcggtcgagtgtcactggccctacgaaacccgtgccgaggacgtgaaggcggcgctggacgaaacaggcttgccaatgctcggcctgaacacgatccgtggcaacccgggcgaaaacggccttgccgcgttgccgggccgtgaggacgaggcacacgccgccattgatcaggcgatccgctatgccgatgcggtgggcgcgggtgcggttcatgtcatggccggttttgccgccggcccgcaggcgcgtgccatgttcgagcgtaatctcgattacgcgacatcgcgaaccgaccgcacgatcctgatcgaaccgctaaacaggcacgacgcgccggggtacttcctgcagaccaccgggcaagcacaagagatcatcaaatccgtcagcgcgcccaacctgaagctgatgttcgattgctaccatgtaggccggaccgaaggggacatactgacccgcctcaccgagcttttgccgttgatcggccatatccaattcgcatcggttcccgatcggggcgcaccggatcatggcgagttgaattatgccgagatattttcgcatatatcaaaactcggatggacgacgccgcttggggctgaattcaagcctcgcgagacagacgagatcacgcgctggctcacctcgtttcgatcgggtggttag

SEQ ID NO: 5025 - protein, 251 aa, Silicibacter pomeroyi DSS-3
MTAFSANLGFLWVDRPLPDAIRAAKAAGFDAVECHWPYETRAEDVKAALDETGLPMLGLNTIRGNPGENGLAALPGREDEAHAAIDQAIRYADAVGAGAVHVMAGFAAGPQARAMFERNLDYATSRTDRTILIEPLNRHDAPGYFLQTTGQAQEIIKSVSAPNLKLMFDCYHVGRTEGDILTRLTELLPLIGHIQFASVPDRGAPDHGELNYAEIFSHISKLGWTTPLGAEFKPRETDEITRWLTSFRSGG

SEQ ID NO: 5026 - DNA, 786 bp, Pseudomonas syringae pv. syringae B728a
  CDS (1)..(786): transl_table=11
atgcctcgttttgccgccaacctcagcatgctgtacccgcagcatgattttcttgagcgctttgccgcagccgctgccgacggtttcggcgcggtcgagtacctgtttccttatgcttacacgccgcaggagctcaagcagcgcctgagcgacaacggtctggtgcaggcgctgttcaacgctccaccgggcgactgggacgcgtgcgagcgaggcattgccaccctgccgggccgtgaagcggaatttcgcagcggtatcgagcgggcactggaatatgcgcaggtgctgggcaatgaccgtgtgcatgtcatggccggtctattgcctaacgaagggttgcgtgagcgtcatcaggcggtctatctggagaacctggcgttcgcggctgagcaagccaagagcgcaggcgtcacgatcctgatcgagccgatcaacacccgcgacatgccgggcttcttcctcaaccgccaggatcaggcgcaggacatctgcaagctggtgggcgccgacaacctgaaagtgcagttcgactgctaccactgccagatcgtcgaaggcgacctgacgaccaagctgcgtcgtgactttgcaggcatcggccacatccagatcgccggggtgccggatcgcaacgaaccggacctgggcgaactgaactacgagcacctgttcaacgtcatcgacgaactgggctacagcggctggatcggttgcgaatatcgcccgaaaggcgataccagcgaaggtctggcatggttgcgcgcgttgcaggccaagggctga

SEQ ID NO: 5027 - protein, 261 aa, Pseudomonas syringae pv. syringae B728a
MPRFAANLSMLYPQHDFLERFAAAAADGFGAVEYLFPYAYTPQELKQRLSDNGLVQALFNAPPGDWDACERGIATLPGREAEFRSGIERALEYAQVLGNDRVHVMAGLLPNEGLRERHQAVYLENLAFAAEQAKSAGVTILIEPINTRDMPGFFLNRQDQAQDICKLVGADNLKVQFDCYHCQIVEGDLTTKLRRDFAGIGHIQIAGVPDRNEPDLGELNYEHLFNVIDELGYSGWIGCEYRPKGDTSEGLAWLRALQAKG

SEQ ID NO: 5028 - DNA, 783 bp, Pseudomonas fluorescens Pf-5
  CDS (1)..(783): transl_table=11
atgccgcgctttgctgccaacctgtccatgctgttcaccgaacaggacttcctcgcccgcttcaaggcggccgccgatgccggcttcagcggcgtcgaatatctgttcccctacgaattcagctctgccgaaattaaggcgcaacttgacgcccacggcctgagccaggtgctgttcaacctgccggccggcgactgggccaagggtgaacgcggtatcgcctgcctgcccgaccgggtcgaggagttccgcgccggggtcgacctggccattgcctacgcccaggtcctgggcaatacccagatcaactgcctggcaggcatccgcccacagggcgccgatgaagccctggtggaaaagaccttggtcgccaacctcaagtacgccgccgacaagctccaggccgtgggcatcaagctggtgatggaagccatcaacacccgcgacattcccggcttctacctcaacaataccgcccaggcgctgtcgattcgcgagcaggtgggcagcgacaacctgtacctgcagtacgacatctaccacatgcagatcatggagggagacctggcgcggaccatggccaaccacctgggccagatcaaccacatccagctggcggacaaccccgggcgcaacgagccgggcaccggcgagatcaactaccgcttcctcttcgagcacctggaccgcatcggctaccagggctgggtcggttgcgagtacaagccgctgaccaccactgaagccggccttggctggctgaaaacccacaacgcaatctga

SEQ ID NO: 5029 - protein, 260 aa, Pseudomonas fluorescens Pf-5
MPRFAANLSMLFTEQDFLARFKAAADAGFSGVEYLFPYEFSSAEIKAQLDAHGLSQVLFNLPAGDWAKGERGIACLPDRVEEFRAGVDLAIAYAQVLGNTQINCLAGIRPQGADEALVEKTLVANLKYAADKLQAVGIKLVMEAINTRDIPGFYLNNTAQALSIREQVGSDNLYLQYDIYHMQIMEGDLARTMANHLGQINHIQLADNPGRNEPGTGEINYRFLFEHLDRIGYQGWVGCEYKPLTTTEAGLGWLKTHNAI

SEQ ID NO: 5030 - DNA, 783 bp, Pseudomonas fluorescens Pf-5
  CDS (1)..(783): transl_table=11
atgcctcgttttgctgccaacctcagcatgctctacccggaacatgactttctcgaacgtttcgccgccgcggcggccgacggcttcacggccgtggaatatctgtttccctacgactacagcccccaggagctgaaacagcgcctggacgaccacggcctgcaacaggccttgttcaacgctccgcccggcgactgggcggcgggggagcggggcatcgtttccctgcccgggcgcgagcaggaattccgccagggtttcgacaaggccctggaatacgccgcggtgctgggcaactcgcgggtccacgtgatggccggcctgctgccgtccgagaacgatcgcccgcggcaccacggcgtctacctggagaacctggcccacgccacggcccaggcggccaaggtcggggtcacggtgctgctggagccgatcaacacccgggacatgccgggcttcttcctcaaccgccaggaccaggcccaggccatctgcaaggaagtcggcgcggccaacctcaaggtgcagttcgactgctatcactgccagatcgtcgaaggcgacctggcggtgaagctgcgtcgggacctggcgggcatcggccatatccagatcgccggggtgccggaccgccacgagccggacctgggcgaactgaactatccctacctgttccagctgatggacgaccttggctacgacggctgggtcggttgtgaataccgcccgcgcggcaacacctccgccggcctgcagtggctgcgggactggcaggcgcgctaa

SEQ ID NO: 5031 - protein, 260 aa, Pseudomonas fluorescens Pf-5
MPRFAANLSMLYPEHDFLERFAAAAADGFTAVEYLFPYDYSPQELKQRLDDHGLQQALFNAPPGDWAAGERGIVSLPGREQEFRQGFDKALEYAAVLGNSRVHVMAGLLPSENDRPRHHGVYLENLAHATAQAAKVGVTVLLEPINTRDMPGFFLNRQDQAQAICKEVGAANLKVQFDCYHCQIVEGDLAVKLRRDLAGIGHIQIAGVPDRHEPDLGELNYPYLFQLMDDLGYDGWVGCEYRPRGNTSAGLQWLRDWQAR

SEQ ID NO: 5032 - DNA, 774 bp, Dechloromonas aromatica RCB
  CDS (1)..(774): transl_table=11
atgccaaagttcgccgccaatctcagttttctgttcaccgacctgcccttccatgatcgttttcagcgggcagccgccaccgggtttcaaggcgtcgaatatctctttccctacgattggcccgcgcacgaggtggccgactggctgaaggcggcggacgtcgagcaggtattgttcaatttgccgcccggtgactgggcggccggcgagcgcggcctggcctgtctgccgcaccgccagggggagttcgcggaaggggtcgagctggcgttgaattacgccatactgctcgactgcgagcgcgtgcattgcatggcagggttaaggccgggcgggatttcggaggcggaactggcagcgacctatatcgccaacctgcaatttgctgccgaccgatttgccactgtcggggcgacggtgatgatcgagccgatcaacagtcgcatcgacatgccgggctattggctggacgacgtcaacaaggccctgcgcctgatcgaatccatcggccgcagcaatgtgaaactgcagctcgacctttaccacgcccagatcattcagggcgacctggcacggacgattgaagaaaacatcgagcacatcggccatgtccagattgctgataatcccggtcgccatgagccgggcaccggcgagatcaattatcccttcctgttcaacttgctcgaccggctaggttacgccggctgggtgggctgcgaatacaagccgctgacgacgaccgaggccggtcttggctggttgcccaaatga

SEQ ID NO: 5033 - protein, 257 aa, Dechloromonas aromatica RCB
MPKFAANLSFLFTDLPFHDRFQRAAATGFQGVEYLFPYDWPAHEVADWLKAADVEQVLFNLPPGDWAAGERGLACLPHRQGEFAEGVELALNYAILLDCERVHCMAGLRPGGISEAELAATYIANLQFAADRFATVGATVMIEPINSRIDMPGYWLDDVNKALRLIESIGRSNVKLQLDLYHAQIIQGDLARTIEENIEHIGHVQIADNPGRHEPGTGEINYPFLFNLLDRLGYAGWVGCEYKPLTTTEAGLGWLPK

SEQ ID NO: 5034 - DNA, 783 bp, Ralstonia eutropha JMP134
  CDS (1)..(783): transl_table=11
atgccgcgtttcgccgccaacctttcgatgatgtacacggagcacgacttcctggaccgcttcgccgctgccgcggcggacggcttccaggccgtcgagtacctgttcccgtacgagtacccggccgccgaactgcgtgcgcgactcgacgccagcggcctcgtgcaggcgctgttcaatgcgccgccgggcgactgggccgcaggcgagcgcggcattgccgccctgcccggccgcgaagccgagttccgcgatgccttcggccgcgcgctcgaatacgccggcgtgatcggcaatgaccgtgtccacgtgatggccggcctgattcccgccgataccgacctcgcgcgctgtcgtgccacctatctggaaaacctggcctacgccgcgaaggccgctgccgcccaaggcatcaccgtgctgatcgagccgatcaacacacgcgacatgcccggctatttcctgaaccgccaggacgacggccaggccatctgcaaggaagtcggcgccgcgaacctgaaggtgcagttcgactgctaccactgccagatcgtcgaaggcgatgtcacgaagaaactgcagcgcgacttcggcggcatcggccatatccagatcgccggcgtgccggagcgccacgagccggacatcggcgaactgaactacccctacctgttcgatgcgatcgacagcctcggctaccagggctggatcggctgcgaataccggccgcgcgccggcacctcggccggcctgggctggatcaagccgtacctgaagcgctga

SEQ ID NO: 5035 - protein, 260 aa, Ralstonia eutropha JMP134
MPRFAANLSMMYTEHDFLDRFAAAAADGFQAVEYLFPYEYPAAELRARLDASGLVQALFNAPPGDWAAGERGIAALPGREAEFRDAFGRALEYAGVIGNDRVHVMAGLIPADTDLARCRATYLENLAYAAKAAAAQGITVLIEPINTRDMPGYFLNRQDDGQAICKEVGAANLKVQFDCYHCQIVEGDVTKKLQRDFGGIGHIQIAGVPERHEPDIGELNYPYLFDAIDSLGYQGWIGCEYRPRAGTSAGLGWIKPYLKR

SEQ ID NO: 5036 - DNA, 783 bp, Pseudomonas fluorescens PfO-1
  CDS (1)..(783): transl_table=11
atgccgcgtttcgcagccaacctgtccatgctgttcaccgaacaggatttccttgcccgtttcgacgccgccgccaaggctggcttcagcggtgtcgagtacctgttcccgtacgatttcagctccgccgaaatcaaggccagactcgacgccaacggtctgacccaagtgctgttcaacctgccggccggtgactgggccaagggcgagcgcggtatcgcgtgcctgccggaccgggtcgaagagttccgcgccggggtcgatctggccatcgcttacgcacaggtgctgggcaacacccaggtcaactgcctggccggtatccgtccgcagggcgtggacgatgccaccgttgaaaagaccttcgtcgccaacctcaagtacgccgccgacaagctgcaagccgtcggcatcaaactggtgatggaagcgatcaacacccgcgacatcccgggtttctacctgaacaacacggcgcaagccctgtcgattcgcgagcaggtcggcagcgccaatctgttcctgcaatacgacatctatcacatgcaaatcatggaaggcgatctggcccgcaccctgcaatcgcacctggccgagatcaaccatgtgcagctcgccgacaacccgggccgcaacgagccgggcactggcgaaatcaactaccgcttcctgttcgaacacctcgatcgcatcggttatcagggctgggtcggctgcgagtacaaaccgctgaccaccactgaagcgggcctcggctggctgaagacccacaacgcgatctga

SEQ ID NO: 5037 - protein, 260 aa, Pseudomonas fluorescens PfO-1
MPRFAANLSMLFTEQDFLARFDAAAKAGFSGVEYLFPYDFSSAEIKARLDANGLTQVLFNLPAGDWAKGERGIACLPDRVEEFRAGVDLAIAYAQVLGNTQVNCLAGIRPQGVDDATVEKTFVANLKYAADKLQAVGIKLVMEAINTRDIPGFYLNNTAQALSIREQVGSANLFLQYDIYHMQIMEGDLARTLQSHLAEINHVQLADNPGRNEPGTGEINYRFLFEHLDRIGYQGWVGCEYKPLTTTEAGLGWLKTHNAI

SEQ ID NO: 5038 - DNA, 777 bp, Burkholderia sp. 383
  CDS (1)..(777): transl_table=11
atgccacgcttcgccgccaacctctcgatgatgtacaccgagcacgcgttcctcgaacgcttcgccgctgccgcctacgacggcttcaaggccgtcgagtacctgtttccgtacgacttcgccgccgaggacatccgtgcgcgcctcgacgcgcacgacctcgagcaggcactgttcaacgcgccgcccggcgactgggccgcgggcgaacgcggcaccgcttcgctgccgggccgcgaggacgagttccggcgcggcatcgaccaggcgctcgactatgcgcgcgtactcggcaacaagaagctgcacgtgatggccggcatggtgccgccgggcgccgaccgcgcacgccatcgcgacacctacgtggcgaacctgcgccatgcgacgcaggccgctgccgcgcacggcatcacgatcctgatcgagccgatcaaccagcgcgacatgcccggctatttcctgagccgccaggacgacgcgcaggcgatctgcgcggaagtcggcgtgccgaacctgaaggtgcagttcgactgctaccactgccagatcgtcgaaggcgacctcgcgatgaagctcaagcgcgatttcgcggggatcggccatatccagatcgcgggcgtgcccgagcgccacgagccggatatcggcgaactcaactacccgtatctgttcgcgctgatcgatgcgctcggctacgacggctggatcggctgcgagtaccgcccgaaggccggcacgtcggaaggcctcggctggctcaagccgtacctgtaa

SEQ ID NO: 5039 - protein, 258 aa, Burkholderia sp. 383
MPRFAANLSMMYTEHAFLERFAAAAYDGFKAVEYLFPYDFAAEDIRARLDAHDLEQALFNAPPGDWAAGERGTASLPGREDEFRRGIDQALDYARVLGNKKLHVMAGMVPPGADRARHRDTYVANLRHATQAAAAHGITILIEPINQRDMPGYFLSRQDDAQAICAEVGVPNLKVQFDCYHCQIVEGDLAMKLKRDFAGIGHIQIAGVPERHEPDIGELNYPYLFALIDALGYDGWIGCEYRPKAGTSEGLGWLKPYL

SEQ ID NO: 5040 - DNA, 795 bp, Rhodospirillum rubrum ATCC 11170
  CDS (1)..(795): transl_table=11
atgccacgcttcgcggccaatctttccacgctctttaccgaccgcccgctcgaggagcggttcgccgccgccgcggcctgcggctttcggggggtggagctgcagtttccctataccttggccccggaacggctgggcgatctggcggcgatgaaccggcttgatgtcgtgctcttcaacgccccgccgggcgattgggcggccggcgagcgcggccttgccgccctgccgggccgccagagcgagttccgcgacagcctggaggtcgtgctgccctatgtggaactggccggctgcgagcgcgtccacgtgatggccggggtggtcgccgaggacgactggcccgtcgccctggaaacctatgtcgaaaatctggcctatgccgccgatctgttcgccgagcgcggtgtgaaggtgctgatcgaggcggtcaataccgaggacatgccgggctatttcctgtcgcgtcccgatgacgccttgcaggtcatcgaagaggtcggccacaagaacctgcatgtgctttacgatttttatcacgcccagatcgttcagggcgggctgacggattttctggaatccaacatcgagcgcatcgcccatgtccaggtcgccggggttcccggacggcgcgaacccgatgccaatggcgagatcaactggccctatctgttcaatctgctcgatgcccacggcttccccggttgggtcggctgcgagtacaccccgcgcgccggcaccgaggccggcctgcgctgggcgcgggatttcgggatcagcgctccggcggcgtga

SEQ ID NO: 5041 - protein, 264 aa, Rhodospirillum rubrum ATCC 11170
MPRFAANLSTLFTDRPLEERFAAAAACGFRGVELQFPYTLAPERLGDLAAMNRLDVVLFNAPPGDWAAGERGLAALPGRQSEFRDSLEVVLPYVELAGCERVHVMAGVVAEDDWPVALETYVENLAYAADLFAERGVKVLIEAVNTEDMPGYFLSRPDDALQVIEEVGHKNLHVLYDFYHAQIVQGGLTDFLESNIERIAHVQVAGVPGRREPDANGEINWPYLFNLLDAHGFPGWVGCEYTPRAGTEAGLRWARDFGISAPAA

SEQ ID NO: 5042 - DNA, 810 bp, Burkholderia thailandensis E264
  CDS (1)..(810): transl_table=11
atgccacgcttcgccgccaacctcacgatgatgtacaacgagcacgcgtttctcgaccgcttcgccgccgcggcacgcgacggcttcaaggcggtcgagtacctgttcccgtacgacttccccgccgccgagctgaagtcgcgcctggacgcgcacggcctcgtgcaggcgctcttcaacgcgccgcccggcgactgggcggcgggcgagcgcgggatcgcgtcgctgccgggccgcgaggacgaattcaggcgcgcgatcgacaccgcgctcgactacgcgcgcgtgatcggcaacgacaagctccacgtgatggcgggcctgatcgcgccggcgcaggatcgcgcgcggcatcgcgacgtgtatctgcgcaacctcgcgcacgcggccgaagcggcgcgcgcgcagaacgtgacgatcgtcatcgagccgatcaacccgcgcgacatgccgggcttcttcctgaaccgccaggacgacgcacaggcgatctgccgcgaagtcggcgcgccgaacctgttggtgcagttcgactgctatcactgccagatcgtcgaaggcgacctggcgatgaaattgaagcgcgacatcgcgggcatcggccacatccagatcgcgggcgtgccggagcgtcacgaaccggacgtcggcgaaatccactatccgtacctgttcgagctgatcgacgcgctcggctacgacggctggatcggctgcgagtatcggccgaaggccggcacctccgagggcctcggctggctcgcgccgtacctgtcatctcccgcattctcacgaggcacattgcgatga

SEQ ID NO: 5043 - protein, 269 aa, Burkholderia thailandensis E264
MPRFAANLTMMYNEHAFLDRFAAAARDGFKAVEYLFPYDFPAAELKSRLDAHGLVQALFNAPPGDWAAGERGIASLPGREDEFRRAIDTALDYARVIGNDKLHVMAGLIAPAQDRARHRDVYLRNLAHAAEAARAQNVTIVIEPINPRDMPGFFLNRQDDAQAICREVGAPNLLVQFDCYHCQIVEGDLAMKLKRDIAGIGHIQIAGVPERHEPDVGEIHYPYLFELIDALGYDGWIGCEYRPKAGTSEGLGWLAPYLSSPAFSRGTLR

SEQ ID NO: 5044 - DNA, 789 bp, Desulfitobacterium hafniense Y51
  CDS (1)..(789): transl_table=11
atgcatgtaaagaaagaccggcttgttgccaacttatcctttctctttaatgatctgccgatgatggagcgtttcaaggcgaccaaagaggctggacttaaacgggtggagtttatgttcccttatgatttggaccttgccgagctcaaacaggagttggccgcccacgaactagagatggttctctttaacctccccgccggagactggggagccggtgagcggggtatcgcccttgaccccagccgtcaggaggagtttaaagaaggagtagcgcaagctgtcgccctcgctcaggctcttcatgtcaaacaaatcaattgcctggtggggaaggtccgtgaggatcaatccccggaggaacagcgggctaccctgatcgccaatgtccgctatgccgccaagcagttgcagcaaattggcgtcaagctgctcctcgaacccctgaatcgctttgatgccccgggattctatcttaataccacggaagatgtcctgaaggtcatcgacgaagcaggcagtgaaaatgttttcctccagtatgatgtttatcacgccgcccgggaaggagaggatctcctacagatcctgcgggaaaagctgcctcatatcgctcacattcaagtagccgataaccccggacgccatcagccgggtacaggggagatcgattaccacgctttctttaaggtcttaacagaggtcggctatccttatgccgtctctatggaatatgttcctcagccggatacggtggcttctttggagtggattaaagcgtttgagtag

SEQ ID NO: 5045 - protein, 262 aa, Desulfitobacterium hafniense Y51
MHVKKDRLVANLSFLFNDLPMMERFKATKEAGLKRVEFMFPYDLDLAELKQELAAHELEMVLFNLPAGDWGAGERGIALDPSRQEEFKEGVAQAVALAQALHVKQINCLVGKVREDQSPEEQRATLIANVRYAAKQLQQIGVKLLLEPLNRFDAPGFYLNTTEDVLKVIDEAGSENVFLQYDVYHAAREGEDLLQILREKLPHIAHIQVADNPGRHQPGTGEIDYHAFFKVLTEVGYPYAVSMEYVPQPDTVASLEWIKAFE

SEQ ID NO: 5046 - DNA, 810 bp, Burkholderia xenovorans LB400
  CDS (1)..(810): transl_table=11
atgccgaaatttgcagcgaatctcaccatgctgttcaacgaagtcccgtttctcgaccgctttgcggccgccgcggacgcgggctttcacgccgtcgagttcctgtttccgtacccgtaccagatcgtcgagttgagcgaacgtctgcagcagaaccgcctgaaactggtgctgcacaacctgcccgcgggcaactgggaagccggcgagcgcggcatcgcgtgtctgccggatcgggtgggcgagttccaggaaggcgtcggccgcgcgatcgaatacgcgagcgcgctgaaggtgccgcaactgaactgcctcgtcggcattccgacggccggcgtcgatgcggacaaggcgcgctcgaccatcgtcgagaacctgcgcttcgccgcgggcgagttgcaaaaagccggcatcaggctgctggtcgaaccgtgcaattcctacgacattccgggcttcgcgctcaatcgttctgctgaaggcctcgacgtgatccgcgcagtcggttcggacaatctgttcctgcagtacgacatctatcacatgcaacggatggaaggcgaactcgcggcgaccatcacgaagaacctgccgcggatcgcgcacatccagctcgccgacaatccgggccgcaacgaaccgggcacgggcgaaatcaactacccgttcctgttcgagctgctcgactcgcttggctacgacggctacgtcggttgcgaatacaaaccgcgcacgaccacggccgccggtctcggctggattcagagcgtggccgggcaaacccgcggcgcagcccacgccgccgcctga

SEQ ID NO: 5047 - protein, 269 aa, Burkholderia xenovorans LB400
MPKFAANLTMLFNEVPFLDRFAAAADAGFHAVEFLFPYPYQIVELSERLQQNRLKLVLHNLPAGNWEAGERGIACLPDRVGEFQEGVGRAIEYASALKVPQLNCLVGIPTAGVDADKARSTIVENLRFAAGELQKAGIRLLVEPCNSYDIPGFALNRSAEGLDVIRAVGSDNLFLQYDIYHMQRMEGELAATITKNLPRIAHIQLADNPGRNEPGTGEINYPFLFELLDSLGYDGYVGCEYKPRTTTAAGLGWIQSVAGQTRGAAHAAA

SEQ ID NO: 5048 - DNA, 783 bp, Ralstonia metallidurans CH34
  CDS (1)..(783): transl_table=11
atgccgcgcttcgccgcgaacctttcaatgatgtacacggagcacgactttctggaccgctttgccgccgccgcaaaggacgggttccaggccgtggagtacctgttcccgtacgaccatccggccgccgagatccgcaagcggctcgacgacaacggcctgacccaggccctgttcaacgcgccgcccggtgactggggcgcgggcgagcgtggcatcgccgccctgcccggccgcgagaccgagttccgcactgagttcgcgaaggccctcgaatacgctgccgtgctcggcaacgaccgcgtgcacgtgatggcaggcatcgtgccggccgacgccgaccacgcccgctgccgctccatctatctcgagaacctggcctatgcctctgcctcggccgcgtcgcatggcatcacggtgctgatcgagccgatcaacacccgcgacatgccgggctatttcctgaaccgccaggacgaaggccagaccatttgccgccaggtgggcgcggccaatctcaaggtccagttcgattgctatcactgccagatcgtcgagggtgatatcgcgaagaaactcgaacgcgacttcgctgggattggccatatccagatcgccggcgtgcccgaacgccacgaacccgatatcggcgaactgaactacccgtacctcttcgacgtcatcgaccggctcggatacacgggctggatcggctgcgaataccgcccgcgtggcggcacgtcggaaggtctgggctggatcaagccctggctgaagcgctga

SEQ ID NO: 5049 - protein, 260 aa, Ralstonia metallidurans CH34
MPRFAANLSMMYTEHDFLDRFAAAAKDGFQAVEYLFPYDHPAAEIRKRLDDNGLTQALFNAPPGDWGAGERGIAALPGRETEFRTEFAKALEYAAVLGNDRVHVMAGIVPADADHARCRSIYLENLAYASASAASHGITVLIEPINTRDMPGYFLNRQDEGQTICRQVGAANLKVQFDCYHCQIVEGDIAKKLERDFAGIGHIQIAGVPERHEPDIGELNYPYLFDVIDRLGYTGWIGCEYRPRGGTSEGLGWIKPWLKR

SEQ ID NO: 5050 - DNA, 768 bp, Silicibacter sp. TM1040
  CDS (1)..(768): transl_table=11
atgcctaagttcgcggccaatctatccatgctctttgcggagcttccttaccttgaccgattctcggctgccgcggctgctgggttcgaggcggtggaagttctctttccttatgagtttgccgccaaagaaacgcagcgtgcgcttcttgccaatgggctggagcttttgttgatcaatgccccgccgcccaattacaccggtggcgatccgggctatgctgccgttcccgaacaggcggagcgctttcagcgcgatattcgtcgggtactgcgctatgccgacatgttgaaagcgggacgtatccacatcatggcggggccagccaaaggggaggccgcgcggcggacctttgtgcagaacctgcaggcagcggcggagtctgcgccgcagcagcaattcacgatcgaaccgcttaacagcggagatttcccgggctatttcctcgacgattacaaccttgcgatcgacattctcgatgaggttgggcgcgacaatgtcaccctgcagttcgacgcttatcacgcccaacttatccacggagatgcgctcaaggtctgggagacttttgggagccgcgcgagccatgtgcaatttgcagcagctccgtcacgctgcgagccggggcgcggaccggtggattttgatgcgttgtttcaggcgatcgatgacagcggctatagtggttgggtcagcgcggaatacaccccgagcaccccaagaaccgaagacagcctgcgctggatgaaggccctgcagaccgcttga

SEQ ID NO: 5051 - protein, 255 aa, Silicibacter sp. TM1040
MPKFAANLSMLFAELPYLDRFSAAAAAGFEAVEVLFPYEFAAKETQRALLANGLELLLINAPPPNYTGGDPGYAAVPEQAERFQRDIRRVLRYADMLKAGRIHIMAGPAKGEAARRTFVQNLQAAAESAPQQQFTIEPLNSGDFPGYFLDDYNLAIDILDEVGRDNVTLQFDAYHAQLIHGDALKVWETFGSRASHVQFAAAPSRCEPGRGPVDFDALFQAIDDSGYSGWVSAEYTPSTPRTEDSLRWMKALQTA

SEQ ID NO: 5052 - DNA, 813 bp, Rubrobacter xylanophilus DSM 9941
  CDS (1)..(813): transl_table=11
gtgaggttctgcgcgaacgtctccatcttgttcggggaggtgccgtttctcgagcggttcgggagggcgagggaggcgggcttctcggcggtggagttctggtggccttccggggaggagcttgcggaggtggagtcggcggtacgggaggcggggctcgaggtggcgctcttcaacttcgacgccggggacatgcccggcggggacagggggctcctgagcgacccggaccgggtggagcggttccgggagaacgtgccggtggcgctggagctcgcggggaggctcgggtgcaggaggctgaacgcgctcgtggggcaccggctcgaggggatggggttagaggagcagctcgcgctggcgcgcgagagcgttgcttgggccgcggagagggcggcggagcggggggcggaggtcatgatcgaggcggtcaacaccttcgagaacgggccgtacctgctcagcaggacggaggaggcggcggcgttcgtccggagcgtgggccgggagaacgtccggctgcagtacgacgtctaccacatgcagcggatggagggtaacctcacggagaacctgcggcggcacaggggcttgatcgggcacgtgcaggtcgcggactcgccgggccgcggggagccggggaccggggagatcaactaccgctacgtgctcggggtgctggaggggctgggctacggcggctacgtgggcctggagtacaggccgaccacggagacgaccggggagagcctggcctggctgccgcgggagctgcgcggcggcgacgtgagggtagaggagctcgaactctag

SEQ ID NO: 5053 - protein, 270 aa, Rubrobacter xylanophilus DSM 9941
MRFCANVSILFGEVPFLERFGRAREAGFSAVEFWWPSGEELAEVESAVREAGLEVALFNFDAGDMPGGDRGLLSDPDRVERFRENVPVALELAGRLGCRRLNALVGHRLEGMGLEEQLALARESVAWAAERAAERGAEVMIEAVNTFENGPYLLSRTEEAAAFVRSVGRENVRLQYDVYHMQRMEGNLTENLRRHRGLIGHVQVADSPGRGEPGTGEINYRYVLGVLEGLGYGGYVGLEYRPTTETTGESLAWLPRELRGGDVRVEELEL

SEQ ID NO: 5054 - DNA, 768 bp, Mesorhizobium sp. BNC1
  CDS (1)..(768): transl_table=11
atgttgtacagcgaatggccctttctcgagaggtttgccatggccgcagcggacggttttcaagccgtcgaatatctgcgcccttatgacgagacccccgaggcgatatgcgagcagcttgaacgccacgacctcgtccaggcacttttcaacctgcccgccggggactgggcagcgggcgaacgcggaatcgcctgcatgccggaccgcgtcgaggagttcaaggcaggcgtcgaggttgcgatccgttatgcgcaggcgttgaagtgcagcaaaatcaattgcctcgccgggattgccccgacagatgccagtgctgcggttctcgaggtaacgctgatcagcaatctctcccatgccgcggcgaggctgcgagatgtcgggatcgatctgctgatcgagccgatcaatttgcgggacattcctggcttttttgtatcaacgaccgatcatgccgagcgcatcatcgacgccgtcggggccgataatctgttcatccagtatgacctctaccacacgcagatcatgcagggtgacctgatctgcggctatgagcggcttagggagcgcatcgggcatatccaactggccgacacccccggccgacacgagcccggcactggggagatcaacttcgcaaacgtcctgcccgccctcgattcgctgggatatggcggattcgtcggctgcgaatacaagcccctcgccggaacgcgcgaaggccttatctggatgaagccatacctgcagggaggagttggagaatga

SEQ ID NO: 5055 - protein, 255 aa, Mesorhizobium sp. BNC1
MLYSEWPFLERFAMAAADGFQAVEYLRPYDETPEAICEQLERHDLVQALFNLPAGDWAAGERGIACMPDRVEEFKAGVEVAIRYAQALKCSKINCLAGIAPTDASAAVLEVTLISNLSHAAARLRDVGIDLLIEPINLRDIPGFFVSTTDHAERIIDAVGADNLFIQYDLYHTQIMQGDLICGYERLRERIGHIQLADTPGRHEPGTGEINFANVLPALDSLGYGGFVGCEYKPLAGTREGLIWMKPYLQGGVGE

SEQ ID NO: 5056 - DNA, 822 bp, Rhodococcus sp. RHA1
  CDS (1)..(822): transl_table=11
atggataccttggcctacaccctgaactgctcgatcctgctcaccgacgtcccactcctgcagcgcccacaggctgcccgggatgccggattcgacgccgtcgaattctggtggcccttcgacaccgccgtgccgcgggacagcgacgtcgacgcgttcgtggccgcgatcgagaacgccggagtgcagctcaccgggttgaacttcgcggcgggcaacatgccggcgggggaccgcggactgctgtccgacccggcgcaggtctcggcgttccgcgacaacatcgacatcaccgtcggaatcggagaacggctgggcaccaaagctttcaacgccctgtatggtaatcgtatcgacgggacggatccgaagattcaagacggcacggccaccgagaacctcgcccaggccggcaaggcggcagatcgcatcggtgccgtcgtactcgtcgaaccggtcagcggcacgccggcgtacccgctgaagagcgcggccgacgcgatcgccgtgatcgaccgggtgaaggcggaacacggtgtcgattcgctccggctcctcgcggacctctaccacctcgaggtcaacggcgacgacgtcggcgccgcgatcgacacgtacgcggaccgcatcgggcacgtgcagatcgcggatgctcccggtcgcggagaacccggcaccggaacactcgacatcgacggctacctgaagaggctcgccggacacggctaccgcggatatgtggggctcgagtacaagtccacccgaccggacaccttcgactggttgccccgcgaacagcgcgcgtcccgcgccggccactga

SEQ ID NO: 5057 - protein, 273 aa, Rhodococcus sp. RHA1
MDTLAYTLNCSILLTDVPLLQRPQAARDAGFDAVEFWWPFDTAVPRDSDVDAFVAAIENAGVQLTGLNFAAGNMPAGDRGLLSDPAQVSAFRDNIDITVGIGERLGTKAFNALYGNRIDGTDPKIQDGTATENLAQAGKAADRIGAVVLVEPVSGTPAYPLKSAADAIAVIDRVKAEHGVDSLRLLADLYHLEVNGDDVGAAIDTYADRIGHVQIADAPGRGEPGTGTLDIDGYLKRLAGHGYRGYVGLEYKSTRPDTFDWLPREQRASRAGH

SEQ ID NO: 5058 - DNA, 777 bp, Haemophilus somnus 129PT
  CDS (1)..(777): transl_table=11
atgcccaaatttgctgcaaatttaaccatgatgtttaacgaagtcccttttttagaccgttttgaagcagctgctactgctggttttaaatatgtggaatacctttggccctatgattatccagcagatatgctaaaggaaaaattagataagtatggtttacaacaagttctatttaatacttcagcaggcaatgtagacgccggcgaatggggtgtctctgcgattccgggtcgtgaagcggatagccaccgtgacatcgatcttgctcttgaatatgctcttgcgttaggttgtccacacgttcatgtgatggcggcagttgtaccgcaaggcgaagatcgagaagcctataaacagactttcatcaaaaatgtgcaatatgcggcagataaatttaaaccgcacggtattaaagtcttattagaagcactcagcccggaagtcaaacctaactacctgctgaaaagtcaattcgacacgctagaaattgttgaatccgtcaaccgagataacgtctttgtacagttggattatttccacgcacaaaacgtagatggcaacttgtctcgcttaaccgacaaactcaacggcaaatttgcccatatccaaattgcctccgtgccgaatcgccatgagcctgatgaaggtgaaataaattaccaatatctctttgataaattggatcaaattggctatcaaggttttattggctgtgaatataaaccacgctctgacaccttagcaggtttagattggtttaaaccttacaaataa

SEQ ID NO: 5059 - protein, 258 aa, Haemophilus somnus 129PT
MPKFAANLTMMFNEVPFLDRFEAAATAGFKYVEYLWPYDYPADMLKEKLDKYGLQQVLFNTSAGNVDAGEWGVSAIPGREADSHRDIDLALEYALALGCPHVHVMAAVVPQGEDREAYKQTFIKNVQYAADKFKPHGIKVLLEALSPEVKPNYLLKSQFDTLEIVESVNRDNVFVQLDYFHAQNVDGNLSRLTDKLNGKFAHIQIASVPNRHEPDEGEINYQYLFDKLDQIGYQGFIGCEYKPRSDTLAGLDWFKPYK

SEQ ID NO: 5060 - DNA, 777 bp, Rhizobium leguminosarum bv. viciae 3841
  CDS (1)..(777): transl_table=11
atgccggttttcgccgccaacctgacgatgatgttcaacgaatggtcgttcctcgatcgcttcgacgccgcagccgatgccggctttgccgccgtcgaatacctttttccctatgaagccgctccggaggcgatcgccgaacggcttgcccgcaacaatctgcagcaggccttgttcaacctgccgccgggcgactgggcagcaggcgaacgtggcatcgccgctcttcccggacggttcgatgcgctgaaagccgatgtcgagcgggcactggactatgcggcggcaacgggcgtcagacggttacacctgatggcaggcatcgccgaccgtcatgacgaagacgccgcctcttcttatcggcgctccgtcacctatgccgccgggcggcttgcggaaaagggcatcgatctgctgctcgagccgatcaacgggcgaaacatgccgggatatttcctcaacgacttcggcgtggccgagcggctgattgccgaatgcggcctgccgaacctgaagctgcagttcgacatctatcaccggcagatcatccgtggcgacgtcactatggcgttgcgacgtctgctgccgatcaccggccatatccagatcgccagcgtgccgtcacgcaatgagcctgagggggaggaactgaactatccctatctgttcggcgaaatcgaccgcctggcttatgacggtttcgtcggctgcgaatacatcccgcgcggccacacactggacggtcttggctggttcaaaccttttgcacggagctag

SEQ ID NO: 5061 - protein, 258 aa, Rhizobium leguminosarum bv. viciae 3841
MPVFAANLTMMFNEWSFLDRFDAAADAGFAAVEYLFPYEAAPEAIAERLARNNLQQALFNLPPGDWAAGERGIAALPGRFDALKADVERALDYAAATGVRRLHLMAGIADRHDEDAASSYRRSVTYAAGRLAEKGIDLLLEPINGRNMPGYFLNDFGVAERLIAECGLPNLKLQFDIYHRQIIRGDVTMALRRLLPITGHIQIASVPSRNEPEGEELNYPYLFGEIDRLAYDGFVGCEYIPRGHTLDGLGWFKPFARS

SEQ ID NO: 5062 - DNA, 795 bp, Rhizobium leguminosarum bv. viciae 3841
  CDS (1)..(795): transl_table=11
gtgccgaaattttccgccaatctttccttcctttatcaggatctgccctttctcgaccgcttcacggcagccgcaaaggacggcttcggcgccctcgaatatctcggcccctacgccgaacccaaggagaaagtcgccgaggcgctgaaggcgagcggcctgaaacaggcgctcttcaacgtgccatcaggagactgggccggcggcgagcgcggcatcgcctgcctgccggaccgcgtagaggagttccgcaacgggatcgcgcaggcgctcgattatgccgcagcgctcgattgccggcaggtgaatgtcatctccggcctggtgccgaaggatgcggaccttcaaacgctggaaacggtgctggtcgacaatctgaaatatgctgcaaagcgttgtgccgacgccggtgtcaggctgctggtcgagccgatcaacctgcgcgatattcccggcttcttcctgtcgaccaccgctgatgccgaacgcattctcgaccgggtcggctcggacaatctctacatccagtatgatttctaccacatgcagatcatgcaaggcgacctgatccccaccttcatccggctgaaggagaagatcgcccatgtgcagatcgccgacaatcccggccggggcgaacccggcaccggcgagatcaattacagcttcatcctctccgagctcgatcgcctcggctacgacggctgggtcggctgcgagtacaagccgaaatccggcaccagcgaaggcctcggctggatgaaaccctatctgaactcagcgaggacagcatga

SEQ ID NO: 5063 - protein, 264 aa, Rhizobium leguminosarum bv. viciae 3841
MPKFSANLSFLYQDLPFLDRFTAAAKDGFGALEYLGPYAEPKEKVAEALKASGLKQALFNVPSGDWAGGERGIACLPDRVEEFRNGIAQALDYAAALDCRQVNVISGLVPKDADLQTLETVLVDNLKYAAKRCADAGVRLLVEPINLRDIPGFFLSTTADAERILDRVGSDNLYIQYDFYHMQIMQGDLIPTFIRLKEKIAHVQIADNPGRGEPGTGEINYSFILSELDRLGYDGWVGCEYKPKSGTSEGLGWMKPYLNSARTA

SEQ ID NO: 5064 - DNA, 798 bp, Pseudomonas aeruginosa UCBPP-PA14
  CDS (1)..(798): transl_table=11
atgccccgcttcgccgccaacctcagcatgctctacccccgccacgacttcctcgatcgcttcgccgctgccgcggcggacggctacgagggcgtggagtacctgttcccctatgcctatcctgcggccgaactgaaggcccggctggacgaccacggcttgcgccaggtgctgttcaatgccgcacccggcgactgggacaagggcgagcgcggcctggccagcctgccggggcgcgaggccgaattccgccgcgccatcgcccaggccatcgactatgcccaggtcctcggcaaccgccacatccatgtcatggccggactgctgccggccggcgccgaccgcatccgccaccgcgagacctacctcgacaacctcgcccatgccgcccgcgaagccgccggcgccaggctgacggtgctcatagagccgatcaacaaccgcgacatgccgggcttcttcctcacccgccaggacgacgcccaggccatctgccgcgaggtcggcgcggacaacctgcaggtacagttcgactgctaccactgccagatcgtcgagggcgacctggccaccaccctgcgtcgcgacatcggcaatatcggccacgtccagatcgccggggtacccgaccgccacgagccggatgacgacaacgaagtgaactacccctacctgttcgagctactcgaccggctcggctaccagggctggatcggctgcgagtaccgtccgcgcggcgacacctcggcaggcctggaatggctgcggcgctggcgcgctactcgacgcgacggatga

SEQ ID NO: 5065 - protein, 265 aa, Pseudomonas aeruginosa UCBPP-PA14
MPRFAANLSMLYPRHDFLDRFAAAAADGYEGVEYLFPYAYPAAELKARLDDHGLRQVLFNAAPGDWDKGERGLASLPGREAEFRRAIAQAIDYAQVLGNRHIHVMAGLLPAGADRIRHRETYLDNLAHAAREAAGARLTVLIEPINNRDMPGFFLTRQDDAQAICREVGADNLQVQFDCYHCQIVEGDLATTLRRDIGNIGHVQIAGVPDRHEPDDDNEVNYPYLFELLDRLGYQGWIGCEYRPRGDTSAGLEWLRRWRATRRDG

SEQ ID NO: 5066 - DNA, 834 bp, Mycobacterium smegmatis str. MC2 155
  CDS (1)..(834): transl_table=11
atgccggcaagcccgtacaccgtcaattgctcgatcctgttgaccgagctgccactgctgcagcgccccgaggccgcgcgggccgcgggcttcgacgcggtcgagttctggtggcctttcgccgaggccaccccgtccgaccgcgaggtcgacgagttcgtgagcgcgatctccgacgcgggagtgcagctcaccggtctgaacttcgccgcgggggacatgcccggtggtgagcgcggcatcctgtcgcatccgggacgcagcgcagacttccgcgcgagcgtcgacatcgccgtcgaaatcgccaagcgcctgggcaccaaggctttcaacgccctgtacggcaaccgccgtgacgacgccggcgtcgacgagcaggacgcggcggcggtggagaacctgatctacgcctcggaagccacccgcgccatcgacgccgtcgtcctcatcgaacccgtcagcgggtcaccgctgtacccgctgaaactcgccgccgacgcggtcgccgtgatcgaccgcgtcgcggcgcagtccgacggcaccgccaacaacctgcgtcttctggccgacgtctatcacatgagcgtcaacggcgacgacgtgcctgccgcgctggaaggccatgccgacctgatcggccacgtgcagatcgccgacgcgccgggccgtggtgaaccggggaccgggtcgctgccgctggcgggctacctcgaacagctcgcaggctacggctaccgcggctacgtgggcctggaatacaaggccagccgcgaggatccgttcgactggctgcctctcgaacaccgctcggtgcacgcccgcgccgaccgctga

SEQ ID NO: 5067 - protein, 277 aa, Mycobacterium smegmatis str. MC2 155
MPASPYTVNCSILLTELPLLQRPEAARAAGFDAVEFWWPFAEATPSDREVDEFVSAISDAGVQLTGLNFAAGDMPGGERGILSHPGRSADFRASVDIAVEIAKRLGTKAFNALYGNRRDDAGVDEQDAAAVENLIYASEATRAIDAVVLIEPVSGSPLYPLKLAADAVAVIDRVAAQSDGTANNLRLLADVYHMSVNGDDVPAALEGHADLIGHVQIADAPGRGEPGTGSLPLAGYLEQLAGYGYRGYVGLEYKASREDPFDWLPLEHRSVHARADR

SEQ ID NO: 5068 - DNA, 789 bp, Azoarcus sp. BH72
  CDS (1)..(789): transl_table=11
atgccgaaactcgcggccaacctcacgctgctcttcaccgaactggacttcctcgatcgcttccaggccgcggccgcggcggggttcaaggcggtggagttccagtttccctatgcgtggccggcggcgcggattgccgaacggctggatgcggccggcctgccggtcgtgctgcacaacctgcctgcgggcgactgggctgccggcgagcgcggcatcgcctgtcatccggatcgcgtgggggaattccgggatggcgtcggacgcgccatcgactacgccgttgtgctcgggtgcaaacagctgaactgcctggccggtatcgtgcccgccggcgtgacggcgcaggccgcgcacgagaccttcatcgccaacctgcgcttcgcggccgatgcgctgaagtcggccggtatccggctgctggtggagccgatcaacaccttcgacattcccggcttctacctcagccgcaccgcgcaggcggcggccatcctggacgaggtgggcgcggacaatcttcatatccagtacgacatctatcacgcgcagcggatggaaggcgacctcgccaacaccatcgcccgccacctgccgcgcatcgcccacatgcagattgccgacaacccggggcgccacgaacccggcaccggcgagatcaactacggctggctgttccgccacatcgaccggctgggctacgacggctggatcggctgcgaatacctgccggccgcgggcacgcgcgaaggactgggatggatgacggcactggccgcgatggcgcagtaa

SEQ ID NO: 5069 - protein, 262 aa, Azoarcus sp. BH72
MPKLAANLTLLFTELDFLDRFQAAAAAGFKAVEFQFPYAWPAARIAERLDAAGLPVVLHNLPAGDWAAGERGIACHPDRVGEFRDGVGRAIDYAVVLGCKQLNCLAGIVPAGVTAQAAHETFIANLRFAADALKSAGIRLLVEPINTFDIPGFYLSRTAQAAAILDEVGADNLHIQYDIYHAQRMEGDLANTIARHLPRIAHMQIADNPGRHEPGTGEINYGWLFRHIDRLGYDGWIGCEYLPAAGTREGLGWMTALAAMAQ

SEQ ID NO: 5070 - DNA, 783 bp, Haemophilus somnus 2336
  CDS (1)..(783): transl_table=11
atgcccaaatttgctgcaaatttaaccatgatgtttaacgaagtcccttttttataccgttttgaagcagctgctactgccggttttaaatatgtggaatacctttggccctatgattatccagcagatatgctaaaggaaaaattagataagtatggtttacaacaagttctatttaatacttcagcaggcaatgtagacgccggcgaatggggtgtctctgcgattccggggcgtgaagcggatagtcaccgtgacatcgatcttgctcttgaatatgctcttgccttaggttgttcacacgttcatgtgatggcggcagttgtaccgcaaggcgaagatcgagaagcctataaacagactttcatcaaaaatgtgcaatatgcggcagataaatttaaaccgcacggtattaaagtcttgttagaagcactcagcccggaagtcaaacctaactacctgctgaaaagtcaattcgacacgctagaaattgttgaatccgtcaaccgagataacgtctttgtacagttggattatttccacgcacaaaatgtagatggcaacttgtctcgcttaaccgacaaactcaacggcaaatttgcccatatccaaattgcctccgtgccgaatcgccatgagcctgatgaaggtgaaataaattaccaatatctctttgataaattggatcaaattggctatcaaggttttattggctgtgaatataaaccacgctctgacaccttagcaggtttagattggtttaaaccttatcaacaaaaataa

SEQ ID NO: 5071 - protein, 260 aa, Haemophilus somnus 2336
MPKFAANLTMMFNEVPFLYRFEAAATAGFKYVEYLWPYDYPADMLKEKLDKYGLQQVLFNTSAGNVDAGEWGVSAIPGREADSHRDIDLALEYALALGCSHVHVMAAVVPQGEDREAYKQTFIKNVQYAADKFKPHGIKVLLEALSPEVKPNYLLKSQFDTLEIVESVNRDNVFVQLDYFHAQNVDGNLSRLTDKLNGKFAHIQIASVPNRHEPDEGEINYQYLFDKLDQIGYQGFIGCEYKPRSDTLAGLDWFKPYQQK

SEQ ID NO: 5072 - DNA, 777 bp, Haemophilus influenzae R2866
  CDS (1)..(777): transl_table=11
atgcctaaatttgcagcaaacttaacaatgatgtttaacgaagtgccatttttagatcgctttgaagcggcggctaaagcaggctttaaatatgtcgaattcttatggccttatgattaccctgcacaagaactcaaagcaattttagataagcatggcctaaaagttgtgttatttaataccccagctggtgatgtaaacaaaggtgaatggggtgtttcggcaatccctggccgagaagctgatagccatagagatattgatttggctcttgaatatgcacttgcattaggttgtccaaatgtacatatcatgtcagcagttgtgccagaaggtgcaagccgtgaagaatataaacaaacctttattaaaaacgtacgctatgcatctgataaatataaaccatatggaatcaaaattcagcttgaagctttaagccctgaagtgaaacctaattatttactcaaaagccaatttgatacgcttgaagtggtggaattggttgatcgtgataatgtatttgttcaactcgactattttcatgcacaaaatgtagatggcaatcttgcacgtttaaccgataaattaaatggcaaatttgctcacgttcaaattgcttctgtaccagaccgtcatgaacccgacgaaggtgaaattaactaccaatatatcttcgataaactagatgaaatcggttatacaggctatgttggctgtgaatataaaccacgtggtgaaaccgtaacgggattggattggtttcagaagtataaataa

SEQ ID NO: 5073 - protein, 258 aa, Haemophilus influenzae R2866
MPKFAANLTMMFNEVPFLDRFEAAAKAGFKYVEFLWPYDYPAQELKAILDKHGLKVVLFNTPAGDVNKGEWGVSAIPGREADSHRDIDLALEYALALGCPNVHIMSAVVPEGASREEYKQTFIKNVRYASDKYKPYGIKIQLEALSPEVKPNYLLKSQFDTLEVVELVDRDNVFVQLDYFHAQNVDGNLARLTDKLNGKFAHVQIASVPDRHEPDEGEINYQYIFDKLDEIGYTGYVGCEYKPRGETVTGLDWFQKYK

SEQ ID NO: 5074 - DNA, 777 bp, Burkholderia vietnamiensis G4
  CDS (1)..(777): transl_table=11
atgccccgcttcgccgccaatctgtcgatgatgtacaccgagcacgcgttcctcgaacgcttcgccgccgcgtcgtacgacggctttcgcgccgtcgagtatctgttcccgtacgacttcgcggccgaggacatccgcgcgcgcctcgacgcgcacgacctcgagcaggcgctgttcaacgcgccgcccggcgactgggacgccggcgaacgcggaatcgcgtcgctgccgggccgcgacgacgaattccgccgcggcatcgaccgcgcgctcgactatgcgcgcgtgctcggcaacaagaagctgcacgtgatggccgggatcgtcgcgccgggcgcggaccgcgcgcgccagcgcgacacctacgtcgcgaacctgcgccacgcggcgcaggccgccgccgcgcacggcgtcacgatcctgatcgagccgatcaacccgcgcgacatgcccggctatttcctgaaccgccaggacgatgcgcatgcgatctgcgcggaagtcggcgcgccgaacctgaaggtgcagttcgactgctatcactgccagatcgtcgaaggcgacctcgtgaccaagctcaggcgcgacttcgcgagcatcggccacattcagatcgccggcgtacccgagcggcacgagcccgacgtcggcgaactgaactacccgtacctgttcgcgctgatcgacgcgctcggctacgacggctggatcggctgcgaataccgcccgaaggccggcacgtccgaagggctcggctggctccggccgtacctgtaa

SEQ ID NO: 5075 - protein, 258 aa, Burkholderia vietnamiensis G4
MPRFAANLSMMYTEHAFLERFAAASYDGFRAVEYLFPYDFAAEDIRARLDAHDLEQALFNAPPGDWDAGERGIASLPGRDDEFRRGIDRALDYARVLGNKKLHVMAGIVAPGADRARQRDTYVANLRHAAQAAAAHGVTILIEPINPRDMPGYFLNRQDDAHAICAEVGAPNLKVQFDCYHCQIVEGDLVTKLRRDFASIGHIQIAGVPERHEPDVGELNYPYLFALIDALGYDGWIGCEYRPKAGTSEGLGWLRPYL

SEQ ID NO: 5076 - DNA, 822 bp, Kineococcus radiotolerans SRS30216
  CDS (1)..(822): transl_table=11
gtgaagttcagcgccaacctgtccatgctgtaccaggagctcccgttcctcgagcgcatcccggccgcggccgccgacggcttcaccggcgtggagttcctcggcgcctacgaccaggacgtgctcgaggtgcgggccgcgctcgaggcggcggggctgcggcaggtcctgttcaacgtgccgtccggggactgggccggcggtgaacggggcatcgcgtgcctacccgaacgggtggaggagttcgaggagggagtcgcccgtgccctcgagcacgcccgcacgctgggctgctccctggtcaacgtcctcgccgggcgcgtccccgagggccttgagctcgacacggcgttggagaccttggctgagaacgtgcgcttcgccgcccacgcgctggcgccggcgggagtgaccgtgctcctcgaagccgtcaacacccgcgatgtccccggcttcgccctccccacgatcgccgacgccgctgctctgctctcccgggtgcaggcccccaacaccggcctgcagttcgacgtctaccacgctcaggtcatgcggggggacctgctggcgacgttcgagcggttccggaccgcgatccagcacgtgcagatcgcggacaaccccgggcggcacgaaccgggcaccggagaggtgaactactccttcctcctccccgccctccgagccgccgggtacggcggctacatcggcgcggagtacgtcccgaccaccgcaggcaccggctggctgcgggagttcgcgccggttcccgagccggcctggggagcgactcggggatcggcctgggaagcggcacggtga

SEQ ID NO: 5077 - protein, 273 aa, Kineococcus radiotolerans SRS30216
MKFSANLSMLYQELPFLERIPAAAADGFTGVEFLGAYDQDVLEVRAALEAAGLRQVLFNVPSGDWAGGERGIACLPERVEEFEEGVARALEHARTLGCSLVNVLAGRVPEGLELDTALETLAENVRFAAHALAPAGVTVLLEAVNTRDVPGFALPTIADAAALLSRVQAPNTGLQFDVYHAQVMRGDLLATFERFRTAIQHVQIADNPGRHEPGTGEVNYSFLLPALRAAGYGGYIGAEYVPTTAGTGWLREFAPVPEPAWGATRGSAWEAAR

SEQ ID NO: 5078 - DNA, 756 bp, Sulfitobacter sp. EE-36
  CDS (1)..(756): transl_table=11
atgaagccagccgcgaaccttactctgctgtggtccgagctgccctatcttgaccgttttgccgtcgccgcaaaggcaggatttaccgccgtagaggtgcttttcccctatgatctggccgccaaagagacgctgcgcgcctgtgtcgccaacggcttgcagctgatcctgatcaacgccccgccgcccaattacaccggcggcgcacagggctttgccgcggtgcccgaactggcggcgcgtttccgcgtcgatatccagcgttcgtttcgatatgccaccgcgctcaaggtccgctatctgcatgtcatggcgggcaacgggcaaggcgcgctggcgcggcaaaccttcatcgacaatctgatctgggcggctgatatcgcgcccaaggggctcaccctgacggttgaaccgctgaaccccgtcgcgatgccggggtatttcatgaacgactacgcgcttgccgccgatgtgctgcgtgctgtgaaccggccgaacgtcgggctgcaatatgacagctaccacgcgcagatgatccacggcgacgcggtggcggtgttcgaacaatacaaagacctgatcgtacatgtgcagcttggcgacgcgcccgatcgcagcgcgccgggggcgggtacggttgatttccccgcgctcttcgccgccctgcgccgcgcagggtatcgcggctgggtcagtggcgaatacatccccggcccacggaccgaagacagcctaggctggatgacactcagctag

SEQ ID NO: 5079 - protein, 251 aa, Sulfitobacter sp. EE-36
MKPAANLTLLWSELPYLDRFAVAAKAGFTAVEVLFPYDLAAKETLRACVANGLQLILINAPPPNYTGGAQGFAAVPELAARFRVDIQRSFRYATALKVRYLHVMAGNGQGALARQTFIDNLIWAADIAPKGLTLTVEPLNPVAMPGYFMNDYALAADVLRAVNRPNVGLQYDSYHAQMIHGDAVAVFEQYKDLIVHVQLGDAPDRSAPGAGTVDFPALFAALRRAGYRGWVSGEYIPGPRTEDSLGWMTLS

SEQ ID NO: 5080 - DNA, 777 bp, Roseovarius nubinhibens ISM
  CDS (1)..(777): transl_table=11
atgccgcgctttgccgccaatctttcgctgctcttcaccgaatgcgcgccgctcgaccggttcaaagcggcgcgcgcggcggggtttcagggctgcgagctgctctttccctatgatcatgccgccgccgatctggcgcaggccgcagaggcggcggcgctgccggtggtgttgatcaacacgccggggggcaactgggccgggggcgagcggggcgtggccgccattccgggctgtgaggcgcggtttcgcgacgagttcgatcaggcgcttgcgatggccggggcgcttggcgcgggtcttctgcatgtcctcgctgggctggccgagggggcggcggcgcgggccacctatgtggacaatctgcgctgggccgcggcgcgggcggcggcatctaatcccgcgctgcgcctcacgatagagccgatcaatggccacgacatgccgggctatttcctgcaggatttcgccgaggcccaagcgagtttggcggagattgccgcgcccaatctggggctgcaattcgacgcctaccatgcgcagcggatcaccggggatgcgcgcgccgcttgggacaatctcgacaagatgccgctgcatgttcaggtggcgggcgtgcccggtcgccatgagccacagagcggagacatcgactttcccgcgtttttcacgcagctcgacacgggcggctatgccggttgggtcagcggggaataccacccgaaacgcagcaccacagaggggctgggctggctgcgcgaggcctcgcgcagctaa

SEQ ID NO: 5081 - protein, 258 aa, Roseovarius nubinhibens ISM
MPRFAANLSLLFTECAPLDRFKAARAAGFQGCELLFPYDHAAADLAQAAEAAALPVVLINTPGGNWAGGERGVAAIPGCEARFRDEFDQALAMAGALGAGLLHVLAGLAEGAAARATYVDNLRWAAARAAASNPALRLTIEPINGHDMPGYFLQDFAEAQASLAEIAAPNLGLQFDAYHAQRITGDARAAWDNLDKMPLHVQVAGVPGRHEPQSGDIDFPAFFTQLDTGGYAGWVSGEYHPKRSTTEGLGWLREASRS

SEQ ID NO: 5082 - DNA, 765 bp, Oceanicola batsensis HTCC2597
  CDS (1)..(765): transl_table=11
ttgcccagattttgcgccaacctctctttcctctggaaggatctgccgctgcccgcgcggatctcggcggcggccgaggcaggattctcgggggtcgagatcctgtttccctatgacgaccccgtgccggaggtgcgcgatgcgctggcccggacgggtctgccgttggtgctgatcaactgcccgcctccgaactatgccggcggggacaggggctttgcggcggtcccgggactgggcggccggttccgcagcgatttcctccgcgccctgcgatacgcccgggcgctcggggtcgagcatctgcacatcatgtccggtgcggccgagggagccgaggccgaggcctgtctcgtcgacaacctggcctgggcctgcgccgaggcgcccgggcagagcctgaccatcgagccgatcaacggcgcggacatgccgggctatttcatgaatgatttcgacctggcgctgcgcgtgatcgacagggtcggcgccgcgaacctcggcctgcaattcgacgcctatcacgcgcaccggatcaccggcgatctgcttggcacctgggcaagggcggcgccccgggtccggcacgttcagttcgccgaccatcccggccggcatgagccggggacgggcgaggtggatctgggcgcgttcttcgagcgcctggatgcggacggctttgcgggatgggtcagtgcggaatacgtgccgtcgtccagtccggaggcttccctcggttggatggggtctgccgattcctcctga

SEQ ID NO: 5083 - protein, 254 aa, Oceanicola batsensis HTCC2597
MPRFCANLSFLWKDLPLPARISAAAEAGFSGVEILFPYDDPVPEVRDALARTGLPLVLINCPPPNYAGGDRGFAAVPGLGGRFRSDFLRALRYARALGVEHLHIMSGAAEGAEAEACLVDNLAWACAEAPGQSLTIEPINGADMPGYFMNDFDLALRVIDRVGAANLGLQFDAYHAHRITGDLLGTWARAAPRVRHVQFADHPGRHEPGTGEVDLGAFFERLDADGFAGWVSAEYVPSSSPEASLGWMGSADSS

SEQ ID NO: 5084 - DNA, 804 bp, Xanthobacter autotrophicus Py2
  CDS (1)..(804): transl_table=11
atgccgcgctttgccgccaacctcaccatgatgttcaccgagtggtcgttcctcgaccgcttcgccgccgccgccgatgccggcttcaccgcggtggaattcctcttcccctacgagcatgcgccggaagccgtgggcgaacgcctcgcccgcaacggcctgacccaggccctgttcaacctgccccccggcgattgggcggctggcgagcgcggcatcgctgccttccccgagcgcttcgacgaactgaaggcaggcgttgcgaccggcctcacctatgccgcagccaccggcgtgaagcgcctgcatctcatgtccggccttgccgaccgcgccgaccccaaggcccgcgccgcctatcgcgaggcggtggtctacgccgccggcgcgctggcggagaagggtctcgacctggtgctggagcccatcaacggccgcaacatgccgggctatttcctcaacgatttcgccttcaccgaggcgctcatcgccgagctgggcctgcccaacctgaagctccagttcgacatctatcactgccagatcatccatggcgacgtgaccatgcggctgcgccagctcatgcccatcaccggccatgtgcagatcgccagcgtgccgtcccgcaacgagccggacggcgaggagctgaactatccgttcctgttcgcggagctggatcgcctgggatatgacggcttcgtgggctgcgaatacaacccgcgcgccggcacgctgagcggcctgagctggttcgcgccctatgccgccgccccggccctccaggcgggagcgaacggatga

SEQ ID NO: 5085 - protein, 267 aa, Xanthobacter autotrophicus Py2
MPRFAANLTMMFTEWSFLDRFAAAADAGFTAVEFLFPYEHAPEAVGERLARNGLTQALFNLPPGDWAAGERGIAAFPERFDELKAGVATGLTYAAATGVKRLHLMSGLADRADPKARAAYREAVVYAAGALAEKGLDLVLEPINGRNMPGYFLNDFAFTEALIAELGLPNLKLQFDIYHCQIIHGDVTMRLRQLMPITGHVQIASVPSRNEPDGEELNYPFLFAELDRLGYDGFVGCEYNPRAGTLSGLSWFAPYAAAPALQAGANG

SEQ ID NO: 5086 - DNA, 780 bp, Xanthobacter autotrophicus Py2
  CDS (1)..(780): transl_table=11
atgcccaagttctgcgccaacctcaccatgctgtggaacgagatcgacttcctcgaccggttcaaaaaggcggctgaggccggcttcaccggggtcgagtatctcttcccctatccgtatgaaaaggatgtgctggcggagaagctggccacctacaagctcacccaggtgctgcacaacctgccggccggcgactgggcggcgggcgagcgcggcatcgcctgcctgccgggccgcgaaggcgagttccaggacagcgtcggcaagggcatcgactatgcgaaggctctcggcaccaaggcgctcaactgcctcgtcggcctgaccccgaaggatgttccggccgagaaggtccacgagaccctggtgaagaacctgaagttcgctgccgccgagctgaagaaggccggcatccccttcgtggtggaggccatcaacactcgcgacatcccgggcttccacctgcacaacaccaagcagacgctggcggtgctggacgaagtgggcgcggacgacatcttcttccagtacgacatctatcacatgcagatcatggaaggggacctcacccccaccatccgcaccaacattgcccgcatcaagcacatccagctggccgacaatccgggtcgcggcgagccgggcacgggcgagatcaactatccgttcctgttcaaggccatcgacgacaccggctatgacggctggatcggatgcgaatacaagcccaagaccaccaccgacgagggcatcggctggttcgcgccctacaagggctga

SEQ ID NO: 5087 - protein, 259 aa, Xanthobacter autotrophicus Py2
MPKFCANLTMLWNEIDFLDRFKKAAEAGFTGVEYLFPYPYEKDVLAEKLATYKLTQVLHNLPAGDWAAGERGIACLPGREGEFQDSVGKGIDYAKALGTKALNCLVGLTPKDVPAEKVHETLVKNLKFAAAELKKAGIPFVVEAINTRDIPGFHLHNTKQTLAVLDEVGADDIFFQYDIYHMQIMEGDLTPTIRTNIARIKHIQLADNPGRGEPGTGEINYPFLFKAIDDTGYDGWIGCEYKPKTTTDEGIGWFAPYKG

SEQ ID NO: 5088 - DNA, 816 bp, Oceanobacter sp. RED65
  CDS (1)..(816): transl_table=11
atgcgtttagcagcgaatttatcattgatgtttaccgaagtccctttattacagcgttttcaaaaagccaaagacgctggttttaaaacggtagagattcaatttccctacgaagaaaaaattgaagacttagtcaaggccaaggaggcggccaacgtcgatgtgtgcctcataaatttaccggcaggggacttaatgcaaggcggggaaggtttagcgtgcgttccaggtaaagaaaaagaattcgaagaggctatcaagcttggctttcaatacgcgaaagcgttaggggtaaaatgcgttaatgtactgccaggtcgatgcgatcatgcaggcgaggcagaagtatataccgaagtctttaaaaagaatttagttaaagctgcaagcgcattagcaaagcatcatatcttagtcgtctttgaggcaatcaataccaaggatatgccgggattccttatccacaatactcagcaaatgctagatgtattaacggagcttgatcatccgaatattaaaatgcaatttgatgtctatcatatgcatattatggacggtaatgtggatgaacaaattcgcaaccatgggcaccttatagggcatattcagtttgcggattatccagggcgaggtgaaccgctcagtggtaatttaaattttaaaagcttatttaatgatatccagcatagccattataaggggtatgtagcagctgaatacaaacctactgggaagaccgaagacagcttagcttggatggaaaacctggacttagattggctgcaaacccaaatagaagtgcacggtaatggctga

SEQ ID NO: 5089 - protein, 271 aa, Oceanobacter sp. RED65
MRLAANLSLMFTEVPLLQRFQKAKDAGFKTVEIQFPYEEKIEDLVKAKEAANVDVCLINLPAGDLMQGGEGLACVPGKEKEFEEAIKLGFQYAKALGVKCVNVLPGRCDHAGEAEVYTEVFKKNLVKAASALAKHHILVVFEAINTKDMPGFLIHNTQQMLDVLTELDHPNIKMQFDVYHMHIMDGNVDEQIRNHGHLIGHIQFADYPGRGEPLSGNLNFKSLFNDIQHSHYKGYVAAEYKPTGKTEDSLAWMENLDLDWLQTQIEVHGNG

SEQ ID NO: 5090 - DNA, 789 bp, Desulfitobacterium hafniense DCB-2
  CDS (1)..(789): transl_table=11
atgcatgtaaaaaaagaccaacttgttgccaacttatcctttctctttaatgacctgccgatgatggagcgcttccaggcggtcaaagcggccggacttaaacgggtggagtttatgttcccttacgatttggaccttgcccagctcaaacaggaattggcgtcccaccaattagagatggttctctttaacctccctgccggagactggggagccggtgagcggggtatcgcccttgatcccagccgtcaagaggagtttaaagcgggagtagagaaagctgtcgccctggctcaagctcttcatgtcaaacaaatcaattgcctggtggggaaagtccgtgaggatcaatccccggcggaacagcgggctactctgatcgccaatatccgctatgccgccgagcagctgcagcaaattggcgtcaagctgctcctcgagcccctgaatcgctttgatgccccgggattctatcttaataccaccgaagatgttctgaaggtcattgccgaagctgaccatgagaatgttttcctccaatatgatacctatcacgccgcccgggaaggagaggatctcttacagatcctgcgggaaaagctgccccatatcgctcatattcaagtagccgataaccccggacgtcatcagccgggtacgggggagatcgattaccacgctttctttaagaccttggcggaagtcggctattcctatgccgtctctatggaatatgttcctcagccggatacagtggcttcgttggagtggattaaagcgtttgaatag

SEQ ID NO: 5091 - protein, 262 aa, Desulfitobacterium hafniense DCB-2
MHVKKDQLVANLSFLFNDLPMMERFQAVKAAGLKRVEFMFPYDLDLAQLKQELASHQLEMVLFNLPAGDWGAGERGIALDPSRQEEFKAGVEKAVALAQALHVKQINCLVGKVREDQSPAEQRATLIANIRYAAEQLQQIGVKLLLEPLNRFDAPGFYLNTTEDVLKVIAEADHENVFLQYDTYHAAREGEDLLQILREKLPHIAHIQVADNPGRHQPGTGEIDYHAFFKTLAEVGYSYAVSMEYVPQPDTVASLEWIKAFE

SEQ ID NO: 5092 - DNA, 747 bp, marine gamma proteobacterium HTCC2143
  CDS (1)..(747): transl_table=11
atgttgttcaaagaacatcattttttggatcgctttaatgacgcccgcaaagcggggtttgaaggcgtagagtatgtctcgccgtacgaattttcagtgccagatattaaacaacgtttagatgacaacgatttaaaacaggtgctcttcaatctccccctcggtaattgggccaacggcgaacgcggtatcggttgccaccccggccggattagcgaatatagagacggcgttgataaagccattgagtacgccctcgcgcttgactgcaaacagtgcaacgcattagccggtattgtccccgatgacgtcagttatcaacaagcgcacgaaacgctcattgccaacctttcttatgccgcagaaaaatttgcagcagctaaactcaacctgctaacagaggccataaatacgtatgacatgcccgggttttttctcaatacaacagcacaggcgctgtcgatcattgacgaggtcaacaagcccaatctctactatcagtatgacatctatcatatgcaacgtatggagggagaactcgcttcgactattaaaatgaacctaccacgaattgggcactttcaattggcagacaacccgggccgtcatgaacccggcagtggcgaaatcaattatcacttcttactcaattttattgaaaaaaacggctataagggctggattggtgctgaatataatccgctaacaaccacgcttgaaggactaagctggatgtcaaaatactga

SEQ ID NO: 5093 - protein, 248 aa, marine gamma proteobacterium HTCC2143
MLFKEHHFLDRFNDARKAGFEGVEYVSPYEFSVPDIKQRLDDNDLKQVLFNLPLGNWANGERGIGCHPGRISEYRDGVDKAIEYALALDCKQCNALAGIVPDDVSYQQAHETLIANLSYAAEKFAAAKLNLLTEAINTYDMPGFFLNTTAQALSIIDEVNKPNLYYQYDIYHMQRMEGELASTIKMNLPRIGHFQLADNPGRHEPGSGEINYHFLLNFIEKNGYKGWIGAEYNPLTTTLEGLSWMSKY

SEQ ID NO: 5094 - DNA, 777 bp, Escherichia coli B
  CDS (1)..(777): transl_table=11
atgttacgtttctctgctaatttatcgatgttatttggagaatatgattttctcgcccgttttgagaaagctgcgcagtgtggttttcgcggcgttgaatttatgtttccttatgactacgacattgaagaattaaaacaggtgctggcgagtaataaactcgaacatacgctgcacaatttaccggcgggtgactgggcggcgggggagcgcggtattgcctgtattcctggccgtgaagaagagtttcgggatggcgtagcagcagcgattcgttatgcccgtgcgctgggtaataaaaaaattaactgtctggtcggtaaaacgccggctggtttcagcagtgaacagattcacgcaacgcttgtagaaaacctgcgttatgccgcgaatatgctgatgaaagaagatattttattactgattgaacctattaaccattttgatattcctggtttccatctcaccggaactcggcaggcgctgaaattgattgatgatgttggttgctgcaatttgaaaattcagtatgacatttatcacatgcagcggatggaaggtgaattaaccaacaccatgactcagtgggctgataaaattggtcacctgcaaattgccgataatccgcatcgcggcgaaccgggaaccggagaaattaattatgattatctctttaaggtaatcgaaaattctgactacaacggttgggttgggtgtgaatataaaccccaaaccaccacggaagccggtttacgctggatggatccgtaccgttaa

SEQ ID NO: 5095 - protein, 258 aa, Escherichia coli B
MLRFSANLSMLFGEYDFLARFEKAAQCGFRGVEFMFPYDYDIEELKQVLASNKLEHTLHNLPAGDWAAGERGIACIPGREEEFRDGVAAAIRYARALGNKKINCLVGKTPAGFSSEQIHATLVENLRYAANMLMKEDILLLIEPINHFDIPGFHLTGTRQALKLIDDVGCCNLKIQYDIYHMQRMEGELTNTMTQWADKIGHLQIADNPHRGEPGTGEINYDYLFKVIENSDYNGWVGCEYKPQTTTEAGLRWMDPYR

SEQ ID NO: 5096 - DNA, 783 bp, Pseudomonas putida GB-1
  CDS (1)..(783): transl_table=11
atgcctcgcttcgctgccaacttgtccatgctgttcaccgaacaggacttcctggcccgcttcaaggctgccgccgatgctggtttcagcggcgtcgaatacctcttcccgtacgacttcagcgcggctgaaatcaagcagcagctggaggccaacggcctgacccaggtgttgttcaacctgcccgcgggtgactgggccaagggtgagcgcggcatcacctgccacccagaccgcgtcgaagaattccgtgccggtgtcgacaaggccatcgagtacgccaaggtgctgggcaacacccaggtcaacgccctggccggcatccgcccacaaggcccggactgcgccaccgtgcgcaagaccttcgtcgagaacctgcgctacgccgccgacaagctcaaggccgccggcattcgcctggtcatggaaatgatcaacacccgcgacatcccaggcttctacctgaacaccacccagcaggccctggaaatccaggccgaagtcggcagcgacaacctgttcctgcagtacgacatctaccacatgcagatcatggaaggtgacctggcgcgcaccattcaagccaacctgccactgatcaaccacatccagctggccgacaacccagggcgcaacgagccaggcaccggcgaaatcaactaccgcttcctgttcgagcacctggaccgtatcggctaccagggctgggtgggcgcagagtacaagccgctgaccaccaccgaagcgggcctgggctggctgaaaacccataacgcaatttga

SEQ ID NO: 5097 - protein, 260 aa, Pseudomonas putida GB-1
MPRFAANLSMLFTEQDFLARFKAAADAGFSGVEYLFPYDFSAAEIKQQLEANGLTQVLFNLPAGDWAKGERGITCHPDRVEEFRAGVDKAIEYAKVLGNTQVNALAGIRPQGPDCATVRKTFVENLRYAADKLKAAGIRLVMEMINTRDIPGFYLNTTQQALEIQAEVGSDNLFLQYDIYHMQIMEGDLARTIQANLPLINHIQLADNPGRNEPGTGEINYRFLFEHLDRIGYQGWVGAEYKPLTTTEAGLGWLKTHNAI

SEQ ID NO: 5098 - DNA, 783 bp, Escherichia coli
  CDS (1)..(783): transl_table=11
atggcaaagtttgcagcaaatttatctatgctctttaccgagtatccatttattgaacgttttgcacaggcaagtcacgcaggattccacggcgttgagtatcttttcccctatgacttttccgcagatgagttggtttcgcaactgcatcaacataatctgacgcaggttctgtttaatcttcctgcgggtaactggcaagagggtgaacggggtattgcatgtcatcctggtcgggcaaaagaatttcaggagggtgtttgcagagcgatagaatatgcccaggcccttaattgttcacaagttaattgccttgcaggaaaacatccaggtggttattcgcatgaacaatgtcatgaaacactggtcgaaaatttgcgctatgcagtagataaattggcttctcatggcataaagttagttctggaagccattaatacaaaagatattcccggtttttttgttaacaacaccagacaagctctcaatattattcatgatgtaaatcatcctgattttcgctatcaatacgatatttatcatatgcaaatcatggaagggaatattgctacaacaatcaaaaacaacctgaataacattggacatattcaattagccgataaccctgggcgtcatgaaccagggacgggagaaattaattacccgtggttgttaaattatatagaccagattggttatcagggatggattggttgcgaatatgttccatctacgacaacgactgaaagtctacgctggctaaaaaacgagactcaattttaa

SEQ ID NO: 5099 - protein, 260 aa, Escherichia coli
MAKFAANLSMLFTEYPFIERFAQASHAGFHGVEYLFPYDFSADELVSQLHQHNLTQVLFNLPAGNWQEGERGIACHPGRAKEFQEGVCRAIEYAQALNCSQVNCLAGKHPGGYSHEQCHETLVENLRYAVDKLASHGIKLVLEAINTKDIPGFFVNNTRQALNIIHDVNHPDFRYQYDIYHMQIMEGNIATTIKNNLNNIGHIQLADNPGRHEPGTGEINYPWLLNYIDQIGYQGWIGCEYVPSTTTTESLRWLKNETQF

SEQ ID NO: 5100 - DNA, 777 bp, Klebsiella pneumoniae
  CDS (1)..(777): transl_table=11
atgttgcgcttttctgccaacctttccatgttatttcaggaatatgattttctggatcgctttgagaaagcggcggcctgtggttttcgcgctgttgaatttatgtttccctatgactatgcccccgagctattaaagcaaaagctgagcgacaaccagctggaacatactttacacaatttacccgctggtgactgggcggcaggggaacgaggcatcgcttgtattccaggccgcgaagtggagtttcgcgaaggtgtcgacgccgcaatccgctacgccaaagcgctgggcaatcgtaaaattaactgtctggtcggcaaaactccggtgggttatcgcgaagaacatattcgctcaacgctggtggcgaatttacgttttgccgccgccgcgctggcccaggaaggtatcctgctgctaattgagccgatcaattacttcgacatgccgggcttttatctgaataccacgcatcaggcgttggcgctgattgatgaagtgggtaatgataatctgaaaattcagtacgatatttaccatatgcagcgtatggagggggaattaacccatacgatgcaaacttacgctaatcgtatcggtcacttacagatcgcggataatccgaatcgaggtgaacccgggaccggtgaaattaattatgagtatctttttaatttcatcgataaatcaaactatgacggttgggtaggttgtgaatataaaccattgactaccaccgaagcgggactgacatggtttaatcgctaccgctaa

SEQ ID NO: 5101 - protein, 258 aa, Klebsiella pneumoniae
MLRFSANLSMLFQEYDFLDRFEKAAACGFRAVEFMFPYDYAPELLKQKLSDNQLEHTLHNLPAGDWAAGERGIACIPGREVEFREGVDAAIRYAKALGNRKINCLVGKTPVGYREEHIRSTLVANLRFAAAALAQEGILLLIEPINYFDMPGFYLNTTHQALALIDEVGNDNLKIQYDIYHMQRMEGELTHTMQTYANRIGHLQIADNPNRGEPGTGEINYEYLFNFIDKSNYDGWVGCEYKPLTTTEAGLTWFNRYR

SEQ ID NO: 5102 - DNA, 783 bp, Escherichia coli
  CDS (1)..(783): transl_table=11
atggcaaagtttgcagcgaatttatcaatgctttttaccgagcatccatttattgaacgttttgcgcaggcaagtcacgcaggattccacggcgttgaatatctttttccctatgacttttccactgacgagctggcttcgcaactgcatcaacataatctgactcaggttttgtttaatcttcctgcgggtaactggcaagagggtgaacggggtattgcatgtcatcctagtcgggcaaaagaatttcaggagggtgtttgcagagcgatagaatatgcccaggcccttaattgttcacaagttaattgccttgcaggaaaacatccaggtggttattcgcatgaacaatgtcatgaaacactggtcgaaaatttgcgctatgcagtagataaattggcttctcatggcataaagttagttctggaagccattaatacaaaagatattcccggtttttttgttaacaacaccagacaagccctcaatattatttatgatgtaaatcatcctgattttcgctatcaatacgatatttatcatatgcaaatcatggaagggaatattgctacaacaatcaaaaacaacctgaataacattgaacatattcaattagccgataaccctgggcgtcatgaaccagggacgggagaaattaattacccgtggttgttaaattatatagaccagattggttatcagggatggattggttgcgaatatgttccatctacgacaacgactgaaagtctacgctggctaaaaaacgagactcaattttaa

SEQ ID NO: 5103 - protein, 260 aa, Escherichia coli
MAKFAANLSMLFTEHPFIERFAQASHAGFHGVEYLFPYDFSTDELASQLHQHNLTQVLFNLPAGNWQEGERGIACHPSRAKEFQEGVCRAIEYAQALNCSQVNCLAGKHPGGYSHEQCHETLVENLRYAVDKLASHGIKLVLEAINTKDIPGFFVNNTRQALNIIYDVNHPDFRYQYDIYHMQIMEGNIATTIKNNLNNIEHIQLADNPGRHEPGTGEINYPWLLNYIDQIGYQGWIGCEYVPSTTTTESLRWLKNETQF

SEQ ID NO: 5104 - DNA, 777 bp, Escherichia coli
  CDS (1)..(777): transl_table=11
atgcctcgttttgcagctaatttatccatgatgttcaccgaagtgccttttattgaacgcttcgccgcagcgcgaaaagccgggttcgatgctgtggaatttctgtttccctatgactactccaccctgcaaatccaaaagcaactggagcaaaaccatctgacactggcgctgttcaataccgctcccggagatattaatgcgggggaatggggattatccgcccttcccggacgtgagcacgaagcacacgcagacatcgacctggcactggaatatgcattggcgctcaattgtgaacaagtccatgtgatggcaggcgtcgtgcccgctggcgaagacgctgaacggtaccgggcagtatttatcgataatctccgctacgctgccgaccgctttgcgctacacggcaagcgaatattagttgaagcactcagccccgacgttaagcctcattatctcttctccagccagtatcaggcactggctattgttgaagaggttgcgcgagataacgtgtttattcaactagatacttttcatgcgcaaaaagtagatggcaacctgacgcatttaatccgcgactacgctgggaaatatgcgcacgtacaaattgccggactacctgatcgacatgaaccggacgatggagaaatcaactatccgtggctgttccgcctgttcgatgaggtgggatatcagggctggatcggttgtgaatataaacctcgtggcctcaccgaagaagggcttggctggtttgacgcctggcgctaa

SEQ ID NO: 5105 - protein, 258 aa, Escherichia coli
MPRFAANLSMMFTEVPFIERFAAARKAGFDAVEFLFPYDYSTLQIQKQLEQNHLTLALFNTAPGDINAGEWGLSALPGREHEAHADIDLALEYALALNCEQVHVMAGVVPAGEDAERYRAVFIDNLRYAADRFALHGKRILVEALSPDVKPHYLFSSQYQALAIVEEVARDNVFIQLDTFHAQKVDGNLTHLIRDYAGKYAHVQIAGLPDRHEPDDGEINYPWLFRLFDEVGYQGWIGCEYKPRGLTEEGLGWFDAWR

SEQ ID NO: 5106 - DNA, 777 bp, Escherichia coli
  CDS (1)..(777): transl_table=11
atgcctcgttttgcagctaatttatccatgatgttcaccgaagtgccttttattgaacgcttcgccgcagcgcgaaaagccgggttcgatgctgtggagtttctgtttccctatggctactccccccagcaaatccagcagcaactggtgcaaaaccatctgacactggcgctgttcaataccgctcccggagatattaatgcgggagaatggggattatccgcccttcccggacgtgagcacgaagcacgcgcagacatcgacctggcactggaatatgcattggcgctcaattgtgaacaagtccatgtgatggcaggcgtcgtgcccgctggcgaagatgctgaacggtaccggggagtatttattgataatctccgctacgctgccgaccgctttgcgccacacggcaagcgaatattggttgaagcactcagccccggcgttaagcctcattatctcttctccagccagtatcaggcactggctattgttgaagaggttgcgcgagataacgtgtttattcaactggatactttccatgcgcaaaaagtagatggcaacctgacacatttaatccgcgactacgccgggaaatatgcgcacgtacaaattgccggactacctgatcgacatgaaccggacgatggagaaatcaactatccgtggctgttccgcctgttcgatgaagtgggatatcagggctggatcggttgtgaatacaaacctcgtggcctcaccgaagaagggcttggctggtttgacgcctggcgctaa

SEQ ID NO: 5107 - protein, 258 aa, Escherichia coli
MPRFAANLSMMFTEVPFIERFAAARKAGFDAVEFLFPYGYSPQQIQQQLVQNHLTLALFNTAPGDINAGEWGLSALPGREHEARADIDLALEYALALNCEQVHVMAGVVPAGEDAERYRGVFIDNLRYAADRFAPHGKRILVEALSPGVKPHYLFSSQYQALAIVEEVARDNVFIQLDTFHAQKVDGNLTHLIRDYAGKYAHVQIAGLPDRHEPDDGEINYPWLFRLFDEVGYQGWIGCEYKPRGLTEEGLGWFDAWR

SEQ ID NO: 5108 - DNA, 795 bp, Drosophila melanogaster
  CDS (1)..(795)
atggcactcaagtttgcagcgaatctgaactttttgttcacggaaagagcgacgtcgatcgcggagcgaattcgtctggcccaccagaacggattccgtgcggtagagatcccctatcccgaaggcgagacgagcgacgtggtgtccgccgtaaaggagacgggtgtggtggtcagtctggtgaatctggccttcgacaagagcgacgatcagctgcgtttcggctccaccagtgtgcccggctcggaaaagctgttccgtagccaattggatgccaccattgatttcgcccgacaggttaactgtggcaagattcatctaaccgctggactcttcaagggcggccaggagagtgactacacgaagacgtataccgccaatctaaagatcgccgccgatagccttagagccagtaaaatgatcggcgtgatagagccaattaacaagtacgccgtgcctggctactacatgaattcatactccaaagccgctggaattctggccgatgtagctgcggacaacattcaattgctggccgatctgtatcacctgcagcatttgcacggcaacgtgtccaagacgctcgaggagtacaaggcgctcattggacactttcagatcgcccaggtgccgcatcgccacgagccggatgtttccggtgagctggactacggatttgtgttcaaggctctccaggaattcggctatgatggatggatcggttgcgagtacaagccgaagacgaccactgtcgagggtttgggttgggtctccaaattgggctacacgctataa

SEQ ID NO: 5109 - protein, 264 aa, Drosophila melanogaster
MALKFAANLNFLFTERATSIAERIRLAHQNGFRAVEIPYPEGETSDVVSAVKETGVVVSLVNLAFDKSDDQLRFGSTSVPGSEKLFRSQLDATIDFARQVNCGKIHLTAGLFKGGQESDYTKTYTANLKIAADSLRASKMIGVIEPINKYAVPGYYMNSYSKAAGILADVAADNIQLLADLYHLQHLHGNVSKTLEEYKALIGHFQIAQVPHRHEPDVSGELDYGFVFKALQEFGYDGWIGCEYKPKTTTVEGLGWVSKLGYTL

SEQ ID NO: 5110 - DNA, 777 bp, Escherichia coli
  CDS (1)..(777): transl_table=11
atgttacgtttctctgctaatttatcgatgttatttggagaatatgattttctcgcccgttttgagaaagctgcgcagtgtggttttcgcggcgttgaatttatgtttccttatgactacgacattgaagaattaaaacatgtgctggcgagtaataaactcgaacatacgctgcacaatttaccggcgggtgactgggcggcgggggagcgcggtattgcctgtattcctggccgtgaagaagagtttcgggatggcgtagcagcagcgattcgttatgcccgtgcgctgggtaataaaaaaattaactgtctggtcggtaaaacgccggctggtttcagcagtgaacagattcacgcaacgcttgtagaaaacctgcgttatgccgcgaatatgctgatgaaagaagatattttattactgattgaacctattaaccattttgatattcctggtttccatctcaccggaactcggcaggcgctgaaattgattgatgatgttggttgctgcaatttgaaaattcagtatgacatttatcatatgcagcggatggaaggtgaattaaccaacaccatgactcagtgggctgataaaattggtcacctgcaaattgccgataatccgcatcgcggcgaaccgggaaccggagaaattaattatgattatctctttaaggtaatcgaaaattctgactacaacggttgggttgggtgtgaatataaaccccaaaccaccacggaagccggtttacgctggatggatccgtaccgttaa

SEQ ID NO: 5111 - protein, 258 aa, Escherichia coli
MLRFSANLSMLFGEYDFLARFEKAAQCGFRGVEFMFPYDYDIEELKHVLASNKLEHTLHNLPAGDWAAGERGIACIPGREEEFRDGVAAAIRYARALGNKKINCLVGKTPAGFSSEQIHATLVENLRYAANMLMKEDILLLIEPINHFDIPGFHLTGTRQALKLIDDVGCCNLKIQYDIYHMQRMEGELTNTMTQWADKIGHLQIADNPHRGEPGTGEINYDYLFKVIENSDYNGWVGCEYKPQTTTEAGLRWMDPYR

SEQ ID NO: 5112 - DNA, 840 bp, Streptomyces coelicolor
  CDS (1)..(840): transl_table=11
atgggattcgcagaccagcgcttcaacgtcaacctgtcgatcctcttcacggaactcccgctcctggagcgccccgcggccgccgccgcggccggcttcaccgcggtcgagctgtggtggccctggatcgactcgcccacccccgagcagtccgagctggacgctctgaagtcggccatcgaggacgcgggcgtccagctcaccgggctcaacttctacgccgggcagctgcccggacccgaccggggcgccctgtccatccccggcgaggagtcggagcgcttccgcgccaacatcgacgtggccgccgacttcgccaggtcactgggctgcacggcactcaacgccctgtacggcaaccgcgtcgagggcgtggacccggccgagcaggacaggctcgcgctggagaacctggtcctcgcggcccgcgcggccgaccggatcggcgcggtcctgctggtcgaggcgctcaacaagcccgagtcgccgcggtacccgctggtgtcggcgccggccgcgatcgcggtcgtggaccgggtcaacgaggccaccgggctcggcaacgccaagttcctcatggacctctaccacctgtccatgaacggcgaggacctgccgcaggtgatcgacgcgtacgccgcgaagaccggccatgtgcagatcgccgacaacccgggccgcggcgcccccggtacgggctccctcccgctggaggacctgctcgaccgcctcgcgaaggccgggtacgacggctgggtcggcctggagtacaagcccggcgacgaccccagcgcccagtccttctcctggctgccggccggggcccgcgcggcccgctga

SEQ ID NO: 5113 - protein, 279 aa, Streptomyces coelicolor
MGFADQRFNVNLSILFTELPLLERPAAAAAAGFTAVELWWPWIDSPTPEQSELDALKSAIEDAGVQLTGLNFYAGQLPGPDRGALSIPGEESERFRANIDVAADFARSLGCTALNALYGNRVEGVDPAEQDRLALENLVLAARAADRIGAVLLVEALNKPESPRYPLVSAPAAIAVVDRVNEATGLGNAKFLMDLYHLSMNGEDLPQVIDAYAAKTGHVQIADNPGRGAPGTGSLPLEDLLDRLAKAGYDGWVGLEYKPGDDPSAQSFSWLPAGARAAR

SEQ ID NO: 5114 - DNA, 783 bp, Ralstonia eutropha
  CDS (1)..(783): transl_table=11
atgccgcgcttcgccgcaaacctctcgatgatgtacaacgagcacgccttcctggaccgctttgccgcagccgcggccgacggcttccgggcggtggagttcctgttcccgtacgagcacgccgccgccgagctgcgcgcgcgcctggacgcgaacggcctcacacaggcactgttcaacgcggcgccgggcgactgggcagcaggcgaacgcggcctggccgccctgcccgggcgcgaggcggatttccgcggcaccatcggccgcgcgctggaatacgccggcgtgatcggcaatgaccgcatccacgtgatggcgggcctgatccctgccgatgccgaccgcgcgcgctgccgcgccacatacctcgagaacctcgcctttgctgccaacgctgccgccgcccagggcgtgaccgtgctgatcgagccgatcaacacgcgcgacatgccgggctatttcctgaaccgccaggacgacggccaggctatctgcaaggaagtcggcgcggccaacctgaaggtgcagttcgactgctaccactgccagatcgtcgaaggcgatgtcgcgatgaagctcaagcgcgacatcgcgggcatcggccatatccagatcgccggcgtgcccgagcgccatgagccggacgtgggcgagctgaactatccctacctgttcgaggtcatggacacgctcggctacgacggctggatcggctgcgaataccgcccgcgcgccggcacctcggccggcctgggctggctcaagccctacctgggccgctga

SEQ ID NO: 5115 - protein, 260 aa, Ralstonia eutropha
MPRFAANLSMMYNEHAFLDRFAAAAADGFRAVEFLFPYEHAAAELRARLDANGLTQALFNAAPGDWAAGERGLAALPGREADFRGTIGRALEYAGVIGNDRIHVMAGLIPADADRARCRATYLENLAFAANAAAAQGVTVLIEPINTRDMPGYFLNRQDDGQAICKEVGAANLKVQFDCYHCQIVEGDVAMKLKRDIAGIGHIQIAGVPERHEPDVGELNYPYLFEVMDTLGYDGWIGCEYRPRAGTSAGLGWLKPYLGR

SEQ ID NO: 5116 - DNA, 25 bp, Artificial sequence
  primer
atgcctcgttttgcagctaatttat

SEQ ID NO: 5117 - DNA, 22 bp, Artificial sequence
  primer
ttagcgccaggcgtcaaaccag

SEQ ID NO: 5118 - protein, 276 aa, Artificial sequence
  consensus sequence
  Variant (2)..(2): Xaa in position 2 is any amino acid
  Variant (6)..(15): Xaa in position 6 to 15 is any amino acid
  Variant (16)..(18): Xaa in position 16 to 18 is any or no amino acid
  Variant (21)..(22): Xaa in position 21 to 22 is any amino acid
  Variant (24)..(26): Xaa in position 24 to 26 is any amino acid
  Variant (27)..(27): Xaa in position 27 is any or no amino acid
  Variant (30)..(31): Xaa in position 30 to 31 is any amino acid
  Variant (34)..(36): Xaa in position 34 to 36 is any amino acid
  Variant (38)..(38): Xaa in position 38 is any amino acid
  Variant (39)..(44): Xaa in position 39 to 44 is any or no amino acid
  Variant (46)..(57): Xaa in position 46 to 57 is any amino acid
  Variant (58)..(60): Xaa in position 58 to 60 is any or no amino acid
  Variant (62)..(64): Xaa in position 62 to 64 is any amino acid
  Variant (66)..(66): Xaa in position 66 is any amino acid
  Variant (68)..(70): Xaa in position 68 to 70 is any amino acid
  Variant (72)..(73): Xaa in position 72 to 73 is any amino acid
  Variant (74)..(75): Xaa in position 74 to 75 is any or no amino acid
  Variant (77)..(78): Xaa in position 77 to 78 is any amino acid
  Variant (79)..(79): Xaa in position 79 is any or no amino acid
  Variant (81)..(84): Xaa in position 81 to 84 is any amino acid
  Variant (86)..(95): Xaa in position 86 to 95 is any amino acid
  Variant (96)..(97): Xaa in position 96 to 97 is any or no amino acid
  Variant (99)..(100): Xaa in position 99 to 100 is any amino acid
  Variant (103)..(114): Xaa in position 103 to 114 is any amino acid
  Variant (116)..(128): Xaa in position 116 to 128 is any amino acid
  Variant (129)..(132): Xaa in position 129 to 132 is any or no amino acid
  Variant (135)..(136): Xaa in position 135 to 136 is any amino acid
  Variant (139)..(147): Xaa in position 139 to 147 is any amino acid
  Variant (148)..(152): Xaa in position 148 to 152 is any or no amino acid
  Variant (154)..(155): Xaa in position 154 to 155 is any amino acid
  Variant (157)..(158): Xaa in position 157 to 158 is any amino acid
  Variant (159)..(161): Xaa in position 159 to 161 is any or no amino acid
  Variant (163)..(180): Xaa in position 163 to 180 is any amino acid
  Variant (181)..(188): Xaa in position 181 to 188 is any or no amino acid
  Variant (190)..(192): Xaa in position 190 to 192 is any amino acid
  Variant (194)..(194): Xaa in position 194 is any amino acid
  Variant (196)..(196): Xaa in position 196 is any amino acid
  Variant (199)..(199): Xaa in position 199 is any amino acid
  Variant (201)..(203): Xaa in position 201 to 203 is any amino acid
  Variant (205)..(218): Xaa in position 205 to 218 is any amino acid
  Variant (219)..(220): Xaa in position 219 to 220 is any or no amino acid
  Variant (222)..(222): Xaa in position 222 is any amino acid
  Variant (224)..(224): Xaa in position 224 is any amino acid
  Variant (226)..(227): Xaa in position 226 to 227 is any amino acid
  Variant (229)..(229): Xaa in position 229 is any amino acid
  Variant (231)..(231): Xaa in position 231 is any amino acid
  Variant (234)..(236): Xaa in position 234 to 236 is any amino acid
  Variant (237)..(237): Xaa in position 237 is any or no amino acid
  Variant (239)..(248): Xaa in position 239 to 248 is any amino acid
  Variant (249)..(251): Xaa in position 249 to 251 is any or no amino acid
  Variant (253)..(254): Xaa in position 253 to 254 is any amino acid
  Variant (256)..(256): Xaa in position 256 is any amino acid
  Variant (258)..(259): Xaa in position 258 to 259 is any amino acid
  Variant (261)..(261): Xaa in position 261 is any amino acid
  Variant (264)..(264): Xaa in position 264 is any amino acid
  Variant (266)..(266): Xaa in position 266 is any amino acid
  Variant (267)..(268): Xaa in position 267 to 268 is any or no amino acid
  Variant (270)..(272): Xaa in position 270 to 272 is any amino acid
  Variant (274)..(274): Xaa in position 274 is any amino acid
  Variant (275)..(275): Xaa in position 275 is any or no amino acid
FXANLXXXXXXXXXXXXXRFXXAXXXXGFXXVEXXXPXXXXXXXYXXXXXXXXXXXXXXXLXXXLXNXXXGXXXXGXXXGXXXXPXXXXXXXXXXXXAXXYAXXXXXXXXXXXXGXXXXXXXXXXXXXXXXXNLXXAAXXXXXXXXXXXXXXEXXNXXXXXPXXXXXXXXXXXXXXXXXXXXXXXXXXNXXXQXDXYHXQXXXGXXXXXXXXXXXXXXXXHXQXAXXPXRXEPXXXXEXXXXXXXXXXXXXGXXYXGXXGXEYXPXXXTXXXLXXW

SEQ ID NO: 5119 - protein, 13 aa, Artificial sequence
  protein pattern
  Variant (2)..(2): Xaa in position 2 is Ile, Leu or Val
  Variant (4)..(4): Xaa in position 4 is Phe, Ile, Leu or Val
  Variant (6)..(6): Xaa in position 6 is Asp, Gly, Gln or Ser
  Variant (7)..(7): Xaa in position 7 is any amino acid
  Variant (9)..(9): Xaa in position 9 is any amino acid
  Variant (11)..(11): Xaa in position 11 is any amino acid
HXQXAXXPXRXEP

SEQ ID NO: 5120 - protein, 15 aa, Artificial sequence
  protein pattern
  Variant (2)..(3): Xaa in position 2 to 3 is any amino acid
  Variant (4)..(4): Xaa in position 4 is Phe, Trp or Tyr
  Variant (5)..(5): Xaa in position 5 is Ile, Leu, Met or Val
  Variant (7)..(7): Xaa in position 7 is any amino acid
  Variant (10)..(10): Xaa in position 10 is any amino acid
  Variant (11)..(11): Xaa in position 11 is Ala, Pro or Ser
  Variant (12)..(14): Xaa in position 12 to 14 is any amino acid
  Variant (15)..(15): Xaa in position 15 is Ala, Asp, Gly, Pro or Thr
YXXXXGXEYXXXXXX

SEQ ID NO: 5121 - DNA, 672 bp, Escherichia coli
  CDS (1)..(672): transl_table=11
atgacaatgcgcacaaatcgctaccctgccagacagatttttagggagagaaccatgctgttacacattttgtatttggttggcattactgccgaagccatgacgggggcgctggcggccggacgacggcgcatggatacatttggcgtaattattattgcgaccgccaccgcaattggcggagggtcagtgcgcgatattctgctgggccactatccgctcggctgggtcaaacacccggaatatgtgattatcgtcgctaccgccgcagtactcaccactatcgttgctcctgtaatgccttacctgcgcaaagtgtttctggtgctcgatgcgctcggactggtggtcttttctatcatcggggcacaggttgcactggatatggggcacggcccaattattgccgttgtcgcggcggtaaccaccggcgtgtttggcggcgttttgcgcgatatgttctgtaaacgtatcccactggtattccagaaagagttgtatgccggtgtctcatttgcctccgccgtgctgtacatcgcgctgcaacactatgtttctaaccatgatgtggtaattatctccaccctggtattcggcttttttgcccgcttactggcgctacgccttaagctgggattaccggtcttttactacagccacgaaggacactaa

SEQ ID NO: 5122 - protein, 223 aa, Escherichia coli
MTMRTNRYPARQIFRERTMLLHILYLVGITAEAMTGALAAGRRRMDTFGVIIIATATAIGGGSVRDILLGHYPLGWVKHPEYVIIVATAAVLTTIVAPVMPYLRKVFLVLDALGLVVFSIIGAQVALDMGHGPIIAVVAAVTTGVFGGVLRDMFCKRIPLVFQKELYAGVSFASAVLYIALQHYVSNHDVVIISTLVFGFFARLLALRLKLGLPVFYYSHEGH

SEQ ID NO: 5123 - DNA, 639 bp, Mesorhizobium loti MAFF303099
  CDS (1)..(639): transl_table=11
atgcccttgaaccccatcgcccttctcgactatgccggcgtcgccgtttttgcggcgaccggggcgttggctgcctcgcgcaagcaactcgacattatcggtttcctgttcttggccagcgtcactggcattggcggtggcacgtttcgcgacctcatcctcaacgtgccggtcttctgggtgggaaaccgcgactatgtgctgatctgcgccgtggtggcggtcctggtcttcttcaccgcgcatcgcgtcgaatcccgatacaagctgctgctgtggctcgacgccatcgggctcgccgccttttcggtgatgggcgcggccaagggtcttggcatcaccggctcgccggtggtttcgatcatcaccggcatgctgaccgcgacctttggcggcatattgcgcgatctgctggccggcgagccgtcggtgctgctgaggccggagatctacgtcacggccgccctggcgggcgcggccatcttcacattaggtgacgtcgccggattgccgcagtttgtctcggggttggccggcttcgtcgtggcgctcgccgtgcgcggcggcgcgctgcgtttcggctgggcgtttccgtcctacaagagccggcccggccgacggccggaagatattccgtga

SEQ ID NO: 5124 - protein, 212 aa, Mesorhizobium loti MAFF303099
MPLNPIALLDYAGVAVFAATGALAASRKQLDIIGFLFLASVTGIGGGTFRDLILNVPVFWVGNRDYVLICAVVAVLVFFTAHRVESRYKLLLWLDAIGLAAFSVMGAAKGLGITGSPVVSIITGMLTATFGGILRDLLAGEPSVLLRPEIYVTAALAGAAIFTLGDVAGLPQFVSGLAGFVVALAVRGGALRFGWAFPSYKSRPGRRPEDIP

SEQ ID NO: 5125 - DNA, 624 bp, Vibrio cholerae O1 biovar eltor str. N16961
  CDS (1)..(624): transl_table=11
atgctgctgagtgttttgtatatcattgggatcacggcggaagccatgaccggagccttgagtgccggccgtcgcaaaatggactggtttggcgtcatgctggttgccagcgctactgcgattggcggtggtacagtgcgcgatattttgctgggccactacccactcggctgggtaaagaatcctgaatatctggcgattacttgtgtcgcgggcgtactgaccacttgggtctataagtgggtcatcaagctcaaaggcctgtttattcgtcttgatgcgctggggctgattgtgttttcgatcatcggtacgcaagtggcgatgcgcatgggactgcaccccggcatctgtttagtttctgcggtagtcactggcgtgtttggtggtttgctgcgcgatttaatttgccgtcaaccacctttggtattgcatgaagagttgtacgcctcgattgctctgttggcatcgggactgtatctcgccttgcttgaatttggtgtcagtgatgtggtaagcacagtggtcactctggtggtcggttacactttgcggatggctgcggtgcgttttaaatggcgtctgccctctttccatttagaaaccgagaactccattcactag

SEQ ID NO: 5126 - protein, 207 aa, Vibrio cholerae O1 biovar eltor str. N16961
MLLSVLYIIGITAEAMTGALSAGRRKMDWFGVMLVASATAIGGGTVRDILLGHYPLGWVKNPEYLAITCVAGVLTTWVYKWVIKLKGLFIRLDALGLIVFSIIGTQVAMRMGLHPGICLVSAVVTGVFGGLLRDLICRQPPLVLHEELYASIALLASGLYLALLEFGVSDVVSTVVTLVVGYTLRMAAVRFKWRLPSFHLETENSIH

SEQ ID NO: 5127 - DNA, 681 bp, Pasteurella multocida subsp. multocida str. Pm70
  CDS (1)..(681): transl_table=11
atgctgttaagcgtcctctacattattggtatcaccgcagaagccattacaggtgcactggctgctggacgtgaaaaaatggatatttttggcgtcattattattgccgcaatgacggcgattggcggtggctcggtcagagatgtcttactcggtcactaccctatcggctgggtgaaaaatcctcattactttctgattgtggcaggtgcagcggtgttaaccgtctttattgtgcccctaattcgtcgctttatgcactattttcataccgtcttcttagtcttagatgcccttggtttgatcgtgttttccattatcggcgcacaagttgcactggacatgggctatggctttactatcgcggtgattgccgccatcattactggtgcgtttggtggggtactccgtgatttattatgtaaccgtattccactggttttccaaaaagagctatatgccagtattgcattgattgcgactgccatttatattggcttgcagcaactcaatatcgatcacaatcttgttattattatcaccttgatcagtggctttattgctcgtcttttagcaatttatttcgaatgggggctacctgtttttgactatcaagagcaagaaatggcaaagaagagtaatgatgacaaattacccaaaaaagtaacatggaaaaaataa

SEQ ID NO: 5128 - protein, 226 aa, Pasteurella multocida subsp. multocida str. Pm70
MLLSVLYIIGITAEAITGALAAGREKMDIFGVIIIAAMTAIGGGSVRDVLLGHYPIGWVKNPHYFLIVAGAAVLTVFIVPLIRRFMHYFHTVFLVLDALGLIVFSIIGAQVALDMGYGFTIAVIAAIITGAFGGVLRDLLCNRIPLVFQKELYASIALIATAIYIGLQQLNIDHNLVIIITLISGFIARLLAIYFEWGLPVFDYQEQEMAKKSNDDKLPKKVTWKK

SEQ ID NO: 5129 - DNA, 606 bp, Halobacterium sp. NRC-1
  CDS (1)..(606): transl_table=11
atgaacgcggtcggcctggtggcgttcgccaccgtcggctcgctgaaggcgatcgacgccgacttcgacgtgctcggggtcgcggtgctcggcgtgctgacggcgctgggcggcggcgcaacccgtgacgtgctcgtcgggtcggtgccggcgatgttgcagtccaccaccgacgtggggttcgcgctggctggcgtggtggtggcggtcgtggtggcgcgacgcgtcggcaccgaggtgcttgcccacccggtcgtggacgtcccggacgccgtcgggctggcggcgttcgcggcgtcgggcgcgctggtcggcgtcggggcggacgtgtcgccgttcggggtggtcgtgctcggcaccaccacgggagtcggcggggggctggtgtccgacgtgctgttgcagcgcgtgccgttcgtgctcacggaggacctgtacgcgacgtgcgcgatcgccgggagcaccgtgttgtgggtcgccaccgcgtcggggctgggggccacgatcgcggcggcggcgggcgcgggggtcacgctcgcggtgcggctgctcgcgatccgcttcgagtgggcgctgccgacggtccggctcaacgccccggcgtga

SEQ ID NO: 5130 - protein, 201 aa, Halobacterium sp. NRC-1
MNAVGLVAFATVGSLKAIDADFDVLGVAVLGVLTALGGGATRDVLVGSVPAMLQSTTDVGFALAGVVVAVVVARRVGTEVLAHPVVDVPDAVGLAAFAASGALVGVGADVSPFGVVVLGTTTGVGGGLVSDVLLQRVPFVLTEDLYATCAIAGSTVLWVATASGLGATIAAAAGAGVTLAVRLLAIRFEWALPTVRLNAPA

SEQ ID NO: 5131 - DNA, 624 bp, Escherichia coli O157:H7 EDL933
  CDS (1)..(624): transl_table=11
atgctcgtctattggctggatatagtcggcacagcggtatttgccatctccggcgttttgttagccggaaaattgcgtatggacccttttggtgttctggtactgggcgtggttaccgctgtaggcggcgggacaattcgcgacatggcgctggatcacggcccggtattttgggtgaaagatcccaccgatctggtcgttgcaatggtaaccagcatgctgaccatcgtgctggtgcgccagccaagacacttaccaaaatggatgttgccggtgctggacgccgttggtctggcggtgtttgtcggcattggcgtgaataaagcctttaatgcggaagccggtccgttaatcgcggtttgtatgggcgtcattactggcgttggcggcgggatcattcgtgatgttctggcccgcgaaatccccatgattttacgtacagaaatctacgcaactgcctgtattatcggcggtattgtccacgctacggcttattacacattttccgtaccactggaaacagccagtatgatgggcatggtcgtgacgctattgattcggctggcggctattcgttggcatcttaagctaccgacgtttgcgctggatgagaatgggcgttga

SEQ ID NO: 5132 - protein, 207 aa, Escherichia coli O157:H7 EDL933
MLVYWLDIVGTAVFAISGVLLAGKLRMDPFGVLVLGVVTAVGGGTIRDMALDHGPVFWVKDPTDLVVAMVTSMLTIVLVRQPRHLPKWMLPVLDAVGLAVFVGIGVNKAFNAEAGPLIAVCMGVITGVGGGIIRDVLAREIPMILRTEIYATACIIGGIVHATAYYTFSVPLETASMMGMVVTLLIRLAAIRWHLKLPTFALDENGR

SEQ ID NO: 5133 - DNA, 690 bp, Agrobacterium tumefaciens str. C58
  CDS (1)..(690): transl_table=11
ttgcgcgacactgacgtgtttgcgggccgtctttctggggggaaccttttcatgacgctgctgggttttctcgattatgccggtgtcgccgtctttgccgcaaccggcgccttggccgcctcacgcaagcagctcgacctgatcggcttcctgttcttcgcggcggcgaccggcattggcggcggcacggttcgcgatctcgtgctgggcagaacgccggtgttctgggtgataaaccccacctatattctcgtctgtgtctcggtcgcggttctgctgttctttaccgcgcatcttttcgaatcccgttatcgggtattgatctggcttgatgcgctcggcctttccgcctattgcgtcatgggagcagccaaaggtctcgctgcaagcggctcggcaaccgtcgccatcgtcacaggtgttctgacggcgacgttcggtggtgttttgcgcgatattatggccggagagccgtcggttctgctgcgcccggaaatctacatcacctgcgcgcttttgggctcttccatcttcattgtcgtctatttcttcggcgcaccgctctatgccgcatcagcggcgggtttcctgacggccttctgcgtccgatccggcgcgctgatcttcggatggaccttcccgccctataagggcaaaccgggcagacggccggaagacgtcatgaagtga

SEQ ID NO: 5134 - protein, 229 aa, Agrobacterium tumefaciens str. C58
MRDTDVFAGRLSGGNLFMTLLGFLDYAGVAVFAATGALAASRKQLDLIGFLFFAAATGIGGGTVRDLVLGRTPVFWVINPTYILVCVSVAVLLFFTAHLFESRYRVLIWLDALGLSAYCVMGAAKGLAASGSATVAIVTGVLTATFGGVLRDIMAGEPSVLLRPEIYITCALLGSSIFIVVYFFGAPLYAASAAGFLTAFCVRSGALIFGWTFPPYKGKPGRRPEDVMK

SEQ ID NO: 5135 - DNA, 714 bp, Brucella melitensis 16M
  CDS (1)..(714): transl_table=11
ttgaggcagcgcgggtggaaacttgaaccggacgatcaagcggaggctcgtagagacgtgacgatcatacaattcctgaactacgcgggagtgttcgtttttgccgccacaggtgcattggccgcctcgcgccgccagctcgacattatcggcttcatcttccttgccaatatcacggccattggcgggggaacgatgcgcgatctggtgctcgcaagcccggttttctgggtcgtgcagccgctctatctgtttgtgggcacacttgcggccattgcagtctatttcaccgcccataaggtggaatcgcgctatcgcacccttctctggctcgatgccatcggcatggccgcctacacggtcatgggcgccgccaaggggcttgcgctgggcttcggcccgtcagtcgctatcgtcacaggcattttcaccgccacgttcggcggcatattgcgcgacatggtggtgggggaaccgtccgtgctgatgcgccgcgaaatctatgtcacggcagccgttgccggggcctgcctctatgtggtgctggaatatctcggcatcaatcccgtgatttcggcgggtgcagccgcttttgccgcttttttcgtgcgcggcggcgcgctttatttcggctggaccctgccggtttataaaagcaagcccggccgcactgaagaagaactccagcgcgaccagatcatccggccagaataa

SEQ ID NO: 5136 - protein, 237 aa, Brucella melitensis 16M
MRQRGWKLEPDDQAEARRDVTIIQFLNYAGVFVFAATGALAASRRQLDIIGFIFLANITAIGGGTMRDLVLASPVFWVVQPLYLFVGTLAAIAVYFTAHKVESRYRTLLWLDAIGMAAYTVMGAAKGLALGFGPSVAIVTGIFTATFGGILRDMVVGEPSVLMRREIYVTAAVAGACLYVVLEYLGINPVISAGAAAFAAFFVRGGALYFGWTLPVYKSKPGRTEEELQRDQIIRPE

SEQ ID NO: 5137 - DNA, 660 bp, Corynebacterium glutamicum ATCC 13032
  CDS (1)..(660): transl_table=11
atgctgctgacaattctatgggccatcggcatcaccgccgaaggcatgacaggcgcgctggccgcaggccgacaaaaaatggatctcttcggagtatccgtcatcgcatgcgttaccgcgatcggcggcggatccatccgcgacatgctgctgggacattacccgctggtgtgggtggaaaagccactgtatctactgctgatcattggcgcagccattttgacagtgtccatttccttcctgatggagcacttccgtgtgttgttcctcgtgctcgacgccgtgggtctttctgcattcgctgtgatcggcacacaaatcgcactggaaatgggctacggattcatcatcgcagtagtggcatcagtgctcacaggtgtattcggcggcgtcatgcgtgaccttttgtgtgaccgcatcccactggtatttcaaaaagagctctacgcatcaatcgcattcctcgccacctgcgtctactttgcgatgatgtaccttggagcttccgaaaacgtcaccgtcctggtctctgtggtggttgcctttgtagtccgactgctatccatctggcgcggatggagcctccccgtattcgactaccaagaacgcgaatacaaacgagatcccaaaatgcgtctgtggagaatgttccggaagtaa

SEQ ID NO: 5138 - protein, 219 aa, Corynebacterium glutamicum ATCC 13032
MLLTILWAIGITAEGMTGALAAGRQKMDLFGVSVIACVTAIGGGSIRDMLLGHYPLVWVEKPLYLLLIIGAAILTVSISFLMEHFRVLFLVLDAVGLSAFAVIGTQIALEMGYGFIIAVVASVLTGVFGGVMRDLLCDRIPLVFQKELYASIAFLATCVYFAMMYLGASENVTVLVSVVVAFVVRLLSIWRGWSLPVFDYQEREYKRDPKMRLWRMFRK

SEQ ID NO: 5139 - DNA, 615 bp, Xanthomonas axonopodis pv. citri str. 306
  CDS (1)..(615): transl_table=11
gtggcaactgtcctgttcctgctggatctgctcggcaccttcgtgttcgccctgagcggggcgaccgtggcggtacgcaaccgtctggacctgttcggcgtgctggtgctctcctgcgcggccgccgtgtccggcggcatcgtgcgcgatgtgctgatcggcgccaccccgccggccgcgctggtgcagccgcagtatctgctggtggcctgcctggccggcgtggccgggttctattgccatgcagcggtggagcgcctgcgcaatccggtgcagatcttcgatgccgccgggctggcgctgtttgcggtctatggcaccagcaaggcgctggactatcacctcaccccgttgagcgcgacattgctgggcatgctcagcggcatcggcggcggcattgcgcgcgatctgctggtggcgcgcacgccggtggtgttgcaggccgaactgtacgcggtcgccgcgcttgccggtggcgggctggtcgcggtcgggcacgtcctggatgtgccgcaggcctggtcgttggcgaccggcgccggcgtgtgcttcggcctgcgcttcatggcgatccgctacggctggcatctgccggtggcgcgctcgccggagtag

SEQ ID NO: 5140 - protein, 204 aa, Xanthomonas axonopodis pv. citri str. 306
MATVLFLLDLLGTFVFALSGATVAVRNRLDLFGVLVLSCAAAVSGGIVRDVLIGATPPAALVQPQYLLVACLAGVAGFYCHAAVERLRNPVQIFDAAGLALFAVYGTSKALDYHLTPLSATLLGMLSGIGGGIARDLLVARTPVVLQAELYAVAALAGGGLVAVGHVLDVPQAWSLATGAGVCFGLRFMAIRYGWHLPVARSPE

SEQ ID NO: 5141 - DNA, 663 bp, Yersinia pestis KIM
  CDS (1)..(663): transl_table=11
gtgccaacaaatggccagcattccaacccctgtcgcggagtcacattaatgctggtttattggctggatatcttaggtactgcggtatttgctatctctggtgtattactggcaggaaaactacgtatggatccatttggcgtactggttttgggggtggttactgccgtcgggggtggcacgatccgtgacatggcattagccaatggcccggtattttgggtgaaagatcccaccgatctagtcgtggccatggtgacctgtctggctaccatcgtactggtacgtcaacccaggcgcacggcaaaatggatcctgccggtgttagatgcgattggtttagcggtgttcgtcggtatcggggttaataaagcttttgccgccgatgccagcccattagtggctatctgtatgggcgtaataactggtgtcggaggtgggattattcgtgacgtcttagcccgtgagattccgatgatcctgcgtactgagatttatgcgacggcctgtattattggcgggatcgtgcatgccactgcgttctatacatttaacatgccattacagcaagccatgatgttgggcatggtgataaccctcggtattcggctcgccgcaatccgttggcatttaaaactaccaaccttcgaaatagagcattga

SEQ ID NO: 5142 - protein, 220 aa, Yersinia pestis KIM
MPTNGQHSNPCRGVTLMLVYWLDILGTAVFAISGVLLAGKLRMDPFGVLVLGVVTAVGGGTIRDMALANGPVFWVKDPTDLVVAMVTCLATIVLVRQPRRTAKWILPVLDAIGLAVFVGIGVNKAFAADASPLVAICMGVITGVGGGIIRDVLAREIPMILRTEIYATACIIGGIVHATAFYTFNMPLQQAMMLGMVITLGIRLAAIRWHLKLPTFEIEH

SEQ ID NO: 5143 - DNA, 792 bp, Bifidobacterium longum NCC2705
  CDS (1)..(792): transl_table=11
atgcaggtggcgttggagaacaacatcgtttttgtggtcatcgagtatttagcaatcctgtgttggggattatcgggcggacttgccgccattcgcaagggctacgacatcttcaccatcatgctgtgcggatggcttaccgcactcggcggcggtcttgtgcgcgacgtgatgctcggtgccctgccgccggtcggcatcaccgacaaaggctatgtgctcaccacgctgttttccggcattatcgtggtggtggcccatccggagatcaccaaactcaaatggacgatgactgtcatcgatgctctgggcctcggactattcgcagtcagcggcaccgcaaaagctctggcctacggttcctcaggcatgacagccgtattccttggcatgttcacagcactggccggcggcctcattcgtgacatcttcattggcgacgtgccaatgattattcgagacaaacacctctatgctgtgccttcgttcatcggctgcatcctgaccgtgctggtatggcgcggcgtaagctacggctggttcgacatgcgctcggaaatgctgctcgacgtgctgatcgtcatcatcgtggtggcgctgcgactgctctcggtaggcttcaacgtcactctgcccggagccgtcgaacgtcatcgcgtctacctgcccagcgaaagccgatatctcaagcgcccggtcatccatccgcacgccgataccgtcgatcccggcgataccaccaaggacgaagaagacaagcctcaggatggttcaaggccgcctcagggctaa

SEQ ID NO: 5144 - protein, 263 aa, Bifidobacterium longum NCC2705
MQVALENNIVFVVIEYLAILCWGLSGGLAAIRKGYDIFTIMLCGWLTALGGGLVRDVMLGALPPVGITDKGYVLTTLFSGIIVVVAHPEITKLKWTMTVIDALGLGLFAVSGTAKALAYGSSGMTAVFLGMFTALAGGLIRDIFIGDVPMIIRDKHLYAVPSFIGCILTVLVWRGVSYGWFDMRSEMLLDVLIVIIVVALRLLSVGFNVTLPGAVERHRVYLPSESRYLKRPVIHPHADTVDPGDTTKDEEDKPQDGSRPPQG

SEQ ID NO: 5145 - DNA, 657 bp, Brucella suis 1330
  CDS (1)..(657): transl_table=11
gtgacgatcatacaattcctgaactacgcgggagtgttcgtttttgccgccacaggtgcattggccgcctcgcgccgccagctcgacattatcggcttcatcttccttgccaatatcacggccattggcgggggaaccatgcgcgatctggtgctcgcaagcccggttttctgggtcgtgcagccgctctatctgtttgtgggcacacttgcggccattgcagtctatttcaccgcccataaggtggaatcgcgctatcgcacccttctctggctcgatgccatcggcatggccgcctacacggtcatgggcgccgccaaggggcttgcgctgggcttcggcccgtcagtcgctatcgtcacaggcattttcaccgccacgttcggcggcatattgcgcgacatggtggtgggggaaccgtccgtgctgatgcgccgcgaaatctatgtcacggcagccgtcgccggggcctgcctctatgtggtgctggaatatctcggcatcaatcccgtgatttcggcgggtgcagccgcttttgccgcttttttcgtgcgcggcggcgcgctttatttcggctggaccctgccggtttataaaagcaagcccggccgcactgaagaagaactccagcgcgaccagatcatccggccagaataa

SEQ ID NO: 5146 - protein, 218 aa, Brucella suis 1330
MTIIQFLNYAGVFVFAATGALAASRRQLDIIGFIFLANITAIGGGTMRDLVLASPVFWVVQPLYLFVGTLAAIAVYFTAHKVESRYRTLLWLDAIGMAAYTVMGAAKGLALGFGPSVAIVTGIFTATFGGILRDMVVGEPSVLMRREIYVTAAVAGACLYVVLEYLGINPVISAGAAAFAAFFVRGGALYFGWTLPVYKSKPGRTEEELQRDQIIRPE

SEQ ID NO: 5147 - DNA, 624 bp, Shigella flexneri 2a str. 301
  CDS (1)..(624): transl_table=11
atgctcgtctattggctggatatagtcggcacagcggtatttgccatctacggcgttttgttagccggaaaattgcgtatggacccttttggtgttctggtactgggcgtggttaccgcagtaggcgacggaacaattcgcgacatggcgctggatcacggcccggtattttgggtgaaagatcccaccgatctggtcgttgccatggtcaccagcatgctgaccatcgtgctggtgcgccagccaagacgcttaccaaaatggatgttgccggtgctggacgccgttggtctggcggtgtttgtcggcattagcgtgaataaagcctttaatgcggaagccggtccgttaatcgcggtttgtatgggcgtcattactggcgttggcggcgggatcattcgtgatgtactggtccgcgaaatccccatgattttacgtacagaaatctacgcaactgcctgtattatcggcggtattgtccacgctacggcttattacacattttccgtaccactggaaacagccagtatgatgggcatggtcgtgacgctattgattcggctggcggctattcgttggcatcttaagctaccgacgtttgcgctggatgagaatgggcgttga

SEQ ID NO: 5148 - protein, 207 aa, Shigella flexneri 2a str. 301
MLVYWLDIVGTAVFAIYGVLLAGKLRMDPFGVLVLGVVTAVGDGTIRDMALDHGPVFWVKDPTDLVVAMVTSMLTIVLVRQPRRLPKWMLPVLDAVGLAVFVGISVNKAFNAEAGPLIAVCMGVITGVGGGIIRDVLVREIPMILRTEIYATACIIGGIVHATAYYTFSVPLETASMMGMVVTLLIRLAAIRWHLKLPTFALDENGR

SEQ ID NO: 5149 - DNA, 627 bp, Shewanella oneidensis MR-1
  CDS (1)..(627): transl_table=11
atgaatcactggatttacttcttcgatttatgtggcacggcggtatttgccctttctggcgctttagccgctggtcgccaccgtatggacccttttggggtgatagtgcttgcgtcggtgacagcagtgggcggtggcagtatccgcgatgcgctgattggcgcaaccccagtattttggatccgcgacccaaactatattatcgttatccttgcgactgtagtggcctgtttgttgttagtacgtcgcccacgcaagatgcctgagtacgtcctccccgtcgccgatgccttaggtttagccctgttcactgtgattggtgccgaaaaagccctcaatatggggctaagcggcatgattgcagtggtgatgggcttgatcaccggcgtaggaggaggcattattcgagacttgctgtgcagacaaatcccgatggtattgcgcacagaaatctatgccacagcctccattatcggcggtataggctataccgtaagtttggcctgcggtatgggcgaaaaaacggcactttttttagccatggccagtgcgttaatcatccgtctatgcgccatcaaatggcatttatcattacccgcttttgatctcaaaaccaagagggaatag

SEQ ID NO: 5150 - protein, 208 aa, Shewanella oneidensis MR-1
MNHWIYFFDLCGTAVFALSGALAAGRHRMDPFGVIVLASVTAVGGGSIRDALIGATPVFWIRDPNYIIVILATVVACLLLVRRPRKMPEYVLPVADALGLALFTVIGAEKALNMGLSGMIAVVMGLITGVGGGIIRDLLCRQIPMVLRTEIYATASIIGGIGYTVSLACGMGEKTALFLAMASALIIRLCAIKWHLSLPAFDLKTKRE

SEQ ID NO: 5151 - DNA, 642 bp, Shewanella oneidensis MR-1
  CDS (1)..(642): transl_table=11
atgcaagaagcacaatttatcggattattatggctgattgggattttggccgaggcgatgacaggggccttagcggcgggtcgtaagcagatggatttattcggtgtggtgattattggctgcgctacggcgattggtggtggtaccttaagagacatgctactcggaaattaccccttggtttgggtcgagaatgttcattacctgattgcgattgcatttgcgtctttgttaacggtcgcgattgcgccggttatgcgttatctgtctaagttgtttttggcaatcgatgcccttgggctggcggttttctcgattgttggcgcgcaaaagactctgatgctcggttttagccctacgattgcggtagttatggggttagttactggcgtttttggtggggtgatccgcgatattctgtgcaaccaagtgcctttaatttttaagaaagaactctatgcggtgatttcgctctttaccgcaggcttatatatcacgctcaacgcctaccaattggaggagtggataaacctagtgatttgtttaacgcttggatttagcttacgaatgctggcattgcgctatcattggtcgatgcctacctttgattaccagtccagtggtgatcagcatacacactga

SEQ ID NO: 5152 - protein, 213 aa, Shewanella oneidensis MR-1
MQEAQFIGLLWLIGILAEAMTGALAAGRKQMDLFGVVIIGCATAIGGGTLRDMLLGNYPLVWVENVHYLIAIAFASLLTVAIAPVMRYLSKLFLAIDALGLAVFSIVGAQKTLMLGFSPTIAVVMGLVTGVFGGVIRDILCNQVPLIFKKELYAVISLFTAGLYITLNAYQLEEWINLVICLTLGFSLRMLALRYHWSMPTFDYQSSGDQHTH

SEQ ID NO: 5153 - DNA, 666 bp, Corynebacterium efficiens YS-314
  CDS (1)..(666): transl_table=11
atgctgctgacaattctctgggtgatcggcatcaccgcggaagggatgaccggtgccctggctgcggggcgtcagaagatggatctcttcggtgtctcggtcatcgcctgcgtgaccgccatcggtggtggttcgatccgcgacatgctgctgggacactaccccctggtgtgggtggagaaaccgcacttcctgttgctgatcatcggggccgccatcctgacggtgtccatctcctacctgatgcagcacttccgggtgctgttcctggtgctcgatgccgtgggattgtcagcgttcgccgtgatcggcacgcagatcgccctggagatggggtacggcttcatcatcgcggtggtcgcctccgtgctcaccggtgtcttcggcggcgtgctgcgtgacctgttgtgcgaccgtatcccactggtgttccagaaggagctctacgcctccatcgccctgctggccacctgcgtgtacttcctcatgatgtacctcggtgtgggggagaacaccacggtgatcgtatccgtgctggtggccttcaccgcccgactgctcgccctgtggcggggctggtccctgccggtgtttgagtaccaggagcgtgaggtccagcgtgatcccaccaaccggatctggcgtttctggaactggaagaagtag

SEQ ID NO: 5154 - protein, 221 aa, Corynebacterium efficiens YS-314
MLLTILWVIGITAEGMTGALAAGRQKMDLFGVSVIACVTAIGGGSIRDMLLGHYPLVWVEKPHFLLLIIGAAILTVSISYLMQHFRVLFLVLDAVGLSAFAVIGTQIALEMGYGFIIAVVASVLTGVFGGVLRDLLCDRIPLVFQKELYASIALLATCVYFLMMYLGVGENTTVIVSVLVAFTARLLALWRGWSLPVFEYQEREVQRDPTNRIWRFWNWKK

SEQ ID NO: 5155 - DNA, 612 bp, Pseudomonas putida KT2440
  CDS (1)..(612): transl_table=11
atgttgttgatgctctaccttatcgccattaccgccgaagccatgactggcgcgctgtctgccgggcgtcgcggcatggactggtttggcgtggtgctgatcgcctgcgtcactgcgcttgggggtggctcggtgcgtgatgtgctgctcgggcactacccgctgacctgggtgaagcaccctgagtacctggtgctgaccagttttgcggcgctgctgaccattttcattgcgccaatgatgcgccgccttcgctcgctgttcctggtgcttgatgccctggggctggtggcgtttaccctgataggttgcatgacggcgctggagatggggcagggcatgctggtggcgtcgatcagcggggtgatcactggggtgtttggcgggatcctgcgggatatcttctgcaacgacatcccgctggtgttccgccgtgagctgtatgccagcgtgtcatttgcggcagcctggttttatctgggttgcgtgtatttcaaggtgccggcagaacaggcgatgttgctcacactgtttggcggcttcctggtgcgcctgttggcaatccgcttccactgggaaatgcccaagttccactacaacgaccagcagtga

SEQ ID NO: 5156 - protein, 203 aa, Pseudomonas putida KT2440
MLLMLYLIAITAEAMTGALSAGRRGMDWFGVVLIACVTALGGGSVRDVLLGHYPLTWVKHPEYLVLTSFAALLTIFIAPMMRRLRSLFLVLDALGLVAFTLIGCMTALEMGQGMLVASISGVITGVFGGILRDIFCNDIPLVFRRELYASVSFAAAWFYLGCVYFKVPAEQAMLLTLFGGFLVRLLAIRFHWEMPKFHYNDQQ

SEQ ID NO: 5157 - DNA, 621 bp, Vibrio vulnificus CMCP6
  CDS (1)..(621): transl_table=11
atggactccatgctgctgtattttatcgatttatttggcaccgctgtttttgctgtttccggcgttctcttggctggacggttaaagatggatccttttggtgtggttgtattaggcagcgtgaccgcgattggtggtggcactattcgcgatatggccttgggcgcaacccccgtcttttggatcaaggacaccacctatctttgggttatcatcgttacctgtctgttgacaatgctcgttgtgcgccgacctaagcgcttagcgtggtggatattacccgtctgcgatgccattggcttggcggtatttgttgggatcggtgtcgagaaagccctcgcctatcaagattcagcgatggtcgcggtgatcatgggcgtcattaccggctgtggtggcggtattattcgcgatgtgttagcgcgtgagattccaatggtgctgcgaagtgaagtgtatgcgactgcctgtcttgttggtgggatattccacacatctgccctaagccttggctatgatcactctacagccttattggcaggtgtgttttcgaccttgatcatccgcttgggcgccattcgctggcatttatcattgcctacatttgcactaaataaataa

SEQ ID NO: 5158 - protein, 206 aa, Vibrio vulnificus CMCP6
MDSMLLYFIDLFGTAVFAVSGVLLAGRLKMDPFGVVVLGSVTAIGGGTIRDMALGATPVFWIKDTTYLWVIIVTCLLTMLVVRRPKRLAWWILPVCDAIGLAVFVGIGVEKALAYQDSAMVAVIMGVITGCGGGIIRDVLAREIPMVLRSEVYATACLVGGIFHTSALSLGYDHSTALLAGVFSTLIIRLGAIRWHLSLPTFALNK

SEQ ID NO: 5159 - DNA, 642 bp, Bradyrhizobium japonicum USDA 110
  CDS (1)..(642): transl_table=11
atgtggagcctgccgccgagcgatagcgtgctgcaccttctggcgtttgttgccttgacggcgcagggcatgaccgcggcgcttgctgcggggcggcgcagcatggactatgtcggcgtctgcatgctcggcagcattaccgcgctcggcggcggcacgctgcgcgacctgtttctcggccactatccgctcgcctgggtcgcgaacccgatctatctcgtgctccctggcgctgcagcgctgctgaccatcctgttcgcgcgcctcgtgcaccggcttcagctcgccttcatcgtgctcgatgccatcggcctcgtcgtcttcactatgaccggctgcgacatcgcctggcagatggatgtctcgctgccgatcgtcatcgtctcgggcatggtgacgggctgcgccggcggcgtgttgcgcgacgtgctctgcaacgacgtgccgctcttgtttcgctccgagctctacgccagcgtctccgtggtgacggggctgttctacgcgacggccttcggcctcaatctcaacgccgagctctggacgatcctgaccttcatcctcggcatcagcttccgcctgctcgcggtgcgctacaaatgggagatgccgaaattcgtgttcaaggaggatgagcggtag

SEQ ID NO: 5160 - protein, 213 aa, Bradyrhizobium japonicum USDA 110
MWSLPPSDSVLHLLAFVALTAQGMTAALAAGRRSMDYVGVCMLGSITALGGGTLRDLFLGHYPLAWVANPIYLVLPGAAALLTILFARLVHRLQLAFIVLDAIGLVVFTMTGCDIAWQMDVSLPIVIVSGMVTGCAGGVLRDVLCNDVPLLFRSELYASVSVVTGLFYATAFGLNLNAELWTILTFILGISFRLLAVRYKWEMPKFVFKEDER

SEQ ID NO: 5161 - DNA, 612 bp, Pseudomonas syringae pv. tomato str. DC3000
  CDS (1)..(612): transl_table=11
atgttgctgatgctttatctgatcgccatcaccgctgaggccatgaccggcgcgctgtctgccgggcgtcgcgggatggactggttcggcgtggtgctgatcgcctgcgtgactgcgctgggcggtggctcggtgcgtgacgtgctgatcggtcattacccgctgacttgggtcaagcacccggaatacctgatgctgaccagcgtggcggcgttggtgacgatctttatcgcaccgctgatgcgccacctgcgctcgctgtttctggtgctcgacgcactggggctggtggccttcacattgatcggctgcatgacggcactggaagccggacatggtctggtgatcgcgtcggtgtgcggcgttattaccggggtattcggtggcatcctgcgtgacatcttctgcaatgacatcccgctgatcttccgccgcgagctgtacgccagcgtgtcgtttctggccgcgtggtgttttctgctgtgccagtacctgcagttgcccaacgaacaggccgtgctgatcaccctgtttggcggcctgttgctgcgcctgctggccatccgcttccactgggaaatgcccaagttcgtctataaagacgagccctga

SEQ ID NO: 5162 - protein, 203 aa, Pseudomonas syringae pv. tomato str. DC3000
MLLMLYLIAITAEAMTGALSAGRRGMDWFGVVLIACVTALGGGSVRDVLIGHYPLTWVKHPEYLMLTSVAALVTIFIAPLMRHLRSLFLVLDALGLVAFTLIGCMTALEAGHGLVIASVCGVITGVFGGILRDIFCNDIPLIFRRELYASVSFLAAWCFLLCQYLQLPNEQAVLITLFGGLLLRLLAIRFHWEMPKFVYKDEP

SEQ ID NO: 5163 - DNA, 621 bp, Vibrio parahaemolyticus RIMD 2210633
  CDS (1)..(621): transl_table=11
atggattccatgctgctttatatgatcgatttattcggtacagcaatcttcgctgtgtctggtgttttactcgctggccgattaaaaatggatcccttcggtgttatcgtcctaggcagcgtgactgccattggcggtggcactattcgtgatatggcacttggtgcgacccccgtcttttggattaccgataccacttatctttgggttatcttcatcacctgtttgttaactatgatcttggttcgcagaccaaaacggttagcttggtgggttttacccgtgtgtgacgccatcggtctggccgtatttgtgggaattggggtagaaaaagcgctcgcctacaacgcctccggcatggttgccgtgatcatgggtgtaatcaccggttgcggtggcggcataatccgagatgtcttagcccgagaggtacctatggtgctaagaagcgaagtctacgccacagcctgtatcattggtggcatcttccatacaatggctgtgagtatgggttacgatcattccacagccctgctcgcaggtgttatctcaacactagtgattcgcctgggtgcgattcgttggcatctatctttacctactttcgctatcaaccgctaa

SEQ ID NO: 5164 - protein, 206 aa, Vibrio parahaemolyticus RIMD 2210633
MDSMLLYMIDLFGTAIFAVSGVLLAGRLKMDPFGVIVLGSVTAIGGGTIRDMALGATPVFWITDTTYLWVIFITCLLTMILVRRPKRLAWWVLPVCDAIGLAVFVGIGVEKALAYNASGMVAVIMGVITGCGGGIIRDVLAREVPMVLRSEVYATACIIGGIFHTMAVSMGYDHSTALLAGVISTLVIRLGAIRWHLSLPTFAINR

SEQ ID NO: 5165 - DNA, 624 bp, Vibrio parahaemolyticus RIMD 2210633
  CDS (1)..(624): transl_table=11
atgttgctaagtgtgttgtatatcattggtatcacggctgaagccatgacaggtgcgttaagcgctggtagaagaaaaatggactggtttggcgttatgttggtagcgagtgcgacagccattggcggcggcacagtgcgtgacattttattgggccactatcctcttggttgggtcaaaaaccctgagtttctggctatcacctgtgttgctggcgtactaacgactggcctcgcgaaatgggtgatcaaactaaaaggcttgttcattcgtcttgatgcactgggtttgattgtatttagcatcatcggtaccaagattgcgatgggcatgggcttgcacccaggcatctgtatggtgtctgcattggtgactggcgtatttggtggcttacttcgcgatttgatctgtcgccaaactccgttggtactgcatgaggagctatacgcttctatcgcgttgatagcatccggcctttaccttacgttactggaattcagcgtaccagacgtaacagcaaccattgttacccttgttgtgggttacgtacttcgtatggcagcggttcgatttaagtggcgtttgccttctttccagttggaaaccgaaagctcgctccactaa

SEQ ID NO: 5166 - protein, 207 aa, Vibrio parahaemolyticus RIMD 2210633
MLLSVLYIIGITAEAMTGALSAGRRKMDWFGVMLVASATAIGGGTVRDILLGHYPLGWVKNPEFLAITCVAGVLTTGLAKWVIKLKGLFIRLDALGLIVFSIIGTKIAMGMGLHPGICMVSALVTGVFGGLLRDLICRQTPLVLHEELYASIALIASGLYLTLLEFSVPDVTATIVTLVVGYVLRMAAVRFKWRLPSFQLETESSLH

SEQ ID NO: 5167 - DNA, 618 bp, Salmonella enterica subsp. enterica serovar Typhi Ty2
  CDS (1)..(618): transl_table=11
atgctgttgcacgttctttatttaattggcatcactgccgaggccatgacgggcgcactcgctgcgggtcgtcgtcgcatggatacattcggcgtaattattattgctaccgccaccgccattggtggaggctcggttcgcgacattctgctcggtcactatccgctgggttgggtgaagcatcccgaatatgtcattattgtggcgactgccgccgtattgaccaccattgttgctcccgtcatgccctatttacgcaagcttttcctggtacttgacgcgctggggttggtggttttctctattattggcgctcagatagcccttgatatgggcgaagggccaattatcgccgtggtagccgccgccactaccggcgtctttggcggcgtgctccgcgatatgttctgcaaacgcattccactggtgtttcaaaaagagctgtatgccggcatttcgttcgcctcggcggtgctctatattgcgctacaacattacgtcatgaatccggatgtcgtcgttatctctacgctactgtttggctttacagcaaggttattagcgctacgtcttaaacttggcctgccggtattttattaccgtcatgaaggacactaa

SEQ ID NO: 5168 - protein, 205 aa, Salmonella enterica subsp. enterica serovar Typhi Ty2
MLLHVLYLIGITAEAMTGALAAGRRRMDTFGVIIIATATAIGGGSVRDILLGHYPLGWVKHPEYVIIVATAAVLTTIVAPVMPYLRKLFLVLDALGLVVFSIIGAQIALDMGEGPIIAVVAAATTGVFGGVLRDMFCKRIPLVFQKELYAGISFASAVLYIALQHYVMNPDVVVISTLLFGFTARLLALRLKLGLPVFYYRHEGH

SEQ ID NO: 5169 - DNA, 630 bp, Bacteroides thetaiotaomicron VPI-5482
  CDS (1)..(630): transl_table=11
atgccgacattcgttcaaattcttgattttataggcacatttgcctttgctattagtggtatccggctggcttcggcaaagcgtttcgactggttcggagcctatgtcgtaggtcttgctaccgctatcggtggcggtaccatccgtgatgtactgctggatgtgacgcccggatggatgacgaaccctatctatttgatctgtacgggacttgccttgatctgggtgatctgtttcggtcgctggctgatccgtctgaataataccttttttatattcgataccatcggactggctttgtttacggtggtcggtgtggggaaaagtatcgctttgggctatcctttttgggtagccatcatcatgggtagtatcacaggtgccgcaggaggtgtgattcgtgatgtctttatcaatgagatccccttgattttccgaaaagaaatctatgcgatggcgtgtgtagtaggcggcatcgcttactggctgtgcgatgccgcagggatggaatcttatgtctgtcagctcgttggcggatcggcggtatttgttacacgcatccttgccgtgaaataccacatttgccttcctatattaaaaggtagtgaagagactgacggcgattcttga

SEQ ID NO: 5170 - protein, 209 aa, Bacteroides thetaiotaomicron VPI-5482
MPTFVQILDFIGTFAFAISGIRLASAKRFDWFGAYVVGLATAIGGGTIRDVLLDVTPGWMTNPIYLICTGLALIWVICFGRWLIRLNNTFFIFDTIGLALFTVVGVGKSIALGYPFWVAIIMGSITGAAGGVIRDVFINEIPLIFRKEIYAMACVVGGIAYWLCDAAGMESYVCQLVGGSAVFVTRILAVKYHICLPILKGSEETDGDS

SEQ ID NO: 5171 - DNA, 633 bp, Bacillus cereus ATCC 14579
  CDS (1)..(633): transl_table=11
atgttattaatcgatatatttacgtttcttggcattatcgccgctgccatttctggtacattagttggtttaaaaaaagatttagatttatttggtgtcctttgtttagctgtagctactgcgctcggcggcggtattattcgtgatatcatgattggtaacctgccccctgtcgcatttgtaaaacccatttactttttcgtaagtgtattatcagcattatttacttgtatgttttttgagcgcatcaataaacttcaagtcgttattatgctttctgatgctgttggcttaggcgtttttacagctattggtgcaaatgcggcaatgtcacatcatgttgacgcctcatttctagttgtttcaatgggagtcattacaggtattggaggcggtattttacgtgacatttgtgctcaagatatcccttacgtattccgaaaagaaatttacgcaatcgcttctatcttaggagcaattagcttcctaatcacacacgctatgggcgcgcacgtattagctttctatgtttgtttattagtaacattcgttattcgtgtcgtcactgtaatatataatgtgcatttccctgttttctttaaaacacatgctaaaattaataaaggccattaa

SEQ ID NO: 5172 - protein, 210 aa, Bacillus cereus ATCC 14579
MLLIDIFTFLGIIAAAISGTLVGLKKDLDLFGVLCLAVATALGGGIIRDIMIGNLPPVAFVKPIYFFVSVLSALFTCMFFERINKLQVVIMLSDAVGLGVFTAIGANAAMSHHVDASFLVVSMGVITGIGGGILRDICAQDIPYVFRKEIYAIASILGAISFLITHAMGAHVLAFYVCLLVTFVIRVVTVIYNVHFPVFFKTHAKINKGH

SEQ ID NO: 5173 - DNA, 633 bp, Bacillus anthracis str. Ames
  CDS (1)..(633): transl_table=11
atgttattaatcgacatatttacgtttcttggcattatcgccgctgctatttccggtacattagttggtttaaaaaaagatttagatttattcggtgtcctttgtttagctgtagctactgcgctcggcggcggtattattcgtgatattatgatcggtaacctgcctcctgtcgcatttgttaaacctatttactttttcgtaagcgtattatcagcactatttacttgtatgttttttgagcgtatcaataaactgcaagtcgttattatgctctctgatgctgttggcttaggtgtttttacagctatcggtgcaaatgcggcaatgtcacatcatgttgacgcctcatttctagtcgtttcaatgggagtcattacaggtattggaggcggtattttgcgtgacatttgcgctcaagatatcccctacgtcttccgaaaagaaatttacgcaatcgcttctattttaggagcaattagtttcctaatcacatatgcaatgggggcacacatattagctttctatgtttgtttattagtaacattcattattcgtgttgtcactgtaatatataatgtacatttcccagttttctttaaaacacatgctaaaattaataaaggccattaa

SEQ ID NO: 5174 - protein, 210 aa, Bacillus anthracis str. Ames
MLLIDIFTFLGIIAAAISGTLVGLKKDLDLFGVLCLAVATALGGGIIRDIMIGNLPPVAFVKPIYFFVSVLSALFTCMFFERINKLQVVIMLSDAVGLGVFTAIGANAAMSHHVDASFLVVSMGVITGIGGGILRDICAQDIPYVFRKEIYAIASILGAISFLITYAMGAHILAFYVCLLVTFIIRVVTVIYNVHFPVFFKTHAKINKGH

SEQ ID NO: 5175 - DNA, 633 bp, Helicobacter hepaticus ATCC 51449
  CDS (1)..(633): transl_table=11
atgctccttactacgctttatatcattgctatcaccgcggaaggaatgacaggcgcgcttgctgctgggaaacataaaatggatttatttggcgtgatttttatcgcccttgttacagccattggtggtggctctattagagatattttacttaatcattatccacttacttgggtagctcaccctgaatatgttgtgcttatttgtattgctgcattgcttacaatgaaagctccgcgcgtggtagcacgaagtgagggcgtatttttaacccttgatgcagtaggtttagttgtttttagcattcttggcgcacaaattgcgattgataaagaatatgggtttatcattgcagtaagtgcagcagtgattacgggcgtatttggaggcattttgcgtgatattttatgtatgcgaatcccccttgtttttcaaaaagaaatttatgcaggtattgccattattgcaggagcgatgtattatgcgttgcttgaatggacacaattggatattgctcttgttacgattttgactttaatagtgggcgtaagcgcaaggcttttggcgattttttataaactttctttgcctatattttcttatgaagaatcttcacaagaggagaaaaaataa

SEQ ID NO: 5176 - protein, 210 aa, Helicobacter hepaticus ATCC 51449
MLLTTLYIIAITAEGMTGALAAGKHKMDLFGVIFIALVTAIGGGSIRDILLNHYPLTWVAHPEYVVLICIAALLTMKAPRVVARSEGVFLTLDAVGLVVFSILGAQIAIDKEYGFIIAVSAAVITGVFGGILRDILCMRIPLVFQKEIYAGIAIIAGAMYYALLEWTQLDIALVTILTLIVGVSARLLAIFYKLSLPIFSYEESSQEEKK

SEQ ID NO: 5177 - DNA, 639 bp, Bordetella pertussis Tohama I
  CDS (1)..(639): transl_table=11
atgccgccagatccgtccgtcctgctgttgtacacgctctacctggtggccatcgtggccgaggccatgacggcggcgctggccgccgggcggcgcgacatggattgggtcggcgtgtgcgtgatcgcctgtgtcacggcattgggcggcgggtcgctgcgcgacgtgctgctgggccattatccgctgagctgggtggcccatcccgaatacctgtggatgacggccggcgccgcgctgctgacggcgctgggggcgcgcgcactgcggcgcctgcgcagcctgttcctgctgctggacgccatcggcctggtggcgttcaccatcatcggctgccaggtggcccaacaaatggaaatgccgctgaccatcgtgctggtcagcggcatgatcaccgggtgcgccggcggcgtattgcgcgacgtgctgtgcaacgacattccgctgctgtttcgcagcgaactctacgccagcgtttcggcagtgaccggcggcctgtacctggccatgtacggccagggcgtgtccgccagcgtgtcggtgcccgtcgcgctggccgtcgggctggcgtttcgcctgctggcgttgcggttcaactggcagatgccgaagttcgtctaccgcggcgactggcattga

SEQ ID NO: 5178 - protein, 212 aa, Bordetella pertussis Tohama I
MPPDPSVLLLYTLYLVAIVAEAMTAALAAGRRDMDWVGVCVIACVTALGGGSLRDVLLGHYPLSWVAHPEYLWMTAGAALLTALGARALRRLRSLFLLLDAIGLVAFTIIGCQVAQQMEMPLTIVLVSGMITGCAGGVLRDVLCNDIPLLFRSELYASVSAVTGGLYLAMYGQGVSASVSVPVALAVGLAFRLLALRFNWQMPKFVYRGDWH

SEQ ID NO: 5179 - DNA, 639 bp, Bordetella parapertussis 12822
  CDS (1)..(639): transl_table=11
atgccgccagatccgtccgtcctgctgttgtacacgctctacctggtggccatcgtggccgaggccatgacggcggcgctggccgccgggcggcgcgacatggattgggtcggcgtgtgcgtgatcgcctgtgtcacggcattgggcggcgggtcgctgcgcgacgtgctgctgggccattatccgctgagctgggtggcccatcccgaatacctgtggatgacggccggcgccgcgctgctgacggcgctgggggcgcgcgcgctgcggcgcctgtgcagcctgttcctgctgctggacgccatcggcctggtggcgttcaccatcatcggctgccaggtggcccaacaaatggaaatgccgctgaccatcgtgctggtcagcggcatgatcaccgggtgcgccggcggcgtattgcgcgacgtgctgtgcaacgacattccgctgctgtttcgcagcgaactctacgccagcgtttcggcagtgaccggcggcctgtacctggccatgtacggccagggcgtgtccgccagcgtgtcggtgcccgtcgcgctggccgtcgggctggcgtttcgcctgctggcgttgcgcttcaactggcagatgccgaagttcgtctaccgcggcgactggcattga

SEQ ID NO: 5180 - protein, 212 aa, Bordetella parapertussis 12822
MPPDPSVLLLYTLYLVAIVAEAMTAALAAGRRDMDWVGVCVIACVTALGGGSLRDVLLGHYPLSWVAHPEYLWMTAGAALLTALGARALRRLCSLFLLLDAIGLVAFTIIGCQVAQQMEMPLTIVLVSGMITGCAGGVLRDVLCNDIPLLFRSELYASVSAVTGGLYLAMYGQGVSASVSVPVALAVGLAFRLLALRFNWQMPKFVYRGDWH

SEQ ID NO: 5181 - DNA, 573 bp, Bordetella bronchiseptica RB50
  CDS (1)..(573): transl_table=11
atgacggcggcgctggccgccgggcggcgcgacatggattgggtcggcgtgtgcgtgatcgcctgtgtcacggcattgggcggcgggtcgctgcgcgacgtgctgctgggccattatccgctgagctgggtggcccatcccgaatacctgtggatgacggccggcgccgcgctgctgacggcgctgggggcgcgcgcgctgcggcgcctgcgcagcctgttcctgctgctggacgccatcggcctggtggcgttcaccatcatcggctgccaggtggcccaacaaatggaaatgccgctgaccatcgtgctggtcagcggcatgatcaccgggtgtgccggcggcgtattgcgcgacgtgctgtgcaacgacattccgctgctgtttcgcagcgaactctacgccagcgtttcggcagtgaccggcggcctgtacctggccatgtacggccagggcgtgtccgccagcgtgtcggtgcccgtcgcgctggccgtcgggctggcgtttcgcctgctggcgttgcgcttcaactggcagatgccgaagttcgtctaccgcggcgactggcattga

SEQ ID NO: 5182 - protein, 190 aa, Bordetella bronchiseptica RB50
MTAALAAGRRDMDWVGVCVIACVTALGGGSLRDVLLGHYPLSWVAHPEYLWMTAGAALLTALGARALRRLRSLFLLLDAIGLVAFTIIGCQVAQQMEMPLTIVLVSGMITGCAGGVLRDVLCNDIPLLFRSELYASVSAVTGGLYLAMYGQGVSASVSVPVALAVGLAFRLLALRFNWQMPKFVYRGDWH

SEQ ID NO: 5183 - DNA, 615 bp, Chromobacterium violaceum ATCC 12472
  CDS (1)..(615): transl_table=11
atgctgaccctgatctacctgatcgccatcaccgcggaagcgatgaccggcgcgctggcggccggccgccgccacatggacattttcggcgtagccgtcatcgccttcctcaccgcgctgggcggcggcaccgtgcgcgacatcgtgctgggacgctatccgatcggctggacccagcacccggaatacgtgctgctggtggtcgccggcgggctagccgcggtgctggtcgcccgctacatgcgccacctgaaccgcctgttcctgatcctggacgcgctggggctggtggcgttcaccatcataggctgcgacgtggcgctgggcatgggctaccatcctgtgatcgtggtgatggctggcatgatcaccggcatcgccggcggcatcctgcgcgacgtgctatgcaaccgcgtgcccatcgtgttccgccgcgaactgtacgccagcgtgtcgctgctggtggccatcctgtacctgggcctcaaccacctggccgtgccgcacgactggaacgtggtcgccagtttcgccttcggcttggcgctgaggctgaccgcgctatggcgcgaatggcagctgccggttttcgcctaccggcacgaccatcactaa

SEQ ID NO: 5184 - protein, 204 aa, Chromobacterium violaceum ATCC 12472
MLTLIYLIAITAEAMTGALAAGRRHMDIFGVAVIAFLTALGGGTVRDIVLGRYPIGWTQHPEYVLLVVAGGLAAVLVARYMRHLNRLFLILDALGLVAFTIIGCDVALGMGYHPVIVVMAGMITGIAGGILRDVLCNRVPIVFRRELYASVSLLVAILYLGLNHLAVPHDWNVVASFAFGLALRLTALWREWQLPVFAYRHDHH

SEQ ID NO: 5185 - DNA, 645 bp, Vibrio vulnificus YJ016
  CDS (1)..(645): transl_table=11
gtgttactagagcgtttcaacatgttgttaagtgttttgtatgtcattggcatcacggcagaagccatgacaggtgcgctaagcgccggacgcagaaaaatggattggtttggtgtaatgttggtggccagtgcaacagccattggcggtggtacggtacgagacatcctactaggacactacccacttggttgggtaaaaaatccagagtttcttgctatcacttgtgtggcgggcatcttaacaacggggcttgccaagtgggtgatcaaactcaaaggcttgtttatccgccttgatgccctcggcctcatcgtatttagcattattggtactaaaattgcgctgcagatgggcttgcatccgggcatttgtatggtttcagctctagtgactggtgtttttggtggtttactgcgcgacctcatctgtcgtcaaacaccattggtattgcatgaagagctttacgcatccattgcgcttttggcatcgggtctttacctgacattgttggcatttgaaatcccagacgtcacggccactatcgtcacactcgtggtaggttatgtgctgcgcatggcggcagtccgatttaaatggcgcttaccgtcattccacttggactctgaagaagccgtgcattaa

SEQ ID NO: 5186 - protein, 214 aa, Vibrio vulnificus YJ016
MLLERFNMLLSVLYVIGITAEAMTGALSAGRRKMDWFGVMLVASATAIGGGTVRDILLGHYPLGWVKNPEFLAITCVAGILTTGLAKWVIKLKGLFIRLDALGLIVFSIIGTKIALQMGLHPGICMVSALVTGVFGGLLRDLICRQTPLVLHEELYASIALLASGLYLTLLAFEIPDVTATIVTLVVGYVLRMAAVRFKWRLPSFHLDSEEAVH

SEQ ID NO: 5187 - DNA, 654 bp, Rhodopseudomonas palustris CGA009
  CDS (1)..(654): transl_table=11
atggataagcttccgatcgttctcgatctggcgggaactttcgtgttcgcactcagcggcgcggtggccggagcacggcggcggctcgatctgttcggcgtgctggtgctggcgttcgcggccggcaatgccggcggcattacccgcgacgtgctgatcggtgcggtgccgccggtcgcggtggcggactggcgctatctcggggtgtcactgctggccggcctcgtcacgttctacctagtgccggtggtggtgcggatgcgtagcgcgatcctgatgctcgacgccgccgggctggcgctgtttgcggtgaccggcgccagcaaggcgttggcgcatgggctcagcccagtgacggcggtcgcgctcggcgtggtcaccgggatcggcggcggcatggcacgcgacctgctactcgccgagatcccgaccgtgctgcgcgccgagctgtatgcggtcgcggcgctgatcgcggcggcgatcgtggtggtcgggcagatgctgcaactccccgccgcaccggtcacggcggccgccttgctggcctgctttgcgcttcgcgtcactgcgatccgccgcggctggcggctgccggtcgcgaagctcgatgaggcgggcgacccggtcaagccgccgccacaggacggcggttag

SEQ ID NO: 5188 - protein, 217 aa, Rhodopseudomonas palustris CGA009
MDKLPIVLDLAGTFVFALSGAVAGARRRLDLFGVLVLAFAAGNAGGITRDVLIGAVPPVAVADWRYLGVSLLAGLVTFYLVPVVVRMRSAILMLDAAGLALFAVTGASKALAHGLSPVTAVALGVVTGIGGGMARDLLLAEIPTVLRAELYAVAALIAAAIVVVGQMLQLPAAPVTAAALLACFALRVTAIRRGWRLPVAKLDEAGDPVKPPPQDGG

SEQ ID NO: 5189 - DNA, 633 bp, Bacillus thuringiensis serovar konkukian str. 97-27
  CDS (1)..(633): transl_table=11
atgttattaatcgatatatttacgtttcttggcattatcgccgctgctatttccggtacattagttggtttaaaaaaagatttagatttattcggtgtcctttgtttagctgtagctactgcgctcggcggcggtattattcgtgatattatgatcggtaacctgcctcctgtcgcatttgttaagcccatttactttttcgtaagtgtattatcagcattatttacttgtatgttttttgagcgtatcaataaactgcaagtcgttattatgctttctgatgctgttggcttaggtgtttttacagctattggtgcaaatgcagcaatgtcgcatcatgttgatgcctcatttttagttgtttcaatgggagtcattacaggtattggaggcggtattttgcgtgacatttgcgctcaagatatcccctacgtattccgaaaagaaatttacgcaatcgcttctattttaggagcaattagtttcctaatcacatatgcaatgggggcacacgtattagctttctatgtttgtctattagtaacattcattattcgtgttgtcactgtaatatataatgtacatttcccagttttctttaaaacacatgctaaaattaataaaggccattaa

SEQ ID NO: 5190 - protein, 210 aa, Bacillus thuringiensis serovar konkukian str. 97-27
MLLIDIFTFLGIIAAAISGTLVGLKKDLDLFGVLCLAVATALGGGIIRDIMIGNLPPVAFVKPIYFFVSVLSALFTCMFFERINKLQVVIMLSDAVGLGVFTAIGANAAMSHHVDASFLVVSMGVITGIGGGILRDICAQDIPYVFRKEIYAIASILGAISFLITYAMGAHVLAFYVCLLVTFIIRVVTVIYNVHFPVFFKTHAKINKGH

SEQ ID NO: 5191 - DNA, 645 bp, Acinetobacter sp. ADP1
  CDS (1)..(645): transl_table=11
atgttactcactattatttatattatcgcaattaccgcagaagccatgacaggcgcgctttctgctggtcggcgtagtatggattggtttggagtaattctgattgcttgtgtaactgctttaggtggcggttctgtccgtgatgtcctgcttggtcattatcctctgacgtgggtcaaacaccctgagtatcttgtgctaacctgttgcgcagcattatttacgattctgattgccaaatggatgaggcatttacgcaatattttcttgattctggatgcactgggtctgattggattcacgattattggctgtcaaattgctttgcaaatgggtcatggttttgtggtgtctgctgttgctggtgttctaacaggcgtatcgggcggtattttacgcgatattttgtgtaatgacgttccgctggttttccgccgtgagttgtatgccagtatttcatttgttgccgtgatctgttattggctgtgcctcaatattggtatgtcgttagaacttacagtaattttcacattaatttttggctttgtactgcgcttaattgccatttattttggtctggaaatgccaaaatttatttatcaggaagatgatgcagattcagcctcatcaactgataagcattaa

SEQ ID NO: 5192 - protein, 214 aa, Acinetobacter sp. ADP1
MLLTIIYIIAITAEAMTGALSAGRRSMDWFGVILIACVTALGGGSVRDVLLGHYPLTWVKHPEYLVLTCCAALFTILIAKWMRHLRNIFLILDALGLIGFTIIGCQIALQMGHGFVVSAVAGVLTGVSGGILRDILCNDVPLVFRRELYASISFVAVICYWLCLNIGMSLELTVIFTLIFGFVLRLIAIYFGLEMPKFIYQEDDADSASSTDKH

SEQ ID NO: 5193 - DNA, 627 bp, Erwinia carotovora subsp. atroseptica SCRI1043
  CDS (1)..(627): transl_table=11
gtgctgacttacatctatctgatcgcaattacagccgaagggatgtccggggcgcttgccgccgggcgtcgcaatatggatatttttggcgtaggcatgattgccttcatcaccgcgcttggcggtggcaccgttcgcgatattcttctcggtaattaccccatcggctggacgcagcatcccggctatatctacctcaccattggtgcaggtcttttcacgattatcattgcgcgttttatgcaccatttgcatcgtctctttcttgtactggatgcgatggggctaattgcttttaccattattgggtgcaatgtggcgctgaagctgaattattcgatgacagtagtcgtcatggcggggattgtgaccgggattttcggtggcatattgcgtgatattttctgtaaccgtacgccaatggtgttgaagaaagagctgtatgccagcgtctcgctgctcgtcgcacttttatatctgggtctgaaatcgcttaatatcaatcacgatattaacctgctggcgtcattcacgattggtctggctgtgcgattggcagcaattcgctggtcatggcagcttcctgtgttctcttatgttcctggacgctggaaagggaaggcgtaa

SEQ ID NO: 5194 - protein, 208 aa, Erwinia carotovora subsp. atroseptica SCRI1043
MLTYIYLIAITAEGMSGALAAGRRNMDIFGVGMIAFITALGGGTVRDILLGNYPIGWTQHPGYIYLTIGAGLFTIIIARFMHHLHRLFLVLDAMGLIAFTIIGCNVALKLNYSMTVVVMAGIVTGIFGGILRDIFCNRTPMVLKKELYASVSLLVALLYLGLKSLNINHDINLLASFTIGLAVRLAAIRWSWQLPVFSYVPGRWKGKA

SEQ ID NO: 5195 - DNA, 618 bp, Yersinia pseudotuberculosis IP 32953
  CDS (1)..(618): transl_table=11
atgctactcagtgttctttatattattggtatcaccgctgaagccatgaccggggctctggctgcgggtcgccgccaaatggatatgtttggcgttattattattgcctcagcgaccgcaattggcggtggctcggttagagatatgcttttaggccactatccacttggttgggttaagcatcctgaatacattgtgatcgtcgccatcgcagcgatcgtcaccacctggatggctccattgatgaaacagttacgccatctatttttagtgcttgatgccattgggctgattgttttctcaattattggcgcacaaattgctctcgatatgggccacagtactattattgccgctattgccgccgtgattactggtgtctttggtggcgtactacgcgatatgctctgcaactgcattcccttagtgtttcagaaagaaatttatgcaggcatctcatttgcggcagcctggatttacattgctctgcaatacacgccgctgtcccataattgggtcattatcattacgctcatcaccgggcttagcgctagattactcgccttacgattccggcttggcctgcctgtattcaaatatgagcactcagaccattaa

SEQ ID NO: 5196 - protein, 205 aa, Yersinia pseudotuberculosis IP 32953
MLLSVLYIIGITAEAMTGALAAGRRQMDMFGVIIIASATAIGGGSVRDMLLGHYPLGWVKHPEYIVIVAIAAIVTTWMAPLMKQLRHLFLVLDAIGLIVFSIIGAQIALDMGHSTIIAAIAAVITGVFGGVLRDMLCNCIPLVFQKEIYAGISFAAAWIYIALQYTPLSHNWVIIITLITGLSARLLALRFRLGLPVFKYEHSDH

SEQ ID NO: 5197 - DNA, 684 bp, Mannheimia succiniciproducens MBEL55E
  CDS (1)..(684): transl_table=11
atgttattagaggttcttttttatatcgggcttatcgtcgaagcgatgaccggcgcgctttctgccggacgggagaaaatggatattttcggggtgatcgtgattgcatttatgccggcgttagggggcggtttaatgcgggatattattctcggcaattacccggtaaattttatcgccaaccctcattgggtgttaattgtagcggttactgcgcttgcaactatatttattgcacctttaattactcactttaaccgttcgtttcggacggtttttcttgtgttagacgggctggggctgattttattttctatttttggtacgcaaattgcgttagaaatggggtttggtttgacagttgcttccatttcggcgattttaaccggtgcctttggcggtgtattgcgagatattttatgtaaccggatcccgttaattttccaaaaagaactttatgcctttattgccttttttaccgcttgtctctatattggattacagcatttagggttatcaattaatttaaccgtaatgattacgctgacggtcggatttattttccgcttgctcgccatttatttcagttggggattcccggtatttgattatcatgaagaagaaatgtcgccgaaagaaataatgccgagattgccgaaaagacgtaaatataaagaaaaatag

SEQ ID NO: 5198 - protein, 227 aa, Mannheimia succiniciproducens MBEL55E
MLLEVLFYIGLIVEAMTGALSAGREKMDIFGVIVIAFMPALGGGLMRDIILGNYPVNFIANPHWVLIVAVTALATIFIAPLITHFNRSFRTVFLVLDGLGLILFSIFGTQIALEMGFGLTVASISAILTGAFGGVLRDILCNRIPLIFQKELYAFIAFFTACLYIGLQHLGLSINLTVMITLTVGFIFRLLAIYFSWGFPVFDYHEEEMSPKEIMPRLPKRRKYKEK

SEQ ID NO: 5199 - DNA, 630 bp, Legionella pneumophila subsp. pneumophila str. Philadelphia 1
  CDS (1)..(630): transl_table=11
atgttacttcattatctttttattgtggggatttgtgtagaggcgattacaggagccctggcagcaggacgtaaaaaaatggatttttttggggtgctacttattgcgtcaatcactgcactgggaggagggactgtaagggatacattatttaacacctatccactgacctgggtagctcacccggaatatcttttatatacctcagtatgcgcttttctaactatttttattgctcattcactggttagaataatgaaagtattcttaattcttgatgcccttggtctctcaacttttgttattattggtacacaaaaagttctcgcccatggtatgccaccaagtgttgcagtaatcagtggaatgattaccgggatttgcgggggaatgttgcgagatattttatgtaatgacattcctctggttttaagaaaagaattatatgctgttattgccctggctggtgcgcttctgtttataacattagactattttcatatccctcataatttaaatatcattatcactttgttatgcatttttaccgcacgcttattggctattttttttcatattgaaattccaatttttgattactcagagagtataaagaggagaaaaaaataa

SEQ ID NO: 5200 - protein, 209 aa, Legionella pneumophila subsp. pneumophila str. Philadelphia 1
MLLHYLFIVGICVEAITGALAAGRKKMDFFGVLLIASITALGGGTVRDTLFNTYPLTWVAHPEYLLYTSVCAFLTIFIAHSLVRIMKVFLILDALGLSTFVIIGTQKVLAHGMPPSVAVISGMITGICGGMLRDILCNDIPLVLRKELYAVIALAGALLFITLDYFHIPHNLNIIITLLCIFTARLLAIFFHIEIPIFDYSESIKRRKK

SEQ ID NO: 5201 - DNA, 621 bp, Burkholderia mallei ATCC 23344
  CDS (1)..(621): transl_table=11
gtgcacccgaggctcacgctcgcgatcgcggtgctcgaggcgatcgcgacgctcgcgttcgcgatctccggcttcgtcgaggcgcgcaaaaaccggctcgattcggtcggcacgttcgtcgtcgcgctcgcgaccgcgttcggcggcggcacgatgcgcgacgtcctgctcgagcgccggccgttctactgggtcgaacatcaggcgtacgtgatcgcgatcttcggcctgtcgctcgtcgcgccgctcatcctccggatggcgtcgcggctgtcggcggaacggctgctgctcgccgccgacgcgatcggcctcggcatcttcagcatctccggcacgtcgatcgcgctcgacgcgcagatgccgcggttcgtcgccgcgatgatgggcgtgacgacgggcgtgttcggcggagtgatccgcgacgtgctgtgcaacgacattccgctgatcctgcgcgactcgcggccgtacgcgacctgcgcgttcgccgggtgctgggtctatctgctgctcgtgtggctgcagttcgattccgtctacagcgtgctcgcggcgacggccttcatcctcgtcgcgcggctcgtcacctaccagctcgatatccggctgccgcactag

SEQ ID NO: 5202 - protein, 206 aa, Burkholderia mallei ATCC 23344
MHPRLTLAIAVLEAIATLAFAISGFVEARKNRLDSVGTFVVALATAFGGGTMRDVLLERRPFYWVEHQAYVIAIFGLSLVAPLILRMASRLSAERLLLAADAIGLGIFSISGTSIALDAQMPRFVAAMMGVTTGVFGGVIRDVLCNDIPLILRDSRPYATCAFAGCWVYLLLVWLQFDSVYSVLAATAFILVARLVTYQLDIRLPH

SEQ ID NO: 5203 - DNA, 621 bp, Burkholderia pseudomallei K96243
  CDS (1)..(621): transl_table=11
gtgcacccgaggctcacgctcgcgatcgcggtgctcgaggcgatcgcgacgctcgcgttcgcgatctccggcttcgtcgaggcgcgcaaaaaccggctcgattcggtcggcacgttcgtcgtcgcgctcgcgaccgcgttcggcggcggcacgatgcgcgacgtcctgctcgagcgccggccgttctactgggtcgaacatcaggcgtacgtgatcgcgatcttcggcctgtcgctcgtcgcgccgctcgtcctccggatggcgtcgcggctgtcggcggaacggctgctgctcgccgccgacgcgatcggcctcggcatcttcagcatctccggcacgtcgatcgcgctcgacgcgcagatgccgcggttcgtcgccgcgatgatgggcgtgacgacgggcgtgttcggcggagtgatccgcgacgtgctgtgcaacgacattccgctgatcctgcgcgactcgcggccgtacgcgacctgcgcgttcgccgggtgctgggtctatctgctgctcgtgtggctgcagttcgattccgtctacagcgtgctcgcggcgacggccttcatcctcgtcgcgcggctcgtcacctaccagctcgatatccggctgccgcactag

SEQ ID NO: 5204 - protein, 206 aa, Burkholderia pseudomallei K96243
MHPRLTLAIAVLEAIATLAFAISGFVEARKNRLDSVGTFVVALATAFGGGTMRDVLLERRPFYWVEHQAYVIAIFGLSLVAPLVLRMASRLSAERLLLAADAIGLGIFSISGTSIALDAQMPRFVAAMMGVTTGVFGGVIRDVLCNDIPLILRDSRPYATCAFAGCWVYLLLVWLQFDSVYSVLAATAFILVARLVTYQLDIRLPH

SEQ ID NO: 5205 - DNA, 639 bp, Azoarcus sp. EbN1
  CDS (1)..(639): transl_table=11
atgctattctcgcgccccatgattccgatcgatattctcgtctatggcatcggcctcgccggcgtcgcggcgcaggcggccgccggagtgctcgaagccgggcgcaagcgtttcgacctcttcggcatggtcatcgtcgcgctcgcggcggcgctcggcggtggctcgttgcgcgacctgctgctcgaccgcacggtgttctggatcgccgatcagagctatctgatcaccgcactgacggccgggctcgcgactttcgcgctggtgcgcttcgtgcgcctgccaggcaggctcttcctgctgcccgacgccgtcggcctcgcgttgttcaccgtcagcggcacgcaggcggctcttgcgctcggcacaccgtggctcgtcgcgagcctgatgggcgtcgtcaccggcgtattcggcggcatcgtgcgcgacgtgctgtgcaacgaagtgccgctggtgttcagcggcgaactgtatgcgaccgcatcctgggccggcgcgctgctgctgatcgcgatgagagcgtccggcgcgacgcccggcctggcggcactcgccgccggcgtcgtggtgctcgtgatccgcctcggcgcgatgcgcttcggctggcgcctgccggtgttcagcgcgcgcctgtag

SEQ ID NO: 5206 - protein, 212 aa, Azoarcus sp. EbN1
MLFSRPMIPIDILVYGIGLAGVAAQAAAGVLEAGRKRFDLFGMVIVALAAALGGGSLRDLLLDRTVFWIADQSYLITALTAGLATFALVRFVRLPGRLFLLPDAVGLALFTVSGTQAALALGTPWLVASLMGVVTGVFGGIVRDVLCNEVPLVFSGELYATASWAGALLLIAMRASGATPGLAALAAGVVVLVIRLGAMRFGWRLPVFSARL

SEQ ID NO: 5207 - DNA, 663 bp, Haemophilus influenzae 86-028NP
  CDS (1)..(663): transl_table=11
atgttacttagtattttatatatcatcggtatcaccgctgaaggaatgacaggcgcacttgcggcaggtcgtgagaaaatggatatttttggcgtgatcattatcgcatctgtgactgccattggtggcggctctgtgcgtgatgtactgctcggacattaccctctcggctgggttaagcacccagaatattttttaatggtggcaagtgcggcggtaattaccgtatatgttgcaccatttatcaatcattttatgcgctactttcgcactattttcttggtgcttgatgcgatgggcttagtggtgtattccattattggcgcacaaattgcaatggatatgggacatagccttaccattgtttgtattgcaggctgtattactggtgcctttggcggggttctacgcgatatgctatgcaatcgaattcctctcgtgttccaaaaagaactctatgccagcattgcgctatttgccacgctgacttattacgcattaagtacacttcaagtagaacatacacttgccgtgttactcacacttattagcagctttactttacgccttttagctattcatttcgaatgggggttgccggtgtttaattaccaagaactcacatcggaagaacaagataagctgccaaataaaaagaaataa

SEQ ID NO: 5208 - protein, 220 aa, Haemophilus influenzae 86-028NP
MLLSILYIIGITAEGMTGALAAGREKMDIFGVIIIASVTAIGGGSVRDVLLGHYPLGWVKHPEYFLMVASAAVITVYVAPFINHFMRYFRTIFLVLDAMGLVVYSIIGAQIAMDMGHSLTIVCIAGCITGAFGGVLRDMLCNRIPLVFQKELYASIALFATLTYYALSTLQVEHTLAVLLTLISSFTLRLLAIHFEWGLPVFNYQELTSEEQDKLPNKKK

SEQ ID NO: 5209 - DNA, 612 bp, Pseudomonas fluorescens Pf-5
  CDS (1)..(612): transl_table=11
atgctgttgatgctttatctgattgccattaccgccgaagccatgaccggcgccctgtctgccggccggcgcggcatggactggttcggtgtggtgctgattgcctgcgtcaccgcactcggcggcggttcggtgcgtgatgtgctgctgggccactacccgctgacctgggtcaagcacccggagtacctggtgctgacgtcggtggcggcgttggtgacgatcttcatcgcgcccttgatgcgtcacctgcgctcgctgtttctggtgctcgacgccgtgggcctggtggcctttaccctgatcggctgcatgactgccctggaaatgggccacggcatgctggtggcttcagtcagcggggtgatcaccggggtctttggcggcatcctcagggacatcttctgcaacgatatcccgctgatctttcgccgcgagctgtacgccagcgtgtccttcgccgcggcctggtgctacatgctgtgcatctacctgcaactgcccagcgagcagtcgatcctggtcaccctgttcggcggctttctattgcgcctgctggcgatccgttttcactgggaaatgcccaagttcgtctacaacgacgaacactga

SEQ ID NO: 5210 - protein, 203 aa, Pseudomonas fluorescens Pf-5
MLLMLYLIAITAEAMTGALSAGRRGMDWFGVVLIACVTALGGGSVRDVLLGHYPLTWVKHPEYLVLTSVAALVTIFIAPLMRHLRSLFLVLDAVGLVAFTLIGCMTALEMGHGMLVASVSGVITGVFGGILRDIFCNDIPLIFRRELYASVSFAAAWCYMLCIYLQLPSEQSILVTLFGGFLLRLLAIRFHWEMPKFVYNDEH

SEQ ID NO: 5211 - DNA, 663 bp, Psychrobacter arcticus 273-4
  CDS (1)..(663): transl_table=11
atgcctaccattgccttagattctaatctgattactacttttgacccgcgctcactcatttatttgttcgatatgattggcattgtcgcttgtagcatttcaggaacgatattagccaagcataaaaacttcgatgtatttggctgcttactggtatcgattgtgactgctatcggcggcggtaccgtgcgtgatgtgatcttgaatcgtcatccactgttttggatggtggatatgaattatctgacggtcattaccatctcttcactgttgatgcagatattctttcaccccaactctagacgcgttgatacgtttcttaaactctctgacaccattggtctgtcagcctttaccttaatcggtatcaaggtggctgatagtatgggcacaaatgtgctggtggcattgttacttggggttattacaattattgtcggcggtatcattcgcgatatgatttgcaatgaaattccactggtgctacagcaagagatttatatcaccgccgctttaacaggtggtatcctttactttgtgcttcaaaatcttggcgtgagcgcttggattgctgatatctcagcaatggcaacgatttttaccttacgcatgcttgctattcgctatgactggcagtttccgagcattgaatggaaatattaa

SEQ ID NO: 5212 - protein, 220 aa, Psychrobacter arcticus 273-4
MPTIALDSNLITTFDPRSLIYLFDMIGIVACSISGTILAKHKNFDVFGCLLVSIVTAIGGGTVRDVILNRHPLFWMVDMNYLTVITISSLLMQIFFHPNSRRVDTFLKLSDTIGLSAFTLIGIKVADSMGTNVLVALLLGVITIIVGGIIRDMICNEIPLVLQQEIYITAALTGGILYFVLQNLGVSAWIADISAMATIFTLRMLAIRYDWQFPSIEWKY

SEQ ID NO: 5213 - DNA, 660 bp, Colwellia psychrerythraea 34H
  CDS (1)..(660): transl_table=11
atgaacgactttttattttatttagatatttttggcgtcattgtttttgccttatcaggggcgcttatggctgggcgttatcaacttgatccttttggtgttgtggtgttggcttcagttactgctgtgggtggcggtaccattcgagatgttattttacaaacgcccgtcttttgggtggaaaaaccctactacctctatgttattttagcgactgcaatactcaccatagtgcttattagacaaccaaaacggatccctaagcgtttcttgctcattgctgatgcactaggtttagctttgtttgcggttttaggcacgcaaaaagcattatatttgggcgcaccaattccggtggctgtggtattaggtactattacggggattgccggcggaatgattcgagatgttttatgtaatgtaatcccgatgattttacgtgaagagatttatgcgctggcggccatgttaggtggtagtttatttattatattgcatggattaaattggaatgataccaatgcgatgattgtgtcaatctctgcagcattggctctacgcctagccgctatctattggcatgtttcattaccggcctttcatattgttgaaaagccaaaaaaagaaaaaggcacaactaagatcatagagaaaaaataa

SEQ ID NO: 5214 - protein, 219 aa, Colwellia psychrerythraea 34H
MNDFLFYLDIFGVIVFALSGALMAGRYQLDPFGVVVLASVTAVGGGTIRDVILQTPVFWVEKPYYLYVILATAILTIVLIRQPKRIPKRFLLIADALGLALFAVLGTQKALYLGAPIPVAVVLGTITGIAGGMIRDVLCNVIPMILREEIYALAAMLGGSLFIILHGLNWNDTNAMIVSISAALALRLAAIYWHVSLPAFHIVEKPKKEKGTTKIIEKK

SEQ ID NO: 5215 - DNA, 612 bp, Pseudomonas syringae pv. phaseolicola 1448A
  CDS (1)..(612): transl_table=11
atgttgctgatgctttatctgattgccatcactgctgaagccatgactggcgcgctgtctgcgggccgtcgaggaatggactggttcggcgtggtgctgattgcttgcgtcacagcgctgggcggcggctcggtgcgcgatgtgctgatcggccattacccgctgacctgggtcaagcacccggaatacctcatattgaccagtgtggcagcgttggtgacgatctttatcgcgccattgatgcgccacctgcgctcgttgtttctggtgctggatgcgctggggctggtagccttcaccctgatcggctgcatgactgcgctggaagccgggcatggtctggtgatcgcgtcagtgtgcggtgtcatcaccggggtcttcggtggcatcctgcgcgacatcttctgcaacgacattccgctgatcttccctcgcgaactgtatgccagcgtttcatttctggccgcgtggtgttttttgctgtgccagtacctgcaactgccggatgaacaggccgtgctcatcaccttgttcggcggcctgctgctgcgcctgctggcgatccgattccgctgggaaatgcccaaattcgtctataaagacgagccctga

SEQ ID NO: 5216 - protein, 203 aa, Pseudomonas syringae pv. phaseolicola 1448A
MLLMLYLIAITAEAMTGALSAGRRGMDWFGVVLIACVTALGGGSVRDVLIGHYPLTWVKHPEYLILTSVAALVTIFIAPLMRHLRSLFLVLDALGLVAFTLIGCMTALEAGHGLVIASVCGVITGVFGGILRDIFCNDIPLIFPRELYASVSFLAAWCFLLCQYLQLPDEQAVLITLFGGLLLRLLAIRFRWEMPKFVYKDEP

SEQ ID NO: 5217 - DNA, 669 bp, Dechloromonas aromatica RCB
  CDS (1)..(669): transl_table=11
atgttcgatagtctcgcccacgtttttcagcctctcgctatcaagcaattcaacttgttactggtcatttatctggttgccatcaccgccgaagcgatgtccggtgccctggcagcaggacgtcgcaacatggatttcttcggggtggccgtgatcgcctttgtcaccgctctgggaggcggaaccatcagggatgtcgttcttggcaattacccgattggttggacgcagcatcccgaatacgtgtatctggtgaccctggctggtttggccacgaccttgcttgccaagttcatgcaccacctgaaaaacgtctttctgatgctggatgcactcgggttggtcgccttctcgctgattggttgcaatgtggccctgcaacttgaatacccgacggtagtagtcatcatggccggcatgctgacggggatatgcggaggcgttttgcgcgatgtgctgtgcaaccaggtgcccgtcgtattttgccgggagctttatgccagcgtgtcactctttgtttgcgccctatttctcgcgttgaggtcgctggacttggatgccaacctcaatacgatgatgtgcttcattctcggcttcggatttcgcatgctggcgctacgtttgagctggaagcttccgaccttctcctatcagcagcgatgggattag

SEQ ID NO: 5218 - protein, 222 aa, Dechloromonas aromatica RCB
MFDSLAHVFQPLAIKQFNLLLVIYLVAITAEAMSGALAAGRRNMDFFGVAVIAFVTALGGGTIRDVVLGNYPIGWTQHPEYVYLVTLAGLATTLLAKFMHHLKNVFLMLDALGLVAFSLIGCNVALQLEYPTVVVIMAGMLTGICGGVLRDVLCNQVPVVFCRELYASVSLFVCALFLALRSLDLDANLNTMMCFILGFGFRMLALRLSWKLPTFSYQQRWD

SEQ ID NO: 5219 - DNA, 615 bp, Dechloromonas aromatica RCB
  CDS (1)..(615): transl_table=11
atggaaaacctgctctactggatcggcctcgccgccgtcgctgtcagcgccctgaccggcgtgctcgacgccggccgcaagaacatggacctgatcggcgcggtgatggttggctgcgccacggcactggggggcggcacggtgcgcgacgtgctgctcgaccgcaaagtcttctggatcagcgatcagacctatctggtggtcgcactgctcacgacactgctcattttctttgcagtgcgcgccctgcacctgccatcacgtcgcttcctgattcccgacgccatcggcctggcgctattcactgtttccggcacgcagattgcgctggaatggcaggcgccgtggctggttgccagcctgcttggggtgattaccggggtcgttggcggcgtgctgcgcgatgtgctgtgcaacgaagtgccgctggttttcgtgcgcggcgaactctatgcttccgcggcctgggccggagcgctggtactgatcggcctgcagggattcgacatttcgccggtcattgccgcgtgggcaggcatggcggtcgttcttgccgcccgcctgctggccatcgccttccgcattaccctgccgatctactcggaacggcagtga

SEQ ID NO: 5220 - protein, 204 aa, Dechloromonas aromatica RCB
MENLLYWIGLAAVAVSALTGVLDAGRKNMDLIGAVMVGCATALGGGTVRDVLLDRKVFWISDQTYLVVALLTTLLIFFAVRALHLPSRRFLIPDAIGLALFTVSGTQIALEWQAPWLVASLLGVITGVVGGVLRDVLCNEVPLVFVRGELYASAAWAGALVLIGLQGFDISPVIAAWAGMAVVLAARLLAIAFRITLPIYSERQ

SEQ ID NO: 5221 - DNA, 615 bp, Thiobacillus denitrificans ATCC 25259
  CDS (1)..(615): transl_table=11
atggaaaacctgctgtactgggccggcctgtcggccgttgcggtcaatgcgctgaccggcgtgctcgacgcgggccgcaagcggatggacctgatcggtgtggtcatggtgggcgcagccaccgcgctcggcggcggcaccgtgcgcgacgtgctgctcgcgcgccccgtgttctggatcgccgaccaggtctatctgatcgtcgcgctcgcggccacgctggccgtcttcttcgtcgtgcgcaacctgcggctgccgccgcggctgtttctgattcccgatgcgttcggcctcgcgctcttcactatcgtcggcacccagatcgcgctcgagtggcaggcgccgtggctggtcgcgagcctgctgggcatgatcacgggcgtcgtcggcggcgtgttgcgcgacgtgctgtgcaacgaggtgccgctggttttcgtgcgcggcgaactgtatgcctccgcggcgtggctcggcgcgctggtcctggtcgggctgcaggccttgtcggtgtcgccggtcgccgcggcgtgggcggggatggcgaccgttctcgtcgtccggctggcggcgatggccttccgcatcaccctgccgacgtattcggagcgagagtag

SEQ ID NO: 5222 - protein, 204 aa, Thiobacillus denitrificans ATCC 25259
MENLLYWAGLSAVAVNALTGVLDAGRKRMDLIGVVMVGAATALGGGTVRDVLLARPVFWIADQVYLIVALAATLAVFFVVRNLRLPPRLFLIPDAFGLALFTIVGTQIALEWQAPWLVASLLGMITGVVGGVLRDVLCNEVPLVFVRGELYASAAWLGALVLVGLQALSVSPVAAAWAGMATVLVVRLAAMAFRITLPTYSERE

SEQ ID NO: 5223 - DNA, 615 bp, Streptococcus agalactiae A909
  CDS (1)..(615): transl_table=11
atgtcaattgatatttggaacattttaagtttggttggaaccgtagcttttgcaagttcgggagctattgtggcgattgaggaagaatttgatattctagggctttttatcttaggttttgtaacggcatttggtggtggagctattagaaatgtactaattggcttgcctattgaaacactttggagtcaaggaattgctttttatgcagcagcagcagctattttatttattatgattttccctaatttgttgagtggtaagggacgggatgccgaagttgtatcagatgctattgggttagcagcgtttagtgttcaaggagcactatatgcgactcaatctcatcaacctcttagtgctgtcattgtcgcagcagtactaactggtgcaggtggtggtattgtcagagatgttctggctggccgaaaacctggagtactaagaagtgaaatatatgcaggttggtcaatattagtggggatcattttatattttaaaattgctaaaacaacaactgactattatttgttagtgttagttgtaactagcctaaggatgttgggttataagaaacaatggcacttgccagttgtcagaccacgtaagaaatga

SEQ ID NO: 5224 - protein, 204 aa, Streptococcus agalactiae A909
MSIDIWNILSLVGTVAFASSGAIVAIEEEFDILGLFILGFVTAFGGGAIRNVLIGLPIETLWSQGIAFYAAAAAILFIMIFPNLLSGKGRDAEVVSDAIGLAAFSVQGALYATQSHQPLSAVIVAAVLTGAGGGIVRDVLAGRKPGVLRSEIYAGWSILVGIILYFKIAKTTTDYYLLVLVVTSLRMLGYKKQWHLPVVRPRKK

SEQ ID NO: 5225 - DNA, 624 bp, Burkholderia sp. 383
  CDS (1)..(624): transl_table=11
gtgccgcatcctaggctgacgctcgcgatcgcgatactggaggcgatcgccacgctggcctttgcgatctcgggcttcatcgaggcgcgcaagaaccgcctcgactcggtcggcacgttcgtcgtcgcgctcgccaccgcgttcggcggcggcacgctgcgcgacatcctgctcgaacgccggccgttctactgggtcgtgcacgacgactacgtgatcgcgatcttcgtgctcgcgctgttcgcgccgttcgtgctgcgaatgctgtcgcgactgtcggccgagcggttgctgctcgtcgccgatgcgatcgggctggggatcttcagcatctcgggcacggcgatcgcgctcgatgccgagatgccgcgcttcatcgcggtgatgatgggcgtgatcacgggcgtggtcggcgggatcatccgcgacgtgctgtgcaacgatatcccgctgatcctgcgcgattcgcggccttacgcgacctgcgcgttcgtcggctgctggttctacctgctgctcgtgtggctgcagttcgactcggtgtacagcgtgctgctcgcgaccggcttcatcctcgtcgcgcggctcgcgacgttcaagttcgacgtgcggctgccgcactga

SEQ ID NO: 5226 - protein, 207 aa, Burkholderia sp. 383
MPHPRLTLAIAILEAIATLAFAISGFIEARKNRLDSVGTFVVALATAFGGGTLRDILLERRPFYWVVHDDYVIAIFVLALFAPFVLRMLSRLSAERLLLVADAIGLGIFSISGTAIALDAEMPRFIAVMMGVITGVVGGIIRDVLCNDIPLILRDSRPYATCAFVGCWFYLLLVWLQFDSVYSVLLATGFILVARLATFKFDVRLPH

SEQ ID NO: 5227 - DNA, 612 bp, Burkholderia sp. 383
  CDS (1)..(612): transl_table=11
atgcatacgctttatctgattgcaatcgtcgcggaagcgatgtcgggggcgctgatgggcatgcgccgcgggatggaccgcttcgggctcgcgctcgtcggtgcggtgacggcgctcggcggcggcaccgtgcgcgacgtgctgctcggccactatccgctcggctggatcgcgcatccggagtacctggtgatcacgctcgtcgcggcgaccgtcgcgtcgtgggtcgcacggcatgtcgcgcggatgaagacgttgttcgtcaccgtcgacgcgatcggcctcgcggcgttcacgatcatcggttgcgacatcggcgcatcgacgggcgcggtgccgatcatcgtcgtgctggctggcgcgatcaccggtgtctgcggcgggatgctgcgcgacctgctgtgcaacgagatgccgctgatcctgcgcgaggaactgtatgcgagcgtcgcgttcgtcacgggcgggctctatgtcgggatgcagtacgttggcatcgatgcgggcttcgcgacggtcgtcgcgctggcggccgggttctcgatgcggatgcttgccgtgcggctcgggtggaagatgcggacgtttggtgcggcggatctcgagcattga

SEQ ID NO: 5228 - protein, 203 aa, Burkholderia sp. 383
MHTLYLIAIVAEAMSGALMGMRRGMDRFGLALVGAVTALGGGTVRDVLLGHYPLGWIAHPEYLVITLVAATVASWVARHVARMKTLFVTVDAIGLAAFTIIGCDIGASTGAVPIIVVLAGAITGVCGGMLRDLLCNEMPLILREELYASVAFVTGGLYVGMQYVGIDAGFATVVALAAGFSMRMLAVRLGWKMRTFGAADLEH

SEQ ID NO: 5229 - DNA, 618 bp, Geobacter metallireducens GS-15
  CDS (1)..(618): transl_table=11
atgaacctgctctatgccctcgacctgctcggaaccgccgccttcgccgcctcgggcgcctgggccggcatccgccgcgatatggacctcttcggcgtgctcatgctcggcctcgtcaccgctacgggtggcggaaccctgcgcgacctgttcctgggggacaccccccccttcatcttcaaggacgaaacctacctctacctctccatcgccgtttccctggctatctttctcttccacaagcgcctggaattcctccatcacccccttctctacttcgacgccgtggggctcggcaccttcgtggtcatcggcacgggtaaggccctggcattcaaaatggggtttgtcggctcggtgatgatgggggtgatgaccgccaccgccggagggatgatccgtgacgtcctctccacccatattcccctggtgctgcagaaggaggtgtacgcctcggcctgcatcgccggcgcggctcttctcttcctgctggaccggatctcctttccccgcaccctgtcccttctcgccgccgccatgacggtcatcgtggtgcggctcctggccatccgctacaactggtccctcccccgggccgggggcgagcgaaacgcatga

SEQ ID NO: 5230 - protein, 205 aa, Geobacter metallireducens GS-15
MNLLYALDLLGTAAFAASGAWAGIRRDMDLFGVLMLGLVTATGGGTLRDLFLGDTPPFIFKDETYLYLSIAVSLAIFLFHKRLEFLHHPLLYFDAVGLGTFVVIGTGKALAFKMGFVGSVMMGVMTATAGGMIRDVLSTHIPLVLQKEVYASACIAGAALLFLLDRISFPRTLSLLAAAMTVIVVRLLAIRYNWSLPRAGGERNA

SEQ ID NO: 5231 - DNA, 717 bp, Rhodospirillum rubrum ATCC 11170
  CDS (1)..(717): transl_table=11
atggccttgtcgccgactccgacggttttcccctttgtttcccgcggtgagcggggttttctggagcgcggcatggatccggttctgacctggcttgacaccttcggcctgatcgttttcgccgtgtccggggggctggtggcggcgcgcaagggcatggatatcgttggcttcgccctgatggcgacggtcaccggcatcggcggcggcaccttccgcgacatggtgttggggatgacgccggtcttctgggtgcgcgagccccattatctggtggtctgtctggctgtcggtatcctgacgtggttcgtcgcccatcgcctggattcgcgccaaagggcgctgttgtgggccgacgccatcggcatcgccttttttacggtggtcggtacccaggtcggtctgcgcgccgaggccggcatttccgtggccctgctgatgggggtgatgaccgcctgcttcggtggcatcgtccgcgaccttctggccggcgagccgagcctgatccttcagcgcgagatctacatcaccgcctgcgtcgccggcgcctgcgcctatctgctgtttgacgccatgggagcgggcgagggcgtttcgggggtggtgtccttctgcgtgaccttcctggtgcgcggcgcggccctggccttcggtctcagcctgccgggctatcgcgacaaaatcgatcgcagccagggtggaacgggcaagggatga

SEQ ID NO: 5232 - protein, 238 aa, Rhodospirillum rubrum ATCC 11170
MALSPTPTVFPFVSRGERGFLERGMDPVLTWLDTFGLIVFAVSGGLVAARKGMDIVGFALMATVTGIGGGTFRDMVLGMTPVFWVREPHYLVVCLAVGILTWFVAHRLDSRQRALLWADAIGIAFFTVVGTQVGLRAEAGISVALLMGVMTACFGGIVRDLLAGEPSLILQREIYITACVAGACAYLLFDAMGAGEGVSGVVSFCVTFLVRGAALAFGLSLPGYRDKIDRSQGGTGKG

SEQ ID NO: 5233 - DNA, 609 bp, Burkholderia thailandensis E264
  CDS (1)..(609): transl_table=11
atgcatacgctctatttgatcgcgatcgtcgcggaagccatgtcgggcgcgctgatgggcatgcagcgcgggatggaccgcttcggcctcgcgctcgtcggcgcggtgacggcgctgggcggcggcaccgtgcgcgacgtgctgctcggccgctatccgctgacctgggtcgcgcatcccgaatacttgctgctgacgctcgcggcggcgacgttcgcatcgatgacggcgacgcacgtcgcgcggctgaagtcgctgttcacgaccgtcgacgcgcttgggctcgcggcgttctcgatcatcggctgcgacgtcgccgcgaccgtgaacggcagcccggtcgtgatcgtgttggccggcgcgatcaccggcgtctgcggcgggatgctgcgcgatgtgctctgcaacgaaatgccgctcgtgctgcgcaaggagctgtacgcgagcatcgcgctgctgacgggcgggctgtatgtcggcatgaaggcgctcggcgtcgcggaaggtctcgcgaccgtcgtcgcgctgatcgcgggattcgcgctgcggatgctcgcggtgcggcgcggctggcggctgaaggcgtttcacgcggccgaagcgggttga

SEQ ID NO: 5234 - protein, 202 aa, Burkholderia thailandensis E264
MHTLYLIAIVAEAMSGALMGMQRGMDRFGLALVGAVTALGGGTVRDVLLGRYPLTWVAHPEYLLLTLAAATFASMTATHVARLKSLFTTVDALGLAAFSIIGCDVAATVNGSPVVIVLAGAITGVCGGMLRDVLCNEMPLVLRKELYASIALLTGGLYVGMKALGVAEGLATVVALIAGFALRMLAVRRGWRLKAFHAAEAG

SEQ ID NO: 5235 - DNA, 621 bp, Burkholderia thailandensis E264
  CDS (1)..(621): transl_table=11
gtgcatccgagactcacactcgcgatcgcggtcctcgaggcaatcgcgacgctcgcgttcgcgatctcgggtttcgtcgaagcgcgcaagaaccggctcgattcggtcggcatgttcgtcgtcgcgctcgcgaccgcgttcggtggcggcacgatgcgcgacgtgctgctcgagcggcgtccgttctactgggtcgagcaccagggctacgtgattgcgatcttcggcctgtcgctcgtcgcgccgctcgtgctccggatggcgtcgcggctttcggccgaacggctgctgctcgcagccgatgcgatcggcctcgggatcttcagcatctccggcacgtcgatcgcgctcgacgcgcaaatgccgtggttcgtcgccgcgatgatgggcgtgacgacgggcgtgttcggcggaatcatccgcgacgtgctgtgcaacgacatcccgctgatcctgcgcgactcgcgaccgtacgcgacctgcgcgttcgccggctgctgggtctatctgctgctcgtgtggctgcaattcgattccgtctacagcgtgctcgcggcgacgggtttcatcctcgtcacgcggctcgtcacgtacaagctcgacatccggctgccgcactag

SEQ ID NO: 5236 - protein, 206 aa, Burkholderia thailandensis E264
MHPRLTLAIAVLEAIATLAFAISGFVEARKNRLDSVGMFVVALATAFGGGTMRDVLLERRPFYWVEHQGYVIAIFGLSLVAPLVLRMASRLSAERLLLAADAIGLGIFSISGTSIALDAQMPWFVAAMMGVTTGVFGGIIRDVLCNDIPLILRDSRPYATCAFAGCWVYLLLVWLQFDSVYSVLAATGFILVTRLVTYKLDIRLPH

SEQ ID NO: 5237 - DNA, 768 bp, Syntrophus aciditrophicus SB
  CDS (1)..(768): transl_table=11
atgaataacctgagagcgccgtatcttaattgtttgacaaacaacggcacaaataataagggtgaccgggctgtaattcttggatggaaaagaggaaatgccttgacttatctgctggacattctgggcactctggtttttgccgtttccggggccttccgggctgtcaagtacgaactggacctcctcggggtccttgtcctcgcggtggccaccggggtgggcggaggaattctccgcgatctcctgatcggttttgtgcctccgtcggccttccgggatgaaacctatcttcttgtctgctttcttggcggactgcttgtctttctcgccgcgcccaaaatcgcacggcgttgggacctggtgatggcggcggatgctttgggactgggggtgttttccgcaatcggcgccgccaaggccgcggagtttcaccttgggcccgtgggaatcgtcatgatggctgttctgactgctacgggaggaggggttgtccgggatatcctggtaagagaaattcctgcggttatccgggtcgatttttacgcgaccgccgccctctgcggcgggctttcttttctggctgccggactggccggtatgaacgagttttttcagcttctcatctccattatcgttgccacagggctgcggctcatcgccatgatttatcggattaatcttccccgggtgcgcagcctgcctgaatctcccacggagttgacccacaggcataaagctgagaagaaaaaacctcgcgccttctga

SEQ ID NO: 5238 - protein, 255 aa, Syntrophus aciditrophicus SB
MNNLRAPYLNCLTNNGTNNKGDRAVILGWKRGNALTYLLDILGTLVFAVSGAFRAVKYELDLLGVLVLAVATGVGGGILRDLLIGFVPPSAFRDETYLLVCFLGGLLVFLAAPKIARRWDLVMAADALGLGVFSAIGAAKAAEFHLGPVGIVMMAVLTATGGGVVRDILVREIPAVIRVDFYATAALCGGLSFLAAGLAGMNEFFQLLISIIVATGLRLIAMIYRINLPRVRSLPESPTELTHRHKAEKKKPRAF

SEQ ID NO: 5239 - DNA, 639 bp, Novosphingobium aromaticivorans DSM 12444
  CDS (1)..(639): transl_table=11
atgcctgaaatgccgagcgccgacctttcctacctgatcggactgctcgaccttgcgggcattgccgtcttcgcgctgaccggggcgctgctggcggcgcaactgcggcagaccttcgtgaccatggcattcttcgcgctggtgacgggcgtgggcggcggatcggtgcgcgatctgctgatcggggcgccagtgttctgggttcgcgatccgtgggtggcgccggtgtgccttggcgtggcgctggtcgcatggttcacgccgcaccgctggtgggagcggcccgtgctggaatgggcggacgcggcggggcttggcgcctatgcagtgctgggcacggtgaaagccctggcgttcggcgtgccacctgttccggcggtactgatgggagtgatcaccgggtgcgtcggcgggatcatccgcgacgtgcttgcgggccgcccgtcgatcctgatgcggccggaactctacgtgacggcggcagcgctttcgtcggggctctgcgcggcgggcgcggcgctggggctcgcgaaagggctggtttggccggtcgcggcgatggcggggtttgcgctgcgcggcgcggcgatctggtggcgactgggcttgccgacatattcggcggagcgcgagggctga

SEQ ID NO: 5240 - protein, 212 aa, Novosphingobium aromaticivorans DSM 12444
MPEMPSADLSYLIGLLDLAGIAVFALTGALLAAQLRQTFVTMAFFALVTGVGGGSVRDLLIGAPVFWVRDPWVAPVCLGVALVAWFTPHRWWERPVLEWADAAGLGAYAVLGTVKALAFGVPPVPAVLMGVITGCVGGIIRDVLAGRPSILMRPELYVTAAALSSGLCAAGAALGLAKGLVWPVAAMAGFALRGAAIWWRLGLPTYSAEREG

SEQ ID NO: 5241 - DNA, 651 bp, Francisella tularensis subsp. holarctica
  CDS (1)..(651): transl_table=11
atgtatcacgtcggtatcactggaccttttattttttcagttatgtttcttttaggcataattgccgagagtatgactggtgttatatcatcgtctcgtagaaacatggatgcttttggggttgttgcaatagcacttacaacagctttaggaggtggtgttgttagagatgttctattaggtaatttaccagtaactattatactttatccgcactatattgtgatatgcctatttttctcaattattgctattttcacgcaaaaatatattaataagttttataaagtatttttgattctcgattcaattggtctaattgcttttgcctatattggtagcagtatagcacatcaaatttgtacacaagtttttcatatgcagttttttagtgttctgattgttggtattgttatcgcaatacttaacggcgttgctggtggaataatgcgcgatatgatctgtaatgatatccctgttgcctttaaatctgaattatatgcatctgtcgcagcaatagtcggtgcaatgaatatcatatttatatatttagatataaatttatacataagcgcgtcactgataataggcattggtttaacagtgagaattatgtcaataatttataagtggaaattaccaattatataa

SEQ ID NO: 5242 - protein, 216 aa, Francisella tularensis subsp. holarctica
MYHVGITGPFIFSVMFLLGIIAESMTGVISSSRRNMDAFGVVAIALTTALGGGVVRDVLLGNLPVTIILYPHYIVICLFFSIIAIFTQKYINKFYKVFLILDSIGLIAFAYIGSSIAHQICTQVFHMQFFSVLIVGIVIAILNGVAGGIMRDMICNDIPVAFKSELYASVAAIVGAMNIIFIYLDINLYISASLIIGIGLTVRIMSIIYKWKLPII

SEQ ID NO: 5243 - DNA, 648 bp, Rubrobacter xylanophilus DSM 9941
  CDS (1)..(648): transl_table=11
atgcccgagccctcgggatcgacgctgatgctggcgctggacctcgccgggaccttcgccttcgggctgagcggggccctggccggggtgcgcgctcgcctggacctctacggcgtcgtggtgctggccgcggtggtggggctcgccggagggatcacccgcgacatcctgctcggggcgctgcccccggccaccttcagcgactggcgctacctggccaccgtggtctgcgccgccctcctgaccttcttcgcccaccccaccctggagcgcttctcgcgcccggtggccgtcttcgacgccgccggcctctcgctgttctgcgtcaccggggcgaccaaggccctggacttccaggtgggggccgtgcaggcggtgctgctcggcgtcatcaccgcgaccggcggggggatgctgcgcgacgtgctggtgcgcgagatcccgacggtgctgcgcaacgagctgtacgccgtgcccgcgctcgtcggggcgtccatcgtggtcgcggcctccaagctcggccacgacccgggggtcgcctcggtggccgcggcggcgacctgcttcctcatccgcctggcgagcctgcgcttcggcatcgagctgcccaccgcccccaccgaccgcgacaagccccccgaccggtag

SEQ ID NO: 5244 - protein, 215 aa, Rubrobacter xylanophilus DSM 9941
MPEPSGSTLMLALDLAGTFAFGLSGALAGVRARLDLYGVVVLAAVVGLAGGITRDILLGALPPATFSDWRYLATVVCAALLTFFAHPTLERFSRPVAVFDAAGLSLFCVTGATKALDFQVGAVQAVLLGVITATGGGMLRDVLVREIPTVLRNELYAVPALVGASIVVAASKLGHDPGVASVAAAATCFLIRLASLRFGIELPTAPTDRDKPPDR

SEQ ID NO: 5245 - DNA, 609 bp, Rhodococcus sp. RHA1
  CDS (1)..(609): transl_table=11
gtgctgctgtacatcctggaactggtgggcatcgcggtgttcgcggcctcgggtgccctggtgggggtgacgaagcgcctcgacatcttcggtgtgtgcgtggtcggtgtcttcaccgctctcggtggcggcatcgtccgcgacgtcctgctgggcatccacccgccgacgtcgctgggtagctggccgaacctcggcacgtcgttcggcatgtcgttgctggtgttcttcctgcattcgactgtcgggcgactccgccgcgagatcctggtgctcgacgctctgggtatgggcctgttcgcgagcacgggcgcggtgatcgcgctcgaccacggggcgagtccgctcgcgtcgtgcctcatcggcgggacggcggcgatcggcggcgggatcttgcgcgacgtgctggtgaacgaggtcccgttgctgctgcagcgggacttctacgcggtgccggcgctgctcggttcggcgctggtggtcgtggtgagcgagtggggttcgggcaccgacgtggcgctggtggtgggcacggtgttcgcgtcggcgctgcgggtgctggcgctgtggcggaactggggtctgccgggtccgcgggtcctcgactga

SEQ ID NO: 5246 - protein, 202 aa, Rhodococcus sp. RHA1
MLLYILELVGIAVFAASGALVGVTKRLDIFGVCVVGVFTALGGGIVRDVLLGIHPPTSLGSWPNLGTSFGMSLLVFFLHSTVGRLRREILVLDALGMGLFASTGAVIALDHGASPLASCLIGGTAAIGGGILRDVLVNEVPLLLQRDFYAVPALLGSALVVVVSEWGSGTDVALVVGTVFASALRVLALWRNWGLPGPRVLD

SEQ ID NO: 5247 - DNA, 672 bp, Haemophilus somnus 129PT
  CDS (1)..(672): transl_table=11
atgttactgagtattctctatattatcggcattacagcagaagcgataaccggagcattagctgccggacgagaaaaaatggatatttttggggttattattattgcttcaatgacagccatcggtggaggatcgattcgggatatcttgctcgggcattatcccttgggttgggttaaaaacccacattatttcttaattgttaccggagcggctatactcactgtttttatagctcctttcatcaaacactttatacgctacttccgtaccatttttttggtcttagatgcactaggattgatcgtattttccattattggtgctcaaattgctttggacatggggcatggttttactgttacctgtatagccgctatcgttacgggagcctttggtggtgtattacgagattcgctctgtaaccgcattcctttagtgttccaaaaagagctttatgccagtattgcattattagctaccggtatttatgttggcttacaacaattacagattaatcaaaatttggtcattattattacgttaattagtggcttcattattcgtttgctcgccatttatttcgaatggggattgcctatttttgattatcaagagcaagaagcagaaaaagtcaaaacgcatgataaattacctaaaaaaacaaaataa

SEQ ID NO: 5248 - protein, 223 aa, Haemophilus somnus 129PT
MLLSILYIIGITAEAITGALAAGREKMDIFGVIIIASMTAIGGGSIRDILLGHYPLGWVKNPHYFLIVTGAAILTVFIAPFIKHFIRYFRTIFLVLDALGLIVFSIIGAQIALDMGHGFTVTCIAAIVTGAFGGVLRDSLCNRIPLVFQKELYASIALLATGIYVGLQQLQINQNLVIIITLISGFIIRLLAIYFEWGLPIFDYQEQEAEKVKTHDKLPKKTK

SEQ ID NO: 5249 - DNA, 642 bp, Shewanella sp. MR-4
  CDS (1)..(642): transl_table=11
atgcaagaagcgcaatttatcggattattatggctgattggaattttggccgaggccatgactggggcattagcggctggccgtaaacagatggacttattcggcgtggttatcattggctgcgcaacggcgattggtggtggcaccctaagagacatgctgcttggaaattaccctttgatttgggtcgaaaatgtccattatctgatcgcgattgcatttgcctctttgttaacggttgcgattgcgccagtgatgcgttacctgtctaaattatttttggccattgatgccttgggtttagccgtattctcgattgttggcgcacaaaaaacgctaatgttagggtttagtccaacgattgctgtggtgatgggactcgtcactggggtatttggtggggtgatccgcgatattctctgtaaccaagtgcctttgatttttaagaaagaactctatgcggtgatttcactctttaccgcaggcttatatatcacgctcaacgcctatcaattggcggagtggataaacctagtggtctgtttaacgctgggctttagcttgcgaatgttagcactgcgttaccattggtctatgccaaccttcgactatcaagccaacggcgaccagcatactcactaa

SEQ ID NO: 5250 - protein, 213 aa, Shewanella sp. MR-4
MQEAQFIGLLWLIGILAEAMTGALAAGRKQMDLFGVVIIGCATAIGGGTLRDMLLGNYPLIWVENVHYLIAIAFASLLTVAIAPVMRYLSKLFLAIDALGLAVFSIVGAQKTLMLGFSPTIAVVMGLVTGVFGGVIRDILCNQVPLIFKKELYAVISLFTAGLYITLNAYQLAEWINLVVCLTLGFSLRMLALRYHWSMPTFDYQANGDQHTH

SEQ ID NO: 5251 - DNA, 627 bp, Shewanella sp. MR-4
  CDS (1)..(627): transl_table=11
atgagtcactggatttacttcttcgatttatgtggcacagcggtatttgccctttccggcgctttagccgcagggcgtcaccgtatggatccctttggcgttatcgtgctggcctcggtgactgcggtcggcggtggcagtattcgcgatgcgctgattggcgcgacgcccgtgttttggatccgcgacccaaactacatcattgtcatactcgccacagtcctagcttgtttgctgttggtgcgccgcccccgcaagatgccgcaatacacgctaccggtcgccgatgccttaggtttagccctgtttaccgtgattggtgccgaaaaagccctcaatatgggactcagtggcatgattgccgtcgtgatgggcttgatcacgggcgtgggaggaggcattattcgagacttactgtgcagacaaatccctatggtgttacgcacagaaatctatgccacggcttcgattattggcggcataggttataccgtaagcttagccttcggtatgggcgaaaaaacggcgctgtttttatccatggccagtgccctaatcattcgtttaagcgccatcaaatggcatttgtcgttacccgcctttgatctcaaaaccaagagggaatag

SEQ ID NO: 5252 - protein, 208 aa, Shewanella sp. MR-4
MSHWIYFFDLCGTAVFALSGALAAGRHRMDPFGVIVLASVTAVGGGSIRDALIGATPVFWIRDPNYIIVILATVLACLLLVRRPRKMPQYTLPVADALGLALFTVIGAEKALNMGLSGMIAVVMGLITGVGGGIIRDLLCRQIPMVLRTEIYATASIIGGIGYTVSLAFGMGEKTALFLSMASALIIRLSAIKWHLSLPAFDLKTKRE

SEQ ID NO: 5253 - DNA, 615 bp, Alkalilimnicola ehrlichei MLHE-1
  CDS (1)..(615): transl_table=11
atggacgttggctacatctattggctggacctgttcggcacggccgtgtttgccatctccggcgccttggcggcgggtcgcaagaacctggacctgttcggggtcatcgtcctcggactggtcaccgccgtgggcggcggcaccctacgtgacgccaccctgggtgccaccccggtgttctgggtggtcgacccggtctacatcatcgtcgccagcaccgccgcgctgatcaccgtggtcttggcacggctggagcggatcccccatgggctgttggtgaaggccgatgccctgggtctggccacgttcaccgtgatcggcgccgaaaaggccctcagcctcggcttctcaccggtgatcgccctggtcaccggggtgatgaccggctgtttcggcggcatgatccgcgacctgctgtgcggcgagataccgctgatcctgcaaaaggagatctatgccaccgccgcactgtttggcgccggggtctatgtcggggtggggctgacgcccgcgccaaccgccctggccatctggtccggcctgctcgcggccctgctgctgcgcctggcggccatccgctggcacctgcaactgccggtgttcacccaccaataa

SEQ ID NO: 5254 - protein, 204 aa, Alkalilimnicola ehrlichei MLHE-1
MDVGYIYWLDLFGTAVFAISGALAAGRKNLDLFGVIVLGLVTAVGGGTLRDATLGATPVFWVVDPVYIIVASTAALITVVLARLERIPHGLLVKADALGLATFTVIGAEKALSLGFSPVIALVTGVMTGCFGGMIRDLLCGEIPLILQKEIYATAALFGAGVYVGVGLTPAPTALAIWSGLLAALLLRLAAIRWHLQLPVFTHQ

SEQ ID NO: 5255 - DNA, 633 bp, Hyphomonas neptunium ATCC 15444
  CDS (1)..(633): transl_table=11
atgaaccccatcctgatcctcgactatgcgggcatcgccgtcttcgccgccaccggcgcgctggctgcctcgcgcaagcagctcgacatcatcggcttcctgttcttcgccgccttcaccggggtagggggcggcacggtgcgcgatctgatcctcgatgtgcccgtcttctgggtggccaatcatgactatctgctgatctgcctcgtcaccgctatcctggtctacttcaccgcccacctgtttgagtcccgctacaagctcctcctctggctcgatgccctcggccttgctgcctattgcgtctttggcgcgtggaaggcgctggaggttaccggctcgcccgtcatcgccgtcgtcatgggcgtcatcacggcgagcttcggcggcatcctgcgcgaccagctcgcgggagagccctgcatcctcctgcgcccggagatctacatcaccgcggcgctggccggcagcgcggtctataccggcctccacctggcgggccttcccctgatggccgccgccgtgcctgccgccctcgttgccttcgccataaggggcggggcgatgaagttcggctggtcgatccccggctacaagacgcgccccggccgccccgccgaagagatcgaatga

SEQ ID NO: 5256 - protein, 210 aa, Hyphomonas neptunium ATCC 15444
MNPILILDYAGIAVFAATGALAASRKQLDIIGFLFFAAFTGVGGGTVRDLILDVPVFWVANHDYLLICLVTAILVYFTAHLFESRYKLLLWLDALGLAAYCVFGAWKALEVTGSPVIAVVMGVITASFGGILRDQLAGEPCILLRPEIYITAALAGSAVYTGLHLAGLPLMAAAVPAALVAFAIRGGAMKFGWSIPGYKTRPGRPAEEIE

SEQ ID NO: 5257 - DNA, 621 bp, Pseudomonas aeruginosa UCBPP-PA14
  CDS (1)..(621): transl_table=11
atgctgctgaccgtgctctacatcatcgccatcaccgccgaagccatgaccggcgcgctgtcggccggccggcgcagcatggacctgttcggcgtggtgctgatcgcctgcgtcaccgccctgggcggcggctcggtacgcgacatgctgctgggccattacccgctgacctgggtccgtcacccggaatacctggcgctgaccgcagtcgccgcgctggtcacggtgttcatcgcgccgctgatgcgccacctgcgctcgctgttcctggtactcgacgcggtcggcctggtggccttcaccctgatcggctgccaggtcagcctggaaatgggccacagcctgctgatcgcggcgatcagcggggtgatcaccggggtgttcggcggcattctccgcgacatcctgtgcaacgacgtacccttgatcttccgccgcgaactctatgccagcgtgtccttcgccagcgcctggtgctacctgatctgcgtggagctggaactgccctccgagcaggcgatgctgatcaccctgttcagcggcttcctgttccgcctgctggccatccgcttccactgggaaatgcccaagttcgtctaccaggacgatttcgaccactga

SEQ ID NO: 5258 - protein, 206 aa, Pseudomonas aeruginosa UCBPP-PA14
MLLTVLYIIAITAEAMTGALSAGRRSMDLFGVVLIACVTALGGGSVRDMLLGHYPLTWVRHPEYLALTAVAALVTVFIAPLMRHLRSLFLVLDAVGLVAFTLIGCQVSLEMGHSLLIAAISGVITGVFGGILRDILCNDVPLIFRRELYASVSFASAWCYLICVELELPSEQAMLITLFSGFLFRLLAIRFHWEMPKFVYQDDFDH

SEQ ID NO: 5259 - DNA, 642 bp, Shewanella sp. ANA-3
  CDS (1)..(642): transl_table=11
atgcaagaagcgcaatttatcggattattatggctgattgggattttagccgaggccatgacaggggcattagcggcgggtcgtaagcagatggacctattcggcgtggttatcattggctgcgcgacggcaattggtggtggcaccctaagagacatgctgctcggaaattaccctttgatttgggtcgagaatgtccattacctgctcgcgattgcatttgcgtctttactaacggtcgccattgcgcctgtgatgcgttacctgtctaagttattcttggccattgatgccttaggcctagccgtattctcgattgttggcgcccaaaaaaccctaatgttaggctttagtccaacgattgcggtggtgatggggctcgtcacaggggtctttggcggggtgatccgcgatattctctgtaatcaagtgcctttgatttttaagaaagaactctatgcggtgatttcgctctttaccgcaggcttatatatcaccctcaacgcttatcaattggctgagtggataaacctagtggtctgtttaacgcttggctttagcttacgaatgttagcgctgcgttatcattggtctatgccgacctttgactatcaagccaatggcgaccaacatacgcactaa

SEQ ID NO: 5260 - protein, 213 aa, Shewanella sp. ANA-3
MQEAQFIGLLWLIGILAEAMTGALAAGRKQMDLFGVVIIGCATAIGGGTLRDMLLGNYPLIWVENVHYLLAIAFASLLTVAIAPVMRYLSKLFLAIDALGLAVFSIVGAQKTLMLGFSPTIAVVMGLVTGVFGGVIRDILCNQVPLIFKKELYAVISLFTAGLYITLNAYQLAEWINLVVCLTLGFSLRMLALRYHWSMPTFDYQANGDQHTH

SEQ ID NO: 5261 - DNA, 627 bp, Shewanella sp. ANA-3
  CDS (1)..(627): transl_table=11
atgagccactggatttacttcttcgatttatgtggcacggcggtatttgccctttctggcgccttagccgctgggcgtcaccgtatggacccctttggcgttatcgtgctcgcgtcggtaacagctgtgggtggtggcagtattcgcgatgcgctgataggcgccacgccggtgttttggatccgcgaccctaactacatcatagtgatactcgccacagtcctagcttgtttgctgttagtgcgccgcccccgcaagatgccgcaatacacgctacctgtcgccgacgccttaggtttggccctattcacagtgattggtgctgaaaaagccctcaatatgggactcagtggcatgattgccgtcgtgatgggcttgatcacgggcgtaggaggaggcattattcgagacttactgtgcagacaaatccctatggtgttacgcacagaaatctatgccacggcgtcgattgttggcggcataggttataccgtaagccttgcctacgggatgggcgaaaaaacggcactatttttagccatgaccagtgccttaatcattcgcctatgcgccatcaaatggcatttgtcgttacccgcctttgatctcaaaaccaagagggaatag

SEQ ID NO: 5262 - protein, 208 aa, Shewanella sp. ANA-3
MSHWIYFFDLCGTAVFALSGALAAGRHRMDPFGVIVLASVTAVGGGSIRDALIGATPVFWIRDPNYIIVILATVLACLLLVRRPRKMPQYTLPVADALGLALFTVIGAEKALNMGLSGMIAVVMGLITGVGGGIIRDLLCRQIPMVLRTEIYATASIVGGIGYTVSLAYGMGEKTALFLAMTSALIIRLCAIKWHLSLPAFDLKTKRE

SEQ ID NO: 5263 - DNA, 627 bp, Mycobacterium smegmatis str. MC2 155
  CDS (1)..(627): transl_table=11
atgccgatcgactcgccactgctgctgacccttgatctggtgggtacgttcgcgttcgcgttgaacggtgcgctgacggctgtgcgcgccgaacggctcgacatcttcggcgtgatcacgctcggcatgttcaccggcctcggcggcggcacgatccgcgacgtcctgctcgacgcgctaccgcccgccacgttcgtcgactggcggtatctcgcgctcgcggcaggcgggggtctgatcgcgttcatcctcaaccgcacgctcgaccgcctctcgatgaccatcacggtgctcgacgccgtcgggctcagcgtgttcgcggtgctcgcggcctacaaggcactggatctgggattcggtgtgccgcaggcgatgatcgtcggcaccgtcacggccgtgggaggcggcacgatccgcgacgtgatgatcggccgcatccccacggtgctgcgcagtgagctctacgccatcccggcgttgatcgccgcggggatcgccgcggccggatacagcttcggccaccgtggcaccgcggccgcactgagcgcggcggccgtgtgcttcgtgatccggatggtcggcgtgcgtttcgatctgcacgcgccgcggccgccgggccggcgctga

SEQ ID NO: 5264 - protein, 208 aa, Mycobacterium smegmatis str. MC2 155
MPIDSPLLLTLDLVGTFAFALNGALTAVRAERLDIFGVITLGMFTGLGGGTIRDVLLDALPPATFVDWRYLALAAGGGLIAFILNRTLDRLSMTITVLDAVGLSVFAVLAAYKALDLGFGVPQAMIVGTVTAVGGGTIRDVMIGRIPTVLRSELYAIPALIAAGIAAAGYSFGHRGTAAALSAAAVCFVIRMVGVRFDLHAPRPPGRR

SEQ ID NO: 5265 - DNA, 636 bp, Nocardioides sp. JS614
  CDS (1)..(636): transl_table=11
atgccctcgcccgagccctccaccaccctggtcgtcctcgacctggtcggcatcttcgtcttcgcgatcaccggcgccctggtcgccgtgcgcaagggcctcgacgtgttcggggtcctcgtgctggccggcatgaccggcctcggcggtggcttcctgcgcgacgtgctcatcgacgccaccccgccggccgccctgcaggactggcgctacctgctggtgccggtcgtctccggggtgctggcgttcttctaccacccggtgctgggccgggtggagcgcgccgtcaacgtcttcgacgcgttcggcctcggactgttctgcgtcaccggcgccctcaaggccctggactacggcctcggcccggcgccggccgcgctgatggggatggtgaccggcatcggcggcggggtgatccgcgacctgctcgcctcccgcgtgcccgcggtcttccgcggcgagctgtacgccaccccggccctggccggcgccgtcgtggtcgtcgtcggcacccacgtcgacctgccgctcggcgtcgtggtcgtcaccggcgccggcctgtgcatcgtctggcggctgctggccctctggcggcactggcaggcaccggtgccgaccggcccggcgtcggtgtag

SEQ ID NO: 5266 - protein, 211 aa, Nocardioides sp. JS614
MPSPEPSTTLVVLDLVGIFVFAITGALVAVRKGLDVFGVLVLAGMTGLGGGFLRDVLIDATPPAALQDWRYLLVPVVSGVLAFFYHPVLGRVERAVNVFDAFGLGLFCVTGALKALDYGLGPAPAALMGMVTGIGGGVIRDLLASRVPAVFRGELYATPALAGAVVVVVGTHVDLPLGVVVVTGAGLCIVWRLLALWRHWQAPVPTGPASV

SEQ ID NO: 5267 - DNA, 615 bp, Azoarcus sp. BH72
  CDS (1)..(615): transl_table=11
atgctgaccaccatctatctcatcgcgatcaccgccgaagcgatgtccggcgcgctcgccgcgggccgccgcagcatggacatcttcggcgtcgcggtcatcgcctttgtcaccgcgctcggcgggggcaccatccgcgacatgattctcgggcacttcccgattggctggacgcaacatccggagtacgtctatctggtgatctccgccggcctgctcaccacgctggtggcgcgctacatgcaccatctgaagaccgtgttcctggtgctcgacgcaatgggcctgatcgccttctcgctgatcggctgcggcgtcgcgctggagatgggctacgccacgccggtggtgatcatgtccggcatgatcaccggcatcttcggcggcatcctgcgcgacgtgctgtgcaaccaggtgccggtggtgttccgccacgagttgtacgccagcgtgtcgctcgcggtgtgcgcgctctacctcgcgctgcaccacttcgccgtgcccgagcagatcaacatcgccgcgagcttcgccgccggcctcacgctgcggctgctggccatctggcgcggctggcggctgccgacgttttcgtaccgggagcgctgggagtaa

SEQ ID NO: 5268 - protein, 204 aa, Azoarcus sp. BH72
MLTTIYLIAITAEAMSGALAAGRRSMDIFGVAVIAFVTALGGGTIRDMILGHFPIGWTQHPEYVYLVISAGLLTTLVARYMHHLKTVFLVLDAMGLIAFSLIGCGVALEMGYATPVVIMSGMITGIFGGILRDVLCNQVPVVFRHELYASVSLAVCALYLALHHFAVPEQINIAASFAAGLTLRLLAIWRGWRLPTFSYRERWE

SEQ ID NO: 5269 - DNA, 672 bp, Haemophilus somnus 2336
  CDS (1)..(672): transl_table=11
atgttactgagtattctctatattatcggcattacagcagaagcgataaccggagcattggctgccggacgagaaaaaatggatatttttggggttattattattgcttcaatgacagccatcggtggaggatcgattcgggatatcttgctcgggcattatcccttgggttgggttaaaaacccacattatttcttgattgttaccggagcggctatactcactgtttttatagctccttttatcaaacactttatacgctacttccgtaccatttttttggtcttagatgcactaggattgatcgtattttccattattggtgctcaaattgctttggacatggggcatggttttactgttacctgtatagccgctatcgttacgggagcctttggtggtgtattacgagattcgctctgtaaccgcattcctttagtgttccaaaaagagctttatgccagtgttgcattattagctaccggtatttatgttggcttacaacaattacagattaatcaaaatttggtcattattattacgttaattagtggcttcattattcgtttgctcgccatttatttcgaatggggattgcctatttttgattatcaagagcaaggagcagaaaaagtcaaaacgcatgataaattacctaaaaaaacaaaataa

SEQ ID NO: 5270 - protein, 223 aa, Haemophilus somnus 2336
MLLSILYIIGITAEAITGALAAGREKMDIFGVIIIASMTAIGGGSIRDILLGHYPLGWVKNPHYFLIVTGAAILTVFIAPFIKHFIRYFRTIFLVLDALGLIVFSIIGAQIALDMGHGFTVTCIAAIVTGAFGGVLRDSLCNRIPLVFQKELYASVALLATGIYVGLQQLQINQNLVIIITLISGFIIRLLAIYFEWGLPIFDYQEQGAEKVKTHDKLPKKTK

SEQ ID NO: 5271 - DNA, 663 bp, Haemophilus influenzae R2866
  CDS (1)..(663): transl_table=11
atgttacttagtattttatatatcatcggtatcaccgctgaaggaatgacaggcgcactcgccgctggtcgtgaaaaaatggatatttttggcgtgatcattatcgcatccgtcactgccattggtggcggttctgtgcgtgatgtactgcttgggcattatcctctcggctgggttaagcacccagaatattttttaatggtggcaagtgcggcggtaattaccgtatatgttgcaccattcatcaatcattttatgcgctactttcgcactattttcttggtgcttgatgcgatgggcttagtggtgtattccattattggcgcacaaattgcgatggatatgggacatggcctcactattgtttgtattgcaggctgtattacgggtgcctttggcggggttctacgcgatatgctatgcaatcgaattcctctcgtattccaaaaagaactctatgccagcattgcgctatttgccacgctgacttattacgcattaagcacacttcaagtagaacatacacttgccgtattactcacgcttattagtagctttactttacgtcttttagctattcatttcgaatggggtttacccgtgtttaattaccaagaactcacatcggaagaacaagataagctgccaaataaaaagaaataa

SEQ ID NO: 5272 - protein, 220 aa, Haemophilus influenzae R2866
MLLSILYIIGITAEGMTGALAAGREKMDIFGVIIIASVTAIGGGSVRDVLLGHYPLGWVKHPEYFLMVASAAVITVYVAPFINHFMRYFRTIFLVLDAMGLVVYSIIGAQIAMDMGHGLTIVCIAGCITGAFGGVLRDMLCNRIPLVFQKELYASIALFATLTYYALSTLQVEHTLAVLLTLISSFTLRLLAIHFEWGLPVFNYQELTSEEQDKLPNKKK

SEQ ID NO: 5273 - DNA, 645 bp, Actinobacillus pleuropneumoniae serovar 1 str. 4074
  CDS (1)..(645): transl_table=11
atgactaacttattcgacagcttattgccgccttttccttggtcattcttatttattcaagatttgatcggcacgatcgtatttgccgtatccggggcaatcgcggctcgacaacataaaatggatattttcggtatgttcattttagcgtttgtgaccggtgtaggcggcggtacgttgcgtgatgtgatgatcggcagtacgccggttttttggatgaagcaaccgatttatgttttgatgatcactcttgcggtaattatcactgcggtttttaaaaataatttcagtaaaaaagagtggcaaaccggtttactgattttcgatgcgattggtttgggcgtgtttaccgttattggtgtgcaaaaaggcttggatttcggcttacatccgttgattgcgattgcattaggcggaatgaccggatgtttcggtggggttattcgagatattttgcgtaacgaagtgccgattgtgttacaaaaagaagtgtatgtcacggcaagtcttatcggcggtgtgatttttgtgttgttctattccgccggcgttgaaagccgctgggtggatattgccacggtcgctaccgtgattgtgatacgtttattagcgattcgatttaatctaaatttaccgagaatttaa

SEQ ID NO: 5274 - protein, 214 aa, Actinobacillus pleuropneumoniae serovar 1 str. 4074
MTNLFDSLLPPFPWSFLFIQDLIGTIVFAVSGAIAARQHKMDIFGMFILAFVTGVGGGTLRDVMIGSTPVFWMKQPIYVLMITLAVIITAVFKNNFSKKEWQTGLLIFDAIGLGVFTVIGVQKGLDFGLHPLIAIALGGMTGCFGGVIRDILRNEVPIVLQKEVYVTASLIGGVIFVLFYSAGVESRWVDIATVATVIVIRLLAIRFNLNLPRI

SEQ ID NO: 5275 - DNA, 612 bp, Burkholderia vietnamiensis G4
  CDS (1)..(612): transl_table=11
atgcatacgctatatctgattgcgatcgttgcggaagcgatgtcgggcgcgctgatgggcatgcggcgcgggatggaccggttcggcctcgcgctggtcggcgcggtgacggcgctcggcggcggcaccgtgcgcgacgtgctgctcggacactatccgctcggctggatcgcgcatccggcctatctgctgatcacgctcgcggccgcgaccgccgcgtcgtgggctgcgcggcacctgtcacggatgaagacgctgttcgtgaccgtcgacgcgatcggcctcgcggcgttcacgatcatcggctgcgacatcggcgcgtcgaccggcgcggcgccgatcatcgtcgtgctggcaggtgcgatcaccggcgtgtgcggcgggatgctgcgcgacctgctgtgcaacgagatgccgctggtcctgcgcgacgaactgtacgcgagcgtcgcattgttcacgggcgggttgtacgtcggcatgcagtatctgggtatcggcgcggggccggcgacgatcgtcgcgctcgtggcaggcttcgcgacgcggatgctcgccgtgcgactcggatggaaattgcggactttcgcggtcgcggatgtcgagcgctga

SEQ ID NO: 5276 - protein, 203 aa, Burkholderia vietnamiensis G4
MHTLYLIAIVAEAMSGALMGMRRGMDRFGLALVGAVTALGGGTVRDVLLGHYPLGWIAHPAYLLITLAAATAASWAARHLSRMKTLFVTVDAIGLAAFTIIGCDIGASTGAAPIIVVLAGAITGVCGGMLRDLLCNEMPLVLRDELYASVALFTGGLYVGMQYLGIGAGPATIVALVAGFATRMLAVRLGWKLRTFAVADVER

SEQ ID NO: 5277 - DNA, 624 bp, Burkholderia vietnamiensis G4
  CDS (1)..(624): transl_table=11
gtgccgcatcctaggctcacgctcgcgatctcgatcctcgaggcgatcgcgacgctggcgtttgcgatctccggcttcatcgaggcgcgcaagaaccgcctcgactcggtcggcacgttcgtcgtcgcgctcgccaccgcgttcggcggcggcacgctgcgcgacatcctgctcgaacgccggccgttctactgggtcgtgcacgacgactacgtgatcgcgatcttcgtgctcgcgctgttcgcgccgttcgtgctgcggatgctgtcgcggctgtcggccgagcgcctgctgctcgtcgccgacgcgatcgggctcggcatcttcagcatctccggcaccgcgatcgcgctcgacgccgagatgccgcgcttcatcgcggtgatgatgggcgtgatcaccggcgtggtcggcggcatcgtgcgcgacgtgctgtgcaacgacatcccgctgatcctgcgcgattcgcgcccctatgcgacctgcgcgttcgccggctgctggttctatctgctgctcgcatggctgcagtacgactcggtgtacagcgtgctgctcgcgaccggcttcattctcgtcgcgcggctggcgacgttcaaattcgacgtgcggctgccgcactga

SEQ ID NO: 5278 - protein, 207 aa, Burkholderia vietnamiensis G4
MPHPRLTLAISILEAIATLAFAISGFIEARKNRLDSVGTFVVALATAFGGGTLRDILLERRPFYWVVHDDYVIAIFVLALFAPFVLRMLSRLSAERLLLVADAIGLGIFSISGTAIALDAEMPRFIAVMMGVITGVVGGIVRDVLCNDIPLILRDSRPYATCAFAGCWFYLLLAWLQYDSVYSVLLATGFILVARLATFKFDVRLPH

SEQ ID NO: 5279 - DNA, 630 bp, Croceibacter atlanticus HTCC2559
  CDS (1)..(630): transl_table=11
atggatttctttgtatttgttgatcttataggaacaatagcatttgcaatttctggtgttttaacagccaccaagaagcgtatggatgtttttggcattattattattgcttttgtaacatcaattggtggtggtacgttaagagaccttttagtaggatttcccgtagcttggatacgcaatacttattatgtttactttattataggatgcacaattttagctattttatttagacgaaaattaagacatgtaagaacctctttatttctatttgatactattggtattggtttgtacaccgtagttggtatagaaaagggattatctgcagatttgtctccagtaatttgtgttgcattaggaacagttacagctacatttggtggtgtaatacgagacatactctgtaatgaaataccagttgtatttagaaaagagatttatgctactgcctgtattttaggaggtgtttcctactttgtgttattgttcttaactcctataccagaaggtattatttttgttatagcaggatcaatagtaattacatttaggctactagcagttcattacaaatggatactgcctacaatttactcgaaagaagaattggaaaacttaaattag

SEQ ID NO: 5280 - protein, 209 aa, Croceibacter atlanticus HTCC2559
MDFFVFVDLIGTIAFAISGVLTATKKRMDVFGIIIIAFVTSIGGGTLRDLLVGFPVAWIRNTYYVYFIIGCTILAILFRRKLRHVRTSLFLFDTIGIGLYTVVGIEKGLSADLSPVICVALGTVTATFGGVIRDILCNEIPVVFRKEIYATACILGGVSYFVLLFLTPIPEGIIFVIAGSIVITFRLLAVHYKWILPTIYSKEELENLN

SEQ ID NO: 5281 - DNA, 615 bp, Pseudoalteromonas tunicata D2
  CDS (1)..(615): transl_table=11
atggaagcgtggtttcattggtttgatttaataggtgttgcggtttttgcgatatcaggcgcattggtagctcatcgtaaaaagcttgatggttttggtgtgatagtgctcgctgctgtgacaggcattggtggtggtaccattcgagatgtcattctcgatgcgccggtattttggttacataatcctagttatctttactcaattttaggtgcctcgttattaactattttttggcttaataagcgcgggagtatgcgtaaaattataattgaaagtgcagatgcgctgggcctagcattttttgtcgttatgggcgtccaaaaagcgctagattacggtatgcctaatatcacagcagtggtgatgggagtgattacgggttgttttggtggcatgatccgcgatgtgcttgctcgttcaacacctatggtattaaaaagtgaattgtatgcaacaacttgtatttttggcgggattgtttatacccaatgtttaaattttgatatcgccaaagaaatagccatgattgccgggatgctggcgactttatcacttcgtgcagcagctataaaatggcgcttgagcttacatgtttttaaatatccaaattga

SEQ ID NO: 5282 - protein, 204 aa, Pseudoalteromonas tunicata D2
MEAWFHWFDLIGVAVFAISGALVAHRKKLDGFGVIVLAAVTGIGGGTIRDVILDAPVFWLHNPSYLYSILGASLLTIFWLNKRGSMRKIIIESADALGLAFFVVMGVQKALDYGMPNITAVVMGVITGCFGGMIRDVLARSTPMVLKSELYATTCIFGGIVYTQCLNFDIAKEIAMIAGMLATLSLRAAAIKWRLSLHVFKYPN

SEQ ID NO: 5283 - DNA, 612 bp, Photobacterium sp. SKA34
  CDS (1)..(612): transl_table=11
atgctcatctatattctcgatatgtttggtactgcaatctttgcagcctcgggagtactcatggcggggcgattacgcatggatccttttggcgttgtcgtactagccagcgtaacagcgattggtggcggcactattcgtgatatggcactaggtgctacccctgtgttttggatcaatgataccaattacttatgggtgatttttataacatgcattatcacgatgctcgcaacccaacgccctaaacggctgccatggtattttcttcctgtcgctgatgcgattggattagcagtctttgtcgctatcggtgttgaaaaatcattacgttatggcgcatcaccaatagttgctgtgattatgggggttataacaggctgtggcggcggcgtgatccgagatatactcggacgtgagatcccaatggtgttacgtacagaggtttatgcaacggcctgtattcttggtggtatggtacacaccataggcttatctttaggtgtattgccttctattgcagcagtgatcggtatctttaccacactcacaataagactcgctgccattaagtggaatctttctctgcctatttttgcattacgcaattaa

SEQ ID NO: 5284 - protein, 203 aa, Photobacterium sp. SKA34
MLIYILDMFGTAIFAASGVLMAGRLRMDPFGVVVLASVTAIGGGTIRDMALGATPVFWINDTNYLWVIFITCIITMLATQRPKRLPWYFLPVADAIGLAVFVAIGVEKSLRYGASPIVAVIMGVITGCGGGVIRDILGREIPMVLRTEVYATACILGGMVHTIGLSLGVLPSIAAVIGIFTTLTIRLAAIKWNLSLPIFALRN

SEQ ID NO: 5285 - DNA, 621 bp, Photobacterium sp. SKA34
  CDS (1)..(621): transl_table=11
atgctgctttcagttttatacattattggcattacggcagaagcgatgaccggtgcactagctgcaggtaaacgccacatggattggtttggagtaatgctagttgcaagtgctactgcaattggtggagggacagttcgtgacatattactcggtcactaccctttaggctgggttgcacacccacaatacttagtggtcacttgcgttgcagggatcttaactacctactttgcccgttgggttgtacgttttcataaagtgtttatcttgctcgatgctatcggcttaatcgtatttagtattattggatgtcaagtcgcgatgacaatggggctttctccaataatttgtgtcgttgcggctgttgtgacaggcgtatttggtggtttgctacgtgatatgatcactcgtcgtaaacctatggtgctgcataaagagctttatgcatcagtcgcattcattgctggcatcatgtattacgtcatgtcttatataggtgtacacccagatatcaccacactatgtaccttgattacaggttttagcctacgcatggctgcagtgtactttagctggagcttacctgtgtttgagtttaaagaagaatcctttcattaa

SEQ ID NO: 5286 - protein, 206 aa, Photobacterium sp. SKA34
MLLSVLYIIGITAEAMTGALAAGKRHMDWFGVMLVASATAIGGGTVRDILLGHYPLGWVAHPQYLVVTCVAGILTTYFARWVVRFHKVFILLDAIGLIVFSIIGCQVAMTMGLSPIICVVAAVVTGVFGGLLRDMITRRKPMVLHKELYASVAFIAGIMYYVMSYIGVHPDITTLCTLITGFSLRMAAVYFSWSLPVFEFKEESFH

SEQ ID NO: 5287 - DNA, 669 bp, Oceanospirillum sp. MED92
  CDS (1)..(669): transl_table=11
atgactgatctaagttatgcccagtttatctatattgccgacctgataggtgtggcggtatttgctaccgcgggagcgttggcagctcaggggaagcgccttgatattctgggtgtagtcgttttggcaattgttacggcattgggtggtggaactatccgcgatattactctggatatccatccggtagtatggattgctgatacctcctatttgtggacagcgatcatctctgcagtcgttgcttttgttgtttgtcgttatatccagtatccgagacgtacgttattggtactcgatgccatgggattggcactgtttgctgtgctgggtgctgaaaaggcattggcgttggagcttccgccactaatcgttgtcatgatgtctgttatcactggatgtgccggagggatgattcgagacatcatcactgggcagattccattgattctgcaaagggatggtgagctctatgcaacctgtgcattgggtggcgcgattttctatatcgttttcaaagaatatatgccgggcgaagtggttgcgcttagctctatgatgatcatatttgtgttgcgtatggcggctatgtttgctgatctgcgcttgcctgagtttattgttaccgggcataaactggaaaaaataaagaaggataaaaatcagtga

SEQ ID NO: 5288 - protein, 222 aa, Oceanospirillum sp. MED92
MTDLSYAQFIYIADLIGVAVFATAGALAAQGKRLDILGVVVLAIVTALGGGTIRDITLDIHPVVWIADTSYLWTAIISAVVAFVVCRYIQYPRRTLLVLDAMGLALFAVLGAEKALALELPPLIVVMMSVITGCAGGMIRDIITGQIPLILQRDGELYATCALGGAIFYIVFKEYMPGEVVALSSMMIIFVLRMAAMFADLRLPEFIVTGHKLEKIKKDKNQ

SEQ ID NO: 5289 - DNA, 630 bp, Xanthobacter autotrophicus Py2
  CDS (1)..(630): transl_table=11
atggagacggcggatcttctcaaggttctctacatcgtcgccatcgtggcggaggcgatgacggccgcgctggcggcggggcggcgggagatggactgggtgggcgtgtgcctgctcggctcggtcacggcgctcggcggcggctcggtgcgcgacgtgctgctgggccggcatcccctgtcctgggtgcagcatccggaatacctgctcatcacctgcggcgcggcgctggcgaccatcatggtggcgcgttacatgcgccacctgcggcacgtcttcctgttcctcgatgcggtggggctggtggtgttcaccgtcatcggctgcaacgtggccatgagcctcgacatgccggtggtggtggtgatcgccgccgggatgatcaccggctgcgtcggcggcgtcctgcgcgacgtgctgtgcgcggacgtcccgctgctgttccgggccgagctctacggcacggtgtccatcgtcaccggcggcctttacatggcgggcaaggcgctggatttgccgcacgatcccctcaccatcggcgtcatggcgctcgggttggggatgcgcatgcttgccctgcggttcggctggcgcatgcccaagttcgtctacaccgaaacgatccactga

SEQ ID NO: 5290 - protein, 209 aa, Xanthobacter autotrophicus Py2
METADLLKVLYIVAIVAEAMTAALAAGRREMDWVGVCLLGSVTALGGGSVRDVLLGRHPLSWVQHPEYLLITCGAALATIMVARYMRHLRHVFLFLDAVGLVVFTVIGCNVAMSLDMPVVVVIAAGMITGCVGGVLRDVLCADVPLLFRAELYGTVSIVTGGLYMAGKALDLPHDPLTIGVMALGLGMRMLALRFGWRMPKFVYTETIH

SEQ ID NO: 5291 - DNA, 609 bp, Flavobacteria bacterium BBFL7
  CDS (1)..(609): transl_table=11
atggattttatacaagtaattgatttaatgggaacggtagcttttgctatctctggtgctcttgccgcttataataaaaagttagacgcatttggaatcatcattatcgcatttgttactgccgctggtggtggaactataagagacattctactaggtgtaagtccagtttcatggatgactaatatgaatctagtttataccattcttgtatgtgtattggttacttttatattcagtcagaagttactcaaactgcgcaaaacacttttcttttttgatacgataggtatcggtttatatactgttgtagggctagaaatgggaattaccgcaggattacatccctttatatgtgtaaccttaggttgcattacggcctgttttggtggagtaataagagatattctagtaaatgagattccagtaattttccgtaaaaacatctatgccacagcctgtatcgctggtggtgttatttactttatccttagaaagtttgaggcgccagaaaatattacgttcatcgtttctggtatttcagtaatcgttatacgtatgcttgcggtaagatttaaatggcagctaccacgaccttataaagattaa

SEQ ID NO: 5292 - protein, 202 aa, Flavobacteria bacterium BBFL7
MDFIQVIDLMGTVAFAISGALAAYNKKLDAFGIIIIAFVTAAGGGTIRDILLGVSPVSWMTNMNLVYTILVCVLVTFIFSQKLLKLRKTLFFFDTIGIGLYTVVGLEMGITAGLHPFICVTLGCITACFGGVIRDILVNEIPVIFRKNIYATACIAGGVIYFILRKFEAPENITFIVSGISVIVIRMLAVRFKWQLPRPYKD

SEQ ID NO: 5293 - DNA, 618 bp, marine gamma proteobacterium HTCC2207
  CDS (1)..(618): transl_table=11
atgacctcactggatcagctactttacgtcttctcgataatcggcaccgtagtctttgccgtgtcaggggcgttatttgccgctgagaagcgtatggatattctcggctttatcttagttggcaccgtcaccggagtgggcggcggcaccctgcgagatctattgctgggcatctctccagtgagttgggtacacaacccaatggcggtttatatctgtattggtgcctcggctctcacctactttaccgttgccctatatcgcaagcgcgatgctcggatactatggactgatgccataggcctagcagtgtttgcggttatgggagcacaggccgccatagcccatgaagtgccgccaatgattgcggtggtgatgggtgtgatgacggcgacctttggtgggctgatgcgcgatgtgctctgtgctgaagtgctgaccctaatgcggccggagatctatatcagctgtgcattgctgggtgcttcggtgtatgtgattttgaaccagtttggggttggagattcggttgcagccagtgtagcgtttttgatggggtttgggcttagggcggcggcgatttggtttaggttgacgttgccgcggtttggggcttag

SEQ ID NO: 5294 - protein, 205 aa, marine gamma proteobacterium HTCC2207
MTSLDQLLYVFSIIGTVVFAVSGALFAAEKRMDILGFILVGTVTGVGGGTLRDLLLGISPVSWVHNPMAVYICIGASALTYFTVALYRKRDARILWTDAIGLAVFAVMGAQAAIAHEVPPMIAVVMGVMTATFGGLMRDVLCAEVLTLMRPEIYISCALLGASVYVILNQFGVGDSVAASVAFLMGFGLRAAAIWFRLTLPRFGA

SEQ ID NO: 5295 - DNA, 618 bp, Oceanobacter sp. RED65
  CDS (1)..(618): transl_table=11
atgattttagatatcatctattttgcaggactgggcggaactctcgtatttgccatctccggagcactcgctgctgctgagaacgaattagatatccttggttttatactctttgccaccgtgaccggcattggtggtggtactgtgagagacctaattctgggtgtcgaggttgcttgggcacacggtcaacatgcttatgacctgcatatttgtgtggcagctgccgtggttacttattttctcgcgccacaatttataaagcgcatgcgtttattggtgtggatggatgccatgggactcgccatttttagtgcagtcggtacagcaaaggcatatgaattaggactgagtcctttggtctgtgttgccatgggtatgatcaccccaactttcggttctatgattcgagatatcctgtcagatcgccaacctgaactgctacaaccggagatatatgtcaccgcttccatcgtgggaggcgtcagttttcttttaagtatgcaagtactaactaacccacagctaagcatacttctggcggcgctttcagcgtttttagtaagatcggcctcaatcgtgtataatctacggctgcctaagtttacgaataaataa

SEQ ID NO: 5296 - protein, 205 aa, Oceanobacter sp. RED65
MILDIIYFAGLGGTLVFAISGALAAAENELDILGFILFATVTGIGGGTVRDLILGVEVAWAHGQHAYDLHICVAAAVVTYFLAPQFIKRMRLLVWMDAMGLAIFSAVGTAKAYELGLSPLVCVAMGMITPTFGSMIRDILSDRQPELLQPEIYVTASIVGGVSFLLSMQVLTNPQLSILLAALSAFLVRSASIVYNLRLPKFTNK

SEQ ID NO: 5297 - DNA, 624 bp, Vibrio sp. Ex25
  CDS (1)..(624): transl_table=11
atgttgctaagtgtgttgtatatcattggtatcacggctgaagccatgacaggtgcgttgagtgctggtagaagaaaaatggactggtttggtgttatgttggtggccagtgcaacggccattggtggtggcaccgtacgtgacattttactgggacactaccctcttggttgggtaaaaaacccagagttcctagcaatcacgtgtattgcgggtgtacttaccacaggcttagcgaaatgggtgattaagctaaaaggtctattcatccgccttgatgcgttaggtctaatcgtattcagcatcatcggaactaagattgcgatgggcatgggcttacaccctgggatctgtatggtttcagcgctagtaacgggtgtattcggtgggctactccgcgacttaatctgtcgccaaacaccgttggtactgcatgaagaactttacgcttctgtcgctcttatcgcatcaggaatgtacttagcgctattagaatttaatgttcccgatgtaacagccactatcattacactgatcaccggttatatgctgcgtatggccgcggtacgttttaagtggcgtctcccttctttcaatttggaaacggaaggctcactccattaa

SEQ ID NO: 5298 - protein, 207 aa, Vibrio sp. Ex25
MLLSVLYIIGITAEAMTGALSAGRRKMDWFGVMLVASATAIGGGTVRDILLGHYPLGWVKNPEFLAITCIAGVLTTGLAKWVIKLKGLFIRLDALGLIVFSIIGTKIAMGMGLHPGICMVSALVTGVFGGLLRDLICRQTPLVLHEELYASVALIASGMYLALLEFNVPDVTATIITLITGYMLRMAAVRFKWRLPSFNLETEGSLH

SEQ ID NO: 5299 - DNA, 615 bp, Alteromonadales bacterium TW-7
  CDS (1)..(615): transl_table=11
atgacagaactgtatcactggtttgatttaatcggcattgctgtgtttgctatttcaggcacattagtggcctacgagaaaaaaatggatggtttcggggttgtagtattagcaacagtgaccgctattggtgggggaactgttcgcgatgtgattctagacgttcctgtattttggctacatgatcaaagctatttttttgctattttagctgctgtacttattacatctcggcttattaataagcaaaaatccattccgtattacacacttcaaatagcagacgcattcggtttggctttttttgctgtaatgggtactcaaaaagcactacttgcaggtatgccagaaatgacagcaatcataatgggagtcataacggcttgttttggaggcttaatacgtgatgtactcgcccgcgaaatccctatgctgttaaaaggagagctctacgccattacctgtattgcgggtggtattgtttatacacttagtgtgtatttttcatttgtgactgagctggcgatggtattggcaatgttgatgacattattcttacgtttttcagcaataaaatggaaaatcacattacacgtttttaaatatcctgactaa

SEQ ID NO: 5300 - protein, 204 aa, Alteromonadales bacterium TW-7
MTELYHWFDLIGIAVFAISGTLVAYEKKMDGFGVVVLATVTAIGGGTVRDVILDVPVFWLHDQSYFFAILAAVLITSRLINKQKSIPYYTLQIADAFGLAFFAVMGTQKALLAGMPEMTAIIMGVITACFGGLIRDVLAREIPMLLKGELYAITCIAGGIVYTLSVYFSFVTELAMVLAMLMTLFLRFSAIKWKITLHVFKYPD

SEQ ID NO: 5301 - DNA, 810 bp, Pseudomonas putida GB-1
  CDS (1)..(810): transl_table=11
atgtgcgtgacagcttcaagaagggcaatacccacctggcgctggacgatattcgcgagtcgatcgccgaactgcgtcactaccgcgagcacttcatcaagctgtgatccgaaacggcgcagatattgtgtctgcgcccccttttggtgccttgggcaactggttagactgcgcgcctttcctgcacggacccgcaccatgttgttgatgctctatctcgttgccatcaccgccgaagccatgactggcgcgctgtctgccgggcgtcgcggcatggactggttcggcgtggtgctgattgcctgcgtcaccgccctggggggcggctcggtgcgtgatgtgctgctcgggcactacccgctgacctgggtgaagcaccccgagtacctggtgttgaccagctttgcggcgctgctgactattttcattgcgccgatgatgcgccgcctgcgctcgctgtttctggtgctcgatgccctggggctggtggcgtttaccctgattggctgcatgacggcgctggaaatggggcagggcatgctggtggcgtccatcagcggggtgatcaccggggtgtttggcggcatcctgcgggatatcttctgcaacgacatcccgctggtgttccgtcgcgaactgtatgccagcgtgtcgttcgcggcggcgtggttctatctgggctgcgtgtatttcaaggtgccggcggagcaggcgatgctgctgaccttgtttggcggtttcctgctgcgcctgttggcgattcgcttccactgggaaatgcccaagttccactacaacgaccagcagtga

SEQ ID NO: 5302 - protein, 269 aa, Pseudomonas putida GB-1
MCVTASRRAIPTWRWTIFASRSPNCVTTASTSSSCDPKRRRYCVCAPFWCLGQLVRLRAFPARTRTMLLMLYLVAITAEAMTGALSAGRRGMDWFGVVLIACVTALGGGSVRDVLLGHYPLTWVKHPEYLVLTSFAALLTIFIAPMMRRLRSLFLVLDALGLVAFTLIGCMTALEMGQGMLVASISGVITGVFGGILRDIFCNDIPLVFRRELYASVSFAAAWFYLGCVYFKVPAEQAMLLTLFGGFLLRLLAIRFHWEMPKFHYNDQQ

SEQ ID NO: 5303 - DNA, 657 bp, Streptomyces coelicolor
  CDS (1)..(657): transl_table=11
atgagcaccgaacccgctccgctgctcgccctcgacctgaccggcacgttcgcgttcgggctgaacggggcgctgaccgcggtgcgggccgcgcggctggacgtggtcggggtggtggtgctcgggatgatcaccgcgttgggcggcggggtcatccgggacgtgctcatcgactcgctgccgcccgccgcattcctggactggcgttactacacgctcgccgccgccggtggcctgctcgccttcgccgtcagcaggcacctgcgccggctggaaccggcgatcaccgtgctcgacgcggtcggactgagcaccttcgcggtgatcggcgcgagcaaggcgctggacgccgggctggccgtcgtaccggcgatgctgctgggcgtgatcaccgcggtgggcggagggacgatccgcgacaccctggtcggccggatcccgacggtgctgcgcaccgggctgtacgccatccccgccctggcaggcgcggcggtgacggtcgcgaccaccgagaccggggtgtacggcctcccggccgcgctcggagcggcggcggtctgcttcctgatccgcatgctcggcctgcacttcggcatcaacgctccggagccgcccgagacgcgtccgtccggtggcggaacacggcgccagaagtag

SEQ ID NO: 5304 - protein, 218 aa, Streptomyces coelicolor
MSTEPAPLLALDLTGTFAFGLNGALTAVRAARLDVVGVVVLGMITALGGGVIRDVLIDSLPPAAFLDWRYYTLAAAGGLLAFAVSRHLRRLEPAITVLDAVGLSTFAVIGASKALDAGLAVVPAMLLGVITAVGGGTIRDTLVGRIPTVLRTGLYAIPALAGAAVTVATTETGVYGLPAALGAAAVCFLIRMLGLHFGINAPEPPETRPSGGGTRRQK

SEQ ID NO: 5305 - DNA, 633 bp, Campylobacter jejuni
  CDS (1)..(633): transl_table=11
atggagataaatgctcttacgataaccactctttatatcataggtatttccgcagaaggaatgacaggagctttagctgcaggacgccacaaaatggatctttttggagttatttttattgctctcgtaacagcaattggaggcggaagcatacgagatgtgcttttaggacattatcctttaacttgggttaaacatcctgaatatattattttaatctgtttttgcgcccttgtagccacaaaaattccgcgcgtagtaaccaaacttgaaactttatttctaactcttgatgctataggacttgttgtttttagcatacttggagctcaaatagctatagatcaaaaccatggctttatcatagccgttgctgccgctgtaattaccggtgtttttggtggaattttaagagatattttatgtatgagaatccccttggtgtttcaaaaagaaatttatgcaggaattgccataattgcaggagcaatctattattctctaataatttggcttgagcttaatgccctagtttgcacacttttaactctttttataggagtttttgcaaggcttttagctatcaaatatcaatggtctttacctattttttcttacaatgaagaaaaataa

SEQ ID NO: 5306 - protein, 210 aa, Campylobacter jejuni
MEINALTITTLYIIGISAEGMTGALAAGRHKMDLFGVIFIALVTAIGGGSIRDVLLGHYPLTWVKHPEYIILICFCALVATKIPRVVTKLETLFLTLDAIGLVVFSILGAQIAIDQNHGFIIAVAAAVITGVFGGILRDILCMRIPLVFQKEIYAGIAIIAGAIYYSLIIWLELNALVCTLLTLFIGVFARLLAIKYQWSLPIFSYNEEK

SEQ ID NO: 5307 - DNA, 633 bp, Aeromonas punctata
  CDS (1)..(633): transl_table=11
atgcagacactggttgagcagattgtttacatcagcgacatgtttggtactgcggtattcgcgttttcgggcgtactggtggccggccgtctcaggatggacggtttcggtgtcatggtgctggcggcagtcaccgccatcgggggtggcaccatccgcgacatgatcctgggggccacccccgtcttctgggtgcgcgaccccctctatatctgggtggtcattgccacggcgctcatcggcatgtggatggtcaaactgccccgccgcatgccctggtatgtgctgccggtggcggacgccttcgggttggcgctctttaccgtgatcggggcacaaaaagccctcaactttggtacatcggggcttatcgccgtattgatgggcaccatgacgggggttgcgggcggcatgatccgtgacgtgctggcccgggaagtgcccatggtgctgcaaaaggagatctacgccaccgcctgcattctgggcggcatcctctataccttgtcgctggaggtcggggtagacagggtcagcgccatgctcatcagcatgctcggggtgtttggtctgcgagtggcggccatctactggcacctctccctgcccaccttctcgctgcagcgcaactga

SEQ ID NO: 5308 - protein, 210 aa, Aeromonas punctata
MQTLVEQIVYISDMFGTAVFAFSGVLVAGRLRMDGFGVMVLAAVTAIGGGTIRDMILGATPVFWVRDPLYIWVVIATALIGMWMVKLPRRMPWYVLPVADAFGLALFTVIGAQKALNFGTSGLIAVLMGTMTGVAGGMIRDVLAREVPMVLQKEIYATACILGGILYTLSLEVGVDRVSAMLISMLGVFGLRVAAIYWHLSLPTFSLQRN

SEQ ID NO: 5309 - DNA, 624 bp, Escherichia coli O6
  CDS (1)..(624): transl_table=11
atgctcgtctattggctggatatagtcggcacagcggtatttgccatctccggcgttttgttagccggaaaattgcgtatggacccttttggtgttctggtactgggcgtggtaaccgcagtaggcggcgggacaattcgcgacatggcgctggatcacggcccggtattttgggtgaaagatcccaccgatctggtcgttgcaatggtcaccagcatgctgaccatcgtgctggtgcgccagccaagacgcttaccaaaatggatgttgccggtgctggacgccgttggtctggcggtgtttgtcggcattggcgtgaataaagcctttaatgcggaagccggtccgttaatcgcggtttgtatgggcgtcattactggcgttggcggcgggatcattcgtgatgttctggcccgcgaaatccccatgattttacgtacagaaatctacgcaactgcctgtattatcggcggtattgtccacgctacggcttattacacattttccgtaccactggaaacagccagtatgatgggcatggtcgtgacgctattgattcggctggcggctattcgttggcatcttaagctaccgacgtttgcgctggatgagaatgggcgttga

SEQ ID NO: 5310 - protein, 207 aa, Escherichia coli O6
MLVYWLDIVGTAVFAISGVLLAGKLRMDPFGVLVLGVVTAVGGGTIRDMALDHGPVFWVKDPTDLVVAMVTSMLTIVLVRQPRRLPKWMLPVLDAVGLAVFVGIGVNKAFNAEAGPLIAVCMGVITGVGGGIIRDVLAREIPMILRTEIYATACIIGGIVHATAYYTFSVPLETASMMGMVVTLLIRLAAIRWHLKLPTFALDENGR

SEQ ID NO: 5311 - DNA, 618 bp, Escherichia coli O6
  CDS (1)..(618): transl_table=11
atgctgttacacattttgtatttggttggcattactgccgaagccatgacgggggctctggcggccgggcgacgccgcatggatacatttggcgtaattattattgcgaccgccaccgcaattggcggagggtcagtgcgcgatattctgctgggccactatccgctcggctgggtcaaacacccggaatatgtgattatcgtcgctaccgccgcagtactcaccactatcgttgctcctgtaatgccttacctgcgcaaagtgtttctggtgctcgatgcgcttggactggtggtcttttctatcatcggcgcacaggttgcactggatatggggcacggcccaattattgccgttgtcgcggcggtaaccaccggcgtgtttggcggcgttttgcgcgatatgttctgtaaacgtatcccactggtattccagaaagagttgtatgccggtgtctcatttgcctccgccgtgctgtacatcgcgctgcaacactatgtttctaaccatgatgtggtaattatctccaccctggtattcggcttttttgcccgcttactggcgctacgccttaagctgggattaccggtcttttactacagccacgaaggacactaa

SEQ ID NO: 5312 - protein, 205 aa, Escherichia coli O6
MLLHILYLVGITAEAMTGALAAGRRRMDTFGVIIIATATAIGGGSVRDILLGHYPLGWVKHPEYVIIVATAAVLTTIVAPVMPYLRKVFLVLDALGLVVFSIIGAQVALDMGHGPIIAVVAAVTTGVFGGVLRDMFCKRIPLVFQKELYAGVSFASAVLYIALQHYVSNHDVVIISTLVFGFFARLLALRLKLGLPVFYYSHEGH

SEQ ID NO: 5313 - DNA, 24 bp, Artificial sequence
  primer
atgacaatgcgcacaaatcgctac

SEQ ID NO: 5314 - DNA, 23 bp, Artificial sequence
  primer
ttagtgtccttcgtggctgtagt

SEQ ID NO: 5315 - protein, 207 aa, Artificial sequence
  consensus sequence
  Variant (2)..(3): Xaa in position 2 to 3 is any amino acid
  Variant (5)..(5): Xaa in position 5 is any amino acid
  Variant (7)..(7): Xaa in position 7 is any amino acid
  Variant (9)..(13): Xaa in position 9 to 13 is any amino acid
  Variant (14)..(14): Xaa in position 14 is any or no amino acid
  Variant (16)..(17): Xaa in position 16 to 17 is any amino acid
  Variant (19)..(25): Xaa in position 19 to 25 is any amino acid
  Variant (28)..(28): Xaa in position 28 is any amino acid
  Variant (32)..(33): Xaa in position 32 to 33 is any amino acid
  Variant (36)..(37): Xaa in position 36 to 37 is any amino acid
  Variant (39)..(40): Xaa in position 39 to 40 is any amino acid
  Variant (41)..(41): Xaa in position 41 is any or no amino acid
  Variant (43)..(44): Xaa in position 43 to 44 is any amino acid
  Variant (46)..(50): Xaa in position 46 to 50 is any amino acid
  Variant (51)..(52): Xaa in position 51 to 52 is any or no amino acid
  Variant (54)..(80): Xaa in position 54 to 80 is any amino acid
  Variant (81)..(85): Xaa in position 81 to 85 is any or no amino acid
  Variant (88)..(88): Xaa in position 88 is any amino acid
  Variant (91)..(92): Xaa in position 91 to 92 is any amino acid
  Variant (94)..(96): Xaa in position 94 to 96 is any amino acid
  Variant (98)..(100): Xaa in position 98 to 100 is any amino acid
  Variant (102)..(117): Xaa in position 102 to 117 is any amino acid
  Variant (118)..(126): Xaa in position 118 to 126 is any or no amino acid
  Variant (129)..(130): Xaa in position 129 to 130 is any amino acid
  Variant (133)..(134): Xaa in position 133 to 134 is any amino acid
  Variant (137)..(142): Xaa in position 137 to 142 is any amino acid
  Variant (144)..(148): Xaa in position 144 to 148 is any amino acid
  Variant (149)..(150): Xaa in position 149 to 150 is any or no amino acid
  Variant (152)..(152): Xaa in position 152 is any amino acid
  Variant (155)..(185): Xaa in position 155 to 185 is any amino acid
  Variant (186)..(195): Xaa in position 186 to 195 is any or no amino acid
  Variant (197)..(198): Xaa in position 197 to 198 is any amino acid
  Variant (200)..(206): Xaa in position 200 to 206 is any amino acid
AXXGXLXAXXXXXXDXXGXXXXXXXTAXGGGXXRDXXLXXXPXXWXXXXXXXYXXXXXXXXXXXXXXXXXXXXXXXXXXXXXXXXDAXGLXXFXXXGXXXAXXXXXXXXXXXXXXXXXXXXXXXXXTGXXGGXXRDXXXXXXPXXXXXXXEXYAXXXXXXXXXXXXXXXXXXXXXXXXXXXXXXXXXXXXXXXXXRXXAXXXXXXXP

SEQ ID NO: 5316 - protein, 22 aa, Artificial sequence
  protein pattern
  Variant (2)..(2): Xaa in position 2 is any or no amino acid
  Variant (4)..(5): Xaa in position 4 to 5 is any amino acid
  Variant (8)..(13): Xaa in position 8 to 13 is any amino acid
  Variant (15)..(15): Xaa in position 15 is any amino acid
  Variant (16)..(16): Xaa in position 16 is Ala, Ile, Leu or Val
  Variant (17)..(17): Xaa in position 17 is Phe, Ile or Leu
  Variant (18)..(19): Xaa in position 18 to 19 is any amino acid
  Variant (20)..(20): Xaa in position 20 is Asp, Glu, Gly or Asn
  Variant (21)..(21): Xaa in position 21 is Phe, Ile, Leu or Val
GXGXXRDXXXXXXPXXXXXXXY

SEQ ID NO: 5317 - protein, 29 aa, Artificial sequence
  protein pattern
  Variant (2)..(2): Xaa in position 2 is any amino acid
  Variant (3)..(3): Xaa in position 3 is Phe, Ile or Val
  Variant (5)..(7): Xaa in position 5 to 7 is any amino acid
  Variant (8)..(8): Xaa in position 8 is Phe, Ile, Leu or Val
  Variant (9)..(9): Xaa in position 9 is Ala, Gly or Ser
  Variant (10)..(11): Xaa in position 10 to 11 is any amino acid
  Variant (12)..(12): Xaa in position 12 is Pro or Thr
  Variant (13)..(13): Xaa in position 13 is Ala, Gly or Ser
  Variant (14)..(14): Xaa in position 14 is any amino acid
  Variant (18)..(18): Xaa in position 18 is any amino acid
  Variant (19)..(19): Xaa in position 19 is Phe, Ile, Leu, Met or Val
  Variant (22)..(22): Xaa in position 22 is any amino acid
  Variant (23)..(23): Xaa in position 23 is any or no amino acid
  Variant (25)..(26): Xaa in position 25 to 26 is any amino acid
  Variant (27)..(28): Xaa in position 27 to 28 is any or no amino acid
DXXGXXXXXXXXXXGGGXXRDXXLXXXXP

SEQ ID NO: 5318 - protein, 16 aa, Artificial sequence
  protein pattern
  Variant (2)..(2): Xaa in position 2 is any amino acid
  Variant (3)..(3): Xaa in position 3 is any or no amino acid
  Variant (6)..(6): Xaa in position 6 is Ala, Gly, Ile or Val
  Variant (7)..(7): Xaa in position 7 is Ala, Ile, Leu or Val
  Variant (8)..(8): Xaa in position 8 is Phe or Tyr
  Variant (9)..(9): Xaa in position 9 is Ala, Cys, Ser, Thr or Val
  Variant (10)..(11): Xaa in position 10 to 11 is any amino acid
  Variant (12)..(12): Xaa in position 12 is Gly or Ser
  Variant (13)..(13): Xaa in position 13 is Ala, Cys, Gly, Ser, Thr or Val
  Variant (14)..(15): Xaa in position 14 to 15 is any amino acid
  Variant (16)..(16): Xaa in position 16 is Ala, Gly, Ser or Thr
DXXGLXXXXXXXXXXX

SEQ ID NO: 5319 - DNA, 2097 bp, Escherichia coli
  CDS (1)..(2097): transl_table=11
atgaaaaaaagacatctgcttagcttactggcgctgggcattagcacagcttgctacggcgaaacatatcctgcgcccattggtccgtcgcagtcggatttcggtggcgtaggattattacaaacgcccaccgcgcgtatggcacgggaaggggagttgagtctgaactatcgcgataacgatcagtaccgttattactcagcttcagtgcaactcttcccgtggctggaaacaacgctgcgctacaccgacgtgcgcacccggcagtacagcagcgtcgaagcgttctctggcgatcaaacgtataaagataaagccttcgatctcaaactgcgtttgtgggaagagagttactggctgccgcaagtggcggttggtgcgcgggatatcggcggtacggggctgtttgatgcggaatatcttgttgccagcaaagcctgggggccgttcgattttacgctcggcctgggctgggggtatttgggcaccagcggtaatgtgaaaaatccgctctgttcagccagtgataaatattgctatcgcgataacagctacaaacaggcgggatctatcgacggtagccagatgttccacggtcctgcctcactgtttggcggcgtggaataccagacgccctggcaaccgctgcgcctgaaactggagtatgaaggcaataattatcagcaggattttgccgggaagctggagcaaaaaagtaagtttaacgtcggtgcgatttatcgcgttaccgattgggccgacgttaaccttagctatgaacgtggcaacacctttatgtttggcgttacgttgcgcaccaactttaacgatctgcgcccgtcttacaacgataacgcccgcccgcaatatcaaccgcagccgcaggatgccattttgcagcattcggtggtggcgaatcagttaacgctgttgaaatacaatgccggacttgccgatccacagatccaggcgaaaggcgatacgctgtatgttaccggcgagcaggtgaaatatcgtgattcgcgcgaagggatcatccgtgcgaatcggatcgtgatgaacgatctgccggatgggatcaaaacgatccgcattacggaaaatcgccttaacatgccgcaggtgacgacggaaaccgatgtcgccagcctgaaaaatcatctcgccggagagccgttgggccacgaaacgacgctggcgcaaaaacgcgtcgagccagtggttccgcagtccaccgagcagggctggtatatcgacaaatcacgctttgatttccatatcgatccggtgctgaaccagtcggtcggtggcccggaaaacttttacatgtatcagctgggcgtgatgggaacggcagatttgtggctgacggaccatctgctgaccaccggcagcctgtttgcaaatcttgccaacaactacgacaagtttaactacactaatcctccgcaggactcgcacttaccgcgcgtgcgtacccatgtgcgcgagtatgtgcagaacgatgtctatgtgaataacctgcaagccaactacttccagcatctgggcaacggcttctacggtcaggtctacggtggttatctcgaaaccatgtttggcggtgcgggggcagaagtgttgtatcgcccgctggacagcaactgggcgtttggtctggatgccaactacgttaaacagcgcgactggcgtagtgcaaaagatatgatgaaattcaccgactacagcgtgaaaaccggacatctgaccgcctactggacgccatctttcgctcaggatgtgttagttaaagccagcgtcgggcagtatctggcaggggataaaggcggcacgctggagatcgccaaacgctttgatagcggcgtggtggtgggtggctatgccacgatcactaatgtttcgaaagaggagtacggcgaaggggacttcaccaaaggcgtgtatgtctcggtaccgttggatctcttctcgtctggcccgacacgcagccgtgcggcgattggctggacgccgctgacgcgtgacggtggtcagcaacttgggcgtaagttccagttgtatgacatgaccagcgaccgtagcgtcaatttccgctaa

SEQ ID NO: 5320 - protein, 698 aa, Escherichia coli
MKKRHLLSLLALGISTACYGETYPAPIGPSQSDFGGVGLLQTPTARMAREGELSLNYRDNDQYRYYSASVQLFPWLETTLRYTDVRTRQYSSVEAFSGDQTYKDKAFDLKLRLWEESYWLPQVAVGARDIGGTGLFDAEYLVASKAWGPFDFTLGLGWGYLGTSGNVKNPLCSASDKYCYRDNSYKQAGSIDGSQMFHGPASLFGGVEYQTPWQPLRLKLEYEGNNYQQDFAGKLEQKSKFNVGAIYRVTDWADVNLSYERGNTFMFGVTLRTNFNDLRPSYNDNARPQYQPQPQDAILQHSVVANQLTLLKYNAGLADPQIQAKGDTLYVTGEQVKYRDSREGIIRANRIVMNDLPDGIKTIRITENRLNMPQVTTETDVASLKNHLAGEPLGHETTLAQKRVEPVVPQSTEQGWYIDKSRFDFHIDPVLNQSVGGPENFYMYQLGVMGTADLWLTDHLLTTGSLFANLANNYDKFNYTNPPQDSHLPRVRTHVREYVQNDVYVNNLQANYFQHLGNGFYGQVYGGYLETMFGGAGAEVLYRPLDSNWAFGLDANYVKQRDWRSAKDMMKFTDYSVKTGHLTAYWTPSFAQDVLVKASVGQYLAGDKGGTLEIAKRFDSGVVVGGYATITNVSKEEYGEGDFTKGVYVSVPLDLFSSGPTRSRAAIGWTPLTRDGGQQLGRKFQLYDMTSDRSVNFR

SEQ ID NO: 5321 - DNA, 2097 bp, Escherichia coli
  CDS (1)..(2097): transl_table=11
atgaagaagaattcttatcttttaagctgcctggccattgccgtctccagtgcctgtcatgctgaagtattaacctacccggatccgctgggttcgtcgcaatcggactttggcggcacaggattgttgcagatgccaaatgcgcgcatcgcaccggaaggtgaattcagcgtcaactaccgggataacgatcaataccgtttctactccacctccgtggcgctgttcccatggctggaaggcaccattcgttatacggatgtgcgcacacgtaaatatagccagtgggaagatttcagcggcgatcagtcatacaaagacaaatcattcgattttaaacttcgcctgtgggaagaaggttactggctaccgcaagtggcgtttggtaaacgtgatattgctggtacgggtctgtttgacggtgagtatctggtggccagcaagcaagcggggccatttgatttcaccctcgggatggcatggggctacgccggtaatgcgggcaatattaccaacccgttttgccgggtgagcgataaatattgtcatcgcgcagagtctcacgatgcgggcgatatcagctttagcgatatctttcgtggcccggcttccatctttggcggcattgagtatcaaacgccgtggaatcccctgcgtctgaaactcgaatacgacggcaacaattaccagaatgatttcgctggcaaactgcctcaggcaagccatttcaacgtcggtgcagtttatcgcgctgccagctgggcagacctcaacctgagttatgaacgcggtaacacgttgatgtttggtttcactttacggaccaatttcaacgatctgcgccctgccctgcgcgatacgccaaaaccggcatatcaacctgcgcctgaatctgaaggattgcagtacaccacggtagcaaaccaacttaccgccctgaagtataacgcgggctttgacgcgccagaaattcagctacgcgataagacgctgtatatgtctggtcagcaatacaaataccgtgactctcgtgaagcggtcgatcgtgccaaccggattctggtgaataacctgccgcaaggcgttgagaagattagcgtgacgcaaaagcgcgagcatatggcgatggtgactaccgaaaccgacgtagccagcctgcgcaaacagctggcaggtacagcgcctggtcaatcagagccactgcaacaacaacgtgttgaagctgaagatctttctgcctttggtcggggctaccgtattcgtgaagatcgctttagctactctttcaacccaacactttcacagtcgctgggcggcccggaagatttctatatgttccagctggggctgatgtccagcgcccgctactggtttaccgaccacctgctgcttgatggcggtattttcaccaatatttacaacaactacgacaagtttaagtcttcgctgttgcccgcggactctaccctgccccgcgtgcgcacgcatatccgtgattacgttcgcaatgacgtttatctcaacaacttgcaagcgaattactttgccgacttaggcaatggtttctatggccaggtgtatggcggttatctggaaacgatgtatgccggtgtcggttccgagctgctttatcgcccgctagatgccagctgggcgctgggtgtggacgttaactacgtgaagcagcgtgactgggacaacatgatgcgcttcaccgattattccacgccaactggtttcgtgacggcttactggaacccgccgacgctcaatggcgtactgatgaaacttagcgttgggcaatatctggcaaaagataaaggggcaacgatcgacgtcgccaaacgctttgacagcggcgtggcggtaggggtatgggcggcaatcagtaacgtatctaaagatgactacggcgaaggcggctttagtaaaggtttttatatctcgattccgttcgacttgatgaccattggacctaaccgcaaccgcgcggtggtttcgtggacaccattgacgcgtgatggtggacaaatgctgtcacgcaaataccagctctatccaatgacggcagagcgagaagtaccggttggacaataa

SEQ ID NO: 5322 - protein, 698 aa, Escherichia coli
MKKNSYLLSCLAIAVSSACHAEVLTYPDPLGSSQSDFGGTGLLQMPNARIAPEGEFSVNYRDNDQYRFYSTSVALFPWLEGTIRYTDVRTRKYSQWEDFSGDQSYKDKSFDFKLRLWEEGYWLPQVAFGKRDIAGTGLFDGEYLVASKQAGPFDFTLGMAWGYAGNAGNITNPFCRVSDKYCHRAESHDAGDISFSDIFRGPASIFGGIEYQTPWNPLRLKLEYDGNNYQNDFAGKLPQASHFNVGAVYRAASWADLNLSYERGNTLMFGFTLRTNFNDLRPALRDTPKPAYQPAPESEGLQYTTVANQLTALKYNAGFDAPEIQLRDKTLYMSGQQYKYRDSREAVDRANRILVNNLPQGVEKISVTQKREHMAMVTTETDVASLRKQLAGTAPGQSEPLQQQRVEAEDLSAFGRGYRIREDRFSYSFNPTLSQSLGGPEDFYMFQLGLMSSARYWFTDHLLLDGGIFTNIYNNYDKFKSSLLPADSTLPRVRTHIRDYVRNDVYLNNLQANYFADLGNGFYGQVYGGYLETMYAGVGSELLYRPLDASWALGVDVNYVKQRDWDNMMRFTDYSTPTGFVTAYWNPPTLNGVLMKLSVGQYLAKDKGATIDVAKRFDSGVAVGVWAAISNVSKDDYGEGGFSKGFYISIPFDLMTIGPNRNRAVVSWTPLTRDGGQMLSRKYQLYPMTAEREVPVGQ

SEQ ID NO: 5323 - DNA, 2097 bp, Escherichia coli
  CDS (1)..(2097): transl_table=11
atgaaaaaaagacatctgcttagcttactggcgctgggcattagcacagcttgctacggcgaaacatatcctgcgcccattggtccgtcgcagtcggatttcggtggcgtaggattattacaaacgcccacggctcgcatggcgcgggaaggggagttgagtctgaactatcgcgataacgatcagtaccgttattactcagcttcagtgcaactcttcccgtggctggaaacaacgctgcgctacaccgacgtgcgcacccggcagtacagcagcgtcgaagcgttctctggcgatcaaacgtataaagataaagccttcgatctcaaactgcgtttgtgggaagagagttactggctgccgcaagtggcggttggtgcgcgggatatcggcggtacggggctgtttgatgcggaatatcttgttgccagcaaagcctgggggccgttcgattttacgcttggcctgggctggggatatttgggcacaagcggtaatgtgaaaaatccgctctgttcagccagtgataaatattgctatcgcgataacagctacaaacaggcgggatctatcgacggtagccagatgttccacggtcctgcctcactgtttggcggcgtggaataccagacgccctggcaaccgctgcgcctgaaactggagtatgaaggcaataattatcagcaggattttgccggtaagctggagcaaaaaagtaagtttaacgtcggggcgatttatcgcgttaccgattgggccgacgttaaccttagctatgaacgtgccaacacctttatgtttggcgtcacgctgcgcaccaactttaacgatctgcgcccgtcttacaacgataacgcccgcccgcaatatcaaccgcagccgcaggatgccattttgcagcattcggtggtggcgaatcagttaacgctgttgaaatacaatgccggacttgccgatccgcagatccaggcgaaaggcgatacgctgtatgttaccggcgagcaggtgaaatatcgtgattcgcgcgaagggatcgttcgtgctaatcggatcgtgatgaatgatctgccggatgggatcaagacgatccgcgttacggaaaatcgccttaacatgccgcaggtgacgacggaaacggatgtcgccagcctgaaaaatcatctcgccggagagccgttgggccacgaaacgaagctggcgcaaaaacgcgtcgagccagtggttccgaagtccaccgagcagggctggtatatcgacaaatcgcgctttgatttccatatcgatccggtgctgaaccagtcggtcggtggcccggaaaacttttacatgtatcagctgggcgtgatgggaacggcagatttgtggctgacggaccatctgctgaccaccggcagcctgtttgcaaatcttgccaacaactacgacaagtttaactacaccaatccgccgcaggactcgcacttaccgcgcgtgcgtacccatgtgcgcgagtatgtgcagaacgatgtctatgtgaataacctgcaagccaactacttccagcatctgggcaacggcttctacggtcaggtctacggaggttatctcgaaaccatgtttggcggtgcgggggcagaagtgttgtatcgcccgctggacagcaactgggcgtttggtctggatgccaactacgttaaacagcgcgactggcgtagtgcaaaggatatgatgaaattcaccgactacagcgtgaaaaccggacatctgaccgcctactggacgccatctttcgctcaggatgtgttagttaaagccagcgtcgggcagtatctggcaggggataaaggcggcacgctggagatcgctaaacgctttgacagcggcgtggtggtgggcggctatgccacgatcaccaacgtttcgaaagaggagtacggcgaaggggacttcaccaaaggcgtgtatgtctctgtaccgttggatctcttctcgtctggcccgacacgcagccgtgcggcgattggctggacgccgctgacgcgtgacggtggtcagcaacttgggcgtaagttccagttgtatgacatgaccagcgaccgtagcgtcaatttccgctaa

SEQ ID NO: 5324 - protein, 698 aa, Escherichia coli
MKKRHLLSLLALGISTACYGETYPAPIGPSQSDFGGVGLLQTPTARMAREGELSLNYRDNDQYRYYSASVQLFPWLETTLRYTDVRTRQYSSVEAFSGDQTYKDKAFDLKLRLWEESYWLPQVAVGARDIGGTGLFDAEYLVASKAWGPFDFTLGLGWGYLGTSGNVKNPLCSASDKYCYRDNSYKQAGSIDGSQMFHGPASLFGGVEYQTPWQPLRLKLEYEGNNYQQDFAGKLEQKSKFNVGAIYRVTDWADVNLSYERANTFMFGVTLRTNFNDLRPSYNDNARPQYQPQPQDAILQHSVVANQLTLLKYNAGLADPQIQAKGDTLYVTGEQVKYRDSREGIVRANRIVMNDLPDGIKTIRVTENRLNMPQVTTETDVASLKNHLAGEPLGHETKLAQKRVEPVVPKSTEQGWYIDKSRFDFHIDPVLNQSVGGPENFYMYQLGVMGTADLWLTDHLLTTGSLFANLANNYDKFNYTNPPQDSHLPRVRTHVREYVQNDVYVNNLQANYFQHLGNGFYGQVYGGYLETMFGGAGAEVLYRPLDSNWAFGLDANYVKQRDWRSAKDMMKFTDYSVKTGHLTAYWTPSFAQDVLVKASVGQYLAGDKGGTLEIAKRFDSGVVVGGYATITNVSKEEYGEGDFTKGVYVSVPLDLFSSGPTRSRAAIGWTPLTRDGGQQLGRKFQLYDMTSDRSVNFR

SEQ ID NO: 5325 - DNA, 2097 bp, Shigella flexneri
  CDS (1)..(2097): transl_table=11
atgaagaagaattcttatcttttaagctgcctggccattgccgtctccagtgcctgtcatgctgaagtattaacctacccggatccgctgggttcgtcgcaatcagactttggcggcacaggattgttgcagatgccaaatgcgcgcatcgcaccggaaggtgaattcagcgtcaactaccgggataacgatcaataccggttctactccacctccgtggcgctgttcccatggctggaaggcaccattcgttatacggatgtgcgcacacgcaaatatagccagtgggaagatttcagcggcgatcagtcatacaaagacaaatcattcgattttaaacttcgcctgtgggaagaaggttactggctaccgcaagtggcgtttggtaaacgtgatattgctggtacgggtttgtttgacggtgaatatctggtggccagcaagcaagcggggccatttgatttcaccctcgggatggcatggggctacgccggtaatgcgggcaatattaccaacccgttttgccgggtgagcgataaatattgtcatcgcgcagagtctcacgatgcgggcgatatcagctttagcgatatctttcgtggcccggcttccatctttggcggcattgagtatcaaacgccgtggaatcccctgcgtctgaaactcgaatacgacggcaacaattaccagaatgatttcgctggcaaactgcctcaggcaagccatttcaacgtcggtgcagtttatcgcgctgccagctgggcagacctcaacctcagttatgaacgcggaaacacgttgatgtttggtttcactttacggaccaatttcaacgatctgcgccctgccctacgcgatacgccaaaaccggcctggcagcctgcgccagagtctgaaggtttgcagtacaccacggtagcaaaccaacttaccgccctgaagtataacgcgggctttgacgcgccagaaattcagctacgcgataagacgctgtatatgtctggtcagcaatacaaataccgtgactctcgcgaagcggtcgatcgtgccaaccggattctggtgaataacctgccgcaaggcgttgagaagattagcgtgacgcaaaagcgcgagcatatggcgatggtgactaccgaaaccgacgtagccagcctgcgcaaacagctggccggcacagcgcctggtaaatcagagcaactgcaacaacaacgtgttgaagcagaagatctttctgcctttggtcggtgctaccgtattcgtgaagatcgctttagctactctttcaacccaacactttcacagtcgctgggcggcccggaagatttctatatgttccagctggggctgatgtccagcgcccgctactggtttaccgaccacctgctgcttgatgacggtattttcaccaatatttacaacaactacgacaagtttaagtcttcactgttacccgcggactctaccctgccccgcgtgcgcacgcatatccgtgattacgttcgcaatgacgtttatctcaacaacttgcaagcgaattactttgccgacttaggcaatggtttctatggccaggtgtatggcggttatctggaaacgatgtatgccggtgtcggttccgagcttctttatcgcccgctagatgccagctgggcgctgggtgtggacgttaactacgtgaagcagcgtgactgggacaacatgatgcgcttcaccgattattccacgcccacaggtttcgtgacggcttactggaacccgccgacgctcaatggcgtactgatgaaacttagcgttgggcaatatctggcaaaagataaaggcgcaacgatcgacgtcgccaaactctttgacagcggcgtggcggtaggggtatgggcggcaatcagtaacgtatctaaagatgactacggcgaaggcggctttagtaaaggtttttatatctcgattccgttcgacttgatgaccattggacctaaccgcaaccgcgcggtggtttcgtggacaccattgacgcgtgatggtggacaaatgctgtcacgcaaataccagctcgatccaatgacggcagagcgagaagtaccggttggacaataa

SEQ ID NO: 5326 - protein, 698 aa, Shigella flexneri
MKKNSYLLSCLAIAVSSACHAEVLTYPDPLGSSQSDFGGTGLLQMPNARIAPEGEFSVNYRDNDQYRFYSTSVALFPWLEGTIRYTDVRTRKYSQWEDFSGDQSYKDKSFDFKLRLWEEGYWLPQVAFGKRDIAGTGLFDGEYLVASKQAGPFDFTLGMAWGYAGNAGNITNPFCRVSDKYCHRAESHDAGDISFSDIFRGPASIFGGIEYQTPWNPLRLKLEYDGNNYQNDFAGKLPQASHFNVGAVYRAASWADLNLSYERGNTLMFGFTLRTNFNDLRPALRDTPKPAWQPAPESEGLQYTTVANQLTALKYNAGFDAPEIQLRDKTLYMSGQQYKYRDSREAVDRANRILVNNLPQGVEKISVTQKREHMAMVTTETDVASLRKQLAGTAPGKSEQLQQQRVEAEDLSAFGRCYRIREDRFSYSFNPTLSQSLGGPEDFYMFQLGLMSSARYWFTDHLLLDDGIFTNIYNNYDKFKSSLLPADSTLPRVRTHIRDYVRNDVYLNNLQANYFADLGNGFYGQVYGGYLETMYAGVGSELLYRPLDASWALGVDVNYVKQRDWDNMMRFTDYSTPTGFVTAYWNPPTLNGVLMKLSVGQYLAKDKGATIDVAKLFDSGVAVGVWAAISNVSKDDYGEGGFSKGFYISIPFDLMTIGPNRNRAVVSWTPLTRDGGQMLSRKYQLDPMTAEREVPVGQ

SEQ ID NO: 5327 - DNA, 2097 bp, Enterobacter cloacae
  CDS (1)..(2097): transl_table=11
ctgatgaacaaactttttttactgagcggccttgctctggcgatctcttctgcctgccacgcggagctgcgtacctggcccgatccgaccggaccgtcacagtccgattttggcggcaccggcctgatgcaaatgcccgacgcgcgctttggccgggaaggggaattcagcgtaaactaccgcgataacaaccagtaccgtttttactcctcttcggtcgtgctcttcccgtggctggaagggacaattcgctataccgacgtccgcacccgtaaatacagcagcaacgaggatttcagcggcgatcaaagctacaaggataagtcgttcgactttaaagttcgtctgtgggaagaggactatagcctgccgcaggtggcgctcggcaagcgtgatattgcaggcaccggcctgttcgatggtgaatatctggttgccagtaaaatggccggaccggtcgattttacctttggaatagcctggggatatcccggtaatagcgacaacgtgggtaacccgctttgccatgacaacaataagtattgcacccgcggcgagtcgcatgatgccggagatatcagctttagcgatatgtttcgtggtccggcgtctctgtttggcggcctccagtatcagacgccctggcagcccctgcgcctgaagcttgagtatgacggcaacaattatgccgatgattttgccggctccattaagcagtcgagccatattaacgtgggggcggtctatcgcgttgccgactgggccgatctcaacctcagctacgagcgcggcaatacgctgatgtttggcttcaccctgcggaccaactttaacgacctgcgccccgcgctgcgtgataacccgaaaccggcctggcaaccggcaccggcaggcgagacgctggactatacctctgcggcgaaccagctcaccgcgcttaagtacaacgcaggcttcgatgcgccggagatccttcagcacggcaataccttatacatgaccggcgaacagtatcgctatcgcgatccgcgcgaagcggtggatcgtgccaaccgtattctgatcaataacctgcccgacggggtcgacacgatcgctatcacccagcagcgtgatcatctgccgctcgtcacgacgcaaaccgatgtcgccagcctgcgcaaacagttggcggggcagccgctcggccaggaggaggcgctcaggcagcagcgcgtcgagcctgtggataccacagcattcgggcgtggctaccgtattcgcgccgatcgcttcagctacagcgttaaaccgacgctggcgcagtcgctgggcggtccggaagatttctatatgttccaggtgggggtgatggccagcgccagctactggctgaccgatcgtctgctgctcgacggcggcgtgttcgccaacctctataacaactacgacaagttcaaatcctcgctacttcccgctgactccagcctgccgcgcgtcagaacccatattcgcgattatgtcagcaatgacgtctacatcaacaacttacaagccaactatgtcgatgcgctggggaacggcttctatgcccagatttatggcggctacctcgaaaccatgtacggcggcgtgggagcagaggcgctctggcgcccgctggatagcgactgggcgctgggcgtggatgcgaattacgtcaagcagcgcgactgggacgacatgatgcgcttcaccgactacagcgtgccaaccggatttatcaccgcctactggaacccggcgaagctcaacagtgtgctaatgaagctgagcgtcgggcagtacctggcgaaggataaaggcgccaccctcgacgtcgcgaagcgattcgacagcggcgtgacggtaggcgtctgggcggcgctgaccaacgtctcgaaagaggattatggcgaaggtggctttagcaaaggcttctacatctcgatcccgcttgatctgatgacgatcggcccaaatcgcaaccgggcggtggtctcttggacgcctctcacgcgtgatggcggccagatgttaggccgtaaatatcagctctatgacatgacgtcagaacgcgaaaccccggtagggcagtag

SEQ ID NO: 5328 - protein, 698 aa, Enterobacter cloacae
LMNKLFLLSGLALAISSACHAELRTWPDPTGPSQSDFGGTGLMQMPDARFGREGEFSVNYRDNNQYRFYSSSVVLFPWLEGTIRYTDVRTRKYSSNEDFSGDQSYKDKSFDFKVRLWEEDYSLPQVALGKRDIAGTGLFDGEYLVASKMAGPVDFTFGIAWGYPGNSDNVGNPLCHDNNKYCTRGESHDAGDISFSDMFRGPASLFGGLQYQTPWQPLRLKLEYDGNNYADDFAGSIKQSSHINVGAVYRVADWADLNLSYERGNTLMFGFTLRTNFNDLRPALRDNPKPAWQPAPAGETLDYTSAANQLTALKYNAGFDAPEILQHGNTLYMTGEQYRYRDPREAVDRANRILINNLPDGVDTIAITQQRDHLPLVTTQTDVASLRKQLAGQPLGQEEALRQQRVEPVDTTAFGRGYRIRADRFSYSVKPTLAQSLGGPEDFYMFQVGVMASASYWLTDRLLLDGGVFANLYNNYDKFKSSLLPADSSLPRVRTHIRDYVSNDVYINNLQANYVDALGNGFYAQIYGGYLETMYGGVGAEALWRPLDSDWALGVDANYVKQRDWDDMMRFTDYSVPTGFITAYWNPAKLNSVLMKLSVGQYLAKDKGATLDVAKRFDSGVTVGVWAALTNVSKEDYGEGGFSKGFYISIPLDLMTIGPNRNRAVVSWTPLTRDGGQMLGRKYQLYDMTSERETPVGQ

SEQ ID NO: 5329 - DNA, 2097 bp, Escherichia coli O157:H7 EDL933
  CDS (1)..(2097): transl_table=11
  misc_feature (679)..(679): r is g or a
atgaagaagaattcttatcttttaagctgcctggccattgccgtctccagtgcctgtcatgctgaagtattaacctacccggatccgctgggttcgtcgcaatcggactttggcggcacaggattgttgcagatgccaaatgcgcgcatcgcaccggaaggtgaattcagcgtcaactaccgggataacgatcaataccgtttctactccacctccgtggcgctgttcccatggctggaaggcaccattcgttatacggatgtgcgcacacgtaaatatagccagtgggaagatttcagcggcgatcagtcatacaaagacaaatcattcgattttaaacttcgcctgtgggaagaaggttactggctaccgcaagtggcgtttggtaaacgtgatattgctggtacgggtctgtttgacggtgagtatctggtggccagcaagcaagcggggccatttgatttcaccctcgggatggcatggggctacgccggtaatgcgggcaatattaccaacccgttttgccgggtgagcgataaatattgtcatcgcgcagagtctcacgatgcgggcgatatcagctttagcgatatctttcgtggcccggcttccatctttggcggcattgagtatcaaacgccgtggaatcccctgcgtctgaaactcgaatacgacggcracaattaccagaatgatttcgctggcaaactgcctcaggcaagccatttcaacgtcggtgcagtttatcgcgctgccagctgggcagacctcaacctgagttatgaacgcggtaacacgttgatgtttggtttcactttacggaccaatttcaacgatctgcgccctgccctgcgcgatacgccaaaaccggcatatcaacctgcgcctgaatctgaaggattgcagtacaccacggtagcaaaccaacttaccgccctgaagtataacgcgggctttgacgcgccagaaattcagctacgcgataagacgctgtatatgtctggtcagcaatacaaataccgtgactctcgtgaagcggtcgatcgtgccaaccggattctggtgaataacctgccgcaaggcgttgagaagattagcgtgacgcaaaagcgcgagcatatggcgatggtgactaccgaaaccgacgtagccagcctgcgcaaacagctggcaggtacagcgcctggtcaatcagagccactgcaacaacaacgtgttgaagctgaagatctttctgcctttggtcggggctaccgtattcgtgaagatcgctttagctactctttcaacccaacactttcacagtcgctgggcggcccggaagatttctatatgttccagctggggctgatgtccagcgcccgctactggtttaccgaccacctgctgcttgatggcggtattttcaccaatatttacaacaactacgacaagtttaagtcttcgctgttgcccgcggactctaccctgccccgcgtgcgcacgcatatccgtgattacgttcgcaatgacgtttatctcaacaacttgcaagcgaattactttgccgacttaggcaatggtttctatggccaggtgtatggcggttatctggaaacgatgtatgccggtgtcggttccgagctgctttatcgcccgctagatgccagctgggcgctgggtgtggacgttaactacgtgaagcagcgtgactgggacaacatgatgcgcttcaccgattattccacgccaactggtttcgtgacggcttactggaacccgccgacgctcaatggcgtactgatgaaacttagcgttgggcaatatctggcaaaagataaaggggcaacgatcgacgtcgccaaacgctttgacagcggcgtggcggtaggggtatgggcggcaatcagtaacgtatctaaagatgactacggcgaaggcggctttagtaaaggtttttatatctcgattccgttcgacttgatgaccattggacctaaccgcaaccgcgcggtggtttcgtggacaccattgacgcgtgatggtggacaaatgctgtcacgcaaataccagctctatccaatgacggcagagcgagaagtaccggttggacaataa

SEQ ID NO: 5330 - protein, 698 aa, Escherichia coli O157:H7 EDL933
MKKNSYLLSCLAIAVSSACHAEVLTYPDPLGSSQSDFGGTGLLQMPNARIAPEGEFSVNYRDNDQYRFYSTSVALFPWLEGTIRYTDVRTRKYSQWEDFSGDQSYKDKSFDFKLRLWEEGYWLPQVAFGKRDIAGTGLFDGEYLVASKQAGPFDFTLGMAWGYAGNAGNITNPFCRVSDKYCHRAESHDAGDISFSDIFRGPASIFGGIEYQTPWNPLRLKLEYDGBNYQNDFAGKLPQASHFNVGAVYRAASWADLNLSYERGNTLMFGFTLRTNFNDLRPALRDTPKPAYQPAPESEGLQYTTVANQLTALKYNAGFDAPEIQLRDKTLYMSGQQYKYRDSREAVDRANRILVNNLPQGVEKISVTQKREHMAMVTTETDVASLRKQLAGTAPGQSEPLQQQRVEAEDLSAFGRGYRIREDRFSYSFNPTLSQSLGGPEDFYMFQLGLMSSARYWFTDHLLLDGGIFTNIYNNYDKFKSSLLPADSTLPRVRTHIRDYVRNDVYLNNLQANYFADLGNGFYGQVYGGYLETMYAGVGSELLYRPLDASWALGVDVNYVKQRDWDNMMRFTDYSTPTGFVTAYWNPPTLNGVLMKLSVGQYLAKDKGATIDVAKRFDSGVAVGVWAAISNVSKDDYGEGGFSKGFYISIPFDLMTIGPNRNRAVVSWTPLTRDGGQMLSRKYQLYPMTAEREVPVGQ

SEQ ID NO: 5331 - DNA, 2097 bp, Escherichia coli O157:H7 EDL933
  CDS (1)..(2097): transl_table=11
  misc_feature (580)..(580): w is a or t
  misc_feature (2024)..(2024): w is a or t
  misc_feature (2094)..(2094): y is t or c
atgaaaaaaagacatctgcttagcttactggcgctgggcattagcacagcttgctacggcgaaacatatcctgcgcccattggtccgtcgcagtcggatttcggtggcgtaggattattacaaacgcccacggctcgcatggcgcgggaaggggagttgagtctgaactatcgcgataacgatcagtaccgttattactcagcttcagtgcaactcttcccgtggctggaaacaacgctgcgctacaccgacgtgcgcacccggcagtacagcagcgtcgaagcgttctctggcgatcaaacgtataaagataaagccttcgatctcaaactgcgtttgtgggaagagagttactggctgccgcaagtggcggttggtgcgcgggatatcggcggtacggggctgtttgatgcggaatatcttgttgccagcaaagcctgggggccgttcgattttacgcttggcctgggctggggatatttgggcacaagcggtaatgtgaaaaatccgctctgttcagccagtgataaatattgctatcgcgataacagctacaaacaggcgggatctatcgacggtwgccagatgttccacggtcctgcctcactgtttggcggcgtggaataccagacgccctggcaaccgctgcgcctgaaactggagtatgaaggcaataattatcagcaggattttgccggtaagctggagcaaaaaagtaagtttaacgtcggggcgatttatcgcgttaccgattgggccgacgttaaccttagctatgaacgtgccaacacctttatgtttggcgtcacgctgcgcaccaactttaacgatctgcgcccgtcttacaacgataacgcccgcccgcaatatcaaccgcagccgcaggatgccattttgcagcattcggtggtggcgaatcagttaacgctgttgaaatacaatgccggacttgccgatccgcagatccaggcgaaaggcgatacgctgtatgttaccggcgagcaggtgaaatatcgtgattcgcgcgaagggatcgttcgtgctaatcggatcgtgatgaatgatctgccggatgggatcaagacgatccgcgttacggaaaatcgccttaacatgccgcaggtgacgacggaaacggatgtcgccagcctgaaaaatcatctcgccggagagccgttgggccacgaaacgaagctggcgcaaaaacgcgtcgagccagtggttccgaagtccaccgagcagggctggtatatcgacaaatcgcgctttgatttccatatcgatccggtgctgaaccagtcggtcggtggcccggaaaacttttacatgtatcagctgggcgtgatgggaacggcagatttgtggctgacggaccatctgctgaccaccggcagcctgtttgcaaatcttgccaacaactacgacaagtttaactacaccaatccgccgcaggactcgcacttaccgcgcgtgcgtacccatgtgcgcgagtatgtgcagaacgatgtctatgtgaataacctgcaagccaactacttccagcatctgggcaacggcttctacggtcaggtctacggaggttatctcgaaaccatgtttggcggtgcgggggcagaagtgttgtatcgcccgctggacagcaactgggcgtttggtctggatgccaactacgttaaacagcgcgactggcgtagtgcaaaggatatgatgaaattcaccgactacagcgtgaaaaccggacatctgaccgcctactggacgccatctttcgctcaggatgtgttagttaaagccagcgtcgggcagtatctggcaggggataaaggcggcacgctggagatcgctaaacgctttgacagcggcgtggtggtgggcggctatgccacgatcaccaacgtttcgaaagaggagtacggcgaaggggacttcaccaaaggcgtgtatgtctctgtaccgttggatctcttctcgtctggcccgacacgcagccgtgcggcgattggctggacgccgctgacgcgtgwcggtggtcagcaacttgggcgtaagttccagttgtatgacatgaccagcgaccgtagcgtcaatttccgytaa

SEQ ID NO: 5332 - protein, 698 aa, Escherichia coli O157:H7 EDL933
  misc_feature (194)..(194): The Xaa at location 194 stands for Cys, or Ser.
  misc_feature (675)..(675): The Xaa at location 675 stands for Asp, or Val.
MKKRHLLSLLALGISTACYGETYPAPIGPSQSDFGGVGLLQTPTARMAREGELSLNYRDNDQYRYYSASVQLFPWLETTLRYTDVRTRQYSSVEAFSGDQTYKDKAFDLKLRLWEESYWLPQVAVGARDIGGTGLFDAEYLVASKAWGPFDFTLGLGWGYLGTSGNVKNPLCSASDKYCYRDNSYKQAGSIDGXQMFHGPASLFGGVEYQTPWQPLRLKLEYEGNNYQQDFAGKLEQKSKFNVGAIYRVTDWADVNLSYERANTFMFGVTLRTNFNDLRPSYNDNARPQYQPQPQDAILQHSVVANQLTLLKYNAGLADPQIQAKGDTLYVTGEQVKYRDSREGIVRANRIVMNDLPDGIKTIRVTENRLNMPQVTTETDVASLKNHLAGEPLGHETKLAQKRVEPVVPKSTEQGWYIDKSRFDFHIDPVLNQSVGGPENFYMYQLGVMGTADLWLTDHLLTTGSLFANLANNYDKFNYTNPPQDSHLPRVRTHVREYVQNDVYVNNLQANYFQHLGNGFYGQVYGGYLETMFGGAGAEVLYRPLDSNWAFGLDANYVKQRDWRSAKDMMKFTDYSVKTGHLTAYWTPSFAQDVLVKASVGQYLAGDKGGTLEIAKRFDSGVVVGGYATITNVSKEEYGEGDFTKGVYVSVPLDLFSSGPTRSRAAIGWTPLTRXGGQQLGRKFQLYDMTSDRSVNFR

SEQ ID NO: 5333 - DNA, 2097 bp, Salmonella enterica subsp. enterica serovar Typhi str. CT18
  CDS (1)..(2097): transl_table=11
atgaaaaaaacacatctgctcagcgtgctggcgctgggtattagcgcggcctgccatgccgaaacatatccagcccctgttgggccttcacaatctgactttggcggcgtgggcctgctgcaaacgccgacagcgcgtatggcgcgtgaaggggagatgagcctgaactatcgcgataacgatcagtaccgctactactcggcttcggttcagcttttcccgtggctggaaaccacgttgcgctataccgatgtccgtacgaaaaagtacagcagcgtggaatcattctccggcgaccagacttacaaagataaagcgtttgatgtgaaactgcggttgtgggaagagagttactggatgccgcaggtggcggttggcgcgcgcgatatcggcgggacggggctgtttgatgcggaatatattgtagcgagtaaggcttgggggccatttgatttttcattaggtctcggctggggctatcttggcaccagcggcaatgtgtctaatcctttctgttcgtatagtgataaattctgttcgcgtgataacagctataaagaggccggttccgtcgacggtagcgatatgtttcacggcccggcttcgctgtttggcggcgtggaataccagaccccgtggcaaccgctacgcctgaagctggagtatgaaggcaataactatcagcaggattttgcggggaaactggaacagaagagcaagtttaacgtcggcgccatttactgcgtcaccgattgggccgacgttaacctcagctacgagcgcggcaacacctttatgtttggcgttacgctgcgcaccaatttcaacgatttacgtcccgcgtatcatgacaattcacgcccgcaataccgaccacagccgcaggatgccatcctgcaacattcggtagtggctaatcaattaacgttattgaaatataatgccggtctggcggacccgaaaatccaggtcaaaggcgatacgctatacgttaccggtgaacaggtgaagtaccgcgactcccgtgaggggatcgtgcgcgctaaccggatcgtcatgaacgatctgccggaggggatccgcacgatccgcgtgacggaaaaccgccttaatctgccgcaggtcaccactgaaaccgatgtcgccagcctgaaacgccatctggaaggcgaaccgctgggacatgaaactccgctggcgcaaaaacgcgtggagccgatcgtgccagagagtactgaacagggttggtatatcgacaagtcgcgcattgattttcatcttgatcccgtgctgaatcagtcggtaggcggcccggaaaacttctatatgtatcagttgggcgtaatgggaactgcggatctgtgggtcacggatcatctgctcaccacgggcagcgtgtttgccaatatcgccaacaactacgacaaatttaactacaccaatccaccgaaggactcgcatctgccgcgggtgcgtacgcatgtccgtgagtatgtgcagaatgatgtttatgtgaataacctacaggccaactacttccagtattttggcaatggtttctatgggcaggtctatggcggttatctggagaccatgtttggcggtgccggggcggaagtcctgtatcgcccggtagacagcaattgggcgtttggtctggatgccaactacgtgaaacagcgtgactggcgtagcgcgcaggatatgatgaagtttaccgattacagcgtgaagaccggacatttgaccgcatactggacgccgtcgttcgcccaggatgtgctggtgaaagccagcgttggtcagtatctggcgggcgataaaggcggtacgctggagatcgccaaacgcttcgatagcggcgtcgttgtcggcggttacgcgacgattaccgatgcgtcgccggatgaatatggggaaggggattttaccaaaggcgtatatgtttccgtaccgctggatctcttctcgtccggcccaacccgaagtcgtgcggcaattggctggacgccgctgacgcgtgacggtggtcaacagcttggccgtaagtttggcctgtatgatatgaccagtgacaggagcgtaaatttccgttaa

SEQ ID NO: 5334 - protein, 698 aa, Salmonella enterica subsp. enterica serovar Typhi str. CT18
MKKTHLLSVLALGISAACHAETYPAPVGPSQSDFGGVGLLQTPTARMAREGEMSLNYRDNDQYRYYSASVQLFPWLETTLRYTDVRTKKYSSVESFSGDQTYKDKAFDVKLRLWEESYWMPQVAVGARDIGGTGLFDAEYIVASKAWGPFDFSLGLGWGYLGTSGNVSNPFCSYSDKFCSRDNSYKEAGSVDGSDMFHGPASLFGGVEYQTPWQPLRLKLEYEGNNYQQDFAGKLEQKSKFNVGAIYCVTDWADVNLSYERGNTFMFGVTLRTNFNDLRPAYHDNSRPQYRPQPQDAILQHSVVANQLTLLKYNAGLADPKIQVKGDTLYVTGEQVKYRDSREGIVRANRIVMNDLPEGIRTIRVTENRLNLPQVTTETDVASLKRHLEGEPLGHETPLAQKRVEPIVPESTEQGWYIDKSRIDFHLDPVLNQSVGGPENFYMYQLGVMGTADLWVTDHLLTTGSVFANIANNYDKFNYTNPPKDSHLPRVRTHVREYVQNDVYVNNLQANYFQYFGNGFYGQVYGGYLETMFGGAGAEVLYRPVDSNWAFGLDANYVKQRDWRSAQDMMKFTDYSVKTGHLTAYWTPSFAQDVLVKASVGQYLAGDKGGTLEIAKRFDSGVVVGGYATITDASPDEYGEGDFTKGVYVSVPLDLFSSGPTRSRAAIGWTPLTRDGGQQLGRKFGLYDMTSDRSVNFR

SEQ ID NO: 5335 - DNA, 2097 bp, Salmonella typhimurium LT2
  CDS (1)..(2097): transl_table=11
atgaaaaaaacacatctgctcagcgtgctggcgctgggtattagcgcggcctgccatgccgaaacatatccagcccctgttgggccttcacaatctgactttggcggcgtgggcctgctgcaaacgccgacagcgcgtatggcgcgtgaaggggagatgagcctgaactatcgcgataacgatcagtaccgctactactcggcttcggttcagcttttcccgtggctggaaaccacgttgcgctataccgatgtccgtacgaaaaagtacagcagcgtggaatcattctccggcgaccagacttacaaagataaagcgtttgatgtgaaactgcggttgtgggaagagagttactggatgccgcaggtggcggttggcgcgcgcgatatcggcgggacggggctgtttgatgcggaatatattgtagcgagtaaggcctgggggccgtttgatttttcattaggtctcggctggggctatcttggcaccagcggcaatgtgtctaatcctttctgttcgtatagtgataaattctgttcgcgtgataacagctacaaagaggcaggttccgtcgacggtagcgatatgtttcacggcccggcctcgctgtttggcggcgtggaataccagaccccgtggcaaccgctacgcctgaagctggagtatgaaggcaataactatcagcaggattttgcgggtaaactggagcagaagagcaagtttaacgtcggcgccatttaccgcgtcaccgattgggccgacgttaacctcagctacgagcgcggcaatacctttatgtttggcgttacgctgcgcaccaatttcaacgatttacgtcccgcgtatcatgacaattcacgcccgcaataccgaccacagccgcaggatgccatcctgcaacattcggtagtggctaatcaattaacgttattgaaatataatgccggtctggcggacccgaaaatccaggtcaaaggcgatacgctatacgttaccggtgaacaggtgaagtaccgcgactcccgtgaagggatcgtgcgcgctaaccggatcgtcatgaacgatctgccggaggggatccgcacgatccgcgtgacggaaaaccgccttaatctgccgcaggtcaccactgaaaccgatgtcgccagcctgaaacgccatctggaaggcgaaccgctgggacatgaaactccgctggcgcaaaaacgcgtggagccgatcgtgccagagagtactgaacagggctggtatatcgacaagtcgcgcgttgattttcatcttgatcccgtgctgaatcagtcggtaggcggcccggaaaacttctatatgtatcagttgggcgtaatgggaactgcggatctgtgggtcacggatcatctgctcaccacgggcagcgtgtttgccaatatcgccaacaactacgacaaatttaactacaccaatccgccgaaggactcgcatctgccgcgggtgcgtacgcatgtccgtgagtatgtgcagaatgatgtttatgtgaataacctacaggccaactacttccagtattttggcaatggtttctatgggcaggtctacggtggttatctggagaccatgtttggcggtgccggggcggaagtcctgtatcgcccggtagacagcaattgggcgtttggcctggatgccaactacgtgaaacagcgtgactggcgtagcgcgcaggatatgatgaagtttaccgattacagcgtgaagaccggacatttgaccgcatactggacgccgtcgttcgcccaggatgtgctggtgaaagccagcgttggtcagtatctggcgggcgataaaggcggtacgctggagatcgccaaacgcttcgatagcggcgtcgttgtcggcggttacgcgacgattaccgatgcgtcgccggatgaatatggggaaggggattttaccaaaggcgtatatgtttccgtgccgctggatatcttctcgtccggcccaacccgaagtcgtgcggcaattggctggacgccgctgacgcgtgacggtggtcaacagcttggccgtaagtttggcctgtatgatatgaccagtgacaggagcgtaaatttccgttaa

SEQ ID NO: 5336 - protein, 698 aa, Salmonella typhimurium LT2
MKKTHLLSVLALGISAACHAETYPAPVGPSQSDFGGVGLLQTPTARMAREGEMSLNYRDNDQYRYYSASVQLFPWLETTLRYTDVRTKKYSSVESFSGDQTYKDKAFDVKLRLWEESYWMPQVAVGARDIGGTGLFDAEYIVASKAWGPFDFSLGLGWGYLGTSGNVSNPFCSYSDKFCSRDNSYKEAGSVDGSDMFHGPASLFGGVEYQTPWQPLRLKLEYEGNNYQQDFAGKLEQKSKFNVGAIYRVTDWADVNLSYERGNTFMFGVTLRTNFNDLRPAYHDNSRPQYRPQPQDAILQHSVVANQLTLLKYNAGLADPKIQVKGDTLYVTGEQVKYRDSREGIVRANRIVMNDLPEGIRTIRVTENRLNLPQVTTETDVASLKRHLEGEPLGHETPLAQKRVEPIVPESTEQGWYIDKSRVDFHLDPVLNQSVGGPENFYMYQLGVMGTADLWVTDHLLTTGSVFANIANNYDKFNYTNPPKDSHLPRVRTHVREYVQNDVYVNNLQANYFQYFGNGFYGQVYGGYLETMFGGAGAEVLYRPVDSNWAFGLDANYVKQRDWRSAQDMMKFTDYSVKTGHLTAYWTPSFAQDVLVKASVGQYLAGDKGGTLEIAKRFDSGVVVGGYATITDASPDEYGEGDFTKGVYVSVPLDIFSSGPTRSRAAIGWTPLTRDGGQQLGRKFGLYDMTSDRSVNFR

SEQ ID NO: 5337 - DNA, 2379 bp, Shewanella oneidensis MR-1
  CDS (1)..(2379): transl_table=11
atgaaaaagtcaactcccactttgcatgcattcgggcgtttatctgcgctgtcattagcattgctacctttattacatgttaacgccgatgaattttcttatcccacactcttaccttcacagtcagatttcggtggcgttggtctcatgcaaatgccaacgggccgtatggcgcccgaaggtgaatttaactttgccaccacttataacgatgactatcagcactttagtgcttcggtacagttatttccgtggtttgagaccaccattcgctatacccaagtacaagatttgctttatagcgatgacccaagctttagcggtaactctaaatacacagacaaaggcattgattttaaggttcgtctactcgaagaaagcaattggctacccgaaacctccattggggtacgggactttggcggcacaggtttatttgatggcgaatttattgccgcgacgaaacgagttggcccactggattttaccctcggcattggctggggttatattggcaatagcggtaatcttacctcggataaaaaagatcttaattacaactgtgacagagatacctcttttggtggttcgggtggcaccgttgattaccagcgctggtttaagggctgcgccgccctctttggcggcgttgaatatcaaaccccttgggaaccgttacgcttgaaagtcgaatatgacggtaacgactatcaatccgactaccctgttattcgtggcgaaagcactatgccacaggacagtaaatttaactacggactgctctatcggtttggtgattggggcgatctgcatttaagttatgagcgtggtaatacttggacgctcggctttagtctgcaaaccaattttaataccctatcgcagattaaaaccgatcctgctgccactaaatataagccgcttccagctgcgccattaacacctacacaaacagaatcctccacgccggtaaacataccaacagtcgcacaagtgactgttagtgctgatacttccgaaacgcataaatcagaagttcaaaatgcagaagtagcaaatctagaacctgtaaacgcatccaatcaggctgttacgaatacccaagtagattggaacaaggtcactcatgacttacaaactatcgcaggttatgcaaacgccaaaatttatctggctcatgacagcattaccgtagtaggtgaacaaacgacattccgcgatagaaatgaagcgcatcaaagagcagccactatccttgctaataacactgatgcaactcatatcaaagagtatcggctaattgaaacccgttataaccagccgataaccgaaactctaatcgatacacaaaagtttgcccaaattgcaagctatagttatctcaatgccaaaataactgacgccagtgttgtaagagttcccagcttacctcagggacaactggtcaatagtactgataaggattggctggataagcttagttttgatgtttcgccgaccatggcccaatcctttggtggttccgaaggtttttatatgttcaacattggggtgacaggcagtgcaaattatcgctttaccgataattttgatttttcaggttccctttatctgaatctttacgataactacgataagtttttatacgatgtgccacccgatggaacagacttaaaacgtgttcgtacacttatccgtcaatatgttcatgaaaatccagtaagggtgaatagcctacaactaacttggatggataatttaaccgataatatctcctaccaagcctatggtggctatctagaaatgatgtatggcggtgtggggacagagttcctctaccgaccacttaatagccaatgggcttttggtattgatgtgaattatgttaagcagcgcgatcccgatagcgtgtttggcttctttgaagatgagcatcaatatgatccaattacaaacagcaactacagagtacagacaggtacagtcacaggtaatgcgactttctactatcaacccgactggttccccaatactttattaagggtaagtgcaggccaatatttgactgaagataaaggtgtaacagttgatttctccaaacaattcgatagcggcgtaattgttggcgcctttgcgactaagactaacctttctgcggaggaatatggtgaaggcagctttaccaagggcttctacatctctatcccatttgatttaatgaccgtaaaatcaacccatagccgagcgacgatcagttggatgccactcacccgcgatggtggccaaatggtcggccgtaaatattatctctttgataatactgatgctcgctcaccttggttcactcgtctcagcactcaaactaagtcagtaaaataa

SEQ ID NO: 5338 - protein, 792 aa, Shewanella oneidensis MR-1
MKKSTPTLHAFGRLSALSLALLPLLHVNADEFSYPTLLPSQSDFGGVGLMQMPTGRMAPEGEFNFATTYNDDYQHFSASVQLFPWFETTIRYTQVQDLLYSDDPSFSGNSKYTDKGIDFKVRLLEESNWLPETSIGVRDFGGTGLFDGEFIAATKRVGPLDFTLGIGWGYIGNSGNLTSDKKDLNYNCDRDTSFGGSGGTVDYQRWFKGCAALFGGVEYQTPWEPLRLKVEYDGNDYQSDYPVIRGESTMPQDSKFNYGLLYRFGDWGDLHLSYERGNTWTLGFSLQTNFNTLSQIKTDPAATKYKPLPAAPLTPTQTESSTPVNIPTVAQVTVSADTSETHKSEVQNAEVANLEPVNASNQAVTNTQVDWNKVTHDLQTIAGYANAKIYLAHDSITVVGEQTTFRDRNEAHQRAATILANNTDATHIKEYRLIETRYNQPITETLIDTQKFAQIASYSYLNAKITDASVVRVPSLPQGQLVNSTDKDWLDKLSFDVSPTMAQSFGGSEGFYMFNIGVTGSANYRFTDNFDFSGSLYLNLYDNYDKFLYDVPPDGTDLKRVRTLIRQYVHENPVRVNSLQLTWMDNLTDNISYQAYGGYLEMMYGGVGTEFLYRPLNSQWAFGIDVNYVKQRDPDSVFGFFEDEHQYDPITNSNYRVQTGTVTGNATFYYQPDWFPNTLLRVSAGQYLTEDKGVTVDFSKQFDSGVIVGAFATKTNLSAEEYGEGSFTKGFYISIPFDLMTVKSTHSRATISWMPLTRDGGQMVGRKYYLFDNTDARSPWFTRLSTQTKSVK

SEQ ID NO: 5339 - DNA, 2097 bp, Escherichia coli CFT073
  CDS (1)..(2097): transl_table=11
atgaaaaaaagacatctgcttagcttactggcgctgggcattagcacagcttgctacggcgaaacatatcctgcgcccattggtccgtcgcaatcggatttcggtggcgtaggattattacaaacgcccaccgcgcgcatggcgcgggaaggggagctgagcctgaactatcgcgataacgatcagtaccgttattactcagcttcagtgcaactcttcccgtggctggaaacaacgctgcgctacaccgacgtgcgcacccggcagtacagcagcgtcgaagcgttctctggcgatcaaacgtataaagataaagccttcgatctcaaactgcgtttgtgggaagagagttattggctgccgcaagtggcggttggtgcgcgggatatcggcggtacggggctgtttgatgcggaatatcttgttgccagcaaagcctggtggccgttcgattttacactcggcctgggctggggatatctgggcaccagcggtaacgtgaaaaatccgctctgttcagccagtgataaatattgctatcgcgataacagctacaaacaagcgggatctatcgacggcagtcagatgttccacggcccggcctcactgtttggcggcgtggaataccagacgccctggcaaccgctgcgcctgaaactggagtatgaaggtaataattatcagcaggattttgccgggaagctggagcaaaaaagtaagtttaacgtcggggcgatttatcgcgttaccgattgggccgacgttaaccttagctatgaacgtggcaacacctttatgtttggcgtcacgctgcgcaccaactttaacgatctgcgcccgtcctacaacgataacgcccgaccgaaataccagccgcaaccgcaggatgccattttgcagcactcggtggtggcgaatcagttaacgctgttgaaatacaatgccggactggccgatccgcagatccaggcgaaaggcgatacgctgtatgtcaccggcgagcaggtgaaatatcgtgattcgcgcgaagggatcatccgtgctaatcggatcgtgatgaacgatctgcctgatgggatcaaaacgatccgcattacggaaaatcgccttaacatgccgcaggtgacgacggaaaccgatgtcgccagcctgaaaaatcatctcgccggagagccgttgggccacgaaacgaagctggcgcaaaaacgcgtcgagccagtggttccgaagtccaccgagcagggctggtatatcgacaaatcgcgctttgattttcatattgatccggtgctgaaccagtcggtcggtggcccggaaaacttttacatgtatcagctgggcgtgatgggaacggcggatttgtggctgacggaccatctgctgaccaccggcagcctgtttgctaaccttgccaacaactacgacaagtttaactacaccaatccaccgcaggactcgcacttaccgcgcgtgcgtacccatgtgcgcgagtatgtgcagaatgatgtctatgtgaataacctgcaagccaactacttccagcatctgggcaacggcttctacggtcaggtctacggaggttatctcgaaaccatgtttggcggcgtgggagcagaagtgttgtatcgcccgctggatagtaactgggcgtttggtctggatgccaactacgttaaacagcgcgactggcgtagcgcaaaagatatgatgaaattcaccgattacagcgtgaaaaccggacatctgaccgcgtactggacgccatctttcgcccaggacgtgttagtgaaagcgagcgtcgggcagtatctggctggggataaaggcggcacgctggagatcgccaaacgctttgatagcggcgtggtggtggggggctatgccacgatcacgaatgtttcgaaagaggagtacggcgaaggggacttcaccaaaggcgtgtatgtctctgtaccgctggatctcttctcgtctggcccgacacgcagccgtgcggcgattggctggacgccgctgacgcgtgacggtggtcagcaacttgggcgtaagttccagttgtatgatatgaccagcgaccgtagcgtcaatttccgctaa

SEQ ID NO: 5340 - protein, 698 aa, Escherichia coli CFT073
MKKRHLLSLLALGISTACYGETYPAPIGPSQSDFGGVGLLQTPTARMAREGELSLNYRDNDQYRYYSASVQLFPWLETTLRYTDVRTRQYSSVEAFSGDQTYKDKAFDLKLRLWEESYWLPQVAVGARDIGGTGLFDAEYLVASKAWWPFDFTLGLGWGYLGTSGNVKNPLCSASDKYCYRDNSYKQAGSIDGSQMFHGPASLFGGVEYQTPWQPLRLKLEYEGNNYQQDFAGKLEQKSKFNVGAIYRVTDWADVNLSYERGNTFMFGVTLRTNFNDLRPSYNDNARPKYQPQPQDAILQHSVVANQLTLLKYNAGLADPQIQAKGDTLYVTGEQVKYRDSREGIIRANRIVMNDLPDGIKTIRITENRLNMPQVTTETDVASLKNHLAGEPLGHETKLAQKRVEPVVPKSTEQGWYIDKSRFDFHIDPVLNQSVGGPENFYMYQLGVMGTADLWLTDHLLTTGSLFANLANNYDKFNYTNPPQDSHLPRVRTHVREYVQNDVYVNNLQANYFQHLGNGFYGQVYGGYLETMFGGVGAEVLYRPLDSNWAFGLDANYVKQRDWRSAKDMMKFTDYSVKTGHLTAYWTPSFAQDVLVKASVGQYLAGDKGGTLEIAKRFDSGVVVGGYATITNVSKEEYGEGDFTKGVYVSVPLDLFSSGPTRSRAAIGWTPLTRDGGQQLGRKFQLYDMTSDRSVNFR

SEQ ID NO: 5341 - DNA, 2250 bp, Vibrio vulnificus CMCP6
  CDS (1)..(2250): transl_table=11
atgacgtacttaaattcctcatcagaaatcccaagcgttggctttcgctctcaaatttccgccgtttgtcttggtgtactctccgcgctcgcaggcgtaacttctttgcattcacaagcctctgagcttgaaaccgtgacacttcgcccctcacaaactgattttggtggcgtgggtttaatgcaaatgccatctggccgtatggcaaaagaaggtgaattcaactttggtgttaacctcaacgacgattatcaacattattacacctcgctgcagttgttcgattggtttgaaaccaccattcgttacacgcgtgtgccggatatgctgtttaacccgaacccagattacagcggcgataatctctataccgataaaggtattgatttcaaaatacgcctttggcaagagagctactggttacctgaaacctcaattggtattcgtgattttggcgggacaggtttatttgatggcgagtttattgccgcgaccaaacggtttggccctatcgactttaccctaggtatgggatggggttatatcggccaaagcggcaattttaccaacccattttgtaaagccagcgacaagttttgtgaaaggccgagtgattataaaggctcaggtggcagcgttgattttgagcgctggtttaaaggccctgctgccctctacggcggcattgaatatcaaacaccgtatcaaccgctgcgcttgaaagtggaatacgatgccaacgattacagccaagatttcccttatgttcaaggtggtaagccaatgccacaacataccccttggaactttggcgtactctatcaacttggggattggggcgatgctaagctaagttatcaacgtggcgatacactgacgtttggttttaatctctacaccaattttgatgatctcaaagccgtttggcgagatgaaccaaagcaagccgttacgggaagaccaagcgaaggcaacaccgattggcaagcagtcgcccagcaactagacagcaacgcgggttatcagcaaagcaccttgtatgaacaaggcgatgctttggtgattgcgggtgagcaggttaaatacagtgatataaaagaagcgcaagatcgcgccgccacgattttagccaataacgcaccagactacatcactacctataagattgttgaaacgcgcaatggcgtggacttaacacaaaccgagtttgatgcagaagcttataaacaagcggcgacgtatcaataccttggtgccaatagccgtgagctaggcagtaccagcgagcccgattaccgtgaaaacgcaaaaccattgacgacacatcgcgagcgctggaacgcaggtatttctcctgtgttggcgcaatcattgggtggccctgaagcgttctacttgttccaccttggttttaataccgaagcgaactattggctaaccaacaacatcgaagcgagcggctctatctacgtcaaccttgccgataactacgacaagttcaactacgtagagaaagatcctcatatttcgaacttcgccgtgccgcgcgtgcgaacgatgttccgctcctacgtgagcgataaccctgttcgtctaaaccatatgcagctcacttggtttgctcaacctacgcagcaagtctatacccagatgtacggcggttatttggaaaccatgtttgctggtgtgggtggtgaagtgctttatcgtccattaggtaaaaactgggcgctgggcttggatgcgaacttaatctcacagcgtgacccagatagctggtttgctacgtttgatgaaccgtttgtttattacgatggctacgatgcctctaactgcaaaccaaacgatgttggctgccaagcttacgtgcttgataaaggcacaacgggtcaactttcggcttactacatgcctcagtggtctttgctagagaacacgttatttaaagtcagcgcgggtaagttcttgggcggtgacaacggggtacgcgtcgatttctccaaacagtttaaatccggcatgattgttggcgcatttgcgaccgtgacggacctgacgacagaggaatatggcgaaggcagttacaacaaaggcttctatatttcgattccatttgatgcgatgacgatcaaaccaagcacggcgcgtggtgtttttgcttggcaaccaatcacgcgagatggcggtcaaacactgagccgcaagtacgagctatttgaagtgaccaacgcgagaagccgttggtattaa

SEQ ID NO: 5342 - protein, 749 aa, Vibrio vulnificus CMCP6
MTYLNSSSEIPSVGFRSQISAVCLGVLSALAGVTSLHSQASELETVTLRPSQTDFGGVGLMQMPSGRMAKEGEFNFGVNLNDDYQHYYTSLQLFDWFETTIRYTRVPDMLFNPNPDYSGDNLYTDKGIDFKIRLWQESYWLPETSIGIRDFGGTGLFDGEFIAATKRFGPIDFTLGMGWGYIGQSGNFTNPFCKASDKFCERPSDYKGSGGSVDFERWFKGPAALYGGIEYQTPYQPLRLKVEYDANDYSQDFPYVQGGKPMPQHTPWNFGVLYQLGDWGDAKLSYQRGDTLTFGFNLYTNFDDLKAVWRDEPKQAVTGRPSEGNTDWQAVAQQLDSNAGYQQSTLYEQGDALVIAGEQVKYSDIKEAQDRAATILANNAPDYITTYKIVETRNGVDLTQTEFDAEAYKQAATYQYLGANSRELGSTSEPDYRENAKPLTTHRERWNAGISPVLAQSLGGPEAFYLFHLGFNTEANYWLTNNIEASGSIYVNLADNYDKFNYVEKDPHISNFAVPRVRTMFRSYVSDNPVRLNHMQLTWFAQPTQQVYTQMYGGYLETMFAGVGGEVLYRPLGKNWALGLDANLISQRDPDSWFATFDEPFVYYDGYDASNCKPNDVGCQAYVLDKGTTGQLSAYYMPQWSLLENTLFKVSAGKFLGGDNGVRVDFSKQFKSGMIVGAFATVTDLTTEEYGEGSYNKGFYISIPFDAMTIKPSTARGVFAWQPITRDGGQTLSRKYELFEVTNARSRWY

SEQ ID NO: 5343 - DNA, 2199 bp, Vibrio parahaemolyticus RIMD 2210633
  CDS (1)..(2199): transl_table=11
atgaacctgatcagaaccagtttatccctttctttaataggtccagcgttggtgtgggctcaagacatgcctttcgaagcaccaccattgcaaccatcacaaatggactttggtggtgtcggcttaatgcagatgccaaccggtcgtatggcgcctgaaggtgagtttaactttgctattaacaacagtaatgagtacacattttacaatgttactttgcaagtgatgccatggttagaaactactattcgttatactactgcaaaagatgttctttacagcgaagaccccaatttttctggcaacaatgaatacactgataaaggcatcgattttaaagttcgacttttgcaagagtctaagtacttaccagaactttctgttggtgtacgtgactttgcaggcaccggcctttttgatggtgaatttgttgccgcgacaaaacgttactctaacccaaacctcggtacctttgattttacgttaggtattggttggggctacttaggtacgcgcgacaacatcagcaacccagcttgtaagctgtccgatagtttctgtgaacgcccttcagactttaaaggtaatggcggtagtgtggattttgaacgttggttcaaaggccctgctgcactctttggtggtgttgagtatcaaactttgcacgccccactgcgatttaagcttgaatacgacagcaacgattacagcgaagacttccctgttgtacgtggtggtgtagacatgacgcctcatacaccttggaactttggtgttctgtatcgtttaggacatatggcagatttgcgcttgagctacgagcgcggtgacacgttagttgcaggcgtaagcctttacacaaacttcaataatatgccgtctttctggcgtgatacaccaacgccagaagttgaagacaagcaaccagagcaactgtctgatgtagattgggaacgtgttaccgaggagctggataaaattgctggctaccaaaatacccaactctatgttgaagataataccgtttcggttgtcggcgagcagaagaagtatcgcgaccgcaacgaagctcatgaaaaagcagcggcagtcctttataacgaaatgccagacaacattgatacctttactatcaatgaacgcagtagtggtctgatcggcgatcaaacggttatctccaaagagaaataccgtgactttgcagaagttaactacatcaatccaaatatcgaagatgcaacatcaacctcaagcgataaaccgcaaggtaaacctgcttacgatggttttgagcgctttgattggagcttctcaccaaaactggctcaaaccttaggcaacccagaagagttctatctgttcagtgtcggcttaagtggcagcgcctcttactggctgacagataacctagaaattggtggctcgctatactgggattggtacaacaactacgacaagtttaactacgtcaccccaccagacggcacttcgattcctcgtgtacgtaccatgttccgcgcttatcagaatgaacacgcggtaaccatgtccaacctgcagttaacttggttccaagaatactcagataccatggaccaacagttctacgctggttatctagaaagtatgttcgcgggtgtgggtaccgaattcttgtaccgaccgaaaggcgcaaactgggctatcggtgcagatgtaaacttgatctctcaacgtgatccgcaaagctacttcggtgtatacgacgagaaatggcaatacgttccagaatatgggcgtccgttccaagttgtagacaaaggctttactggttttgtgtcgggttattactacccgcaatgggacttcctacaagatttgatgattcaagtcgatgtaggtcaattcctagccggtgatgtcggtacgcaagtgaatgtatctaaacagttcaagagtggtgtcattgcaggtgcattcgcatcaatcagtgatttgtctgctgacgaattcggtgaaggtagctttactaaaggcttctacatttcgattccattcgacatcatgacagtgaaaccaagcaacaaccgcgcgttctttagctggcagccattgactcgcgatggtggtcaaaagctaggtcgtaagtacagcttgattgaacttactgatgaacgtaacccttggtaccagagaccaaacgcgtcaaacgctaaataa

SEQ ID NO: 5344 - protein, 732 aa, Vibrio parahaemolyticus RIMD 2210633
MNLIRTSLSLSLIGPALVWAQDMPFEAPPLQPSQMDFGGVGLMQMPTGRMAPEGEFNFAINNSNEYTFYNVTLQVMPWLETTIRYTTAKDVLYSEDPNFSGNNEYTDKGIDFKVRLLQESKYLPELSVGVRDFAGTGLFDGEFVAATKRYSNPNLGTFDFTLGIGWGYLGTRDNISNPACKLSDSFCERPSDFKGNGGSVDFERWFKGPAALFGGVEYQTLHAPLRFKLEYDSNDYSEDFPVVRGGVDMTPHTPWNFGVLYRLGHMADLRLSYERGDTLVAGVSLYTNFNNMPSFWRDTPTPEVEDKQPEQLSDVDWERVTEELDKIAGYQNTQLYVEDNTVSVVGEQKKYRDRNEAHEKAAAVLYNEMPDNIDTFTINERSSGLIGDQTVISKEKYRDFAEVNYINPNIEDATSTSSDKPQGKPAYDGFERFDWSFSPKLAQTLGNPEEFYLFSVGLSGSASYWLTDNLEIGGSLYWDWYNNYDKFNYVTPPDGTSIPRVRTMFRAYQNEHAVTMSNLQLTWFQEYSDTMDQQFYAGYLESMFAGVGTEFLYRPKGANWAIGADVNLISQRDPQSYFGVYDEKWQYVPEYGRPFQVVDKGFTGFVSGYYYPQWDFLQDLMIQVDVGQFLAGDVGTQVNVSKQFKSGVIAGAFASISDLSADEFGEGSFTKGFYISIPFDIMTVKPSNNRAFFSWQPLTRDGGQKLGRKYSLIELTDERNPWYQRPNASNAK

SEQ ID NO: 5345 - DNA, 2250 bp, Vibrio vulnificus YJ016
  CDS (1)..(2250): transl_table=11
atgacgtacttcaattcctcatcagaaatcccaagcgttggctttcgctctcaaatttccgccgtttgtcttggcgtgctctccgcgcttgcaggcgtaacttctttgcattcacaagcctctgagcttgaaaccgtgacacttcgcccctcacaaactgattttggtggcgtgggtttaatgcaaatgccgtctggccgtatggcaaaagagggtgaattcaactttggtgttaacctcaacgacgactaccaccattattacacctcgctgcagttgtttgattggtttgaaaccaccatccgctatacacgaattcctgacactttatacaatccaaatcctgactacagcggcgataatctaaacacagacaaaggtatagatatcaagtttcgtctctggcaagagagctattggcttcctgaaacctccattggtattcgcgatattggcggaactggtttatttgatggcgagtttattgcgggtacaaaacgctttggccctctcgatgtcacccttggcgttggttggggatatattggtcaaagtggcaatatttctaatcctttctgtaaagtgagtgaagaatattgtgacagagacggcccaacaaaaggaactggagggagtgtcgattttggtcgctggtttaaaggggaggcttcgatttacggtggcattgaatatcaaacaccgtatcaaccactgcgcttgaaagtggaatacgatgccaacgactacactacggattacccagttcgcgctgttaacaaaccgatgccacaacatactccttggaactttggcgtgctctaccaacttggggattggggcgatgccaagttaagttaccaacgtggcgatacactgacctttggttttaatctctacaccaattttgaggatctcaaagcggtttggcgagatgaaccaaagcaagccgtcacgggaagaccaagcgaaggcaataccgattggcaagcagtcgcccagcaactagacagcaacgcgggttatcagcaaagcaccttgtatgaacaaggcgatgctttggtgattgcgggtgagcaggttaaataccgtgatagaaaagaagcgcaagatcgcgccgccgcgattttagccaataacgcaccagactacatcactacctataagattgttgatacgcgcaatggcgtggacttaacacaaaccgagtttgacgcagaagcttataaacaagcggcgacgtatcaataccttggtgccaatagccgtgagctaggcagtaccagcgagcccgattaccgtgaaaacgcaaaaccattgacgacacatcgcgagcgctggaacgcaggtatttctcctgtgttggcgcaatcattaggtggcccggaagcgttctacttgttccaccttggttttaataccgaagcgaactattggctaactgataacatcgaagcgagtggttctatctacgtcaaccttgccgataactacgacaagttcaactacgtagagaaagatcctcatatttcgaacttcgccgtgccgcgcgtgcgaacgatgttccgctcctacgtgagcgataaccctgttcgtctaaaccatatgcagctcacctggtttgctcagcctacgcagcaagtctatacccaaatgtacggcggttatttggaaaccatgtttgctggtgtaggtggtgaagtgctttaccgtccattaggtaaaaactgggctttgggcttggatgcgaacttaatctcacagcgtgacccagatagctggtttgctacctttgatgagccgtttgtttattacgatggctacgacgcctctaactgcaaaccaaacgatgttggctgccaagcttacgtgcttgataaaggcacaacgggtcaactttcggcttactacatgcctcagtggtctttgttggagaacacgttgtttaaagtcagcgcgggtaagttcttgggcggcgacaacggggtacgcgtcgatttctccaaacagtttaaatccggcatgattgttggtgcatttgcgaccgtgacggacctgacgacagaggaatatggcgaaggcagttacaacaaaggcttctatatttcgattccatttgatgcgatgacgatcaaaccaagcacggcgcgtggtgtttttgcttggcaaccaatcacgcgagatggcggtcaaacactgagtcgcaagtacgagctatttgaagtgaccaacgcgagaagccgttggtattaa

SEQ ID NO: 5346 - protein, 749 aa, Vibrio vulnificus YJ016
MTYFNSSSEIPSVGFRSQISAVCLGVLSALAGVTSLHSQASELETVTLRPSQTDFGGVGLMQMPSGRMAKEGEFNFGVNLNDDYHHYYTSLQLFDWFETTIRYTRIPDTLYNPNPDYSGDNLNTDKGIDIKFRLWQESYWLPETSIGIRDIGGTGLFDGEFIAGTKRFGPLDVTLGVGWGYIGQSGNISNPFCKVSEEYCDRDGPTKGTGGSVDFGRWFKGEASIYGGIEYQTPYQPLRLKVEYDANDYTTDYPVRAVNKPMPQHTPWNFGVLYQLGDWGDAKLSYQRGDTLTFGFNLYTNFEDLKAVWRDEPKQAVTGRPSEGNTDWQAVAQQLDSNAGYQQSTLYEQGDALVIAGEQVKYRDRKEAQDRAAAILANNAPDYITTYKIVDTRNGVDLTQTEFDAEAYKQAATYQYLGANSRELGSTSEPDYRENAKPLTTHRERWNAGISPVLAQSLGGPEAFYLFHLGFNTEANYWLTDNIEASGSIYVNLADNYDKFNYVEKDPHISNFAVPRVRTMFRSYVSDNPVRLNHMQLTWFAQPTQQVYTQMYGGYLETMFAGVGGEVLYRPLGKNWALGLDANLISQRDPDSWFATFDEPFVYYDGYDASNCKPNDVGCQAYVLDKGTTGQLSAYYMPQWSLLENTLFKVSAGKFLGGDNGVRVDFSKQFKSGMIVGAFATVTDLTTEEYGEGSYNKGFYISIPFDAMTIKPSTARGVFAWQPITRDGGQTLSRKYELFEVTNARSRWY

SEQ ID NO: 5347 - DNA, 2097 bp, Salmonella enterica subsp. arizonae serovar 62:z4,z23:--
  CDS (1)..(2097): transl_table=11
atgaaaaaaacacatttgctcagcgtgctggcgctgggcattagcgcggcctgccatgccgaaacatatccggcccccattgggccttcacaatctgactttggcggcgtgggcttgctgcaaacgccgacagcgcgtatggcacgtgaaggagagatgagcctgaactatcgcgataacgatcagtaccgctactactctgcttctgttcagcttttcccgtggctggaaaccacgttgcgctataccgatgtccgcacgaaaaagtacagcagcgtggaatcattctccggcgaccagacttacaaggataaagcgtttgatgtgaaattgcggttgtgggaagagagttactggatgccgcaggtggcggttggcgcgcgcgatatcggcgggacggggttgttcgatgcggaatatattgtggcgagtaaggcctggggaccgtttgatttttcattaggtctcggctggggctatcttggcgccagcggcaatgtgtctaatcctttctgttcgtatagtgataaattctgttcacgcgataacagctataaagaggcgggttccgtcgacggtagcgatatgttccacggtccagcttcgctatttggcggcgtggaataccaaaccccgtggcaaccgctacgcctgaagctggagtatgaaggcaataactatcagcatgattttgcgggtaaactagaacagaagagcaagtttaatgtcggcgccctttaccgcgtcaccgattgggccgacgttaacctcagctacgagcgtggcaacactgtcatgtttggcgtcacgctacgtaccaatttcaacgacttacgcccctcgtataatgataattcacgcccgcaataccgaccgcagccgcaggatgccatcctgcaacattcggtagtggctaatcaactgacactattgaaatataatgccggtctggcggacccaaaaattcaggtcaaaggcgatacgctgtacgttaccggcgaacaggtgaagtatcgtgacgcccgtgaagggatcgtgcgcgctaaccggatcgtcatgaacgatctgccggaggggatccgcacgatccgcgtgacggaaaaccgccttaacctgccgcaggtcaccaccgaaaccaatgtcgccagcctgaaacgccatctggaaggcgaaccgctgggacatgaaacgccgctggcgcaaaaacgtgtggagccgatcgtgccagagagcaccgagcagggctggtatatcgacaaatcacgccttgattttcatctcgatcccgtgctgagccagtcggtaggtggcccggaaaacttctatatgtatcagttgggcgtgatgggaacggcggatctgtgggttacggatcacctgctcaccacgggcagcgtgtttgccaatatcgccaacaactacgacaaatttaactacactaacccgccgaaggattcgcatctgccgcgggtgcgtacgcatgttcgcgagtatgtgcagaatgatgtctatgtgaataacctacaggccaactacttccagtattttggcaatggtttctatgggcaggtctacggcggttatctggagactatgtttggcggtgccggggcggaagtactgtatcgcccggtggacagcaattgggcgtttggtctggatgccaactatgtgaaacagcgtgactggcgtagcgcgcaggatatgatgaagtctaccgattacagcgtgaagaccggacatttgaccgcatactggacgccgtcgttcgcccaggatgtgctggtgaaagccagcgtaggtcagtatctggcgggcgataaaggcggtacgatggagattgccaaacgcttcgatagcggcgtcgttgtcggcggttacgcgacaattaccgacgcatcgccggatgaatatggggaaggagattttaccaaaggtgtatacatttccgtgccgctggatctcttctcgtctggcccaacccgtagccgcgcggcaattggctggacgccgctgacgcgtgatggtggtcaacagcttggccgtaagtttggcctgtatgatatgaccagcgaccggaacgtgaatttccgttaa

SEQ ID NO: 5348 - protein, 698 aa, Salmonella enterica subsp. arizonae serovar 62:z4,z23:--
MKKTHLLSVLALGISAACHAETYPAPIGPSQSDFGGVGLLQTPTARMAREGEMSLNYRDNDQYRYYSASVQLFPWLETTLRYTDVRTKKYSSVESFSGDQTYKDKAFDVKLRLWEESYWMPQVAVGARDIGGTGLFDAEYIVASKAWGPFDFSLGLGWGYLGASGNVSNPFCSYSDKFCSRDNSYKEAGSVDGSDMFHGPASLFGGVEYQTPWQPLRLKLEYEGNNYQHDFAGKLEQKSKFNVGALYRVTDWADVNLSYERGNTVMFGVTLRTNFNDLRPSYNDNSRPQYRPQPQDAILQHSVVANQLTLLKYNAGLADPKIQVKGDTLYVTGEQVKYRDAREGIVRANRIVMNDLPEGIRTIRVTENRLNLPQVTTETNVASLKRHLEGEPLGHETPLAQKRVEPIVPESTEQGWYIDKSRLDFHLDPVLSQSVGGPENFYMYQLGVMGTADLWVTDHLLTTGSVFANIANNYDKFNYTNPPKDSHLPRVRTHVREYVQNDVYVNNLQANYFQYFGNGFYGQVYGGYLETMFGGAGAEVLYRPVDSNWAFGLDANYVKQRDWRSAQDMMKSTDYSVKTGHLTAYWTPSFAQDVLVKASVGQYLAGDKGGTMEIAKRFDSGVVVGGYATITDASPDEYGEGDFTKGVYISVPLDLFSSGPTRSRAAIGWTPLTRDGGQQLGRKFGLYDMTSDRNVNFR

SEQ ID NO: 5349 - DNA, 2097 bp, Salmonella enterica subsp. enterica serovar Paratyphi B str. SPB7
  CDS (1)..(2097): transl_table=11
atgaaaaaaacacatctgctcagcgtgctggcgctgggtattagcgcggcctgccatgccgaaacatatccagcccctgttgggccttcacaatctgactttggcggcgtgggcctgctgcaaacgccgacagcgcgtatgacgcgtgaaggggagatgagcctgaactatcgcgataacgatcagtaccgctactactcggcttcggttcagcttttcccgtggctggaaaccacgttgcgctataccgatgtccgtacgaaaaagtacagcagcgtggaatcattctccggcgaccagacttacaaagataaagcgtttgatgtgaaactgcggttgtgggaagagagttactggatgccgcaggtggcggttggcgcgcgcgatatcggcgggacggggctgtttgatgcggaatatattgtagcgagtaaggcctgggggccatttgatttttcattaggtctcggctggggctatcttggcaccagcggcaatgtgtctaatcctttctgttcgtatagtgataaattctgttcgcgtgataacagctataaagaggcaggttccgtcgacggtagcgatatgtttcacggcccggcctcactgtttggcggcgtggaatatcagaccccgtggcaaccgctacgcctgaagctggagtatgaaggcaataattatcagcaggattttgcgggtaaactggagcagaagagcaagtttaacgtcggcgccatttaccgcgtcaccgattgggccgacgttaacctcagctacgagcgcggcaacacctttatgtttggcgttacgctgcgcaccaatttcaacgatttacgtcccgcgtatcatgacaattcacgcccgcaataccgaccacagccgcaggatgccatcctgcaacattcggtagtggctaatcaattaacgttattgaaatataatgccggtctggcggacccgaaaatccaggtcaaaggcgatacgctatacgttaccggtgaacaggtgaagtaccgcgactcccgtgaagggatcgtgcgcgctaaccggatcgtcatgaacgatctgccggaggggatccgcacgatccgcgtgacggaaaaccgccttaatctgccgcaggtcaccactgaaaccgatgtcgccagcctgaaacgccatctggaaggcgaaccgctgggacatgaaactccgctggcgcaaaaacgcgtggagccgatcgtgccagagagtactgaacagggttggtatatcgacaagtcgcgcgttgattttcatcttgatcccgtgctgaatcagtcggtaggcggcccggaaaacttctatatgtatcagttgggcgtaatgggaaccgcggatctgtgggtcacagatcatctgctcaccacgggcagcgtgtttgccaatatcgccaacaactacgacaaatttaactacaccaatccgccgaaggactcgcatctgccgcgggtgcgtacgcatgtccgtgagtatgtgcagaacgatgtttatgtgaataacctacaggccaactacttccagtattttggcaatggtttctatgggcaggtctacggcggttatctggagaccatgtttggcggtgccggggcggaagtcctgtatcgcccggtagacagcaattgggcgtttggtctggatgccaactacgtgaaacagcgtgactggcgtagcgcgcaggatatgatgaagtttaccgattacagcgtgaagaccggacatttgaccgcatactggacgccgtcgttcgcccaggatgtgctggtgaaagccagcgttggtcagtatctggcgggcgataaaggcggtacgctggagatcgccaaacgcttcgatagcggcgtcgttgtcggcggttacgcgacgattaccgatgcgtcgccggatgaatatggggaaggggattttaccaaaggcgtatatgtttccgtgccgctggatatcttctcgtccggcccaacccgaagtcgtgcggcaattggctggacgccgctgacgcgtgacggtggtcaacagcttggccgtaagtttggcctgtatgatatgaccagtgataggagcgtaaatttccgttaa

SEQ ID NO: 5350 - protein, 698 aa, Salmonella enterica subsp. enterica serovar Paratyphi B str. SPB7
MKKTHLLSVLALGISAACHAETYPAPVGPSQSDFGGVGLLQTPTARMTREGEMSLNYRDNDQYRYYSASVQLFPWLETTLRYTDVRTKKYSSVESFSGDQTYKDKAFDVKLRLWEESYWMPQVAVGARDIGGTGLFDAEYIVASKAWGPFDFSLGLGWGYLGTSGNVSNPFCSYSDKFCSRDNSYKEAGSVDGSDMFHGPASLFGGVEYQTPWQPLRLKLEYEGNNYQQDFAGKLEQKSKFNVGAIYRVTDWADVNLSYERGNTFMFGVTLRTNFNDLRPAYHDNSRPQYRPQPQDAILQHSVVANQLTLLKYNAGLADPKIQVKGDTLYVTGEQVKYRDSREGIVRANRIVMNDLPEGIRTIRVTENRLNLPQVTTETDVASLKRHLEGEPLGHETPLAQKRVEPIVPESTEQGWYIDKSRVDFHLDPVLNQSVGGPENFYMYQLGVMGTADLWVTDHLLTTGSVFANIANNYDKFNYTNPPKDSHLPRVRTHVREYVQNDVYVNNLQANYFQYFGNGFYGQVYGGYLETMFGGAGAEVLYRPVDSNWAFGLDANYVKQRDWRSAQDMMKFTDYSVKTGHLTAYWTPSFAQDVLVKASVGQYLAGDKGGTLEIAKRFDSGVVVGGYATITDASPDEYGEGDFTKGVYVSVPLDIFSSGPTRSRAAIGWTPLTRDGGQQLGRKFGLYDMTSDRSVNFR

SEQ ID NO: 5351 - DNA, 2133 bp, Pectobacterium atrosepticum SCRI1043
  CDS (1)..(2133): transl_table=11
atgaccaagaacagaaacgttaaactaggctgtctgtcgttggcaattggcggcattctgagtgcgcaggctatggcggctgaaacagaaaacagccgtactgcgacgaacccgaatctgcgttttcagcctgcgggtgtgtcgcagtctgatttcggtggcacgggcttattgcaaatgccaaccgcacgcatggcggaaacgggtgaatttagccttaactaccgcgacaatgaggattatcgacgttactccgtgtccctccaactctttgactggctggaaacaacggtgcgttataccgatatccgtacccgactttatagcgacgacgcgtctttcagcggtaatcaaacctacaaggacaaagccttcgatctcaaggctcgcttgtggcaggaaagctactggatgccggatgtatcgctggggttgcgcgatattgctggtaccgggttgttcgatagcgaatatctggtagccagcaagcgtatggggccgtttgatttcaccttgggtatggggtggggcaatatggcggagagcgggaatattaaaaacccagcctgttcgctgaaagccagcttctgcaatcgtactcagaatacagaaatcggtcagtttgaggttaagaatttcttacatggtccggcggcactgtttggtggaattgaatatcagacgccatgggatccgctgcgcctgaaactcgagtatgacagcaacgattatagtaatgagactgcagatggtgcgcgaagcgagaaaatcaagcaggattctcctttcaacatcggggcagtttaccgcgtgggcgatatactggataccacgctgtcgtggcagcggggcaataccctgatgtggggctttaccctacgtactaactttaacagtttgaaaccaaactatttagacgatgcaccaccagtctatgcgccggtgcaggatggtaaagggacaaactggcagctagtttcgaaagagctgaatgataaggctggctttaaggacgccgatatctacgcggaccaaaagcaggtcaccattgttgccgatcagacaaaatatcgtgatagtgagcaggccacacagcgtgctgccaccgtattggcgaaccatgtcccaggtagtcttgatgaatatcacattgttcagcgcagccagcgcttaccgattgccagtacggaagtcgatgccaaagccttccatcaggttcaacaggctgctattccgcttggtcaacctgaacctgctacgcatcgcaaagaaccggtatctgacgtgcgtggtcagcaggtgctgctcgcagagcccgatcgtctgacgtattcattagatccgacgctggtacagtctttcggtggtcctgaatccttctatatgtaccaaatcgcgcttaaaggcaatgtggactaccgtctaagcgatcactggagcgtggggggaaccgcgctgctgaatctggtgaataactatgacaagtttaactataaatcaccgccggccgatggcgcggcattgccgcgagtcagaacctgggtgcgtgaatattccacatcttccgatctgttattgaccaatctgcaattgacccgcagggataatcccgcgcaggactggtatacgcaggtctacggcggttatctggaaatgatgtatgctggcgttggctctgaagtgctgtatcgtccgttcggtaaaagctgggcactggggctggatgttaactatgtcaaacagcgtgactggaacgacatcatgagaatggccgattacgatgtagtgacgggccatctgaccgcgtattgggaactgccgtttgtggaaggtgcggtggcgaaagtgagcgtaggtcgttatctggctggtgataaaggggtcacgctcgacctgtctcgccgctttgacagcgggattgttgcgggtgcctttgcaaccaaaactaacgtcagcgctgctgaatacggtgaagggagctttaccaaaggcttctacgtctccataccgtttgacctactgttcactgagcctacggtgaaacgtggggcagtcggttgggtaccgctaacgcgtgatggtggtcaaatgttgcagcgccgtagctcgctgtatggcctcaccgatcactaa

SEQ ID NO: 5352 - protein, 710 aa, Pectobacterium atrosepticum SCRI1043
MTKNRNVKLGCLSLAIGGILSAQAMAAETENSRTATNPNLRFQPAGVSQSDFGGTGLLQMPTARMAETGEFSLNYRDNEDYRRYSVSLQLFDWLETTVRYTDIRTRLYSDDASFSGNQTYKDKAFDLKARLWQESYWMPDVSLGLRDIAGTGLFDSEYLVASKRMGPFDFTLGMGWGNMAESGNIKNPACSLKASFCNRTQNTEIGQFEVKNFLHGPAALFGGIEYQTPWDPLRLKLEYDSNDYSNETADGARSEKIKQDSPFNIGAVYRVGDILDTTLSWQRGNTLMWGFTLRTNFNSLKPNYLDDAPPVYAPVQDGKGTNWQLVSKELNDKAGFKDADIYADQKQVTIVADQTKYRDSEQATQRAATVLANHVPGSLDEYHIVQRSQRLPIASTEVDAKAFHQVQQAAIPLGQPEPATHRKEPVSDVRGQQVLLAEPDRLTYSLDPTLVQSFGGPESFYMYQIALKGNVDYRLSDHWSVGGTALLNLVNNYDKFNYKSPPADGAALPRVRTWVREYSTSSDLLLTNLQLTRRDNPAQDWYTQVYGGYLEMMYAGVGSEVLYRPFGKSWALGLDVNYVKQRDWNDIMRMADYDVVTGHLTAYWELPFVEGAVAKVSVGRYLAGDKGVTLDLSRRFDSGIVAGAFATKTNVSAAEYGEGSFTKGFYVSIPFDLLFTEPTVKRGAVGWVPLTRDGGQMLQRRSSLYGLTDH

SEQ ID NO: 5353 - DNA, 2079 bp, Pseudomonas fluorescens PfO-1
  CDS (1)..(2079): transl_table=11
ttgaatttgcgttttgcagctgtgttgttattgccgtgtggcctggtgcatgccgagcctcggattacccagaatgacttcggcggcgtcggtctgttgcagaccccgaccgcgcgcatgtcgcccgccggtgagttgagcgtcaacgccaaccgcaccgaaccgtacagccgatacagcgtttcgttgcagccgctcgactggctggaaggttcgtttcgctacaccgccatcaccaaccgtccgtacggttccgaagcgctgagcggcagccagagctataaggacaaggcggtcgacgccaaggtccggctgtggcaggaaagccactgggcgccggaagtggcgctgggctttcgagacatcggcggtaccggtctgtttgccagtgaattcttcgtggccaacaagcgctgggacaatttcgatttcagcgccggcatcgcctggggttacatcggcaatcgcggcgatgtcgataacccgttgggttcgatcagtgaccgcttcaacactcgccctgatctggaaggcaccggtgacgtcaacgccggctcgtactttcgcggcaagccgtcgtttttcggcggtgtgagttaccagacgccctgggaccgtctcagtctgaagctcgaatacgaaggcaacgactacaagcacgagcccaaggacaacatcatcaagcaggactcgccgatcaacctcggcgcggtgttcaaggtgaccgattcagtcgatgtgagtgcggcctgggaacgcggcaacacggcgatgttcggcatcacgttccacaccaatttcgtcagtcgcaaggccccggccaagacctttgatccgccggccgaaccgctgccggcgaaggcgccgaccgcgtccatggaagaggtcaactgggccgacgtgtcgcgccgtttgcagcagaacgccggctacaaggtcgaacgcatcacccagcgcgattccgaactgatcgtgtacggcgagcagcagcgctatttccattcgccgaaggctgtcggccgcgcgagccggatcctcgacaacagcgtcaacgacgacatcgactggttcaccgtggtcaacaagcgctacgacctgccgctggaagaaaccagcgtgccccggcagacattccgcgaagtgatcaacaacgaagagcctctggagtcgctgcaccgcaccaccgagatcaacccggcgatgccgcgcaacgagaaaaccctctacaccgaggcgccgcagcacttcaattacggcgtcggcctgggcttcaaacagaacgtcggcggccccgatggtttgctctatcagttcacggcggatctggacgccgagtaccgcttcaaccgcaacacctggtggaacggtctgctgagtcagaacctgatcaacaacttcgacaagttcacctacgacgcgcccagcggcctgccgcgtgtgcgcaccgacttgcgtcagtacctgaccacgtcggacaccaccatgccgctgttccaggtcagccacgccgagcaactggacaaggatttgtacggcatggtctacggcggttatctggagtcgatgttcgccggggtcgggggcgaggtgctgtttcgcccgaccggcaagcgctggtcgattggtgcggacctgaactacgtgcgtcagcgtgagttcgaccagggtttcggcctgcgtgattactcggtctggaccggccacatcaccggctacaccgacctgccgttcgacacgctggccgcagtcagcgtcgggcgttacctggcgggcgactttggcggcacggtggatatctcccgcgagttcttcaacggcgtacgctttggcgcctgggcgaccattaccaccgccggcagcgccgagtatggtgagggtagtttcgacaaggggctgtatttgtcgattccgttcgacgaaatgatgagcatgtcgaccatgcgccgcgccaacctggtgtgggcaccgctgacccgtgacggtggcgcgcggctcaaccgaagcttccagctgcattcgatgacggacagtcgggaaggggacatgttctaccgcaacttcgggaagattaccgagtag

SEQ ID NO: 5354 - protein, 692 aa, Pseudomonas fluorescens PfO-1
MNLRFAAVLLLPCGLVHAEPRITQNDFGGVGLLQTPTARMSPAGELSVNANRTEPYSRYSVSLQPLDWLEGSFRYTAITNRPYGSEALSGSQSYKDKAVDAKVRLWQESHWAPEVALGFRDIGGTGLFASEFFVANKRWDNFDFSAGIAWGYIGNRGDVDNPLGSISDRFNTRPDLEGTGDVNAGSYFRGKPSFFGGVSYQTPWDRLSLKLEYEGNDYKHEPKDNIIKQDSPINLGAVFKVTDSVDVSAAWERGNTAMFGITFHTNFVSRKAPAKTFDPPAEPLPAKAPTASMEEVNWADVSRRLQQNAGYKVERITQRDSELIVYGEQQRYFHSPKAVGRASRILDNSVNDDIDWFTVVNKRYDLPLEETSVPRQTFREVINNEEPLESLHRTTEINPAMPRNEKTLYTEAPQHFNYGVGLGFKQNVGGPDGLLYQFTADLDAEYRFNRNTWWNGLLSQNLINNFDKFTYDAPSGLPRVRTDLRQYLTTSDTTMPLFQVSHAEQLDKDLYGMVYGGYLESMFAGVGGEVLFRPTGKRWSIGADLNYVRQREFDQGFGLRDYSVWTGHITGYTDLPFDTLAAVSVGRYLAGDFGGTVDISREFFNGVRFGAWATITTAGSAEYGEGSFDKGLYLSIPFDEMMSMSTMRRANLVWAPLTRDGGARLNRSFQLHSMTDSREGDMFYRNFGKITE

SEQ ID NO: 5355 - DNA, 2364 bp, Shewanella sp. MR-4
  CDS (1)..(2364): transl_table=11
atgaaaaactcgactcccactttgcatgcgttcgggcgtttatcagcgctgtccttagcactgctacctttattacatgttaacgccgatgaattttcctatcccacactgttaccatcacagtcagattttggtggtgttgggctaatgcagatgccaacaggacgtatggcacctgaaggtgaatttaactttgccactacttacaacgatgactatcaacattttagcgcttcagtgcagctcttcccttggtttgaaaccactattcgctacaccttagtacaagacctgctttacagtagcgatcctagctttagtggtaatactaaatacacggataaagggatcgattttaagattcgtctactcgaagaaagtaactggctccctgaaacctccattggcgtgcgagactttggtggtacaggtttatttgatggtgaatttattgctgcgacaaagcgcgtcggtccactcgattttactctaggtataggttggggctatattggcaatagcggtaatctcacttccgataaaaaagatcttaattacaactgtgatagagatacttcttatgggggtaaaggtggcactgttgattatcagcgttggtttaaaggctgcgcggcactctttggtggcgttgaatatcaaaccccttgggaacctttacgcttgaaagtcgaatacgatggtaacgactatcaatcagatttcccagtggttcgtggtgatatagccatgccacaggacagcaaatttaactatggaatgctttatcgctttggtgattggggcgatctacatttaagttatgagcgcggtaatacgtggacgctcggttttagtctgcaaacaaattttaataccttgtcgcagattaaacgtgatccagaggccgcaaaatataaaccgcttcctgctgcgccattaacgcatagtccgacagaaacatctagacatgcagacatgactaaatccgcacaagatattgaaaatataaaagctttatcagtaaaagatgacgaagtgcaaggctccgacctcttatctacctcatatcaaaccatgcccgatactaaagtggattggaataaagttgctcaggatttacaaactattgctggttacgcaaacgcaaaaatttaccttgataatgaaagcattaccgttgtaggtgaacagacaaaattccgcgatagaaatgaagcgcataaaagagctgccaccattcttgccaacaatactgatgccaactttattaaagagtatcgactaattgagactcgttatagtcaacctataacggaaacccgtattgatgcccagaagtttgcccaagtcgcaagttatggctacctcaatgccaaagtcaccgatgcaactgtagtgagtatcccaagcttacctcatggacaactagtcaataatactgataaagattggttagataagcttagctttgatgtttcgcccaccatgtcccaatccttcggcggttccgaagggttttatatgtttagtattggaatgacaggtagtgcaagttaccgctttaccgataactttgagttttcaagctctctgtatcttaacctctacgataactttgataagtttttatacgaagttccacccgatggcactgacttaaaacgtgttcgcaccctagttcgtcaatatattcatgataatccagttcgggtgaataacctgcaactgacttggatggataatttaaccgacaacatttctttccaagcctacggcggctatttagaaatgatgtatggtggtgtgggcacagaggttctctatcgaccacttaacagtcaatgggcttttggtatcgatgtgaattatgttaagcagcgcgatccagacagcatgctaggcttctttgatgatgagcatcaatttgactcactcactaaccgcccctatcgagtgcaaacgggtacaataacaggtcatgcatctgtctattatcaacctgactggttccccaataccttattaaggatcagtgcaggccagtatttagccgaggataaaggagtaacggttgatttctccaaacaattcgatagcggtgtgattgttggcgctttcgccactaagactaatctttcatcagatgagtatggtgagggcagttttactaaaggcttctacgtgtcgattccatttgacttgatgaccattaaatcaacccatagccgtgcgacaatcagttggatgccgctgacacgcgatggtggtcaaacattaggccgcaagtacagtctatatgatgtaatggatgctagagatccttggttcacacgtgcaagcatcacaagtgagtctgtcaaataa

SEQ ID NO: 5356 - protein, 787 aa, Shewanella sp. MR-4
MKNSTPTLHAFGRLSALSLALLPLLHVNADEFSYPTLLPSQSDFGGVGLMQMPTGRMAPEGEFNFATTYNDDYQHFSASVQLFPWFETTIRYTLVQDLLYSSDPSFSGNTKYTDKGIDFKIRLLEESNWLPETSIGVRDFGGTGLFDGEFIAATKRVGPLDFTLGIGWGYIGNSGNLTSDKKDLNYNCDRDTSYGGKGGTVDYQRWFKGCAALFGGVEYQTPWEPLRLKVEYDGNDYQSDFPVVRGDIAMPQDSKFNYGMLYRFGDWGDLHLSYERGNTWTLGFSLQTNFNTLSQIKRDPEAAKYKPLPAAPLTHSPTETSRHADMTKSAQDIENIKALSVKDDEVQGSDLLSTSYQTMPDTKVDWNKVAQDLQTIAGYANAKIYLDNESITVVGEQTKFRDRNEAHKRAATILANNTDANFIKEYRLIETRYSQPITETRIDAQKFAQVASYGYLNAKVTDATVVSIPSLPHGQLVNNTDKDWLDKLSFDVSPTMSQSFGGSEGFYMFSIGMTGSASYRFTDNFEFSSSLYLNLYDNFDKFLYEVPPDGTDLKRVRTLVRQYIHDNPVRVNNLQLTWMDNLTDNISFQAYGGYLEMMYGGVGTEVLYRPLNSQWAFGIDVNYVKQRDPDSMLGFFDDEHQFDSLTNRPYRVQTGTITGHASVYYQPDWFPNTLLRISAGQYLAEDKGVTVDFSKQFDSGVIVGAFATKTNLSSDEYGEGSFTKGFYVSIPFDLMTIKSTHSRATISWMPLTRDGGQTLGRKYSLYDVMDARDPWFTRASITSESVK

SEQ ID NO: 5357 - DNA, 2364 bp, Shewanella sp. MR-7
  CDS (1)..(2364): transl_table=11
atgaaaaactcgactcccactttgcatgcgttcgggcgtttatcagcgctgtccttagcactgctacctttattacatgttaacgccgatgaattttcctatcccacactgttaccatcacagtcagattttggtggtgttgggctaatgcagatgccaacaggacgtatggcacctgaaggtgaatttaactttgccactacttacaacgatgactatcaacattttagcgcttcagtgcagctcttcccttggtttgaaaccactattcgctacaccttagtacaagacctgctttacagtagcgatcctagctttagtggtaatactaaatacacggataaagggatcgattttaagattcgtctactcgaagaaagtaactggctccctgaaacctccattggcgtgcgagactttggtggtacaggtttatttgatggtgaatttattgctgcgacaaagcgcgtcggtccactcgattttactctaggtataggttggggctatattggcaatagcggtaatctcacttccgataaaaaagatcttaattacaactgtgatagagatacttcttatgggggtaaaggtggcactgttgattatcagcgttggtttaaaggctgcgcggcactctttggtggcgttgaataccaaactccttgggagccacttcgcttaaaagtcgaatacgatggtaacgactatcaatcagatttcccagtggttcgtggtggcatagccatgccacaggacagcaaatttaactatggaatgctttatcgctttggggattggggcgatctacatttaagttatgagcgcggtaatacgtggacgctcggttttagtctgcaaacaaattttaataccttgtcgcagattaaacgtgatccagaggccgcaaaatataaaccgcttcctgctgcgccattaacgcatagtccgacagaaacatctagacaggcagacacgactaaatccgcacaagatattgaaaatgtaaaagctttatcagtaaaagatgacgaagcgcaaggttccgacctcttatctgcctcatatcaaaccatgcctgatactaaagtggattggaataaagttgctcaggatttacaaactattgctggttacgcaaacgcaaaaatttaccttgataatgaaagcattaccgttgtaggtgaacagacaaaattccgcgatagaaatgaagcgcataaaagagctgccaccattcttgccaacaatactgatgccaactttattaaagagtatcgactaattgagactcgttatagtcaacctataacggaaacccgcattgatgcccagaagtttgcccaagtcgcaagttatggctacctcaatgccaaagtcaccgatgcaactgtagtgagtatcccaagcttacctcatggacaactagtaaataatactgataaagattggttagataagcttagttttgatgtttcgcccaccatgtcccaatccttcggcggttccgaagggttttatatgtttagtattggaatgacaggtagtgcaagttaccgctttaccgataactttgagttttcaagctctctgtatcttaacctctacgataactttgataagtttttatacgaagttccacccgatggcactgacttaaaacgtgttcgcaccctagttcgtcaatatattcatgataatccagttcgggtgaataacctgcaactgacttggatggataatttaaccgacaacatttctttccaagcctacggcggctatttagaaatgatgtatggtggtgtgggcacagaggttctctatcgaccacttaacagtcaatgggccttcggtgtcgatatgaattatgtcaaacaacgtgatccagacagcatgctaggcttctttgatgatgagcatcaatttgactcactcactaaccgcccctatcgagtgcaaacgggtacaataacaggtcatgcatctgtctattatcaacctgactggttccccaataccttattaaggatcagtgcaggccagtatttagccgaggataaaggagtaacggttgatttctccaaacaattcgatagcggtgtgattgttggtgctttcgccactaagactaatctttcatcagatgagtatggtgagggcagttttactaaaggcttctacgtgtcgattccatttgacttgatgaccattaaatcaacccatagcagtgcgacaatcagttggatgccgctgacacgcgatggtggtcaaacattaggtcgcaagtacagtctatatgatgtaatggatgctagagatccttggttcacacgtgcaagcatcacaagtgagtctgtcaaataa

SEQ ID NO: 5358 - protein, 787 aa, Shewanella sp. MR-7
MKNSTPTLHAFGRLSALSLALLPLLHVNADEFSYPTLLPSQSDFGGVGLMQMPTGRMAPEGEFNFATTYNDDYQHFSASVQLFPWFETTIRYTLVQDLLYSSDPSFSGNTKYTDKGIDFKIRLLEESNWLPETSIGVRDFGGTGLFDGEFIAATKRVGPLDFTLGIGWGYIGNSGNLTSDKKDLNYNCDRDTSYGGKGGTVDYQRWFKGCAALFGGVEYQTPWEPLRLKVEYDGNDYQSDFPVVRGGIAMPQDSKFNYGMLYRFGDWGDLHLSYERGNTWTLGFSLQTNFNTLSQIKRDPEAAKYKPLPAAPLTHSPTETSRQADTTKSAQDIENVKALSVKDDEAQGSDLLSASYQTMPDTKVDWNKVAQDLQTIAGYANAKIYLDNESITVVGEQTKFRDRNEAHKRAATILANNTDANFIKEYRLIETRYSQPITETRIDAQKFAQVASYGYLNAKVTDATVVSIPSLPHGQLVNNTDKDWLDKLSFDVSPTMSQSFGGSEGFYMFSIGMTGSASYRFTDNFEFSSSLYLNLYDNFDKFLYEVPPDGTDLKRVRTLVRQYIHDNPVRVNNLQLTWMDNLTDNISFQAYGGYLEMMYGGVGTEVLYRPLNSQWAFGVDMNYVKQRDPDSMLGFFDDEHQFDSLTNRPYRVQTGTITGHASVYYQPDWFPNTLLRISAGQYLAEDKGVTVDFSKQFDSGVIVGAFATKTNLSSDEYGEGSFTKGFYVSIPFDLMTIKSTHSSATISWMPLTRDGGQTLGRKYSLYDVMDARDPWFTRASITSESVK

SEQ ID NO: 5359 - DNA, 2376 bp, Shewanella sp. ANA-3
  CDS (1)..(2376): transl_table=11
atgaaaaactcgactcccacttttccctctttcgggcgtttatcagcgctatctttagcactgctaccattattacacgttagcgccgatgaattttcttacccaacatcgttgccttcacagtctgactttggtggtgtaggtttaatgcaaatgccaacaggccgtatgacgcctgaaggtgaatttaactttgccacgacttacaacgatgactatcagcattttagcgcttcagtgcagctcttcccttggtttgaaacaacaatacgctacaccctagtacaagacctgctttacagtagcgaccccaactttagtggtaatactaaatacacggataaaggcatagactttaaagttcgtctactcgaagaaagtaactggctgcctgaaacctctattggggtgagggactttggtggcactggtttatttgatggtgaatttgttgctgcgacaaagcgcgtcggtccactcgattttactctaggtataggttggggctatatcggcaatagcggtaatctcacttccgataaaaaagatcttaattacaactgtgatagagatacttcttatgggggtaaaggtggcactgttgattaccagcgttggtttaagggctgcgcatccctctttggtggcgttgaatatcagactccttgggaacctttacgtttgaaagtcgaatacgatggtaacgactatcaatcagactttcccgttgttcgtggtggtatagatatgcctcaggacagcaagtttaactatggaatgctctatcgttttggagactggggcgatctacatttaagttatgagcgtggcaatacttggacacttggctttagtctgcagaccaattttaataccttgtcacagattaaacgagatccaaaggcagctaaatataagccacttcctgccgcgccattaacccttacgcaaacagaatcctctgctcaagtaaacacactaagagccgaacaagcgactgtgagtacagaaacttcaacgcataaatcagaagtgcaaaatgatgaagtagcaaatctagagcttgtaaatgcatccagtcagactgctgcgaatcccctggtggattggaataaaattgctcaggatttacaaactattgctggttacgcaaacgccaaaatttaccttgataatgacagtattaccgttgtaggtgaacagacaaaattccgcgatagaaatgaagcgcataaaagagctgccaccattctagccaacaatactgatgccaactttattaaagagtatcgactaattgagactcgttatagccaaccaataacggaaacccgtattgatgctcagaagtttgccaaagtcgcaagttatggctatctcaatgccaaagtcactgatgctagtgttgtgagtattccaagcttacctcagggacaactagtcaataatactgataaagattggctagataagcttagttttgatgtttcgcctaccatgtcccaatccttcggcggttccgaagggttttatatgtttagtattggaatgactggcagtgcaagttaccgatttaccgataactttgagttttcaagctctctttatcttaacctctacgataactttgataagtttttatacgaagttccacccgatggcactgacttaaaacgtgttcgcaccctggttcgtcaatatattcatgataatcctgtacgagtgaataacctgcaactaacctggatggataatttaaccgataacatttctttccaagcctacggcggctatttagaaatgatgtatggtggtgtgggcacagaggttctctatcgaccacttaacagccaatgggcttttggggttgatgtgaattatgttaagcagcgcgatccagacagcatgctaggcttctttgaagatgagcatcaatttgactcactcactaaccgcccctatcgagtgcaaacgggtacggtaacaggacacgcatcaatctattatcaacctgactggttccccaatactttactgagaatcagtgccggccagtatttggccgaggataaaggagtaacagttgatttctcaaaacaattcgatagtggggtgattgttggcgctttcgccactaagactaatctttcatcagaggagtatggtgagggcagttttactaaaggcttctacgtgtcgattccatttgacttgatgaccattaaatcaacccatagccgggcgacaatcagttggatgccactgacacgcgatggtggtcaaacattagggcgcaagtacagtctatatgatgtaatggatgctagagatccttggttcacacgcgcaagcatcacaagtgagtctgtcaaataa

SEQ ID NO: 5360 - protein, 791 aa, Shewanella sp. ANA-3
MKNSTPTFPSFGRLSALSLALLPLLHVSADEFSYPTSLPSQSDFGGVGLMQMPTGRMTPEGEFNFATTYNDDYQHFSASVQLFPWFETTIRYTLVQDLLYSSDPNFSGNTKYTDKGIDFKVRLLEESNWLPETSIGVRDFGGTGLFDGEFVAATKRVGPLDFTLGIGWGYIGNSGNLTSDKKDLNYNCDRDTSYGGKGGTVDYQRWFKGCASLFGGVEYQTPWEPLRLKVEYDGNDYQSDFPVVRGGIDMPQDSKFNYGMLYRFGDWGDLHLSYERGNTWTLGFSLQTNFNTLSQIKRDPKAAKYKPLPAAPLTLTQTESSAQVNTLRAEQATVSTETSTHKSEVQNDEVANLELVNASSQTAANPLVDWNKIAQDLQTIAGYANAKIYLDNDSITVVGEQTKFRDRNEAHKRAATILANNTDANFIKEYRLIETRYSQPITETRIDAQKFAKVASYGYLNAKVTDASVVSIPSLPQGQLVNNTDKDWLDKLSFDVSPTMSQSFGGSEGFYMFSIGMTGSASYRFTDNFEFSSSLYLNLYDNFDKFLYEVPPDGTDLKRVRTLVRQYIHDNPVRVNNLQLTWMDNLTDNISFQAYGGYLEMMYGGVGTEVLYRPLNSQWAFGVDVNYVKQRDPDSMLGFFEDEHQFDSLTNRPYRVQTGTVTGHASIYYQPDWFPNTLLRISAGQYLAEDKGVTVDFSKQFDSGVIVGAFATKTNLSSEEYGEGSFTKGFYVSIPFDLMTIKSTHSRATISWMPLTRDGGQTLGRKYSLYDVMDARDPWFTRASITSESVK

SEQ ID NO: 5361 - DNA, 2160 bp, Vibrio sp. Ex25
  CDS (1)..(2160): transl_table=11
atgggcccagcattggtttgggctcaagaagtaccctttgaggctccctcgttacagccttctcaatctgattttggtggtgttggcttaatgcagatgccaaccggacgtatggctcctgaaggggaattcaacttttctgttaccggtagtgatgagtaccttttttacaacgttactctgcaactaatgccttggttagaaacaaccattcgttatacttcggtgcgagatttgctctatagtaaggatcctagtttctcgggagatacaaactatacagataaaggtattgactttaaaattcgattgctaaaagaatctcagtatattcctgagctatcactgggtgttcgagactttgctggtaccggcttattcgatggagaatacatagcagctacgaagcggtattccaactctgagctagggacctttgattttacttttggtattggttgggggtcgctaggcactcgtgacaacatctctaacccgacttgtaaattgtcagatcgattttgtgaacgcccctctgactatttagatacaggtggcacaactaactttgatagagcatttaaaggaccaactgcattgtttggtggtgttgaatatcagaccttacatgcaccattacgttttaaactcgaatacgatagcaatgattacagcgaagacttccctgtggtaaaaggtggcgtggacatgacaccacatactccgtggaacgctggtatgctgtaccgtatcggaatggccgattttcgtttaagttatgaacgcggagacactttggttgcaggtttaacgctcaacactaacttcaatgacatgccatcattctggcgagatgagcctacgccagaagtcgaagataaccaaccagaagaactgtctaatgttgactgggaacgtgtaacggaagatttagacaaaattgcgggttaccaaaacacgcgcatttatgttgatgacaacaccgtaactgtcgttggtgaacagaagaaatatcgtgaccgtacagaggcacatgaaaaagcggcggctgtacttcataatgaaatgcctgaagatattgatacctatgcgatcaatgaacgtagccgaggcttagtcggcgaacaaacgattatttccaaggagaaatatcgcgactttgcccaagttaattacatcaaccctaaaatagaagatgcaaccgcaaaagctagcaataagccaagtggagaatctgtctatgatggttttgagcgttttgattggggctttgcaccgaagcttgttcaaactctcggtaacgcagaagacttctacctctttagtgtaggactaagcggtaatgcctcatactggctgacggataaccttgaaattggcggctccttatactgggattggtataacaactacgataagtttaactatgtcactccacctgatggtactaccgttcctcgtgttcgcaccatgttccgcgcttaccaaaatgaacatactgtaaccatgtcaaacctacaattgacttggttccaagagtattccaatacgatggaccagcaattctacgctggctatctggagagcatgtttgccggagtcggtaccgagtttctttaccgaccacaaggagctaactgggcgattggcgctgacgtcaacgtaatttctcaacgtgatccacaaagttacttcggtgtttacgatgagaaatggcaaaacgtgccagaatatggacgtccgttccaagttattgataaaggattcactggttttgtatctggttactactaccctcaatgggagttcctgcaagatttgatgatccaagtcgatgttggtcagttcctagctggcgatgttggtacacaaatcaatgtttctaagcagttcaagagtggcgtaattgctggcgcctttgcctcatttacagacttgtctgcggatgaatttggtgaaggtagctttactaaaggtttctacttgtcgattccgtttgacatcatgaccgttaaaccaagtaacaatcgtgcgaactttagttggcagcctcttactcgtgacggagggcagaagctcggccgcaaatacagcttaattgagttaaccgacgaacgaaatccttggtaccaaagacctaaccgttcggatgtggaataa

SEQ ID NO: 5362 - protein, 719 aa, Vibrio sp. Ex25
MGPALVWAQEVPFEAPSLQPSQSDFGGVGLMQMPTGRMAPEGEFNFSVTGSDEYLFYNVTLQLMPWLETTIRYTSVRDLLYSKDPSFSGDTNYTDKGIDFKIRLLKESQYIPELSLGVRDFAGTGLFDGEYIAATKRYSNSELGTFDFTFGIGWGSLGTRDNISNPTCKLSDRFCERPSDYLDTGGTTNFDRAFKGPTALFGGVEYQTLHAPLRFKLEYDSNDYSEDFPVVKGGVDMTPHTPWNAGMLYRIGMADFRLSYERGDTLVAGLTLNTNFNDMPSFWRDEPTPEVEDNQPEELSNVDWERVTEDLDKIAGYQNTRIYVDDNTVTVVGEQKKYRDRTEAHEKAAAVLHNEMPEDIDTYAINERSRGLVGEQTIISKEKYRDFAQVNYINPKIEDATAKASNKPSGESVYDGFERFDWGFAPKLVQTLGNAEDFYLFSVGLSGNASYWLTDNLEIGGSLYWDWYNNYDKFNYVTPPDGTTVPRVRTMFRAYQNEHTVTMSNLQLTWFQEYSNTMDQQFYAGYLESMFAGVGTEFLYRPQGANWAIGADVNVISQRDPQSYFGVYDEKWQNVPEYGRPFQVIDKGFTGFVSGYYYPQWEFLQDLMIQVDVGQFLAGDVGTQINVSKQFKSGVIAGAFASFTDLSADEFGEGSFTKGFYLSIPFDIMTVKPSNNRANFSWQPLTRDGGQKLGRKYSLIELTDERNPWYQRPNRSDVE

SEQ ID NO: 5363 - DNA, 2208 bp, Vibrio anguillarum
  CDS (1)..(2208): transl_table=11
atgaaactgagttatctttcgtcttcgacgattcaaccacctcgcgtcacttgtatggcgtgctgcattgcgtttagtttggcgttaccgagccaagctgacgaattcagctacccgacgctggtgcattctcaaactgattttggtggtacaggcttaatacagatgcccagtgcccgcatgatgccagaaggccaattcagtttaagcgtcacaaacaacgatgattacattcattacgtcagttcactccaactcttcccatggctagaagcgacaattcgttacacgcaagtgcatgagctactttacagcggcgataccagctttagcggtgatacgaaatacacggataaatcgattgatgccaaactgcgtttgctagaagagggatattggctgccagaagtgtcggtagggttacgtgatgttggcggtacaggtttgtttgatggcgaatttattgcagccagtaaacgttttggcccattggatgtcacactcggcgttggctggggttatttgggtaacaacgcgaacttaacgggtgataaatcctcaacaccagattgcggtcgcgatggtagttacagtggtaaaggcggccaatttgatattggacggatgttcacgggttgtacgtcgctgtttggtggggttgaataccaaacaccttggcaaccactgcgtctaaaagtggaatacgatggcaatgattaccgcagtgattttcccgtcacccgtggtgatgcagtaatgcccgtttcaacaccgtggaactttggtgtggtatacgctcttgctgattgggccgatttacgccttagctatgaacgcggtaatacctttaccgcaggcattaccttgggtacgaacttggcgaccatgcaaccggtgtgggttgatgaacccaaacccagttatgctccgaaagcgaaatcacatgagttagacgatgctgaatggcaaacgctacttcatgaccttgatgtaatcgccggttataaacaagcgactttgtaccaagatgatgccaccctcacgattgaagctgaacaatataagtatcgcgatcgcaaagaagcgcatgaacgcgccgcattgctgctggcgaatcaaggcattgatgcacagacatatcgcatcatcgagacggccaataatcagcctctcactgaaaccagaataaaagcgaatgcgtttgcccgtgttgctgaccgtgattaccctaacgctcacatcaccgatgccagtgcgcgcggtaaccccgtcgcgatcaatggcgaagtaaaagcgcagcagtatgatgcgtggcaatttggtttagcgcctgtgttgcagcagtcttttggtggctctgaagacttttatttgtacgcgcttggtgtcagtgccaatgccagcgtacaaacacgagatcattggctactctctggcagcctttatggcaaccttgccgataactacgacaaatacaagtacaccgtaccgccagatggtactgatttgaaacgggttcgtaccttgtctcgacaatattatgaagatgccgttcgccttgatagcctgcaactaacctactttgatactttcggccaaagttggtttggtcaaagctacgcagggtatctcgaaaccatgtttgctggtgtcggcggcgaaatactctatcgtccattaggcaaaaattgggcggttgggattgatggaaactatgtaaaacagcgcgaccctgacaccgctttcggtctgtataaagaagaagtgcattctgatccacaaacgggtcgaaactatcgagtacaaactggcacagtaacaggccatgcaacgctctattggcagcctaagttttggtcattgatagacaataccttactcaaggtcagtgcggggcgttacttaaccgacgatatcggtatgtcggtcgatttttctaagcagtttgatagtggtgtgattgccggggcgtttatttctaaaacgaacctttctgcggaagagtttggtgaaggcagttttaccaaggggttttatgtttcaattcctatggacttgatgaccattcggccaagtacacagcgcgtgaccgtatcttggttaccgattcaacgtgatggtgggcaaatgctgaaccgacaatatcgcttgtacgatatgacggatgcacgctccccttggtatggtcgccctatctcaagcaactag

SEQ ID NO: 5364 - protein, 735 aa, Vibrio anguillarum
MKLSYLSSSTIQPPRVTCMACCIAFSLALPSQADEFSYPTLVHSQTDFGGTGLIQMPSARMMPEGQFSLSVTNNDDYIHYVSSLQLFPWLEATIRYTQVHELLYSGDTSFSGDTKYTDKSIDAKLRLLEEGYWLPEVSVGLRDVGGTGLFDGEFIAASKRFGPLDVTLGVGWGYLGNNANLTGDKSSTPDCGRDGSYSGKGGQFDIGRMFTGCTSLFGGVEYQTPWQPLRLKVEYDGNDYRSDFPVTRGDAVMPVSTPWNFGVVYALADWADLRLSYERGNTFTAGITLGTNLATMQPVWVDEPKPSYAPKAKSHELDDAEWQTLLHDLDVIAGYKQATLYQDDATLTIEAEQYKYRDRKEAHERAALLLANQGIDAQTYRIIETANNQPLTETRIKANAFARVADRDYPNAHITDASARGNPVAINGEVKAQQYDAWQFGLAPVLQQSFGGSEDFYLYALGVSANASVQTRDHWLLSGSLYGNLADNYDKYKYTVPPDGTDLKRVRTLSRQYYEDAVRLDSLQLTYFDTFGQSWFGQSYAGYLETMFAGVGGEILYRPLGKNWAVGIDGNYVKQRDPDTAFGLYKEEVHSDPQTGRNYRVQTGTVTGHATLYWQPKFWSLIDNTLLKVSAGRYLTDDIGMSVDFSKQFDSGVIAGAFISKTNLSAEEFGEGSFTKGFYVSIPMDLMTIRPSTQRVTVSWLPIQRDGGQMLNRQYRLYDMTDARSPWYGRPISSN

SEQ ID NO: 5365 - DNA, 2196 bp, Vibrio sp
  CDS (1)..(2196)
atgataccaattagaaaaagcttaaccctttctttaatgggcccagcattggtttgggctcaagaagtaccctttgaggctccctcgttacagccttctcaatctgattttggtggtgttggcttaatgcagatgccaaccggacgtatggctcctgaaggggaattcaacttttctgttaccggtagtgatgagtaccttttttacaacgttactctgcaactaatgccttggttagaaacaaccattcgttatacttcggtgcgagatttgctctatagtaaggatcctagtttctcgggagatacaaactatacagataaaggtattgactttaaaattcgattgctaaaagaatctcagtatattcctgagctatcactgggtgttcgagactttgctggtaccggcttattcgatggagaatacatagcagctacgaagcggtattccaactctgagctagggacctttgattttacttttggtattggttgggggtcgctaggcactcgtgacaacatctctaacccgacttgtaaattgtcagatcgattttgtgaacgcccctctgactatttagatacaggtggcacaactaactttgatagagcatttaaaggaccaactgcattgtttggtggtgttgaatatcagaccttacatgcaccattacgttttaaactcgaatacgatagcaatgattacagcgaagacttccctgtggtaaaaggtggcgtggacatgacaccacatactccgtggaacgctggtatgctgtaccgtatcggaatggccgattttcgtttaagttatgaacgcggagacactttggttgcaggtttaacgctcaacactaacttcaatgacatgccatcattctggcgagatgagcctacgccagaagtcgaagataaccaaccagaagaactgtctaatgttgactgggaacgtgtaacggaagatttagacaaaattgcgggttaccaaaacacgcgcatttatgttgatgacaacaccgtaactgtcgttggtgaacagaagaaatatcgtgaccgtacagaggcacatgaaaaagcggcggctgtacttcataatgaaatgcctgaagatattgatacctatgcgatcaatgaacgtagccgaggcttagtcggcgaacaaacgattatttccaaggagaaatatcgcgactttgcccaagttaattacatcaaccctaaaatagaagatgcaaccgcaaaagctagcaataagccaagtggagaatctgtctatgatggttttgagcgttttgattggggctttgcaccgaagcttgttcaaactctcggtaacgcagaagacttctacctctttagtgtaggactaagcggtaatgcctcatactggctgacggataaccttgaaattggcggctccttatactgggattggtataacaactacgataagtttaactatgtcactccacctgatggtactaccgttcctcgtgttcgcaccatgttccgcgcttaccaaaatgaacatactgtaaccatgtcaaacctacaattgacttggttccaagagtattccaatacgatggaccagcaattctacgctggctatctggagagcatgtttgccggagtcggtaccgagtttctttaccgaccacaaggagctaactgggcgattggcgctgacgtcaacgtaatttctcaacgtgatccacaaagttacttcggtgtttacgatgagaaatggcaaaacgtgccagaatatggacgtccgttccaagttattgataaaggattcactggttttgtatctggttactactaccctcaatgggagttcctgcaagatttgatgatccaagtcgatgttggtcagttcctagctggcgatgttggtacacaaatcaatgtttctaagcagttcaagagtggcgtaattgctggcgcctttgcctcatttacagacttgtctgcggatgaatttggtgaaggtagctttactaaaggtttctacttgtcgattccgtttgacatcatgaccgttaaaccaagtaacaatcgtgcgaactttagttggcagcctcttactcgtgacggagggcagaagctcggccgcaaatacagcttaattgagttaaccgacgaacgaaatccttggtaccaaagacctaaccgttcggatgtggaataa

SEQ ID NO: 5366 - protein, 731 aa, Vibrio sp
MIPIRKSLTLSLMGPALVWAQEVPFEAPSLQPSQSDFGGVGLMQMPTGRMAPEGEFNFSVTGSDEYLFYNVTLQLMPWLETTIRYTSVRDLLYSKDPSFSGDTNYTDKGIDFKIRLLKESQYIPELSLGVRDFAGTGLFDGEYIAATKRYSNSELGTFDFTFGIGWGSLGTRDNISNPTCKLSDRFCERPSDYLDTGGTTNFDRAFKGPTALFGGVEYQTLHAPLRFKLEYDSNDYSEDFPVVKGGVDMTPHTPWNAGMLYRIGMADFRLSYERGDTLVAGLTLNTNFNDMPSFWRDEPTPEVEDNQPEELSNVDWERVTEDLDKIAGYQNTRIYVDDNTVTVVGEQKKYRDRTEAHEKAAAVLHNEMPEDIDTYAINERSRGLVGEQTIISKEKYRDFAQVNYINPKIEDATAKASNKPSGESVYDGFERFDWGFAPKLVQTLGNAEDFYLFSVGLSGNASYWLTDNLEIGGSLYWDWYNNYDKFNYVTPPDGTTVPRVRTMFRAYQNEHTVTMSNLQLTWFQEYSNTMDQQFYAGYLESMFAGVGTEFLYRPQGANWAIGADVNVISQRDPQSYFGVYDEKWQNVPEYGRPFQVIDKGFTGFVSGYYYPQWEFLQDLMIQVDVGQFLAGDVGTQINVSKQFKSGVIAGAFASFTDLSADEFGEGSFTKGFYLSIPFDIMTVKPSNNRANFSWQPLTRDGGQKLGRKYSLIELTDERNPWYQRPNRSDVE

SEQ ID NO: 5367 - DNA, 2193 bp, Vibrio cholerae
  CDS (1)..(2193): transl_table=11
atgaaaactggccaccgccctcttttgaatacttcgctgtctttactcggcgtactgataagcagcgcattactcacaccacggcaagcttttgccgatgagtttagctacccacggctgcgccattcacaaactgactttggcggcacagggttaatgcaaatgcccagtgcccggatgttagaggaaggtgagctaaatcttgccatcaccaataatgatgattatctacactatgcaatttcgctgcagctgtttccatggctagaaaccacggtgcgttatacccaagtgcatgaattactgtacagcgatcaagccagtttcagtggtgataccaaatacaccgataaatcaattgatgccaagctgcgcctgtggcaagagagctattggctaccagagctttcgcttggcttgcgtgatatcggcggcaccggattatttgatggtgaatatctggtcgcgactaaacaagtgggaccactcgattttaccttaggttttggctggggctatctaggtaatcgcgccaactttagcggcgataaaatcagcagccaagactgcggacgtgatagtaactacggcggcaacggcggcctacttgatttggggcggatgttcactggttgtactgccctatttggtggcattgaataccaaaccccactcgcgccactgcgcttacagctggaatacgatggtaatgattaccgcagtgattttccggtaacacgcggccagcctgatgcaatgccggtcgccagcccatggaactttgggcttgcttatgcactgaccgactgggctgatttgcgggtcagttatcaacgtggcaataccttaactgcaggtttaacttttggcactaatcttgccaccctcaaacccacctggcttgatagccccgccccaacttaccaaccagtgccgagtaaagcagaactcagtgatgaagagtggcaacgcttaagccaagatgttgctaacattgccggctaccaaccggttgaaatttatcaagagcaagacagcgtggtgattaagggctctcaagtcaaataccgcgaccgcgagcaagctgagcatcgcgccgccacattacttgccaatacgggaattaatgcgcgctactatcgaattattgaaactagccaagatcaacccctaacggaaactcagctcaatagcgctgcattcaaacgtattattgatcatgattatcctaatgctcgattgtcggatgccaaacagcacaccgaccctgcgccgattcatggtgatttaaaagccgcgcgtaccgagcgctggaaatttggtttctcgccagtgttacaacaatcatttggtggcgcagaagatttttacctctatgcgatcggggtcaatgccaatgccagttacaagatgggcgatcattggcagctttccggcaccttgtatggcaacctaatcgacaactacgacaagttcaattataccgtaccgccagatggcaccgatttaaaacgggtaagaaccttatcacgccagtattttgaagagccgctacgcataagccacttgcaactgacctattttgatcgatggcagcatttttatactcaagcatatgctggatatcttgaaaccatgtttgccggtgtgggcagtgagctattgtaccggccattgggcaaaaattgggcggtggggattgatggtaactatgttaaacaacgtgacccaagctcagcctttggcttgtatgagcacgagcatcaatacgatgtagaaacagatgataattatcgcgtgcaaactggcacccttaccggtcatgccacgctgtattggcaaccgcaattttggtcgcttctggataatacgctactcaaagtcagcgctgggcgttatttgaccgaggatattggctttacggttgatttctcaaaacagtttgctagcggcgttgtcgccggtgcatttgccaccaaaaccgacctctcagcagaagagtttggcgaaggcagcttcacgaaaggcttctatatttctattccattggatttgatgacggttcgcccaagcactgagcgggttaatatttcttggctaccactgcaacgcgatggcggacaaatgctttcccgtcagtatggattatataaaatgaccgatgctagaagcccttggtatgaaaggttctag

SEQ ID NO: 5368 - protein, 730 aa, Vibrio cholerae
MKTGHRPLLNTSLSLLGVLISSALLTPRQAFADEFSYPRLRHSQTDFGGTGLMQMPSARMLEEGELNLAITNNDDYLHYAISLQLFPWLETTVRYTQVHELLYSDQASFSGDTKYTDKSIDAKLRLWQESYWLPELSLGLRDIGGTGLFDGEYLVATKQVGPLDFTLGFGWGYLGNRANFSGDKISSQDCGRDSNYGGNGGLLDLGRMFTGCTALFGGIEYQTPLAPLRLQLEYDGNDYRSDFPVTRGQPDAMPVASPWNFGLAYALTDWADLRVSYQRGNTLTAGLTFGTNLATLKPTWLDSPAPTYQPVPSKAELSDEEWQRLSQDVANIAGYQPVEIYQEQDSVVIKGSQVKYRDREQAEHRAATLLANTGINARYYRIIETSQDQPLTETQLNSAAFKRIIDHDYPNARLSDAKQHTDPAPIHGDLKAARTERWKFGFSPVLQQSFGGAEDFYLYAIGVNANASYKMGDHWQLSGTLYGNLIDNYDKFNYTVPPDGTDLKRVRTLSRQYFEEPLRISHLQLTYFDRWQHFYTQAYAGYLETMFAGVGSELLYRPLGKNWAVGIDGNYVKQRDPSSAFGLYEHEHQYDVETDDNYRVQTGTLTGHATLYWQPQFWSLLDNTLLKVSAGRYLTEDIGFTVDFSKQFASGVVAGAFATKTDLSAEEFGEGSFTKGFYISIPLDLMTVRPSTERVNISWLPLQRDGGQMLSRQYGLYKMTDARSPWYERF

SEQ ID NO: 5369 - DNA, 2208 bp, Vibrio cholerae
  CDS (1)..(2208): transl_table=11
atgaaaactggccgctgtcctcaacttaatacttctctctcactgcttgctgttgtagtcagcagtgcgttgttggtgccaaggtatgccaacgccgatgaattcagctatccgcaactgcaccattcgcaaacggattttggcggcgcggggctgattcaaatgccgagtgcgcgcatgatgcccgaaggcgagctgagcctcgcggtgaccaacaatgatgattacattcactacgcggtttcgctgcaactgttcccgtggctagaaacaacggtacgttacacccaagtgcatgagctgctgtacagtaacgattctgggtttagcggtgacactaagtacacggataaatcgattgatgccaaattgcgcctatgggaagagagctactggctacctgagatttcgctgggtctacgcgatgtcggcggtactggcctatttgatggtgagtacttggtggcaagcaaaaattttggctcgctcgattttactttgggtgttggctggggttatttaggtaatcgcgccaatctcactggcgataaatccaaaacacccgactgtgggcgtgatggtagctacggcggcaaaggcgggatgtttgatctcggccgaatgtttacggggtgtactgcgctgtttggtggcgtggaatatcaaacgccttttgaaccactacgcctaaaggtggaatacgatggcaatgactaccgcagtgattttccggtcacattcggcaagcagtcgatgcccgtcgatacgccttggaactttggggtggtttacgcgctcactgactgggcagatttgcgcctgagttatgaacgcggcaatacgtttactgcaggggtgactttcggtactaacgtcgcagctcttacacccacatgggtcgattctcccgcgccggcttaccagccagcaccaagcaaaaccgaactcacagatgaagaatggcaacgcttaagccaagatttggcgacggtggctggctatcaatcggtggaagtgtatcaagcggcagatagcgttacggtgaaaggggcacaggtgaaataccgtgaccgccaagaagcagagcaaagagccgccactttgattgccaatacggggattgatgccagaacttatcgcattattgaaacgggtgaagatcagccattaaccgagactcgcttaaacagtgccgccttcaagcgcattgccgatcgcgattatccggatgccaaattggatgatgccaaacaaaccggtaacccggccccgatttcgggtgacctaaaagccgcgcaaatcgagcgttggagttttggtttttctcctgtgttacagcagtcgttcggtggttcagaagatttctacctcttcgcgattggggtgaatgcaaatgcccgttataaagccggcgatcactggctattttcaggcacgctttatggcaacctgaccgataactacgacaagtacaaatacacggtgccgcccgatggtacggatttgaaacgtgtgcgtacgttgtctcgccaatactatgaagaagtggtacgggtggataatttgcagctgacttactttgaccaatggaaccaattctatggtcaggcgtatgccggctatctggaaaccatgtttgctggtgtaggtagcgagattttgtatcgtccacttggtaagaattgggcgatcggagtggacggtaactatgttaagcagcgcgatcctagctcgacttttggtctgtatgagcaagagcgtcagtacgatccacaaactggtcgctattatcgagtgcaaacgggtacggtgactgggcatgcgaccctctattggcagccgcaattttggtcattgctggataacaccttgcttaaactgagtgcgggacggtatttgacagaggatatcggctttacgatcgatttctctaagcagttcgccagcggtgtcgtagccggagcctttgcgactaagacggatctctccgctgaagagtttggtgaagggagtttctccaaaggtttctatatttcgattccgttggatttgatgaccattcgcccaagtaccgagcgcgtgaacatttcttggctaccactgcaacgcgatggcggacagatgttaggacgtcaacatactctgtttgatatgaccgatgctcgcgcaccttggtttacccgccctattcagccaattgccgagtaa

SEQ ID NO: 5370 - protein, 735 aa, Vibrio cholerae
MKTGRCPQLNTSLSLLAVVVSSALLVPRYANADEFSYPQLHHSQTDFGGAGLIQMPSARMMPEGELSLAVTNNDDYIHYAVSLQLFPWLETTVRYTQVHELLYSNDSGFSGDTKYTDKSIDAKLRLWEESYWLPEISLGLRDVGGTGLFDGEYLVASKNFGSLDFTLGVGWGYLGNRANLTGDKSKTPDCGRDGSYGGKGGMFDLGRMFTGCTALFGGVEYQTPFEPLRLKVEYDGNDYRSDFPVTFGKQSMPVDTPWNFGVVYALTDWADLRLSYERGNTFTAGVTFGTNVAALTPTWVDSPAPAYQPAPSKTELTDEEWQRLSQDLATVAGYQSVEVYQAADSVTVKGAQVKYRDRQEAEQRAATLIANTGIDARTYRIIETGEDQPLTETRLNSAAFKRIADRDYPDAKLDDAKQTGNPAPISGDLKAAQIERWSFGFSPVLQQSFGGSEDFYLFAIGVNANARYKAGDHWLFSGTLYGNLTDNYDKYKYTVPPDGTDLKRVRTLSRQYYEEVVRVDNLQLTYFDQWNQFYGQAYAGYLETMFAGVGSEILYRPLGKNWAIGVDGNYVKQRDPSSTFGLYEQERQYDPQTGRYYRVQTGTVTGHATLYWQPQFWSLLDNTLLKLSAGRYLTEDIGFTIDFSKQFASGVVAGAFATKTDLSAEEFGEGSFSKGFYISIPLDLMTIRPSTERVNISWLPLQRDGGQMLGRQHTLFDMTDARAPWFTRPIQPIAE

SEQ ID NO: 5371 - DNA, 2097 bp, Escherichia coli
  CDS (1)..(2097): transl_table=11
atgaagaagaattcttatcttttaagctgcctggccattgccgtctccagtgcctgtcatgctgaagtattaacctacccggatccgctgggttcgtcgcaatcagactttggcggcacaggattgttgcagatgccaaatgcgcgcatcgcaccggaaggtgaattcagcgtcaactaccgggataacgatcaataccggttctactccacctccgtggcgctgttcccatggctggaaggcaccattcgttatacggatgtgcgcacacgcaaatatagccagtgggaagatttcagcggcgatcagtcatacaaagacaaatcattcgattttaaacttcgcctgtgggaagaaggttactggctaccgcaagtggcgtttggtaaacgtgatattgctggtacgggtctgtttgacggtgagtatctggtggccagcaagcaagcggggccatttgatttcaccctcgggatggcatggggctacgccggtaatgcgggcaatattaccaacccgttttgccgggtgagcgataaatattgtcatcgcgcagagtctcacgatgcgggcgatatcagctttagcgatatctttcgtggcccggcttccatctttggcggcattgagtatcaaacgccgtggaatcccctgcgtctgaaactcgaatacgatggaaacaattaccagaatgatttcgctggcaaactgcctcaggcaagccatttcaacgtcggcgcagtttatcgcgctgccagctgggcagatctcaacctgagttatgaacgcggtaacacgttgatgtttggcttcacgttacggaccaatttcaacgatctgcgccctgccctgcgcgatacgccaaaaccggcatatcaacctgcgcctgaatctgaaggattgcagtacaccacggtagcaaaccaacttaccgccctgaagtataacgcgggctttgacgcgccagaaattcagctacgcgataagacactgtatatgtctggtcagcaatacaaataccgtgactctcgtgaagcggtcgatcgtgccaaccggattctggtgaataacctgccgcaaggcgttgagaagattagcgtgacgcaaaagcgcgagcatatggcgatggtgactaccgaaaccgacgtagccagcctgcgcaaacagctggcaggtacagcgcctggtcaatcagagccactgcaacaacaacgtgttgaagctgaagatctttctgcctttggtcggggctaccgtattcgtgaagatcgctttagctactctttcaacccaacactttcacagtcgctgggcggcccggaagatttctatatgttccagctggggctgatgtccagtgcccgctactggtttaccgaccacctgctgcttgatggcggtattttcaccaatatttacaacaactacgacaagtttaagtcttcgctgttgcccgcggactctaccctgccccgcgtgcgcacgcatatccgtgactacgttcgcaatgacgtttatctcaacaacttgcaggcgaactattttgctgacttaggcaatggtttctatggccaggtgtatggcggttatctggaaacgatgtacgccggtgtcggttccgagctgctttatcgcccgctagatgcctgctgggcgctgggtgtggacgttaactacgtgaagcaacgtgactgggacaacatgatgcgtttcaccgattattccacgccaacaggtttcgtgacggcttactggaacccgccgacgctcaatggcgtactgatgaaacttagcgttgggcaatatctggcaaaagataaaggcgcaacgatcgacgtcgccaaacgctttgacagcggcgtggcggtaggggtatgggcggcaatcagtaacgtatctaaagatgactacggcgaaggcggctttagtaaaggtttttatatctcgattccattcgacttgatgaccattggacctaaccgcaaccgcgcggtggtttcgtggacaccattgacgcgtgatggtggacaaatgctgtcacgcaaataccagctctatccaatgacggcagagcgagaagtaccggttggacaataa

SEQ ID NO: 5372 - protein, 698 aa, Escherichia coli
MKKNSYLLSCLAIAVSSACHAEVLTYPDPLGSSQSDFGGTGLLQMPNARIAPEGEFSVNYRDNDQYRFYSTSVALFPWLEGTIRYTDVRTRKYSQWEDFSGDQSYKDKSFDFKLRLWEEGYWLPQVAFGKRDIAGTGLFDGEYLVASKQAGPFDFTLGMAWGYAGNAGNITNPFCRVSDKYCHRAESHDAGDISFSDIFRGPASIFGGIEYQTPWNPLRLKLEYDGNNYQNDFAGKLPQASHFNVGAVYRAASWADLNLSYERGNTLMFGFTLRTNFNDLRPALRDTPKPAYQPAPESEGLQYTTVANQLTALKYNAGFDAPEIQLRDKTLYMSGQQYKYRDSREAVDRANRILVNNLPQGVEKISVTQKREHMAMVTTETDVASLRKQLAGTAPGQSEPLQQQRVEAEDLSAFGRGYRIREDRFSYSFNPTLSQSLGGPEDFYMFQLGLMSSARYWFTDHLLLDGGIFTNIYNNYDKFKSSLLPADSTLPRVRTHIRDYVRNDVYLNNLQANYFADLGNGFYGQVYGGYLETMYAGVGSELLYRPLDACWALGVDVNYVKQRDWDNMMRFTDYSTPTGFVTAYWNPPTLNGVLMKLSVGQYLAKDKGATIDVAKRFDSGVAVGVWAAISNVSKDDYGEGGFSKGFYISIPFDLMTIGPNRNRAVVSWTPLTRDGGQMLSRKYQLYPMTAEREVPVGQ

SEQ ID NO: 5373 - DNA, 26 bp, Artificial sequence
  primer
atgaaaaaaagacatctgcttagctt

SEQ ID NO: 5374 - DNA, 23 bp, Artificial sequence
  primer
ttagcggaaattgacgctacggt

SEQ ID NO: 5375 - protein, 784 aa, Artificial sequence
  consensus sequence
  Variant (2)..(4): Xaa in position 2 to 4 is any amino acid
  Variant (5)..(18): Xaa in position 5 to 18 is any or no amino acid
  Variant (21)..(21): Xaa in position 21 is any amino acid
  Variant (26)..(26): Xaa in position 26 is any amino acid
  Variant (29)..(29): Xaa in position 29 is any amino acid
  Variant (31)..(31): Xaa in position 31 is any amino acid
  Variant (33)..(34): Xaa in position 33 to 34 is any amino acid
  Variant (37)..(38): Xaa in position 37 to 38 is any amino acid
  Variant (42)..(48): Xaa in position 42 to 48 is any amino acid
  Variant (51)..(51): Xaa in position 51 is any amino acid
  Variant (53)..(54): Xaa in position 53 to 54 is any amino acid
  Variant (56)..(57): Xaa in position 56 to 57 is any amino acid
  Variant (59)..(59): Xaa in position 59 is any amino acid
  Variant (65)..(65): Xaa in position 65 is any amino acid
  Variant (67)..(67): Xaa in position 67 is any amino acid
  Variant (69)..(69): Xaa in position 69 is any amino acid
  Variant (73)..(73): Xaa in position 73 is any amino acid
  Variant (75)..(78): Xaa in position 75 to 78 is any amino acid
  Variant (81)..(83): Xaa in position 81 to 83 is any amino acid
  Variant (84)..(84): Xaa in position 84 is any or no amino acid
  Variant (88)..(90): Xaa in position 88 to 90 is any amino acid
  Variant (92)..(92): Xaa in position 92 is any amino acid
  Variant (95)..(96): Xaa in position 95 to 96 is any amino acid
  Variant (98)..(98): Xaa in position 98 is any amino acid
  Variant (100)..(100): Xaa in position 100 is any amino acid
  Variant (103)..(104): Xaa in position 103 to 104 is any amino acid
  Variant (106)..(107): Xaa in position 106 to 107 is any amino acid
  Variant (109)..(109): Xaa in position 109 is any amino acid
  Variant (111)..(114): Xaa in position 111 to 114 is any amino acid
  Variant (116)..(116): Xaa in position 116 is any amino acid
  Variant (119)..(120): Xaa in position 119 to 120 is any amino acid
  Variant (127)..(127): Xaa in position 127 is any amino acid
  Variant (129)..(131): Xaa in position 129 to 131 is any amino acid
  Variant (133)..(133): Xaa in position 133 is any amino acid
  Variant (135)..(136): Xaa in position 135 to 136 is any amino acid
  Variant (137)..(141): Xaa in position 137 to 141 is any or no amino acid
  Variant (144)..(144): Xaa in position 144 is any amino acid
  Variant (150)..(151): Xaa in position 150 to 151 is any amino acid
  Variant (155)..(155): Xaa in position 155 is any amino acid
  Variant (157)..(159): Xaa in position 157 to 159 is any amino acid
  Variant (161)..(170): Xaa in position 161 to 170 is any amino acid
  Variant (171)..(172): Xaa in position 171 to 172 is any or no amino acid
  Variant (174)..(174): Xaa in position 174 is any amino acid
  Variant (176)..(181): Xaa in position 176 to 181 is any amino acid
  Variant (182)..(183): Xaa in position 182 to 183 is any or no amino acid
  Variant (185)..(191): Xaa in position 185 to 191 is any amino acid
  Variant (193)..(193): Xaa in position 193 is any amino acid
  Variant (195)..(198): Xaa in position 195 to 198 is any amino acid
  Variant (202)..(202): Xaa in position 202 is any amino acid
  Variant (208)..(209): Xaa in position 208 to 209 is any amino acid
  Variant (215)..(215): Xaa in position 215 is any amino acid
  Variant (218)..(219): Xaa in position 218 to 219 is any amino acid
  Variant (221)..(221): Xaa in position 221 is any amino acid
  Variant (223)..(224): Xaa in position 223 to 224 is any amino acid
  Variant (227)..(236): Xaa in position 227 to 236 is any amino acid
  Variant (237)..(242): Xaa in position 237 to 242 is any or no amino acid
  Variant (244)..(244): Xaa in position 244 is any amino acid
  Variant (246)..(247): Xaa in position 246 to 247 is any amino acid
  Variant (249)..(251): Xaa in position 249 to 251 is any amino acid
  Variant (252)..(252): Xaa in position 252 is any or no amino acid
  Variant (254)..(254): Xaa in position 254 is any amino acid
  Variant (256)..(257): Xaa in position 256 to 257 is any amino acid
  Variant (266)..(268): Xaa in position 266 to 268 is any amino acid
  Variant (270)..(271): Xaa in position 270 to 271 is any amino acid
  Variant (273)..(273): Xaa in position 273 is any amino acid
  Variant (277)..(278): Xaa in position 277 to 278 is any amino acid
  Variant (280)..(284): Xaa in position 280 to 284 is any amino acid
  Variant (285)..(289): Xaa in position 285 to 289 is any or no amino acid
  Variant (291)..(297): Xaa in position 291 to 297 is any amino acid
  Variant (299)..(313): Xaa in position 299 to 313 is any amino acid
  Variant (314)..(368): Xaa in position 314 to 368 is any or no amino acid
  Variant (370)..(372): Xaa in position 370 to 372 is any amino acid
  Variant (375)..(379): Xaa in position 375 to 379 is any amino acid
  Variant (381)..(390): Xaa in position 381 to 390 is any amino acid
  Variant (392)..(392): Xaa in position 392 is any amino acid
  Variant (394)..(394): Xaa in position 394 is any amino acid
  Variant (399)..(400): Xaa in position 399 to 400 is any amino acid
  Variant (402)..(404): Xaa in position 402 to 404 is any amino acid
  Variant (407)..(411): Xaa in position 407 to 411 is any amino acid
  Variant (413)..(433): Xaa in position 413 to 433 is any amino acid
  Variant (434)..(435): Xaa in position 434 to 435 is any or no amino acid
  Variant (437)..(484): Xaa in position 437 to 484 is any amino acid
  Variant (485)..(489): Xaa in position 485 to 489 is any or no amino acid
  Variant (491)..(491): Xaa in position 491 is any amino acid
  Variant (493)..(493): Xaa in position 493 is any amino acid
  Variant (496)..(496): Xaa in position 496 is any amino acid
  Variant (499)..(499): Xaa in position 499 is any amino acid
  Variant (501)..(501): Xaa in position 501 is any amino acid
  Variant (504)..(507): Xaa in position 504 to 507 is any amino acid
  Variant (509)..(512): Xaa in position 509 to 512 is any amino acid
  Variant (514)..(517): Xaa in position 514 to 517 is any amino acid
  Variant (520)..(524): Xaa in position 520 to 524 is any amino acid
  Variant (526)..(529): Xaa in position 526 to 529 is any amino acid
  Variant (531)..(533): Xaa in position 531 to 533 is any amino acid
  Variant (539)..(539): Xaa in position 539 is any amino acid
  Variant (541)..(543): Xaa in position 541 to 543 is any amino acid
  Variant (545)..(546): Xaa in position 545 to 546 is any amino acid
  Variant (547)..(551): Xaa in position 547 to 551 is any or no amino acid
  Variant (553)..(553): Xaa in position 553 is any amino acid
  Variant (558)..(559): Xaa in position 558 to 559 is any amino acid
  Variant (561)..(561): Xaa in position 561 is any amino acid
  Variant (563)..(566): Xaa in position 563 to 566 is any amino acid
  Variant (567)..(567): Xaa in position 567 is any or no amino acid
  Variant (569)..(572): Xaa in position 569 to 572 is any amino acid
  Variant (575)..(586): Xaa in position 575 to 586 is any amino acid
  Variant (587)..(587): Xaa in position 587 is any or no amino acid
  Variant (589)..(589): Xaa in position 589 is any amino acid
  Variant (591)..(591): Xaa in position 591 is any amino acid
  Variant (596)..(596): Xaa in position 596 is any amino acid
  Variant (598)..(599): Xaa in position 598 to 599 is any amino acid
  Variant (601)..(601): Xaa in position 601 is any amino acid
  Variant (603)..(603): Xaa in position 603 is any amino acid
  Variant (605)..(605): Xaa in position 605 is any amino acid
  Variant (610)..(613): Xaa in position 610 to 613 is any amino acid
  Variant (616)..(616): Xaa in position 616 is any amino acid
  Variant (618)..(618): Xaa in position 618 is any amino acid
  Variant (620)..(620): Xaa in position 620 is any amino acid
  Variant (624)..(624): Xaa in position 624 is any amino acid
  Variant (628)..(640): Xaa in position 628 to 640 is any amino acid
  Variant (641)..(666): Xaa in position 641 to 666 is any or no amino acid
  Variant (669)..(672): Xaa in position 669 to 672 is any amino acid
  Variant (674)..(675): Xaa in position 674 to 675 is any amino acid
  Variant (677)..(680): Xaa in position 677 to 680 is any amino acid
  Variant (681)..(685): Xaa in position 681 to 685 is any or no amino acid
  Variant (687)..(689): Xaa in position 687 to 689 is any amino acid
  Variant (691)..(691): Xaa in position 691 is any amino acid
  Variant (693)..(693): Xaa in position 693 is any amino acid
  Variant (696)..(697): Xaa in position 696 to 697 is any amino acid
  Variant (699)..(699): Xaa in position 699 is any amino acid
  Variant (701)..(706): Xaa in position 701 to 706 is any amino acid
  Variant (708)..(708): Xaa in position 708 is any amino acid
  Variant (710)..(710): Xaa in position 710 is any amino acid
  Variant (714)..(715): Xaa in position 714 to 715 is any amino acid
  Variant (717)..(718): Xaa in position 717 to 718 is any amino acid
  Variant (720)..(721): Xaa in position 720 to 721 is any amino acid
  Variant (723)..(724): Xaa in position 723 to 724 is any amino acid
  Variant (726)..(727): Xaa in position 726 to 727 is any amino acid
  Variant (729)..(729): Xaa in position 729 is any amino acid
  Variant (733)..(733): Xaa in position 733 is any amino acid
  Variant (735)..(735): Xaa in position 735 is any amino acid
  Variant (738)..(738): Xaa in position 738 is any amino acid
  Variant (740)..(740): Xaa in position 740 is any amino acid
  Variant (742)..(742): Xaa in position 742 is any amino acid
  Variant (744)..(744): Xaa in position 744 is any amino acid
  Variant (746)..(750): Xaa in position 746 to 750 is any amino acid
  Variant (752)..(754): Xaa in position 752 to 754 is any amino acid
  Variant (756)..(759): Xaa in position 756 to 759 is any amino acid
  Variant (761)..(761): Xaa in position 761 is any amino acid
  Variant (770)..(770): Xaa in position 770 is any amino acid
  Variant (772)..(772): Xaa in position 772 is any amino acid
  Variant (775)..(776): Xaa in position 775 to 776 is any amino acid
  Variant (778)..(780): Xaa in position 778 to 780 is any amino acid
  Variant (782)..(783): Xaa in position 782 to 783 is any amino acid
PXXXXXXXXXXXXXXXXXSQXDFGGXGLXQXPXXRMXXEGEXXXXXXXNDXYXXYXXSXQLFPWXEXTXRYTXVXXXXYSXXXXFSGXXXYXDKXXDXKXRLXXEXXWXPXXXXGXRDXXGTGLFDXEXXXAXKXXXXXXXGPXDFTLGXXWGYXGXXXNXXXXXXXXXXXXCXRXXXXXXXXGXXXXXXXFXGXXXXFGGXEYQTPXXPLRLKXEYXXNXYXXDFXXXXXXXXXXXXXXXXNXGXXYXXXXWXDXXLSYERGNTXXXGXXLXTNFXXLXXXXXXXXXXDXXXXXXXPXXXXXXXXXXXXXXXXXXXXXXXXXXXXXXXXXXXXXXXXXXXXXXXXXXXXXXXXXXXXXXXXXXXXXXLXXXAGXXXXXIXXXXXXXXXXGXQXKYRDXXEXXXRAXXXXXNXXXXXXXXXXXXXXXXXXXXXXXTXXXXXXXXXXXXXXXXXXXXXXXXXXXXXXXXXXXXXXXXXXXXXXXXXXXXXPXLXQSXGGXEXFYXXXXGXXXXAXXXXTDXXXXXGXXXXNXXXNYDKFXYXXXPXXXXXXXLXRVRTXXRXYXXXXXVXXXXLQXXXXXXXXXXXXXQXYXGYLEXMXXGXGXEXLYRPXXXXWAXGXDXNYVXQRDXXXXXXXXXXXXXXXXXXXXXXXXXXXXXXXXXXXXXXXTGXXXXYXXPXXXXXXXXXLXXXSXGXYLXXDXGXXXXXXKXFXSGVXXGXXAXXTXXSXXEXGEGXFXKGXYXSXPXDXXXXXPXXXRXXXXWXPLTRDGGQXLXRKXXLXXXTXXR

SEQ ID NO: 5376 - protein, 55 aa, Artificial sequence
  protein pattern
  Variant (5)..(5): Xaa in position 5 is Ala, Thr or Val
  Variant (8)..(8): Xaa in position 8 is Ile, Leu or Met
  Variant (10)..(10): Xaa in position 10 is any amino acid
  Variant (12)..(12): Xaa in position 12 is Ser or Thr
  Variant (13)..(13): Xaa in position 13 is Ala or Gly
  Variant (16)..(17): Xaa in position 16 to 17 is any amino acid
  Variant (18)..(18): Xaa in position 18 is Ala, Glu or Thr
  Variant (20)..(20): Xaa in position 20 is Glu or Gln
  Variant (21)..(21): Xaa in position 21 is Phe, Leu or Met
  Variant (22)..(22): Xaa in position 22 is Asn or Ser
  Variant (23)..(23): Xaa in position 23 is Phe, Leu or Val
  Variant (24)..(24): Xaa in position 24 is Ala, Gly, Asn or Ser
  Variant (25)..(27): Xaa in position 25 to 27 is any amino acid
  Variant (28)..(28): Xaa in position 28 is Asn, Ser or Thr
  Variant (29)..(29): Xaa in position 29 is Asp, Glu or Asn
  Variant (30)..(30): Xaa in position 30 is Asp, Glu, Pro or Gln
  Variant (32)..(33): Xaa in position 32 to 33 is any amino acid
  Variant (34)..(34): Xaa in position 34 is Phe or Tyr
  Variant (35)..(36): Xaa in position 35 to 36 is any amino acid
  Variant (37)..(37): Xaa in position 37 is Ser or Thr
  Variant (38)..(38): Xaa in position 38 is Leu or Val
  Variant (40)..(40): Xaa in position 40 is Leu, Pro or Val
  Variant (41)..(41): Xaa in position 41 is Phe, Leu or Met
  Variant (42)..(42): Xaa in position 42 is Asp or Pro
  Variant (44)..(44): Xaa in position 44 is Phe or Leu
  Variant (46)..(46): Xaa in position 46 is Ala, Gly or Thr
  Variant (47)..(47): Xaa in position 47 is Ser or Thr
  Variant (48)..(48): Xaa in position 48 is Phe, Ile, Leu or Val
  Variant (52)..(52): Xaa in position 52 is any amino acid
  Variant (53)..(53): Xaa in position 53 is Ala, Ile or Val
  Variant (54)..(54): Xaa in position 54 is any amino acid
  Variant (55)..(55): Xaa in position 55 is Asp, Glu, Asn or Thr
DFGGXGLXQXPXXRMXXXGXXXXXXXXXXXYXXXXXXXQXXXWXEXXXRYTXXXX

SEQ ID NO: 5377 - protein, 58 aa, Artificial sequence
  protein pattern
  Variant (2)..(4): Xaa in position 2 to 4 is any amino acid
  Variant (6)..(6): Xaa in position 6 is any amino acid
  Variant (9)..(9): Xaa in position 9 is Ala, Gly or Ser
  Variant (10)..(10): Xaa in position 10 is Phe, Ile or Val
  Variant (12)..(12): Xaa in position 12 is any amino acid
  Variant (14)..(14): Xaa in position 14 is Ala, Ile, Leu or Val
  Variant (17)..(17): Xaa in position 17 is any amino acid
  Variant (18)..(18): Xaa in position 18 is Glu or Gln
  Variant (20)..(20): Xaa in position 20 is Gly or Ser
  Variant (21)..(21): Xaa in position 21 is any amino acid
  Variant (23)..(23): Xaa in position 23 is any amino acid
  Variant (25)..(25): Xaa in position 25 is Asp, Glu or Gln
  Variant (26)..(26): Xaa in position 26 is any amino acid
  Variant (27)..(27): Xaa in position 27 is Ala or Ser
  Variant (28)..(28): Xaa in position 28 is Phe, Ile, Leu or Val
  Variant (30)..(30): Xaa in position 30 is any amino acid
  Variant (33)..(33): Xaa in position 33 is Phe, Ile or Val
  Variant (34)..(34): Xaa in position 34 is Ala or Gly
  Variant (40)..(40): Xaa in position 40 is Ala or Asp
  Variant (41)..(41): Xaa in position 41 is Ala, Gly or Ser
  Variant (43)..(43): Xaa in position 43 is Phe or Tyr
  Variant (44)..(44): Xaa in position 44 is Phe, Ile, Leu or Val
  Variant (45)..(45): Xaa in position 45 is Ala or Val
  Variant (47)..(47): Xaa in position 47 is Asn, Ser or Thr
  Variant (49)..(51): Xaa in position 49 to 51 is any amino acid
  Variant (52)..(52): Xaa in position 52 is Asn, Pro or Ser
  Variant (53)..(53): Xaa in position 53 is Phe, Ile or Leu
  Variant (55)..(55): Xaa in position 55 is Phe or Val
  Variant (56)..(56): Xaa in position 56 is Ser or Thr
  Variant (57)..(57): Xaa in position 57 is Ala or Leu
GXXXYXDKXXDXKXRLXXEXXWXPXXXXGXRDXXGTGLFXXEXXXAXKXXXXXDXXXG

SEQ ID NO: 5378 - protein, 55 aa, Artificial sequence
  protein pattern
  Variant (4)..(4): Xaa in position 4 is any amino acid
  Variant (5)..(5): Xaa in position 5 is Ala or Val
  Variant (7)..(7): Xaa in position 7 is Ala, Gly or Val
  Variant (8)..(8): Xaa in position 8 is Phe, Trp or Tyr
  Variant (10)..(10): Xaa in position 10 is Ala, Ser or Thr
  Variant (11)..(11): Xaa in position 11 is any amino acid
  Variant (12)..(12): Xaa in position 12 is Ser or Thr
  Variant (13)..(13): Xaa in position 13 is Asp or Asn
  Variant (14)..(14): Xaa in position 14 is Ala, Leu or Val
  Variant (16)..(16): Xaa in position 16 is any amino acid
  Variant (17)..(18): Xaa in position 17 to 18 is Asp or Glu
  Variant (19)..(19): Xaa in position 19 is Phe or Tyr
  Variant (23)..(23): Xaa in position 23 is Asp, Gly or Ser
  Variant (25)..(25): Xaa in position 25 is Ser or Thr
  Variant (28)..(28): Xaa in position 28 is Phe or Val
  Variant (30)..(30): Xaa in position 30 is Ile, Leu or Val
  Variant (32)..(32): Xaa in position 32 is Ile or Val
  Variant (34)..(34): Xaa in position 34 is Phe or Leu
  Variant (36)..(36): Xaa in position 36 is Ile or Leu
  Variant (37)..(37): Xaa in position 37 is Phe or Met
  Variant (38)..(38): Xaa in position 38 is Ser or Thr
  Variant (39)..(40): Xaa in position 39 to 40 is any amino acid
  Variant (41)..(41): Xaa in position 41 is Pro or Ser
  Variant (42)..(42): Xaa in position 42 is Asn, Ser or Thr
  Variant (43)..(43): Xaa in position 43 is any amino acid
  Variant (44)..(44): Xaa in position 44 is Glu, Asn or Ser
  Variant (45)..(45): Xaa in position 45 is Arg or Ser
  Variant (46)..(46): Xaa in position 46 is Ala or Val
  Variant (47)..(47): Xaa in position 47 is any amino acid
  Variant (48)..(48): Xaa in position 48 is Phe, Ile or Val
  Variant (49)..(49): Xaa in position 49 is Gly or Ser
  Variant (51)..(51): Xaa in position 51 is any amino acid
  Variant (54)..(54): Xaa in position 54 is Gln or Thr
SGVXXGXXAXXXXXSXXXXGEGXFXKGXYXSXPXDXXXXXXXXXXXXXXWXPLXR

SEQ ID NO: 5379 - protein, 48 aa, Artificial sequence
  protein pattern
  Variant (2)..(3): Xaa in position 2 to 3 is any amino acid
  Variant (4)..(4): Xaa in position 4 is any or no amino acid
  Variant (6)..(9): Xaa in position 6 to 9 is any or no amino acid
  Variant (14)..(14): Xaa in position 14 is any amino acid
  Variant (16)..(16): Xaa in position 16 is Phe or Tyr
  Variant (17)..(17): Xaa in position 17 is Ala or Gly
  Variant (19)..(19): Xaa in position 19 is Ala or Val
  Variant (21)..(21): Xaa in position 21 is Ala, Gly, Ser or Thr
  Variant (23)..(23): Xaa in position 23 is any amino acid
  Variant (25)..(25): Xaa in position 25 is Trp or Tyr
  Variant (28)..(28): Xaa in position 28 is Phe, Leu or Val
  Variant (29)..(29): Xaa in position 29 is Asp, Gly or Asn
  Variant (30)..(31): Xaa in position 30 to 31 is any amino acid
  Variant (34)..(34): Xaa in position 34 is Phe, Ile, Leu or Val
  Variant (36)..(36): Xaa in position 36 is Ile, Leu or Val
  Variant (38)..(38): Xaa in position 38 is any amino acid
  Variant (40)..(40): Xaa in position 40 is any amino acid
  Variant (41)..(41): Xaa in position 41 is Ile or Val
  Variant (42)..(42): Xaa in position 42 is any amino acid
  Variant (46)..(46): Xaa in position 46 is any amino acid
  Variant (47)..(47): Xaa in position 47 is Asp, Asn, Arg or Ser
  Variant (48)..(48): Xaa in position 48 is Asp, Asn, Ser or Thr
QXXXGXXXXGYLEXMXXGXGXEXLXRPXXXXWAXGXDXNXXXQRDXXX

SEQ ID NO: 5380 - protein, 46 aa, Artificial sequence
  protein pattern
  Variant (2)..(8): Xaa in position 2 to 8 is any amino acid
  Variant (9)..(9): Xaa in position 9 is any or no amino acid
  Variant (11)..(11): Xaa in position 11 is any amino acid
  Variant (13)..(13): Xaa in position 13 is any amino acid
  Variant (14)..(14): Xaa in position 14 is any or no amino acid
  Variant (16)..(16): Xaa in position 16 is any amino acid
  Variant (17)..(17): Xaa in position 17 is any or no amino acid
  Variant (21)..(21): Xaa in position 21 is Ile, Leu or Val
  Variant (22)..(22): Xaa in position 22 is Glu or Gln
  Variant (26)..(26): Xaa in position 26 is Leu or Pro
  Variant (27)..(27): Xaa in position 27 is any amino acid
  Variant (28)..(28): Xaa in position 28 is Ala, Glu, Asn or Gln
  Variant (32)..(32): Xaa in position 32 is Phe or Leu
  Variant (33)..(33): Xaa in position 33 is any amino acid
  Variant (34)..(34): Xaa in position 34 is Leu or Val
  Variant (37)..(37): Xaa in position 37 is Asp or Glu
  Variant (38)..(38): Xaa in position 38 is Gly or Ser
  Variant (39)..(39): Xaa in position 39 is any amino acid
  Variant (40)..(40): Xaa in position 40 is Asp or Asn
  Variant (42)..(43): Xaa in position 42 to 43 is any amino acid
  Variant (45)..(45): Xaa in position 45 is Phe or Tyr
  Variant (46)..(46): Xaa in position 46 is Ala or Pro
GXXXXXXXXFXGXXAXXFGGXXYQTXXXPLRXXXEYXXXXYXXDXX

SEQ ID NO: 5381 - protein, 29 aa, Artificial sequence
  protein pattern
  Variant (2)..(2): Xaa in position 2 is Ala or Gly
  Variant (4)..(5): Xaa in position 4 to 5 is any or no amino acid
  Variant (7)..(8): Xaa in position 7 to 8 is any or no amino acid
  Variant (11)..(11): Xaa in position 11 is Glu or Gln
  Variant (13)..(13): Xaa in position 13 is Ala or Gly
  Variant (14)..(14): Xaa in position 14 is Asp or Asn
  Variant (16)..(18): Xaa in position 16 to 18 is any amino acid
  Variant (20)..(20): Xaa in position 20 is Phe, Ile, Leu or Val
  Variant (21)..(21): Xaa in position 21 is Asn, Ser or Thr
  Variant (22)..(22): Xaa in position 22 is Phe or Leu
  Variant (23)..(23): Xaa in position 23 is any amino acid
  Variant (26)..(26): Xaa in position 26 is Phe, Leu or Val
  Variant (27)..(27): Xaa in position 27 is Ala, Asp, Glu or Asn
  Variant (28)..(28): Xaa in position 28 is Ala, Asp or Thr
  Variant (29)..(29): Xaa in position 29 is Leu or Met
WXDXXLXXSYXRXXTXXXGXXXXTNXXXX

SEQ ID NO: 5382 - protein, 19 aa, Artificial sequence
  protein pattern
  Variant (2)..(3): Xaa in position 2 to 3 is any or no amino acid
  Variant (5)..(5): Xaa in position 5 is Ala, Ile or Leu
  Variant (7)..(7): Xaa in position 7 is Ala, Asn, Gln or Thr
  Variant (8)..(8): Xaa in position 8 is any amino acid
  Variant (9)..(9): Xaa in position 9 is Ala, Asp or Gly
  Variant (11)..(11): Xaa in position 11 is Phe, Ile, Leu or Val
  Variant (12)..(12): Xaa in position 12 is any amino acid
  Variant (13)..(13): Xaa in position 13 is Gly, Asn or Ser
  Variant (14)..(14): Xaa in position 14 is Asp or Pro
  Variant (15)..(18): Xaa in position 15 to 18 is any amino acid
  Variant (19)..(19): Xaa in position 19 is Asn, Pro, Gln or Ser
GXXYXGXXXNXXXXXXXXX

SEQ ID NO: 5383 - protein, 20 aa, Artificial sequence
  protein pattern
  Variant (2)..(2): Xaa in position 2 is any amino acid
  Variant (4)..(7): Xaa in position 4 to 7 is any amino acid
  Variant (8)..(8): Xaa in position 8 is any or no amino acid
  Variant (13)..(14): Xaa in position 13 to 14 is any amino acid
  Variant (16)..(16): Xaa in position 16 is Ala, Asp, Glu or Gln
  Variant (18)..(19): Xaa in position 18 to 19 is any amino acid
  Variant (20)..(20): Xaa in position 20 is Asp, Glu or Asn
PXDXXXXXRVRTXXRXYXXX

SEQ ID NO: 5384 - protein, 19 aa, Artificial sequence
  protein pattern
  Variant (4)..(4): Xaa in position 4 is any or no amino acid
  Variant (6)..(6): Xaa in position 6 is Gly or Ser
  Variant (8)..(8): Xaa in position 8 is any amino acid
  Variant (9)..(9): Xaa in position 9 is Phe or Tyr
  Variant (10)..(10): Xaa in position 10 is Glu, Gly, Gln or Ser
  Variant (12)..(13): Xaa in position 12 to 13 is any amino acid
  Variant (14)..(14): Xaa in position 14 is Leu, Met or Val
  Variant (15)..(15): Xaa in position 15 is any amino acid
  Variant (16)..(16): Xaa in position 16 is Ala, Asp, Asn or Ser
  Variant (17)..(17): Xaa in position 17 is Ala, Asp or Glu
  Variant (19)..(19): Xaa in position 19 is Asp, Glu, Asn or Ser
GGQXLXRXXXLXXXXXXRX

SEQ ID NO: 5385 - protein, 21 aa, Artificial sequence
  protein pattern
  Variant (2)..(2): Xaa in position 2 is Phe, Leu, Met or Val
  Variant (3)..(3): Xaa in position 3 is Lys or Arg
  Variant (4)..(4): Xaa in position 4 is Ala, Ile, Leu or Val
  Variant (6)..(6): Xaa in position 6 is Ala or Val
  Variant (8)..(8): Xaa in position 8 is any amino acid
  Variant (9)..(9): Xaa in position 9 is Phe or Tyr
  Variant (11)..(11): Xaa in position 11 is Ala, Gly or Thr
  Variant (12)..(12): Xaa in position 12 is any amino acid
  Variant (14)..(14): Xaa in position 14 is any amino acid
  Variant (16)..(17): Xaa in position 16 to 17 is any amino acid
  Variant (18)..(18): Xaa in position 18 is Ile, Leu, Met or Val
  Variant (19)..(19): Xaa in position 19 is Asp or Glu
  Variant (20)..(20): Xaa in position 20 is Phe, Ile or Val
  Variant (21)..(21): Xaa in position 21 is Ala or Ser
LXXXSXGXXLXXDXGXXXXXX

SEQ ID NO: 5386 - protein, 10 aa, Artificial sequence
  protein pattern
  Variant (2)..(2): Xaa in position 2 is Thr or Val
  Variant (3)..(3): Xaa in position 3 is Leu or Met
  Variant (4)..(4): Xaa in position 4 is Ala, Asn, Gln or Ser
  Variant (7)..(7): Xaa in position 7 is Phe, Leu or Val
  Variant (10)..(10): Xaa in position 10 is Ala, Pro or Ser
PXXXQSXGGX

SEQ ID NO: 5387 - DNA, 294 bp, Escherichia coli
  CDS (1)..(294): transl_table=11
atggtcggcggcggtgggatagcgccattaaccgggagtgagtcggatatttgcgaactgcaaaagatgtattttcttccggctatccgcggcaaagggctggcaaaaaaactggccttaatggcgatggagcaggcgcgagagatgggtttcaaacgctgctatctggaaacgaccgcttttttaaaggaagccattgcgctttatgagcatttgggctttgagcatatcgactatgcgcttggctgcacgggccatgtcgattgtgaagtgcggatgttgcgcgaactctaa

SEQ ID NO: 5388 - protein, 97 aa, Escherichia coli
MVGGGGIAPLTGSESDICELQKMYFLPAIRGKGLAKKLALMAMEQAREMGFKRCYLETTAFLKEAIALYEHLGFEHIDYALGCTGHVDCEVRMLREL

SEQ ID NO: 5389 - DNA, 486 bp, Vibrio cholerae O1 biovar eltor str. N16961
  CDS (1)..(486): transl_table=11
atgagagtagaaatcgtaccgattcgacctgagtttgacgctgagatttgccaaattattcaaagcgtcggcgctgaatttggcgcgattggtgaagggtttggcccatcggatgccgaagtgcttgccatgagccagtactatcgagagcaagaccgtagcgcgtattttgttgcgttattggaggggaaggtagtcggcggtggtggcattgcaccttttgctggccatacggatttgtgtgagctgaagaagttgtttctgctccccacaagccgcggccatggcgtaggccgggcgctcagcgaacattgtttgaattttgcgaaacagcaaggctataccaaatgttatttagataccctttctagcatgactcaagcgatcaagctctaccaacagcttggttttgagcacttaacgcagcccatggcggggacagagcataatggctgcgacgtgtggatgctgaaatcactcaactag

SEQ ID NO: 5390 - protein, 161 aa, Vibrio cholerae O1 biovar eltor str. N16961
MRVEIVPIRPEFDAEICQIIQSVGAEFGAIGEGFGPSDAEVLAMSQYYREQDRSAYFVALLEGKVVGGGGIAPFAGHTDLCELKKLFLLPTSRGHGVGRALSEHCLNFAKQQGYTKCYLDTLSSMTQAIKLYQQLGFEHLTQPMAGTEHNGCDVWMLKSLN

SEQ ID NO: 5391 - DNA, 294 bp, Escherichia coli O157:H7 EDL933
  CDS (1)..(294): transl_table=11
gtggtcggcggcggtgggattgcgccattagcaggtagtgaatcggacatttgcgaactgcaaaagatgtattttcttccggctattcgcggcaaagggctggcaaaaaaactggccttaaaggcgatggaggaggcaagagaaatgggcttcaaacgctgctatctggaaacgaccgcttttttgaaagaagcgattggtttgtatgaacatttaggttttcaacatatcgactatgcacttggctgcacgggccatgttgattgtgaagtgcggatgctacgcgaactctaa

SEQ ID NO: 5392 - protein, 97 aa, Escherichia coli O157:H7 EDL933
MVGGGGIAPLAGSESDICELQKMYFLPAIRGKGLAKKLALKAMEEAREMGFKRCYLETTAFLKEAIGLYEHLGFQHIDYALGCTGHVDCEVRMLREL

SEQ ID NO: 5393 - DNA, 474 bp, Oceanobacillus iheyensis HTE831
  CDS (1)..(474): transl_table=11
atgttcattagagagattgaggaaaaagataatcgtcaaatagaaaaactaataaaagaatctttagaatcggtaagtcttgatcgagaaggaacagcttattatgacccacaattacctcgtttatctcagtactatagttcaatccaggatggttcgtattggatagctgtggagggtgaagaagtagtaggggggattggtattgccccttatgtaaaagagaaaggtatatgtgaattacaaaagttttatgtacatcaagattatcaaggcaaaggaattggcagaaagttattaagaactgctttggaatttgctgaaagaaaatataatcaatgctatttagaaacaagacatgaattaaaacaagcaaataaattatacgagcagaacgactttacattattaccgagtccaatagaaggctcagatcattcgtttatggatcgatggtacatagttgacttatag

SEQ ID NO: 5394 - protein, 157 aa, Oceanobacillus iheyensis HTE831
MFIREIEEKDNRQIEKLIKESLESVSLDREGTAYYDPQLPRLSQYYSSIQDGSYWIAVEGEEVVGGIGIAPYVKEKGICELQKFYVHQDYQGKGIGRKLLRTALEFAERKYNQCYLETRHELKQANKLYEQNDFTLLPSPIEGSDHSFMDRWYIVDL

SEQ ID NO: 5395 - DNA, 504 bp, Shigella flexneri 2a str. 301
  CDS (1)..(504): transl_table=11
atgaataacattgcgccgcaatcacctgtaatgcgtcgcctgacgctgcaggataatcctgctatcgccagcgtcatccgtcaggtttacgcagagtatggtcttaccgccgataaaggctacaccgttgccgatccgaatctcgacgaactgtatcaagtgtacagccagcctggccatgcttattgggtggttgaatacaatggcgaagtggtcggcggcggcgggattgcgccattaacaggtagtgaagcggacatttgcgaactgcagaaaatgtactttcttcccgctattcgcggtaaagggctagcgaaaaaactggccttaatggcgatggagcaggcacgagagatgggcttcaaacgctgctatctggaaacgaccgcttttttaaaggaagccattgcgctttatgagcatttgggctttgagcatatcgactatgcgcttggctgcacgggccatgtcgattgtgaagtgcggatgctacgcgaactctaa

SEQ ID NO: 5396 - protein, 167 aa, Shigella flexneri 2a str. 301
MNNIAPQSPVMRRLTLQDNPAIASVIRQVYAEYGLTADKGYTVADPNLDELYQVYSQPGHAYWVVEYNGEVVGGGGIAPLTGSEADICELQKMYFLPAIRGKGLAKKLALMAMEQAREMGFKRCYLETTAFLKEAIALYEHLGFEHIDYALGCTGHVDCEVRMLREL

SEQ ID NO: 5397 - DNA, 930 bp, Shewanella oneidensis MR-1
  CDS (1)..(930): transl_table=11
atggcaaatgatttaggctcttctagccaactcaggcagctctcccgctatatggtgagacatttaggcatgcttaacgcagcggtaggtgatttacccctctcccccgtgcaggcccatgccttgcttgagataggtaatcaaccacaaaccattaaggatctcgccaacaaactcagcattgataaatccaatgccagccgagccatcaaacacttgatcgataagcatctcgcccaaagtcaaatgcacccacgggatagtcgttgccttgtcgtgcaactgactcctgcgggtaaaaagctactcgcaaaactcgataaccaacaaaatcaactatttaaagaaatcttagcgcaactcacccctgatcaaattcaacatattgagcaggcgctgatgcagtacaaccaagcaatacataaaaccaaacagcaatcgggttgtattattcgtgtagcctcagccaccgatgatgccgccatagcccaagttatccgcgatgtatctgccgaatatggtttgaccgcagataaaggctatagcgtggccgatcccaccttagattgtttaagtcagatttattcgcaagcgggtgctcaatattgggttgttgaatatgaaggtaaagtcgttggtggtgcaggcattgccccacttgccaataatgcaggcatttgtgaactacaaaaaatgtactttatgcccgaaatccgcggtaaaggcttagctaaacgtttagcactactcgctctcgactttgcccgtcaaacgggttaccaaagctgctacttagaaacgactgcgatattaaaagaagcactcaagctctacgaacacttaggtttttaccctctcagcgcaccactaggaaataccggccacgatgcctgtgagatcccgatgttattgccattacagcctgaataa

SEQ ID NO: 5398 - protein, 309 aa, Shewanella oneidensis MR-1
MANDLGSSSQLRQLSRYMVRHLGMLNAAVGDLPLSPVQAHALLEIGNQPQTIKDLANKLSIDKSNASRAIKHLIDKHLAQSQMHPRDSRCLVVQLTPAGKKLLAKLDNQQNQLFKEILAQLTPDQIQHIEQALMQYNQAIHKTKQQSGCIIRVASATDDAAIAQVIRDVSAEYGLTADKGYSVADPTLDCLSQIYSQAGAQYWVVEYEGKVVGGAGIAPLANNAGICELQKMYFMPEIRGKGLAKRLALLALDFARQTGYQSCYLETTAILKEALKLYEHLGFYPLSAPLGNTGHDACEIPMLLPLQPE

SEQ ID NO: 5399 - DNA, 495 bp, Corynebacterium efficiens YS-314
  CDS (1)..(495): transl_table=11
atgattactcgccccatcgagcagcgggataatgcggcggtgcgggagatcatccgtgagtcgctggaatcacatgggctcgccatccccggttcggcgtatttcgatccccagctcggtgagctcgcccagttctatgacagtcttccgcacgccggttactgggtggtggaggtggagggccgtgtgatgggtggtgtcggcatcgcccccttcggcatcgcccccttcggcaccgccatctgcgagctgcagaaactctatctgcgtcccgaggtgcaggggcgcggtctgtcccgtctgcttatggacgaggccctgtccttcgcggcctgccactatgggcagtgctatctggagaccacccactcactgcgcaccgcgtgcattctgtatgagaaatacggcttccggttgctgccggaaccgctacccgggtcagagcactccgccatggatgcgtggtacctgaaggatctcgaaccgcatccgtga

SEQ ID NO: 5400 - protein, 164 aa, Corynebacterium efficiens YS-314
MITRPIEQRDNAAVREIIRESLESHGLAIPGSAYFDPQLGELAQFYDSLPHAGYWVVEVEGRVMGGVGIAPFGIAPFGTAICELQKLYLRPEVQGRGLSRLLMDEALSFAACHYGQCYLETTHSLRTACILYEKYGFRLLPEPLPGSEHSAMDAWYLKDLEPHP

SEQ ID NO: 5401 - DNA, 495 bp, Vibrio vulnificus CMCP6
  CDS (1)..(495): transl_table=11
atgtcagaaaaaatggactttgtcttgcgccctatcaccgttgaagacaacgcctcaatcgccaatgtgattcgtcaagtctcggcggagtatgggttaaccgccgataaaggctacagtgttgccgatccaaccctagacgatctttttagcatctactcacaagcaaatgccgcctattgggtggtggaacatcaagggaagatcgtcggtggaggtggcttttctgcgctagcaggggtcgaaggtgtctgcgagttacaaaaaatgtacttcttacccatttgccgtgggcagggtctggccaagaaaatcgtttcgctcagccgcagcgccgcgaaaaagatgggttatcaacgctgttacctagaaaccactgcctgcttgaaagaagccattgctctgtatgaaaagctcggatttgaacatctgcaagcgccactcgggcaaaccggacatgacgcttgtgaagtggtgatgatttgccatttataa

SEQ ID NO: 5402 - protein, 164 aa, Vibrio vulnificus CMCP6
MSEKMDFVLRPITVEDNASIANVIRQVSAEYGLTADKGYSVADPTLDDLFSIYSQANAAYWVVEHQGKIVGGGGFSALAGVEGVCELQKMYFLPICRGQGLAKKIVSLSRSAAKKMGYQRCYLETTACLKEAIALYEKLGFEHLQAPLGQTGHDACEVVMICHL

SEQ ID NO: 5403 - DNA, 519 bp, Vibrio parahaemolyticus RIMD 2210633
  CDS (1)..(519): transl_table=11
gtgtatctaaaaggcttaaccaaagtatgccaagcaaaccaatttgttcttcgcccactcagcaaggccgataacccacaagtcgccgacgtgattcgtcaggtttccgcggaatatggtctaaccgcagacaaaggatacggcgtcgcagacccaacacttgatgacatgcattctgtgtataaccaacaaggtgccgcttattgggtgattgagtacaatggcgtcatcgtcggtggtggtggttttgctccactagcaggcgaacctaacgtgtgcgaactacaaaaaatgtactttttaccccaaactcgcggacacggcttggcaaaacgtatcgtcgcgatgagtttgcaactggcgaagcaacttggctataaaaagtgttatttggaaacgacagagtgcttaaaagaagcgataggtttgtatgagaagttaggctttgagcatttacatgccccgcttggacaaacagggcatgatgcatgtgaagtagtgatgcttaaaacactgtaa

SEQ ID NO: 5404 - protein, 172 aa, Vibrio parahaemolyticus RIMD 2210633
MYLKGLTKVCQANQFVLRPLSKADNPQVADVIRQVSAEYGLTADKGYGVADPTLDDMHSVYNQQGAAYWVIEYNGVIVGGGGFAPLAGEPNVCELQKMYFLPQTRGHGLAKRIVAMSLQLAKQLGYKKCYLETTECLKEAIGLYEKLGFEHLHAPLGQTGHDACEVVMLKTL

SEQ ID NO: 5405 - DNA, 516 bp, Salmonella enterica subsp. enterica serovar Typhi Ty2
  CDS (1)..(516): transl_table=11
ttgagccatattatgaataatgtcgcctcgccaacgctcacggtgcaccgaatcactaccgccgacaatgccgctattgcccgtgtcatccgtcaggtttcagcggaatacggacttaccgccgataaaggttataccgttgccgaccccaatctggatgaactgtatcaggtttatagccaaccgggcgcggcctactgggtggtagagcaaaacggttgtgtggtgggcggcggcggcgtggcgccgttatcctgtagcgaaccagacatttgtgaactgcaaaaaatgtattttttaccggtaattcgtggtcaggggctggcgaaaaagctggcgctgatggcgctggatcatgcccgtgaacagggttttaaacgctgctatctggaaacaacggcttttttacgcgaggcgattgcgctatacgaacgtttaggatttgaacatattagcgaaccgctcggctgcaccggacatgtcgattgcgaagtgaggatgttaaaggatctctga

SEQ ID NO: 5406 - protein, 171 aa, Salmonella enterica subsp. enterica serovar Typhi Ty2
MSHIMNNVASPTLTVHRITTADNAAIARVIRQVSAEYGLTADKGYTVADPNLDELYQVYSQPGAAYWVVEQNGCVVGGGGVAPLSCSEPDICELQKMYFLPVIRGQGLAKKLALMALDHAREQGFKRCYLETTAFLREAIALYERLGFEHISEPLGCTGHVDCEVRMLKDL

SEQ ID NO: 5407 - DNA, 939 bp, Chromobacterium violaceum ATCC 12472
  CDS (1)..(939): transl_table=11
atggttgcgtatcgcaactttaaaggacgcgtcatgaacgagcgcgagctgcgcgcgctgtcgcgcgacatcgtcagggaactgggcatgctggccggccgttgcggcgaggtggatctgagcccggtggaggctcacctgctgatcgagctggaggcggccccggcgaacaatcagcagctggccgagcgcttgcgggtggacaaatccaacagcagccggccgttgcagcggctggccgagcgcggtctgatcgcctggcgggcggatccggccgacgggcgcagcaagctggccgagctgacggcagcgggccgcgattggctaaagcggctgcacgcggcgatggacgccgacatggagcgggtgctggctcaactggacgacggggagcgggcggcgctggagtcgggcctgcgcgtttaccgcagggcgctgtcgcaggcggataggcagcgcggctacgtcatccgcccgctggcggcggccgacaatggcgagctggcggcgctgatccggcgggtatcggccgagtacggcctgggcgagggctgcagctttctcgatccgcagctggacgcgctgttccaggtttacgaccggccgggctcttgctatctggtggtgatcgggccggacggacgactgcttggcggcggcggcatcgccccgctggcgggcggcgaacaagatgtatgcgaactgcagaagatgtatttcgacgcggcgctgcgcggtcgcgggctggggaggcgattattgcgccggctgctggccgaggcgagggccttgggctaccggcgcgcttatctggaaaccacggccgcgctgggcgaggcgacggccttgtacgcatcggaaggcttcgccaggctgaatgggcgctggggcgataccgggcacggcgcttgcgagatcgcgatggcgcgggagctgtaa

SEQ ID NO: 5408 - protein, 312 aa, Chromobacterium violaceum ATCC 12472
MVAYRNFKGRVMNERELRALSRDIVRELGMLAGRCGEVDLSPVEAHLLIELEAAPANNQQLAERLRVDKSNSSRPLQRLAERGLIAWRADPADGRSKLAELTAAGRDWLKRLHAAMDADMERVLAQLDDGERAALESGLRVYRRALSQADRQRGYVIRPLAAADNGELAALIRRVSAEYGLGEGCSFLDPQLDALFQVYDRPGSCYLVVIGPDGRLLGGGGIAPLAGGEQDVCELQKMYFDAALRGRGLGRRLLRRLLAEARALGYRRAYLETTAALGEATALYASEGFARLNGRWGDTGHGACEIAMAREL

SEQ ID NO: 5409 - DNA, 495 bp, Vibrio vulnificus YJ016
  CDS (1)..(495): transl_table=11
atgtcagaaaaaatggactttgtcttgcgccctatcaccgttgaagacaacgcctcaatcgccaatgtgattcgtcaagtctcggcggagtatgggttaaccgccgataaaggctacagtgttgccgacccaaccctagacgatctttttagcatctactcacaagcaaatgccgcctattgggtggtggaacatcaagggaagatcgtcggtggcggtggcttttctgcgctagcaggagtccaaggtgtctgcgagttacaaaaaatgtacttcttacccatttgccgtgggcagggtctggccaagaaaatcgtttcgctcagccgcagcgccgcgaaaaagatgggttatcaacgctgttacctagaaaccactgcctgcttgaaagaagccattgctctgtatgaaaagctcggatttgaacatctgcaagcgccactcgggcaaaccggacatgacgcttgtgaagtggtgatgatttgccatttataa

SEQ ID NO: 5410 - protein, 164 aa, Vibrio vulnificus YJ016
MSEKMDFVLRPITVEDNASIANVIRQVSAEYGLTADKGYSVADPTLDDLFSIYSQANAAYWVVEHQGKIVGGGGFSALAGVQGVCELQKMYFLPICRGQGLAKKIVSLSRSAAKKMGYQRCYLETTACLKEAIALYEKLGFEHLQAPLGQTGHDACEVVMICHL

SEQ ID NO: 5411 - DNA, 504 bp, Erwinia carotovora subsp. atroseptica SCRI1043
  CDS (1)..(504): transl_table=11
atgacaaccgcgacctccgccaatcttcaggtacgcccaatcaccgcgcaggatgatgccgctatcgctcaggtcatccgccaagtttctgccgaatttggtttgacggccgacaaaggctataccgtttccgatcccaatctggacgcgttgtttgctctgtatagccagccgaaaagcgcctattgggtggttgaatatgagggccacatagttggaggcggcggtattgcgccactggtcgcgggcgaagaggatgtgtgtgaattacagaaaatgtatttcctacccgtcgtacgaggcaaagggctagcacgtcagttagcgatacaggcacttgattttgctcgtcagcatggctttcgccgttgctatctggaaacaaccggccacctgaccagcgcgattcggctgtatgagtctctgggcttcgatcctattccccattcaatgggcaacacgggccataccgattgtgaagtgacgatgctgaaggtgctgtaa

SEQ ID NO: 5412 - protein, 167 aa, Erwinia carotovora subsp. atroseptica SCRI1043
MTTATSANLQVRPITAQDDAAIAQVIRQVSAEFGLTADKGYTVSDPNLDALFALYSQPKSAYWVVEYEGHIVGGGGIAPLVAGEEDVCELQKMYFLPVVRGKGLARQLAIQALDFARQHGFRRCYLETTGHLTSAIRLYESLGFDPIPHSMGNTGHTDCEVTMLKVL

SEQ ID NO: 5413 - DNA, 528 bp, Desulfotalea psychrophila LSv54
  CDS (1)..(528): transl_table=11
ttgagctataaaattttacagaaaacttcagaaggaaagctgacaatgcaatatggtattaaagaaattcaggccgagcaggacgaggcagtttgtcgaatcattaaagccgtcggtgctgagcacggagccatcggcgaaggttttggcccctccgacccagaagtagagagaatgagtcatttctatatgggagagcagaagagtatctaccttattgccacagttaatggtcaagttgtcggtggtagtggtattgctgccttcaatggcagtgctgagatctgtgaactgcgaaaactatttttactggcggagagtcgtggcctggggctgggcaaaaaattaaccgatgaatgtttaacctttgcccgcgaaaatggctacaggcagtgctatctggatacccttgccaatatgaaaccagcaatagccctctatgagaagttgggattcagacatctgcagagaccacttgagggtaccatccacagcggttgcgatgtttggatgctcaaggatctatag

SEQ ID NO: 5414 - protein, 175 aa, Desulfotalea psychrophila LSv54
MSYKILQKTSEGKLTMQYGIKEIQAEQDEAVCRIIKAVGAEHGAIGEGFGPSDPEVERMSHFYMGEQKSIYLIATVNGQVVGGSGIAAFNGSAEICELRKLFLLAESRGLGLGKKLTDECLTFARENGYRQCYLDTLANMKPAIALYEKLGFRHLQRPLEGTIHSGCDVWMLKDL

SEQ ID NO: 5415 - DNA, 504 bp, Yersinia pseudotuberculosis IP 32953
  CDS (1)..(504): transl_table=11
atgaccacaaccacacctatccgactcctggtgcgccccatcaccgcaagagataacctcgccattgccaatgttatccgtgaggtttcggcagaattcggcctgactgcggacaaaggctataccgtgtccgatcctaatcttgatcacttgtatgaattgtacagccagccacgtagcgcttattgggtgattgaggtggatggtcacatcgcgggtggtggtggtgtcgcgccactgttgggcggtgaagccgatctatgcgaattacagaaaatgtattttctgccaatactgcgtggtaagggtttagcgaaacagttggcactacaggcgttggcatttgcccgccagcagggatttggtcgctgttatttggaaaccactgccagcctgaccagtgctgttggtctgtacgaaagattaggttttgaacatattggcggtgcgatggggaataccggccatgtagattgcgaagtgacgatgctgaaaacgctttaa

SEQ ID NO: 5416 - protein, 167 aa, Yersinia pseudotuberculosis IP 32953
MTTTTPIRLLVRPITARDNLAIANVIREVSAEFGLTADKGYTVSDPNLDHLYELYSQPRSAYWVIEVDGHIAGGGGVAPLLGGEADLCELQKMYFLPILRGKGLAKQLALQALAFARQQGFGRCYLETTASLTSAVGLYERLGFEHIGGAMGNTGHVDCEVTMLKTL

SEQ ID NO: 5417 - DNA, 993 bp, Bacteroides fragilis NCTC 9343
  CDS (1)..(993): transl_table=11
atgatatgcagtctttttgttgataaagtcaacaaagagacttatctttgtgccatgaagcaagaatatataagtcgtataaggtctttcaacagatattatacgaaaatattaggtatactcaacaaatactatttaggaagtgaattgggacttccggaggtgcgtattattcaggatgtttatttacaccctgacaggagttctaaagatatatccaatgaattaaacatggataaaggcttgttatcccgcttattaaaacaattggaacagaaagagtatatatttcgaaaaagcacggaaaaggataatcgtatggggttggtaaatctcacagaaaaaggatgtgaggtttattaccgcttgaatactgctgcaaatcaatctattgaaaggatattctcacacttagaagatcgtcaactacaaagattggttcattgtatggattctatttataagataataaatagtgtggagaccggtcttaccgttgataataatgagccaattgttatacgaccgatagaagaatcagataatgcttcaatagcatcggtgcttcgtgcgtcagtagaggagcatggagctcctaaggtcggtactttttatgatgatccgcatacggatagaatgtttcagacttttaatattaaaggtgcagaatactggatagtggaaagtaatggtgtaatattaggcggaggtggcttttatccgaccaaaggtttaccacatggttatgctgagttatcgaaatttcattttagaccggagcttagagggagaggtattggaaaacgtttacttcaattcatagagcagcgtgctgttagtgccggatatgtgtatatgtatattgtttcttatcatcagtttggaaatgctgttagtatgtatgaaaaatacggatatgaacatatagacaatgcattagatcagtcgggcttgtatcaagatgcacctttccacatggtaaaagcactctga

SEQ ID NO: 5418 - protein, 330 aa, Bacteroides fragilis NCTC 9343
MICSLFVDKVNKETYLCAMKQEYISRIRSFNRYYTKILGILNKYYLGSELGLPEVRIIQDVYLHPDRSSKDISNELNMDKGLLSRLLKQLEQKEYIFRKSTEKDNRMGLVNLTEKGCEVYYRLNTAANQSIERIFSHLEDRQLQRLVHCMDSIYKIINSVETGLTVDNNEPIVIRPIEESDNASIASVLRASVEEHGAPKVGTFYDDPHTDRMFQTFNIKGAEYWIVESNGVILGGGGFYPTKGLPHGYAELSKFHFRPELRGRGIGKRLLQFIEQRAVSAGYVYMYIVSYHQFGNAVSMYEKYGYEHIDNALDQSGLYQDAPFHMVKAL

SEQ ID NO: 5419 - DNA, 483 bp, Colwellia psychrerythraea 34H
  CDS (1)..(483): transl_table=11
gtgagttatatagttcaagaaatcaaatctcaacacgatattcaagtgtgcgaaattattaaacaagtaggcaaagaatacggtgctactggcgaggggtttggtccatctgattctgaagttcaagcgatgagccagaactacaaagatgaaagctctagccgctatatcgtcgcaagtatagaagggcgtatcgtcggtggctgtggtatcgctgcttttaataacagtaatgaaatttgtgaattacgaaaattatttcttttaccagaaagcagaggtttaggtattggtaaaaatcttaccgaaggttgccttaagtatgccaaaagtaaaggttataaaaaatgctatttggataccctaacaagcatgaagtcagcaatcgctttatacgagaagttggggtttagccatctagataagccacttcaaggtactattcataacggttgtgatgtttggatgctaaaagagctttag

SEQ ID NO: 5420 - protein, 160 aa, Colwellia psychrerythraea 34H
MSYIVQEIKSQHDIQVCEIIKQVGKEYGATGEGFGPSDSEVQAMSQNYKDESSSRYIVASIEGRIVGGCGIAAFNNSNEICELRKLFLLPESRGLGIGKNLTEGCLKYAKSKGYKKCYLDTLTSMKSAIALYEKLGFSHLDKPLQGTIHNGCDVWMLKEL

SEQ ID NO: 5421 - DNA, 474 bp, Streptococcus agalactiae A909
  CDS (1)..(474): transl_table=11
atgattatccgtccgattattaaaaatgatgaccaagcagttgcacaattaattcgacaaagtttacgcgcctatgatttagataaacctgatacagcatattcagaccctcacttagatcatttgacctcatactacgaaaaaatagagaagtcaggattctttgtcattgaggagagagatgagattattggctgtggcggctttggtccgctgaaaaatctaattgcagagatgcagaaggtgtacattgcagaacgtttccgtggtaaggggcttgctactgatttagtgaaaatgattgaagtagaagctcgaaaaattgggtatagacaactttatttagagacagccagtactttgagtagggcaactgcggtttataagcatatgggatattgtgccttatcgcaaccaatagcaaatgatcaaggtcatacagctatggatatttggatgattaaagatttataa

SEQ ID NO: 5422 - protein, 157 aa, Streptococcus agalactiae A909
MIIRPIIKNDDQAVAQLIRQSLRAYDLDKPDTAYSDPHLDHLTSYYEKIEKSGFFVIEERDEIIGCGGFGPLKNLIAEMQKVYIAERFRGKGLATDLVKMIEVEARKIGYRQLYLETASTLSRATAVYKHMGYCALSQPIANDQGHTAMDIWMIKDL

SEQ ID NO: 5423 - DNA, 981 bp, Desulfovibrio desulfuricans G20
  CDS (1)..(981): transl_table=11
atggaaaaagtaacatcgtgttttatcaggaagatatcacgcgatctggcgcgggaactgcgccttgtgggcagttatgcagaccagaaggggctgacggtggcggaggcgtatgtgcttatcgagctgggtgagcatggaacgttgtctgtgcagcaggtggcgcagttgctgctgattgatgcggccgatgccagccgggcggtacagtcacttattttgcagaagcttgccgtgctggtgcccgaaggcccgccggacagggcaaagggagtggcattgaccgaagccggacaccggaggctggcagaagtgcacggcgagatggacagtctggtgcgtgcagggctggaccagctgacccccggagaacagaaagcagtggctgacggcctgatgacctatgccagagggttgcggtacagcaggctgcaggaaggatttgtcatcagacccgtccggcctgccgacaatgctgcggtggcagagattatccgcagcgtttcacaagagcacggtctgacggccgaagccggttatgccgtgggggatgctgcggtggacgccgtaagtcaggcgtatgccgcggacggagcctgttactgggtggtggaacatcaggggcgggtgctgggcggtggcggcgtggcgccgcttgccggttgtgacggcagcatctgcgagctgcagaagatgtatctgctggcggaatgcagaggacgcgggctgggcaggcggctggtgctcacagcgctggagtttgcccgcagccacggatacagggcctgttatctggagaccaccggaatattgcagcaggccgcacggctgtacgaatcgctggggttcgagcgctgcacagcgcagggcgatacgggacacagtgtctgtgagctgcggtatatcatgcattttaccacgcaggcatcatcagcccgcggggaacaccccccgcagccctgctgcggctgcggcgcctga

SEQ ID NO: 5424 - protein, 326 aa, Desulfovibrio desulfuricans G20
MEKVTSCFIRKISRDLARELRLVGSYADQKGLTVAEAYVLIELGEHGTLSVQQVAQLLLIDAADASRAVQSLILQKLAVLVPEGPPDRAKGVALTEAGHRRLAEVHGEMDSLVRAGLDQLTPGEQKAVADGLMTYARGLRYSRLQEGFVIRPVRPADNAAVAEIIRSVSQEHGLTAEAGYAVGDAAVDAVSQAYAADGACYWVVEHQGRVLGGGGVAPLAGCDGSICELQKMYLLAECRGRGLGRRLVLTALEFARSHGYRACYLETTGILQQAARLYESLGFERCTAQGDTGHSVCELRYIMHFTTQASSARGEHPPQPCCGCGA

SEQ ID NO: 5425 - DNA, 507 bp, Myxococcus xanthus DK 1622
  CDS (1)..(507): transl_table=11
atgagcacggaagagctgacgctgcgacgcatcgaatcgagggatgacgccgcggtggccggcatcatccggacggtgatgccggagttcggcgcggacggccctggcttcgccatccacgaccccgaggtgtcagcgatgagcgccgcctacgcccggccccggcacgtctacttcgtcgtggagcgggcggggcgtgtcatcggtggcggtggaatcgccccacttgaaggaggagacgcgggcgtctgcgagctgcggaagatgtacttcctccccgaagcccgaggcctcggccagggcgagcgcctgctccgacgctgcctggagttcgcacgtgaagcgggcttccagcgctgctacctggagacgctggccggaatgcagcaggcccagaagctctaccgccgcatgggcttcgagccactgtgcgcgcccatgggcagcacgggccacttcggctgcgaccactggtacgcccgggacttgtcaaagccgctcgactga

SEQ ID NO: 5426 - protein, 168 aa, Myxococcus xanthus DK 1622
MSTEELTLRRIESRDDAAVAGIIRTVMPEFGADGPGFAIHDPEVSAMSAAYARPRHVYFVVERAGRVIGGGGIAPLEGGDAGVCELRKMYFLPEARGLGQGERLLRRCLEFAREAGFQRCYLETLAGMQQAQKLYRRMGFEPLCAPMGSTGHFGCDHWYARDLSKPLD

SEQ ID NO: 5427 - DNA, 513 bp, Synechococcus sp. CC9311
  CDS (1)..(513): transl_table=11
ttgagtgaatggcaagacatagagctgcggcctctgcacccattggatgaaacggccttgtccggagtgattcgggcagcacttgttgaatttggtgctgatcgacccggttttgcttggcaagatccggagcttgatgccatgagcaagacctacgccgcgcctggatggatttattacgtggcagtagagggtgggaatgttgtcgggggagctggaattggtcctctaattggtgtggaagccacttgcgaattgcagaagatgtacttagctccttcagcacgggggaagggtgttggttggcggcttatggggagcctgttggaacaggctcgtgtgctgggctatcgctgtgtttatctcgaaactctttcgggaatggcggcggctcaacggctttattgggcttggggattcctaaagattgaacagccccttggtcaaacagggcacggtggttgtgactgttggttcctcaaggaactgcatggacctggggtttctggatag

SEQ ID NO: 5428 - protein, 170 aa, Synechococcus sp. CC9311
MSEWQDIELRPLHPLDETALSGVIRAALVEFGADRPGFAWQDPELDAMSKTYAAPGWIYYVAVEGGNVVGGAGIGPLIGVEATCELQKMYLAPSARGKGVGWRLMGSLLEQARVLGYRCVYLETLSGMAAAQRLYWAWGFLKIEQPLGQTGHGGCDCWFLKELHGPGVSG

SEQ ID NO: 5429 - DNA, 1023 bp, Shewanella sp. MR-4
  CDS (1)..(1023): transl_table=11
atgattcgaactgagccactgccagcccacactagtgcttgcatggctcaactttggttaaccctgatggcattcaatccgactatggcaaatgatcccggctcatctagccaactgagacacctttcccgctatatggtcagacacttaggcatgctcaatgcggcctttggcgatttacctctgtccccagtacaggcccacgccttgtttgagataggcaatcaaccgcaaaccattaaggaactcgcctgcaaactgagcatagataaatccaatgctagccgcgcaatcaagcacttagtcgataaaaacctcgcccagagccaaatgcatccgcgggataatcgctgcctcgtcgttcaactgactcctgcgggtaaaaagctgctcgctaagttagatagccagcaaaatcaactctttcaagaaatcttggctcagctgaccccagagcaaattcaacaaatcgagcaagccctaatgcaatacaaccaagccatacataaagccaaacaacaatcgggttatcttatccgtgaagcgaccgccgccgatgatgctgccattgcccaagtgatccgcgcagtttccgccgaatacggcttaaccgcggataaaggctatagcgtggccgacccaaccttagattgtttaagccaaatctattcgcagccgggcgcccaatactgggtgatagagcatgaaggccaagtggttggcggcgcaggcatagcgccactggctaacaatgccggtatttgtgaactgcaaaaaatgtactttatacccgagatccgtggtaaaggcttagccaaacgtttagcactgctggctctagacttcgcccgtggagcgggttatcagagctgctatctcgaaaccaccgcattactcaaagaggccctaaagctctacgaacacttagggtttaactacttaagcgccccccttggcaatactggccacgacgcctgtgaaatcccaatgctattaccactgcacgccgaactaaccccataa

SEQ ID NO: 5430 - protein, 340 aa, Shewanella sp. MR-4
MIRTEPLPAHTSACMAQLWLTLMAFNPTMANDPGSSSQLRHLSRYMVRHLGMLNAAFGDLPLSPVQAHALFEIGNQPQTIKELACKLSIDKSNASRAIKHLVDKNLAQSQMHPRDNRCLVVQLTPAGKKLLAKLDSQQNQLFQEILAQLTPEQIQQIEQALMQYNQAIHKAKQQSGYLIREATAADDAAIAQVIRAVSAEYGLTADKGYSVADPTLDCLSQIYSQPGAQYWVIEHEGQVVGGAGIAPLANNAGICELQKMYFIPEIRGKGLAKRLALLALDFARGAGYQSCYLETTALLKEALKLYEHLGFNYLSAPLGNTGHDACEIPMLLPLHAELTP

SEQ ID NO: 5431 - DNA, 981 bp, Shewanella sp. MR-7
  CDS (1)..(981): transl_table=11
atggctcaactttggttaaccctgatggcattcaatccgactatggcaaatgatcccggctcatctagccaactgagacacctttcccgctatatggtcagacacttaggcatgctcaatgcggcctttggcgatttacctctgtccccagtacaggcccacgccttgtttgagataggcaatcaaccgcaaaccattaaggaactcgcctgcaaactgagcatagataaatccaatgccagccgcgcaatcaagcacttagtcgataaaaacctcgcccagagccaaatgcatccgcgggataatcgctgtctcgtcgttcaactgactcctgcgggtaaaaagctgctcgcaaaattagatagccagcaaaatcaactctttcaagaaatcttggctcagctgacccctgagcaaattcaacaaatcgagcaagctcttatgcaatacaaccaagccatacataaagccaaacaacaatcgggttatcttatccgtgaagcgaccgccgccgatgatgctgccattgcccaagtgatccgcgcagtttccgccgaatacggcttaaccgcggataaaggctatagcgtggccgacccaaccttagattgtttaagccaaatctattcgcagccgggcgcccaatactgggtgatagagcatgaaggccaagtggttggcggcgcaggcatagcgccactggctaacaatgccggtatttgtgaactgcaaaaaatgtactttatacccgagatccgtggtaaaggcttagccaaacgtttagcactgctggctctagacttcgcccgtggagcgggttatcagagctgctatctcgaaaccaccgcattactcaaagaggccctaaagctctacgaacacttagggtttaactacttaagcgccccacttggtaatactggccacgacgcctgtgaaatcccaatgctattaccactgcacgccgaactgaatgaatag

SEQ ID NO: 5432 - protein, 326 aa, Shewanella sp. MR-7
MAQLWLTLMAFNPTMANDPGSSSQLRHLSRYMVRHLGMLNAAFGDLPLSPVQAHALFEIGNQPQTIKELACKLSIDKSNASRAIKHLVDKNLAQSQMHPRDNRCLVVQLTPAGKKLLAKLDSQQNQLFQEILAQLTPEQIQQIEQALMQYNQAIHKAKQQSGYLIREATAADDAAIAQVIRAVSAEYGLTADKGYSVADPTLDCLSQIYSQPGAQYWVIEHEGQVVGGAGIAPLANNAGICELQKMYFIPEIRGKGLAKRLALLALDFARGAGYQSCYLETTALLKEALKLYEHLGFNYLSAPLGNTGHDACEIPMLLPLHAELNE

SEQ ID NO: 5433 - DNA, 489 bp, Leuconostoc mesenteroides subsp. mesenteroides ATCC 8293
  CDS (1)..(489): transl_table=11
atgattattagaacaataaaaaaagaggataatttgattgtgaaaaaaattatccaagaatctctagaatctttaaactttgctattgaagggactgcatactttgatccccaattgggccgcctcaatgaatactatgataatttagataacgcaaaatattgggtagtcgaattagataataaaatagttggcggtatcgggattgcaccatttgacaatgaacaaggaatttgtgagcttcaaaagttatatctaattcctgaagcacaaggattaggaatctccagaaaattgatggaaaccgcgttatcctttgccagcactcattataagtcctgttatctggaaacaaatcatgatcttaaagttgcttgtattttatacgaaaaatttggctttaaattattaaattctccaatttctggttctgggcattttgcaatgaatgcttggtatttgaaggatctagaggtagtaaaccaatag

SEQ ID NO: 5434 - protein, 162 aa, Leuconostoc mesenteroides subsp. mesenteroides ATCC 8293
MIIRTIKKEDNLIVKKIIQESLESLNFAIEGTAYFDPQLGRLNEYYDNLDNAKYWVVELDNKIVGGIGIAPFDNEQGICELQKLYLIPEAQGLGISRKLMETALSFASTHYKSCYLETNHDLKVACILYEKFGFKLLNSPISGSGHFAMNAWYLKDLEVVNQ

SEQ ID NO: 5435 - DNA, 1023 bp, Shewanella sp. ANA-3
  CDS (1)..(1023): transl_table=11
atgattcgaactgagccacagcctgcccacacaagtgcttgcatggctcaactttggttaaccctgatggcattcaatccgactatggcaaatgatcccggctcatctagccaactgagacacctttcccgctatatggtcagacacttaggcatgctcaatgcggcctttggcgatttacctctgtccccagtacaggcccacgccttgtttgagataggcaatcaaccgcaaaccattaaggaactcgcctgcaaactgagcatagataaatccaatgctagccgagcaatcaaacacttagtcgataaaaacctcgcccagagccaaatgcatccgcgggataatcgctgcctcgtcgttcaactgactcctgcgggtaaaaagctgctcgcaaaattagatagccagcaaaatcaactctttcaagaaatcttggcccagctgacccctgagcaaattcaacaaatcgagcaagctcttatgcaatacaaccaagccatacataaagccaaacaacaatcgggttatcttatccgtgaagcgaccgccgccgatgatgccgccattgctcaagtgatccgcgcggtttccgccgaatacggtttaactgcagataaaggctatagcgttgccgatccgaccttagattgtttaagccaaatctattcgcagccgggcgcccaatactgggtgatagagcatgaaggccaagtggttggcggcgcgggcatagcgccactggctaacaatgaaggaatttgtgagctgcaaaaaatgtactttatgcccgagatccgcggtaaaggcttagccaaacgtttagcgctgcaggctctagagtttgcgcgtgaagcgggttatcagagctgttacctcgaaaccaccgcattactcaaagaggccctaaaactctacgaacacttaggttttaactacctaagcgccccacttggcaatactggccacgacgcctgtgagatcccaatgctattgccactgcacgccgaactgaatgaatag

SEQ ID NO: 5436 - protein, 340 aa, Shewanella sp. ANA-3
MIRTEPQPAHTSACMAQLWLTLMAFNPTMANDPGSSSQLRHLSRYMVRHLGMLNAAFGDLPLSPVQAHALFEIGNQPQTIKELACKLSIDKSNASRAIKHLVDKNLAQSQMHPRDNRCLVVQLTPAGKKLLAKLDSQQNQLFQEILAQLTPEQIQQIEQALMQYNQAIHKAKQQSGYLIREATAADDAAIAQVIRAVSAEYGLTADKGYSVADPTLDCLSQIYSQPGAQYWVIEHEGQVVGGAGIAPLANNEGICELQKMYFMPEIRGKGLAKRLALQALEFAREAGYQSCYLETTALLKEALKLYEHLGFNYLSAPLGNTGHDACEIPMLLPLHAELNE

SEQ ID NO: 5437 - DNA, 579 bp, Nostoc punctiforme PCC 73102
  CDS (1)..(579): transl_table=11
atggactctgccagaattgctatttgctgggtaaattgggatatagaaccagaaaattttctgtgtaaacttgaccagcaaatggtaatgaaaaactattatcaagattttttaattcgtgattgggtgcaaagcgatcgcacaagagccgccgaagtcatcagttatgtattatcagaatacggtctcggttgggaacccaagggcgctgaccgagatgtgctacgagttgaggaatgttatttagctactgggggagagttttgggtaattgaacaccaaagccagttagtaggaactggggcatactaccccatacagcgaggtgaaaaagctgtagaaatccgcaaaatgtatcttttacccagcatcaggggtttgggattagggaaatatttgttacaacagctagaagcagcgatcgcagagcgtggttttgagcaaatttggattgaaaccgccagtgttttggtggaagcagtcaagctgtatgaaagcaacggctacactccagcaacaggagtagaaacaatacgctgcgatcgcgtgtattttaagtcactggttaatggtcattag

SEQ ID NO: 5438 - protein, 192 aa, Nostoc punctiforme PCC 73102
MDSARIAICWVNWDIEPENFLCKLDQQMVMKNYYQDFLIRDWVQSDRTRAAEVISYVLSEYGLGWEPKGADRDVLRVEECYLATGGEFWVIEHQSQLVGTGAYYPIQRGEKAVEIRKMYLLPSIRGLGLGKYLLQQLEAAIAERGFEQIWIETASVLVEAVKLYESNGYTPATGVETIRCDRVYFKSLVNGH

SEQ ID NO: 5439 - DNA, 492 bp, Croceibacter atlanticus HTCC2559
  CDS (1)..(492): transl_table=11
atgccaactcctactataagagaaataaatattgaagataatcctcatgttgctaagtgtgtaagagatgttcttattgaatttggagttccaaaagttggtactgcgtatgaagatgcttctttagattgtatgtatgaaacctataatcatccaaaaatggtttacctggttttagaggaaaattctcaaattattggaagcgcaggtattgctaaacttgataatcacaatggaaatatatgcgaattgcaaaaaatgtattttgctccagaagctagaggaagaggtttaggtaccaaaatgatcgcaaagtgcttagagtatgcgaaagactttggttttgaagcctgttatttagaaacaatgccatatatggatgctgccagagctctctatgccaaaaacggatttgagattatagacaaacctttaggaaatacaggtcattattcttgtacggtatatatgcttaaaaacctaaaaaactaa

SEQ ID NO: 5440 - protein, 163 aa, Croceibacter atlanticus HTCC2559
MPTPTIREINIEDNPHVAKCVRDVLIEFGVPKVGTAYEDASLDCMYETYNHPKMVYLVLEENSQIIGSAGIAKLDNHNGNICELQKMYFAPEARGRGLGTKMIAKCLEYAKDFGFEACYLETMPYMDAARALYAKNGFEIIDKPLGNTGHYSCTVYMLKNLKN

SEQ ID NO: 5441 - DNA, 906 bp, Photobacterium sp. SKA34
  CDS (1)..(906): transl_table=11
atgcagccccaacaacttcgccagctctctcgccaattagtccgtcaactcggcatgctaaataatcaatgtggacaattcgcccttacccacgtacaagcccacactttgattgagttagaacaagggccttgtacggttaatcaaatggcagagcgtttacgggtcgataaatccaatgccagccgtaatttagccatgttactcaaccaaggattgatccattcaattgccaaccctaacgataaacgtagccaactctctcagttgacaccgaatggtattcaaacactctccgctcttcaccaccaacttgataaagatacccaaacgattttaaatcaactggatcaagatgaaatagagcagttagaaacaagtttacgccgttaccataaagctttgacaatcacagagcatcaacaggggtatgtactcagagaaatcacgcctttagataatgccgccgttgctgcacttattcgtcgtgtttcagctgaatatggattaaccccagatagaggctttagcgttgcggatcctcatcttgatgatctcttccagcattaccaattaccgaaaagtcgttattgggtgatagaaaaaaacaatcgtattttaggctgtggcggtgtagcaccattagcgggagatgcacagtggagtgaactgcaaaaagtcttcttcttaccagagctcagaggcaaggggttagcacgagtattaactgttcaggcattaaagtttgcccgagaaaatggctttaaaggctgctatttagagaccacagaggtattaaaagaagcggtgaaactctatcaatctctaggctttgtcgatattccaactgcgctaggcaatacagggcacaatgtgtgtgaaattcatatgcttaaaaccttctaa

SEQ ID NO: 5442 - protein, 301 aa, Photobacterium sp. SKA34
MQPQQLRQLSRQLVRQLGMLNNQCGQFALTHVQAHTLIELEQGPCTVNQMAERLRVDKSNASRNLAMLLNQGLIHSIANPNDKRSQLSQLTPNGIQTLSALHHQLDKDTQTILNQLDQDEIEQLETSLRRYHKALTITEHQQGYVLREITPLDNAAVAALIRRVSAEYGLTPDRGFSVADPHLDDLFQHYQLPKSRYWVIEKNNRILGCGGVAPLAGDAQWSELQKVFFLPELRGKGLARVLTVQALKFARENGFKGCYLETTEVLKEAVKLYQSLGFVDIPTALGNTGHNVCEIHMLKTF

SEQ ID NO: 5443 - DNA, 495 bp, Oceanospirillum sp. MED92
  CDS (1)..(495): transl_table=11
atggactttcagataaaagagattcaacccgaagatgatgcggcggtatgccagattattaagcaggtcgggcaagagttcggcgctgttggtgagggctatgggccttcagatggtgaggtgatctgtatgagccagcattacagcgatagtaccggtagtcggtatctggtcgcaaaagtcgatggagtcatcgtgggcggtggtgggattgctgccctgagtggtgctgaggatgtggcagagctcaagaagttgtttctgctgcctacgagcagagggatgggcatcggccgcgctttagctgaagcctgcctggcgttcgcgcaagcacatggttatcgcagttgttatctggacacgctctgcagtatgaaatcagccattgccttatatgaacagctgggtttccagcggttagatcagccgtttgccagctctgaacataacggttgtgatgtctggatgcttaaagagttagtggtaaccggctaa

SEQ ID NO: 5444 - protein, 164 aa, Oceanospirillum sp. MED92
MDFQIKEIQPEDDAAVCQIIKQVGQEFGAVGEGYGPSDGEVICMSQHYSDSTGSRYLVAKVDGVIVGGGGIAALSGAEDVAELKKLFLLPTSRGMGIGRALAEACLAFAQAHGYRSCYLDTLCSMKSAIALYEQLGFQRLDQPFASSEHNGCDVWMLKELVVTG

SEQ ID NO: 5445 - DNA, 477 bp, Flavobacteria bacterium BBFL7
  CDS (1)..(477): transl_table=11
atgaaaattcgcaaaattcttcctaaagataatcaagctatcaaagagattattcaagcctctattttagaacatggtgcacccaaaataggaactgcatatagcgatgcggcaacgcaagcgatgtatgaacaataccaaaaacctcgcagaacttactacgtgatagaagttgatggagtagtggtaggtggcgcaggaatcgcaccactagataattacaacggtaatgtgagcgaacttcaaaagatgtactttaaaccacaagcacgtggtaaaggttacggtaagaaattgatgataacttgcctagaacgcgccaaagaattcaaatttgaaagcgtttacctagagactatggataatatgtacgatgcccaaggcttgtacaaacacgtaggttttaaattactcgatgggccattaggtgatactggtcacttctcttgtccggtgcaaatgcttttaaaattttaa

SEQ ID NO: 5446 - protein, 158 aa, Flavobacteria bacterium BBFL7
MKIRKILPKDNQAIKEIIQASILEHGAPKIGTAYSDAATQAMYEQYQKPRRTYYVIEVDGVVVGGAGIAPLDNYNGNVSELQKMYFKPQARGKGYGKKLMITCLERAKEFKFESVYLETMDNMYDAQGLYKHVGFKLLDGPLGDTGHFSCPVQMLLKF

SEQ ID NO: 5447 - DNA, 906 bp, Vibrio sp. Ex25
  CDS (1)..(906): transl_table=11
atgaacgctcgtcaactccgacactactcccgtcaagccgtccgattgcttggtatgctcgataaacaatgcggcgatgtcgctcttaccccggtacaagcgcacgcattaggtgaaatccaattgcagccattgaccatcaaccaactggcgcagcagcttagtgtcgacaagtccaatgcaagccgcaccattactggtttgattaaattaggtttggttgagagcatcgaaaacccgaaagataaacgaagccaactcgtagtgctcacaattcaaggacagcaggcgttagcgcaactagaccagcagcaaaacagcttttttgagcagttgcttacacaacttgatgactgtgagcaagaacaactcaaacttggtctagagacttacctaaaagggctaacaaaagtgtgtcaggcagaggaatacacccttcgacctcttaccaaagcagacaatccgcaagtggcagacgtaattcgtaaagtctccgcagaatacggcttaaccgcagacagaggttatggtgtggccgatccaacgcttgatgatatgtattcggtgtataatcaaaacggggccgcctattgggtcattgaacatcgcggagagatcgttggtggcggtggctttgcccctttagctggtgagccaaatgtgtgtgagctgcaaaagatgtacttcttacctcaaacacgaggacacggtttagccaaacgcatcgtcgcattgagcttacaactggcgaaacagcttgggtatcagcagtgctatttagagacaaccgaatgtctaagagaggcggtaggcttgtatgaaaagctaggctttgagcatctcgatgccccgcttggacaaacagggcatgatgcatgtgaagtcgtaatgcttaaggtactgtaa

SEQ ID NO: 5448 - protein, 301 aa, Vibrio sp. Ex25
MNARQLRHYSRQAVRLLGMLDKQCGDVALTPVQAHALGEIQLQPLTINQLAQQLSVDKSNASRTITGLIKLGLVESIENPKDKRSQLVVLTIQGQQALAQLDQQQNSFFEQLLTQLDDCEQEQLKLGLETYLKGLTKVCQAEEYTLRPLTKADNPQVADVIRKVSAEYGLTADRGYGVADPTLDDMYSVYNQNGAAYWVIEHRGEIVGGGGFAPLAGEPNVCELQKMYFLPQTRGHGLAKRIVALSLQLAKQLGYQQCYLETTECLREAVGLYEKLGFEHLDAPLGQTGHDACEVVMLKVL

SEQ ID NO: 5449 - DNA, 504 bp, Escherichia coli
  CDS (1)..(504): transl_table=11
atgaataacattgcgccgcaatcacctgtaatgcgtcgcctgacgctgcaggataatcctgctatcgcccgcgtcattcgtcaggtatccgccgaatacggtcttaccgctgataaaggctacaccgtcgccgatccgaatcttgacgagctgtatcaagtatatagtcagcctggccatgcatattgggtcgttgagtacgagggtgaagtggtcggcggcggtgggatagcgccattaaccgggagtgagtcggatatttgcgaactgcaaaagatgtattttcttccggctatccgcggcaaagggctggcaaaaaaactggccttaatggcgatggagcaggcgcgagagatgggtttcaaacgctgctatctggaaacgaccgcttttttaaaggaagccattgcgctttatgagcatttgggctttgagcatatcgactatgcgcttggctgcacgggccatgtcgattgtgaagtgcggatgttgcgcgaactctaa

SEQ ID NO: 5450 - protein, 167 aa, Escherichia coli
MNNIAPQSPVMRRLTLQDNPAIARVIRQVSAEYGLTADKGYTVADPNLDELYQVYSQPGHAYWVVEYEGEVVGGGGIAPLTGSESDICELQKMYFLPAIRGKGLAKKLALMAMEQAREMGFKRCYLETTAFLKEAIALYEHLGFEHIDYALGCTGHVDCEVRMLREL

SEQ ID NO: 5451 - DNA, 504 bp, Salmonella typhimurium
  CDS (1)..(504): transl_table=11
atgaataatgtcgcctcgccaacgctcacggtgcgccgaatcactaccgccgacaatgccgctattgcccgtgtcatccgtcaggtttcagcggaatacggacttaccgccgataaaggttataccgttgccgaccccaatctggatgaactgtatcaggtttatagccaaccgggcgcggcctactgggtggtagagcaaaacggttgtgtggtgggcggcggcggcgtggcgccgttatcctgtagcgaaccagacatttgtgaactgcaaaaaatgtattttttaccggtgattcgtggccaggggctggcgaaaaagctggcgctgatggcgctggatcatgcccgtgaacagggttttaaacgctgctatctggaaacaacggcttttttacgcgaggcgattgcgctatacgaacgtttaggatttgaacatattagcgaaccgctcggctgcaccggacatgtcgattgcgaagtgaggatgttaaaggatctctga

SEQ ID NO: 5452 - protein, 167 aa, Salmonella typhimurium
MNNVASPTLTVRRITTADNAAIARVIRQVSAEYGLTADKGYTVADPNLDELYQVYSQPGAAYWVVEQNGCVVGGGGVAPLSCSEPDICELQKMYFLPVIRGQGLAKKLALMALDHAREQGFKRCYLETTAFLREAIALYERLGFEHISEPLGCTGHVDCEVRMLKDL

SEQ ID NO: 5453 - DNA, 21 bp, Artificial sequence
  primer
atggtcggcggcggtgggata

SEQ ID NO: 5454 - DNA, 22 bp, Artificial sequence
  primer
ttagagttcgcgcaacatccgc

SEQ ID NO: 5455 - protein, 154 aa, Artificial sequence
  consensus sequence
  Variant (2)..(8): Xaa in position 2 to 8 is any amino acid
  Variant (10)..(14): Xaa in position 10 to 14 is any amino acid
  Variant (16)..(16): Xaa in position 16 is any amino acid
  Variant (18)..(20): Xaa in position 18 to 20 is any amino acid
  Variant (21)..(22): Xaa in position 21 to 22 is any or no amino acid
  Variant (24)..(27): Xaa in position 24 to 27 is any amino acid
  Variant (29)..(37): Xaa in position 29 to 37 is any amino acid
  Variant (39)..(40): Xaa in position 39 to 40 is any amino acid
  Variant (41)..(56): Xaa in position 41 to 56 is any or no amino acid
  Variant (59)..(59): Xaa in position 59 is any amino acid
  Variant (61)..(62): Xaa in position 61 to 62 is any amino acid
  Variant (64)..(68): Xaa in position 64 to 68 is any amino acid
  Variant (69)..(73): Xaa in position 69 to 73 is any or no amino acid
  Variant (77)..(77): Xaa in position 77 is any amino acid
  Variant (79)..(79): Xaa in position 79 is any amino acid
  Variant (81)..(82): Xaa in position 81 to 82 is any amino acid
  Variant (84)..(85): Xaa in position 84 to 85 is any amino acid
  Variant (88)..(88): Xaa in position 88 is any amino acid
  Variant (90)..(93): Xaa in position 90 to 93 is any amino acid
  Variant (95)..(101): Xaa in position 95 to 101 is any amino acid
  Variant (103)..(105): Xaa in position 103 to 105 is any amino acid
  Variant (107)..(109): Xaa in position 107 to 109 is any amino acid
  Variant (115)..(120): Xaa in position 115 to 120 is any amino acid
  Variant (122)..(123): Xaa in position 122 to 123 is any amino acid
  Variant (126)..(128): Xaa in position 126 to 128 is any amino acid
  Variant (131)..(139): Xaa in position 131 to 139 is any amino acid
  Variant (140)..(142): Xaa in position 140 to 142 is any or no amino acid
  Variant (144)..(144): Xaa in position 144 is any amino acid
  Variant (145)..(145): Xaa in position 145 is any or no amino acid
  Variant (147)..(153): Xaa in position 147 to 153 is any amino acid
DXXXXXXXIXXXXXEXGXXXXXGXXXXDXXXXXXXXXYXXXXXXXXXXXXXXXXXXGGXGXXPXXXXXXXXXXCELXKXYXXPXXRGXGXXXXLXXXXXXXAXXXGXXXCYLETXXXXXXAXXLYXXXGFXXXXXXXXXXXXHXXCXXXXXXXL

SEQ ID NO: 5456 - protein, 20 aa, Artificial sequence
  protein pattern
  Variant (3)..(3): Xaa in position 3 is any amino acid
  Variant (5)..(5): Xaa in position 5 is Leu, Met or Val
  Variant (6)..(6): Xaa in position 6 is Phe or Tyr
  Variant (7)..(11): Xaa in position 7 to 11 is any amino acid
  Variant (14)..(14): Xaa in position 14 is any amino acid
  Variant (16)..(19): Xaa in position 16 to 19 is any or no amino acid
ELXKXXXXXXXRGXGXXXXL

SEQ ID NO: 5457 - protein, 20 aa, Artificial sequence
  protein pattern
  Variant (3)..(3): Xaa in position 3 is Asp or Glu
  Variant (5)..(7): Xaa in position 5 to 7 is any amino acid
  Variant (8)..(8): Xaa in position 8 is Leu or Met
  Variant (9)..(10): Xaa in position 9 to 10 is any amino acid
  Variant (12)..(13): Xaa in position 12 to 13 is any amino acid
  Variant (16)..(18): Xaa in position 16 to 18 is any amino acid
YLXTXXXXXXAXXLYXXXGF

SEQ ID NO: 5458 - DNA, 393 bp, PHYSCOMITRELLA PATENS
  CDS (1)..(393)
atgcaggctgtcagatcgtcgctgtgggcggttcatgggtcagttttgcaacacatgcgcgtgagagcggtcgttgcaccatccaccaccggcctttggggcaatggcaatgcgaggacaatgtcgggcgaggcacatgggacatacttggaccggcgcgatgtcatagaccgtgtgctcgctgtggtgaaatccaaccaaaaagtcgatgcctcgaaggtgtccgagacagctagctttaaagatatgggtctcgacagcttagatgaagtggaggtagtgatggcactcgaagaggaattcgcactggagattcctgatgctgaggctgataaaatcaggtctgcttcagatgctatcgacttcattgcatctcatcccagcgccaagtaa

SEQ ID NO: 5459 - protein, 130 aa, PHYSCOMITRELLA PATENS
MQAVRSSLWAVHGSVLQHMRVRAVVAPSTTGLWGNGNARTMSGEAHGTYLDRRDVIDRVLAVVKSNQKVDASKVSETASFKDMGLDSLDEVEVVMALEEEFALEIPDAEADKIRSASDAIDFIASHPSAK

SEQ ID NO: 5460 - DNA, 743 bp, Glycine max
  CDS (49)..(435)
gatctaacagagaggagagtgaagttttgtggtgtggtttagtgtcaaatggcggcgagtagaagcacttttcctctgatgaaatacttgagagtgcgcgtcgacgctcttccccgcaacactcccttaaccctcgctcccaactttttgattcgccgcttctgtgaagaggttaggggttgttttctcgacaagtctgaggtcacagatcgcgtcatttcctgcgtcaaaaacttccagaaagttgatccttcaaaggttaaccctaatgctcacttccagaatgaccttggattggatagtttagattcggtagagattgtgatggctcttgaggaggagtttgggttcgagattcctgataatgaggcagacaagatcaactccattaaacttgcagtggacttcattgcatctcatcctcaggcaaagtagtggaattcttttgtttctcaacatctagtttagatgatccatcagacatttttgcttccatagtggaactttgttttctcatccctcagaagggtgttagctggggatgtgccagcttcatttggcggtattggcatccagaacttcacattctgtgttcctcctatattcgtgtcaataagaattgtgttaaatttccgattatgaaattgtgaggtcttgagttgtcctcagcaacagatgcattatgctattctcttttgctctgttttctgttattacatcatccgtaataattttgcttttgc

SEQ ID NO: 5461 - protein, 128 aa, Glycine max
MAASRSTFPLMKYLRVRVDALPRNTPLTLAPNFLIRRFCEEVRGCFLDKSEVTDRVISCVKNFQKVDPSKVNPNAHFQNDLGLDSLDSVEIVMALEEEFGFEIPDNEADKINSIKLAVDFIASHPQAK

SEQ ID NO: 5462 - DNA, 723 bp, Glycine max
  CDS (55)..(441)
tccggaaaagaatagagaagagagtgaggtttggtggtgtggtttagtgtcaaaatggcggcgagtagaagcactttacctctgatgaagtacttgagagtgcgcgtggacgctcttccccgcaacactcccttgaccctcgcttccaacttgttgattcgccgcttctccgaagaggttaggggttgttttctcgacaagtccgaggtcacagatcgcgtcatttcctgcgtcaaaaacttccagaaagtcgatccttctaaggttaaccctaatgctcacttccagaatgaccttggattggatagtttagattcagtagagatcgtgatggctcttgaggaagagtttgggttcgagattcctgataatgaggcagacaagatcaactccattaaacttgcagtggacttcattgcatctcatcctcaggcaaagtagtggaattcgtgtataatttttcttttgtttctcaacatctagtttagatgacgcatcgacatttttgcttccaaagtggaactttgttttctcatccctcagaagagtgttagctggggatgtgccagcttcatttggcggtattggcatccagaacttcacattttgtgttcctccaatattcgtgtcaataagaattgtgtgttaaatttccaattatgaaattgtgaggtcttgagttgtcctcaccacaaatatattcttattcttatctaaattttt

SEQ ID NO: 5463 - protein, 128 aa, Glycine max
MAASRSTLPLMKYLRVRVDALPRNTPLTLASNLLIRRFSEEVRGCFLDKSEVTDRVISCVKNFQKVDPSKVNPNAHFQNDLGLDSLDSVEIVMALEEEFGFEIPDNEADKINSIKLAVDFIASHPQAK

SEQ ID NO: 5464 - DNA, 411 bp, Oryza sativa
  CDS (1)..(411)
atgcaggcggtgagaaccctggtgctgcggcacctgcgtcttgcctgccgccgcgcgccgccctcggctgctgcctgtggtggcgcgaggccggcggtgtaccgcgtcgtcggcgtcgcccccggccaccgggggatggccgcgtcggcgggccaggagggtgggccgccgcgggatttctccgagggcgctgtcagggcgcgcgtcgtcgagctcgtcaagaagttcgacaggatcgacgccgacaaggtaactgagacagcagattctctatgggacctgagtttggacagcttagatcgggtggaactcgtcatggcctttgagcaagaattctccgttgaaattcctgatgacaaagccgacaagctttcttgctgcgctgatgttgcaaaatacatcatatcttaa

SEQ ID NO: 5465 - protein, 136 aa, Oryza sativa
MQAVRTLVLRHLRLACRRAPPSAAACGGARPAVYRVVGVAPGHRGMAASAGQEGGPPRDFSEGAVRARVVELVKKFDRIDADKVTETADSLWDLSLDSLDRVELVMAFEQEFSVEIPDDKADKLSCCADVAKYIIS

SEQ ID NO: 5466 - DNA, 702 bp, Sorghum bicolor
  CDS (101)..(529)
gcacgaggagcttcccaaaactcttcttgctcagctcagtcacctgacctccaccgttccttcgtcgtcgctctcggtccacctaccgaaggagcgcgacatgcagacggtacgaggtgtggtgctgcagcacctccggctccgcgcggcgcctgccatcgctgcacgtggaggcagcgggaggccggcgctgtacgggttcgctcgggggatgagcgcgccggcgggccaggaggacagtaagggaagcagcagccccgaccccgagagggacatcaggacgcgcgtcgttaacctggtcaagaagttcgacaagatcgacgccgacaaggtgactgagactgcagacttccaaaaggacctgagcttggacagtttagaccgggtggaacttgttatggcttttgaacaagagttctccattgagattcctgatgacaaggctgacaagctaacctgctgtgcggatgttgcaaaatacatcatatcggaatctcaaatcagcgataaaagtgccggtggctcctgaggggcagatgaaagcgagtgcaatgtttctttttgtgcttaaatgaatcttggttagaaagggtgatttatgcgcagggtttcttttcactttttccagtatggaaggaaatgctcttcaaatgccttatatagtctgttaatgtgaaaatatctctaccttggtagtttatt

SEQ ID NO: 5467 - protein, 142 aa, Sorghum bicolor
MQTVRGVVLQHLRLRAAPAIAARGGSGRPALYGFARGMSAPAGQEDSKGSSSPDPERDIRTRVVNLVKKFDKIDADKVTETADFQKDLSLDSLDRVELVMAFEQEFSIEIPDDKADKLTCCADVAKYIISESQISDKSAGGS

SEQ ID NO: 5468 - DNA, 432 bp, Sorghum bicolor
  CDS (1)..(432)
atggccaccttgtccgccatctccgccaaggccggctactgcaaggcaccaacgctgagctggaagggaagcagagtttcagcccggaatgtggtctccatggcgaccacccggagaggaggcctcgtctccctaagatcccctcggtttcgcgtctacgcggcaaaggcggagacggtgagcaaggtgatggacatcgtgaagcagcagctggcgctggcggcggacgtggggctgacggcggagtccaagttcgcggacctgggcgccgactcgctggacacggtggagatcgtcatggcgctggaggaggagttcaagatcaccgtcgaggaggacaacgcccagagcatcaccaccatccaggaggccgccgacctcatcgacaagctcgtcgaccagaacccagcggcggcggcgccgccggcatga

SEQ ID NO: 5469 - protein, 143 aa, Sorghum bicolor
MATLSAISAKAGYCKAPTLSWKGSRVSARNVVSMATTRRGGLVSLRSPRFRVYAAKAETVSKVMDIVKQQLALAADVGLTAESKFADLGADSLDTVEIVMALEEEFKITVEEDNAQSITTIQEAADLIDKLVDQNPAAAAPPA

SEQ ID NO: 5470 - DNA, 749 bp, Sorghum bicolor
  CDS (88)..(474)
ccggggccccttctcttccccactcgccagtcgccaccgcgcaccttgcatcgatcgtttcgttcgttccaggagtaaaatactaaaatggcgatggcggcggcgaggagagcgctcctggcccacctccgcgtgccggcggtccaccctgcggcggcgggagggactatccccgcggcacggaggctcctgtcgtcgacgacggaggagacgaaggggtcgttcctcgacaagggcgaggtcgccgaccgcgtcctctccgtcgtcaagaacttccagaaggtcgaaccctcaaaggtgacacctactgcccatttccagaaggaccttggactcgatagcttggacactgtcgaggttgtgatggcgtttgaggaagaattttcctttgagatccctgacaatgaagcagagaagattgactccatcaagacagctgttgacttcatcgcctcacatcctcaagcaaaataagaggatttcctttttcttatttcaacgtgcgtttgcatccagaacctgtatgccacatgggaccagttttctgtagcttgcctcagtagataggaagtcatttctttatctttctgaatctgttggaataaaacgtgtaccaaacgattttttgtgttcttgtgcccccatgtgatgcgtgtgaactgtggaacacacggtgcatggaaaccctcattagtaaactaatacagaggtccatttgggatttcttcgaaagggtgaagtacattttc

SEQ ID NO: 5471 - protein, 128 aa, Sorghum bicolor
MAMAAARRALLAHLRVPAVHPAAAGGTIPAARRLLSSTTEETKGSFLDKGEVADRVLSVVKNFQKVEPSKVTPTAHFQKDLGLDSLDTVEVVMAFEEEFSFEIPDNEAEKIDSIKTAVDFIASHPQAK

SEQ ID NO: 5472 - DNA, 643 bp, Zea mays
  CDS (70)..(459)
agtcgcaggtcgcccacgttccccttctcctccccactcgccgcacgactgcaccgagacgagaggggaatggcgatggcggcggcgaggagagccctcctgaaccacctccgcgtgccggtggcgcgccccgcggtcgcagcggcagcgggaagcgtccccgtcgccaggctcctgtcttccacctcggaggtggagaaggggtcgttcctcgacaagggcgaggtcgccgaccgcgtcgtctccgtcatcaagaacttccagaagatcgagccctccaaggtgacgcctaatgcgcatttccagaaggacctcgggctggacagcctggacaccgtcgagatcgtcatggcctttgaggaagaatttagcttcgagatccccgacaatgaggcagagaagatcgattccatcaagtcggcagttgacttcatcgcctcgcatcctcaagcaaagtaagatttgcttgcagcggtttcttggttcgcccctttgacacgcattgtttccagaacgaacgctccccgaaaaggacctgtcttttcccagtaggtgaatgatcctagtttgctccgttgattattgtgttctccgatagcaagtctttcttctctccctccatctgttgcaataaataatgata

SEQ ID NO: 5473 - protein, 129 aa, Zea mays
MAMAAARRALLNHLRVPVARPAVAAAAGSVPVARLLSSTSEVEKGSFLDKGEVADRVVSVIKNFQKIEPSKVTPNAHFQKDLGLDSLDTVEIVMAFEEEFSFEIPDNEAEKIDSIKSAVDFIASHPQAK

SEQ ID NO: 5474 - DNA, 690 bp, Zea mays
  CDS (46)..(441)
  misc_feature (4)..(4): n is a, g, c or t
cggncgcgtgggtcgtttcgttcgttccaggagtaaaatactaaaatggcgatggcggcggcgaggagagcgctcctggcccacctccgcgtgccggcggtccaccctgcggcggcggcggcggcgggacggaccatccccgcggcacggaggctcctgtcgtcgacgacggaggagacgaaggggtcgttcctcgacaagggcgaggtcgccgaccgcgtcctctccgtcgtcaagaacttccagaaggtcgaaccctcaaaggtgacacctactgcccatttccagaaggaccttggactcgatagcttggacactgtcgaggttgtgatggcgtttgaggaagaattttcctttgagatccctgacaatgaagcagagaagattgactccatcaagacagctgttgacttcattgcctcacatcctcaagcaaaataagaggatttcctttttcttatttcaacgtgcgtttgcatccaggacctgtatgcgacacgggaccagttttctgtagcttgcctcagtagataggaagtcatttctatatctttctgaatctgttggaataaaacgtgtaccaaacgattttgtgttcttgtgcccccatgtgatgcgtgtgaactgtggaacacacggtgcatggaaaccctcattagtaaactaatccagaggtccatttgggatttc

SEQ ID NO: 5475 - protein, 131 aa, Zea mays
MAMAAARRALLAHLRVPAVHPAAAAAAGRTIPAARRLLSSTTEETKGSFLDKGEVADRVLSVVKNFQKVEPSKVTPTAHFQKDLGLDSLDTVEVVMAFEEEFSFEIPDNEAEKIDSIKTAVDFIASHPQAK

SEQ ID NO: 5476 - DNA, 792 bp, Zea mays
  CDS (171)..(581)
gccagccgcacgggatagaacccgggagccgccgcactgccctgccttccgctgccgcgcccgcagtttccaaattcgtcttgctccgctcaatcacgcgaatacctgacctctccgttccttcgtcgtcgctcccggtcgcagtcgacctagcgaaggagcagcgcaacatgcaaacagtacggagtgcggtgctgcagcacctccggctccgcgcggcggctcctattgctgcacgtggaggcggcggcgggttcgctcggaggatgagcgcgccggcgggccaggaggacagtagcggcagcagctccgaactggagagggacatcaggacgcgcgtcgttaacctggtcaagaagttcgacaagatcgacgccgacaaggtgaccgagactgcagacttccaaaaggacctgagcttggacagcttagaccgggtggaacttgttatggcctttgaacaagagttctccgttgagatccctgatgacaaggctgacaagctgacctgttgtgcggatgttgccaagtacatcatatctgaatctcaaacgagtgatacaaatgccggtggatcctgagggacagatgaaaccgagtgcaatgtttcttttgtgtgtgtgtgtttatcataatgagtctgggttacaaaggacgatctgtgcgcatgatttccttttagtttttccagtatggaaaaaaatatctctacctcggttgattgttacaaagtgaaggttttttttatatgtcgatcatggtcatggatcatgttcatgattttccaatgct

SEQ ID NO: 5477 - protein, 136 aa, Zea mays
MQTVRSAVLQHLRLRAAAPIAARGGGGGFARRMSAPAGQEDSSGSSSELERDIRTRVVNLVKKFDKIDADKVTETADFQKDLSLDSLDRVELVMAFEQEFSVEIPDDKADKLTCCADVAKYIISESQTSDTNAGGS

SEQ ID NO: 5478 - DNA, 681 bp, Zea mays
  CDS (64)..(465)
tcacgcgtcagttcgttccctcctctgtgtaccggccagtaaaatccgaacccacagcgagaaatggcggcggcagcgctccgtccggcgatcctccgccgcatccgcctctccccctccccttcgctcgccctcgccgccgctgggacaggtgcatcccacccgcacgcgctggggcggtggctcgcgcggcccatgtcctcccacgacgcgcacctcacccgcgacgaagtcatcgaccggatcctcgacgtcatcaagagccaccccaagatcgacccctccaaggtgaccccggaggcgcacttcgagaaggatctcgggctcgacagcctggacaccgtcgaggtggtcatggccatcgaggaggagttcaagctcgagatcccagacatggaggctgacaagatcgactcactccctctggccatcgagtacgtcgccaaccaccccatggctggctgagcctctgctcgcccgagaggaggcgagttgaggtgaggcttcgcttggttttgtttccgagggcaaataatctgctggagtggcacagaaaaacttgttcttggtgctctgcattgcttcacggtgacggatgatgatgtcgaaatggaacattaacattttcagcgttagattgttgtttttgtgtgcgtgttatatctatatatactggttgac

SEQ ID NO: 5479 - protein, 133 aa, Zea mays
MAAAALRPAILRRIRLSPSPSLALAAAGTGASHPHALGRWLARPMSSHDAHLTRDEVIDRILDVIKSHPKIDPSKVTPEAHFEKDLGLDSLDTVEVVMAIEEEFKLEIPDMEADKIDSLPLAIEYVANHPMAG

SEQ ID NO: 5480 - DNA, 615 bp, Zea mays
  CDS (102)..(497)
gttctcctgcctccgctccgccgccgcaacaaccatttccttctctagccgccgcctccgatcccctcccgaggctacagaaccagttcatccaggcgcgaatggcggcggcgaggagcctgcttctgaggcacctccgcttggcggcggccccgtcagcggcgtccgtgaggccgacggcgtcgttgcatgaggccctgtgggggcagcggtggatgtcttcggaggatgccaagggctctttcctggacaagagcgaggtcactgaacgcatcatcaaggtcgtcaagagcttcccgaagatcgatgacccctccaaggtgacaccagatgcccatttcaagaatgatcttggcctagacagtttggatgcagtggaggttgtcatggccctggaagaggaattcagattcgagatacctgacaatgaagctgacaagattgactccgtcaaagttgcagttgacttcattgcctcacacccgcaagcgaaatgataaagatgcgttgcctggtatagcaaagctatatcgtcattaatctctgtttatgaagaaagttcagtttgaagatgtacactaccgtgcccatttgtatacttctactgatgctact

SEQ ID NO: 5481 - protein, 131 aa, Zea mays
MAAARSLLLRHLRLAAAPSAASVRPTASLHEALWGQRWMSSEDAKGSFLDKSEVTERIIKVVKSFPKIDDPSKVTPDAHFKNDLGLDSLDAVEVVMALEEEFRFEIPDNEADKIDSVKVAVDFIASHPQAK

SEQ ID NO: 5482 - DNA, 405 bp, Triticum aestivum
  CDS (1)..(405)
atggcggcggcggcggcgaggaacctggtgctgcggcacctccgcttggccgcgtcccccgcgtcgtcggtggccctcaggccggcagcggcgctgcagggggccctgtcgcggcggcggtggatgtcgtcggaggacgccaaggggtcgttcctggacaaggacgaggtcaccgagcgcaccatcaaggtcgtcaagaacttccagaagatcgacgacccatccaaggtgaaagcagatgcccactttaaggatgatcttggcctagacagtttggatgcagtagaggttgtgatgtccttggaagaggaatttggctttgagatacctgacaatgaagctgacaaaattgactccattaaagctgcagtggacttcatcgcctcgcaccccaaagccaaataa

SEQ ID NO: 5483 - protein, 134 aa, Triticum aestivum
MAAAAARNLVLRHLRLAASPASSVALRPAAALQGALSRRRWMSSEDAKGSFLDKDEVTERTIKVVKNFQKIDDPSKVKADAHFKDDLGLDSLDAVEVVMSLEEEFGFEIPDNEADKIDSIKAAVDFIASHPKAK

SEQ ID NO: 5484 - DNA, 740 bp, Gossypium hirsutum
  CDS (82)..(492)
gtcggccacgccgtcggccaagccgtcggccaagctttcggtggacatttcaagcaggtggaaaagaaggggcgattagctatggaaatggcggcggtgaaaggagttgtgctaaagcacctgagagtgaatgcaacatccttgtccctgcttcgtaaccctaaacccatccctaacggccactgtgctctcaccttcaacgccatacggcgccgatattccgacgacgtcatgggctcattccttgacaaatctgaggtcaccgatcgcgttgtctccgtagtaaaaaacttccagaaaattgatccatccaaggttactccaaatgcccattttcaaaaagatctcgggttagatagtttggacactgtggaggttgttatggctcttgaagaagattttgggtttgagatacctgataatgaggcagacaagatcagcacgatcagtcatgctgtcgagttcattgcttctcacccccaggcaaagtagacaggaaattatgactcaaatctttttctttattttacttcgttcatgtgagacatgaaactgcattggataattccctaatttcctcgcctggacaaatgcctgtagtatcgaggaggaacatatttactagttatatcatttgcaatcgcctgaattttgaggtactcttcgaaccaaaaaaaaaaaaaaaaaaaaaaaaaaaaaaaaaaaaaaaaaaaaaaaaaaaaaaaaaaaaaaaaaaaaag

SEQ ID NO: 5485 - protein, 136 aa, Gossypium hirsutum
MEMAAVKGVVLKHLRVNATSLSLLRNPKPIPNGHCALTFNAIRRRYSDDVMGSFLDKSEVTDRVVSVVKNFQKIDPSKVTPNAHFQKDLGLDSLDTVEVVMALEEDFGFEIPDNEADKISTISHAVEFIASHPQAK

SEQ ID NO: 5486 - DNA, 405 bp, Gossypium hirsutum
  CDS (1)..(405)
atggctgcggtgagagaagctttgctaaagcgcctgagggtgaacgcaacatctctgtcgctgctccgtaaccctaaacctagccttaacggtctctttgctctcaccttcaacgccgtccatcgtcgtttttccgacgacgtcatgggctcatttctcgacaaatctgaggtcaccgatcgcgtcgtctccgtcgtcaaaaacttccagaaagtagatccttccaaggttaccccaaatgcccattttcaaaatgatctcgggttagatagtttggacactgtggaggtagtcatggcccttgaagaagaatttgggtttgagatacctgataatgaggcagacaagatcagcactatcaatcatgctgttgagttcattgcttctcaccctcaggcaaagtag

SEQ ID NO: 5487 - protein, 134 aa, Gossypium hirsutum
MAAVREALLKRLRVNATSLSLLRNPKPSLNGLFALTFNAVHRRFSDDVMGSFLDKSEVTDRVVSVVKNFQKVDPSKVTPNAHFQNDLGLDSLDTVEVVMALEEEFGFEIPDNEADKISTINHAVEFIASHPQAK

SEQ ID NO: 5488 - DNA, 669 bp, Gossypium hirsutum
  CDS (79)..(483)
gcgttcgagcgcgacagaaaagattaggtttcttgacattttcagcaggttgaagagaaggtgcgattagctattgaaatggcggcggtgagaggagttgtgctaaagcacctgagagtgaatgcaacatccctgtccctgcttcgtaaccctaaacccatccctaacggccactgtgctctcaccttcaacgccatacggcgccgattttccgacgacgtcatgggctcattcctcgacaaatctgaggtcaccgatcgcgttgtctccgtagtaaaaaacttccagaaaattgatccatccaaggttaccccaaatgcccattttcaaaaagatctcgggttagatagtttggacactgtggaggttgttatggctcttgaagaagaatttgggtttgagatacctgataatgaggcagacaagatcagcacgatcagtcatgctgtcgagttcattgcttctcacccccaggcaaagtagacaggaaagtatgactcaaatctttttctttatttcactttgttcatgtgagacatgaaagtgcattggataattccccaaatgcctgtagtatcctctggatcaagggtcttgggttagttttgatgtttactgcctcaacgctgctgttctaattcataaaatgtaatattgctattttgttta

SEQ ID NO: 5489 - protein, 134 aa, Gossypium hirsutum
MAAVRGVVLKHLRVNATSLSLLRNPKPIPNGHCALTFNAIRRRFSDDVMGSFLDKSEVTDRVVSVVKNFQKIDPSKVTPNAHFQKDLGLDSLDTVEVVMALEEEFGFEIPDNEADKISTISHAVEFIASHPQAK

SEQ ID NO: 5490 - DNA, 727 bp, Triticum aestivum
  CDS (104)..(502)
gacaaaaatcacgtgaggggatccttggagacgctctcatagcagagaggccgacgaacggtgaggtcaaaatcccgagcgaagagagaggcgggcaggaaagatggcggcggccgcactgcgtccggcgatcctccgccacatccgactctcgcccgccacggcggcccctctcgccgccgccgccgcggccggccggcccctcgccctcgcgccgtggctcgcgcggccaatgtcctcacacgacgcccacctcacccgcgacgaggtcgtcggccgcgtcctcgacgtcctcaagtgccaccccaaggtcgagccctccaaggtgacccccgaggcgcacttcgagaaggatctggggctggacagcctggacacggtggaggtggtgatggcgatcgaggaagagttcaagctcgagatccccgacttggaggctgacaagatcaactcgcttccgctcgccatcgagtatgtcgccaaccaccccatggccggctgagtgcccacccttccgattgccgaccgtgccagggtgaggcattttctcgtttctgtttggggatgatgaataattgcctggagttgttcaggaaaactggtccctggtgctccgcaatgtgtcggtcgctattggtcttggatgcaactgtaacattccgcagtgtcgctgatgaactggccttgttggtcgcacgcttgtttttgtagtatatctgtttaatcc

SEQ ID NO: 5491 - protein, 132 aa, Triticum aestivum
MAAAALRPAILRHIRLSPATAAPLAAAAAAGRPLALAPWLARPMSSHDAHLTRDEVVGRVLDVLKCHPKVEPSKVTPEAHFEKDLGLDSLDTVEVVMAIEEEFKLEIPDLEADKINSLPLAIEYVANHPMAG

SEQ ID NO: 5492 - DNA, 654 bp, Glycine max
  CDS (92)..(442)
atttctgtggtcgtgggttcgcgccccacgtgtgggcgccgaccaaagctcctcacactcactcattttgcaaagcgagagagagagagaaatggcactgagggcagccgtactccgccacgttcgtgtgccactccaagccgctccgaaactgcagccatggcgtgccatgtcatcacacggcgacgatcatctctccaaagaggaggtcgtcgaaagagtcctcgctgtcgtcaaagatttccccaaagtcgatccttccagggtgagtccagatgtacatttccagaaggatttgggtttggatagcttggacaatgtggaaattgtaatggcactagaagaggagttcaagctagagatcccagacaaggaagctgataaaattgactcttgtcatcttgctattgagtatatttctaaccatccaatggctggttaactaatgtgtccttttttcctatttgacctcatgttgaacttaagcatcagtgcaaccttgaaccttccccttactttcactggatgtttgttagtatgttttcctttttccatttaaattggagtgaaggggctggttgtttagaataatgtgaattgttcagagaagattttttcaatgaaaaactggtactgggtttttgaaggacccgt

SEQ ID NO: 5493 - protein, 116 aa, Glycine max
MALRAAVLRHVRVPLQAAPKLQPWRAMSSHGDDHLSKEEVVERVLAVVKDFPKVDPSRVSPDVHFQKDLGLDSLDNVEIVMALEEEFKLEIPDKEADKIDSCHLAIEYISNHPMAG

SEQ ID NO: 5494 - DNA, 396 bp, Arabidopsis thaliana
  CDS (1)..(396)
atgcattgcattaggagctcaatcctgcaacacttgagactgagagtctctgtcagacccacttcgcttcttcagaacgagaatggtttcaagagtattggtatttttaatttcacatcagaagcagctgcagatggaggccaagatcaaatattgagcagggttattgaactggtgaagaaatacgacaaaaccaacacctctgaggttactgaaagggctgattttcagaaagatttgtcgttggacagcttggacaagacggagctagttatggctattgaagaagagttctcgattgagatccctgatgagaaagctgataagcttacttgttgtggtgatgttgcaacatacatactctctgaaactcctaccaaagcgtctgagtcctga

SEQ ID NO: 5495 - protein, 131 aa, Arabidopsis thaliana
MHCIRSSILQHLRLRVSVRPTSLLQNENGFKSIGIFNFTSEAAADGGQDQILSRVIELVKKYDKTNTSEVTERADFQKDLSLDSLDKTELVMAIEEEFSIEIPDEKADKLTCCGDVATYILSETPTKASES

SEQ ID NO: 5496 - DNA, 462 bp, Bombyx mori
  CDS (1)..(462)
atggctgctgcgaatattttccgaagtgctttcggtggtctattgcggagatcaacaacgtatagaacgtccgtaacatgtcgtctttcgaccgttgcgttgcagcaaaagttcagcacaattaaagccgctgtcaaaatatacaaaagtcaggcccttcagaatggggtaccacaatcacatcggtactcgacaggcgtgcagtctaagctttcggttcaggaaatcgaggagcgagtcctgaaagtgtgcaaggcttacgacaaactcagtgctagtcagttgactgtagatagccacttcatgaatgatctgggtcttgactcactggaccatgttgaggtcataatggcaatggaagatgaatttggatttgagataccggatggtgatgcagagagactggttagaccaaaagacattgtccaatacattgctgacaaggaagatatttatgaataa

SEQ ID NO: 5497 - protein, 153 aa, Bombyx mori
MAAANIFRSAFGGLLRRSTTYRTSVTCRLSTVALQQKFSTIKAAVKIYKSQALQNGVPQSHRYSTGVQSKLSVQEIEERVLKVCKAYDKLSASQLTVDSHFMNDLGLDSLDHVEVIMAMEDEFGFEIPDGDAERLVRPKDIVQYIADKEDIYE

SEQ ID NO: 5498 - DNA, 381 bp, Arabidopsis thaliana
  CDS (1)..(381)
atggcggcgagaggtgctatgcttcgatacctgagagtcaacgtcaatccaacaattcaaaaccctagagaatgtgtacttcctttctccattctccttcgtcgtttctccgaggaagttagaggctctttccttgacaaatctgaggtcacagatcgagttctctctgtcgtcaaaaacttccaaaaagttgatccttctaaggtaacaccaaaagccaatttccaaaatgatctagggttggacagtttggacagtgtggaagttgtgatggcattggaggaggaatttgggtttgagatccctgataatgaagcagacaagatccagtccatcgatctagccgttgactttattgcttctcatcctcaggctaagtga

SEQ ID NO: 5499 - protein, 126 aa, Arabidopsis thaliana
MAARGAMLRYLRVNVNPTIQNPRECVLPFSILLRRFSEEVRGSFLDKSEVTDRVLSVVKNFQKVDPSKVTPKANFQNDLGLDSLDSVEVVMALEEEFGFEIPDNEADKIQSIDLAVDFIASHPQAK

SEQ ID NO: 5500 - DNA, 414 bp, Arabidopsis thaliana
  CDS (1)..(414)
atggcttccttatcaaccacttccctaagcttcaaagctccgtccaccacaatttcacaggttttaaggaaagcctcaagttctcagtctgtgacctttggtcgtttcacgtcttcaacaaagagccttcgtcttcaaatcagttgtgccgcgaaagcagagacggtgcagaaagtgagtgacattgtaaaagaacaattggctttagctgctgatgttccgctcactgctgaatccaagttctctgctcttggtgccgattctctcgacaccgtggagatagtgatggcgttggaggaaaagtttaacataagtgtggaggaatctgatgctcaaaacattacgaccatccaagaggcggctgatttgatagaggaccttgttcaaaagaaacccgcggcggaaacttcctga

SEQ ID NO: 5501 - protein, 137 aa, Arabidopsis thaliana
MASLSTTSLSFKAPSTTISQVLRKASSSQSVTFGRFTSSTKSLRLQISCAAKAETVQKVSDIVKEQLALAADVPLTAESKFSALGADSLDTVEIVMALEEKFNISVEESDAQNITTIQEAADLIEDLVQKKPAAETS

SEQ ID NO: 5502 - DNA, 420 bp, Arabidopsis thaliana
  CDS (1)..(420)
atggcgacaagtttctgctcctccatctccatgcaagctcctttctcggctacaacaacaaggttctgtctcaacaaacaggctacgattttcaacaatgaaaagactaataatctctccttcagcctacgacgtttgatgcctgctcgtctcgcagtttcttgtgcagtcaagcaagagacagtagagaaagtgtctgagattgtcaagaagcaattgtcgctcaccgatgatcaaaaagtcactgccggaactaaatttaccgagcttggagctgattctctcgacacggttgagatagtgatgggtttggaggaagagttcgggataacaatggcggaagagagagcaaaggagattgcaacagtccaacaggctgctgaactcattgaagaactcgtccaagagaagactgcttag

SEQ ID NO: 5503 - protein, 139 aa, Arabidopsis thaliana
MATSFCSSISMQAPFSATTTRFCLNKQATIFNNEKTNNLSFSLRRLMPARLAVSCAVKQETVEKVSEIVKKQLSLTDDQKVTAGTKFTELGADSLDTVEIVMGLEEEFGITMAEERAKEIATVQQAAELIEELVQEKTA

SEQ ID NO: 5504 - DNA, 267 bp, Thermotoga maritima MSB8
  CDS (1)..(267): transl_table=11
atggaaagaaaaaagctcattgcgaaatttgtcgaaatcgcgtcagagaaaatgggaaaagatcttgaaacggttgatgaggaaaacacgttcaaagagctcggattcgattcgatagacgtgatagatcttgtgatgttcttcgaggatgaatttgccttgagaatagaagatgaggaaatatcgaaaatccggaaggttaaggatttgatcgatatcgtaatcaagaagctggaggagatcgacgatgaggtatctgagggctga

SEQ ID NO: 5505 - protein, 88 aa, Thermotoga maritima MSB8
MERKKLIAKFVEIASEKMGKDLETVDEENTFKELGFDSIDVIDLVMFFEDEFALRIEDEEISKIRKVKDLIDIVIKKLEEIDDEVSEG

SEQ ID NO: 5506 - DNA, 333 bp, Deinococcus radiodurans R1
  CDS (1)..(333): transl_table=11
ttgacggaagcgggcggctcgttgcaccccgttcagccttgcgcccccgcttctgcccggcgtgtacactgcgggcacttcagtttcaggaggaatttggtaatggcgacttttgatgacgtgaaagatgtgattgtggacaagctcggtgtggacgaaggcaaggtgacccccgaagcccgcttcgtggaagacctcggcgccgacagcctggaaaccgtggaactgatcatgggcctggaagacaaattcggcgtgaccattcccgacgaagccgccgaaaccatccgcaccgtgcaggccgcggtcgactacatcgacaacaaccagtaa

SEQ ID NO: 5507 - protein, 110 aa, Deinococcus radiodurans R1
MTEAGGSLHPVQPCAPASARRVHCGHFSFRRNLVMATFDDVKDVIVDKLGVDEGKVTPEARFVEDLGADSLETVELIMGLEDKFGVTIPDEAAETIRTVQAAVDYIDNNQ

SEQ ID NO: 5508 - DNA, 258 bp, Xylella fastidiosa 9a5c
  CDS (1)..(258): transl_table=11
ttgcggagtgataagccaatgagtgacatcgaagcgcgcgtcagaaaaattgtcgccgagaaactcaatgtcgatgaagaaaaagtaactaatacctcgacgttcgtcgatgaactgggtgcggattcgttggataccgtcgagttggtgatggccttggaagacgagttccaatgtgagatcggtgacgaggctgctgagaagatgacttcggtgcaacatgccatcgactacattaagagtaatgctaagtgctaa

SEQ ID NO: 5509 - protein, 85 aa, Xylella fastidiosa 9a5c
MRSDKPMSDIEARVRKIVAEKLNVDEEKVTNTSTFVDELGADSLDTVELVMALEDEFQCEIGDEAAEKMTSVQHAIDYIKSNAKC

SEQ ID NO: 5510 - DNA, 231 bp, Clostridium acetobutylicum ATCC 824
  CDS (1)..(231): transl_table=11
atggtacttgataaagtaagagaagttatagcaaatcaaataagtgttgataaagagaccatagatatggcaacatcttttggaaaagatttaaatgttgactcattagatttatttcaaataataattgaattagaagaaaaatttgatattcaaatagaagatactgaaaatataaaaactgtaggagatgcagttaagtttattgaagcacaactaaaaaagaagtag

SEQ ID NO: 5511 - protein, 76 aa, Clostridium acetobutylicum ATCC 824
MVLDKVREVIANQISVDKETIDMATSFGKDLNVDSLDLFQIIIELEEKFDIQIEDTENIKTVGDAVKFIEAQLKKK

SEQ ID NO: 5512 - DNA, 300 bp, Thermoanaerobacter tengcongensis MB4
  CDS (1)..(300): transl_table=11
atgttgacggaggaatggttatgtaatattatcataagtgtacaatttttgagaggaggtgaaaagggtatgatttttgaaaaagtgagaaacatcattgctgaacagctcggcattgatccagaggaaataacaatggagtcctcattcatagatgatttaggagcagactccttggacatagtagagcttataatggctttggaagaagagtttgacattgaaattcctgacgaagacgccgaaaaaataaagacggtaggtgatgtcgtagagtacttaagcaatattgttgagtaa

SEQ ID NO: 5513 - protein, 99 aa, Thermoanaerobacter tengcongensis MB4
MLTEEWLCNIIISVQFLRGGEKGMIFEKVRNIIAEQLGIDPEEITMESSFIDDLGADSLDIVELIMALEEEFDIEIPDEDAEKIKTVGDVVEYLSNIVE

SEQ ID NO: 5514 - DNA, 258 bp, Streptomyces coelicolor A3(2)
  CDS (1)..(258): transl_table=11
atgaccaccgacaccacgccccacagccgcgcctacgacctgctcgcctcggttctcagcaacaagttcgaagtgccctccgaggccatcgtccccaccgcgaccttcgagcagctggacctcgactcgctggccgtggtggagctgttcgtcgtactcaccgaggaactcggcatcgaagtgcaggacggcgaggccgacccggacctcaccctggccggcgtggccgacctcatcgccgaggccgtcaagccgtga

SEQ ID NO: 5515 - protein, 85 aa, Streptomyces coelicolor A3(2)
MTTDTTPHSRAYDLLASVLSNKFEVPSEAIVPTATFEQLDLDSLAVVELFVVLTEELGIEVQDGEADPDLTLAGVADLIAEAVKP

SEQ ID NO: 5516 - DNA, 249 bp, Streptomyces coelicolor A3(2)
  CDS (1)..(249): transl_table=11
atggccgccactcaggaagagatcgtcgccggtctcgcggagatcgtgaacgagatcgccggcatcccggtcgaggacgtcaagctggacaagtccttcaccgacgacctggacgtcgactcgctgtccatggtcgaggtcgtcgtcgccgccgaagagcgcttcgacgtcaagatcccggacgacgacgtcaagaacctcaagacggtcggcgacgcgacgaagtacatcctcgaccaccaggcctga

SEQ ID NO: 5517 - protein, 82 aa, Streptomyces coelicolor A3(2)
MAATQEEIVAGLAEIVNEIAGIPVEDVKLDKSFTDDLDVDSLSMVEVVVAAEERFDVKIPDDDVKNLKTVGDATKYILDHQA

SEQ ID NO: 5518 - DNA, 243 bp, Mycoplasma penetrans HF-2
  CDS (1)..(243): transl_table=4
atgactatagaacaaattactactgaagttaataaagttcttgaaaagaaccattcatcacttaaaattaacaacaaaaatattaatagtaacttaaaagaccttggtttaaattcattagatatgttagaaatgattgttcaagttgaagaacaactaaaaatcagtttaccagatgaaaaactgatagaaattaaaacaccaagtgatttgctgaatttaatccaaagtacaatcaaataa

SEQ ID NO: 5519 - protein, 80 aa, Mycoplasma penetrans HF-2
MTIEQITTEVNKVLEKNHSSLKINNKNINSNLKDLGLNSLDMLEMIVQVEEQLKISLPDEKLIEIKTPSDLLNLIQSTIK

SEQ ID NO: 5520 - DNA, 240 bp, Enterococcus faecalis V583
  CDS (1)..(240): transl_table=11
ttgactcgtgaagaagtacttcaaaaagtagcgaagattatctcaaaccactttgatattgaagcggatcaagtaacagatcaattaaacattaaagatgatttgaacgctgactcaattagcgtaatggagtttgttttagaacttgaagatgaatttggaacagagatttcagatgaagatgcagaaaaaattgaaacagttggtgccgctgtagattatattgtgagtaattcataa

SEQ ID NO: 5521 - protein, 79 aa, Enterococcus faecalis V583
MTREEVLQKVAKIISNHFDIEADQVTDQLNIKDDLNADSISVMEFVLELEDEFGTEISDEDAEKIETVGAAVDYIVSNS

SEQ ID NO: 5522 - DNA, 255 bp, Coxiella burnetii RSA 493
  CDS (1)..(255): transl_table=11
atggcaacagttgaagaacgagtcaaaaagattgtcgttgaacaattaggcgtaaaggaagaagaagttaccaacagtgcttcgtttgtagacgatttaggtgctgattccctagatacggtggagttggtgatggcatttgaagaggaattcgaaactgaaatccccgatgaagatgctgaaaaaattaccactgtccaacaagcgattgactatatcaaagaacattccgcgagcgaatccacttctgcgtga

SEQ ID NO: 5523 - protein, 84 aa, Coxiella burnetii RSA 493
MATVEERVKKIVVEQLGVKEEEVTNSASFVDDLGADSLDTVELVMAFEEEFETEIPDEDAEKITTVQQAIDYIKEHSASESTSA

SEQ ID NO: 5524 - DNA, 246 bp, Nitrosomonas europaea ATCC 19718
  CDS (1)..(246): transl_table=11
atggaaattactgaaatagagcagcgcatcaaaaaaatcgtagccgagcaattgggcgtcaacgaatcagatgtcaaaaatgaatcttcctttgtcagcgatctgggtgcagattcactggatactgttgagctggtcatggcgctcgaagaagagttcgaatgcgaaattcctgatgagcaagctgaaaaaatcaatacggttcaggaagcgatcgatttcgtagcagccaacgcagctcagtaa

SEQ ID NO: 5525 - protein, 81 aa, Nitrosomonas europaea ATCC 19718
MEITEIEQRIKKIVAEQLGVNESDVKNESSFVSDLGADSLDTVELVMALEEEFECEIPDEQAEKINTVQEAIDFVAANAAQ

SEQ ID NO: 5526 - DNA, 297 bp, Bordetella parapertussis 12822
  CDS (1)..(297): transl_table=11
ttgcattcctctacgcttggctataattcgcgggatttttcccaattggagatctgcatggaaagcatcgaacagcgcgtcaagaagatcgtcgctgaacaacttggcgtgaacgaagccgagatcaagaacgagtcctccttccttgacgacctcggtgccgattcgctcgacatggtcgaactggtcatggcgctcgaagacgaattcgagaccgagatccccgacgaagaggccgaaaagatcactaccgtgcagcaagcggttgactacatcaattcgcacggtaagcagtaa

SEQ ID NO: 5527 - protein, 98 aa, Bordetella parapertussis 12822
MHSSTLGYNSRDFSQLEICMESIEQRVKKIVAEQLGVNEAEIKNESSFLDDLGADSLDMVELVMALEDEFETEIPDEEAEKITTVQQAVDYINSHGKQ

SEQ ID NO: 5528 - DNA, 243 bp, Prochlorococcus marinus subsp. pastoris str. CCMP1986
  CDS (1)..(243): transl_table=11
atgtcacaagaagaaatccttcaaaaagtatgctctattgtttctgagcaactaagtgttgaatcagccgaagtaaaatctgattcaaactttcaaaatgatttaggtgcagactccctagacaccgtagagctagttatggctcttgaagaagcatttgatatcgagatacctgatgaagcagctgaaggtatcgcaacagtaggagatgctgttaaattcatcgaagaaaaaaaaggttaa

SEQ ID NO: 5529 - protein, 80 aa, Prochlorococcus marinus subsp. pastoris str. CCMP1986
MSQEEILQKVCSIVSEQLSVESAEVKSDSNFQNDLGADSLDTVELVMALEEAFDIEIPDEAAEGIATVGDAVKFIEEKKG

SEQ ID NO: 5530 - DNA, 276 bp, Chromobacterium violaceum ATCC 12472
  CDS (1)..(276): transl_table=11
atgatcccgaatcagaaaggtcaagggtttaaacaaatggaaaacatcgaagcgcgcgtcaagaagatcgttgccgagcaactgggcgtgaacgaagccgaaatcaaggtggaaagctccttcgttgacgatctgggcgccgattccctggataccgttgagctggtgatggcactggaagaagagttcgagtgcgaaatcccggacgaggaagccgagaagatcaccaccgttcagcaagccatcgactacgtgaccggccatctgaacaagtaa

SEQ ID NO: 5531 - protein, 91 aa, Chromobacterium violaceum ATCC 12472
MIPNQKGQGFKQMENIEARVKKIVAEQLGVNEAEIKVESSFVDDLGADSLDTVELVMALEEEFECEIPDEEAEKITTVQQAIDYVTGHLNK

SEQ ID NO: 5532 - DNA, 312 bp, Gloeobacter violaceus PCC 7421
  CDS (1)..(312): transl_table=11
atgtactatcagcgattgggtcaggcacagccgggccgaacaatatgcactttagaggcaggaatgaacgaagtggaagtttatcaacgcgtcaagaagatcgtcgtggagcaactgtccgtcgaggagtcggaggtgacttccgaatcgagctttgccaacgacctcggtgccgattccctcgaccaggtggaactggtcatggcacttgaacaggagtttgaaaccgaaatcccggacgaagacgccgaaaagatcaccaccgtcggcgacgccgtcacatatgtgctcaagcgcggcagcgaagtttaa

SEQ ID NO: 5533 - protein, 103 aa, Gloeobacter violaceus PCC 7421
MYYQRLGQAQPGRTICTLEAGMNEVEVYQRVKKIVVEQLSVEESEVTSESSFANDLGADSLDQVELVMALEQEFETEIPDEDAEKITTVGDAVTYVLKRGSEV

SEQ ID NO: 5534 - DNA, 243 bp, Photorhabdus luminescens subsp. laumondii TTO1
  CDS (1)..(243): transl_table=11
atggaaaatttagagaatcgcgtcaaaagtgttgttgcagaacaacttggaatacctgaaacccagattcttaatacacaaacattcgaggaattaggtgccgactcgttagataatgttgaactgattatggctctagaagagcatttcgggataactattgatgatgaagaagcggaaaaaatagtgacgatacagaacgccattgattgtatcggttcaaagttggaatccgctaactaa

SEQ ID NO: 5535 - protein, 80 aa, Photorhabdus luminescens subsp. laumondii TTO1
MENLENRVKSVVAEQLGIPETQILNTQTFEELGADSLDNVELIMALEEHFGITIDDEEAEKIVTIQNAIDCIGSKLESAN

SEQ ID NO: 5536 - DNA, 237 bp, Photorhabdus luminescens subsp. laumondii TTO1
  CDS (1)..(237): transl_table=11
atgagcactattgaagaacgcgttaaaaaaatcatcgttgaacaacttggtgttaaagaggaagaagttgttaattcagcttcttttgtagatgacttgggcgctgattctcttgacacagttgagctggtaatggctctggaagaagagttcgatatcgaaattccagatgaagaagcagaaaagatcactacagttcaggcagctattgattacgtccagaaccaaagcgaataa

SEQ ID NO: 5537 - protein, 78 aa, Photorhabdus luminescens subsp. laumondii TTO1
MSTIEERVKKIIVEQLGVKEEEVVNSASFVDDLGADSLDTVELVMALEEEFDIEIPDEEAEKITTVQAAIDYVQNQSE

SEQ ID NO: 5538 - DNA, 243 bp, Lactobacillus johnsonii NCC 533
  CDS (1)..(243): transl_table=11
atgaccgaagaggaaatttttaataaaattgctgatatgatttcagaacgctttagtattgatcgtgataagatcactaaagatttaaattttcagaatgatttagatgcagattcaattgatttcgttgagttagtaatggatctagaagatacatttggagcagagattccagatgatgatgcggaaaaattacaaactgttggtgaagcagtagaatatattaagagtcaccaaaattaa

SEQ ID NO: 5539 - protein, 80 aa, Lactobacillus johnsonii NCC 533
MTEEEIFNKIADMISERFSIDRDKITKDLNFQNDLDADSIDFVELVMDLEDTFGAEIPDDDAEKLQTVGEAVEYIKSHQN

SEQ ID NO: 5540 - DNA, 237 bp, Treponema denticola ATCC 35405
  CDS (1)..(237): transl_table=11
atggatgatttattcaaaaagattcagcaattaattgcagcaaagttggaaatcgacgaagacaaggttacattggattcttcattccgacaagatttaggtgccgatagtcttgacacctatgaacttgtttatgctctcgaagaggatatgggtattaagatcccggacgaaaaggctaatgagtttgaaactgtccgcgacgcctatgaatttatcaaatctcagcaaaaataa

SEQ ID NO: 5541 - protein, 78 aa, Treponema denticola ATCC 35405
MDDLFKKIQQLIAAKLEIDEDKVTLDSSFRQDLGADSLDTYELVYALEEDMGIKIPDEKANEFETVRDAYEFIKSQQK

SEQ ID NO: 5542 - DNA, 734 bp, Nasonia vitripennis
  CDS (67)..(531)
tgcgcgacgaaagagccgactgacgactcgcgcagtctacacgaatttccttctgcacggttgaaaatggcgtcgatcgcgggcgtacgagtctttgcgcgaagcgccggtttgctcagaaacacgacgagccgactggctgtcctggccccggctacctcgagtcagctcaaccagagactcgtccacgcgatcaggcgaacgtcggcgccgatcctcggccagagcttagcggacccatgcgtcaagcaggtgcgccagtacagtgaaaaaccaccgctcacattgaattttatccgtgaccgagtccttttggtgcttaagctttatgataaaatagatgcttcaaagctcaccgtagactctcattttataaacgaccttggtctggactccttggaccacgttgaagtcattatggctatggaggatgaatttggtttcgaaataccagatatggatgccgaaagacttgtaacaccagctgccatagcgcgttatgttgcagacaaagaagatatttatgaataatactgctctcattaattataagaaaatcttagtcaacgtctcattgcttaagaaaatcttattgcagttttattcttaaagaggatgatctgcaaaagcaagcacttcattgcgacttgtttctttcctgtatatagaccaaggtcattatgtatgaataaaaatgtcacgaattgttagattaaatgagatttttttaaaac

SEQ ID NO: 5543 - protein, 154 aa, Nasonia vitripennis
MASIAGVRVFARSAGLLRNTTSRLAVLAPATSSQLNQRLVHAIRRTSAPILGQSLADPCVKQVRQYSEKPPLTLNFIRDRVLLVLKLYDKIDASKLTVDSHFINDLGLDSLDHVEVIMAMEDEFGFEIPDMDAERLVTPAAIARYVADKEDIYE

SEQ ID NO: 5544 - DNA, 774 bp, Aedes aegypti
  CDS (136)..(594)
ccgcactttcagcagcaagaatattttcttcgagtcgcgaacttttctctgtcgcgtttgtccgtaatccgtagctccggagtgcgaatccgtggtgtgtccgtcgtcggtcaacggtccagaaagagaataaatatggcgtccctagtgcacagcatccgcacgttggcgtgccggaacaatccactgcttcgatcactagccattcgtaccatctcttcgtcttcggctctgcagcagagaagttgtaatcagaggattcttctggcccagcctcagccccttctgtcaaactttgagtgccgggaaggtttgcgttccgttcgatactactgctcgaagccgaagcttccggaaatccgggagcgggtgctgaaagtagtcgctgcctacgacaaagttactgccgataagctgaccctggagtcgcatttcatcaacgatctcggtctggattcgctggaccatgtcgaagtgataatggccatggaggatgagttcgggttcgagatccccgacggagatgcggagaaactgttcagaccggccgacattgtgcagtacattgccgacaaggaggacatctacgagtaagtctgatgatgcggggcgaataatgggaaacgccttctgggggtggtagaatatcgttgctgcctggattgctgcatatgttgtttaaagataccgaagaacatattgtgtagattatagtgtaaatgaaaggaaataaaattttgattcaacggccagaaataggttggtcatgaatgc

SEQ ID NO: 5545 - protein, 152 aa, Aedes aegypti
MASLVHSIRTLACRNNPLLRSLAIRTISSSSALQQRSCNQRILLAQPQPLLSNFECREGLRSVRYYCSKPKLPEIRERVLKVVAAYDKVTADKLTLESHFINDLGLDSLDHVEVIMAMEDEFGFEIPDGDAEKLFRPADIVQYIADKEDIYE

SEQ ID NO: 5546 - DNA, 354 bp, Chlamydomonas reinhardtii
  CDS (1)..(354)
atggccctgtcgatgatccgcaagtcggccgctgcccccgttcgccgggctgccgctgcccccgtggtcgttcgcggccgtcgggtcatcaccttcgccgccgtggacaaggccaaggtgctggaggacgtgcgctccatcatctccacccagctgggcactgagctggagaaggttgcccccgaggccaagttcgttgacctgggcgccgactccctggacacggtcgagatcatgatggctctggaggagaagttcgagattgccctggaggaggagggtgccgagaagatcgccaccgtccaggacgccgcggacatgatcgccgcccagatcgccgccaagggcaactaa

SEQ ID NO: 5547 - protein, 117 aa, Chlamydomonas reinhardtii
MALSMIRKSAAAPVRRAAAAPVVVRGRRVITFAAVDKAKVLEDVRSIISTQLGTELEKVAPEAKFVDLGADSLDTVEIMMALEEKFEIALEEEGAEKIATVQDAADMIAAQIAAKGN

SEQ ID NO: 5548 - DNA, 387 bp, Chlamydomonas reinhardtii
  CDS (1)..(387)
atggccctctcttctgctgccaacgtggtccggtcggctgttctgcagcacttgcgcgtgactgtgacctccagccttcaatcgagctctctgccgaccttcaccaacataatcagccgtggctttggtggtggcttcctggacaaggattccgtcacggagcgcgtgctgcacgtcacaaagcactttgagaagattgatgcatccaaggtgagcccggcggcctctttcgagaaggacctgggcctggacagcctggacgtggtggagctggtcatggcattggaagaggagtttggcctggagattccggacgctgaggcagataagattgcttccgtgggtgacgctatcaactacatctgcagcaaccctatggcaaagtag

SEQ ID NO: 5549 - protein, 128 aa, Chlamydomonas reinhardtii
MALSSAANVVRSAVLQHLRVTVTSSLQSSSLPTFTNIISRGFGGGFLDKDSVTERVLHVTKHFEKIDASKVSPAASFEKDLGLDSLDVVELVMALEEEFGLEIPDAEADKIASVGDAINYICSNPMAK

SEQ ID NO: 5550 - DNA, 773 bp, Apis mellifera
  CDS (193)..(639)
gtttgaaaagcacatgataaaatataataaatcataatttttattttataataaatatattattataaagtagatgtcgctacaatttttaattcatgtaaactcctgtatgagataactgcaatacacaagtaaagttagtgttatacgattaggttacgtcttttcgcgagatttttcattgcagagaaaatggcgtctctcgcgggagttcgtattttaataagaaataccggtgcttttagaaatttgatctctcgaacgtgtttacgaagtgctattacacaatttcaattaaatgaaagattatttcattgtaaaagacaaagtattctcacagttatacctcaggtaaatatacaaaatattcgtacatccacttcaaaacctaaaactcaagaactagaagaacgtgttttaaatgtggtccaagcttatgataaaataactgctgacaagttatctttgaactctcattttatgcaagatctgggtttggattctttggatcatgtagaaattataatggctatagaagatgaatttggttttgaaataccagatatggatgcacagaagcttctacgacctgcggatatagtacgttacgttgccgatagagaagatgtttacgaataaatattcatataatataaatcatctcattagtcaagcttttttatttttaaaacattattaaaaaaaataataaattttatttcttctgtatataatataaattgtaaaaataaagtgtatcgttagatcaaatc

SEQ ID NO: 5551 - protein, 148 aa, Apis mellifera
MASLAGVRILIRNTGAFRNLISRTCLRSAITQFQLNERLFHCKRQSILTVIPQVNIQNIRTSTSKPKTQELEERVLNVVQAYDKITADKLSLNSHFMQDLGLDSLDHVEIIMAIEDEFGFEIPDMDAQKLLRPADIVRYVADREDVYE

SEQ ID NO: 5552 - DNA, 351 bp, Candida glabrata CBS 138
  CDS (1)..(351)
atgctaagaactgtggtgaatgtcgctagacaaagacctatgatgatggccaaggccaacatgcagatgctgagacctgtcaggttctactctcaaggcctatccaaggatgttgttcagaagcgtgttgttgatgtgatcaaggccttcgataagactagtgccagcgctaacatcactgaggacaccttgttccacaaggacttgaagctggactctctggacacggtcgagttgctagttgccatcgaggaagagttcgatgttgaattcccagacaaggttgccgatgagctaaagagcgtcaaggagactgtggactacattctgtccaacccagatgccaactaa

SEQ ID NO: 5553 - protein, 116 aa, Candida glabrata CBS 138
MLRTVVNVARQRPMMMAKANMQMLRPVRFYSQGLSKDVVQKRVVDVIKAFDKTSASANITEDTLFHKDLKLDSLDTVELLVAIEEEFDVEFPDKVADELKSVKETVDYILSNPDAN

SEQ ID NO: 5554 - DNA, 372 bp, Debaryomyces hansenii CBS767
  CDS (1)..(372)
atgtttagatctactttattcagaagccttagaacaccattagttagacagccaattgcacctgcagcaatttccataacaaaaccatcatttgttcgtttctacgctgggttcccagctttatctagagatcttgccaaagagagaatcgtggaattattagaaggatacgataaggtcgatagcgctaaggaaatcactgaagaaagtgcgtttgtacaagacttgggtttggactcgttagacgttgtcgaagtggtcatggaagtggaacacgaatttaacatccaaatcccagatcacgaagccgacacattaaagactgttggtcagaccgtcgactatatcctcgcccagcctgatgcttgttaa

SEQ ID NO: 5555 - protein, 123 aa, Debaryomyces hansenii CBS767
MFRSTLFRSLRTPLVRQPIAPAAISITKPSFVRFYAGFPALSRDLAKERIVELLEGYDKVDSAKEITEESAFVQDLGLDSLDVVEVVMEVEHEFNIQIPDHEADTLKTVGQTVDYILAQPDAC

SEQ ID NO: 5556 - DNA, 348 bp, Debaryomyces hansenii CBS767
  CDS (1)..(348)
atgtttagattagctgtccgtgctgcccgtgccccagttgctagagctccattagcttccaacttcgttaaaccaattcgtttttacgcagttgcaccaatcacaaaagaggaagttaccacccgtgcttttgacgctttaaagaccgttgccgctttacaagaatctaagctttccttagaagcttcattccaaaaagatttaggtttagattcgttagataccgtcgaagctttagttgctttggaagaagaattcgacttagaaatccctgataaaatttctgatgacatcaagactgttggtgaagccgttaactacatctatgaagaagaacagaaattataa

SEQ ID NO: 5557 - protein, 115 aa, Debaryomyces hansenii CBS767
MFRLAVRAARAPVARAPLASNFVKPIRFYAVAPITKEEVTTRAFDALKTVAALQESKLSLEASFQKDLGLDSLDTVEALVALEEEFDLEIPDKISDDIKTVGEAVNYIYEEEQKL

SEQ ID NO: 5558 - DNA, 330 bp, Yarrowia lipolytica CLIB122
  CDS (1)..(330)
atgcttcgaaacgtttcccgactcgctctgcgatccaactttgcccgacaggccaccatgggccagcgattctactcggtcgctcgacccgatgccgagaagcgaattgctgctgttctcgagtcttttgacaagatctccaaccccgctgccatcacccccaccgcttccttcgccaaggacctcaacctcgacagcttagacaccgtcgaggttgttgttgccatcgaggaggagttcggcatcgagatccccgacaaggaggctgacgagatcaagtctgtcaaccaggccgtcgagtacattctcgcccagcccgatgctaaataa

SEQ ID NO: 5559 - protein, 109 aa, Yarrowia lipolytica CLIB122
MLRNVSRLALRSNFARQATMGQRFYSVARPDAEKRIAAVLESFDKISNPAAITPTASFAKDLNLDSLDTVEVVVAIEEEFGIEIPDKEADEIKSVNQAVEYILAQPDAK

SEQ ID NO: 5560 - DNA, 617 bp, Apis mellifera
  CDS (33)..(488)
gtcttttcgcgagatttttcattgcagagaaaatggcgtctctcgcgggagttcgtattttaataagaaataccggtgcttttagaaatttgatctctcgaacgtgtttacgaagtgctattacacaatttcaattaaatgaaagattatttcattgtaaaagacaaagtattctcacagttatacctcagggcacacgagtcaagcaggtgcgtcagtatggccataaggcaccattatcacttgaccttattcgccagcgtgtacttttagtactcaatctctatgataaagttgatgttcagaagttatctttgaactctcattttatgcaagatctgggtttggattctttggatcatgtagaaattataatggctatagaagatgaatttggttttgaaataccagatatggatgcacagaagcttctacgacctgcggatatagtacgttacgttgccgatagagaagatgtttacgaataaatattcatataatataaatcatctcattagtcaagcttttttatttttaaaacattattaaaaaaaataataaattttatttcttctgtatataatataaattgtaaaaataaagtgtatcgttagatc

SEQ ID NO: 5561 - protein, 151 aa, Apis mellifera
MASLAGVRILIRNTGAFRNLISRTCLRSAITQFQLNERLFHCKRQSILTVIPQGTRVKQVRQYGHKAPLSLDLIRQRVLLVLNLYDKVDVQKLSLNSHFMQDLGLDSLDHVEIIMAIEDEFGFEIPDMDAQKLLRPADIVRYVADREDVYE

SEQ ID NO: 5562 - DNA, 414 bp, Aspergillus nidulans FGSC A4
  CDS (1)..(414)
atgttccgttccgctgtcgtccgttcattgagggcctctgtgcctcgtgccgtcaagcctcaggctgctctccaaatccgtagctctcccgttgctcgtccagctcaattggctcctcgctttgccttgccggctgtccgcttctattccgcccctgccggtcttaagaaggaagaggttgagggccggatagtcaacctcttgaagaactttgacaaggttaatgatgctagcaagattaacggctcctcccacttctcgaacgacctcggacttgacagtctcgacaccgttgaggttgtgatggccatcgaggaggagttcagcattgagatccccgacaaggaggctgacgccatccacagcgttgacaaggctgttgagtacatccttgctcagcccgatgctcactaa

SEQ ID NO: 5563 - protein, 137 aa, Aspergillus nidulans FGSC A4
MFRSAVVRSLRASVPRAVKPQAALQIRSSPVARPAQLAPRFALPAVRFYSAPAGLKKEEVEGRIVNLLKNFDKVNDASKINGSSHFSNDLGLDSLDTVEVVMAIEEEFSIEIPDKEADAIHSVDKAVEYILAQPDAH

SEQ ID NO: 5564 - DNA, 396 bp, Ustilago maydis 521
  CDS (1)..(396)
atggttgccgctcttcgatctgctgtctcttcgctcgtccgagctcgtgctccattggccattgcccgccaggctactcctgtcgcgcgtgccgccatcgtcaccccccgcttcgcacctgtgcgcttctacgccgcctcggcaggtctctccaagtcggacatcgagaccagaatcgttgacgttttgaagactttcgaaaaggttgatcccagcaaggtctctgccgcttcgtcgttcaccactgacctgggtttggattcgcttgacgctgtcgaggtcgtcatggccatcgaggaggagttcaccattgagattcccgacgaggaggctgacaacatcaccaccgttcaacaagccatcgactacatcgccaagacccccgaggccgtgtaa

SEQ ID NO: 5565 - protein, 131 aa, Ustilago maydis 521
MVAALRSAVSSLVRARAPLAIARQATPVARAAIVTPRFAPVRFYAASAGLSKSDIETRIVDVLKTFEKVDPSKVSAASSFTTDLGLDSLDAVEVVMAIEEEFTIEIPDEEADNITTVQQAIDYIAKTPEAV

SEQ ID NO: 5566 - DNA, 494 bp, Tribolium castaneum
  CDS (42)..(494)
tgacatttaggccaagtttttgaataacaatatttgcaaaaatgtccggtttgataaaaagcgtgcgcgttttatcccgaaattcgagttatttacgagctgttgcgattaggccactgactgtcattgccaataaacacaaaaattatgaccagcccccggttacaagcagctcagtatttgcaccccttagccagagactggttttgccacttgagcgatgttacagttccaagccaccgttgactttaaaacttatcacagaccgcgtcctcttggtattaaaactgtacgataaagtcaatccagacaagctcacgctagactcacactttattaatgatctggggcttgattccttggaccatgtggaggtgatcatggccatggaggacgaattcgggttcgaaattccagacggagacgccgaaaaactgctaaaacccgctgatatcgtgaggtatgttgcggacagggaagacatttacgaatag

SEQ ID NO: 5567 - protein, 150 aa, Tribolium castaneum
MSGLIKSVRVLSRNSSYLRAVAIRPLTVIANKHKNYDQPPVTSSSVFAPLSQRLVLPLERCYSSKPPLTLKLITDRVLLVLKLYDKVNPDKLTLDSHFINDLGLDSLDHVEVIMAMEDEFGFEIPDGDAEKLLKPADIVRYVADREDIYE

SEQ ID NO: 5568 - DNA, 312 bp, Prochlorococcus marinus str. MIT 9303
  CDS (1)..(312): transl_table=11
atgttgccgtcaccgttgttaaccccactaccgccagctcgtaggatgcgtcgtcccgtcttcacggctatgtcccaggaagcgatccttgagaaagtccgttcaatcgttacggagcaactgagtgttgaggccggcgaagtgaagccagaatcgagttttcagaacgaccttggtgccgactccctcgacaccgtggaactcgtgatggccctcgaagaggcctttgacatcgagatccccgacgaggcggctgagggcatcacgaccgtcggtgatgccgtcaagtacatcgaagacaagcaagcctga

SEQ ID NO: 5569 - protein, 103 aa, Prochlorococcus marinus str. MIT 9303
MLPSPLLTPLPPARRMRRPVFTAMSQEAILEKVRSIVTEQLSVEAGEVKPESSFQNDLGADSLDTVELVMALEEAFDIEIPDEAAEGITTVGDAVKYIEDKQA

SEQ ID NO: 5570 - DNA, 225 bp, Clostridium thermocellum ATCC 27405
  CDS (1)..(225): transl_table=11
atgttcgaaaaagttagaaagattattgcagagcagttgggtattgaggaagatgagataacaatggaatcatcttttatagatgaccttggtgcagactctttggatattgttgaattgataatggccctggaagaagagttcgatctcgaaattcctgacagcgaggccgaaaagattacgacggtaggagacgttgttgagtacattaaaaataattcataa

SEQ ID NO: 5571 - protein, 74 aa, Clostridium thermocellum ATCC 27405
MFEKVRKIIAEQLGIEEDEITMESSFIDDLGADSLDIVELIMALEEEFDLEIPDSEAEKITTVGDVVEYIKNNS

SEQ ID NO: 5572 - DNA, 225 bp, Clostridium difficile 630
  CDS (1)..(225): transl_table=11
atgtttaataaagttgtagaaataataatagagcaattaggagtagaagataaagaaataactatggaaacatcattaatgaaggatttagaagcagattcattagatgcagtagaaataataatggcacttgaagatgaatttggtatagaaataccagatacagaagcagaaaacttcaaatctataggagatatagttaagtatatagaagctaataaatag

SEQ ID NO: 5573 - protein, 74 aa, Clostridium difficile 630
MFNKVVEIIIEQLGVEDKEITMETSLMKDLEADSLDAVEIIMALEDEFGIEIPDTEAENFKSIGDIVKYIEANK

SEQ ID NO: 5574 - DNA, 240 bp, Bradyrhizobium sp. ORS278
  CDS (1)..(240): transl_table=11
atgagtgagattggcgagcgggttaagaagatcgtggtcgaacaccttggtgtcgagcccgagaaagtggtcgacaacgcgagcttcattgacgacctcggtgccgacagcctcgacacggtcgagctcgtcatggctttcgaggaagaattcggctgcgaaattccggacgatgccgccgagaccatcctgacggtcggcgacgccaccaagttcctcgagaagaacgccaagagctga

SEQ ID NO: 5575 - protein, 79 aa, Bradyrhizobium sp. ORS278
MSEIGERVKKIVVEHLGVEPEKVVDNASFIDDLGADSLDTVELVMAFEEEFGCEIPDDAAETILTVGDATKFLEKNAKS

SEQ ID NO: 5576 - DNA, 231 bp, Dichelobacter nodosus VCS1703A
  CDS (1)..(231): transl_table=11
atgagtaatattgaagaacgtgtgatcaaagtgattgcggaacaattaaacgttgatgaaggacaagtgaaagctgatgcccattttatcgatgatttaggcgcagactcattggatttggtggaattggtgatgactttagaaaaagaatttgactgcgaaattcctgatgaagaagcagaaaaaatcacaaccgtccaatctgcaattgattttgtaaaatcacgctaa

SEQ ID NO: 5577 - protein, 76 aa, Dichelobacter nodosus VCS1703A
MSNIEERVIKVIAEQLNVDEGQVKADAHFIDDLGADSLDLVELVMTLEKEFDCEIPDEEAEKITTVQSAIDFVKSR

SEQ ID NO: 5578 - DNA, 237 bp, Xanthobacter autotrophicus Py2
  CDS (1)..(237): transl_table=11
atgagtgacatcgccgagcgggtgaagaagattgtcgcggagcatctgggggtggaacccgagaaggtcacggagagcgcctccttcatcgacgatctcggcgccgacagcctcgacaccgtggaactcgtgatggccttcgaggaggctttcaactgcgagatcccggacgatgccgccgagacgatcctgaccgtgggtgacgcgatcaagttcctggaaaagaacgcggcttga

SEQ ID NO: 5579 - protein, 78 aa, Xanthobacter autotrophicus Py2
MSDIAERVKKIVAEHLGVEPEKVTESASFIDDLGADSLDTVELVMAFEEAFNCEIPDDAAETILTVGDAIKFLEKNAA

SEQ ID NO: 5580 - DNA, 246 bp, Rickettsia akari str. Hartford
  CDS (1)..(246): transl_table=11
atgagtataacggacaagatcgaacagaaagttattgaaatggttgctgaaaagctaaataaagataaatcgataataactacgaattcaagatttatagaagatttggcagccgatagccttgataccgtagagttaatgatggcaatagaagttgagtacggtattgagatccctgatgatgaagccactaaaattaaaaccgtatccgatgttataacatatatcaaagaacgccaatcttaa

SEQ ID NO: 5581 - protein, 81 aa, Rickettsia akari str. Hartford
MSITDKIEQKVIEMVAEKLNKDKSIITTNSRFIEDLAADSLDTVELMMAIEVEYGIEIPDDEATKIKTVSDVITYIKERQS

SEQ ID NO: 5582 - DNA, 345 bp, Acinetobacter sp. ADP1
  CDS (1)..(345): transl_table=11
atggtggtttatacatggcctaagtgccgatgtattaactttcaaaaaattcaatattcaattaaactaacggcaattaaaacgccacgagcaatgaggagaattcctgtgagcgatatcgaacaacgcgttaagcaagcagttgcagaacaacttggtattaaagcagaagagatcaaaaacgaagcgtcttttatggatgatttgggtgcggactctcttgatctagtagaacttgttatgtctttcgaaaatgacttcgacatcacgattcctgatgaagattctaacgaaatcacaactgttcaatcagcaattgattatgtaaccaaaaaacttggttaa

SEQ ID NO: 5583 - protein, 114 aa, Acinetobacter sp. ADP1
MVVYTWPKCRCINFQKIQYSIKLTAIKTPRAMRRIPVSDIEQRVKQAVAEQLGIKAEEIKNEASFMDDLGADSLDLVELVMSFENDFDITIPDEDSNEITTVQSAIDYVTKKLG

SEQ ID NO: 5584 - DNA, 246 bp, Propionibacterium acnes KPA171202
  CDS (1)..(246): transl_table=11
atggctgacaaagaccagatccttgccgacatggctgacatcgtcaatgacatcactggtgtcgaccagtccgaggtcacccttgagaagttcttcgttgacgacctcgacgtcgactcgctgtccatggtcgagatcatctacgcctgcgacgagaagttcggcgttgagatccctgacgaagagtccaagaacatcaagaccgttggcgacgccgtcaactacatcatcgagcaccagggctga

SEQ ID NO: 5585 - protein, 81 aa, Propionibacterium acnes KPA171202
MADKDQILADMADIVNDITGVDQSEVTLEKFFVDDLDVDSLSMVEIIYACDEKFGVEIPDEESKNIKTVGDAVNYIIEHQG

SEQ ID NO: 5586 - DNA, 228 bp, Desulfotalea psychrophila LSv54
  CDS (1)..(228): transl_table=11
atggctttagatgaaaaaatggttgatattatcgtagaacagttgagtgttgagaaagagaaagttgttgccaaggcatcttttgttgatgatttgggtgctgattctcttgatcttgttgagttgatcatggcaatggaagaaggttatgatattgaaattcctgatgaagatgcagaaaaaattgcgactgttcaggatgcaattgattacgtaagcaacaagtaa

SEQ ID NO: 5587 - protein, 75 aa, Desulfotalea psychrophila LSv54
MALDEKMVDIIVEQLSVEKEKVVAKASFVDDLGADSLDLVELIMAMEEGYDIEIPDEDAEKIATVQDAIDYVSNK

SEQ ID NO: 5588 - DNA, 246 bp, Rickettsia typhi str. Wilmington
  CDS (1)..(246): transl_table=11
atgagtacaacggacaagatcgaacagaaagttattgaaatggttgctgagaagctaaataaagataaagcgataataactacagattcaagatttatagaagatttgaaagctgatagccttgataccgtagaattaatgatggcaatagaagttgaatacggtattgatatccctgatgatgaagccactaaaattaaaaccgtatccgatgtcataaaatatatcaaagaacgccaatcttaa

SEQ ID NO: 5589 - protein, 81 aa, Rickettsia typhi str. Wilmington
MSTTDKIEQKVIEMVAEKLNKDKAIITTDSRFIEDLKADSLDTVELMMAIEVEYGIDIPDDEATKIKTVSDVIKYIKERQS

SEQ ID NO: 5590 - DNA, 252 bp, Symbiobacterium thermophilum IAM 14863
  CDS (1)..(252): transl_table=11
atgaacctgcccatgtccactgatccgattttcgagaaagtcaaggcgatcatcgtggaccagctctccgtcgaggaggaagaggtgacgatggaggcctcgttcatcgaggacctcggcgccgactccctcgacatcgtggagctgattatggctctggaagaggagttcgatctcgaggtccccgacgaggacgcggagaagctcaccactgttggcgctgcggtgaactacatcaaggagcataagtag

SEQ ID NO: 5591 - protein, 83 aa, Symbiobacterium thermophilum IAM 14863
MNLPMSTDPIFEKVKAIIVDQLSVEEEEVTMEASFIEDLGADSLDIVELIMALEEEFDLEVPDEDAEKLTTVGAAVNYIKEHK

SEQ ID NO: 5592 - DNA, 234 bp, Bacillus licheniformis ATCC 14580
  CDS (1)..(234): transl_table=11
atggcagacgcattagagcgtgtaacaaaaatcatcgtagaccgcctcggcgtggatgaagctgacgtcactcttgaagcttcttttaaagaggatttaggcgctgattccctggatgtagttgagcttgtcatggaacttgaagacgagtttgatatggagatttctgacgaagatgctgaaaagattgcaacagtcggtgacgctgtgaactacataaatagtaagcagtaa

SEQ ID NO: 5593 - protein, 77 aa, Bacillus licheniformis ATCC 14580
MADALERVTKIIVDRLGVDEADVTLEASFKEDLGADSLDVVELVMELEDEFDMEISDEDAEKIATVGDAVNYINSKQ

SEQ ID NO: 5594 - DNA, 348 bp, Anaplasma marginale str. St. Maries
  CDS (1)..(348): transl_table=11
atgcggttctggcacggtccgtggtttctgtttttagtttatgggtgcgtcatggaaggtggtgaggtagggaacttgaagtctgacgatgctgttttggaagacatcaaatctaaggtcatggaggccgtgattggctgtctaaaattgaaggatgagcagaagcaggttctttctgggactaccaacctggccaaggatttcaacctggatagcctggattttgtggatctgattatgtccctggaggagaagttctccatagagattaccgacgaggaggcgcagggattggaaaccgtagatgatatatgtaaatacatacatggcaaatctaagtctgagtag

SEQ ID NO: 5595 - protein, 115 aa, Anaplasma marginale str. St. Maries
MRFWHGPWFLFLVYGCVMEGGEVGNLKSDDAVLEDIKSKVMEAVIGCLKLKDEQKQVLSGTTNLAKDFNLDSLDFVDLIMSLEEKFSIEITDEEAQGLETVDDICKYIHGKSKSE

SEQ ID NO: 5596 - DNA, 240 bp, Azoarcus sp. EbN1
  CDS (1)..(240): transl_table=11
atggagaacatcgaacagcgcgtcaagaagattgtcgccgagcagcttggcgtgaacgaatcggagatcaagaccgagtcgtctttcgtcgacgatctgggcgcggattcgctggacaccgtggaactggtcatggcgctggaagaagaattcgagtgcgaaatcccggacgaagaggccgagaagatcaccacggttcagcaggcgattgactacgtcaccgctcatctgaagaaataa

SEQ ID NO: 5597 - protein, 79 aa, Azoarcus sp. EbN1
MENIEQRVKKIVAEQLGVNESEIKTESSFVDDLGADSLDTVELVMALEEEFECEIPDEEAEKITTVQQAIDYVTAHLKK

SEQ ID NO: 5598 - DNA, 234 bp, Silicibacter pomeroyi DSS-3
  CDS (1)..(234): transl_table=11
atgagcgacgtcgcagatcgcgttaagaagatcgttgtggagcacctgggtgtcgaagaagacaaagtgaccgagaatgcctcgttcatcgacgacctgggcgccgacagcctcgacaccgtcgagctggtcatggctttcgaagaagagttcggcatcgagatcccggacgacgcggccgaaaccatccagaccttcggcgacgccgtcaagttcatcagcgaagcctcctga

SEQ ID NO: 5599 - protein, 77 aa, Silicibacter pomeroyi DSS-3
MSDVADRVKKIVVEHLGVEEDKVTENASFIDDLGADSLDTVELVMAFEEEFGIEIPDDAAETIQTFGDAVKFISEAS

SEQ ID NO: 5600 - DNA, 234 bp, Campylobacter jejuni RM1221
  CDS (1)..(234): transl_table=11
atggcaacatttgatgatgtaaaagcagtagtagtagagcaattaagtattgatgcagatgcagttaaaatggaatcaaaaattattgaagatttaggtgctgattctttagatgttgtagagcttattatggctttagaagaaaaatttgaaatagaaattccagatagtgatgctgaaaaattaattaaaattgaagatgttgtaaattatattgacaatctaaaaaaataa

SEQ ID NO: 5601 - protein, 77 aa, Campylobacter jejuni RM1221
MATFDDVKAVVVEQLSIDADAVKMESKIIEDLGADSLDVVELIMALEEKFEIEIPDSDAEKLIKIEDVVNYIDNLKK

SEQ ID NO: 5602 - DNA, 261 bp, Dehalococcoides ethenogenes 195
  CDS (1)..(261): transl_table=11
atggcaacggtttttgaaagagtaaaaaaagttagtgttgagcagctgggcgctgaagaaaaagatgtagtgcctgctgccagttttgcagatgatttgggtgcagattccctggatcaggtagagcttattatggcactggaaaccgaattcggtacacctgatgccaagtttgaaatacctgatactgacgccgaaaagttaaagacagtacaggctgtggtggactacctgaagtccaaaggcataaaagacagctaa

SEQ ID NO: 5603 - protein, 86 aa, Dehalococcoides ethenogenes 195
MATVFERVKKVSVEQLGAEEKDVVPAASFADDLGADSLDQVELIMALETEFGTPDAKFEIPDTDAEKLKTVQAVVDYLKSKGIKDS

SEQ ID NO: 5604 - DNA, 237 bp, Chlamydophila abortus S26/3
  CDS (1)..(237): transl_table=11
atgagtttagaagatgatgtaaaatcgattattgttgagcaacttggggtagatccgagtgaagtaactgagaattcttcatttatcgaagatcttaatgctgatagtttagacttaacagagttaattatgactttagaggaaaagtttaactttgaaatttcagaacaagatgcagaaaaattacgtactgtgggtgacgttctcgcatatattaaaacacgtcagggtcagtag

SEQ ID NO: 5605 - protein, 78 aa, Chlamydophila abortus S26/3
MSLEDDVKSIIVEQLGVDPSEVTENSSFIEDLNADSLDLTELIMTLEEKFNFEISEQDAEKLRTVGDVLAYIKTRQGQ

SEQ ID NO: 5606 - DNA, 243 bp, Pseudomonas syringae pv. syringae B728a
  CDS (1)..(243): transl_table=11
atgagcaccacatccatcgaagagcgcgtcaagaaaatcgttgcagagcaacttggcgtcaaacaagaagaggttgtcaacactgcttctttcgttgaggacctgggcgctgactccctggacaccgtcgagctggtaatggctctggaagaggaattcgagaccgaaatccctgacgaagaagcggaaaagatcactaccgttcaagcagcaatcgactacgtcactagccatcaggcttaa

SEQ ID NO: 5607 - protein, 80 aa, Pseudomonas syringae pv. syringae B728a
MSTTSIEERVKKIVAEQLGVKQEEVVNTASFVEDLGADSLDTVELVMALEEEFETEIPDEEAEKITTVQAAIDYVTSHQA

SEQ ID NO: 5608 - DNA, 237 bp, Pseudomonas fluorescens Pf-5
  CDS (1)..(237): transl_table=11
atgagcaccatcgaagagcgcgtcaagaaaatcgttgccgagcaactgggtgttaaagaagaagaagtggtcaacaccgcttccttcgtagaagacctgggtgccgactcccttgacaccgttgagctggtgatggctctggaagaggaattcgagaccgaaatccctgacgaagaagctgagaagatcactactgtacaagctgcaatcgactacgttactagccaccaggcgtaa

SEQ ID NO: 5609 - protein, 78 aa, Pseudomonas fluorescens Pf-5
MSTIEERVKKIVAEQLGVKEEEVVNTASFVEDLGADSLDTVELVMALEEEFETEIPDEEAEKITTVQAAIDYVTSHQA

SEQ ID NO: 5610 - DNA, 234 bp, Colwellia psychrerythraea 34H
  CDS (1)..(234): transl_table=11
atgagtaatatcgaagaacgcgtaaaaaaaatcacagttgaacagttaggtgttagtgaagcagaagtaaaaattgattcatcatttgttgatgacttaggtgctgactcattagacactgttgaattagttatggcgttagaagaagaatttgatactgaaattcctgacgaagaagctgaaaaaatcacaacagttcaagcagcaatcgattacgttactgctaaccagtaa

SEQ ID NO: 5611 - protein, 77 aa, Colwellia psychrerythraea 34H
MSNIEERVKKITVEQLGVSEAEVKIDSSFVDDLGADSLDTVELVMALEEEFDTEIPDEEAEKITTVQAAIDYVTANQ

SEQ ID NO: 5612 - DNA, 237 bp, Pseudomonas syringae pv. phaseolicola 1448A
  CDS (1)..(237): transl_table=11
atgagcaccatcgaagagcgcgtcaagaaaatcgttgcagagcaacttggcgtcaaatcagaagaggttgtcaacactgcttctttcgttgaagacctgggcgctgactccctggacactgtcgagctggtaatggctctggaagaggaattcgagaccgaaatccctgacgaagaagcggaaaagatcactaccgttcaagcagcaatcgactacgtcactagccatcaggcttaa

SEQ ID NO: 5613 - protein, 78 aa, Pseudomonas syringae pv. phaseolicola 1448A
MSTIEERVKKIVAEQLGVKSEEVVNTASFVEDLGADSLDTVELVMALEEEFETEIPDEEAEKITTVQAAIDYVTSHQA

SEQ ID NO: 5614 - DNA, 243 bp, Prochlorococcus marinus str. NATL2A
  CDS (1)..(243): transl_table=11
atgtcccaggaagcaattcttgaaaaagttcgttctattgtcgcagaacaacttagcgttgaagccggtgaagttaaaccggattcaaatttccaaaacgacctcggagctgactctctcgacactgtcgaattagttatggctcttgaagaggcatttgacatagaaatccccgacgaggctgctgaaggcattgccactgttggtgatgcagtcaaatacatcgaagaaaaacagtcttga

SEQ ID NO: 5615 - protein, 80 aa, Prochlorococcus marinus str. NATL2A
MSQEAILEKVRSIVAEQLSVEAGEVKPDSNFQNDLGADSLDTVELVMALEEAFDIEIPDEAAEGIATVGDAVKYIEEKQS

SEQ ID NO: 5616 - DNA, 261 bp, Dehalococcoides sp. CBDB1
  CDS (1)..(261): transl_table=11
atggcaacggtttttgaaagagtaaaaaaagttagtgttgagcagttgggcgccgaagaaaaagatgtggtgcttactgccagttttgcagatgacctgggggcagattctctggatcaggtagaacttataatggcactggagaccgaattcggtactcccgaaaccaagtttgagatacctgatactgacgctgaaaaattaaagacggtgcaggctgtagtggactacttgaagtccaaaggcataaaagacagctaa

SEQ ID NO: 5617 - protein, 86 aa, Dehalococcoides sp. CBDB1
MATVFERVKKVSVEQLGAEEKDVVLTASFADDLGADSLDQVELIMALETEFGTPETKFEIPDTDAEKLKTVQAVVDYLKSKGIKDS

SEQ ID NO: 5618 - DNA, 234 bp, Thiobacillus denitrificans ATCC 25259
  CDS (1)..(234): transl_table=11
atggataacgtacagcgtgtaattaaagtcgtcgccgagcagttgggcgtgaacgaggcggacatcaagagcgagtcctccttcgttggcgaccttggcgccgactcgctcgacaccgtcgagctggtgatggcgctggaagaagaattcggttgcgaaattcccgacgaagacgccgagaaaatcaccaccgtccagcaggccatcgactacgtcaacagccactcgaactga

SEQ ID NO: 5619 - protein, 77 aa, Thiobacillus denitrificans ATCC 25259
MDNVQRVIKVVAEQLGVNEADIKSESSFVGDLGADSLDTVELVMALEEEFGCEIPDEDAEKITTVQQAIDYVNSHSN

SEQ ID NO: 5620 - DNA, 255 bp, Anabaena variabilis ATCC 29413
  CDS (1)..(255): transl_table=11
atgagccaatcagaaacttttgaaaaagtcaaaagcattgttgtcgaacaactaagtgtggaagaccctgacaaagtaactccagaagctagttttgccaacgatttacaggctgattccctcgatacagtagaactagtaatggctttggaagaagaatttgagatcgaaattcccgatgaagccgcagagaaaatcaccaccgttcaagaggcggtggattacatcaataaccaagttgccgcatcagcttaa

SEQ ID NO: 5621 - protein, 84 aa, Anabaena variabilis ATCC 29413
MSQSETFEKVKSIVVEQLSVEDPDKVTPEASFANDLQADSLDTVELVMALEEEFEIEIPDEAAEKITTVQEAVDYINNQVAASA

SEQ ID NO: 5622 - DNA, 234 bp, Carboxydothermus hydrogenoformans Z-2901
  CDS (1)..(234): transl_table=11
atggcaggagtgtttgagcgggttaaaaaaataatcgtggatcaattaggagtcgaagaagatgaagttactatggaagcatcgtttattgacgaccttggagcggattcattggacattgtggagttaattatggcttttgaagaagagtttgaattagagatacccgatgaagatgcggaaaaaattcgcaccgttggggatgctgttaactatattcaggagagagtttaa

SEQ ID NO: 5623 - protein, 77 aa, Carboxydothermus hydrogenoformans Z-2901
MAGVFERVKKIIVDQLGVEEDEVTMEASFIDDLGADSLDIVELIMAFEEEFELEIPDEDAEKIRTVGDAVNYIQERV

SEQ ID NO: 5624 - DNA, 234 bp, Geobacter metallireducens GS-15
  CDS (1)..(234): transl_table=11
atgtcagcgatagacaaaagggttaaagagatcgttgccgaacagcttggcgtcgatgaagcacaggtaacgaatgaggcatcgttcatggacgatctgggtgccgattctcttgataccgtggaactggtgatggccctcgaggaggagttcgacatcgagatctccgacgaagacgcagagaagatccaaagcgtacaggacgccatcgactacatcaccgagcatacctaa

SEQ ID NO: 5625 - protein, 77 aa, Geobacter metallireducens GS-15
MSAIDKRVKEIVAEQLGVDEAQVTNEASFMDDLGADSLDTVELVMALEEEFDIEISDEDAEKIQSVQDAIDYITEHT

SEQ ID NO: 5626 - DNA, 231 bp, Desulfovibrio desulfuricans G20
  CDS (1)..(231): transl_table=11
atgtccgtcgaagaaaaagtcaaaaagatcatcatggaccagctcggcgtttccgccgaagaagtaaagcccgaagcttcctttgtggaagatctgggtgctgactccctggacctgaccgaactgatcatggccatggaagaagaattcggtaccgagattgatgacgacgacgctcagaaaattctgaaagtcaaagacgccatcgactacatcgctggcaagcaatag

SEQ ID NO: 5627 - protein, 76 aa, Desulfovibrio desulfuricans G20
MSVEEKVKKIIMDQLGVSAEEVKPEASFVEDLGADSLDLTELIMAMEEEFGTEIDDDDAQKILKVKDAIDYIAGKQ

SEQ ID NO: 5628 - DNA, 240 bp, Prochlorococcus marinus str. MIT 9312
  CDS (1)..(240): transl_table=11
atgtcacaagaaatcctcgaaaaagtctgttctattgtttcagagcaattaagcgttgaagcagcagaagtgaaatcagattcaaatttccaaaatgatttgggtgcagattccttagatactgttgaattagtgatggctctggaggaagcatttgatattgaaatacctgatgaagcagctgaaggcattgcaacagttggagatgcagttaaattcatcgaagaaaaaaaaggttaa

SEQ ID NO: 5629 - protein, 79 aa, Prochlorococcus marinus str. MIT 9312
MSQEILEKVCSIVSEQLSVEAAEVKSDSNFQNDLGADSLDTVELVMALEEAFDIEIPDEAAEGIATVGDAVKFIEEKKG

SEQ ID NO: 5630 - DNA, 243 bp, Synechococcus elongatus PCC 7942
  CDS (1)..(243): transl_table=11
atgagccaagaagacatcttcagcaaagtcaaagacattgtggctgagcagctgagtgtggatgtggctgaagtcaagccagaatccagcttccaaaacgatctgggagcggactcgctggacaccgtggaactggtgatggctctggaagaggctttcgatatcgaaatccccgatgaagccgctgaaggcattgcgaccgttcaagacgccgtcgatttcatcgctagcaaagctgcctag

SEQ ID NO: 5631 - protein, 80 aa, Synechococcus elongatus PCC 7942
MSQEDIFSKVKDIVAEQLSVDVAEVKPESSFQNDLGADSLDTVELVMALEEAFDIEIPDEAAEGIATVQDAVDFIASKAA

SEQ ID NO: 5632 - DNA, 234 bp, Rhodospirillum rubrum ATCC 11170
  CDS (1)..(234): transl_table=11
atgagcgacgtcgccgaccgcgttaagaagatcgttgtcgagcatctgggtgtcgaagaagccaaggtaactgaaaacgccagcttcatcgatgacctgggcgccgatagtctggatacggttgaattggttatggcgttcgaggaggaattcggttgcgaaatccccgatgacgccgccgagaagatcctgaccgtcaaggatgccatcgacttcatcgaaagcaacggctga

SEQ ID NO: 5633 - protein, 77 aa, Rhodospirillum rubrum ATCC 11170
MSDVADRVKKIVVEHLGVEEAKVTENASFIDDLGADSLDTVELVMAFEEEFGCEIPDDAAEKILTVKDAIDFIESNG

SEQ ID NO: 5634 - DNA, 240 bp, Moorella thermoacetica ATCC 39073
  CDS (1)..(240): transl_table=11
atgaggtcagtggacgtttttgaaaaaatcaaggggatcgtcgctgagcagctgggggtcgaggaagacacgataaccatggagacctcctttgaggacttgaatgccgattccctggatatcgtagaactcatcatggccctggaagaggaattcgacctggagattcccgacgaggatgctgaaaagctcacgactgtcggggcagcagtggcctatattaaagaacataccaagtaa

SEQ ID NO: 5635 - protein, 79 aa, Moorella thermoacetica ATCC 39073
MRSVDVFEKIKGIVAEQLGVEEDTITMETSFEDLNADSLDIVELIMALEEEFDLEIPDEDAEKLTTVGAAVAYIKEHTK

SEQ ID NO: 5636 - DNA, 249 bp, Frankia sp. CcI3
  CDS (1)..(249): transl_table=11
atgtcccaagctgacatcctcgccggtctcgccgtcatcctcgaagaggtcgccggtgtcgacccggccgacgtgacggccgacaagaccttcatcgacgacttggacgtggactcgctgtccatggtcgaggtggtcgtcgccgcggaggagaagttcggggtgaagatcccggacgacgacgtgaagaccctcaagaccgtcggtgacgcggtctcctacatccagcgggcaggtgtcgcggcgtga

SEQ ID NO: 5637 - protein, 82 aa, Frankia sp. CcI3
MSQADILAGLAVILEEVAGVDPADVTADKTFIDDLDVDSLSMVEVVVAAEEKFGVKIPDDDVKTLKTVGDAVSYIQRAGVAA

SEQ ID NO: 5638 - DNA, 237 bp, Novosphingobium aromaticivorans DSM 12444
  CDS (1)..(237): transl_table=11
atgagcgataccgccgaccgcgttaagaagatcgttgtcgagcacctcggcgtcgaggctgacaaggtcaccgaagaagccagcttcatcgacgatctgggcgctgactcgctcgacatcgtcgagctggtcatggccttcgaagaagaatttggcgtcgagatccccgacgatgcggccgagaagatctcgaccgtttcggacgcgatcaagtacatcgacgaaaacaagggctga

SEQ ID NO: 5639 - protein, 78 aa, Novosphingobium aromaticivorans DSM 12444
MSDTADRVKKIVVEHLGVEADKVTEEASFIDDLGADSLDIVELVMAFEEEFGVEIPDDAAEKISTVSDAIKYIDENKG

SEQ ID NO: 5640 - DNA, 255 bp, Anaplasma phagocytophilum HZ
  CDS (1)..(255): transl_table=11
atgtcagaagaaataaaagcacaggttatggagtcagtgatcgggtgtctaaaattaaacgacgaacaaaagcagattctttctggcactacaaacttagcaaaagattttaatcttgatagcttggattttgttgatcttatcatgtcgctagaagagaggttttccctagaaatatcagatgaagatgcacaaaagctggaaacagttgatgacatttgtcgctacatagcaagtaagtctagtgacgcttga

SEQ ID NO: 5641 - protein, 84 aa, Anaplasma phagocytophilum HZ
MSEEIKAQVMESVIGCLKLNDEQKQILSGTTNLAKDFNLDSLDFVDLIMSLEERFSLEISDEDAQKLETVDDICRYIASKSSDA

SEQ ID NO: 5642 - DNA, 276 bp, Ehrlichia chaffeensis str. Arkansas
  CDS (1)..(276): transl_table=11
atggaaagtaatgacgaaaagttagaatctgtcaaagatactgtgactaaaattgtgattgattgtttaaaactaaaagacgaacaaaaagctactctatccggtagcactaatttagcaaaagacttgaatcttgatagccttgatttcgtagatttggtaatgtgcttagaagaccatttctccatagaaatttccgatgaagaagcacaagaacttgaaactatagataaaatagaagagtatatacgtaataagttatcaagtaagaattga

SEQ ID NO: 5643 - protein, 91 aa, Ehrlichia chaffeensis str. Arkansas
MESNDEKLESVKDTVTKIVIDCLKLKDEQKATLSGSTNLAKDLNLDSLDFVDLVMCLEDHFSIEISDEEAQELETIDKIEEYIRNKLSSKN

SEQ ID NO: 5644 - DNA, 228 bp, Desulfitobacterium hafniense Y51
  CDS (1)..(228)
atgagcgtttttgacaaagtgaaatcaatcgtagtggatcaacttggggtagaagaagatgaaattacattagaaaccaccttcgcagatcttaatgcggattccctggatatcgttgaacttattatggctcttgaagaagaatttgatctcgatattccggatgaggatgcagagaaaattcgtaatgtcggtgatgcagtaaattacatcaaggaaaaccaataa

SEQ ID NO: 5645 - protein, 75 aa, Desulfitobacterium hafniense Y51
MSVFDKVKSIVVDQLGVEEDEITLETTFADLNADSLDIVELIMALEEEFDLDIPDEDAEKIRNVGDAVNYIKENQ

SEQ ID NO: 5646 - DNA, 237 bp, Saccharophagus degradans 2-40
  CDS (1)..(237): transl_table=11
atgagcagcattgaagaacgcgttaaaaagattgtcgcagagcaactaggtgttaaagaagaagaagtaaaaaacgaagcgtccttcgttgaagacttaggtgcagattctctagataccgttgaattggttatggctttagaagaggaattcgaaactgaaattcctgatgaagaagcagagaaaatcactactgttcaactagctatcaactacatcaacgaaaatttggcgtaa

SEQ ID NO: 5647 - protein, 78 aa, Saccharophagus degradans 2-40
MSSIEERVKKIVAEQLGVKEEEVKNEASFVEDLGADSLDTVELVMALEEEFETEIPDEEAEKITTVQLAINYINENLA

SEQ ID NO: 5648 - DNA, 237 bp, Methylobacillus flagellatus KT
  CDS (1)..(237): transl_table=11
atgtctgacatcgaacaacgcgttaaaaagatcgtttccgagcaacttggtgcaaacgaggctgacgtcaagaacgaatcctcctttgttgacgatctgggtgctgattctctcgacaccgtagaattagtgatggcgctggaagaagaattcgactgcgaaattcctgacgaagaagccgaaaaaatcacaacagttcagcaagcgattgattacgtcaacgcaaacctgaaataa

SEQ ID NO: 5649 - protein, 78 aa, Methylobacillus flagellatus KT
MSDIEQRVKKIVSEQLGANEADVKNESSFVDDLGADSLDTVELVMALEEEFDCEIPDEEAEKITTVQQAIDYVNANLK

SEQ ID NO: 5650 - DNA, 252 bp, Burkholderia xenovorans LB400
  CDS (1)..(252): transl_table=11
atgtccgaggcagagattctggagcgcatccgcgccatcttcaaagagaacttcgcgatcgagcccgagcgtgtcacgcccgaagcgcatctgttcgaagacctcgatctcgacagcatcgacgccgtcgacctcgcgatcaaactgcaggaaatgaccggacgccgcatcaagccggaagagttcaagtcggtgcgcaccgtcggcgacgtgatcggtgcggtcgagtccctgctggcggcacaaggctga

SEQ ID NO: 5651 - protein, 83 aa, Burkholderia xenovorans LB400
MSEAEILERIRAIFKENFAIEPERVTPEAHLFEDLDLDSIDAVDLAIKLQEMTGRRIKPEEFKSVRTVGDVIGAVESLLAAQG

SEQ ID NO: 5652 - DNA, 246 bp, Acidobacteria bacterium Ellin345
  CDS (1)..(246): transl_table=11
atggcttccgtagaagaaaaagtaaaacagatcattgtcgagcagctcggtgtggatgagggtgaggttacgcccaatgcttcgttcgtggacgatctcggcgccgactcgctcgatacggtcgagctggtgatggctttcgaggaagcgtttgaaatcgagattccagatgaggacgccgaaaagatccgcaccgtaaaagacgcggtagattacatcacagcccacgcgaaaggtggcaagtag

SEQ ID NO: 5653 - protein, 81 aa, Acidobacteria bacterium Ellin345
MASVEEKVKQIIVEQLGVDEGEVTPNASFVDDLGADSLDTVELVMAFEEAFEIEIPDEDAEKIRTVKDAVDYITAHAKGGK

SEQ ID NO: 5654 - DNA, 234 bp, Silicibacter sp. TM1040
  CDS (1)..(234): transl_table=11
atgagcgacgtcgcagatcgcgtgaaaaagatcgttgtagagcacctgggtgttgaagaagacaaggtgaccgagagcgcctccttcatcgacgaccttggcgcagacagcctcgacacagttgagctggttatggcgttcgaagaagagttcggcatcgagatcccggacgacgcggccgagaccatccagaccttcggcgacgcagtgaagttcatctccgaagcgtcctga

SEQ ID NO: 5655 - protein, 77 aa, Silicibacter sp. TM1040
MSDVADRVKKIVVEHLGVEEDKVTESASFIDDLGADSLDTVELVMAFEEEFGIEIPDDAAETIQTFGDAVKFISEAS

SEQ ID NO: 5656 - DNA, 243 bp, Myxococcus xanthus DK 1622
  CDS (1)..(243): transl_table=11
atgtcgacgtcaaccattgaggccaaggtcaagtccatcatcgccgaccagctcggtgtcggagaggatgagatcaagccggagtcctccttcatcgaggacctcggcgcggacagcctcgacatcgtggagctcgtcatggcgatggaagaggagttcgaggtcgagattcccgacgaagaggcggagaacatcaagaccgtcaacgacgccgtcagctacatcaacacccacaagaagtag

SEQ ID NO: 5657 - protein, 80 aa, Myxococcus xanthus DK 1622
MSTSTIEAKVKSIIADQLGVGEDEIKPESSFIEDLGADSLDIVELVMAMEEEFEVEIPDEEAENIKTVNDAVSYINTHKK

SEQ ID NO: 5658 - DNA, 246 bp, Rubrobacter xylanophilus DSM 9941
  CDS (1)..(246): transl_table=11
ttggatcgcgaagagatactgcagaagatccaggagataaccgccgaccggctcggcgtcgacgagagcgaggtcacgcccgaagcctccttcagggaggatctggaggccgactcgctcgacctcgtcgagctcatcatggagctcgaggaggccttcggcatggagatccccgacgaggaggccgagaagatcaccaccgtcgaggaggccgtcgactacgtggtggagcaccagaccgcgtga

SEQ ID NO: 5659 - protein, 81 aa, Rubrobacter xylanophilus DSM 9941
MDREEILQKIQEITADRLGVDESEVTPEASFREDLEADSLDLVELIMELEEAFGMEIPDEEAEKITTVEEAVDYVVEHQTA

SEQ ID NO: 5660 - DNA, 237 bp, Mesorhizobium sp. BNC1
  CDS (1)..(237): transl_table=11
atgagtgatactgcagagcgcgtcaagaagatcgttgttgagcatcttggcgtagacgccgacaaggtgaccgaacaggccagctttatcgacgatctgggcgcggacagcctcgacaccgttgaactggtaatggccttcgaggaagaattcggtgtcgagatccccgacgacgcggccgagacgatcctcacagtcggcgacgctgtgaagtacatcgaaaaggccacagcctga

SEQ ID NO: 5661 - protein, 78 aa, Mesorhizobium sp. BNC1
MSDTAERVKKIVVEHLGVDADKVTEQASFIDDLGADSLDTVELVMAFEEEFGVEIPDDAAETILTVGDAVKYIEKATA

SEQ ID NO: 5662 - DNA, 231 bp, Haemophilus somnus 129PT
  CDS (1)..(231): transl_table=11
atgagcattgaagaacgtgtaaaaaaaatcattgttgaacaattaggtgttaaagaagatgatgttaagcctgaagcttcatttattgaagatttaggtgcagattctttggatacagttgaattagtaatggctttagaggaagaatttgatattgaaattccggatgaagaagctgagaaaattacaacagttcaatcagcaattgattatgttcaaaataatcaatag

SEQ ID NO: 5663 - protein, 76 aa, Haemophilus somnus 129PT
MSIEERVKKIIVEQLGVKEDDVKPEASFIEDLGADSLDTVELVMALEEEFDIEIPDEEAEKITTVQSAIDYVQNNQ

SEQ ID NO: 5664 - DNA, 267 bp, Trichodesmium erythraeum IMS101
  CDS (1)..(267): transl_table=11
atgaccaacgatagtgttccggcgaaagtcatggaaattgtggctaaacaactggaaaaagaccaaaaagaagtcacgccagaatcgagttttgctaacgatctaggagctgattctttagatactgtagaattagtcatggcattggaagaagaatttggtacagagattccagatgaagaagcagaaaaaattactactgtccaagctgctgtggattatattcaaaacaagatggatgatggaaaaataaaactggaaaaataa

SEQ ID NO: 5665 - protein, 88 aa, Trichodesmium erythraeum IMS101
MTNDSVPAKVMEIVAKQLEKDQKEVTPESSFANDLGADSLDTVELVMALEEEFGTEIPDEEAEKITTVQAAVDYIQNKMDDGKIKLEK

SEQ ID NO: 5666 - DNA, 285 bp, Synechococcus sp. CC9311
  CDS (1)..(285): transl_table=11
atggggcaagcccgtaagatgcgacgtcacgtctgctcggccatgtcccaggaatcgatcctcgaaaaagtccgttcgatcgttacggagcaactcagcgtcgatgccggcgaagtcaaaccggagtccaactttcagaacgatctgggagctgactcactcgacaccgtcgagttggtgatggctcttgaagaagccttcgacatcgaaattcccgatgaagccgccgaagggattgccaccgttggcgatgccgtcaaatacatcgaagacaagcaagcctga

SEQ ID NO: 5667 - protein, 94 aa, Synechococcus sp. CC9311
MGQARKMRRHVCSAMSQESILEKVRSIVTEQLSVDAGEVKPESNFQNDLGADSLDTVELVMALEEAFDIEIPDEAAEGIATVGDAVKYIEDKQA

SEQ ID NO: 5668 - DNA, 240 bp, Alkalilimnicola ehrlichei MLHE-1
  CDS (1)..(240): transl_table=11
atgagcagcatcgaagaacgcgttaagaaaatcgtcgtcgagcagcttggggtcaaagaggaagaggtgagcggtgaggcctcctttgtcgacgatcttggcgctgactcgctggataccgtggaactggtcatggcgctcgaggaggagttcgagtgcgaaattcctgacgaagaagctgagaagatcaccaccgttcaacaggcggtcgactacatcaacaagcatctgggctcctaa

SEQ ID NO: 5669 - protein, 79 aa, Alkalilimnicola ehrlichei MLHE-1
MSSIEERVKKIVVEQLGVKEEEVSGEASFVDDLGADSLDTVELVMALEEEFECEIPDEEAEKITTVQQAVDYINKHLGS

SEQ ID NO: 5670 - DNA, 234 bp, Hyphomonas neptunium ATCC 15444
  CDS (1)..(234)
atgtctgacgtttttgaacgtgtgaagaaaatcgtagtcgagaacctcgacgtggaagcagacaaggttgttgagagcgcaagcttcatcgacgacctcggtgcggactcgctggacctcgtcgaactcgtgatggctttcgaagaagagtttaacatcgagatccctgatgacgtgcaagagtcgatccgttcggtcggtgacgccgtctcgcacatcaaggcccacgtctaa

SEQ ID NO: 5671 - protein, 77 aa, Hyphomonas neptunium ATCC 15444
MSDVFERVKKIVVENLDVEADKVVESASFIDDLGADSLDLVELVMAFEEEFNIEIPDDVQESIRSVGDAVSHIKAHV

SEQ ID NO: 5672 - DNA, 240 bp, Pseudomonas aeruginosa UCBPP-PA14
  CDS (1)..(240): transl_table=11
atggacgacatcgagaccagagtgaggaagctggtagccgcccggctcggcgtggaggaatgcgacatccggctggacagcgatttccgtaacgacttcggtgccgagtcgctcgaggtggtcgaactggtcatggccctggaagcggagttcggcgtcgagatcgccgatgacgatgcggaacggatcgagaccgtgcgccaggccatcgactatctcgaggaagccgtgccgacctga

SEQ ID NO: 5673 - protein, 79 aa, Pseudomonas aeruginosa UCBPP-PA14
MDDIETRVRKLVAARLGVEECDIRLDSDFRNDFGAESLEVVELVMALEAEFGVEIADDDAERIETVRQAIDYLEEAVPT

SEQ ID NO: 5674 - DNA, 243 bp, Pediococcus pentosaceus ATCC 25745
  CDS (1)..(243): transl_table=11
ttgtcaaaagaagaaatttttaataaaattgctgaaattttagcagatcggtttgaattaaaaaccgaacaaattaccaatacactaaactttaaagaagatttaaatgctgactcaattgatattgttgagttcgtgttagagttagaagatacttttggagctgaaattactgatgaagctgctgagaacctagttactgttggggatgcagttgattatattagtgaacatcaggcttaa

SEQ ID NO: 5675 - protein, 80 aa, Pediococcus pentosaceus ATCC 25745
MSKEEIFNKIAEILADRFELKTEQITNTLNFKEDLNADSIDIVEFVLELEDTFGAEITDEAAENLVTVGDAVDYISEHQA

SEQ ID NO: 5676 - DNA, 255 bp, Oenococcus oeni PSU-1
  CDS (1)..(255): transl_table=11
atgaataaagatgaaattgctgctcaactagcagatgaagtttctaaacgctttggtttatcaaaatcaaaaattaccccggatttggattttacaaaggatgtcaacgccgattcaatcgattttgttgaattggtgatggaattagaagataaatatgatattgaaatttccgatgacgatgctgccaagctgattactttccaatcgactgtcgactatctctatgatcatgcgagtaaaaaagcttcatga

SEQ ID NO: 5677 - protein, 84 aa, Oenococcus oeni PSU-1
MNKDEIAAQLADEVSKRFGLSKSKITPDLDFTKDVNADSIDFVELVMELEDKYDIEISDDDAAKLITFQSTVDYLYDHASKKAS

SEQ ID NO: 5678 - DNA, 255 bp, Solibacter usitatus Ellin6076
  CDS (1)..(255): transl_table=11
ttgatccagcgcgttttgaaggtcattgccacttccaaacgcatacccctcgaaaccgtgacgatcgatagcgatttccagcagttgggaatcgactcgatggatgccgtcgagatcctgtttgcgctcgagaatgaattcgacatcagtattcccgacgacgaagtgcgctctgtccgcaacgtacgcgatatgtgcaccggagtagataagctggtggccgccaaggcgtccggcagtcaggccggcgagtaa

SEQ ID NO: 5679 - protein, 84 aa, Solibacter usitatus Ellin6076
MIQRVLKVIATSKRIPLETVTIDSDFQQLGIDSMDAVEILFALENEFDISIPDDEVRSVRNVRDMCTGVDKLVAAKASGSQAGE

SEQ ID NO: 5680 - DNA, 330 bp, Solibacter usitatus Ellin6076
  CDS (1)..(330): transl_table=11
atggggtttcgggcgggaacgcatgcgacttgcggaatctccgcgaaggtagctaaaatcaacgcgttcacaaaaatcccaggaggaattatggcagttgagcagaaggtgaagcagattattgtcgagcaactgggcgtagatgagagccaggttgatagcaacgcgtctttcgttgacgacctgggcgccgattcgctcgacatcgtcgagctcgtgatggcttttgaagaagccttcgaactcgagatcccagatgaggacgccgagaaaatcactacggtgaaagacgcggtggattacatcgaaggcaagaccaccaagaaatag

SEQ ID NO: 5681 - protein, 109 aa, Solibacter usitatus Ellin6076
MGFRAGTHATCGISAKVAKINAFTKIPGGIMAVEQKVKQIIVEQLGVDESQVDSNASFVDDLGADSLDIVELVMAFEEAFELEIPDEDAEKITTVKDAVDYIEGKTTKK

SEQ ID NO: 5682 - DNA, 237 bp, Magnetococcus sp. MC-1
  CDS (1)..(237): transl_table=11
atgagtgatatcgcggaacgtgtcaaaaagatcgttgcagaacagatgggcgttgacctggacaaagttaccgacgacgccaagtttgtcgaagacctgggtgcagactccctggacaacgtggagttggtcatggctttcgaggaagagttcggctgcgagatcccagacgaaaccgccgagaagatcacctcggtgagtgacgccatcaagtacattggcgaaaacatggaataa

SEQ ID NO: 5683 - protein, 78 aa, Magnetococcus sp. MC-1
MSDIAERVKKIVAEQMGVDLDKVTDDAKFVEDLGADSLDNVELVMAFEEEFGCEIPDETAEKITSVSDAIKYIGENME

SEQ ID NO: 5684 - DNA, 246 bp, Nocardioides sp. JS614
  CDS (1)..(246): transl_table=11
atggcaacgaccgaagagatccgcgccgacctcgctgacatcgtcaacgaggtcgccggcatcgacgccgacgacgtccagctcgacaagtccttcgtcgacgacctggacgtggactcgttgtccatggtcgaggtggtcgtcgcggccgaggagaagttcggcgtgtcgatccccgacgacgaggtcaagaacctcaagaccgtcggcgacgccgtcgcgttcatcgagcgcgcccaggcctga

SEQ ID NO: 5685 - protein, 81 aa, Nocardioides sp. JS614
MATTEEIRADLADIVNEVAGIDADDVQLDKSFVDDLDVDSLSMVEVVVAAEEKFGVSIPDDEVKNLKTVGDAVAFIERAQA

SEQ ID NO: 5686 - DNA, 240 bp, Azoarcus sp. BH72
  CDS (1)..(240): transl_table=11
atggagaacatcgaacagcgcgtcaagaagatcgtcgctgagcaacttggcgtgaacgaatcggagatcaagaacgagtcttcgttcgtggacgatctgggcgcggattcgctggacaccgtggaactggttatggcgctggaagaagagttcgagtgcgagatcccggacgaagaggccgagaagatcaccaccgtccagcaggcgatcgactacgtcaacgcccatctgaagaagtaa

SEQ ID NO: 5687 - protein, 79 aa, Azoarcus sp. BH72
MENIEQRVKKIVAEQLGVNESEIKNESSFVDDLGADSLDTVELVMALEEEFECEIPDEEAEKITTVQQAIDYVNAHLKK

SEQ ID NO: 5688 - DNA, 255 bp, Nostoc punctiforme PCC 73102
  CDS (1)..(255): transl_table=11
atgagccaaacggaactttttgaaaaggtcaagaaaatcgtcatcgaacaactgagtgttgaagatgcttccaaaatcactccacaagctaagtttatggaagatttaggagctgattccctggatactgttgaactcgtgatggctttggaagaagaatttgatatcgaaattcccgacgaagctgccgagcagattgtatcggttcaagacgcagtagattacatcaataacaaagttgctgcatcagcttaa

SEQ ID NO: 5689 - protein, 84 aa, Nostoc punctiforme PCC 73102
MSQTELFEKVKKIVIEQLSVEDASKITPQAKFMEDLGADSLDTVELVMALEEEFDIEIPDEAAEQIVSVQDAVDYINNKVAASA

SEQ ID NO: 5690 - DNA, 246 bp, Rickettsia sibirica 246
  CDS (1)..(246): transl_table=11
atgagtacaacggataagatcgaacagaaagttattgaaatggttgctgaaaagctcaataaagataaatcgataataactacggattcaagatttatagaagatttgaaagctgatagccttgataccgtagagttaatgatggcaatagaagttgaatacggtattgatattcctgatgatgaagccactaaaattaaaaccgtatccgatgttataaaatatatcaaagaacgccaatcttaa

SEQ ID NO: 5691 - protein, 81 aa, Rickettsia sibirica 246
MSTTDKIEQKVIEMVAEKLNKDKSIITTDSRFIEDLKADSLDTVELMMAIEVEYGIDIPDDEATKIKTVSDVIKYIKERQS

SEQ ID NO: 5692 - DNA, 210 bp, Fusobacterium nucleatum subsp. vincentii ATCC 49256
  CDS (1)..(210): transl_table=11
atgttagataaagtaaaagaaattatagttgaacaattaggagtggatgctgatcaaataaaacctgaatcaaatttcgtagatgatttaggagcagattctttagatactgttgaattaataatgtcttttgaagaagaatttggagtagaaatcccagatacagaagcagaaaaaatcaaaactgtacaagatgttataactacatag

SEQ ID NO: 5693 - protein, 69 aa, Fusobacterium nucleatum subsp. vincentii ATCC 49256
MLDKVKEIIVEQLGVDADQIKPESNFVDDLGADSLDTVELIMSFEEEFGVEIPDTEAEKIKTVQDVITT

SEQ ID NO: 5694 - DNA, 243 bp, Prosthecochloris aestuarii DSM 271
  CDS (1)..(243): transl_table=11
atgaacgtagaagaaatcaaagacaaagtgtttgacattatcgtcagcaaaatgggcgtcaacaaagatcagatcaaaaccgaatccaagttcgcagacgatctcggcgcagactctcttgataccgtcgagctgattatggagcttgaaaacgaatttgatgttcagattcctgatgaagacgctgaaaaaatcagcaacgttcagcaggcaatcgactacatcgtcaatgcaaaaaagtaa

SEQ ID NO: 5695 - protein, 80 aa, Prosthecochloris aestuarii DSM 271
MNVEEIKDKVFDIIVSKMGVNKDQIKTESKFADDLGADSLDTVELIMELENEFDVQIPDEDAEKISNVQQAIDYIVNAKK

SEQ ID NO: 5696 - DNA, 234 bp, Croceibacter atlanticus HTCC2559
  CDS (1)..(234): transl_table=11
atgtcagacattgcatcaagagtaaaagcaataatcgtagacaaattaggtgttgacgaaaacgaagtagttaacgacgcaagcttcacaaacgatttaggagcagattcattggacacagtggaattaattatggaattcgaaaaagaattcgatattcagattccagacgaccaagctgaaaacattgcaacagttggtcaagcaatttcttatatagaagaggctaaataa

SEQ ID NO: 5697 - protein, 77 aa, Croceibacter atlanticus HTCC2559
MSDIASRVKAIIVDKLGVDENEVVNDASFTNDLGADSLDTVELIMEFEKEFDIQIPDDQAENIATVGQAISYIEEAK

SEQ ID NO: 5698 - DNA, 234 bp, Roseovarius nubinhibens ISM
  CDS (1)..(234): transl_table=11
atgagcgatatcgcagaccgcgtgaaaaagatcgttgtggaacatcttggcgtcgaagaagacaaggtcactgaaagcgcctccttcatcgacgatctgggcgcagacagcctcgacacggtcgaactggtcatggccttcgaagaagagttcggcatcgagatccccgatgacgccgcagagaacatccagaccttcggcgacgcggtgaaattcatcaacgaggcctcctaa

SEQ ID NO: 5699 - protein, 77 aa, Roseovarius nubinhibens ISM
MSDIADRVKKIVVEHLGVEEDKVTESASFIDDLGADSLDTVELVMAFEEEFGIEIPDDAAENIQTFGDAVKFINEAS

SEQ ID NO: 5700 - DNA, 234 bp, Oceanicola batsensis HTCC2597
  CDS (1)..(234): transl_table=11
atgagcgatgtcgcggaacgcgtgaagaagatcgtcgtcgagcatctgggcgtggaagaagacaaggtgaccgagaacgcctcgttcatcgacgacctgggtgcggacagcctcgatacggtcgagctggtgatggccttcgaggaagagttcggcatcgagatccccgacgacgccgccgagaacatccagaccttcggtgacgccgtgaagttcatcaaggacgctgcctga

SEQ ID NO: 5701 - protein, 77 aa, Oceanicola batsensis HTCC2597
MSDVAERVKKIVVEHLGVEEDKVTENASFIDDLGADSLDTVELVMAFEEEFGIEIPDDAAENIQTFGDAVKFIKDAA

SEQ ID NO: 5702 - DNA, 237 bp, Erythrobacter sp. NAP1
  CDS (1)..(237): transl_table=11
atgagcgatactgccgaccgcgtgcagaaaattgtcgtcgaacatctcggcgtcgaaggtgacaaggtcactcaggatgcaagcttcatcgatgatcttggcgcagacagcctcgacatcgtcgagcttgtgatggctttcgaagaagaattcggcgtcgaaattcccgacgatgcagccgagaagatctcgaccgttggcgatgccacgaaattcatcgaggaaaacaagggctaa

SEQ ID NO: 5703 - protein, 78 aa, Erythrobacter sp. NAP1
MSDTADRVQKIVVEHLGVEGDKVTQDASFIDDLGADSLDIVELVMAFEEEFGVEIPDDAAEKISTVGDATKFIEENKG

SEQ ID NO: 5704 - DNA, 243 bp, Synechococcus sp. RS9917
  CDS (1)..(243): transl_table=11
atgtcccaggaagcgatcctcgaaaaagtccgttcgatcgtggcggagcagctcagcgttgatgccggcgacgtgaagccggaatccaatttccagaatgatctcggcgccgactcgctcgacaccgtcgagctggtgatggctctggaggaagccttcgacatcgaaatccccgacgaagccgctgaaggcatcgccaccgtgggtgacgcagttaagtacatcgaagacaagcaggcctga

SEQ ID NO: 5705 - protein, 80 aa, Synechococcus sp. RS9917
MSQEAILEKVRSIVAEQLSVDAGDVKPESNFQNDLGADSLDTVELVMALEEAFDIEIPDEAAEGIATVGDAVKYIEDKQA

SEQ ID NO: 5706 - DNA, 243 bp, Synechococcus sp. WH 7805
  CDS (1)..(243): transl_table=11
atgtctcaggaagcgatcctcgaaaaagtccgttcgatcgtggcggagcagctcagcgtcgacgccggtgaagtgaagccggagtcgaatttccagaacgatctaggcgccgattcgctcgacaccgtcgagctggtgatggccctggaggaagccttcgacatcgaaattcccgacgaatccgccgaaggcatcgccaccgtgggcgacgccgttaagtacatcgaagacaagcaggcctga

SEQ ID NO: 5707 - protein, 80 aa, Synechococcus sp. WH 7805
MSQEAILEKVRSIVAEQLSVDAGEVKPESNFQNDLGADSLDTVELVMALEEAFDIEIPDESAEGIATVGDAVKYIEDKQA

SEQ ID NO: 5708 - DNA, 237 bp, Pseudoalteromonas tunicata D2
  CDS (1)..(237): transl_table=11
atgagcaacatccaagaacgcgttaagaaaatcatcattgagcaactaggtgttaaagaagaagaagttaaaaatgaatcttcttttgttgatgacttaggtgcagattctctagacactgttgaacttgtaatggctttagaagaagaatttgatactgagatcccagacgaagaagctgagaaaattactacagttcaagctgctatcgattacgtaactgcacacgcagagtaa

SEQ ID NO: 5709 - protein, 78 aa, Pseudoalteromonas tunicata D2
MSNIQERVKKIIIEQLGVKEEEVKNESSFVDDLGADSLDTVELVMALEEEFDTEIPDEEAEKITTVQAAIDYVTAHAE

SEQ ID NO: 5710 - DNA, 234 bp, Oceanospirillum sp. MED92
  CDS (1)..(234): transl_table=11
atgagcaacattgaagagcgcgtaaagaagatcatcgctgagcagctgggtgttaaagaagaagaagttactcaggaagcttcttttgttgaagatctgggcgcagactctctggacacagttgagctggtaatggcgctggaagaagaattcgaaactgaaattccagacgaagaagctgaaaagatcactacagttcagctggctatcgattacatcaacgctcaccagtaa

SEQ ID NO: 5711 - protein, 77 aa, Oceanospirillum sp. MED92
MSNIEERVKKIIAEQLGVKEEEVTQEASFVEDLGADSLDTVELVMALEEEFETEIPDEEAEKITTVQLAIDYINAHQ

SEQ ID NO: 5712 - DNA, 234 bp, delta proteobacterium MLMS-1
  CDS (1)..(234): transl_table=11
atggcggtagagcaaaaactgattgatatcattgccgagcagttgagcgtggacaaggataaggtggtgcccaaggcctccttcatcgacgacctgggggccgactccctggatctggtggagctgatcatggccatggaagaggcctttgatatcgagatcgccgacgaggtggccgagaagatcaccaccgtgcaggacgccatcgaccatatcaagcagatttccgagtaa

SEQ ID NO: 5713 - protein, 77 aa, delta proteobacterium MLMS-1
MAVEQKLIDIIAEQLSVDKDKVVPKASFIDDLGADSLDLVELIMAMEEAFDIEIADEVAEKITTVQDAIDHIKQISE

SEQ ID NO: 5714 - DNA, 240 bp, Oceanobacter sp. RED65
  CDS (1)..(240): transl_table=11
atgtccgatatttataatcaagtagtagaagttgtcgtagagcaactcggcgtagaagtagaccaagtgaaaatggaatcacatttcattgaagatttgggtgcagattcattggatactgttgagttgttgatggctttagaagaaaaattcgattgcgaaatcgaagaagacaaagctgaaaaattaacgactgtaaaagatattgtcgagtttgttcagtcgctagagactgcataa

SEQ ID NO: 5715 - protein, 79 aa, Oceanobacter sp. RED65
MSDIYNQVVEVVVEQLGVEVDQVKMESHFIEDLGADSLDTVELLMALEEKFDCEIEEDKAEKLTTVKDIVEFVQSLETA

SEQ ID NO: 5716 - DNA, 234 bp, Oceanobacter sp. RED65
  CDS (1)..(234): transl_table=11
atgagcagcattgaagaacgcgtaaagaaagtggtttgtgaacaacttggcgtaaaagaagaagaggccaagggtactgcacgcttcgttgaagatcttggagccgattctctagatacagttgagctagtaatggctctagaagaagaattcgaaacagaaattcctgatgaggatgctgaaaagctaaccacagttcaggaagccattgactatatcatcgctcacctttaa

SEQ ID NO: 5717 - protein, 77 aa, Oceanobacter sp. RED65
MSSIEERVKKVVCEQLGVKEEEAKGTARFVEDLGADSLDTVELVMALEEEFETEIPDEDAEKLTTVQEAIDYIIAHL

SEQ ID NO: 5718 - DNA, 237 bp, marine gamma proteobacterium HTCC2143
  CDS (1)..(237): transl_table=11
atgagcagcattgaagaacgcgttaaaaagattgtcgcagagcagttaggtgttaaagaagatgaagtacaaacctctgcatcatttgtagaagatttgggcgctgattctctggatactgttgaattagttatggctcttgaagaggagtttgaaaccgaaattcccgatgaggaagctgagcaaatcaccaccgtgcagttggctatcgactatatcaacaaaaacctgggatag

SEQ ID NO: 5719 - protein, 78 aa, marine gamma proteobacterium HTCC2143
MSSIEERVKKIVAEQLGVKEDEVQTSASFVEDLGADSLDTVELVMALEEEFETEIPDEEAEQITTVQLAIDYINKNLG

SEQ ID NO: 5720 - DNA, 237 bp, marine gamma proteobacterium HTCC2080
  CDS (1)..(237): transl_table=11
atgagcagcattgaagatcgcgtaaagaaaatcgttgccgagcagctgggcgttaaagaagacgaagtgcgtactgaggcgtcttttgtcgacgacttgggcgcagattctctagacaccgtggagctcgttatggcccttgaggaggagtttgaaaccgaaattcccgatgaagaagccgagaaaatcaccacagtgcagttggccatcaactacattaatgaaaaccttgcctaa

SEQ ID NO: 5721 - protein, 78 aa, marine gamma proteobacterium HTCC2080
MSSIEDRVKKIVAEQLGVKEDEVRTEASFVDDLGADSLDTVELVMALEEEFETEIPDEEAEKITTVQLAINYINENLA

SEQ ID NO: 5722 - DNA, 237 bp, Pseudomonas putida GB-1
  CDS (1)..(237): transl_table=11
atgagcaccatcgaagaacgcgtcaagaaaatcgtcgccgagcaactgggcgtgaaggaagatgaagtgaccaacgagaagtccttcgtcgatgacctgggtgccgattcgcttgacaccgttgagctggtgatggctctggaagaggaattcgagaccgaaatccctgacgaagaagccgagaaaatcactaccgttcaagccgctatcgactacgtcaacagccacaaggcctaa

SEQ ID NO: 5723 - protein, 78 aa, Pseudomonas putida GB-1
MSTIEERVKKIVAEQLGVKEDEVTNEKSFVDDLGADSLDTVELVMALEEEFETEIPDEEAEKITTVQAAIDYVNSHKA

SEQ ID NO: 5724 - DNA, 234 bp, Bacillus sp. SG-1
  CDS (1)..(234): transl_table=11
atggcagaagtactagatcgcgtaacaaaaattatcgttgaccgccttggagttgacgagtctcaagtaactcttgaagcttctttcaaagaagacttaggggctgattcactagatgtagtagaattggttatggaacttgaagatgagttcgatatggaaatttctgatgatgatgcagaaaaaatcgcaacagtcggtgacgctgtgaactacataaataacaaaggctaa

SEQ ID NO: 5725 - protein, 77 aa, Bacillus sp. SG-1
MAEVLDRVTKIIVDRLGVDESQVTLEASFKEDLGADSLDVVELVMELEDEFDMEISDDDAEKIATVGDAVNYINNKG

SEQ ID NO: 5726 - DNA, 237 bp, Erythrobacter sp. SD-21
  CDS (1)..(237): transl_table=11
atgagcgatactgccgaccgcgtgcagaagattgtcgtcgagcatctcggcgtcgaagcagacaaggtcacccaggaagccagcttcatcgatgacctgggcgcagacagcctcgacatcgtcgagctcgtgatggccttcgaagaagaattcggcgtggaaatccccgacgatgcggctgagaagatcaccaccgtcggcgacgcgactaagtacattgaagagcataagggctaa

SEQ ID NO: 5727 - protein, 78 aa, Erythrobacter sp. SD-21
MSDTADRVQKIVVEHLGVEADKVTQEASFIDDLGADSLDIVELVMAFEEEFGVEIPDDAAEKITTVGDATKYIEEHKG

SEQ ID NO: 5728 - DNA, 234 bp, unidentified eubacterium SCB49
  CDS (1)..(234): transl_table=11
atgtcagacattgcatcaagagtaaaagcaattatcgttgataaattaggtgtagacgagaacgaagttgtaaacgaagctagcttcacaaacgacctaggagcagactcactagatacggtagagcttattatggaatttgaaaaagaatttgatattcaaataccagacgatcaagctgaaaacattgcgaccgtaggtcaagcagtttcttatattgaagagaacaaataa

SEQ ID NO: 5729 - protein, 77 aa, unidentified eubacterium SCB49
MSDIASRVKAIIVDKLGVDENEVVNEASFTNDLGADSLDTVELIMEFEKEFDIQIPDDQAENIATVGQAVSYIEENK

SEQ ID NO: 5730 - DNA, 237 bp, Moritella sp. PE36
  CDS (1)..(237): transl_table=11
atgagtaacttcgaagaacgcgtaaaaaaaatcattatcgaacaactaggtgttaaagaagaagaagttaaaaacgaagcttctttcgttgatgatctaggtgctgattctctagatacagttgaacttgttatggctctagaagaagaattcgatactgatatccctgatgatgaagcagagaaaatcactactgttcaagctgcaatcgacttcgttgtttctagcgctaaataa

SEQ ID NO: 5731 - protein, 78 aa, Moritella sp. PE36
MSNFEERVKKIIIEQLGVKEEEVKNEASFVDDLGADSLDTVELVMALEEEFDTDIPDDEAEKITTVQAAIDFVVSSAK

SEQ ID NO: 5732 - DNA, 264 bp, Opitutaceae bacterium TAV2
  CDS (1)..(264): transl_table=11
atggccgaccaaaaaaccatcgaacaacgcgttaaagagatcatcgttaaccagctcaacgtgaacgaagagcagatcaccccgcaggcatcgtttctggatgatctgggcgctgactccctcgacacagtcgagttgatcatggccttcgaggaagagttcaaggacgagatcaagggcgagatccctgagtctgatgccgaaaagctccgcaccgtcggtcaggttatcgactacatcacgggcaaggctgctcaggtctga

SEQ ID NO: 5733 - protein, 87 aa, Opitutaceae bacterium TAV2
MADQKTIEQRVKEIIVNQLNVNEEQITPQASFLDDLGADSLDTVELIMAFEEEFKDEIKGEIPESDAEKLRTVGQVIDYITGKAAQV

SEQ ID NO: 5734 - DNA, 423 bp, Oryza sativa subsp
  CDS (1)..(423)
atggctgctcccatcaccggcgccacatcgcctctctcccctgcgtctcgggttcaggtgatgtgctcaatgctcaatccaacctcagcttctttctccaggcaaacagcaagcttcccgtccattcggttgcgcccggtcccaagtcacttccaggccttgtcttgttcggccaaacaagacactattgataaggtttgcgaaatagttaagaatcagttagcagtagatgaaggcactgccgtttctggagaaacaaaattcgtggaccttggtgctgattcacttgacacggttgaaattgtgatgggccttgaggaggcatttcagattaccgtggacgaatcgagtgcgcaagtgattcagacagtggaggatgctgctgcgcttatcgacaagcttgtggcagagaaggacgcctaa

SEQ ID NO: 5735 - protein, 140 aa, Oryza sativa subsp
MAAPITGATSPLSPASRVQVMCSMLNPTSASFSRQTASFPSIRLRPVPSHFQALSCSAKQDTIDKVCEIVKNQLAVDEGTAVSGETKFVDLGADSLDTVEIVMGLEEAFQITVDESSAQVIQTVEDAAALIDKLVAEKDA

SEQ ID NO: 5736 - DNA, 270 bp, Oryza sativa subsp
  CDS (1)..(270)
atgaagaggttacttgcatatgccttaatagccttaatagaaaccctgctgtggttcgtggatgttacttgtaccaggctccctgatacactggtgacaccaaatgctcatttccagaaggacctcggacttgatagcttggatacagttgagattgtcatggcctttgaggaagaatttggcttcgagatcccagataacgaggcagagaagattgactccatcaaaacggcagttgacttcgttgcctctcatcctcaagcaaaataa

SEQ ID NO: 5737 - protein, 89 aa, Oryza sativa subsp
MKRLLAYALIALIETLLWFVDVTCTRLPDTLVTPNAHFQKDLGLDSLDTVEIVMAFEEEFGFEIPDNEAEKIDSIKTAVDFVASHPQAK

SEQ ID NO: 5738 - DNA, 312 bp, Oryza sativa subsp
  CDS (1)..(312)
atggcttcctccctcgccggatccgccctctccttcgccacccccgcaaaaaaggagacagtggagaaggtttgtgacattgttaagaagcaactcgctgttcctgagggcactgaagtttctggtgcatccaagttctcagatcttggtgctgattcactggacacggttgagattgtgatgggtctcgaggaggagttccacatcagcgtcgaagagtcaagtgcgcagtcaattgcaacggttgaagatgccgctgcactcatcgacaagcttgttgagcagaaatctgctgaagcgaaatcatcttga

SEQ ID NO: 5739 - protein, 103 aa, Oryza sativa subsp
MASSLAGSALSFATPAKKETVEKVCDIVKKQLAVPEGTEVSGASKFSDLGADSLDTVEIVMGLEEEFHISVEESSAQSIATVEDAAALIDKLVEQKSAEAKSS

SEQ ID NO: 5740 - DNA, 345 bp, Oryza sativa subsp
  CDS (1)..(345)
atggccgccgcgctgtccgccgtcgtctccgccaagctcggctgcccgccggcggcggcgctcggtagctggaaggcgaaggcggagacggtggggaaggtgatgcagatagtgaagcagcagctggcgctgggggaggaggcgaagctggcgcctgagtcgcagttcacggagctgggagcggactcgctggacacggtggagatcgtgatggcgctggaggaggagttcgggatcaccgtggaggaggacaatgcccagagcatcaccaccatccaggacgccgccgacctcatcgacaagctcgtcgccggcggcggcggcaagccccccgccgccgcctga

SEQ ID NO: 5741 - protein, 114 aa, Oryza sativa subsp
MAAALSAVVSAKLGCPPAAALGSWKAKAETVGKVMQIVKQQLALGEEAKLAPESQFTELGADSLDTVEIVMALEEEFGITVEEDNAQSITTIQDAADLIDKLVAGGGGKPPAAA

SEQ ID NO: 5742 - DNA, 447 bp, Oryza sativa subsp
  CDS (1)..(447)
atggccgccgcgctgtccgccgtcgtctccgccaagttcggctgcccgccggcggcggcgctcggtagctggaagggaagcagaatttcaagcagaaacctggtctccatgaagacgatgacagcaaggagaggcctcgtctccctcagatcccctcgcttccgcgtcttctgcgcggcgaaggcggagacggtggggaaggtgatgcagatagtgaagcagcagctggcgctgggggaggaggcgaagctggcgcctgagtcgcagttcacggagctgggagcggactcgctggacacggtggagatcgtgatggcgctggaggaggagttcgggatcaccgtggaggaggacaacgcccagagcatcaccaccatccaggacgccgccgacctcatcgacaagctcgtcgccggcggcggcggcaagccccccgccgccgcctga

SEQ ID NO: 5743 - protein, 148 aa, Oryza sativa subsp
MAAALSAVVSAKFGCPPAAALGSWKGSRISSRNLVSMKTMTARRGLVSLRSPRFRVFCAAKAETVGKVMQIVKQQLALGEEAKLAPESQFTELGADSLDTVEIVMALEEEFGITVEEDNAQSITTIQDAADLIDKLVAGGGGKPPAAA

SEQ ID NO: 5744 - DNA, 450 bp, Oryza sativa subsp
  CDS (1)..(450)
atggcgcactccctcgccgccgccgcctcgtccttctcgccgcccgccgcacgccggcgactgcccggacagcttcttgtcagtgaggtgactaatgtaatttcgagacggagctcagtttccttcaacagccagagaataagttttatgtccattcgttcaaggccaagtcagcttcgttttaagatttgctgctcggctaagaaagagacagtcgacaaggtttgcaacatagttaagacacagctggcactccctgagggaactgctgtcactggtgaatcaaaattctctgaactcggtgctgattcactggatacggttgagattgtgatgggcctcgaggaggaattcaacatcactgtcgacgaaacaagtgcgcaggacatcgcaactgttcaagatgcagcaaacctgatcgagaagctcgtgctggagaaggctgcataa

SEQ ID NO: 5745 - protein, 149 aa, Oryza sativa subsp
MAHSLAAAASSFSPPAARRRLPGQLLVSEVTNVISRRSSVSFNSQRISFMSIRSRPSQLRFKICCSAKKETVDKVCNIVKTQLALPEGTAVTGESKFSELGADSLDTVEIVMGLEEEFNITVDETSAQDIATVQDAANLIEKLVLEKAA

SEQ ID NO: 5746 - DNA, 447 bp, Oryza sativa subsp
  CDS (1)..(447)
atgcaggcggtgagaaccctggtgctgcggcacctgcgtcttgcctgccgccgcgcgccgccctcggctgctgcctgtggtggcgcgaggccggcggtgtaccgcgtcgtcggcgtcgcccccggccaccgggggatggccgcgtcggcgggccaggagggtgggccgccgcgggatttctccgagggcgctgtcagggcgcgcgtcgtcgagctcgtcaagaagttcgacaggatcgacgccgacaaggtaactgagacagcagatttccaaagggacctgagtttggacagcttagatcgggtggaactcgtcatggcctttgagcaagaattctccgttgaaattcctgatgacaaagccgacaagctttcctgctgcgctgatgttgcaaaatacatcatatctgaatcccaatccaacaaaagtaacgctgggagcatttaa

SEQ ID NO: 5747 - protein, 148 aa, Oryza sativa subsp
MQAVRTLVLRHLRLACRRAPPSAAACGGARPAVYRVVGVAPGHRGMAASAGQEGGPPRDFSEGAVRARVVELVKKFDRIDADKVTETADFQRDLSLDSLDRVELVMAFEQEFSVEIPDDKADKLSCCADVAKYIISESQSNKSNAGSI

SEQ ID NO: 5748 - DNA, 234 bp, Shewanella hanedai
  CDS (1)..(234): transl_table=11
atgagcaacatcgaagaacgtgtaaagaaaatcattattgagcaactaggtgttaaagaggaagacgttaagtctgctgcatctttcgttgacgacttgggtgcagattctctggacacggttgagttggttatggctctagaagaagagtttgataccgagatccctgatgaagaagctgaaaagatcactactgttcaagcagcagttgattacgtttcaaagaatcagtaa

SEQ ID NO: 5749 - protein, 77 aa, Shewanella hanedai
MSNIEERVKKIIIEQLGVKEEDVKSAASFVDDLGADSLDTVELVMALEEEFDTEIPDEEAEKITTVQAAVDYVSKNQ

SEQ ID NO: 5750 - DNA, 234 bp, Magnetospirillum gryphiswaldense
  CDS (1)..(234): transl_table=11
atgagcgacgtcgccgagcgggttaagaagattgtcgttgagcatctgggcgttgaagaagccaaggtgaccgagaacgccagcttcatcgatgacctgggcgccgacagcctcgacaccgtcgagctggtcatggcctttgaagaagaattcggctgcgaaatccccgatgacgccgctgaaaagattttgaccgtcaaggacgcgatcgacttcatctcgaaggccgcgtaa

SEQ ID NO: 5751 - protein, 77 aa, Magnetospirillum gryphiswaldense
MSDVAERVKKIVVEHLGVEEAKVTENASFIDDLGADSLDTVELVMAFEEEFGCEIPDDAAEKILTVKDAIDFISKAA

SEQ ID NO: 5752 - DNA, 420 bp, Vitis vinifera
  CDS (1)..(420)
atggcggctttcgcaggaacatttgtctctgtgcagcctcgtcctcgtttgctccgccaaagccttgcaacaaccagtatctccagtctgaaatcactttcgttttctaatcgagggggaaggcttacatcacagcatctgccactgcgcttaagggtttcttgtgctgcgaaaccagagacagtggagaaggtgtgtgccattgtcaagaaacagcttgcattaccagaggactctgcaattactggtgaatcaaaatttgcagcgcttggagccgattctcttgatacggtggagatcgtgatgggactagaggaggaatttggtatcaatgtggaagaggagagtgcccagagcattgcaactgttcaggatgctgcagatcttattgagaagctcattgagaagaaggatgcttag

SEQ ID NO: 5753 - protein, 139 aa, Vitis vinifera
MAAFAGTFVSVQPRPRLLRQSLATTSISSLKSLSFSNRGGRLTSQHLPLRLRVSCAAKPETVEKVCAIVKKQLALPEDSAITGESKFAALGADSLDTVEIVMGLEEEFGINVEEESAQSIATVQDAADLIEKLIEKKDA

SEQ ID NO: 5754 - DNA, 384 bp, Polytomella parva
  CDS (1)..(384)
atggccctctctatgaaatccgctatcgttggcaagaccgcctgccgctctaagagcgctgccgtcaagcccgccgttatcaaggctttcaagcccgtttccatccgtgcccgcactgttatcaccttcgccaccgttgacaaggaggcgattcttgctgacgtcaggggcatcatctccacccagctcggcaaggagctcgagaaggttgctcccgagtccaagttcgctgatctcggtgctgactcccttgacaccgttgagatcatgatggctcttgaggagaagttccagattactctctctgaggaggctggtgccgagaagatcaccactgtccaggaggccgcggatcttatttgcgctcagattgccgccaagtaa

SEQ ID NO: 5755 - protein, 127 aa, Polytomella parva
MALSMKSAIVGKTACRSKSAAVKPAVIKAFKPVSIRARTVITFATVDKEAILADVRGIISTQLGKELEKVAPESKFADLGADSLDTVEIMMALEEKFQITLSEEAGAEKITTVQEAADLICAQIAAK

SEQ ID NO: 5756 - DNA, 426 bp, Fragaria vesca
  CDS (1)..(426)
atggccgccaccacaggagctgcttcttcgatctcactccgctctcgccttcaccagaatcttgcactgtccagggtcaatggtcttaagccagtttcactgtctggtaatggaagaagttctctttctttcgggttacagcagcgttcagtacggcttcagatttgctgcgcggccaaaccagagacagtggacaaggtgtgccagatagttagaaagcaacttgcattaccagatgactcagcagtttctggagagtcaaaattttctgcacttggagctgattctcttgatacggttgagattgtgatgggacttgaagaggaatttggtattagtgtggaagaggagagtgctcagagcattgcaactgttcaggatgctgcggatcttatcgagaagctcattgagaagaccaaggcttag

SEQ ID NO: 5757 - protein, 141 aa, Fragaria vesca
MAATTGAASSISLRSRLHQNLALSRVNGLKPVSLSGNGRSSLSFGLQQRSVRLQICCAAKPETVDKVCQIVRKQLALPDDSAVSGESKFSALGADSLDTVEIVMGLEEEFGISVEEESAQSIATVQDAADLIEKLIEKTKA

SEQ ID NO: 5758 - DNA, 426 bp, Fragaria ananassa
  CDS (1)..(426)
atggccgccaccacaggagctgcttcttcgatctcactccgctctcgccttcaccagaatcttgcatcgtccagggtcaatggtcttaagccagttttactgtctggtaatggaagaagttctctttctttcgggttacagaagcgttcagcacggcttcagatttactgcgcagccaaaccagagacaatggacaaggtgtgccagatagttagaaagcaacttgcattaccagatgactcggcagtttctggagagtcaaaattttctgcacttggagctgattctcttgatacggttgagatcgtgatgggacttgaggaggaatttggttttagcgtggaagaggagagtgctcagagcattgcaaccgttcaggatgctgcggatcttatcgagaagctcattgagaagaacaatgcttag

SEQ ID NO: 5759 - protein, 141 aa, Fragaria ananassa
MAATTGAASSISLRSRLHQNLASSRVNGLKPVLLSGNGRSSLSFGLQKRSARLQIYCAAKPETMDKVCQIVRKQLALPDDSAVSGESKFSALGADSLDTVEIVMGLEEEFGFSVEEESAQSIATVQDAADLIEKLIEKNNA

SEQ ID NO: 5760 - DNA, 351 bp, Ostreococcus tauri
  CDS (1)..(351)
atgcttcgtcgaggggcgcttcgcgcgatcgcgcgcgcgagcgcgacgcgcgcgccgaccgcgagtgaggcgttgacgttgcgggcgtacggcgccgggtttttaaataaggatgatgtcaccgatcgtgtggtgcgcgtggtgaagaattttgcaaaggtggacgcggccaaggtgagcgccacgagcgcgttcgcgagcgatctgggactcgattcgctcgacgtcgtggaggtggtgatggcgatggaggaggagttcgcggtggagattcccgacgctgaggcggataagattcagagcgtgcccgaggcggtggcgtacctcgccgcgaatccgaacgcaaagtga

SEQ ID NO: 5761 - protein, 116 aa, Ostreococcus tauri
MLRRGALRAIARASATRAPTASEALTLRAYGAGFLNKDDVTDRVVRVVKNFAKVDAAKVSATSAFASDLGLDSLDVVEVVMAMEEEFAVEIPDAEADKIQSVPEAVAYLAANPNAK

SEQ ID NO: 5762 - DNA, 279 bp, Brassica oleracea
  CDS (1)..(279)
atgaatttcacatcaggaggaggccaagatcaggttttgagtaaggttattgaactggttaagaagtacgacacgaccagtgcctctaaggttactgaaacggctgactttaagaaagatttgtcgctggacagtttagatagggtggagatagtgatggctattgaagaagagttctccgttgagatccctgatgaaaaagctgataagcttacttgttgtgctgatattgcaagcttcatagtctctgaaactcaatccaaggcgccagagtcctga

SEQ ID NO: 5763 - protein, 92 aa, Brassica oleracea
MNFTSGGGQDQVLSKVIELVKKYDTTSASKVTETADFKKDLSLDSLDRVEIVMAIEEEFSVEIPDEKADKLTCCADIASFIVSETQSKAPES

SEQ ID NO: 5764 - DNA, 411 bp, Gossypium hirsutum
  CDS (1)..(411)
atggcttctattgctggttcatccatctccatgcaaccttgcccctttgctaaaggcagtgtttccgggttgaaattgggttcatttatgaaccagggaagaagcaccctctcatttacgatgcgtccaatgcctgctcgcttgcagatctgctgtgctgccaaacaagagaccgtggataaggtatgtgaagtagtaaagagacaattacctttacacaatgacaaaccaatcaccggtgaatcaacatttcttgatcttggagctgattctcttgatacggttgagattgtgttgggacttgaggaagaattcggaatcacggtggaagaggacaacgcacaatccatcacaactgttcaagatgctgcagaacttcttgagaagctgtgcagtgagaaaagtgcctag

SEQ ID NO: 5765 - protein, 136 aa, Gossypium hirsutum
MASIAGSSISMQPCPFAKGSVSGLKLGSFMNQGRSTLSFTMRPMPARLQICCAAKQETVDKVCEVVKRQLPLHNDKPITGESTFLDLGADSLDTVEIVLGLEEEFGITVEEDNAQSITTVQDAAELLEKLCSEKSA

SEQ ID NO: 5766 - DNA, 387 bp, Solanum tuberosum
  CDS (1)..(387)
atggcggcgaggatcgcattgctaaagcacctgagagtggaagctcgcccagtgcagcttcgaaaccctaggctcatcggaggttcagtcagtcagctttacaaacgtcatttctcggaggaagtaaggggatcgtttctcgacaaggatgaagttagggatcgtgttatcaacgtcgtcaaaaactttcagaaagttgatccttgcaaggttgtcccaaatgctcacttccaaaatgatctcggcttagatagtttagacaccgtggaagttgtgatggcccttgaagaagaatttaggtttgagattccagacaatgaagccgacaagatcaactcaataaatttagcagttgatttcattgcatctcaccctcaggcaaaataa

SEQ ID NO: 5767 - protein, 128 aa, Solanum tuberosum
MAARIALLKHLRVEARPVQLRNPRLIGGSVSQLYKRHFSEEVRGSFLDKDEVRDRVINVVKNFQKVDPCKVVPNAHFQNDLGLDSLDTVEVVMALEEEFRFEIPDNEADKINSINLAVDFIASHPQAK

SEQ ID NO: 5768 - DNA, 414 bp, Coriandrum sativum
  CDS (1)..(414)
atggctgctttcactgcttcttctgtttcattcacccctctttcaatctcccttaaccaaaccaaggggtttgcccgcggttcagtttccattcctgctaaggcgaagtcctttggtgcacttacgctgcgtaatgcaccccttcgcttcagagtgtcatgcgctgctaagcctgagacagcggagaaggtgtgtgagattgtgaagaaacaacttgcactcccccctactactgaagtttcgggagactcaaaatttgcagcacttggagctgattctctcgatacggttgagattgtgatgggactagaggaggagtttgggatcagcgttgaggaagaaagtgctcaggccattgccactgttcaagatgcagcggatctgattgagaagctttgcgagaagaaagagtaa

SEQ ID NO: 5769 - protein, 137 aa, Coriandrum sativum
MAAFTASSVSFTPLSISLNQTKGFARGSVSIPAKAKSFGALTLRNAPLRFRVSCAAKPETAEKVCEIVKKQLALPPTTEVSGDSKFAALGADSLDTVEIVMGLEEEFGISVEEESAQAIATVQDAADLIEKLCEKKE

SEQ ID NO: 5770 - DNA, 366 bp, Zea mays
  CDS (1)..(366)
atggaggccatgtgcgtcaaggcaatcaacacaaattctctagctttctcaccgttgaggaagggcaacacattcctccgcctgcaaccaatgcctatgagatctgtttcctgcgctgccaagaaggatacaacagacaaggtttgtgagattgtgaagaagcagcttgctcttcctgaccatactgaagtttgcggtgaatcgaaattctctgaactcggtgcagattcactggacacggttgagattgtgatgagtctcgaggagcacttcgatattagcgttgaggagtccagcgcacaaacaatcgccacagttgaagacgccgcggacctcatcgacaagcttgttgctggcaaagcgtag

SEQ ID NO: 5771 - protein, 121 aa, Zea mays
MEAMCVKAINTNSLAFSPLRKGNTFLRLQPMPMRSVSCAAKKDTTDKVCEIVKKQLALPDHTEVCGESKFSELGADSLDTVEIVMSLEEHFDISVEESSAQTIATVEDAADLIDKLVAGKA

SEQ ID NO: 5772 - DNA, 234 bp, Vibrio anguillarum
  CDS (1)..(234): transl_table=11
atgagcaacatcgaagaacgcgtaaagaaaatcattgttgaacagctaggtgtagacgaagcagaagtaaagaatgaagcttctttcgtagaagatctaggtgctgattctctagatacagttgagctagtaatggctctagaagaagaattcgatactgaaattccagatgaagaagctgagaagatcactactgttcaagctgcaatcgactacgtaaacagcgctcagtaa

SEQ ID NO: 5773 - protein, 77 aa, Vibrio anguillarum
MSNIEERVKKIIVEQLGVDEAEVKNEASFVEDLGADSLDTVELVMALEEEFDTEIPDEEAEKITTVQAAIDYVNSAQ

SEQ ID NO: 5774 - DNA, 249 bp, Streptomyces glaucescens
  CDS (1)..(249): transl_table=11
atggccgccactcaggaagagatcgtcgccggtctcgccgacatcgtgaacgagatcgccggcatcccggttgaggacgtccagctggacaagtccttcaccgacgacctggacgtcgactcgctgtccatggtcgaggtcgtcgtcgccgccgaggagcgcttcgacgtcaagatccccgacgaggacgtcaagaacctcaagacggtcggcgacgcgaccgagtacatcctcaagcaccaggcctga

SEQ ID NO: 5775 - protein, 82 aa, Streptomyces glaucescens
MAATQEEIVAGLADIVNEIAGIPVEDVQLDKSFTDDLDVDSLSMVEVVVAAEERFDVKIPDEDVKNLKTVGDATEYILKHQA

SEQ ID NO: 5776 - DNA, 282 bp, Thermotoga sp
  CDS (1)..(282): transl_table=11
atggggggacttcacgtggaaaggaaaaagctcatggcgaaatttgtcgaaatcgcgtcagagaaaatggggaaagatcttgaaacggttgatgaagaaaacacatttgaagagcttggattcgattcgatagacgtgatagatcttgtgatgttctttgaagatgaatttgccttgagaatagaagatgaggagatatcgaaaattcgaaaggttaaggatctgatcgatatcgtaatcaagaagctggaggagatcgacgatgaggtatctgagggctga

SEQ ID NO: 5777 - protein, 93 aa, Thermotoga sp
MGGLHVERKKLMAKFVEIASEKMGKDLETVDEENTFEELGFDSIDVIDLVMFFEDEFALRIEDEEISKIRKVKDLIDIVIKKLEEIDDEVSEG

SEQ ID NO: 5778 - DNA, 276 bp, Thermotoga sp
  CDS (1)..(276): transl_table=11
atgtttttggagagggaggaactcttagcaaaattcgtagaaattacttctgaaaagatcggaaaggaaatcgaggtagtcgatgaagagtcttctttttcagagcttggctttgattcccttgatgtgatagatcttgtgatgtttttcgaagatgaattcgccataaggatagaagacgaagattttgggaaaattcgaaaagtcagagacttgatagatcttgtggcaaagaagctggaggaggttgatgatgagatatctgagagcggatga

SEQ ID NO: 5779 - protein, 91 aa, Thermotoga sp
MFLEREELLAKFVEITSEKIGKEIEVVDEESSFSELGFDSLDVIDLVMFFEDEFAIRIEDEDFGKIRKVRDLIDLVAKKLEEVDDEISESG

SEQ ID NO: 5780 - DNA, 297 bp, Thermotoga sp
  CDS (1)..(297): transl_table=11
gtggtaggattcttaggggggatgatcttggaaaaagaaaaactttttgcaaagcttgtggaaatagtttcagagaagatgggaaaagaactggagacgatcgatgaaaatgcttcttttgaagagcttggttttgattcactcgatgtaatagaccttgtcatgttcttcgaagatgagttcgcaataaggatagaggatgaaaaacttgaaaaccttcgcagagtaagagacctgatagatgttgtgagcagaaaactagaggaggtcgacgatgaggtatctgagggcggatga

SEQ ID NO: 5781 - protein, 98 aa, Thermotoga sp
MVGFLGGMILEKEKLFAKLVEIVSEKMGKELETIDENASFEELGFDSLDVIDLVMFFEDEFAIRIEDEKLENLRRVRDLIDVVSRKLEEVDDEVSEGG

SEQ ID NO: 5782 - DNA, 297 bp, Thermotoga sp
  CDS (1)..(297): transl_table=11
gtggtaggattcttaggggggatgaccttggaaagagaaaagcttcttgcaaagtttgtggaaatagtttcagagaagatgggaaagaatctggagacgatcgatgaagatgtctcttttggagaactcggctttgattcgctagatgtgatagatcttgtcatgttcttcgaagacgagttcgcaataaggatagaggacgaagagctcgaaagtcttcgcagggtaaaagatctgatagatatcgtgagcagaaaactggaggaggtcaacgatgaggtatctgagggcggatga

SEQ ID NO: 5783 - protein, 98 aa, Thermotoga sp
MVGFLGGMTLEREKLLAKFVEIVSEKMGKNLETIDEDVSFGELGFDSLDVIDLVMFFEDEFAIRIEDEELESLRRVKDLIDIVSRKLEEVNDEVSEGG

SEQ ID NO: 5784 - DNA, 237 bp, Helicobacter pylori
  CDS (1)..(237): transl_table=11
atggctttatttgaagatattcaggcagttattgctgagcagttgaatgtggatgcggcgcaagttacgccagaggcggaatttgtgaaagatttgggtgcggactctttagatgtcgtggaattaatcatggcgttagaagaaaagtttggcattgagattcctgatgagcaagcggaaaaaatcgtcaatgtgggcgatgtggtgaagtatattgaggacaataaactagcttaa

SEQ ID NO: 5785 - protein, 78 aa, Helicobacter pylori
MALFEDIQAVIAEQLNVDAAQVTPEAEFVKDLGADSLDVVELIMALEEKFGIEIPDEQAEKIVNVGDVVKYIEDNKLA

SEQ ID NO: 5786 - DNA, 249 bp, Streptomyces echinatus
  CDS (1)..(249): transl_table=11
atggccgccactcaggaagagatcgtcgccggtctcgccgaaatcgtgaacgagatcgccggcatcccggttgaggacgtccagctggacaagtccttcaccgacgacctggacgtcgactcgctgtccatggtcgaggtcgtcgtcgccgctgaagagcgcttcgacgtgaagatcccggacgacgacgtcaagaacctcaagaccgtcggcgacgcgaccgactacatcctcaagcaccaggcctga

SEQ ID NO: 5787 - protein, 82 aa, Streptomyces echinatus
MAATQEEIVAGLAEIVNEIAGIPVEDVQLDKSFTDDLDVDSLSMVEVVVAAEERFDVKIPDDDVKNLKTVGDATDYILKHQA

SEQ ID NO: 5788 - DNA, 390 bp, Helicosporidium sp
  CDS (1)..(390)
atggcgttcctgcagagagggtttgccgggctgcgccagggagtcctggccaaggtcaggctcgctcctggctcttctgtcttccagggcctggctgcctctcagtgccaggccgtgcgcggcttcgccgagtcctcctacctcagcaagtctgatgtcacggctcgcgttctcgacattgtcaagaactttgagaaggtggacgctggaaaggtcaccgagagcgccgcctttcaaaaggacctgggtctggactctctggacacggtggagctggtgatggcgttggaggaggagtttgcgatcgagatccccgatgccgaagccgacaagattctgtctgtttccgaggcggtctcgtacatcacctccaaccccctggccaagtga

SEQ ID NO: 5789 - protein, 129 aa, Helicosporidium sp
MAFLQRGFAGLRQGVLAKVRLAPGSSVFQGLAASQCQAVRGFAESSYLSKSDVTARVLDIVKNFEKVDAGKVTESAAFQKDLGLDSLDTVELVMALEEEFAIEIPDAEADKILSVSEAVSYITSNPLAK

SEQ ID NO: 5790 - DNA, 387 bp, Helicosporidium sp
  CDS (1)..(387)
atgtctctgctcgcgctctcagcaagcaagcccgctgcggctcctcgggctctggcgatgaggccgcagatgcatcgtcacatttctggattacgtgttgttggctcgcggagtcttgcgccgcggcctattctttgcagagcagtgaaagacaagactttggttttggatgacgtgcgctctattattgccgatcagcttggcaaagatgtggagcaggttcaccccacaagcaagtttgtggacttgaacgctgattctttggacactgtggaaattatgttggcgctggaggagaagtttgatgtcagcctcgacgatgaaaacgcagaaaaactctccactgtgcaggatgctgctgaccttatcgtctcccagctgaagtga

SEQ ID NO: 5791 - protein, 128 aa, Helicosporidium sp
MSLLALSASKPAAAPRALAMRPQMHRHISGLRVVGSRSLAPRPILCRAVKDKTLVLDDVRSIIADQLGKDVEQVHPTSKFVDLNADSLDTVEIMLALEEKFDVSLDDENAEKLSTVQDAADLIVSQLK

SEQ ID NO: 5792 - DNA, 402 bp, Solanum lycopersicum
  CDS (1)..(402)
atggctagtctttcagctacttgtctcagatttggctgttctgtcaacacatctcagataaacggaggcactgtgaagttggtttcagtgggttggggaaggagtagtgctggtttcccttctctaagaacatcccgccttcgtgttgcagctgcaaaggcagagacaattgataaggtaataagcatagtgagaaaacaactagctttaccagcagacactaaggtcagccctgaaagtactttcactaaggacctcggagccgactctctggacactgtagaaattgtgatggccctagaagaagagtttgggattgcagtagaagaagagaactctgagaatattgtaacagttcaagatgctgctgacttgattgaaaaacttgttgagaagaagtag

SEQ ID NO: 5793 - protein, 133 aa, Solanum lycopersicum
MASLSATCLRFGCSVNTSQINGGTVKLVSVGWGRSSAGFPSLRTSRLRVAAAKAETIDKVISIVRKQLALPADTKVSPESTFTKDLGADSLDTVEIVMALEEEFGIAVEEENSENIVTVQDAADLIEKLVEKK

SEQ ID NO: 5794 - DNA, 237 bp, Pseudomonas syringae
  CDS (1)..(237): transl_table=11
atgagcaccatcgaagagcgcgtcaagaaaatcgttgcagagcaacttggcgtcaaacaagaagaggttgtcaacactgcttctttcgttgaggacctgggcgctgactccctggacaccgttgagctggtaatggctctggaagaggaattcgagaccgaaattccggacgaagaagcggaaaagatcactaccgttcaagcagcaatcgactacgtcactagccatcaggcttaa

SEQ ID NO: 5795 - protein, 78 aa, Pseudomonas syringae
MSTIEERVKKIVAEQLGVKQEEVVNTASFVEDLGADSLDTVELVMALEEEFETEIPDEEAEKITTVQAAIDYVTSHQA

SEQ ID NO: 5796 - DNA, 237 bp, Brachyspira pilosicoli
  CDS (1)..(237): transl_table=11
atggcattaatcgatgaaattaaggatgttgttgctaatcaattaaacatttcagacaaaagtaaaatcacagatacagcttctttcgtagatgatttgaacgctgattcacttgatttagtagaacttattatggaattagaaaaacgttatgatatcaaaattcctcaagaagaacaagaaaaaattaaaaatgtagctgatgctgctaaatatattgaagagcataagaagtaa

SEQ ID NO: 5797 - protein, 78 aa, Brachyspira pilosicoli
MALIDEIKDVVANQLNISDKSKITDTASFVDDLNADSLDLVELIMELEKRYDIKIPQEEQEKIKNVADAAKYIEEHKK

SEQ ID NO: 5798 - DNA, 258 bp, Pseudomonas aurantiaca
  CDS (1)..(258): transl_table=11
atgactatggaaacgctcgaacaacgtgtgaaaagagtggtggcgaccgaactggccgtcgaactggcgcagatcggcaaccaggactcgttcgtcgagaacctgggcgccgactcgctggcccgggtggaactggtgtcggccctggaggccgagttcgacctgaccatcccggacgatgaagccgatggcctgcagaccgtgcagcaggtgatcgactacgtcctgcaagccaatgagcaagccgtcccggcctga

SEQ ID NO: 5799 - protein, 85 aa, Pseudomonas aurantiaca
MTMETLEQRVKRVVATELAVELAQIGNQDSFVENLGADSLARVELVSALEAEFDLTIPDDEADGLQTVQQVIDYVLQANEQAVPA

SEQ ID NO: 5800 - DNA, 381 bp, Arabidopsis thaliana
  CDS (1)..(381)
atggcggcgagaggtgctttgcttcgatacctgagagtcaacgtcaatccaacaattcaaaaccctagagaatgtgtacttcctttctccattctccttcgtcgtttctccgaggaagttagaggctctttccttgacaaatctgaggtcacagatcgagttctctctgtcgtcaaaaacttccaaaaagttgatccttctaaggtaacaccaaaagccaatttccaaaatgatctagggttggacagtttggacagtgtggaagttgtgatggcattggaggaggaatttgggtttgagatccctgataatgaagcagacaagatccagtccatcgatctagccgttgactttattgcttctcatcctcaggctaagtga

SEQ ID NO: 5801 - protein, 126 aa, Arabidopsis thaliana
MAARGALLRYLRVNVNPTIQNPRECVLPFSILLRRFSEEVRGSFLDKSEVTDRVLSVVKNFQKVDPSKVTPKANFQNDLGLDSLDSVEVVMALEEEFGFEIPDNEADKIQSIDLAVDFIASHPQAK

SEQ ID NO: 5802 - DNA, 405 bp, Brassica campestris
  CDS (1)..(405)
atggcgaccactttcagcgcttcagtctccatgcaagctacctctctggtcacaacaacgaggattagtttccaaaagccagttttggtttcaaaccatggaaggactaatctctccttcaacctaagccgcactcgcctctcaatctcttgcgcggccaaacaagagacagtagagaaagtgtctgagatagtcaagaagcaactctcactcaaagacgatcaacaagtcgttgcagaaaccaaatttgtcgatcttggagcagattctctcgacacggttgagatagtgatgggtttagaggaagagtttgggatccaaatggcagaagagaaagcacagaagattgcaacagttgagcaagctgctgaactcattgaagagctcatgcaagccaaaaagtaa

SEQ ID NO: 5803 - protein, 134 aa, Brassica campestris
MATTFSASVSMQATSLVTTTRISFQKPVLVSNHGRTNLSFNLSRTRLSISCAAKQETVEKVSEIVKKQLSLKDDQQVVAETKFVDLGADSLDTVEIVMGLEEEFGIQMAEEKAQKIATVEQAAELIEELMQAKK

SEQ ID NO: 5804 - DNA, 369 bp, Arabidopsis thaliana
  CDS (1)..(369)
atggcactgagaaatgcaattcttcgtcacctgagggttccggtgcaaaccctaggattgaatcagtctaaaattgggttccttggtacgatccggtcattttcttcgcacgatgatcatcttagcagagaagctgtcgtcgatagagtactcgatgttgtcaagagcttccccaaagtcgattcctctaaggtgactcctgaggttcatttccaaaacgatttgggattagatagtttggacacagtggagatagtgatggctattgaagaggaattcaagctggaaattccagacaaagaagctgacaagatcgattcttgctctctcgccattgaatacgtttacaatcatccaatgtctagctaa

SEQ ID NO: 5805 - protein, 122 aa, Arabidopsis thaliana
MALRNAILRHLRVPVQTLGLNQSKIGFLGTIRSFSSHDDHLSREAVVDRVLDVVKSFPKVDSSKVTPEVHFQNDLGLDSLDTVEIVMAIEEEFKLEIPDKEADKIDSCSLAIEYVYNHPMSS

SEQ ID NO: 5806 - DNA, 405 bp, Olea europaea
  CDS (1)..(405)
atggcttccattactgcttcctctgtttccttttctgcttcttgccctctgaagcaaaaccaggcctcaaatttgaagaaggtttcgctttctttcagtgggaagagcttcccatctcttaggttgcagccttcacgtttccgcattgcctgtgcagccaaaccagagacagtggaaaaagtgtgtgaaattgtgaggaagcaacttgctctccccgccgattctgctgtaactggagagtccaagtttgcatcacttggtgctgattcccttgacacggttgagattgtcatgggactcgaggaagagtttgggatcagtgtggaagaagaaagtgcccagaccatcaccaccgttcaagaagcagctgatatgatcgagaacctcaaggctaagaaggcttga

SEQ ID NO: 5807 - protein, 134 aa, Olea europaea
MASITASSVSFSASCPLKQNQASNLKKVSLSFSGKSFPSLRLQPSRFRIACAAKPETVEKVCEIVRKQLALPADSAVTGESKFASLGADSLDTVEIVMGLEEEFGISVEEESAQTITTVQEAADMIENLKAKKA

SEQ ID NO: 5808 - DNA, 357 bp, Candida rugosa
  CDS (1)..(357): transl_table=12
atgctctctcggtttgccagtctccgcagcgttgccggccggttggcggtggcgcgcccggcggtccgcgtgatgacgcccttccgcagctacgccgtggacgcccacgccaaggaggcggcggcggagcgcgtgtttgacattctcgagagctacgccaagatcaccgacccgagcaagatcacgctcgacgcgagcttcacgaccgacctccacctcgacctgttggacgtggcggaggtggtgatgcagttggaggaggagtttctgatcgagattcccgacgaggagatcgacgagatcaccactgtgggcggcgccgtcgactacgtcttgcgccagcccgatgcggtgtag

SEQ ID NO: 5809 - protein, 118 aa, Candida rugosa
MLSRFASLRSVAGRLAVARPAVRVMTPFRSYAVDAHAKEAAAERVFDILESYAKITDPSKITLDASFTTDLHLDSLDVAEVVMQLEEEFSIEIPDEEIDEITTVGGAVDYVLRQPDAV

SEQ ID NO: 5810 - DNA, 414 bp, Coriandrum sativum
  CDS (1)..(414)
atggctgctttcactgcttcttctgtttcattcacccctctttcaatctcccttaaccaaaccaaggggtttgctcgcggttcagtttccattcctgctaaggcgaagtcctttggtgcacttaccctgcgtaatgcaccccttcgcttcagagtgtcatgcgctgctaagcctgagacagtggagaaggtgtgtgagattgtgaagaaacaacttgcactcccccctactactgaagtttcaggagactcaaaatttgcagcacttggagctgattctctcgatacggttgagattgtgatgggactagaggaggagtttgggatcagcgttgaggaagaaagtgctcaggccattgccactgttcaagatgcagcggatctgattgagaagctttgcgagaagaaagagtaa

SEQ ID NO: 5811 - protein, 137 aa, Coriandrum sativum
MAAFTASSVSFTPLSISLNQTKGFARGSVSIPAKAKSFGALTLRNAPLRFRVSCAAKPETVEKVCEIVKKQLALPPTTEVSGDSKFAALGADSLDTVEIVMGLEEEFGISVEEESAQAIATVQDAADLIEKLCEKKE

SEQ ID NO: 5812 - DNA, 399 bp, Capsicum chinense
  CDS (1)..(399)
atggcttctattactgcatcttccttcgctatctcttccttcaagcacaaccagatatgtttgaagagctcctcccttccgatcaagggaataagctttccttccctcagaatgaagccagctactcgccgcctcagcattaactgtgcggctaaaccagagacagttgacaaagtgtgtgcaattgtgaagaagcaactggctcttcccggtgattctgtagtcaacggagagtcaaaatttgcagcacttggtgctgattctcttgacacggttgagattgtcatgggacttgaggaagcatttggaatcaccgtggaagaagagaatgcacagactattgcaacagttcaagatgctgctgacttgattgaggatctcgttgccaagaaatgttga

SEQ ID NO: 5813 - protein, 132 aa, Capsicum chinense
MASITASSFAISSFKHNQICLKSSSLPIKGISFPSLRMKPATRRLSINCAAKPETVDKVCAIVKKQLALPGDSVVNGESKFAALGADSLDTVEIVMGLEEAFGITVEEENAQTIATVQDAADLIEDLVAKKC

SEQ ID NO: 5814 - DNA, 414 bp, Arabidopsis thaliana
  CDS (1)..(414)
atggcgactcaattcagcgcttctgtctcattgcaaacttcttgtctggcaacaacaaggattagtttccaaaagccagctttgatttccaaccatggaaagactaatctatccttcaacctccgccgttcaatcccatctcgccgcctctctgtttcttgcgcggcaaaacaagagacgatagagaaagtgtctgctatagttaagaagcaactatcacttacaccggataaaaaagtcgttgcagaaaccaaatttgctgaccttggagcagattctctcgacacggttgagatagtaatgggtttagaggaagagtttaacatccaaatggccgaagagaaagcacagaagattgccacagttgagcaagctgctgaactcattgaagagctcatcaacgagaagaagtaa

SEQ ID NO: 5815 - protein, 137 aa, Arabidopsis thaliana
MATQFSASVSLQTSCLATTRISFQKPALISNHGKTNLSFNLRRSIPSRRLSVSCAAKQETIEKVSAIVKKQLSLTPDKKVVAETKFADLGADSLDTVEIVMGLEEEFNIQMAEEKAQKIATVEQAAELIEELINEKK

SEQ ID NO: 5816 - DNA, 405 bp, Brassica napus
  CDS (1)..(405)
atgtcgaccactttctgctcttccgtctccatgcaagccacttctctggcagcaacaacgaggattagtttccagaagccagctttggtttcaaggactaatctctccttcaatctaagccgttcaatccccactcgcctctcagtctcctgcgcggccaaaccagagacagttgagaaagtgtctaagatcgtcaagaagcagctatcactcaaagacgatcaaaacgtcgttgcggaaaccaaatttgctgatcttggagcagattctctcgacactgttgagatagtgatgggtttagaggaagagtttcatatcgaaatggctgaagaaaaagcacagaagatcacaacggtggaggaagctgctgagctcattgatgagctcgtgcaagccaagaagtga

SEQ ID NO: 5817 - protein, 134 aa, Brassica napus
MSTTFCSSVSMQATSLAATTRISFQKPALVSRTNLSFNLSRSIPTRLSVSCAAKPETVEKVSKIVKKQLSLKDDQNVVAETKFADLGADSLDTVEIVMGLEEEFHIEMAEEKAQKITTVEEAAELIDELVQAKK

SEQ ID NO: 5818 - DNA, 411 bp, Casuarina glauca
  CDS (1)..(411)
atggcttctgtcactggtacttcgatttcaatggcctccttcaaggcgagcctggcacctagcagggtctctaatctgagatcagtttcccttcccattaaagggaaaagcttcgcaccacttaggatgcggtcagcacgctttgttgtttgctgtgcggccaagccagagacagtggaaaaggtgtgtgctatagtgaagaagcagctggctctaccagatgattctgcagtcaccggagagtcaaagtttgccacccttggagctgattctcttgacacggttgagattgtgatgggacttgaggaggaattcggaatcaacgtggaggaagagagcgcccagagcattgccaccgttcaagacgcggcggacctgattgagaagctcattgagaagaagagtggttaa

SEQ ID NO: 5819 - protein, 136 aa, Casuarina glauca
MASVTGTSISMASFKASLAPSRVSNLRSVSLPIKGKSFAPLRMRSARFVVCCAAKPETVEKVCAIVKKQLALPDDSAVTGESKFATLGADSLDTVEIVMGLEEEFGINVEEESAQSIATVQDAADLIEKLIEKKSG

SEQ ID NO: 5820 - DNA, 423 bp, Cuphea lanceolata
  CDS (1)..(423)
atggcttccgcagctgccggtgcttccatctgcatcaagtccgcctccttctcgcctctggcaccgggtagaatttcaagcttgagatctgtctcattacctgtgagtcggaaaagctttccctctctcaagtcatccaagagttcgttcgctctccgggtcagctgtcaggctaaaccagaaaccgtggcgaaggtctgcggcatagtgaagaaacaattggccttaccagacgactctgaggttaatggactatccaagtttagtgctctcggagcagattctctcgacacggtggagattgtcatgggactagaggaggaatttgggatcagcgtggaggaagaaagtgcacagagcatccagaccgtccaagatgctgccgatctcatcgagaagctcatggagaagaagggccattga

SEQ ID NO: 5821 - protein, 140 aa, Cuphea lanceolata
MASAAAGASICIKSASFSPLAPGRISSLRSVSLPVSRKSFPSLKSSKSSFALRVSCQAKPETVAKVCGIVKKQLALPDDSEVNGLSKFSALGADSLDTVEIVMGLEEEFGISVEEESAQSIQTVQDAADLIEKLMEKKGH

SEQ ID NO: 5822 - DNA, 450 bp, Hordeum vulgare
  CDS (1)..(450)
atggcgcactgcctcgccgccgtttcctccttctcgccgtccgccgtccgccggcggctgtccagccaggtggctaatgtagtttcgagccggagctcagtttctttccatagccggcagatgagctttgtatccatcagttcaagaccgagttcgcttcggtttaagatttgttgtgcggccatgggagaggcacaggccaagaaagagacagtcgacaaggtttgtatgatagtcaagaagcagctggcagtccctgatggtacacctgtcacagcggagtcgaaattctccgaacttggtgccgactcactagacacggttgagattgtgatgggcctcgaggaagagttcaacatcactgttgatgaaacaagcgcgcaggacattgcaaccgtgcaggatgcagcgaaccttatcgagaagcttgtgacagagaagaccgcataa

SEQ ID NO: 5823 - protein, 149 aa, Hordeum vulgare
MAHCLAAVSSFSPSAVRRRLSSQVANVVSSRSSVSFHSRQMSFVSISSRPSSLRFKICCAAMGEAQAKKETVDKVCMIVKKQLAVPDGTPVTAESKFSELGADSLDTVEIVMGLEEEFNITVDETSAQDIATVQDAANLIEKLVTEKTA

SEQ ID NO: 5824 - DNA, 237 bp, Pseudomonas aeruginosa
  CDS (1)..(237): transl_table=11
atgagcaccatcgaagaacgcgttaagaagatcgtcgctgaacaactcggcgtgaaggaagaagaagtcaccaacagcgcttccttcgtcgaagacctgggcgccgactcccttgacaccgtcgagctggtgatggctctggaagaggaattcgagaccgaaatccctgacgagaaagctgaaaagatcaccaccgttcaggaagccatcgactacatcgttgctcaccagcaataa

SEQ ID NO: 5825 - protein, 78 aa, Pseudomonas aeruginosa
MSTIEERVKKIVAEQLGVKEEEVTNSASFVEDLGADSLDTVELVMALEEEFETEIPDEKAEKITTVQEAIDYIVAHQQ

SEQ ID NO: 5826 - DNA, 240 bp, Ralstonia solanacearum
  CDS (1)..(240): transl_table=11
atggacaacatcgaacaacgcgtcaagaagatcgtcgccgagcaactgggcgtggccgaagctgacatcaagaacgaatcgtcgttcgtcaacgatctcggcgctgactcgctcgacacggttgagctggtgatggcgttggaagatgagttcggtatggaaattccggacgaagaagctgagaagatcaccacggtgcaacaagccatcgattacgctcgcgccaacgtcaaggcgtaa

SEQ ID NO: 5827 - protein, 79 aa, Ralstonia solanacearum
MDNIEQRVKKIVAEQLGVAEADIKNESSFVNDLGADSLDTVELVMALEDEFGMEIPDEEAEKITTVQQAIDYARANVKA

SEQ ID NO: 5828 - DNA, 237 bp, Shigella flexneri
  CDS (1)..(237): transl_table=11
atgagcactatcgaagaacgcgttaagaaaattatcggcgaacagctgggcgttaagcaggaagaagttaccaacaatgcttctttcgttgaagacctgggcgcggattctcttgacaccgttgagctggtaatggctctggaagaagagtttgatactgagattccggacgaagaagctgagaaaatcaccaccgttcaggctgccattgattacatcaacggccaccaggcgtaa

SEQ ID NO: 5829 - protein, 78 aa, Shigella flexneri
MSTIEERVKKIIGEQLGVKQEEVTNNASFVEDLGADSLDTVELVMALEEEFDTEIPDEEAEKITTVQAAIDYINGHQA

SEQ ID NO: 5830 - DNA, 411 bp, Arabidopsis thaliana
  CDS (1)..(411)
atggcttccattgctgcttctgcttctatttcccttcaagctcgtcctcgccaactggcgatcgcggctagtcaagttaaaagctttagcaatggaagaagaagcagtctttcttttaatctccgccagcttcctacccgcttgactgtttcctgcgctgcaaaacctgagacagtggacaaggtgtgtgcagttgtcagaaagcaactctcacttaaagaggctgacgaaattactgctgccaccaaatttgctgcacttggtgctgattcccttgatacggtggagattgtgatgggactagaggaagagttcgggattgaaatggcggaggagaaagcacagtcaatcgccacagttgagcaagcagctgcgctcattgaggagctcttgtttgaaaaggccaagtag

SEQ ID NO: 5831 - protein, 136 aa, Arabidopsis thaliana
MASIAASASISLQARPRQLAIAASQVKSFSNGRRSSLSFNLRQLPTRLTVSCAAKPETVDKVCAVVRKQLSLKEADEITAATKFAALGADSLDTVEIVMGLEEEFGIEMAEEKAQSIATVEQAAALIEELLFEKAK

SEQ ID NO: 5832 - DNA, 405 bp, Brassica napus
  CDS (1)..(405)
atgtcgaccactttctgctcctctgtctccatgcaagccacttctctggcagcaacaacgaggattagtttccagaagccaggtttggtttcaaggactaatctctccttcaatctccgccgttcaatccccactcgcctctcagtctcctgcgcggccaaaccagagacggtagagaaagtgtctaagatagttaagaagcagctatcactcaaagacgaccaaaaggtcgttgcggagaccaagtttgctgatcttggagcagattctctcgacactgttgagattgtgatgggtttggaggaagagtttgatatcgaaatggctgaagagaaagcgcagaagattgcaaccgtggaggaagctgctgaactcattgaagagctcgtgcaagccaagaagtaa

SEQ ID NO: 5833 - protein, 134 aa, Brassica napus
MSTTFCSSVSMQATSLAATTRISFQKPGLVSRTNLSFNLRRSIPTRLSVSCAAKPETVEKVSKIVKKQLSLKDDQKVVAETKFADLGADSLDTVEIVMGLEEEFDIEMAEEKAQKIATVEEAAELIEELVQAKK

SEQ ID NO: 5834 - DNA, 414 bp, Cuphea lanceolata
  CDS (1)..(414)
atggcgtccgcagctcccgcttcttcgatctgcatcaaatccgcctcctgctcggctctggcgccgggtagaatctcgagcttgagatcagtctcactacctgtcagtcggaaaagcttcttctctcgcaggggttcgttctccctccgagtcaactgtcaggctaaaccagaaaccgtgacaaaggtctgcaatatagtgaagaagcagttggccttaccagacgactctgatgtttccggagtgtccaagttcagtgctcttggagcagattctttggacacggtggagattgtcatgggactagaggaggagtttgggatcagtgtggaggaagaaagtgcacagagcatccagaccgtccaagatgccgccgatctcatcgagaagctcatggagaagaagggccattga

SEQ ID NO: 5835 - protein, 137 aa, Cuphea lanceolata
MASAAPASSICIKSASCSALAPGRISSLRSVSLPVSRKSFFSRRGSFSLRVNCQAKPETVTKVCNIVKKQLALPDDSDVSGVSKFSALGADSLDTVEIVMGLEEEFGISVEEESAQSIQTVQDAADLIEKLMEKKGH

SEQ ID NO: 5836 - DNA, 390 bp, Hordeum vulgare
  CDS (1)..(390)
atggcctccgccgcggcgtccgccgtctccttcgccaggcccgtcaaggcaatctgtgtcaactcggtctccttctctgctctaaggaaagacaatgtatccttccgtttgcagccagttccccagagattttctgtttgctgtgcagccaaaaaggagacagtagagaaggtttgtgatattgtgaagagccagcttgcgctgtctgatgacactgaagtttctggctcctccacatttgctgatcttggtgccgattctttggatacggttgagattgttatgggcctcgaggaggcttttggaatcagcgtggaggaatcgagcgctcagaccatcgcaacggtggaagacgccgccaacctgatcgacagccttgttggaaagtaa

SEQ ID NO: 5837 - protein, 129 aa, Hordeum vulgare
MASAAASAVSFARPVKAICVNSVSFSALRKDNVSFRLQPVPQRFSVCCAAKKETVEKVCDIVKSQLALSDDTEVSGSSTFADLGADSLDTVEIVMGLEEAFGISVEESSAQTIATVEDAANLIDSLVGK

SEQ ID NO: 5838 - DNA, 393 bp, Spinacia oleracea
  CDS (1)..(393)
atggcttccatcactggatcatccgtctccttcaagtgcgcccctcttcagtcctcgtttaactcaaagaactatgcgctgaagtcatcagtgacattctggaggagaactccagtgatgccacgtggcctaagtgtctcttgcgctgccaagcccgagatggtcacaaaggtcagtgatatagtgaaaagccagcttgctttggcagaggatgctaaagttaccggtgaaacaaaattttcagaaattggagctgattctcttgacacagttgagattgtgatgaagcttgaggaggaatttggggttaccgttgaggaagagaatgctcaaaccattacaactattcaagaagcagcagacatgattgaggcacttcaacaaaacaagtag

SEQ ID NO: 5839 - protein, 130 aa, Spinacia oleracea
MASITGSSVSFKCAPLQSSFNSKNYALKSSVTFWRRTPVMPRGLSVSCAAKPEMVTKVSDIVKSQLALAEDAKVTGETKFSEIGADSLDTVEIVMKLEEEFGVTVEEENAQTITTIQEAADMIEALQQNK

SEQ ID NO: 5840 - DNA, 405 bp, Brassica napus
  CDS (1)..(405)
atggcgaccactttcagcgcctctgtctccaccctagccacttctctggcgacaccaacaaggattagtttccagaagccagctttggtttcaaggaccaatctctccttcaacttacgccgttcaatccccactcgcctctcagtttcttgcgcggccaaaccagagacgatagagaaagtgtctaagattgtcaagaagcaactctcactcaaagacgaccaaaaggtcgttgcggagaccaagtttgctgatcttggagcagattctctcgacacggttgagatagtgatgggtttagaggaagagtttgatatcgaaatggcggaagagaaagcacagaagatcgcaactgtggaggaagctgctgaactcattgaagagctcgtcctactgaagaagtag

SEQ ID NO: 5841 - protein, 134 aa, Brassica napus
MATTFSASVSTLATSLATPTRISFQKPALVSRTNLSFNLRRSIPTRLSVSCAAKPETIEKVSKIVKKQLSLKDDQKVVAETKFADLGADSLDTVEIVMGLEEEFDIEMAEEKAQKIATVEEAAELIEELVLLKK

SEQ ID NO: 5842 - DNA, 432 bp, Cuphea lanceolata
  CDS (1)..(432)
atggctaccgccgccgccggatcttccctcatctgcatcaagtccgcttcctgctcccttaaccgggctcaggtaccaagtggactttcaagcctgagatctgtctcgctacctatcagtggcaaaatctttccctctctcaggtcatccaggggacctttgagcttccgcgtctgctgtcaggctaagcaagaaaccgtaacgagggtctgcgaaatagtcaagaagcagttggccttgccagaggactctgaggttaacggactgtcaaagttctctgctctcggtgcagactctttggacacggtggagattgtcatgggactagaggaagagtttgggatcagtgtggaggaagagagtgctcagagcatccaaaccgtccaagacgctgcagatctcatcgagaagctcgttgggaataagaaataa

SEQ ID NO: 5843 - protein, 143 aa, Cuphea lanceolata
MATAAAGSSLICIKSASCSLNRAQVPSGLSSLRSVSLPISGKIFPSLRSSRGPLSFRVCCQAKQETVTRVCEIVKKQLALPEDSEVNGLSKFSALGADSLDTVEIVMGLEEEFGISVEEESAQSIQTVQDAADLIEKLVGNKK

SEQ ID NO: 5844 - DNA, 399 bp, Hordeum vulgare
  CDS (1)..(399)
atggcttccatcgccggatctgccgtctccttcgccaagcccgtcaaggcaatcaacacgaattcactctctttctccggtgcaaggaggggcaatgcatttcttcgcctgcagccagtgccaatgagatttgctgtttgctgctcagcaaagcaggatacagtggagaaggtttgtgaaattgttaagaagcagcttgctgttcctgaaggcactgaagtttgtggtaccaccaagttctctgaccttggagctgattcactggacacggttgagattgtgatgggccttgaggaggagttccagatcagcgtggaggagacgagcgcgcaagcaattgcgacagttgaagatgcggccacgctcatcgacaagcttgtctctgcgaagtcatcctga

SEQ ID NO: 5845 - protein, 132 aa, Hordeum vulgare
MASIAGSAVSFAKPVKAINTNSLSFSGARRGNAFLRLQPVPMRFAVCCSAKQDTVEKVCEIVKKQLAVPEGTEVCGTTKFSDLGADSLDTVEIVMGLEEEFQISVEETSAQAIATVEDAATLIDKLVSAKSS

SEQ ID NO: 5846 - DNA, 222 bp, Mycoplasma pulmonis
  CDS (1)..(222): transl_table=4
atggccatcaaagaatgaataattacacaactttcaaaactaactaaaaacaaaattactgaagagagtttattttcagaaatcggaattgactcacttgatttggtagaacatgtctctgatttagagcaacactttgacattgaaattagtgatgaagagcttttaaatattaaaaaagttaacgatattattgttttaattgaacaaaaaagtaaataa

SEQ ID NO: 5847 - protein, 73 aa, Mycoplasma pulmonis
MAIKEWIITQLSKLTKNKITEESLFSEIGIDSLDLVEHVSDLEQHFDIEISDEELLNIKKVNDIIVLIEQKSK

SEQ ID NO: 5848 - DNA, 369 bp, Arabidopsis thaliana
  CDS (1)..(369)
atggcactgagaaatgcaattcttcgtcacctgagggttccggtgcaaaccctaggattgaatcagtctaaaattgggttccttggtacgatccggtcattttcttcgcacgatgatcatcttagcagagaagctgtcgtcgatagagtactcgatgttgtcaagagcttccccaaagtcgatccctctaaggtgactcctgaggttcatttccaaaacgatttgggattagatagtttggacacagtggagatagtgatggctattgaagaggaattcaagctggaaattccagacaaagaagctgacaagatcgattcttgctctctcgccattgaatacgtttacaatcatccaatgtctagctaa

SEQ ID NO: 5849 - protein, 122 aa, Arabidopsis thaliana
MALRNAILRHLRVPVQTLGLNQSKIGFLGTIRSFSSHDDHLSREAVVDRVLDVVKSFPKVDPSKVTPEVHFQNDLGLDSLDTVEIVMAIEEEFKLEIPDKEADKIDSCSLAIEYVYNHPMSS

SEQ ID NO: 5850 - DNA, 405 bp, Neurospora crassa
  CDS (1)..(405)
atgttccgcaccgccgccctcactgccgcccgcgtggcccgtcccgccgtcgcctccgccgtccgcgctggtgttgcccgtcctgcttttgtccaggccgtccccaaggtcgctgccttccaggctgtccggttttacagcgccggtggtcatctcaagaaggatgaggtctttagcaggattgcgcaggtgttgagtggatttgacaaggtcaacgaccccaagaacatcaccgagaccgcccacttcgccaacgacctcggtcttgacagcttggacaccgttgaggttgttatggctattgaggaggagttctccatcgagatccccgacaaggacgccgaccagatccactcggtcgacaaggccgtcgagtacatcctcagccagcccgatgccaactaa

SEQ ID NO: 5851 - protein, 134 aa, Neurospora crassa
MFRTAALTAARVARPAVASAVRAGVARPAFVQAVPKVAAFQAVRFYSAGGHLKKDEVFSRIAQVLSGFDKVNDPKNITETAHFANDLGLDSLDTVEVVMAIEEEFSIEIPDKDADQIHSVDKAVEYILSQPDAN

SEQ ID NO: 5852 - DNA, 339 bp, Schizosaccharomyces pombe
  CDS (1)..(339)
atgctttcccgtttttcttcccagttgcgctttatttccgcagttaggccggtgattcccaaatttcaacctttgcgattttatagcgttgctcgccctgatgctgaaaaacgaatccttaaagttgtttcttcctttgacaaaattcaggaccctaaaaaggtcacacctacatcaacatttgcgaatgacttgggtcttgattctttagatgctgtcgaggtcgttatggctatcgaagaagaatttagcattcaaattcctgataaggatgcagatgaaattacttcagtcggggatgccatctcgtatattacaaaaaaccccgaagcaaaataa

SEQ ID NO: 5853 - protein, 112 aa, Schizosaccharomyces pombe
MLSRFSSQLRFISAVRPVIPKFQPLRFYSVARPDAEKRILKVVSSFDKIQDPKKVTPTSTFANDLGLDSLDAVEVVMAIEEEFSIQIPDKDADEITSVGDAISYITKNPEAK

SEQ ID NO: 5854 - DNA, 378 bp, Saccharomyces cerevisiae
  CDS (1)..(378)
atgtttagatccgtttgccgcatttcttcccgcgtggcaccttctgcgtaccgcactataatgggccgttccgttatgtccaacaccatactcgcacaaagattttattctgcaaacttgagcaaagatcaggtttctcaaagggtcattgatgttatcaaggcgtttgataagaactctcccaacattgccaacaagcaaatctccagcgatacccaatttcacaaggatttggggttggactccttggacactgtcgagctgctcgtagctattgaagaagaatttgatattgaaatccctgacaaagtggctgatgagttgagaagtgttggtgaaacggtcgattatatcgcttccaatcccgacgcaaactaa

SEQ ID NO: 5855 - protein, 125 aa, Saccharomyces cerevisiae
MFRSVCRISSRVAPSAYRTIMGRSVMSNTILAQRFYSANLSKDQVSQRVIDVIKAFDKNSPNIANKQISSDTQFHKDLGLDSLDTVELLVAIEEEFDIEIPDKVADELRSVGETVDYIASNPDAN

SEQ ID NO: 5856 - DNA, 237 bp, Agrobacterium tumefaciens
  CDS (1)..(237): transl_table=11
atgagcgatatcgcagaacgcgtaaagaaaattgtaattgatcatcttggcgttgacgccgacaaggttgtcgaaggcgccagcttcattgacgatctgggcgctgattcgctcgacaccgttgaactggtcatggctttcgaagaagaattcggcgttgaaattcccgacgacgcagctgactcgatcctgactgtcggcgacgccgtcaagttcatcgagaaggcccaggcctga

SEQ ID NO: 5857 - protein, 78 aa, Agrobacterium tumefaciens
MSDIAERVKKIVIDHLGVDADKVVEGASFIDDLGADSLDTVELVMAFEEEFGVEIPDDAADSILTVGDAVKFIEKAQA

SEQ ID NO: 5858 - DNA, 255 bp, Anabaena sp
  CDS (1)..(255): transl_table=11
atgagccaatcagaaacttttgaaaaagtcaaaaaaattgttatcgaacaactaagtgtggagaaccctgacacagtaactccagaagctagttttgccaacgatttacaggctgattccctcgatacagtagaactagtaatggctttggaagaagaatttgatatcgaaattcccgatgaagccgcagagaaaattaccactgttcaagaagcggtggattacatcaataaccaagttgccgcatcagcttaa

SEQ ID NO: 5859 - protein, 84 aa, Anabaena sp
MSQSETFEKVKKIVIEQLSVENPDTVTPEASFANDLQADSLDTVELVMALEEEFDIEIPDEAAEKITTVQEAVDYINNQVAASA

SEQ ID NO: 5860 - DNA, 237 bp, Aquifex aeolicus
  CDS (1)..(237): transl_table=11
atgagtttagaagagagggtcaaggaaattattgcggaacaacttggagttgagaaggaaaagataactcccgaggcaaaattcgttgaggacctcggggcggattctcttgacgtcgttgaactcataatggcctttgaagaggagttcggtattgagatccctgacgaggacgcggaaaagatacagactgtcggggatgtaataaattaccttaaagaaaaggtaggaggatga

SEQ ID NO: 5861 - protein, 78 aa, Aquifex aeolicus
MSLEERVKEIIAEQLGVEKEKITPEAKFVEDLGADSLDVVELIMAFEEEFGIEIPDEDAEKIQTVGDVINYLKEKVGG

SEQ ID NO: 5862 - DNA, 240 bp, Azospirillum brasilense
  CDS (1)..(240): transl_table=11
atgagcgatgtcgccgagcgcgttaagaagatcgttgtggaccacctcggggtcgaggagtcgaaggtgacggagaacgcctccttcatcgacgatctcggcgccgacagcctcgacacggtcgagctggttatggctttcgaggaagagttcggctgcgagattccggacgacgccgccgagaagattttgacggtgaaggacgccatcgacttcatcaaggcgaacgccgccgcctga

SEQ ID NO: 5863 - protein, 79 aa, Azospirillum brasilense
MSDVAERVKKIVVDHLGVEESKVTENASFIDDLGADSLDTVELVMAFEEEFGCEIPDDAAEKILTVKDAIDFIKANAAA

SEQ ID NO: 5864 - DNA, 234 bp, Bacillus anthracis
  CDS (1)..(234): transl_table=11
atggcagatgttttagagcgtgtaacaaaaattatcgttgatcgtttaggagtagaagaaacagaagtagtaccagctgcgagcttcaaggaagatttaggagcagactccctagatgtagtagaacttgtaatgcaattagaagacgaattcgaaatggaaatttctgatgaagatgctgaaaagattgctactgttggcgatgctgtgacttacatagagagtcatctataa

SEQ ID NO: 5865 - protein, 77 aa, Bacillus anthracis
MADVLERVTKIIVDRLGVEETEVVPAASFKEDLGADSLDVVELVMQLEDEFEMEISDEDAEKIATVGDAVTYIESHL

SEQ ID NO: 5866 - DNA, 237 bp, Bacteroides fragilis
  CDS (1)..(237): transl_table=11
atgtctgaaattgcatcaagagtgaaagcgattatcgtcgataaattgggcgtagaagaatcagaagttacagaaacagcaagcttcactaacgacctgggagctgattctcttgacactgtagaacttatcatggaattcgaaaaagaattcggtatctctattcctgatgaccaagctgaaaagattggcacagtacaggatgctgtagcttacatcgaagaacacgctaagtaa

SEQ ID NO: 5867 - protein, 78 aa, Bacteroides fragilis
MSEIASRVKAIIVDKLGVEESEVTETASFTNDLGADSLDTVELIMEFEKEFGISIPDDQAEKIGTVQDAVAYIEEHAK

SEQ ID NO: 5868 - DNA, 234 bp, Bacillus halodurans
  CDS (1)..(234): transl_table=11
atggcagatacattatctcgtatcactaaaattgtcgttgatcgtcttggggttgatgaggcggaagtgaagccagaagcttcatttaaagatgatttaggagcggattctcttgatgttgttgagctcgtaatggagctagaagatgaattcgatcttgaaatttcagatgaagaagcagaaaaaattgcgacggttgctgatgtggttgaatacatagaaggccgtcagtaa

SEQ ID NO: 5869 - protein, 77 aa, Bacillus halodurans
MADTLSRITKIVVDRLGVDEAEVKPEASFKDDLGADSLDVVELVMELEDEFDLEISDEEAEKIATVADVVEYIEGRQ

SEQ ID NO: 5870 - DNA, 234 bp, Bacillus clausii
  CDS (1)..(234): transl_table=11
ttggcagatgttatggagcgtgttacaaaaatcatcgttgaccgtctaggtgtcgaagaatcagaagtaaaactagagtcttctttcaaagaagatttaaaagctgattctcttgatgtcgttgagcttgttatggagcttgaagatgagtttgacatggagattgctgatgaagacgcagaaaaaattgcaacggttaaagatgttgtcgattacataaataacaaccaataa

SEQ ID NO: 5871 - protein, 77 aa, Bacillus clausii
MADVMERVTKIIVDRLGVEESEVKLESSFKEDLKADSLDVVELVMELEDEFDMEIADEDAEKIATVKDVVDYINNNQ

SEQ ID NO: 5872 - DNA, 234 bp, Bacillus subtilis
  CDS (1)..(234): transl_table=11
atggcagacacattagagcgtgtaacgaaaatcatcgtagatcgccttggcgttgatgaagcagacgtcaaacttgaagcttctttcaaggaagacttaggtgctgattccctagatgtagttgagcttgttatggaacttgaagacgagtttgatatggagatttctgacgaagatgctgaaaagattgcaacagtcggcgacgctgtgaactacatacaaaaccagcaataa

SEQ ID NO: 5873 - protein, 77 aa, Bacillus subtilis
MADTLERVTKIIVDRLGVDEADVKLEASFKEDLGADSLDVVELVMELEDEFDMEISDEDAEKIATVGDAVNYIQNQQ

SEQ ID NO: 5874 - DNA, 237 bp, Bacteroides thetaiotaomicron
  CDS (1)..(237): transl_table=11
atgtctgaaattgcatcaagagtaaaagcgattatcgttgataaattaggcgtagaagaatcagaagttactaacgaagcaagcttcactaacgacctgggagcagattctcttgacactgtagaacttatcatggaattcgaaaaagaattcggtatctctattcctgatgaccaagcagaaaagattggtactgtaggtgatgctgtatcttatatcgaagaacacgctaagtaa

SEQ ID NO: 5875 - protein, 78 aa, Bacteroides thetaiotaomicron
MSEIASRVKAIIVDKLGVEESEVTNEASFTNDLGADSLDTVELIMEFEKEFGISIPDDQAEKIGTVGDAVSYIEEHAK

SEQ ID NO: 5876 - DNA, 237 bp, Bartonella henselae
  CDS (1)..(237): transl_table=11
atgagtgatacagtagagcgcgttaagaaaattatcgtagagcatcttggggttaatgcagataaggtagtagaagatgcgagctttatcgatgatctaggagcagatagccttgatacggtcgagctcgttatggcttttgaagaagaatttggtgtagaaatcccagatgaggctgctgaaacgattttcacagtgggtgatgcagtaaagtttattgataaagcttctgcataa

SEQ ID NO: 5877 - protein, 78 aa, Bartonella henselae
MSDTVERVKKIIVEHLGVNADKVVEDASFIDDLGADSLDTVELVMAFEEEFGVEIPDEAAETIFTVGDAVKFIDKASA

SEQ ID NO: 5878 - DNA, 237 bp, Bartonella quintana
  CDS (1)..(237): transl_table=11
atgagtgatacagtagagcgcgttaagaaaattattgtggagcatcttggggttaatgcagataaggtagtagaaaatgcaagctttatcgatgatctaggagcagatagccttgatacggttgagctcgttatggcttttgaagaagaatttggtgtagaaatcccagatgaagccgctgaaacgattttcacagttggtgatgcagtaaagtttatcgataaagcttctgcatga

SEQ ID NO: 5879 - protein, 78 aa, Bartonella quintana
MSDTVERVKKIIVEHLGVNADKVVENASFIDDLGADSLDTVELVMAFEEEFGVEIPDEAAETIFTVGDAVKFIDKASA

SEQ ID NO: 5880 - DNA, 237 bp, Bdellovibrio bacteriovorus
  CDS (1)..(237): transl_table=11
atggctattcatccaaaggttaaagatatcatcgttgaacaacttggcgtagatccagataaagttaaagcggaagcttctttcatcgacgatctgggcgcagacagcttggatatcgttgaacttgtgatggcaatggaagaagaattcgatcttgaaatccctgacgaagacgctgaaaagctgaagacagttcaagacgtagcttcttaccttgagaaaaaaggaaaagcttaa

SEQ ID NO: 5881 - protein, 78 aa, Bdellovibrio bacteriovorus
MAIHPKVKDIIVEQLGVDPDKVKAEASFIDDLGADSLDIVELVMAMEEEFDLEIPDEDAEKLKTVQDVASYLEKKGKA

SEQ ID NO: 5882 - DNA, 237 bp, Blochmannia floridanus
  CDS (1)..(237): transl_table=11
atgagcattgttgaagaaaaagtaaaaactattattgctgaacaattaggagtaaaacaggaagaagtagtaaatcatgcttcgtttgttgatgatttaggagctgattctcttgatactgttgaattagttatggcattagaggaagagtttgatattgaaatcccagatgaagaggcagaaaaaattactactgttcaagcagctatagatttcattcatactaatcagaaatag

SEQ ID NO: 5883 - protein, 78 aa, Blochmannia floridanus
MSIVEEKVKTIIAEQLGVKQEEVVNHASFVDDLGADSLDTVELVMALEEEFDIEIPDEEAEKITTVQAAIDFIHTNQK

SEQ ID NO: 5884 - DNA, 240 bp, Bordetella bronchiseptica
  CDS (1)..(240): transl_table=11
atggaaagcatcgaacagcgcgtcaagaagatcgtcgctgaacaacttggcgtgaacgaagccgagatcaagaacgagtcctccttccttgacgacctcggtgccgattcgctcgacatggtcgaactggtcatggcgctcgaagacgaattcgagaccgagatccccgacgaagaggccgaaaagatcactaccgtgcagcaagcgattgactacatcaattcgcacggtaagcagtaa

SEQ ID NO: 5885 - protein, 79 aa, Bordetella bronchiseptica
MESIEQRVKKIVAEQLGVNEAEIKNESSFLDDLGADSLDMVELVMALEDEFETEIPDEEAEKITTVQQAIDYINSHGKQ

SEQ ID NO: 5886 - DNA, 405 bp, Brassica campestris
  CDS (1)..(405)
atgtcgaccactttctgctcttccgtctccatgcaagccacttctctggcagcaacaacgaggattagtttccagaagccagctttggtttcaacgactaatctctccttcaacctccgccgttcaatccccactcgtttctcaatctcctgcgcggccaaaccagagacggttgagaaagtgtctaagatagttaagaagcagctatcactcaaagacgaccaaaaggtcgttgcggagaccaagtttgctgatcttggagcagattctctcgacactgttgagatagtgatgggtttagaggaagagtttgatatcgaaatggctgaagagaaagctcagaagattgctactgtggaggaagctgctgaactcattgaagagctcgttcaacttaagaagtaa

SEQ ID NO: 5887 - protein, 134 aa, Brassica campestris
MSTTFCSSVSMQATSLAATTRISFQKPALVSTTNLSFNLRRSIPTRFSISCAAKPETVEKVSKIVKKQLSLKDDQKVVAETKFADLGADSLDTVEIVMGLEEEFDIEMAEEKAQKIATVEEAAELIEELVQLKK

SEQ ID NO: 5888 - DNA, 240 bp, Bradyrhizobium japonicum
  CDS (1)..(240): transl_table=11
atgagtgacattggcgagcgggttaagaagatcgtggtcgaacaccttggtgttgaacccgagaaggttgtcgacgctgcgagcttcatcgacgacctcggcgccgacagtctggacaccgtcgagctggtgatggcgttcgaagaagaattcggttgcgagattccggacgacgccgcggagacgattctcaccgtcggcgacgccacgaagtttctcgagaagaacgcgaagagctaa

SEQ ID NO: 5889 - protein, 79 aa, Bradyrhizobium japonicum
MSDIGERVKKIVVEHLGVEPEKVVDAASFIDDLGADSLDTVELVMAFEEEFGCEIPDDAAETILTVGDATKFLEKNAKS

SEQ ID NO: 5890 - DNA, 237 bp, Brucella melitensis
  CDS (1)..(237): transl_table=11
atgagcgataccgcagagcgcgtcaagaaaatcgttgttgaacatctgggcgtagatgccgacaaggtcacggaaggcgcaagcttcattgatgacctcggcgcagacagcctcgacaccgtcgagctggtcatggcctttgaagaagaattcggcgttgaaattcctgacgacgctgccgaaacgatccttacggtcggtgatgctgtgaagttcatcgataaggcttctgcctga

SEQ ID NO: 5891 - protein, 78 aa, Brucella melitensis
MSDTAERVKKIVVEHLGVDADKVTEGASFIDDLGADSLDTVELVMAFEEEFGVEIPDDAAETILTVGDAVKFIDKASA

SEQ ID NO: 5892 - DNA, 240 bp, Buchnera aphidicola subsp
  CDS (1)..(240): transl_table=11
atgaataatgttgaaaaaaaaataaaaaaaataatttcaaaaatactgaatattaaagtagaaaaaatacttaataatgcgtcttttttagatgatcttagtgctgattcattagatatagtagaattaattatggctatagaagaagaatttgatattgaaatatcagatgaagatgcagaaaaacttaatacagtacaaaaatctattgattatattaataataaaaataaaaaataa

SEQ ID NO: 5893 - protein, 79 aa, Buchnera aphidicola subsp
MNNVEKKIKKIISKILNIKVEKILNNASFLDDLSADSLDIVELIMAIEEEFDIEISDEDAEKLNTVQKSIDYINNKNKK

SEQ ID NO: 5894 - DNA, 240 bp, Burkholderia mallei
  CDS (1)..(240): transl_table=11
atggacaacatcgaacaacgcgtgaagaagatcgtcgccgaacaactgggcgtcgccgaagccgaaatcaagaacgaagcgtcgttcgtgaacgacctcggcgcggactcgctcgacacggtcgagctggtgatggcgctcgaagacgagttcggcatggaaatcccggatgaagaggccgagaagatcacgaccgttcagcaagcgatcgactacgctcgcgcgaacgtcaaggcgtaa

SEQ ID NO: 5895 - protein, 79 aa, Burkholderia mallei
MDNIEQRVKKIVAEQLGVAEAEIKNEASFVNDLGADSLDTVELVMALEDEFGMEIPDEEAEKITTVQQAIDYARANVKA

SEQ ID NO: 5896 - DNA, 237 bp, Caulobacter crescentus
  CDS (1)..(237): transl_table=11
atgtccgacattctcgagcgcgtgcgtaagatcgtcatcgagcacctggatgccgatcccgagaaggtcaccgagaaggcttccttcatcgacgacctgggcgccgacagcctcgacaacgttgagctggtgatggcgttcgaagaagagttcgacatcgaaatcccggacgacgccgccgagcacatccaaacggtcggcgacgccgtgaagttcatcacggaaaagaccgcctaa

SEQ ID NO: 5897 - protein, 78 aa, Caulobacter crescentus
MSDILERVRKIVIEHLDADPEKVTEKASFIDDLGADSLDNVELVMAFEEEFDIEIPDDAAEHIQTVGDAVKFITEKTA

SEQ ID NO: 5898 - DNA, 234 bp, Chlamydia muridarum
  CDS (1)..(234): transl_table=11
atgagtttagaagatgatgtaaaggcaattatagttgatcagctcggagtaagtcctgaggacgtcaaagaaagttcctctttcatagaggatcttaatgccgacagtttggacttaacagagttgattatgactttagaagagaaatttgcttttgaaatttctgaaaatgatgccgagcaactccgtacggttggtgacgtaattaagtacatccaagagcgtcaaaactaa

SEQ ID NO: 5899 - protein, 77 aa, Chlamydia muridarum
MSLEDDVKAIIVDQLGVSPEDVKESSSFIEDLNADSLDLTELIMTLEEKFAFEISENDAEQLRTVGDVIKYIQERQN

SEQ ID NO: 5900 - DNA, 240 bp, Chlamydia pneumoniae
  CDS (1)..(240): transl_table=11
atgagtttagaagatgatgtaatagcaattattgttgagcagttaggagtggatccaaaagaagttaatgagaactcttcttttattgaagacttgaatgctgatagtttagatttaacagaattgattatgactttagaagaaaaatttgcttttgaaatttcagaagaagatgctgagaagcttcgtactgtcggggatgtatttacttatattaagaaacgtcaagctgaacaataa

SEQ ID NO: 5901 - protein, 79 aa, Chlamydia pneumoniae
MSLEDDVIAIIVEQLGVDPKEVNENSSFIEDLNADSLDLTELIMTLEEKFAFEISEEDAEKLRTVGDVFTYIKKRQAEQ

SEQ ID NO: 5902 - DNA, 246 bp, Chlorobium tepidum
  CDS (1)..(246): transl_table=11
atgagcgcagccgaaatcaaagataaagtgtacgatatcatcgtcagcaagatgggtgtcaacaaggatcagatcaagccggaatcgaagtttgccgatgacctcggtgccgattcgctcgatacggtcgaactgatcatggagctcgaaaacgagttcggcgtccagattcctgatgaagatgccgagaagatcggtaccgtgcagcaggccattgactacatcgtcaacaagaaagtaagctaa

SEQ ID NO: 5903 - protein, 81 aa, Chlorobium tepidum
MSAAEIKDKVYDIIVSKMGVNKDQIKPESKFADDLGADSLDTVELIMELENEFGVQIPDEDAEKIGTVQQAIDYIVNKKVS

SEQ ID NO: 5904 - DNA, 234 bp, Chlamydia trachomatis
  CDS (1)..(234): transl_table=11
atgagtttagaagatgatgtaaaggcaattatagttgatcagctcggagtaagtcctgaggatgtcaaagtagactcttctttcatagaagatctaaatgcagacagcttggatttgacagagttgattatgactttagaagagaaatttgcttttgaaatttctgaagatgatgccgagcaactccgcacagtcggtgacgtgattaaatacatccaagagcgtcaaaactaa

SEQ ID NO: 5905 - protein, 77 aa, Chlamydia trachomatis
MSLEDDVKAIIVDQLGVSPEDVKVDSSFIEDLNADSLDLTELIMTLEEKFAFEISEDDAEQLRTVGDVIKYIQERQN

SEQ ID NO: 5906 - DNA, 234 bp, Clostridium acetobutylicum
  CDS (1)..(234): transl_table=11
atggtatttgaaaaagttaaggacataatagcagatcaacttggtattgatgcaactgaaataaaaatggaatcctcttttattgatgatttaggagctgattctcttgatatagttgaactgataatggctttagaagaagaatttgatatagaaatgcctgatgaagaggctgaaaaagtttcaagtgtaggcgatgtagttaattacataaaagctcatacagaagagtaa

SEQ ID NO: 5907 - protein, 77 aa, Clostridium acetobutylicum
MVFEKVKDIIADQLGIDATEIKMESSFIDDLGADSLDIVELIMALEEEFDIEMPDEEAEKVSSVGDVVNYIKAHTEE

SEQ ID NO: 5908 - DNA, 231 bp, Clostridium perfringens
  CDS (1)..(231): transl_table=11
atgtttgataaattaaaagaaattattgctgataaattaagcgtaaacgaagatgaaataactatggaatcaacatttatagatgacttaggtgcggattctcttgatatagttgaattaataatggctcttgaagaagagttagagatggaaatcccagatgaagatgctgagggcttcaaaacagtaggagatgtagtagaatacatcacagaacatacagagaagtaa

SEQ ID NO: 5909 - protein, 76 aa, Clostridium perfringens
MFDKLKEIIADKLSVNEDEITMESTFIDDLGADSLDIVELIMALEEELEMEIPDEDAEGFKTVGDVVEYITEHTEK

SEQ ID NO: 5910 - DNA, 237 bp, Erwinia carotovora subsp
  CDS (1)..(237): transl_table=11
atgagcactatcgaagaacgcgttaagaaaatcatcgttgaacagcttggtgttaagcaggaagaagtcgtaaacaatgcttctttcgttgatgacctcggcgctgattctcttgacactgttgagctggtaatggctctggaagaagagtttgatactgagattccagacgaagaagctgaaaaaatcacgactgttcaggcagccattgatttcattcaggctaaccagcagtaa

SEQ ID NO: 5911 - protein, 78 aa, Erwinia carotovora subsp
MSTIEERVKKIIVEQLGVKQEEVVNNASFVDDLGADSLDTVELVMALEEEFDTEIPDEEAEKITTVQAAIDFIQANQQ

SEQ ID NO: 5912 - DNA, 228 bp, Fusobacterium nucleatum subsp
  CDS (1)..(228): transl_table=11
atgttagataaagtaaaagaaattatagttgaacaattaggagtggatgctgatcaaataaaacctgaatcaaattttgtagatgatttaggagcagattctttagatactgttgaattaataatgtcttttgaagaagaatttggagtagaaattccagatactgaagcagaaaaaattaaaactgtacaagatgttataaactacatagaagcgaataagaaataa

SEQ ID NO: 5913 - protein, 75 aa, Fusobacterium nucleatum subsp
MLDKVKEIIVEQLGVDADQIKPESNFVDDLGADSLDTVELIMSFEEEFGVEIPDTEAEKIKTVQDVINYIEANKK

SEQ ID NO: 5914 - DNA, 234 bp, Geobacter sulfurreducens
  CDS (1)..(234): transl_table=11
atgtcgtcaatagaaaaaagagtcaaagagatcgtagccgaacaactcggcgtcgatgaggcgcaggttacgaacgatgcctcctttatggatgatctgggggccgactctcttgacactgtcgagctggtgatggctctcgaggaagagtttgatatcgagatttccgacgaggacgccgagaaaatccaaaacgttcaggatgccatcgattacatcaccgagcacacctag

SEQ ID NO: 5915 - protein, 77 aa, Geobacter sulfurreducens
MSSIEKRVKEIVAEQLGVDEAQVTNDASFMDDLGADSLDTVELVMALEEEFDIEISDEDAEKIQNVQDAIDYITEHT

SEQ ID NO: 5916 - DNA, 234 bp, Haemophilus ducreyi
  CDS (1)..(234): transl_table=11
atgagcattgaagaacgcgtaaaaaaaatcatcgttgatcaattaggtgttaaagctgaagatgtaaaaccagaagcttcattcattgaagacttaggtgcagactctttagacacggttgaattagtgatggctttagaagaagaattcgatatcgaaattccagacgaagaagctgaaaaaatcactacagttcaatctgcaattgattacgtggcaaaagctaacgcataa

SEQ ID NO: 5917 - protein, 77 aa, Haemophilus ducreyi
MSIEERVKKIIVDQLGVKAEDVKPEASFIEDLGADSLDTVELVMALEEEFDIEIPDEEAEKITTVQSAIDYVAKANA

SEQ ID NO: 5918 - DNA, 231 bp, Helicobacter hepaticus
  CDS (1)..(231): transl_table=11
atggatacatttgaaagtgtaaaggctgtagttgttgaacaattaagtgttgatgcaaatgaagtaaaacccgaatctcgttttattgaggatttgaatgcagattctcttgatgttgtagagcttgttatggctcttgaagagaaattctctattgagattccagatgaagaagcagaaaaaatcaaaacagtcaaagatgttgttgcttatattgaagctaacaaataa

SEQ ID NO: 5919 - protein, 76 aa, Helicobacter hepaticus
MDTFESVKAVVVEQLSVDANEVKPESRFIEDLNADSLDVVELVMALEEKFSIEIPDEEAEKIKTVKDVVAYIEANK

SEQ ID NO: 5920 - DNA, 234 bp, Leptospira interrogans serogroup Icterohaemorrhagiae serovar
  CDS (1)..(234): transl_table=11
atggcagactttgaaaaggttaaatctattatcgtagaacaacttggcgtggatgaatctgaagttacacctgaggctcacttcatcgatgacctcggtgcagactctttggatacggttgaattagtaatggctctcgaagaagaattcggaatcgaaatctccgacgaagatgctgaaaaaattcaaactgtcggggatgtaactaagttcatcgacaacctcaagtcctaa

SEQ ID NO: 5921 - protein, 77 aa, Leptospira interrogans serogroup Icterohaemorrhagiae serovar
MADFEKVKSIIVEQLGVDESEVTPEAHFIDDLGADSLDTVELVMALEEEFGIEISDEDAEKIQTVGDVTKFIDNLKS

SEQ ID NO: 5922 - DNA, 234 bp, Listeria innocua
  CDS (1)..(234): transl_table=11
atggcagaagtattagaaaaagttacaaaaatcatcgtagaccgtctaggtgtcgaggaatccaaagtaactttagaagcttccttcaaagaagatctaggtgcagattccctagatgttgttgaattagtaatggaacttgaagacgagttcggagttgaaatctctgatggcgacgctgaaaacattaacacagttggtgatgcagtgaagtacatagaggcaaacgcataa

SEQ ID NO: 5923 - protein, 77 aa, Listeria innocua
MAEVLEKVTKIIVDRLGVEESKVTLEASFKEDLGADSLDVVELVMELEDEFGVEISDGDAENINTVGDAVKYIEANA

SEQ ID NO: 5924 - DNA, 231 bp, Mannheimia succiniciproducens
  CDS (1)..(231): transl_table=11
atgagcattgaagaacgcgtaaaaaaaatcattgttgatcaattaggtgttaaagaagaagaagttaaatccgaagcgtctttcatcgaagacttaggtgccgactctttagacacagttgaattagtaatggctttagaagaagaattcgatatcgaaattcctgatgaagaagctgaaaaaattacaacggttcaatcagcaattgattacgttcaaaacaatcaataa

SEQ ID NO: 5925 - protein, 76 aa, Mannheimia succiniciproducens
MSIEERVKKIIVDQLGVKEEEVKSEASFIEDLGADSLDTVELVMALEEEFDIEIPDEEAEKITTVQSAIDYVQNNQ

SEQ ID NO: 5926 - DNA, 231 bp, Methylococcus capsulatus
  CDS (1)..(231): transl_table=11
atgagtgatatagcagaacgtgtaaagaagatcgtcgccgaacagttgggcgtgaaggacgagatctcgaacgaggcatccttcgtggacgatctgggcgccgattctctggacacggtcgagctggtgatggcactcgaggaagagttcgagtgcgaaattcccgacgaggacgccgaaaagatcactacggttcagcaggcgatcgattacatccagagccatacctga

SEQ ID NO: 5927 - protein, 76 aa, Methylococcus capsulatus
MSDIAERVKKIVAEQLGVKDEISNEASFVDDLGADSLDTVELVMALEEEFECEIPDEDAEKITTVQQAIDYIQSHT

SEQ ID NO: 5928 - DNA, 237 bp, Neisseria meningitidis serogroup A
  CDS (1)..(237): transl_table=11
atgtcaaacatcgaacaacaagttaaaaaaattgttgctgaacaactgggcgtaaacgaagccgacgtgaaaaacgaatcttctttccaagacgacttgggcgcggattctttggacaccgtggagctggttatggctttggaagaagcattcggctgcgaaatccccgacgaagatgccgaaaaaatcaccaccgtccaactggctatcgactacatcaatgcccacaacggctaa

SEQ ID NO: 5929 - protein, 78 aa, Neisseria meningitidis serogroup A
MSNIEQQVKKIVAEQLGVNEADVKNESSFQDDLGADSLDTVELVMALEEAFGCEIPDEDAEKITTVQLAIDYINAHNG

SEQ ID NO: 5930 - DNA, 234 bp, Oceanobacillus iheyensis
  CDS (1)..(234): transl_table=11
gtggcagaagtatttgaccgtgtgaaagaaattataattgatcgccttgatgtggaagagtctaaagtaactatggaagcatcttttaaagatgatctagacgcagattctctagatgtggtggaacttgttatggaattagaagatgaattcgatatggaaatcgcagatgaggatgctgaaaaaataaatacagtaggtgatgctgtagattacataaacagcaaagcttaa

SEQ ID NO: 5931 - protein, 77 aa, Oceanobacillus iheyensis
MAEVFDRVKEIIIDRLDVEESKVTMEASFKDDLDADSLDVVELVMELEDEFDMEIADEDAEKINTVGDAVDYINSKA

SEQ ID NO: 5932 - DNA, 231 bp, Onion yellows phytoplasma
  CDS (1)..(231): transl_table=11
atggtttttgaaaaaattaaagctttaattgccacccaattatctttagacgcttctacaattactttagacactcgttttaaagaagatttaggacttgattcgctagacgctttagaactagttatggaagtagaaaaaacatttcaaatcaacattagtgatgcaactttacaaaattttaaaaccgttcaagatatcgttttttacatcaccaaaaacaccccttaa

SEQ ID NO: 5933 - protein, 76 aa, Onion yellows phytoplasma
MVFEKIKALIATQLSLDASTITLDTRFKEDLGLDSLDALELVMEVEKTFQINISDATLQNFKTVQDIVFYITKNTP

SEQ ID NO: 5934 - DNA, 234 bp, Protochlamydia amoebophila
  CDS (1)..(234): transl_table=11
atgtcaattgaacaagaagtcattgatattgttgtagaacaattaggagttgatagagatgatgtcaattcagaaaagtcatttgtagaagatttgaatgcagattctctagatctaacagaactcatcatgacatttgaagagcgttttgaatgtgagatttcacaagaggatgctgaaaaattaaaaacggtaaacgatgtgattagttatcttgaaaagcgcaaatcatag

SEQ ID NO: 5935 - protein, 77 aa, Protochlamydia amoebophila
MSIEQEVIDIVVEQLGVDRDDVNSEKSFVEDLNADSLDLTELIMTFEERFECEISQEDAEKLKTVNDVISYLEKRKS

SEQ ID NO: 5936 - DNA, 231 bp, Pasteurella multocida
  CDS (1)..(231): transl_table=11
atgagcattgaagaacgcgtaaaaaaaatcatcgttgaacaattaggcgttaaagaagacgaagttaaacctgaagcgtctttcgttgaagatttaggtgcggattctttagatactgttgaattagtcatggctttagaagaagagttcgatatcgaaattccagacgaagaagctgagaaaattacgacagttcaatctgcgatcgattacgttcaaaacaatcaataa

SEQ ID NO: 5937 - protein, 76 aa, Pasteurella multocida
MSIEERVKKIIVEQLGVKEDEVKPEASFVEDLGADSLDTVELVMALEEEFDIEIPDEEAEKITTVQSAIDYVQNNQ

SEQ ID NO: 5938 - DNA, 237 bp, Photobacterium profundum
  CDS (1)..(237): transl_table=11
atgagcaacatcgaagatcgcgtaagaaaaatcatcattgagcaactaggtgtggacgaagcagaagttaagaacgaagcttctttcgttgacgatctaggtgctgattcactagatacagttgaactagtaatggctcttgaagaagaattcgataccgaaattcctgacgaagcagctgaaaaaattactacagttcaagctgcaatcgactacgtaaacagcgcttctgagtaa

SEQ ID NO: 5939 - protein, 78 aa, Photobacterium profundum
MSNIEDRVRKIIIEQLGVDEAEVKNEASFVDDLGADSLDTVELVMALEEEFDTEIPDEAAEKITTVQAAIDYVNSASE

SEQ ID NO: 5940 - DNA, 237 bp, Porphyromonas gingivalis
  CDS (1)..(237): transl_table=11
atgtctgaagtagaaaaaaaagtgatcgacctcgtagttgacaaattgaatgtagaagcttctgaagtaacgcgtgaagccagtttctcaaatgacctcggagcagactctcttgatacagttgagttgatgatgaatttcgaaaaggaattcaacatgtctatccctgacgaccaagcacaggagatcaagactgtcggcgacgctatcgactatatcgaaaaaaacctgaagtaa

SEQ ID NO: 5941 - protein, 78 aa, Porphyromonas gingivalis
MSEVEKKVIDLVVDKLNVEASEVTREASFSNDLGADSLDTVELMMNFEKEFNMSIPDDQAQEIKTVGDAIDYIEKNLK

SEQ ID NO: 5942 - DNA, 237 bp, Pseudomonas putida
  CDS (1)..(237): transl_table=11
atgagcaccatcgaagaacgcgtcaagaaaatcgtcgccgagcaactgggcgtcaaggaagaagaagtgactgttgagaagtccttcgtcgatgacctgggtgccgattcgcttgacaccgttgaactggtgatggctctggaagaggaattcgagaccgaaatccctgacgaagaagccgagaagatcactaccgttcaagctgccatcgactacgtcaaagcccaccaggcctaa

SEQ ID NO: 5943 - protein, 78 aa, Pseudomonas putida
MSTIEERVKKIVAEQLGVKEEEVTVEKSFVDDLGADSLDTVELVMALEEEFETEIPDEEAEKITTVQAAIDYVKAHQA

SEQ ID NO: 5944 - DNA, 237 bp, Pseudomonas syringae pv
  CDS (1)..(237): transl_table=11
atgagcaccatcgaagagcgcgtcaagaaaatcgttgccgagcaacttggcgtcaaatcagaagaggttgtcaacactgcttctttcgttgaagacctgggcgctgactccctggacaccgttgagctggtaatggctctggaagaggaattcgagaccgaaatccctgacgaagaagcggaaaagatcacgaccgttcaagcagcaatcgactacgtcaacagccatcaggcttaa

SEQ ID NO: 5945 - protein, 78 aa, Pseudomonas syringae pv
MSTIEERVKKIVAEQLGVKSEEVVNTASFVEDLGADSLDTVELVMALEEEFETEIPDEEAEKITTVQAAIDYVNSHQA

SEQ ID NO: 5946 - DNA, 237 bp, Rhizobium leguminosarum
  CDS (1)..(237): transl_table=11
atgagcgatatcgcagaacgcgtaaagaaaattgttattgatcatcttggcgttgatgccgacaaggtcgtcgagagcgccagctttatcgacgatctgggcgctgactcgctcgacacggtcgaactggtcatggctttcgaagaagaattcggcgttgaaattcctgacgacgctgccgactcgatcctcacggtcggcgatgcagtgaagtttattgagaaggcccaggcctga

SEQ ID NO: 5947 - protein, 78 aa, Rhizobium leguminosarum
MSDIAERVKKIVIDHLGVDADKVVESASFIDDLGADSLDTVELVMAFEEEFGVEIPDDAADSILTVGDAVKFIEKAQA

SEQ ID NO: 5948 - DNA, 237 bp, Rhizobium loti
  CDS (1)..(237): transl_table=11
atgagtgacaccgcagagcgcgtcaaaaagatcgtcatcgagcaccttggcgtcgatgccgacaaagtgacggagcaggcgagcttcatcgatgatctgggcgctgacagcctcgacacggtcgaactcgtcatggcgttcgaagaagagttcggcgtggaaattcccgacgacgcggccgagaccatcctgaccgtcggcgacgcggtgaagtacatcgacaaggcttcggcctga

SEQ ID NO: 5949 - protein, 78 aa, Rhizobium loti
MSDTAERVKKIVIEHLGVDADKVTEQASFIDDLGADSLDTVELVMAFEEEFGVEIPDDAAETILTVGDAVKYIDKASA

SEQ ID NO: 5950 - DNA, 237 bp, Rhizobium meliloti
  CDS (1)..(237): transl_table=11
atgagcgatatcgcagaacgcgtgaagaaaattgttattgatcatcttggcgtcgacgccgaaaaggtcagcgaaggcgcaagcttcatcgatgacctcggcgcggactcgctcgacaccgtcgaactggtcatggcattcgaagaggaattcggtgtcgaaatcccggacgacgcagcagattcgatcctcaccgttggcgacgccgtcaagttcatcgagaaagcccaggcctga

SEQ ID NO: 5951 - protein, 78 aa, Rhizobium meliloti
MSDIAERVKKIVIDHLGVDAEKVSEGASFIDDLGADSLDTVELVMAFEEEFGVEIPDDAADSILTVGDAVKFIEKAQA

SEQ ID NO: 5952 - DNA, 246 bp, Rhodopirellula baltica
  CDS (1)..(246): transl_table=11
atggcgtctatcgaagaacgcgtggtcgacattgtttctgaacagctcggcgttgataaagacaaaatcacccgcgaaacatcgttcgtcaacgacctcggtgccgactcgctcgacactgttgaattggtgatggagctcgaagaagagttcgacatcagcattccagatgactccgccgaaaagatccaaaaggtcggcgaagcaatcgatttcatcgaaaaggaaaaaggcgaagacgcctag

SEQ ID NO: 5953 - protein, 81 aa, Rhodopirellula baltica
MASIEERVVDIVSEQLGVDKDKITRETSFVNDLGADSLDTVELVMELEEEFDISIPDDSAEKIQKVGEAIDFIEKEKGEDA

SEQ ID NO: 5954 - DNA, 261 bp, Rickettsia prowazekii
  CDS (1)..(261): transl_table=11
atggagttcaaaattatgagtacaacggacaagatcgaacagaaagttattgaaatggttgctgagaagctaaataaagataaagcgataataactacagattcaagatttatagaagatttgaaagctgatagccttgataccgtagagttaatgatggcaatagaagttgaatacggtattgatatccctgatgatgaagccactaaaattaaaaccgtatccgatgtcataaaatatatcaaagaacgccaatcttaa

SEQ ID NO: 5955 - protein, 86 aa, Rickettsia prowazekii
MEFKIMSTTDKIEQKVIEMVAEKLNKDKAIITTDSRFIEDLKADSLDTVELMMAIEVEYGIDIPDDEATKIKTVSDVIKYIKERQS

SEQ ID NO: 5956 - DNA, 234 bp, Shewanella oneidensis
  CDS (1)..(234): transl_table=11
atgagcaacatcgaagaacgtgtaaagaaaatcattgtagagcaactgggcgttaaagaagaagacgttaaaccagcggcatctttcgttgacgatctgggtgcagattctctggacactgttgagttggttatggctctggaagaagagtttgataccgagatccctgatgaagaagctgaaaagatcactactgttcaagcagcgatcgattacgtttctaagaatcagtaa

SEQ ID NO: 5957 - protein, 77 aa, Shewanella oneidensis
MSNIEERVKKIIVEQLGVKEEDVKPAASFVDDLGADSLDTVELVMALEEEFDTEIPDEEAEKITTVQAAIDYVSKNQ

SEQ ID NO: 5958 - DNA, 234 bp, Staphylococcus aureus
  CDS (1)..(234): transl_table=11
gtggaaaatttcgataaagtaaaagatatcatcgttgaccgtttaggtgtagacgctgataaagtaactgaagatgcatctttcaaagatgatttaggcgctgactcacttgatatcgctgaattagtaatggaattagaagacgagtttggtactgaaattcctgatgaagaagctgaaaaaatcaacactgttggtgatgctgttaaatttattaacagtcttgaaaaataa

SEQ ID NO: 5959 - protein, 77 aa, Staphylococcus aureus
MENFDKVKDIIVDRLGVDADKVTEDASFKDDLGADSLDIAELVMELEDEFGTEIPDEEAEKINTVGDAVKFINSLEK

SEQ ID NO: 5960 - DNA, 234 bp, Staphylococcus epidermidis
  CDS (1)..(234): transl_table=11
gtggaaaacttcgataaagtaaaagacatcatcgttgatcgtttaggcgtagatgctgacaaggtaactgaagacgcatcattcaaagatgatttaggcgctgactcacttgatatcgctgaattagtaatggaattagaagacgaatttggtactgaaattcctgatgaagaagcagaaaaaatcaacactgttggtgatgctgttaaatacatcaacagccttgaaaaataa

SEQ ID NO: 5961 - protein, 77 aa, Staphylococcus epidermidis
MENFDKVKDIIVDRLGVDADKVTEDASFKDDLGADSLDIAELVMELEDEFGTEIPDEEAEKINTVGDAVKYINSLEK

SEQ ID NO: 5962 - DNA, 246 bp, Synechococcus elongatus
  CDS (1)..(246): transl_table=11
atgaatcaatctgaaattctcgaaaaagtaaaagccattgttgccgatcaactcagtgttgatccagaaaaagttgtacccgaagccagttttgccgaagacctcaacgctgactcccttgactccgtggagttgatcatggcccttgaggaagagtttggcgtggaaattcccgatgaagaggcagaaaaactcaaaaccgtccaagatgtccttgactttatcaacaataaggtagctgcatag

SEQ ID NO: 5963 - protein, 81 aa, Synechococcus elongatus
MNQSEILEKVKAIVADQLSVDPEKVVPEASFAEDLNADSLDSVELIMALEEEFGVEIPDEEAEKLKTVQDVLDFINNKVAA

SEQ ID NO: 5964 - DNA, 234 bp, Synechocystis sp
  CDS (1)..(234): transl_table=11
atgaatcaggaaatttttgaaaaagtaaaaaaaatcgtcgtggaacagttggaagtggatcctgacaaagtgacccccgatgccacctttgccgaagatttaggggctgattccctcgatacagtggaattggtcatggccctggaagaagagtttgatattgaaattcccgatgaagtggcggaaaccattgataccgtgggcaaagccgttgagcatatcgaaagtaaataa

SEQ ID NO: 5965 - protein, 77 aa, Synechocystis sp
MNQEIFEKVKKIVVEQLEVDPDKVTPDATFAEDLGADSLDTVELVMALEEEFDIEIPDEVAETIDTVGKAVEHIESK

SEQ ID NO: 5966 - DNA, 237 bp, Treponema hyodysenteriae
  CDS (1)..(237): transl_table=11
atggcattaatcgatgaaattaaagatgttgttgctaatcaattaaacatctcagacaaaagtaaaatcactgatacagcttctttcgtagatgatttaaacgctgattcacttgatttagtagaattaatcatggaattagaaaaacgttatgaaatcaaaattcctcaagaagatcaagaaaaaatcaaaaatgtagctgatgctgctaaatacattgaagaacataaaaaataa

SEQ ID NO: 5967 - protein, 78 aa, Treponema hyodysenteriae
MALIDEIKDVVANQLNISDKSKITDTASFVDDLNADSLDLVELIMELEKRYEIKIPQEDQEKIKNVADAAKYIEEHKK

SEQ ID NO: 5968 - DNA, 333 bp, Vibrio cholerae
  CDS (97)..(333): transl_table=11
gtggttagaccagaaacctcacgcttgcaactttccctagttcgaataaactacggaatcatcgcattaggcgaaatctgtaaaggaaaagaaaaaatgagcaacatcgaagaacgcgtaaagaaaatcattgttgaacagctaggtgtagacgaagcagaagtaaagaatgaatcttctttcgttgaagacctgggtgctgattctctggacactgttgagctggtaatggctctggaagaggaattcgatactgagattcctgatgaagaagcagagaagatcactactgttcaagctgcgatcgattacgtaaccagcaacgctcagtaa

SEQ ID NO: 5969 - protein, 78 aa, Vibrio cholerae
MSNIEERVKKIIVEQLGVDEAEVKNESSFVEDLGADSLDTVELVMALEEEFDTEIPDEEAEKITTVQAAIDYVTSNAQ

SEQ ID NO: 5970 - DNA, 234 bp, Vibrio harveyi
  CDS (1)..(234): transl_table=11
atgagcaacatcgaagaacgcgtaaagaaaatcattgttgaacagctaggtgtagacgaagcagaagttaaaaacgaagcttctttcgttgacgatctaggtgctgattctctagacactgtagagctagtaatggctctagaagaggaattcgacactgagattcctgatgaagaagcagagaaaatcactactgttcaagctgcaatcgactacgtaaacagcgctcagtaa

SEQ ID NO: 5971 - protein, 77 aa, Vibrio harveyi
MSNIEERVKKIIVEQLGVDEAEVKNEASFVDDLGADSLDTVELVMALEEEFDTEIPDEEAEKITTVQAAIDYVNSAQ

SEQ ID NO: 5972 - DNA, 237 bp, Vibrio marinus
  CDS (1)..(237): transl_table=11
atgagtaacttcgaagaacgcgtaaaaaaaatcattatcgaacaacttggtgttaaagaagaagaagttaaaaacgaagcttcttttgttgatgacctaggtgcagattctctagatacagttgaacttgttatggctctagaagaagaattcgatactgatatccctgatgatgaagcagagaaaatcactactgttcaagctgcgatcgactacgttgtttctagtgctgaataa

SEQ ID NO: 5973 - protein, 78 aa, Vibrio marinus
MSNFEERVKKIIIEQLGVKEEEVKNEASFVDDLGADSLDTVELVMALEEEFDTDIPDDEAEKITTVQAAIDYVVSSAE

SEQ ID NO: 5974 - DNA, 237 bp, Vibrio vulnificus
  CDS (1)..(237): transl_table=11
atgagcaacctcgaagaacgcgtaaagaaaatcattgttgaacaactaggtgttgatgagtctgaagttaaaaacgaagcttctttcgtagacgacctaggtgctgattctctagacaccgttgaactagtaatggcactagaagaagaattcgacactgagatccctgacgaagaagctgaaaagattacaactgttcaagctgcgatcgattacgtaactgcgaacgctcagtaa

SEQ ID NO: 5975 - protein, 78 aa, Vibrio vulnificus
MSNLEERVKKIIVEQLGVDESEVKNEASFVDDLGADSLDTVELVMALEEEFDTEIPDEEAEKITTVQAAIDYVTANAQ

SEQ ID NO: 5976 - DNA, 237 bp, Wigglesworthia glossinidia brevipalpis
  CDS (1)..(237): transl_table=11
atgagcactatcgaagaaagcgttaaatctattattgcagagcagttaggagttaaaaaagaagaagtaacaaataatgcatctttcgtggatgatcttggagctgactctttagacacagtggaattagttatggcgttagaagaagagtttgacacagagataccagacgaagaagcagaaaaaattactacagttcaagcagctattgattttattaaagaaagtaaaaaataa

SEQ ID NO: 5977 - protein, 78 aa, Wigglesworthia glossinidia brevipalpis
MSTIEESVKSIIAEQLGVKKEEVTNNASFVDDLGADSLDTVELVMALEEEFDTEIPDEEAEKITTVQAAIDFIKESKK

SEQ ID NO: 5978 - DNA, 231 bp, Wolinella succinogenes
  CDS (1)..(231): transl_table=11
atggctatttttgatgatattaaagaagtcgtggtcgaacagctcaatgtcaaccccgaagaggtgaaggaagaatccaagtttgttgaagatttgggggctgactctttggatgtggttgagcttgtcatggctctcgaagagaagtttaatatcgagattcctgatgaggaagccgaaaaaatcgctaccgtgggcgatgtggttcgatacatcgaaaccaacaagtaa

SEQ ID NO: 5979 - protein, 76 aa, Wolinella succinogenes
MAIFDDIKEVVVEQLNVNPEEVKEESKFVEDLGADSLDVVELVMALEEKFNIEIPDEEAEKIATVGDVVRYIETNK

SEQ ID NO: 5980 - DNA, 240 bp, Xanthomonas axonopodis pv
  CDS (1)..(240): transl_table=11
atgagcaccatcgaagaacgcgtcaagaaaatcgtcgtcgaacaactcggcgtcaaggaagaggaagtcaccaccagcgcatcgttcgtcgatgatctgggtgccgactcgctggacaccgtcgagctggtgatggcgctggaagaagagttcgagtgcgagatcccggacgaagaggccgagaagatcacctcggtgcagcaggcgatcgactacgtcaaggctcacgtcaagagctga

SEQ ID NO: 5981 - protein, 79 aa, Xanthomonas axonopodis pv
MSTIEERVKKIVVEQLGVKEEEVTTSASFVDDLGADSLDTVELVMALEEEFECEIPDEEAEKITSVQQAIDYVKAHVKS

SEQ ID NO: 5982 - DNA, 240 bp, Xanthomonas albilineans
  CDS (1)..(240): transl_table=11
atgagcaccatcgaagaacgcgtcaagaaaatcgtcgtcgaacaactcggcgtcaaggaagaagaagtcaccaacagcgcatcgttcgtcgatgacctcggtgcggactcgctggacaccgtcgagttggtgatggccctggaagaagagttcgagtgcgagattccggacgaagaggccgagaagattacctcggtgcagcaggctatcgactacgtcaaggtgcacgtcaagagctga

SEQ ID NO: 5983 - protein, 79 aa, Xanthomonas albilineans
MSTIEERVKKIVVEQLGVKEEEVTNSASFVDDLGADSLDTVELVMALEEEFECEIPDEEAEKITSVQQAIDYVKVHVKS

SEQ ID NO: 5984 - DNA, 240 bp, Xylella fastidiosa
  CDS (1)..(240): transl_table=11
atgagtgacatcgaagcgcgcgtcagaaaaattgtcgccgagaaactcaatgtcgatgaagaaaaagtaactaatacctcgacgttcgtcgatgaactgggtgcggattcgttggataccgtcgagttggtgatggccttggaagacgagttccaatgtgagatcggtgacgaggctgctgagaagatgacttcggtgcaacatgctatcgactacattaagagtaatgctaagtgctaa

SEQ ID NO: 5985 - protein, 79 aa, Xylella fastidiosa
MSDIEARVRKIVAEKLNVDEEKVTNTSTFVDELGADSLDTVELVMALEDEFQCEIGDEAAEKMTSVQHAIDYIKSNAKC

SEQ ID NO: 5986 - DNA, 237 bp, Yersinia pestis
  CDS (1)..(237): transl_table=11
atgagcactatcgaagaacgcgttaagaaaatcatcgttgaacaactgggtgttaaagaagacgaagtgaagaacagtgcttctttcgttgaagatcttggcgcggattctctggacaccgtcgagctggtaatggctctggaagaagaatttgataccgagattccagacgaagaagcagagaaaatcactactgttcaggcagctattgattttatcaacgctaaccagcagtaa

SEQ ID NO: 5987 - protein, 78 aa, Yersinia pestis
MSTIEERVKKIIVEQLGVKEDEVKNSASFVEDLGADSLDTVELVMALEEEFDTEIPDEEAEKITTVQAAIDFINANQQ

SEQ ID NO: 5988 - DNA, 408 bp, Oryza sativa
  CDS (1)..(408)
atggccggggcgaggagcctgctcctgaggcacctccgcgtggcggtggccccttcctcctcctcaccggcggcgtccctcaggcccgtggtggcgctgcgcgaggccctgtgtgcccggcggtggatgtcgtcggaggaggccaaggggtcgttcctggacaaggccgaggtcaccgagcgcatcgtcaaggtcgtcaggaacttccagaagatcgacgaccccgccaaggtcacaccagatgcacatttcaagaatgatcttggtctagacagtttggacgcagtggaggttgtcatggctttggaagaggaatttggttttgagatacctgacaatgaagctgacaagatcgactccattaaagttgcagttgatttcattgcttcacacccccaagcaaaatga

SEQ ID NO: 5989 - protein, 135 aa, Oryza sativa
MAGARSLLLRHLRVAVAPSSSSPAASLRPVVALREALCARRWMSSEEAKGSFLDKAEVTERIVKVVRNFQKIDDPAKVTPDAHFKNDLGLDSLDAVEVVMALEEEFGFEIPDNEADKIDSIKVAVDFIASHPQAK

SEQ ID NO: 5990 - DNA, 423 bp, Oryza sativa
  CDS (1)..(423)
atggctgctcccatcaccgccgccacatcgcctctctcccctgcgtctcgggttcaggtgatgtgctcaatgctcaatccaacctcagcttctttctccaggcaaacagcaagcttcccgtccattcggttgcgcccggtcccaagtcgcttccaggccttgtcttgttcggccaaacaagacactattgataaggtttgcgaaatagttaagaatcagttagcagtagatgaaggcactgccgtttctggagaaacaaaattcgtggaccttggtgctgattcacttgacacggttgaaattgtgatgggccttgaggaggcatttcagattaccgtggacgaatcgagtgcgcaagtgattcagacagtggaggatgctgctgtgcttatcgacaagcttgtggcagagaaggacgcctaa

SEQ ID NO: 5991 - protein, 140 aa, Oryza sativa
MAAPITAATSPLSPASRVQVMCSMLNPTSASFSRQTASFPSIRLRPVPSRFQALSCSAKQDTIDKVCEIVKNQLAVDEGTAVSGETKFVDLGADSLDTVEIVMGLEEAFQITVDESSAQVIQTVEDAAVLIDKLVAEKDA

SEQ ID NO: 5992 - DNA, 384 bp, Oryza sativa
  CDS (1)..(384)
atggcggcggcgaggagggccctcctgagccacctgcgcgtgccggtgctggctcgtcccgccgcggcggcgggaagcgtccccgccgcgcggctcctgtcgtcggcgacggaggaggggtccaagggctcgttcctcgacaagggcgaggtcgccgaccgcatcgtctccgtcgtcaagaacttccagaaggtcgagccctccaaggtgacaccaaatgctcatttccagaaggacctcggacttgatagcttggatacagttgagattgtcatggcctttgaggaagaatttggcttcgagatcccagataacgaggcagagaagattgactccatcaaaacggcagttgacttcgttgcctctcatcctcaagcaaaataa

SEQ ID NO: 5993 - protein, 127 aa, Oryza sativa
MAAARRALLSHLRVPVLARPAAAAGSVPAARLLSSATEEGSKGSFLDKGEVADRIVSVVKNFQKVEPSKVTPNAHFQKDLGLDSLDTVEIVMAFEEEFGFEIPDNEAEKIDSIKTAVDFVASHPQAK

SEQ ID NO: 5994 - DNA, 396 bp, Oryza sativa
  CDS (1)..(396)
atggcggcggcggcgctccgaccggcgatcctccgccgcatccgcctctccccctcccctgcggcggctgcgggggccgcggcggcgtcccagccccacgccctggcgcggtggctcgcgcggcccatgtcctcccacgacgcccacctcacccgcgacgaggtcgtcgaccgcctcctcgacgtcctcaagtgccaccccaaggttgacccctccaaggtgagtcccgaggcgcacttcgagaaggatctggggctggacagcctggacacggtggaggtggtgatggcgatcgaggaggagttcaagctcgagatccccgaccaggaggccgacaagatcgactccctcccgctcgccatcgagtacgtcgccaaccaccccatggccgcctga

SEQ ID NO: 5995 - protein, 131 aa, Oryza sativa
MAAAALRPAILRRIRLSPSPAAAAGAAAASQPHALARWLARPMSSHDAHLTRDEVVDRLLDVLKCHPKVDPSKVSPEAHFEKDLGLDSLDTVEVVMAIEEEFKLEIPDQEADKIDSLPLAIEYVANHPMAA

SEQ ID NO: 5996 - DNA, 417 bp, Oryza sativa
  CDS (1)..(417)
atggcttcctccctcgccggatccgccctctccttcgccacccccgtcaaggcagtcaagactaattcgatatctttcaccagcgcaaggaagggaaatgcatttctccgcctgcagccagtgcctatgagatttgctgtttgctgtgccgcaaaaaaggagacagtggagaaggtttgtgacattgttaagaagcaactcgctgttcctgagggcactgaagtttctggtgcatccaagttctcagatcttggtgctgattcactggacacggttgagattgtgatgggtctcgaggaggagttccacatcagcgtcgaagagtcaagtgcgcagtcaattgcaacggttgaagatgccgctgcactcatcgacaagcttgttgagcagaaatctgctgaagcgaaatcatcttga

SEQ ID NO: 5997 - protein, 138 aa, Oryza sativa
MASSLAGSALSFATPVKAVKTNSISFTSARKGNAFLRLQPVPMRFAVCCAAKKETVEKVCDIVKKQLAVPEGTEVSGASKFSDLGADSLDTVEIVMGLEEEFHISVEESSAQSIATVEDAAALIDKLVEQKSAEAKSS

SEQ ID NO: 5998 - DNA, 408 bp, Oryza sativa
  CDS (1)..(408)
atggccgccttcaccaccaccgccgccggatccgccgtcgccttcgcgcggccagccaaggcaatcaatgtcagttcagtctctttcgctggtttaaggaagaacaatgtggctttcactctgcagccagtgacacaaagatttgcagttctccgtgctgccaaaaaggaaacagtggagaaggtttgtgatattgtaaagaagcagcttgtacttcctgaaggcactgacgttactggtgcctctaagttcaccgatcttggtgctgattccctggatacggttgagattgttatgggtcttgaagaggctttcaagatcagtgtcgatgaatcaagcgcgcagtcaattgcgacagtggaggatgctgctgagctcatcgacaagattgtttctaatgcaaagtaa

SEQ ID NO: 5999 - protein, 135 aa, Oryza sativa
MAAFTTTAAGSAVAFARPAKAINVSSVSFAGLRKNNVAFTLQPVTQRFAVLRAAKKETVEKVCDIVKKQLVLPEGTDVTGASKFTDLGADSLDTVEIVMGLEEAFKISVDESSAQSIATVEDAAELIDKIVSNAK

SEQ ID NO: 6000 - DNA, 447 bp, Oryza sativa
  CDS (1)..(447)
atggccgccgcgctgtccgccgtcgtctccgccaagctcggctgcccgccggcggcggcgctcggtagctggaagggaagcagaatttcaagcagaaacctggtctccatgaagacgatgacagcaaggagaggcctcgtctccctcagatcccctcgcttccgcgtcttctgcgcggcgaaggcggagacggtggggaaggtgatgcagatagtgaagcagcagctggcgctgggggaggaggcgaagctggcgccggagtcgcagttcacggagctgggagcggactcgctggacacggtggagatcgtgatggcgctggaggaggagttcgggatcaccgtggaggaggacaacgcccagagcatcaccaccatccaggacgccgccgacctcatcgacaagctcgtcgccggcggcggcggcaagccccccgccgccgcctga

SEQ ID NO: 6001 - protein, 148 aa, Oryza sativa
MAAALSAVVSAKLGCPPAAALGSWKGSRISSRNLVSMKTMTARRGLVSLRSPRFRVFCAAKAETVGKVMQIVKQQLALGEEAKLAPESQFTELGADSLDTVEIVMALEEEFGITVEEDNAQSITTIQDAADLIDKLVAGGGGKPPAAA

SEQ ID NO: 6002 - DNA, 339 bp, Oryza sativa
  CDS (1)..(339)
atgaagacgatgacagcaaggagaggcctcgtctccctcagatcccctcgcttccgcgtcttctgcgcggcgaaggcggagacggtggggaaggtgatgcagatagtgaagcagcagctggcgctgggggaggaggcgaagctggcgccggagtcgcagttcacggagctgggagcggactcgctggacacggtggagatcgtgatggcgctggaggaggagttcgggatcaccgtggaggaggacaacgcccagagcatcaccaccatccaggacgccgccgacctcatcgacaagctcgtcgccggcggcggcggcaagccccccgccgccgcctga

SEQ ID NO: 6003 - protein, 112 aa, Oryza sativa
MKTMTARRGLVSLRSPRFRVFCAAKAETVGKVMQIVKQQLALGEEAKLAPESQFTELGADSLDTVEIVMALEEEFGITVEEDNAQSITTIQDAADLIDKLVAGGGGKPPAAA

SEQ ID NO: 6004 - DNA, 435 bp, Oryza sativa
  CDS (1)..(435)
atggcgcactccctcgccgccgccgcctcgtccttctcgccgcccgccgcacgccggcgactgcccggacaggtgactaatgtaatttcgagacggagctcagtttccttcaacagccagagaataagttttatgtccattcgttcaaggccaagtcagcttcgttttaagatttgctgctcggctaagaaagagacagtcgacaaggtttgcaacatagttaagacacagctggcactccctgagggaactgctgtcactggtgaatcaaaattctctgaactcggtgctgattcactggatacggttgagattgtgatgggcctcgaggaggaattcaacatcactgtcgacgaaacaagtgcgcaggacatcgcaactgttcaagatgcagcaaacctgatcgagaagctcgtgctggagaaggctgcataa

SEQ ID NO: 6005 - protein, 144 aa, Oryza sativa
MAHSLAAAASSFSPPAARRRLPGQVTNVISRRSSVSFNSQRISFMSIRSRPSQLRFKICCSAKKETVDKVCNIVKTQLALPEGTAVTGESKFSELGADSLDTVEIVMGLEEEFNITVDETSAQDIATVQDAANLIEKLVLEKAA

SEQ ID NO: 6006 - DNA, 351 bp, Oryza sativa
  CDS (1)..(351)
atggcactgagggcagccgtgctccgccacgttcgtgtgccactccaagccgctccaaaactgcagccatggcgtgccatgtcatcacacggcgacgatcatctctccaaagaggaggtcgtcgaaagagtcctcgccgtcgtcaaagatttccccaaagtcgatccttccagggtgagtccagatgtacatttccagaaggatttgggtttggatagcttggacaatgtggaaattgtaatggcactagaagaggagttcaagctagagatcccagacaatgaagctgataaaattgactcttgtcatcttgctattgagtacatttctaaccatcccatggctggttaa

SEQ ID NO: 6007 - protein, 116 aa, Oryza sativa
MALRAAVLRHVRVPLQAAPKLQPWRAMSSHGDDHLSKEEVVERVLAVVKDFPKVDPSRVSPDVHFQKDLGLDSLDNVEIVMALEEEFKLEIPDNEADKIDSCHLAIEYISNHPMAG

SEQ ID NO: 6008 - DNA, 393 bp, Triticum aestivum
  CDS (1)..(393)
atggcgatggcggcggcgaggagagccctccttaaccacttccgcgtgccggtggcgcgccccgcggtcgcagcgggagcagcgggaagcgtccccgtcgccaggctcctgtcttccacctcggaggtggagaagggctctttcctcgacaagggcgaggtcgccgaccgcgtcgtctccgtcatcaagaacttccagaagatcgaaccctccaaggtgacccctaatgcacatttccagaaggacctcgggctggacagcctggacaccgtcgagattgtcatggcctttgaggaagaattcagcttcgagatccccgacaatgaggcagagaagatcgattccatcaaatcagcagttgacttcatcgcctcgcatcctcaagcaaagtaa

SEQ ID NO: 6009 - protein, 130 aa, Triticum aestivum
MAMAAARRALLNHFRVPVARPAVAAGAAGSVPVARLLSSTSEVEKGSFLDKGEVADRVVSVIKNFQKIEPSKVTPNAHFQKDLGLDSLDTVEIVMAFEEEFSFEIPDNEAEKIDSIKSAVDFIASHPQAK

SEQ ID NO: 6010 - DNA, 402 bp, Triticum aestivum
  CDS (1)..(402)
atggcggcggcggcgaggaacctggtgctacggcacctccgcttggccgcggcccccgcgtcgtcggtggccctcaggccggcagcggcgctgcagggggccctgtcggggcggcggtggatgtcgtcagaggacgccaaggggtcgttcctggacaaggacgaggtcaccgagcgcaccatcaaggtcgtcaagaacttccagaagatcgacgacccatccaaggtgaaagcagatgcccacttcaaggatgatcttggcctagacagtttggatgcagtagaggttgttatgtccttggaagaggaatttggctctgagatacctgacaatgaagctgacaaaattgactccattaaagctgcagtggacttcatcgcctcgcaccccaaagccaaatga

SEQ ID NO: 6011 - protein, 133 aa, Triticum aestivum
MAAAARNLVLRHLRLAAAPASSVALRPAAALQGALSGRRWMSSEDAKGSFLDKDEVTERTIKVVKNFQKIDDPSKVKADAHFKDDLGLDSLDAVEVVMSLEEEFGSEIPDNEADKIDSIKAAVDFIASHPKAK

SEQ ID NO: 6012 - DNA, 363 bp, Linum usitatissimum
  CDS (1)..(363)
atggcgttgagggcagccatcatccgacaccttcgtgttcccgtccaaaccctagttcccgctggccgatacactcagccgttcatccggcgaatgtcatcgcacgacgaccatcttagcaaggaagacgtcgccgagagagttctttccgtcatcaagagcttcccgaaagtcgatccatccaaggtgactcctgaggtacatttccaaaatgatctaggattggacagcctggacagtgttgagatcgtgatggctttggaagaggaattcaagctggagattcccgacaaggaagctgataagattgactcgtgcaagcttgctatcgaatacatccataaccatcctatggcaagttga

SEQ ID NO: 6013 - protein, 120 aa, Linum usitatissimum
MALRAAIIRHLRVPVQTLVPAGRYTQPFIRRMSSHDDHLSKEDVAERVLSVIKSFPKVDPSKVTPEVHFQNDLGLDSLDSVEIVMALEEEFKLEIPDKEADKIDSCKLAIEYIHNHPMAS

SEQ ID NO: 6014 - DNA, 411 bp, Zea mays
  CDS (1)..(411)
atgcaaacagtacggagtgcggtgctgcagcacctccggctccgcgcggcggctcctattgctgcacgtggaggcggcggcgggttcgctcggaggatgagcgcgccggcgggccaggagggcagtagcggcagcagctccgaactggagagggacatcaggacgcgcgtcgttaacctggtcaagaagttcgacaagatcgacgccgacaaggtgaccgagactgcagacttccaaaaggacctgagcttggacagcttagaccgggtggaacttgttatggcctttgaacaagagttctccgttgagatccctgatgacaaggctgacaagctgacctgttgtgcggatgttgccaagtacatcatatccgaatctgaagcgagtgatacaaatgccggtggatcctga

SEQ ID NO: 6015 - protein, 136 aa, Zea mays
MQTVRSAVLQHLRLRAAAPIAARGGGGGFARRMSAPAGQEGSSGSSSELERDIRTRVVNLVKKFDKIDADKVTETADFQKDLSLDSLDRVELVMAFEQEFSVEIPDDKADKLTCCADVAKYIISESEASDTNAGGS

SEQ ID NO: 6016 - DNA, 399 bp, Helianthus annuus
  CDS (1)..(399)
atggcggccagaaacgcactcctcaagtacctacgtgtgaacgtcacaccagctcttcaatcttcttccgctcaaaaccctagcgctatcggaggaggactgattcagctgttccggcgccatttctccgaggaagttcgaggatcgtttctcgataagtcagaggtcaccgatcgagtggttacctgcgttaaaaatttccagaaagttgatccgtctaaggttacacctactgcccacttccaaaatgatctcgggttagacagtttagatacagttgaggtcgtgatggctcttgaagaagagttcgggtttgagattcctgacaatgaagcagacaaaattagttctattgagcttgctgttgacttcattgcatctcatcctcaggcaaaataa

SEQ ID NO: 6017 - protein, 132 aa, Helianthus annuus
MAARNALLKYLRVNVTPALQSSSAQNPSAIGGGLIQLFRRHFSEEVRGSFLDKSEVTDRVVTCVKNFQKVDPSKVTPTAHFQNDLGLDSLDTVEVVMALEEEFGFEIPDNEADKISSIELAVDFIASHPQAK

SEQ ID NO: 6018 - DNA, 396 bp, Brassica napus
  CDS (1)..(396)
atggcggcgagaaatgctcttcttcgatacctccgagtcaacgtcaatccatcacttgcaagccctacaacaatctgcgctcgagaatcagcactccctttcaccgtacttcttcggcgtttctcggaggaagtgagaggatcgtttctcgacaaatctgacgtcacagatcgcgtaatcactgtcgtcaaaaacttccaaagagtcgatccctcaaaggtaacaccaaaagcccatttccttaacgatctcgggttagacagtttggacagtgtggaagttgtgatggcattggaggaagaatttaaatttgagatccctgataatgaagctgacaagatcctgtccgtcgatcaagcggttgattttatcgcctctcatcctcaggctacttaa

SEQ ID NO: 6019 - protein, 131 aa, Brassica napus
MAARNALLRYLRVNVNPSLASPTTICARESALPFTVLLRRFSEEVRGSFLDKSDVTDRVITVVKNFQRVDPSKVTPKAHFLNDLGLDSLDSVEVVMALEEEFKFEIPDNEADKILSVDQAVDFIASHPQAT

SEQ ID NO: 6020 - DNA, 396 bp, Brassica napus
  CDS (1)..(396)
atggcgttaagaaatgctctacttagatacctcagagtcaatgtcacgcctactctccgaagctcgagcatcacttctcatcgaggcgtagctcccttgtacgttattcttcgtcgtcgtttctcagaggaagtcagaggatcattcctcgacaaatccgaagtcacagatcgtgttgtctctgtcgtcaaaaaattccagaaagtagagccttcgaaggtgacagcaaaggcacacttccagaatgatctagggctggatagtttggacacagtggaggtggttatggcactagaagaagagtttggattcgagatacctgataacgaagcagataagatacagtccgtcgatcttgctgttgagtttattgcttcccacccacaggctaaatga

SEQ ID NO: 6021 - protein, 131 aa, Brassica napus
MALRNALLRYLRVNVTPTLRSSSITSHRGVAPLYVILRRRFSEEVRGSFLDKSEVTDRVVSVVKKFQKVEPSKVTAKAHFQNDLGLDSLDTVEVVMALEEEFGFEIPDNEADKIQSVDLAVEFIASHPQAK

SEQ ID NO: 6022 - DNA, 363 bp, Brassica napus
  CDS (1)..(363)
atggcactgagaactgcagtccttcgtcaccttagggttccggtgacgggatcgaaccagtctcaaattgggttccttggttcgatccgtgctttctcgtcgcacgatgatcatctcagcaagcaggaagtcgtcgacagagtcctcgacgttgtcaaatgcttccctaaagtcgatccagctaaggtgactcctgatgttcatttccagaaggatctggggttagatagtttggacactgtggagatagtgatggctattgaagaggagttcaagcttgagatcccagacaaagaagctgacaagatcgactcttgccctcttgccattgaatacgttttcaaccatccaatgtctagctaa

SEQ ID NO: 6023 - protein, 120 aa, Brassica napus
MALRTAVLRHLRVPVTGSNQSQIGFLGSIRAFSSHDDHLSKQEVVDRVLDVVKCFPKVDPAKVTPDVHFQKDLGLDSLDTVEIVMAIEEEFKLEIPDKEADKIDSCPLAIEYVFNHPMSS

SEQ ID NO: 6024 - DNA, 396 bp, Brassica napus
  CDS (1)..(396)
atggcggcgagaaatgctcttcttcgatacctccgagtcaacgtcaatccatcacttgcaagccctacaacaatcggcgcccgagaatcggcactccctttcaccgtccttcttcggcgtttctcggaggaagtgagaggatcgtttctcgacaaatctgatgtcacagatcgcgtaatcactgtcgtcaaaaacttccaaagagtcgatccctcaaaggtaacaccaaaagcccatttccttaacgatctcgggttagacagtttggacagtgtggaagttgtgatggcattggaggaagaatttaaatttgagatccctgataatgaagctgacaagatcctgtccgtcgatcaagcggttgattttatcgcctctcatcctcaggctacttaa

SEQ ID NO: 6025 - protein, 131 aa, Brassica napus
MAARNALLRYLRVNVNPSLASPTTIGARESALPFTVLLRRFSEEVRGSFLDKSDVTDRVITVVKNFQRVDPSKVTPKAHFLNDLGLDSLDSVEVVMALEEEFKFEIPDNEADKILSVDQAVDFIASHPQAT

SEQ ID NO: 6026 - DNA, 351 bp, Glycine max
  CDS (1)..(351)
atggcactgagggcagccgtgctccgccacgttcgtgtgccactccaagccgctccaaaactgcagccatggcgtgccatgtcatcacacggcgacgatcatctctccaaagaggaggtcgtcgaaagagtcctcgccgtcgtcaaagatttccccaaagtcgatccttccaaggtgagtccagatctacatactcagaacgatatgggtttggatagcttggacaatgtggaaatcgtagtggcgctagatgaggagttcaatctagatatcccagacgatgaagctgatcacattgactctcgtcatcttgctattgagtacattcctaaccatcccatggctggttaa

SEQ ID NO: 6027 - protein, 116 aa, Glycine max
MALRAAVLRHVRVPLQAAPKLQPWRAMSSHGDDHLSKEEVVERVLAVVKDFPKVDPSKVSPDLHTQNDMGLDSLDNVEIVVALDEEFNLDIPDDEADHIDSRHLAIEYIPNHPMAG

SEQ ID NO: 6028 - DNA, 390 bp, Oryza sativa
  CDS (1)..(390)
atggcgatggcggcggcgaggagggccctcctgagccacctgcgcgtgccggtgctggctcgtcccgccgcggcggcgggaagcgtccccgccgcgcggctcctgtcgtcggcgacggaggaggggtccaagggctcgttcctcgacaagggcgaggtcgccgaccgcatcgtctccgtcgtcaagaacttccagaaggtcgagccctccaaggtgacaccaaatgctcatttccagaaggacctcggacttgatagcttggatacagttgagattgtcatggcctttgaggaagaatttggcttcgagatcccagataacgaggcagagaagattgactccatcaaaacggcagttgacttcgttgcctctcatcctcaagcaaaataa

SEQ ID NO: 6029 - protein, 129 aa, Oryza sativa
MAMAAARRALLSHLRVPVLARPAAAAGSVPAARLLSSATEEGSKGSFLDKGEVADRIVSVVKNFQKVEPSKVTPNAHFQKDLGLDSLDTVEIVMAFEEEFGFEIPDNEAEKIDSIKTAVDFVASHPQAK

SEQ ID NO: 6030 - DNA, 351 bp, Oryza sativa
  CDS (1)..(351)
atggcactgagggcagccgtgctccgccacgttcgtgtgccactccaagccgctccaaaactgcagccatggcgtgccatgtcatcacacggcgacgatcatctctccaaagaggaggtcgtcgaaagagtcctcgccgtcgtcaaagatttccccaaagtcgatccttccagggtgagtccagatgtacatttccagaaggatttgggtttggatagcttggacaatgtggaaattgtaatggcactagaagaggagttcaagctagagatcccagacaatgaagctgataaaattgactcttggcatcttgctattgagtacatttctaaccatcccatggctggttaa

SEQ ID NO: 6031 - protein, 116 aa, Oryza sativa
MALRAAVLRHVRVPLQAAPKLQPWRAMSSHGDDHLSKEEVVERVLAVVKDFPKVDPSRVSPDVHFQKDLGLDSLDNVEIVMALEEEFKLEIPDNEADKIDSWHLAIEYISNHPMAG

SEQ ID NO: 6032 - DNA, 384 bp, Zea mays
  CDS (1)..(384)
atggcgatggcggcggcgaggagagcgctcctggcccacctccgcgtgccggtggtccaccctgcagcggcggcagcgaccatccccgcggcagggcggctcctgtcgtcgacgacggagacaaaggggtcgttcctcgacaagggcgaggtcgctgaccgtgtcgtctccgtcgtcaagaacttccagaaggtcgaaccctcaaaggtgacacctagtgctcattttcagaaggaccttggacttgatagcttggacactgtggagatcgtgatggcgtttgaggaagaattttcctttgagattcctgacaacgaagcagagaagattgactccatcaagacagcggttgatttcattgcttcgcatcctcaagcaaaataa

SEQ ID NO: 6033 - protein, 127 aa, Zea mays
MAMAAARRALLAHLRVPVVHPAAAAATIPAAGRLLSSTTETKGSFLDKGEVADRVVSVVKNFQKVEPSKVTPSAHFQKDLGLDSLDTVEIVMAFEEEFSFEIPDNEAEKIDSIKTAVDFIASHPQAK

SEQ ID NO: 6034 - DNA, 402 bp, Zea mays
  CDS (1)..(402)
atggcggcggcagcgctccgtccggcgatcctccgccgcatccgcctctccccctccccttcgctcgccctcgccgccgctgggacaggtgcatcccacccgcacgcgctggcgcggtggctcgcgcggcccatgtcctcccacgacgcgcacctcacccgcgacgaagtcatcgaccggatcctcgacgtcatcaagagccaccccaagatcgacccctccaaggtgaccccggaggcgcacttcgagaaggatctggggctcgacagcctggacaccgtcgaggtggtcatggccatcgaggaggagttcaagctcgagatcccagacatggaggctgacaagatcgactcactccctctggccatcgagtacgtcgccaaccaccccatggctggctga

SEQ ID NO: 6035 - protein, 133 aa, Zea mays
MAAAALRPAILRRIRLSPSPSLALAAAGTGASHPHALARWLARPMSSHDAHLTRDEVIDRILDVIKSHPKIDPSKVTPEAHFEKDLGLDSLDTVEVVMAIEEEFKLEIPDMEADKIDSLPLAIEYVANHPMAG

SEQ ID NO: 6036 - DNA, 384 bp, Zea mays
  CDS (1)..(384)
atggcgatggcggcggcgaggagagcgctcctggcccacctccgcgtgccggtggtccaccctgcagcggcggcagcgaccatccccgcggcagggcggctcctgtcgtcgacgacggagacaaaggggtcgttcctcgacaagggcgaggtcgctgaccgtgtcgtctccgtcgtcaagaacttccagaaggttgaaccctcaaaggtgacacctagtgctcattttcagaaggaccttggacttgatagcttggacactgtggagatcgtgatggcgtttgaggaagaattttcctttgagattcctgacaacgatgcagagaagattgactccatcaagacagcggttgatttcattgcttcgcatcctcaagcaaaataa

SEQ ID NO: 6037 - protein, 127 aa, Zea mays
MAMAAARRALLAHLRVPVVHPAAAAATIPAAGRLLSSTTETKGSFLDKGEVADRVVSVVKNFQKVEPSKVTPSAHFQKDLGLDSLDTVEIVMAFEEEFSFEIPDNDAEKIDSIKTAVDFIASHPQAK

SEQ ID NO: 6038 - DNA, 20 bp, Artificial sequence
  primer
atgcaggctgtcagatcgtc

SEQ ID NO: 6039 - DNA, 23 bp, Artificial sequence
  primer
ttacttggcgctgggatgagatg

SEQ ID NO: 6040 - protein, 66 aa, Artificial sequence
  consensus sequence
  Variant (2)..(17): Xaa in position 2 to 17 is any amino acid
  Variant (18)..(25): Xaa in position 18 to 25 is any or no amino acid
  Variant (27)..(27): Xaa in position 27 is any amino acid
  Variant (28)..(28): Xaa in position 28 is any or no amino acid
  Variant (32)..(32): Xaa in position 32 is any amino acid
  Variant (37)..(37): Xaa in position 37 is any amino acid
  Variant (40)..(41): Xaa in position 40 to 41 is any amino acid
  Variant (43)..(44): Xaa in position 43 to 44 is any amino acid
  Variant (46)..(47): Xaa in position 46 to 47 is any amino acid
  Variant (49)..(51): Xaa in position 49 to 51 is any amino acid
  Variant (52)..(56): Xaa in position 52 to 56 is any or no amino acid
  Variant (58)..(59): Xaa in position 58 to 59 is any amino acid
  Variant (60)..(65): Xaa in position 60 to 65 is any or no amino acid
VXXXXXXXXXXXXXXXXXXXXXXXXFXXDLGXDSLDXVEXXMXXEXXFXXXXXXXXIXXXXXXXXA

SEQ ID NO: 6041 - DNA, 909 bp, Synechocystis sp.
  CDS (1)..(909): transl_table=11
atggttgcccaacaaacacgaaccgactttgatttagcccaatacttacaagttaaaaaaggtgtggtcgaggcagccctggatagttccctggcgatcgcccggccggaaaagatttacgaagccatgcgttattctctgttggcggggggcaaacgattgcgaccgattttatgcattacggcctgcgaactgtgtggcggtgatgaagccctggccttgcccacggcctgtgccctggaaatgatccacaccatgtccctcatccatgatgatttgccctccatggataatgacgatttccgccggggtaaacccactaaccacaaagtgtacggggaagacattgccattttggccggggatggactgctagcctatgcgtttgagtatgtagttacccacaccccccaggctgatccccaagctttactccaagttattgcccgtttgggtcgcacggtgggggccgccggtttagtggggggacaagttctagacctggaatcggaggggcgcactgacatcaccccggaaaccctaacttttatccatacccataaaaccggggcattgctggaagcttccgtgctcacaggcgcaattttggccggggccactggggaacaacaacagagactggcccgctatgcccagaatattggcttagcttttcaagtggtggatgacatcctcgacatcaccgccacccaggaagagttgggtaaaaccgctggtaaagatgtcaaagcccaaaaagccacctatcccagtctcctcggtttggaagcttcccgggcccaggcccaaagtttgattgaccaggccattgtcgccctggaaccctttggcccctccgccgagcccctccaggcgatcgccgaatatattgttgccagaaaatattaa

SEQ ID NO: 6042 - protein, 302 aa, Synechocystis sp.
MVAQQTRTDFDLAQYLQVKKGVVEAALDSSLAIARPEKIYEAMRYSLLAGGKRLRPILCITACELCGGDEALALPTACALEMIHTMSLIHDDLPSMDNDDFRRGKPTNHKVYGEDIAILAGDGLLAYAFEYVVTHTPQADPQALLQVIARLGRTVGAAGLVGGQVLDLESEGRTDITPETLTFIHTHKTGALLEASVLTGAILAGATGEQQQRLARYAQNIGLAFQVVDDILDITATQEELGKTAGKDVKAQKATYPSLLGLEASRAQAQSLIDQAIVALEPFGPSAEPLQAIAEYIVARKY

SEQ ID NO: 6043 - DNA, 1311 bp, Arabidopsis thaliana
  CDS (186)..(1121)
aacatttataaagttctattagagacggtggataggccatggctactactgttcatctcagctcattctccctcttcatccaatccagaggaagaagagacaactccatatcttccgtcaagagtctcaaaaaacgcacaggtttgtctccctcttctgccctcacctcacaaggtggcagagacatgattccaccagagagaaaatgcaatgatcacaactctgcttttgatttcaagttgtatatgatccgcaaagccgaatctgtaaatgcggctctcgacgtttctgtaccgctccgagaacccctcactgtccaggaagccgtgcggtactcattgctagcgggcggaaaacgtgtgaggcctctgctctgcattgccgtctgcgagcttgtgggaggcgacgaggctactgccatgtcagctgcttgcgcggttgagatgatccacacaagctctcttattcatgacgatcttccgtgcatggacaatgccgacctccgcagaggcaagcccaccaaccacaaggtatatggagaagacatggcggttttggcaggtgatgcactccttgcattggcgtttgagcacatgacggttgtgtcgagtgggttggtcgctcccgagaggatgattcgcgcggtggttgagctggccagggccatagggactacagggctagttgctggacaaatgatagacctagccagcgaaagactgaatccagacaaggttggattggagcatctagagttcatccatctccacaaaacggcggcattgttggaggcagcggcggttttaggggttataatgggaggtggaacagaggaagagatcgaaaagcttagaaagtatgctaggtgtattggactactgtttcaggtggttgatgacattcccgacgtaacaaaatctactgaggaattgggaaagactgcaggaaaagacgtaatggctggaaagctgacgtatccaaggctgataggtttggagagatcaaaggaagttgcagaggaactgaggagagaagcagaggaacaacttctagggtttgatccaagtaaggcggcgcctctggtggctcttgctagctacatcgcttgcagacacaactgaatggactgatcatatcctcaatgcatctaatcttctaacaagtccttttacttagatctatggtcttgtttcttataaatcatctatgccgtgtgatcatctctctcagttgttttcaagttgtattatgtttttgaatcttaataatgtaatgttcgaaaaatatcaataagatttgctcataggaacg

SEQ ID NO: 6044 - protein, 311 aa, Arabidopsis thaliana
MIPPERKCNDHNSAFDFKLYMIRKAESVNAALDVSVPLREPLTVQEAVRYSLLAGGKRVRPLLCIAVCELVGGDEATAMSAACAVEMIHTSSLIHDDLPCMDNADLRRGKPTNHKVYGEDMAVLAGDALLALAFEHMTVVSSGLVAPERMIRAVVELARAIGTTGLVAGQMIDLASERLNPDKVGLEHLEFIHLHKTAALLEAAAVLGVIMGGGTEEEIEKLRKYARCIGLLFQVVDDIPDVTKSTEELGKTAGKDVMAGKLTYPRLIGLERSKEVAEELRREAEEQLLGFDPSKAAPLVALASYIACRHN

SEQ ID NO: 6045 - DNA, 1537 bp, Zea mays
  CDS (243)..(1334)
cattggacccctcgaggccggccggggcccggaacaccacgcctagcaccaagcaccaccaccgcccgggcggccactccacgtctccacttgccgtgctgcaccgacgcggccagcgcctaggcttctcttcacctcaagacaaagcagatcgcaacctctcgagccacccccaatctccaacgttaccgtccccggtcccccgcactttagccccccaagcccaacccaactcgccacccatggccatggcgtttcacttccacccgctggtcgcctcgcgcgtccacctctctccgcacccgttcgccgccgctacgggggcaccctccccctcctcctccgtcgccatcgcggcgcactaccaccaccacggccgccgccgcttctccgccatcgtggccacggccacgaccacggagttcaacttcaaggcatacatggaggagcgagcggtcgcggtgaaccgggcgctggacgcggccatccccgccggggggctccccgcggcgctgcacgacgcgatgcggtacgcgctgctggcgggcgggaagcgcgtgcgccccgcgctgtgcctggccgcgtgcgccgtggtgggcgggccggagtcctgggcgatgccggccgcggcggccgtcgagatggtgcacaccatgtcgctcgtccacgacgacctcccctgcatggacgacgacgacctccgccgcggcaagcccacctgccacgtcgtctacggcgagcccatcgccgtcctcgccggggacgcgctgctctcgctctccttccaccacatggccagcgtcgggtcctaccctccggacgtggacccggagaagcaccccgcccgcgtcgtccgagccattggggagctcgcgcgctgcatcggatccgagggactcgtcgccggccaggttgtcgatctcgagatgacgggcacatcagagacggtgcccctcgaacgcctcgagtacatccacctccacaagaccgccgcattgctcgaggcctcggtggtgattggggcgatcatcggaggcggcacggacgagcagatcgagaggctgcggaagtacgcgaggtcgatcgggctgctgttccaggtggtcgacgacatactcgatgtcaccaagtcgtcagaggagctcggcaagacggcggggaaggacctggcaagcgacaaaacgacgtacccgaagctgctggggctagaaaagtcgcgggagttcgcggaggagttgctctctgatgccgtagagcagcttgcttgcttcgacaaggagaaggcagcgcctctgttgcatctggccaactatatcgcccataggcagaactgagaatttgaggtgattgcgtactctattgtcggacctgttgtaactttgtcaggccgtcgcccgtcgaactggggttcgaggaatatatccaaatcgtcatgtgatgtatactagctgtagctctgtaccttgatggaatggggctgtttagttcgaattccaaaagtatgaaataccgtatccaattatgaacctaattatta

SEQ ID NO: 6046 - protein, 363 aa, Zea mays
MAMAFHFHPLVASRVHLSPHPFAAATGAPSPSSSVAIAAHYHHHGRRRFSAIVATATTTEFNFKAYMEERAVAVNRALDAAIPAGGLPAALHDAMRYALLAGGKRVRPALCLAACAVVGGPESWAMPAAAAVEMVHTMSLVHDDLPCMDDDDLRRGKPTCHVVYGEPIAVLAGDALLSLSFHHMASVGSYPPDVDPEKHPARVVRAIGELARCIGSEGLVAGQVVDLEMTGTSETVPLERLEYIHLHKTAALLEASVVIGAIIGGGTDEQIERLRKYARSIGLLFQVVDDILDVTKSSEELGKTAGKDLASDKTTYPKLLGLEKSREFAEELLSDAVEQLACFDKEKAAPLLHLANYIAHRQN

SEQ ID NO: 6047 - DNA, 1032 bp, Arabidopsis thaliana
  CDS (1)..(1032)
atgctctgtaagattattatcatgcggccgtgttacagcctggttctgtctgcaatgcggctgatacgaccgtccaaccgccgtctaagttcgatcgcaagctccgactctgagttcatttcatacatgaacaataaggctaagtccatcaacaaagcactagacaattcaattccactttgcaacaattctgttcctctttgggagccagtactcgaggttcacaaagctatgaggtacacgcttctctcaggcggcaaacgagtaaggccaatgctctgtttggtcgcttgcgagctcgtaggtggccaagagtcaaccgcaatgcctgcagcctgtgcggttgagatgattcacgcagcgtcgctcatcctagacgaccttccttgtatggatgacgacagcctccgccgtggaatacccaccaaccataaagtttttggcgagaaaacatccatcttggcctctaatgcgctcatgtctttggccgtcaagcagacattggcatcgacctcattgggggtgacttcagagagggttcttcgggctgttcaggagatggcgagagctgttgggacagagggacttgtggcaggccaagcagcggatttggccggagaaaggatgagttttaagaacgaagacgacgaattgagatatcttgagttgatgcatgttcataaaaccgcggttttggttgaagctgcggctgttgtgggagctataatgggaggtgggtctgatgaagagattgagaggcttaagagctacgcgaggtgcgttggactgatgtttcaggtgatggatgatgtactcgatgagaccaagtcttccgaggagcttgggaaaactgccggtaaagatttgatcaccggaaagctgacgtatccgaaggtgatgggtgtggacaatgcgagagaatatgcaaagaggttgaacagagaagcgcaggaacatcttcaggggtttgattctgacaaggtggttcctttgttgtctctcgctgattatattgtcaagagacaaaactga

SEQ ID NO: 6048 - protein, 343 aa, Arabidopsis thaliana
MLCKIIIMRPCYSLVLSAMRLIRPSNRRLSSIASSDSEFISYMNNKAKSINKALDNSIPLCNNSVPLWEPVLEVHKAMRYTLLSGGKRVRPMLCLVACELVGGQESTAMPAACAVEMIHAASLILDDLPCMDDDSLRRGIPTNHKVFGEKTSILASNALMSLAVKQTLASTSLGVTSERVLRAVQEMARAVGTEGLVAGQAADLAGERMSFKNEDDELRYLELMHVHKTAVLVEAAAVVGAIMGGGSDEEIERLKSYARCVGLMFQVMDDVLDETKSSEELGKTAGKDLITGKLTYPKVMGVDNAREYAKRLNREAQEHLQGFDSDKVVPLLSLADYIVKRQN

SEQ ID NO: 6049 - DNA, 930 bp, Synechococcus sp
  CDS (1)..(930)
atgaccgtcgcggcgacttctcccgacaacacttctggcctggccgacatctttgatttcaaggcctatctcgccaaagccaaggcgacggtggagcaagccttggatcagtccttggtgccggagcggccggagtcgctgcgtgaagccatgcgctactcactgctggcaggaggaaagcgtctgcggccaatcctctgcctggccgcctgcgagctggcgggtggggatgctgcccaggccatgccaacggcagtggcgctggagatgattcacaccatgtcgttgatccatgacgaccttccggccatggatgacgacgacctgcggcgtggacgccccacaaaccacaaggtctatggcgaggctgttgcgatccttgccggtgacgcattgctgacccgtgcctttgagatggtggcgctgcgtagtcctggggttccgcccgaacggctgctcaaggtggtgggagagctgtcgttggtggcgggggcccctggcctggtgggcggtcaggtggttgatctggaaagcgagggcaaggaggttgatcttgaaaccctcgagtacatccacctccacaaaaccggcgcgttgttgagcgcctgtgtgatcaccggcgcgatgatcggtggcgctgatgatgagctgattgctgcgttacgggtctacgcccgggggatcggcctggcgttccagatcattgacgacatcctggacatcacggccagcagcgaggtgcttgggaaaacagccggtaaggacctgatcgctgacaaaacgacgtatcccaaacttctcgggctcgaggaatcccgcaaacgggccgctgatctggtgcaggaggccaaaggggtgctcaagccatgggcaagcaaagcccaaccgctgctggccctggcggattacatcaccagccgtgatcgatga

SEQ ID NO: 6050 - protein, 309 aa, Synechococcus sp
MTVAATSPDNTSGLADIFDFKAYLAKAKATVEQALDQSLVPERPESLREAMRYSLLAGGKRLRPILCLAACELAGGDAAQAMPTAVALEMIHTMSLIHDDLPAMDDDDLRRGRPTNHKVYGEAVAILAGDALLTRAFEMVALRSPGVPPERLLKVVGELSLVAGAPGLVGGQVVDLESEGKEVDLETLEYIHLHKTGALLSACVITGAMIGGADDELIAALRVYARGIGLAFQIIDDILDITASSEVLGKTAGKDLIADKTTYPKLLGLEESRKRAADLVQEAKGVLKPWASKAQPLLALADYITSRDR

SEQ ID NO: 6051 - DNA, 903 bp, Prochlorococcus marinus
  CDS (1)..(903): transl_table=11
atggcggaagcagtcatgtttccttttgactttaccgcttatctggctaaggctagaacaagaattgagtctgcattagatgcttccttaggtccagaacgacctaatcaacttagagaagcaatgcgatattcccttcttgctggtggcaaaagactaagaccaattctttgtttagcagcctgcgaattaacaggttctgattctgagaatgcaatctcaacagcagtagcaattgagatgattcatacaatgtcattaattcatgatgacttgccatctatggataatgatgatttgcgtagaggtcgtcctactaatcacaaagtatatggagaagctatagcaatccttgctggggacgcacttttaacaagagcttttgaaatggttgcgcttcgaagtccaaatgtgccgaaggatcgtttactaaaagtagtaggcgaactctctttggtagcaggtgctccaggtttagtcggaggacaagtcgaagatcttgaaagtgaagggaaggcagtcgatcttgatactctggaattcattcatattcataaaacaggagccctacttaaagcatccgttgtatgtggagctctaattggaggagcagatgaagacttgcttatagctcttagtacttatgccaaaggaataggcttagcctttcagatagtagatgatatccttgatgttacagcgagtagtgaagtcttagggaaaacagctggtaaggatctattggctgataaatctacttatccaaagctgcttggcttggatgaatcacgcaaaaaagctaaggaactaattagaaaatccaaagacgttatacatccttggagtgataaggctgccccgcttttatctttagcggattacattattaatagagatagatga

SEQ ID NO: 6052 - protein, 300 aa, Prochlorococcus marinus
MAEAVMFPFDFTAYLAKARTRIESALDASLGPERPNQLREAMRYSLLAGGKRLRPILCLAACELTGSDSENAISTAVAIEMIHTMSLIHDDLPSMDNDDLRRGRPTNHKVYGEAIAILAGDALLTRAFEMVALRSPNVPKDRLLKVVGELSLVAGAPGLVGGQVEDLESEGKAVDLDTLEFIHIHKTGALLKASVVCGALIGGADEDLLIALSTYAKGIGLAFQIVDDILDVTASSEVLGKTAGKDLLADKSTYPKLLGLDESRKKAKELIRKSKDVIHPWSDKAAPLLSLADYIINRDR

SEQ ID NO: 6053 - DNA, 1524 bp, Abies grandis
  CDS (122)..(1267)
gattttccctgctacaaaaatctatgtattgtttcttcagttgcattcaaagatctatagaatttcgagctttgaatttgttttaagagtttatagcaggagctaatcatataaagaggacatggcttacagtgctatggcaaccatgggttacaatggtatggcagctagctgccataccctgcatcctaccagcccattaaaaccttttcatggagcttcaacctcactggaagcttttaatggcgagcatatgggcctcctccgagggtattcgaagaggaagctatcttcatataaaaatccggcatctagatcctcaaacgctacagttgcccagttgcttaatcctccacaaaaagggaagaaggccgttgaatttgatttcaacaagtacatggattccaaggcaatgacagtgaatgaggcgttgaataaggctatcccacttcgttatccccagaaaatatatgaatccatgaggtattctcttctggcaggagggaaacgagttcgtcctgttctgtgcattgcagcatgtgagcttgttggaggaaccgaggagcttgcgattccaactgcctgtgcaatcgaaatgatccacacaatgtctttgatgcatgatgacttgccttgcatagacaatgatgatttacggcgagggaaacctacaaaccataagatcttcggggaagatactgctgttactgcagggaatgcgcttcattcttacgcctttgagcatattgcagtttccacaagcaaaactgtgggggctgataggattttgaggatggtatctgaactgggtagagcaacaggctctgaaggggttatgggtggccagatggtcgatattgccagcgaaggggatccttctattgaccttcagactctggaatggattcatattcacaagactgcaatgctcttggagtgctcggttgtgtgtggggcgatcatcggtggtgcttcggagattgtgatcgagagagctcgaaggtatgcccgttgcgtggggcttctttttcaggttgtggatgacatactcgatgtcacgaaatcatcagacgaactgggcaagactgcaggaaaggatttgattagtgataaggcaacttatccaaagctcatgggtttggagaaagcaaaggagttttctgatgaattgttgaacagagctaagggagagttatcttgcttcgatccagtgaaggcagcacctctgttgggtcttgcagattacgtggcattcagacaaaattgaagagcctcctcaaagcgttcttgtttgttagagtggataatcttggtttaatagttttttaaagtaacagagttagacctgcgttccctgccctccgtatactatctatgatgtagcactgcaacttcttgtattgtgaaaacttgagcacagcattttaattgtgaaatctagtccaactgcaaactcaaaccggatattcagtcgatggcccgtctacaggccgactggccgtgattcaaggcgagcaatactca

SEQ ID NO: 6054 - protein, 381 aa, Abies grandis
MAYSAMATMGYNGMAASCHTLHPTSPLKPFHGASTSLEAFNGEHMGLLRGYSKRKLSSYKNPASRSSNATVAQLLNPPQKGKKAVEFDFNKYMDSKAMTVNEALNKAIPLRYPQKIYESMRYSLLAGGKRVRPVLCIAACELVGGTEELAIPTACAIEMIHTMSLMHDDLPCIDNDDLRRGKPTNHKIFGEDTAVTAGNALHSYAFEHIAVSTSKTVGADRILRMVSELGRATGSEGVMGGQMVDIASEGDPSIDLQTLEWIHIHKTAMLLECSVVCGAIIGGASEIVIERARRYARCVGLLFQVVDDILDVTKSSDELGKTAGKDLISDKATYPKLMGLEKAKEFSDELLNRAKGELSCFDPVKAAPLLGLADYVAFRQN

SEQ ID NO: 6055 - DNA, 1278 bp, Brassica napus
  CDS (11)..(1096)
agaaaccacaatggcttcaatgactctaggttcattggttcaccaccatcatccttctatctttacccgatcttcttccctcacgactcttaaacccatcgtcatcaactcaaaacgcaccgtttcatcatcatcatcttcctacatcgtctcctcttccatcgtcactaaaaaagacaaccacaattacaaatcatcatccttcgacttcatgtcttacatggtcagtaaagccgagtccgtcaacagagccttggacttggccgttcctctccaagaaccactcaagatccacgaagccatgcgctactctctcctcgccggaggcaaacggatcaggccccttctctgcatcgccgcttgcgagctcgtcggaggcgaagcatccgtcgctatgccggcagcttgcgccgtcgaaatgctccacaccatgtccttaatccacgacgatctcccgtgcatcgataacgacgatctccgccgcgggaaacccacgaaccacaaagtcttcggcgaaaacgtcgcccttttggccggagacgcgcttcttccctttgccttcgagcatttagtgtcggcgacgagtcccgtggtttctccggtgagactggttcgaggcgtgggagaattggctaaagccgttggcgtcgaaggcgtcgcggctggacaagtggcggatataagcagcgaagggttggacccaaacgacctcggtttggagcatttggagtttatccatttgcataaaacggcggcgttgcttgaagcctctgcggtgttgggtgggatcgttggaggagggagtgacgatgagatcgagaggctgaggcaattcgcgaggtgtgttggtttgttgtttcaggtggttgacgacatcttggacgtcacgaaatcgtctcaagaattaggtaaaactgctgggaaagatttggttgctgataagctgacgtatccgaagattatggggttggagaaatcgagagagttcgctgagaagttgagtagagatgctcgtgaacagcttttagggtttggttccgaccaggtggctcctttgttggctttggctaattacattgccaatagacagaactgatgtgtgttttctttcttacttgttagaatcattcgagattttattctctggtcttgtttcagattgaattgtataaaatattggagaagctgaaacagattcttgtgcttgtttgttggtgtaacctctatgtttccgtgtactacaagatagttatgtgtttaaaagaaaaaaaaaaaaaa

SEQ ID NO: 6056 - protein, 361 aa, Brassica napus
MASMTLGSLVHHHHPSIFTRSSSLTTLKPIVINSKRTVSSSSSSYIVSSSIVTKKDNHNYKSSSFDFMSYMVSKAESVNRALDLAVPLQEPLKIHEAMRYSLLAGGKRIRPLLCIAACELVGGEASVAMPAACAVEMLHTMSLIHDDLPCIDNDDLRRGKPTNHKVFGENVALLAGDALLPFAFEHLVSATSPVVSPVRLVRGVGELAKAVGVEGVAAGQVADISSEGLDPNDLGLEHLEFIHLHKTAALLEASAVLGGIVGGGSDDEIERLRQFARCVGLLFQVVDDILDVTKSSQELGKTAGKDLVADKLTYPKIMGLEKSREFAEKLSRDAREQLLGFGSDQVAPLLALANYIANRQN
